United States Patent Application Publication US 2011/0183924 A1 - sequence listing, part 49

SEQ ID NO: 133974 - DNA, 815 bp, Homo sapiens
cccaaagccactttatataacaagtattttgaaatctccttttgccaacatgaaatgaaatgactgaatattacaacctaccttcatccaattaggaaaaaaaatgctctaactataatttaaaggggaaataaaaggaaaacaatttatgataaaataatacatattcctttatgtaaaagtatggctaataccagaagatatgatgaaggagtcagagccttgtactactatgttgaatcactttgaatgatgtgacagctacaaatgcagagtgatgcaggtaggttactttggtgcctcatatgccacgagaagtactgatgtcattaaagttctaaactagcagcacacaacatttccagaattgacatggtagtcacattcctggaaaattcaagatatgtaaagcaaaggtagattttaagctcagataattaaaaacaggcttttcagccatgtgaatatctgtggaacattcaaaagctctctgggaagcaggaagattcttcatagttcagaactgtccctgccattgaagatctctagaatccttggctcctgcctactatgaatcagcagggcctccttgtaccaaccaagaacctgcccacctaccaaatattaaaaatgctatccacaaggtggtatcatttcttccaggagctagtgctctaagctttaaaatgtgctgtgcagagcaggcttcaaggatgaacaatctgtgtagtcatcagggttccctgctctttgaaggaccctgtgcctgaatactctgttgttactctcctgaatttcttaatgatttttgaata

SEQ ID NO: 133975 - DNA, 595 bp, Homo sapiens
aacatctccacagtgaactccctaacagatagctcagggatctctcagctagtgtggacaggaaacatcaaggacattacataagctccccctcattccgccccagaatctagatgtaatcaagaggacagagagatgctccaaatttgcttcccacctaccagaatagggactctgctctgtattaacctataaataaagtatgttgcttgtgctcttgagctatcatctgggattcatacctcctaataaatgccactgaatattatgaataaaggtatatgtgcacaggagtgtgtgcatgagtatgagtgtgtatgtttgttccaagcagagatagcagcattttccaaggtctggagataaaatgagaatgtgcatgtggagaactacaaaccattcatgggaaagtacacaaatgggctgtttttttcaggtcgggttcccaatgataccgtcttttttctattacacagtgacgtgtgtaaggcaccaaatcatgatgctaggaaaaacatcttgatatgtaatgccatacccaccatctaggtaatggtactgcatatctttggtccttccgcatgtgccagagggt

SEQ ID NO: 133976 - DNA, 339 bp, Homo sapiens
acaaagtcttagtaatattatgaaaatagtttttaccttgcaaacttcttaaaataatcttggagctccttcaagaccagactgagatttctgcattaagttataaaagttttcgggcgggcgcagtggctcacgcctgtaatcccagcactgtgggaggccgaggcaagtgaatcatgaggccgggagttcaagaccagcctggccaagatggtgaaaccccatctctactaaaaatacaaaaaaattagccgggtatggtggtgggtgcctgtaatcccagctacttgggaggctgaggcagagaattacttgaacccgggaggcagaggttgcagt

SEQ ID NO: 133977 - DNA, 684 bp, Homo sapiens
ctgctagtgtcaattttttttgcattttctgtagtataatgatagctgaaatctgactttattattgttgtaatgcccaattctaggtaaataaattatgcccacagccgaatcaatcacaacccattattaaatttgagttttctattaataagattacaaatgttttagtctcaaaattgtgtaaaacaagatcaatttttaagttcctatccatttaatagtgaatgtgttcaaaaaaatatgtatttttaataaggcaaaatgcatgataccaaacacagcattgttaggttggtagtattttggaattcacgatttggctttgataaaagtgacttatggactcttcaatatagctttccagtgaatatatattgaatgttgaaagaccactcattaaaattaaatttaaaaataaagtaaatgctctatgctgtgagccatacaaggcataatatcaacttcaacaagaaatggtctgcaaacacaccatatttgccaagtatcataacagtctagaaacttctgcttctgtgtcacagatcatgaaattaggttattaggctttttttgatatctgtaaaagccctaattaagccctttaatactctaattgaaatagatataagtgcttctggatgataccctgtagctggtccagcttctttagttgcagactga

SEQ ID NO: 133978 - DNA, 787 bp, Homo sapiens
gtgcggactgaagggaaggctgcgggagtgtgcttcgcgtcctctgtagtcgactaccgcagctcttctttgcattctggctctttaataatctcccttcgccctttctttaaatcagttcccaccctcccaacacctgtaatctttctcccctctggactccctcctccccgaatcccccgcatcagaatcttcctttggaatctactgcaagaaatctggctggattctcagattaaggacttccagaatcctatcctccctagaatccccctccttggggatcctctcccagaatccttttcccctcagagccccttcccctcagaatctccctttcaccagaatgtccttcctttcagtttcctcttcccagaatgtttcccatccttctctcagatggccaaccccaaatgtccctcttaagagtgctcaacttagaccccccttttccctgaatctccctccattcggtcctcgtcccctcagtcacccttcccagaatctttctcttgtcaggacccagtacccctggaatctccctcctccagaatctccctttcccggcaaatccccctttcccggcaaatccccctttcccagaacaccccgccccgcaaatccacaaaaacttttctctcagagacccgtccctcaaaatctacctttctcctgagtttatttcccttccgagactcctcttcccagcaactgccttccctggagttttccctccgttagaatccccctctcctaagagaccctcccccaagaattaacctcttcc

SEQ ID NO: 133979 - DNA, 317 bp, Homo sapiens
cttaccctgtgcagacattgtggctcataggaggagggtgttttggacatgagggttaagggctcttggggggcgggtggagaagccggggtgcagctaagatgaagctgctgagatgggtgtgaattggggcatttgcagccctggcatgagttcccgaggcatagtggaaggaagggttagaagaggagagggcagaggaaggacggagtcagatccaggtagagatgagagaaccccagaggatggatgttgcttggaggcccttcagcctgggcagacattgtggctcataggaggagggtgttttggacatg

SEQ ID NO: 133980 - DNA, 670 bp, Homo sapiens
gactttgtaaaatacaaggatgtaatttaggaggagtagcttaataggacgttgacacattagcgttaattggtttatcagaatagccaatcattaccaagtttctggagtgactagaacgggaaataggcaagtttgggagaactgaaacctgacttaggctgggtgcgggaagccttagacacacacacatacaagttgggcggaaagtggtagtataagagaaaagatagtgcaagtactttagcttgaatctagaatttaagttgggactaaccttgcttcattctgaaatttagatcgtttgaattacattattttaatatttattaggttcactttatgatttaagcatattaaatttagtcgaaaaatttaaaagagccatagatgggatattcagcttattcccataaagcatgcatgctgttcacttgtaggaaagatgatgactgtttctaacttcaggtgagtcatgcgtgattgaaaatgggagtacctcctcttacctctgacaatcctggttttttgttttgtgtatttcatgattgtttaaaacaattttttgaaaaatcggggaataccttttaaagtactcctgttcttttggggctagattgatgaagagaaaaggagcagtgagaaatatttcctctttcacagatattac

SEQ ID NO: 133981 - DNA, 204 bp, Homo sapiens
taattgtttcttttcttttctgctccccatatattgctaacagtttccttttgaaatacatggtcaggtggactctgcttattattgtcgaggctacctgtctataaacaaatctgtatatagtccttaatatgttaaataagtaacacatctttttactaccatgatattacagtgttaactcttgcaatttgcttgcccacc

SEQ ID NO: 133982 - DNA, 656 bp, Homo sapiens
cagcctgccaagtagctgggattacagacaggcatgtgctattacacctggctaatttttaaagttttttttgtaaagatagggtctttctatgttgcccaggctcgtcttgagctcctggcctcaatcgatcttcctgccaaggttttggaattacaggtgtgagccaccatgcctggcctgctttgacatattttatagtgtgttaattacaaatagtcttcatatgccagaatataagagcaagtgttatctactttttagatgggaattgcagaagctgcatcaaaagtatgctttgaggtatatatagtgaaacagagcctttctgaagagaattatatcaaactaattacaaccaagaaataatagtatgaagcggatgctgtttggaggacaggaaaatttatcgggaaaattacataatccctctgattccactatccagagatagccattattattaatatttggtatgtacatccttatattatttttttcttatgcatgattttgtatatatggttatttttctttccataaaaatggtattaaactgtatatactgttttgtagcctacatatttcatatagaagtatattgttaacattttccatgtcaataaatattctatggcttaaatgtcttatgactg

SEQ ID NO: 133983 - DNA, 415 bp, Homo sapiens
ctgggggcagagagtgaagtggggtccctcccagcctccccaacaaatcagagcttgtttgctgcaaagctggaatgaggcccaccctgatggggcctatcttcttgccaccacaatcaagtcttccagaaggcaaacaggtaaggggaggaatgcaatctgccagacaggaagatgcaatggctgatcttggacaaacagctccaggggtggcaggaagttgttttgacatctgtcttctcacgtcaaagagatcctcattccaagaccacaggtgcctctggcctccagtaacccacatgcaggttatataaaagacatgccgcaccgaccatgctacaacacagctggccttgggacccccaaacctaccacctgcctctccctgtaaattcaaaggaaagcatggacactc

SEQ ID NO: 133984 - DNA, 272 bp, Homo sapiens
agaagctatgaaggtttgccttgttggagaacacagcctgggaaaattcagggggaattccacgtgagctgaagtcaatctgcacaatgatggagttctccactcacattctccagtcacattcagggactagggcacagcctagcggacgcagaaaatagagtccaagtggagaggagtttggccaggtattaggactgaggggcagaggaacaggagttgggggaatggggttcagtgcactagtggaggtgacagcccaatcacagtag

SEQ ID NO: 133985 - DNA, 871 bp, Homo sapiens
cagaagcagaaaatgtggggtgggtgctgaaggaggaatgtgaagaatattcctgagaccgtgtacatgattccaaccaatcaaagtacaaaagtacataaaggctttcagaagcagaaaatgttggggtgggtgctgaaggaggaatgtgaagaatattcctgagaccgtgtgcatgattcctataggggaaggcagggtttggaaaagagtttgaggccaatacattggaacagtactgaagagttagggctggtaaagaggagaggattgagatataatgcaggaagagagagggagagatgtggaattggaaaagcagagaatgaagagaaacttaagtactggcagtgtttccatgtgtgatcctatgattcaaattctgtatttttgtcataggaacctggttgagtttgtcagtctagctgttttaataacactaacaaatagtttacatgcttattagctgtttgtaatcatgtcactaaaaaaaaaaaaagaaaacaaaagaaaagagaaagaaaaagaaaaaagcgaagaagaaacacaaaggccagcaaggacgacataggaccaaaagacaagacagaggcaacgcatagacaacataaggactgaccacccaaagacgaaacaagcgacgggggcggcgaacagaaataaacgtacgggagggggcaacacaagggacgtaccccacatagtaaggtaagagggggccgccagtaaggtgcaagaatgcgttaaacaagacgcgcggggcggggtaacataccagccaggtggggaggatacagcggtgacgcgtgcgggaccccactgagggggggagagaggacacaccccacagcaagaccggcgacgaaacctg

SEQ ID NO: 133986 - DNA, 748 bp, Homo sapiens
ctgctatgctccatcaaaaccaactagatgggagcttgttcctctgctgcattgtacagtgactggtctcacccagcacttccatgtgagaatgaacaccctcttaacaagaaattttgagtgttttccttttattcacagctgaatgcaatagctcactggttttcaattatgtttgattatttgtgattaaaaactgtatgtatttttttggcagtcaagatttctgtacatatatttaagaaatagttcattaactgcttttcacaactgtgtactaacatattttatacttttttaattagctgagaagctatattaaaatatctcattgcaaaaaaatgaactttgttatctgataaaatgaattttgcacttcagaattgtcttgaatattgttgtcattgcaaatgatttttatcttcatttgtagagtttcaccaaaataatccttttggaattttattaggatcaaattgaatttattggttaatttgggcctaattgtcatttttaccttactgaaacttcatcagcaatatttcagtaatgtcaatattttcttctacaaagtcttatgcatattttggtatatttatttctagacattttatagttggattaggaatcaaaagtagtacatttttaaaagtacatttcaaatgatttgcaatggcatataaagatgatagtacacatttatcttatatccaatcaggaaatttgttgcagttcttacaagttctaa

SEQ ID NO: 133987 - DNA, 135 bp, Homo sapiens
tttttcacagtgactgtggcattttgtgttccaatcagtgatgtatggggggtccagttcctctacctctttgtgactctagccatcccaccaggtgtgaagtggtatctgattttttttttttttttttttttg

SEQ ID NO: 133988 - DNA, 283 bp, Homo sapiens
ggtgaggacactgaggcctggaggggactgtgacatcggagccactctcctggggtctgccactcctgtcgcctcccatacaaacctgagtggccacgtgaccctgggggagcgctacctaactgtcccaaggagaggatgatcactgctggcctcccaccagccatcagtcccccactgactgacacccctgagtcagtctccaccccaggactgtttctttcactctttgccatggccttgggccacttccgggggcttggcaaggcaggaggcgtggaac

SEQ ID NO: 133989 - DNA, 672 bp, Homo sapiens
gaaatactatttttttcaatatcagattaataaaactgcattgaaagcatacaaaaagagatactatgcactaatttaaaagagcatgagtttgtacaaactctggtaggcaatttgtcaacttcagaattttaattgggaaaagtagaattttattttgaagttcaaaaactcggcacacaatgtctttccctccagattctattatacacatagaacaatgtaaatgattcttaaaaaaaaaaaaaaggtgaggcttttgagtggatgaaataattttgtaaaaggcaaaacagggaagagtgttcatgaattgtagcagaagatgctgcatgttatatgcgaatgaccgaagggttttaaaaatggaatctagtctgcccaaaggatccctagagaagttcaggcttggagttggcttatgtacaggctgtggcttctaagaagacatgatgaaaagcctcttgaagcctttgtatgtgaaagttatgtcagtagcccttgccaaaagcctcctcactctcccctctcttgtataagtaaattgaatgggatccttatttcacaccattaacaagtataagttctaactgaataaaaatctaaatgtaaattactaaagcaaaagtattagaaaaaatatagtgggatatgttaacgactttggtgtca

SEQ ID NO: 133990 - DNA, 257 bp, Homo sapiens
gtaaccaacactcagctcaagatacaggatgttcccatcagcacagagggctccctcttgccccttctcagttgctgtcccctcacagttaaccaggatcctgacctctgtcaccatggattagttttgcctgttcttgaacttcatataaatgggatcattcagtatgtgcgcgtttgtggctggcttctttcattcaacagaatcctgtgagatttagccacgttttgggtactggtagctgtttatttttctgg

SEQ ID NO: 133991 - DNA, 146 bp, Homo sapiens
gattgctggcgacaggaagggacaaagaggaaggggtggaaaagaggcttctgctttcttttaacaacttcccaagggttctagaccaccgttatgcttgtatctccttggccaaatgcagtttcacatctagcagcatatggccg

SEQ ID NO: 133992 - DNA, 204 bp, Homo sapiens
ctttggggtaggttttgagcaattctctggtgtcactttaattgactccatgacatcctcctccttcttccaggtttgcagttttgctttctggtttttggcactgtatatttgctccttcaatcagcaagagactgccaaagactagacttgtgaggacatgactgggcacagtgtctcacgtctgtagtcccagcactttgg

SEQ ID NO: 133993 - DNA, 527 bp, Homo sapiens
aaaaattctcacctattatgtcttcaaatattgcttctcccccattctctcttttcacttttctcagactccaactggatatgggttggaccttcccatgctatctactctcttactctcccttctatgttgtcatgttatcattcattcctttgtttctctgaacttcattctggatggtttcttctgtactttagctgtgtttggcactaaagattaaggtgatgtaacttaagattaaggtgatgtaacttacaggaaatagctggccagtcctcattttcaaaccaatcaagtaaaagagatttctgttaaacaaaagcacacttcattttaattcaaataaatgtgttgatacacatctctgtgataactatctcatttttataataataattctaacttagagaaggcagccgggggcagtggctcatgcctgtaatccaaacactttgggaggccgaggcgggtggatcacttgaggtcaggagttcgagacctgcctggtcaaaatggtgaaaccccaa

SEQ ID NO: 133994 - DNA, 413 bp, Homo sapiens
ttttagtagagacggggtttcatcatattggccaggctggtctcaaactcctgacctcgtgatccgcccacctcggcctcccaaagtgctgggattacaggcgtgagccaccgtgcgcgacctgaatacttttcatgatggcaaaatctcaccggcaacagaagaaaaaccaatgtttttaaatttactgaccagaaaacttgactgagagttgaattaagtgcctgttgttgtgtttttcagtgaaatgcaaatcttacagatcacttcttacagttaggaatactgcacttgtttgtgtaatattagaacaactgtagttttcctatcttagggcagaggttcagtattccatggggagaaaaaaacagtaattatctttgttactcttcttctttagaggaatattctag

SEQ ID NO: 133995 - DNA, 499 bp, Homo sapiens
ggcatgtagaagtcatctatgtggattatttctgtgctgtttggaatttggaagctgaggcacagaaagcaaaaataatttactcaggaccacaatgctgcttaacagcagaagctagatgcctatccatcataccaaagtgctttgaacataagtgttgtcaaaatccatctctcccaatggatcctaaaagatacgttttcatttgtttagatgatgaagaggaaattcattcttttaaaaactctttgtcatttctatttcccccttttatcttaagatgctccagctgcttcccatattatgttccaccactatgttttccttttattttaacatgcaccacttcaatttccgaaaacacagtgtaatttatcaatcaataaataaatctggacagaaacacaaagcacatttttctccaggagcattccctattcacaagcacagggagaggaaactcagtggcatcttgagcaaacatatgcatcaatacaca

SEQ ID NO: 133996 - DNA, 457 bp, Homo sapiens
accaaagtcccacccaggaatttttctgagaagctaccactaagtcaagctctgtcccctgctattctcactggctgctgaagggctggacgtcaatgaccctttctatcacccggcagcctgtgagggaaggttgttagatactgagagttaagggcttggaagaattaaaagcttggaaacaaagcctatgaattcctcagagcaatctttagaaagtgactctcacaggcatgtggaattgtcattccataatatcttgctaggaattcatcctaatagcaaattaggaagaccctcccgccacgctgaccactgctgcctgagtcagagataagcatccaattcaatagagaaggactgtcttccccagacttgggatgagacagagagtgtttagtccatctctcttcaagggctaaagctgtgagacgtaaaacatgggctatatcctggc

SEQ ID NO: 133997 - DNA, 306 bp, Homo sapiens
ctccatgaggatgtctgttgggcatgtaaaccttcacactccacaaatgatctaatcttacctccaaaacctgctcatcctgtttgtcttctccatcctttaagttgctcaggccgaaaactttgactcacctttgccacctctttttctttcctgcccctcactcaacttttcagtcaattctggtaggattttctgtcttctttgttcatagatgtatctccatggcctaaaaccataattagcacaagcctattagcaaagtccttcaaaatatatccagaattttattaagtctcaccactt

SEQ ID NO: 133998 - DNA, 584 bp, Homo sapiens
tacagctgcagcagtaagccacatatattttatttggccttgcaaattttctgttgagttctaggagctgtggatttttgagatatttggctcaaactcaaaatgaaaaaatcattttaaaaaatagaaatgcatttcattctttaaaaatgctaaaaatatatgatgcaaaatgtcatagtttggctgtaatagcaaaattcttagaatcaatcagtcaaaaataactgtgttatttaggcgcaatttgaaggcatacaaactaaaaacagtattttaaaaccagctataagagcttgatggcttctctacacactgatagctatttgccttataaaaataacaattgaacgagcacagggaacaggccgccacagaaaaggttgccttttatgtagcactaacatgcactcagtagcatttaccgacttagtctggggcaggggcaagaggatgcttcaaaaacaaaataggctaccctctttcgccactgttcttactatataacccccttgcagtaaagataagaaacaaactaaaattcacataaacaccccaatttggaaattgttttatatatgttt

SEQ ID NO: 133999 - DNA, 234 bp, Homo sapiens
tgcacttcaggctaagtaaaagagtaagattctgcctcaaaaaattactaattaaagttttccagattacattgtttaagaaaaaggaaaagaaaaaaatcttttttttattttcaaatgggagaatagagcctctcatttctaatttgtattgccttctgcaaaaacttagtctaggcccatggtcttgaactactggacatctgaattttggtaggtgctggattcaggcaa

SEQ ID NO: 134000 - DNA, 427 bp, Homo sapiens
tacatttccagcaggagatttaggaagggtctgtggacagagaagtagatttcccaggatctaagaaaagaaggttggtttactgtgggtattctagctgtcattataactgtgttattttatttatttacaaagggatcatgagccagaaccaatcataacaatcaaatgaacccactcactgtttcagcctctgatggtggctaagagaaaacagcaagtggggagcaccccccctcacagtcgcctctattatgttgtaccagaagctgggatccagcaccctcaaacgtagaggcttgtactagcaagagtcacatggacagtgggaaggtccattctaattattttgttagtaattcagtctgttctatttattcttataatctagcacattccaaaacatatttgttttgagaatgataaa

SEQ ID NO: 134001 - DNA, 294 bp, Homo sapiens
catgaaagcaactctatcagtaagaagctggtttcacagaaaaatggggaaactacctcaattcagcttgctgattttctgacattgctacctccctgcccattatttttgtgtttctatatggaaatttgaagcaggtagcttctcaagctctacatagaccaaactgaagaaagatcacttgaatacacaaactggtgcagaagaacattcagcatataaagttactaccaagctcttgcatcaagaaaaaagagtgagatttttgaactctatacatcataaatggcatgc

SEQ ID NO: 134002 - DNA, 346 bp, Homo sapiens
ccgttttggggactatggaagggggaacatgaaggcctcacaactggggtgcagggaagagttgagggaactgaaatggaatagtgtggactgagttagagagaggactctgaattttacaggaaaattttgcccctaggttttgcatttgacttttatgcaaagaagagaaactagataaaccaacaacaaagtaacaatagatctgattgatcagaacagtgaattccagccccgtatcaaccatgtttgagaaggaggcttagtggccatatcaggacagggaagtaggaggaaaaaagatacaaaatgcccacttggcaacagcctcaagggtaaagtaaga

SEQ ID NO: 134003 - DNA, 1438 bp, Homo sapiens
  misc_feature (1)..(2): n is a, c, g, or t
nngattatgggcaattctgagcttgaactgggacataagcttgtctctcccaaatataatagctgaaataagtgtatgtgctggcatatcacacacagccatctccttacagaataagaaatttagtagcatattcttcaaaacacagttgtgttgttgtagtatgtattttttgtgcgtacatactacttcttcaaaatccactctgtagtttacactaaagcacatctgaattcagaatagccacatttcaattccttagtagccaaacgtgaatagttcctactatattgcatgttgaaatggtcatatctaattttcttttgaagtttcaaggtactgtgttcactgccatattgtaaatatattcttatacagttgaccactgaaaagtaccagtttgaactctgctgatgcacttatgtggaattttttcaataaatacagtcagctctccttacctgtggattctgcatccactaccaaacacagatggaaaatatagtattcgtgggatgcaaacccttgtacatatttcctatggcatcggaccccaaagggctgactatggacttcagtatgtgtggatttgggtatgggtactgggggctggtcctggaaccaatctcatgtgtatacctagggacaattgtatttaatttttacaatttgggaaattaaaatgcatggattatatttccaataaaacaagcaaactgattttaagataatataatgtttttgatgagctatatagctcagttaaaattataatctagtacatttttacatgtaattgtgtataagctgccacaatagtaatgataactcagtggtattcagtaggctcttctcatgtgacaaaacaaaatgggagagaatagggataattatagctagcttaatgttacagatgtgcacagaatgaatacaggttattttgtttgcaatctcagcttttctcgatcttatttaggtaataatgatctatcttgtggtcataaagatattttcctgtattttatcataaaagttttagaattttacttttcatatgtaggcttttaatgtacctaaactttatttttgtgtattgcatcaaaagaacctagtttaattcatttctcttggataaccagttgtccccatgcttaatgagtagtgtatttttccccactgacttgtaatgccacgtttgtgtgtatccagtttctctgtgtgtgtggtcctatttctgtgccttctattttggtgccttaccttaattatcagtctgtgcactgattccacatagtattaatcattctagctctaaaataatgtttgatatctgatagggaaataccttcccatgtaattttgtcttcagaattgtcttgactattcttgtccctttgtcccttcacatgaatttagaattaatttttcttatttgacc

SEQ ID NO: 134004 - DNA, 280 bp, Homo sapiens
ctaatgtctatagcagtttttgcactacactggcagaatttgatttgagtcatggtgaaagagaccatagtccaagaaagcctgaaatatctactatctgatcctcatcagaaaatgtttgccaactgtagtctatacctttgcacgtcagagaattgcatcagggaagaactagaagccctccttttgcacccccacaaccctgccacaattcagtgaacaaacagaagatcagagagggaatgtgacttgaccaaagtcacacagctggttcatagga

SEQ ID NO: 134005 - DNA, 404 bp, Homo sapiens
tctttataataacaccatccattgttaagcatgttaatactatgctctcttcacaatgactttgctagactctgagctccaaggtggtctggcccattttgttttgttcaccactgaacaaccaatgccagcctgatgatgtccagactatgttccataaatgtctgtgcatgaattgctactctgatccatcacattttgttgtaatttaaccctcagagagaaatcgtcttctaagttttgtaggaaagatggtttttttttttttaagatggagtctcactctgtcacccaggctggagtgcaatggtgcaatctcaactcactgcaacctccacctcctgtattcaagcaattctcctgcctcagcctcctgagtagctgggattacaggcatgcaccac

SEQ ID NO: 134006 - DNA, 770 bp, Homo sapiens
cagaagaaaaatgactatatctggaagttcagaggtgcttccaagagcaacaaaaatggcaaatatatcattcaataaattaatactctctacacaaaataaagtctgtcatttaatatttatacatgacagatttaaaaataaatgaaaccatgtcatatgatatggttaggttttgtgttcccacccaaagctttttttgaattgtaatccccagttgttgagggagagacctggtgggaggcgactggatcatgagggcagtttcccccatgctgttattgtgatagtgagggagttttcatgagatctgatggttttataaatggcagttcccctgggtttttctctttgtttctccggctgccttgtgaagaggtgcctgcttccccttttgcctttcatcatgattgtaagtttcctgaggtctccccagcctgcagaactgtgagtcaattaaacctcttttgtttataaattacccagactcgggtagtgtctttataccagtgtaagaatggaataatacaacatctaagttgggagaatcaaatagaaataatatacattaagatttttacagatgcagaaaaggcctttgacaaagtttaacagccctgcatgctaaaaactctcaataaacaagatattgctggaacacatctcaaaataataagagctatttatgacaaacccacagccaatatcatactgaatgggcaaaaactggaagcattccctttgaaaacgagcacaagacaaggataccc

SEQ ID NO: 134007 - DNA, 244 bp, Homo sapiens
catccaactggtagccactagcaccaatctaggagccaagcagggaactgctgggcttaaaccaagagactcggaagcaagaaaaatgtctaccttctccagctagagcacagattaggacaaattccactcaaaaaaaaaatggaaaagatctcattcctcctgttctgaacccataaatcattatttcttggcccatattcacgcttccaccatccacagcccccttcatgccacctgaggc

SEQ ID NO: 134008 - DNA, 171 bp, Homo sapiens
attttaatatgtatattacagctgaaaagaatcatctagtaagggttatatctgatttcctgaggcctcattagcaaccaaaagttgcatttaaaaattacaaaagcatatctccatcgagaaatggcctttttatgttgtctacttttcccccagaggttccaataagta

SEQ ID NO: 134009 - DNA, 346 bp, Homo sapiens
tctgtttggctatttcagtgcctccagaaagggttgagaagataatggatcagattgaaaagtacatcatgactcatctctgtaaatatgcgttctgtccagaaccccagtgagcctggaagactgggtgctatgggaaatgtcatcaatccaatgctagtgaaagatgtgactggggaatgctgaaaaatgcgcacccctgggaggaatgaggaaagatgacatccactgacttgttatttttttgagaaggagtcttgctctgttgcccaggctggagtgtggtggcacgatctcggctcactgatgatgagaagaaagatcttgccattcaaaagaggatcag

SEQ ID NO: 134010 - DNA, 436 bp, Homo sapiens
gatcgagctcgcacctctgaatgaaagtgacactagttctctttcagtaaacttgggatagtcttgttccttggagccctagctgcaaagcctctgggaaaagtctttggtgaataaggcagaggaggaatgattgtacctgttagccatttgactgggggcaacagggtgctatgaaccagtggtagctgaataactcttctctgtccagtcatgattatcatgatcatagtgatttgctgccaccaattcctgaaaaatctgccaagggcagcataaaaatgtacctgggtaagagcttcccagctctggcaaaataagagagtggggcaaagaagaggaagagtgaagggagggacaaacagcaggatttggtgacactctcaggagaaatattgagaacacctacaagacagagacactattgtcagaagag

SEQ ID NO: 134011 - DNA, 315 bp, Homo sapiens
cacgtcctgatttgggcaggtcggtgcaggctatccgggacagcgtccttgtttttaggaaacccacacaggagaatctagaggcactctctgcagtctattctcaaattattccggaaaaaagggatgtgtgtatgtggagagacagacagacaaacatgtcggaatgttaattcagggaatctgggtgaagagtatttgggaattctttatactgtttgggagcatctctgtaaatttaaacttacttcaaaattagaatataacgccaccaaaaccccctctatcactcactccgcattcctagataacaac

SEQ ID NO: 134012 - DNA, 437 bp, Homo sapiens
tatgagaggctgcttggatttttattggaaatagaatacaaataagaggtgttgcggagtttaagaagtatttatatatttgcaaataggttagcacagataggaaagaaagctacctcatgtagtcattgaaaaaattaacataaataatcaaatcttttagtaaacatagaactgcagtgtagtaagatgctttctctttcatggtagtgacacctgtagtcacttctggttttattgacccaaatttaaaaactcctatcagtgtgcagtgtagtgtcagttaaacctagcacagcctctttgttatgcagcaagtgcctttttctaagacattcttggaagagctacctgattataacaataagtctggcacagatttgacaaaacagcttcatttagctgtaattggaatgaatgtggcctatacttttttt

SEQ ID NO: 134013 - DNA, 203 bp, Homo sapiens
ctgcagcactctgacggggaaatcacactccaggaaaacagcccggaggcagagcagtgcctcaggcaatcaacacgtttttcactaaagtttcccaatctcatttctgaaggtatttctgaaaagcagcgtggcttcatagcaggcccagcgatggaaaccacaatgccaaggctgaaagcccagaagtgcggcctcagctt

SEQ ID NO: 134014 - DNA, 496 bp, Homo sapiens
taatctgctttacaagaacaaacacttagctttaatattggcatgcgttgttaaacatttattacaagtacttcttatcaggaccaacaagacttctgcttagcaataatttgccagccctttaaagttgtttatgaatttcagagcacttaaatggcgtttttatgtgaaggttttgaaatcgacgggagaaagggcaaatgcgagcatctgatttgtttgtaccagtgctgcttggaagaggactgggctttgaggagacactcagcatttcttgtcgcgtgtaggattgaatgggtgcatcaatcaaatggtgctgggattagcggttggcttgttgggaagaaaacagctcattgtgtttctcagtggcagttccattggcaccacagccaagatgatctttccttgctcaggtttgtgctgtgcactccggacattcagcttccctgactcctaccccgtggaagtttgtttctgacttgtttccagatac

SEQ ID NO: 134015 - DNA, 787 bp, Homo sapiens
caatggtagcttccactagaaatgttcaaggttggcaacaaaagcctgaattcccacgtggcacacatcagttggaaccaagcggcacactcccttcagacagggtgcgtctcactggtttgccacagtcgtcactactccctaatgtcacaccagaccagctttcctcactcccaactcccactgcaagctcactctggccagcctggtttcagtttgcaagatggcactctgacccaatgagtctgcagaacaacactaactcgggtcttttgaaaaggcctcaaaaacgaaagtaaaaatcatggtttaataaactcaccatgatcctgataccaataacctggctcaagagaagaggctctttctgtacaaagcagctttctccaattctgtttatttttgaagagattttatttttaggccaattagaaactaaccatgctgttgctctgcccatataacatagtccattctcctcagcacatttggatctgtgtgtagaaaagatgacaatgaggaaaggagtatcaactgatacccagtactcccccagtggatgtaatgtgcaggtgaacagctactcagagggtgatgtgaggccagttagagcccagactcaaagaatgagcctgctcctgaaatgtcttccccatgaaacttggagcaaaatgctaacgaaccctctctgagcgtatgcaggaggaaggtaaggttaacaacctccccacagccgttctttctctccgtacagcctttctttctctccgtctttatttcagcaccc

SEQ ID NO: 134016 - DNA, 631 bp, Homo sapiens
aaaaaagaaattaatatggaacgtttctcaggtccatgctgagcttgaaagaaaaaataatacagcaatatcttcaatccaaaatatgccttgaatttaagttggtaattaaaatgtttgtttaaaaaaagtcgctaaaattagagacaaagacccattgtttgttattactgctgactgcatatctgtgtgtggagaagggtgtgaggagacagtcacaggcctgtgatattgtaaagatttatcacccacccccaaagggttttgaggcacccacctgcattttcagcttggatctaagtcaaggggtgggacaagaccatgacaggttttggggtttgtttattttttgctaattactcgtggacacttcaaataccaaatatatcagaacagaaaggcacctgctcaacccagcccctgccatcctctggcaatggcctgacatctctagatgattttctagagattgtggaaccttggagcaatgcctgtgtgcatttttaaaggagggaagcatcccagaacatgccagttccttatagagtatcttgaatagttaccacctctaaccggacttgtgaatttttttcatgtttattcttttcccgtctaggattgagattggtta

SEQ ID NO: 134017 - DNA, 259 bp, Homo sapiens
tgggatcattctggttacttccccagaggaatattttgttgtttttagggacccagcccaacaggctctggagtgctgtctaggcctttgggcctctgatggagtggtcgggcaggagaacaagggcttccttaccaggaggaacttgactctgatgctggtcctgcccttttctcactgtgtaatttgctgcatttttaagttctctgtgtttcattttcttcatttataaaatgtagttataatgccttcatttcag

SEQ ID NO: 134018 - DNA, 350 bp, Homo sapiens
ggaggttaaaccttactctagtccaggaaactgggttgatatttaaacaaggacgacttcagtgaggtaattcatgttatgtctgttgacacagtcatttgaactgggaaaaatcagttactgggaggagtggcccttttcataaggagaggttttcctgtagttgattaacttaaatgttggggcagtaggtgataggttaaaatggggagagttaaaaagtaaacctctctctcaaatcatttttaagcatttgagattgtatgtctttttcttcgtcctgaaaaggtttaagtatgaagagacaaaaaaggaaatttgtattagaaactagaaggcttatgacaggt

SEQ ID NO: 134019 - DNA, 322 bp, Homo sapiens
cagagtctgctactttttttgttgtttttgttttttgagacaggctctccatcacccaggccggagtgcattggtgtgatcacagcactgcaaccttgacttccagggttcaagcctgagcagattcaaggttctctggtccatctcactgtgacagtggttctcatcctaggggccgtttttcccccagggaacatttggcaatttctggagacatttttggttgttatgcctggggcatgtgctactggcatctagttggtagaggccagagatgctgctgagtatcctataatgcacaggacagcactgctacaaagaa

SEQ ID NO: 134020 - DNA, 798 bp, Homo sapiens
atttgtggcattatcatcattatgaatgcctctttggggttcccagaggctgatgttctccgtgcatctgctcacaggaccaccacacagcaagtttcctgactctcaggccaggattctctttctgatcccataatgtctcttttaaaaattaataagctgagtgactagcagataatttcccaaggaggtccctacaatttccccactcccacacacatttattttctcttccttggcagagtgcaaacttcactacaggccaccgaacaaaataatgtcttcttttaaaatcattaagctgagtgaccaggcaactcgaaatatagcagggtgtttcccagggaggtcaggtcaccactttccccaccccctcctcatttatcttctcttctccatcagaatgcaagctgccacacaaacttttgggcatatgctcttttggcctcctggataggcaggtgttagccacaggaaacaagcaactaaacaggctgctcttggtgccgattggccatgggttaatgagaggtttcatttaactctaggtggtcggtggtgttccaccccacctctcccagagtatgtcattgtcctgaatgagaaggcctgagggcaatgcttagaaatgagtttaagctgttacacatcaactaaggttaaagtcctctgtgcttctgtcccccttattgcctactctataccattcctcttagcatatactgccttgggctgtttttattttttctgaagcatgtggcctgtatcccttagtgaaaccctgtagccccttgaaca

SEQ ID NO: 134021 - DNA, 288 bp, Homo sapiens
gtggaagaatgttgaatataagtttcactcatttttaaatgatgctcacggctgctcatgctatgagttttcacagatgaatatttaaaataagtgtctttctcatttttataccccactcctttatccaatcttgttcagactttgaaaacatgtatcttcatatttgcttcccaacctttaaaaagctattgtcggaacgaatcttagggtattagttaatatttgaatgtgaactccttgtagcttaccctgtgtttctttctgggcacatttgtaactaaaggg

SEQ ID NO: 134022 - DNA, 141 bp, Homo sapiens
tacctgggcacacaactggcatactgcgggcattctgaaaatggagttgatatttctggtaggctttctcaaaggggcaaacactgagtgggagtgaattagaggcaaggagacatgacatgagaagtgcaaaacagagag

SEQ ID NO: 134023 - DNA, 394 bp, Homo sapiens
ggacttaggccacttagtgaatattagaaagcataaccattttgtgttttttatacatatgaatgtcccaatgtgataattctcagtttaagaaatgtgggaaagataggctgggtgttacggggctgtttcaggtttgccaggtgtatttagagaaagaaattgcagttagtgaattttcccatcatctattttgaagaacaaagtttttgcccgcattttccccatgttccttagataaaagttacatcagacggttccttgtgactgtcaccactttacattagacacagatatcattcatgatctgaacgtgacactgcgagcttgggagggaaagaagggaagtagtatcaagatatgggcccagtttcagaggagtaattaggtgtct

SEQ ID NO: 134024 - DNA, 510 bp, Homo sapiens
tggttcttgtctccatgatctgcctctttagagagctcaattctctttttaatgaacacttgggggcttggtctgttgctgcaacaccctgcttctctcaagcttcaataataaagtgagtgtgttaaggaactatgagtagagaaccataagatactcgcccatctcccaaatatctcccataccatcatctgtcaaaggtacctgaaatacctttttgtcttcaggaatctccagatgaaaatgctaacgtcctaagaaagaataagaccttgaggcttaaataagtaatatcagccaacaccttcatttggaagcttgggtttgtggaaacataatggaagggagatgatgggaggatgagcaggatgtgacagggactccctaaaagggaagtaggtgtgactgtatgcttctcagttttcttccatgcccaccctggctgataccacatagtttctgtttcttattttgaattggcagtaggaagtcagctgcattcctaggcat

SEQ ID NO: 134025 - DNA, 415 bp, Homo sapiens
ggaccatatggacctgctgcagttcgtcttttctaataagagtactgaggctttcatttaattaaacagagctcacttcgctattcaggcaaagttaatgacaagtaatacagattcctttatagggccttatgacaatacaactgatttaagtcctttcccgtgttcctattatctttcaggccacatgtcaactgctttccctgacacgaatatggggagccacctccctctggtcctctctcccatcaaatacacctctgattcgaattgaactttctctgagtcttgacacccatcctatcccctaggataagaccaaggcacttctcattaatctattgtatcttctaatacctgatctaagaattgtcattatttgacaaaagccaacagtgaacctaccagggaatac

SEQ ID NO: 134026 - DNA, 765 bp, Homo sapiens
ccggtgaggagtggcgccgtgagagtgctgatgatttgctttgtggtcttttttccacaggtctgttttcctggctagactttgaggtgctcaagagtggacacgttcgtctttatgtccttcactgtgcttagcaccatgtcatccatgttcaataaatgggtgttgcccataaatgcaagaacaaactaacaaatgatactctacagcaacgatggggtctttggcacatctgcagggcctgaggcctaggctctgttttagggtgatgcacatttaatggagacccactctgcacccccagcagatttcttgagctttatgcaaccgctgtggtcctgatgacactgtgaatcacatgtctaagtctcatctcatcttcctcatctatacaggtgatagtgatcatcatcgctgctctgtctaactcacagtgttgggaggttcaaataatgttaaccgtggagggtgtccaggttcttggcatcttgaacaaagaattggacaaaactcacaaacaaaggaaagaatgaagggttttattgaaaatgaaagcacgctccacagtgtgggagtgggcctgagtgtaggggctcaaaggccctgtttacagagtttttatgagtttaaataccctctacttggagtacgctctatgtaaacaaagagggtgaagtaaagttacaaagtcatttagtcggtgtatgccctatggagagggtatcttatgtttcctgcctccagaccctattttcctgcctcaat

SEQ ID NO: 134027 - DNA, 234 bp, Homo sapiens
gggtgatataaaaacctacacatataagaactcaaattggccctttgacccaacctcgtgttggaaaaggcttttcacttctcaaaatatttgcacatctattagaagtattttcagagtcatatttgaggagtagctatttagggattacaaaatatcagtcaggtgagatgtgtccccttaaacaccatataaaaatggttcaagaaacttaagaggggcaggaggataata

SEQ ID NO: 134028 - DNA, 109 bp, Homo sapiens
ggagctcgggagatttcctttgcatttgtaggattgccccaggatacacacctcaaatgaaactaaattgtgctttatgacttcttttttttttttaagacacagtctc

SEQ ID NO: 134029 - DNA, 349 bp, Homo sapiens
actcaatggccaattcattttgcaaagtactcttctgactgagtcaccaacaccgcaagactgtctggcccctgagttcccacatggagccccatgacttggggttgctacttggtgaatagaaagttttaattttgatttcacaggatcccagcagccatgagaacattaaagccaagattctgatagaatgagcaaatcaaactcagagagccctttcctaattttcttttttaaggaagttggcagaggggcaatgtgacaggagctgagtaccagctttgtcactaccagctagctctacagcccaggcaactactcaacctccctgggcctcagtttcctcatc

SEQ ID NO: 134030 - DNA, 275 bp, Homo sapiens
aagtctcaaacggcacctgaaattctgcattccaatagactatcaggagaaactgatgctgctgaatctcaaaccatacactgaggagcaggactccaaatcagggcagaccacaatctgtttcctgaggatgggcctttgttagcagtgagtaatggacagagacttatctagtggctcaatacaatcaacatactcaggttagtctccactcctaccttcacctcacttatgacagacacacacaaacacacacacacacacacacacacccc

SEQ ID NO: 134031 - DNA, 842 bp, Homo sapiens
tattttctagcttcataaaatcaaacacttttccaaaaatatgtttccagaaaaatctttttaacttaaaaaactgttcattgaccagagatttgagggtcgagtcaaaacacactgtgacgtgccaggtccttcatctgacccctgctttaacctcccaaagtgttaggaacatcatgaacgctgcttggaactagaataatccaagtttgaataccacttccacttcaaggaagacttaggtagtttgctttctgggactcagttttataatccatacagcaggtaaaatattaactatataatggcgttaagaattaaattagatataaaacctttcaggagcaattattgatttgtaatcccaattttttttggtccagaaaataagacattcccttctatttgttaacatgtgttcctatcatgctgtcatgttcatgttcctcttttccattagtatatgagatcttgatagacacaatgtttttcatctttatggctgaagtgcacagttcctggcatgtaataggcatgcagttttgttgcacaaatgaatagataatctgctttgatgccagatgcctgaaaatgttgcccatagtatgtgtttattacaatagaaagtcccttgaatataaaatttgatgcaaatggtctggttgattctataccatcatcttgtaagacttcagagggttttcccacacttttcaaaaacatgtatctattttgttgcaagctagaaggactagtccctactctattcatttataatctagtttgggattaagccacatcagtaagtaaccaagtactgtaagcattcagccagatatccc

SEQ ID NO: 134032 - DNA, 406 bp, Homo sapiens
cctagaccctcctccctctcccccagaggcatagccttcatagtgctggaaatgttccatatccctccattgtgccgtggtgggaaaaagacagggaaagagccctccagggaactggcatttgttgtggcctgcactggctggttcctggagtaggatgtgtgcatcattagccctgcatagcacagtagctgtgaggaagtgaccgctcaggtgttgggtgatgtgtctagggtcacattgcctagaagagtggcagggctgcgcttgctgcaggcttgcttgatcctgaagccctggttcctctcaccatgccctgggctgcagaactcacttctgggccttgtaaggccgctggtgggtaatggtgacagtgggaggagtaatacctgaacagaggctgccc

SEQ ID NO: 134033 - DNA, 278 bp, Homo sapiens
gctatagagtgcaacaggagtgttctcagcagattcctgtagtttcctgaccaaacaaaagtttccattttgttttcacctgcttagcctggaccttggttttatgtgcattcaaagatgacatgttatttaagagcaagttgagctgttgatgaatgaatgatggaaacaactttcagccaagcctgggttacttttcattcctttccctccaaaatcagaaaacatctcaattgttccatatttcttcctgtgttgactcattttgtgacctctgc

SEQ ID NO: 134034 - DNA, 453 bp, Homo sapiens
gctgtgttggtctttgcaaccttccttaattgtatgattttaagattcattgttgtttttagttgtgtaacaccaatctttttggacctctggaattcatactattgaagtaatgcagtcccagatttgaatttatctgtttataactgttaggaaatacttagagtgagccaagtgtaatggctcacacctgtaatctcagcactttgggaggctgaggcaggtggatcgcttgagcccaggagtttgagaccagcctgggaaacatgaagagacccagtgtctataaaatacaaaaaagcctggcatggtatctacatgcctgcagtcccatctactcagaaggctgaggggggagaatcacttcagcccacaagttccagagtgaggtgaaccgagatggtgccactgcactccagcctgggcaacagagtaagaacgagaccctatctc

SEQ ID NO: 134035 - DNA, 630 bp, Homo sapiens
cagttccggaaccacaagtctaacaggtttattaggatcacactggtgactgagttaagaccaggctgtatggggcaaatacaaaggaagagcctccaagaagtaatctgggtgagagaagactgagagttgcagcaggctggtcacagggcagatgatgagaaattgctggatccaggatgtatttgggagaacccagcagaaatcattcttagtgccatgattggagagtttcctgaggcctcccttgacacagaagctgctatgcttcctgtacagcctgaagaatcatgagccaattaaacctctttactttataaattaaaaagcaaaaaaaaaaaaaaaaaaacaaaaaaaaaaaagagcagaggaggagggagaaagagagaaaaaagagggcggggggggggcgaggggcggcgggggggcacctggaaacaaaacagagtagagacaaggggcaaaaggggtacaaaagaagaacacgaagagagaaaacagagaacagaggaaccaaaaaaaagagcggagggagagacaagaaaaaggccacgggggacaacggggtgtagagaaagcacaagggaggaacacagagaaacagaggggataaaagagggagaaacacga

SEQ ID NO: 134036 - DNA, 753 bp, Homo sapiens
ataaaagttctgtgagctttatttctttggaaaccatacctagaagtttacaaacacatctggggtacaattgggacacgtctactctatgtttcacctctactcacatccttgtagtgtttcttataggcaaggaaaatacttcatattgaacatatgataagtggcaactttgctgagactaatttataagaatagaagctgaaatattatccatggtttccaaagaaaagcattttttcctgaatagcccacttccaatctatcattcttcactttgttgcttatgtatatctctatcttcatttccatatatcaaatattacctatcctcaaaggctcatcccaaatgcctctaactttctgaggcccttattgcttacttctctttagctctcccatgcaacgaaagtcattgacttgtatataccacccgcccacaataaatttttgtgcacttcttttgtaaagcttattacttaatttgcataattgtctataaatttgtctaatccctctgctaggtatgaactctttaagtgaaagaactttaatactgtgtcttaggacaggacacagtaggcacacagtaaatatcgttacgcaaattgaatctcttttattgtgaacaggaatttttttccagaattttccatactatttacagaatgatagactgataaatgcatcactatattcaatcgaatatatttttaatcgattaaaaaacaatcgatttaaagacaatcgaaa

SEQ ID NO: 134037 - DNA, 515 bp, Homo sapiens
tcactctatcccactggcatagtgagtgtgtgaacaggggaacaagatgtgttttacagtcagtttcatccacattcaagcatttcttttccagattttcaacataagaagttttgttgtttttgttgatattttgggtagtggtggccaatgtctgttgcctctctcctgtatctctgcccctagaggcccctgggacacagatagaaaggaagcagcttccccaaggacttggacagcagacaagctggctaggggagcagggggcaggtggtgaaacaggggaaaagctcatttctatgacccatcagggaagctgaacaaaatctagaaatgtcaccaggataactgcatagggagatacagcatccttgacagctctataactattatgcagaaaatagcaacagcagaatcaactaaggttgtaaaggaacattgaaaccattatgaatggagatctaaaagaagtgatcagaaaagcactacaggatttggcaagcaccctggaaaaa

SEQ ID NO: 134038 - DNA, 407 bp, Homo sapiens
tctgagatttccatactgacctcagacccttggaggaaaaacatgttttccaattacattgcaatacatggagactgaccctcagttggtaattccaagttctagtgttccctttctgaacagattgctgtttttcccgtgttatatggaaaggggaaggaacttgaatagccagtagaattttgcaaaagggcagcaaagttgatttaagatttactataaagccaccgtaatcaaaacagttggaattggtgaaagagtagacacataaagcagtggaacaaagcaaagagtcctcacatatatggcaattaatcttcaacaaaagtacaaagaaaattccatgttgaaaggatgggatagtattttcaacaaatggcgctgtaacaattggacatctacatgca

SEQ ID NO: 134039 - DNA, 257 bp, Homo sapiens
acattaatgtcatctttctgatcaagcttaattcaaatttttgtcgaagagaacagtcaaattaatgacattatgatatcagatttctactttggactacatgggcctaaagtaccatgtgtcttttgcaacgtcagcagttgctgttaggaatattttcttttgtgaggttttttttttgtttttttttcttcagtccttttcgtccttatgaacccatcactaggcacatagagacattcattgttgactgactc

SEQ ID NO: 134040 - DNA, 322 bp, Homo sapiens
tgcaggaggtccgtctgggcatggctcccactccccactgacatcaacacctcagcccaaagagcagaatccactgatgctagaggaagatggaagggtcataaccccaccttcccagggagacttccctgggcctcttgcctgaacaggcccctcgatccatgctgtagactaggggtcttaacaggtcagtcataagtctcatcttgcagtctgggccctggagctggcctttccttttgttccttgccccctccacgatcacttaggcctgacagaacctgaaaccctgtcaccccaccccaggaagcatcatcacctc

SEQ ID NO: 134041 - DNA, 225 bp, Homo sapiens
catacctggaccttctggatttcgactggtgaaattaaatgaggtcatccgacaagtgggcgagaaggagattgaagaatgctggggatgaagacgggttgcggggagacactccccagggaggggcaggcaggagataaggtctgtctctagccgggtgctcagtagaacacacaggccctgtcagtgcgtctaagggctaagtgcctggctgccggctttact

SEQ ID NO: 134042 - DNA, 330 bp, Homo sapiens
gctacaatgtgagattggaaagaattttatacttaggattatatcctgggacattttcttcattcttcctgaatattgagatatttgggtggaaaagttcaagcagcagcagtggaatccattcccaccttcactggggtgaggagcagttggaaaaaagccccagacctgacctcagcctgccttggctctgccacaaacctgcagtgtgactttgagcaagttgccttcctctttgggcctttggttcctctgttatcaactggggaggaagttaacatctatcttgctatccacccaacagctctatggagttgtcacctttatcat

SEQ ID NO: 134043 - DNA, 105 bp, Homo sapiens
gtggcagcaccggcaaggggctgggggaagagcccacgccagcctacgtcacgcaggaagggagccagtggccaccccaaacacacctctcctcctcacacctgg

SEQ ID NO: 134044 - DNA, 473 bp, Homo sapiens
atccccgatgccgggcggatgcatagatgggtgggtggatggatgagtggatggatttataaatggatagacagatgggtggatggggcgaggcacagtggcgcatgcctgtaatcccagctactcgggaggctgaggcaggagaatcacttgaacccaggaggcagaggttacagtgagctgagatcatgccactgcactccagcctgggcaacagagtgagacttcgtctaaaagaaaaaaaaaaagacagtggttctgaaactttttgctctcaagaccgctgtaccctgaaagatgttaaggagatctcacagggctttcctttatgggttgatggctctggatattatcatattagaaactagagctgagacattacaaatgctcatgtagcctctgaacaattccattgtacactagtgagatggtgagactgaaaaacacaagtaattcctcagtgttattatgac

SEQ ID NO: 134045 - DNA, 129 bp, Homo sapiens
ttccttaaaatatccttctttattgtttttctcgtattaaatcctcctattggtgcttggaggggacggagatagtggagtgggcttattttctatgccctgtgatttttgctgtgtcacaacctgttc

SEQ ID NO: 134046 - DNA, 574 bp, Homo sapiens
gtgttacagtacctcccggtcattttctttttctctctctctacctgcgctcttcgagtgtcagaaacctttaaagctgttactatggaattgcaaaaaagagatcaagtgactctttcactatgctggtttcccttgtgacccagatgaagaatcaattcagaattcagttcctcccttggcattgcaagacacagaagaaactgtcacttcctaacagcctagtactggagtaaattcagtatgaaggaagaaagcgctcctgcgtgttagaaccttgcccatgagctggaccgaggacaggagatggactccaggaaaattggatttcttcaagcagcctcccttggaaatggaatatctttaaaatcttctttgcagaaagacagttagaatgtattaatcagaatagttgaagacttattttcctttttattttttttcaaaatgagcattattatgaagccaagatcccgatctacaagttccctaaggactgcagaggcagtttgagacagtgtctccctatgttgcccaagctggattcaaacaatctgcctgcctcagcctccca

SEQ ID NO: 134047 - DNA, 421 bp, Homo sapiens
aattgaatcatacagaattttaataactttaaatagtaaattttagaagtatatatgtaaaaacttcatgatttcatattttgaggcaatatgttattgcctgctatatgtggctttatctagatagtgttttccatcttgtcaactcatcacaatttgctcttttttccctttttacttgactggcccactctgccatgagaaaatgtggtctagtccaaattattttttaaaatataaaaagttataggttgaggctgggcgcagtgtctcacgcctgtaatcgcagcactttgggaggccaaggtggcagatcactggaggtcaggagttcgagaccagcctggccaacatggcaaaactccatctctactaaaaatacaaaacctagttgggcatagttacacgcacctgtaggctg

SEQ ID NO: 134048 - DNA, 228 bp, Homo sapiens
gcaacaagtaacgagactattttgtattttggagaattcatattatggagaacctaacaatttaaagacactgggaacacttgcccctcagtatagtactgtcaagggaagccatacactttttgtagacatgggtaccaaaaatacccaattctaagtggttgacagatgttcactttgaagtgtgaagttttaaaaatacgtgaataaattggttattgaaacatc

SEQ ID NO: 134049 - DNA, 401 bp, Homo sapiens
gccccaacccagtgtcttttcccaacatttactcattcattcattcagtcactcaagtctagtgtataattcatgctgttcttggtgttctgagataaagaattataagaatgtcatcgccaggcgcggtggctcacgcctgtaatcccagcactttgagaggccaaggtgggcggatcacttgaggtcaggagtttgagaccagcctggcccacatggtgaaacctcgtctttactataaatacaaaaattagccaggcattgtggcaggcacctgtaatcccagctactcaggaggctgaagcaggagaattgcttgaacccgggaggctgaagttgcagtgagccaggatggcaccactgcactccaacctgggcaacagaggaagactccctctcaa

SEQ ID NO: 134050 - DNA, 341 bp, Homo sapiens
ctaaatcatggtggattcccgcctcggcttccctccaagagccaacacggagatgggaaggcagcttcaccagaaattactaagcattttccagccccccagatgaacaaattatagggtacaaaatgaatgaaaacagcttttttactcgcccagccataaaaactttgctctccagattttaaagccagggagcagggtggtgagcccctcagcaggctgaggcatggaaagccaccgtcccctgcaccaacctcatggagagccactgtcccccgcaccaacctcagaactccagtcctcagcctggtgctcacctcagaccctcaccacccacacag

SEQ ID NO: 134051 - DNA, 806 bp, Homo sapiens
tactaacctattgttagacatctctgaatagtctgtgcacatcttatgcccaagatgacatgaactgagttctgtatctccaccccaccctgcaaaccatatttccttcagtgcactctgtgtttctgttaatgttacctccattcatgcagtaatgcaaactgagaatctgcaagtgattcttaagttcattttccttgcatctcacactctgctggtcattacagtttgttgaatctacttattcagtacttatcaaaagtgtcctcttttttccatgcctcttgacatgtattcagggctgatattcagctcatgcacaaatatgtcatgttgacttatgtccattctatgttttggcttctgatatgatgtgtgcctatacattccagttacatatttcaggttatcattagatacacttctctcttaatattgataaaacaacagacagaaagtcagtgaagatgtagaaaaacttgacatcatcaaccaacaagatttaattgacattcatagaaaactattctcgacagcagcagaatacacattctttttaaatgcccacagaataattaccaagataaacgaaaacctgggccacgaaacaaacttcaactaatttaaaaatatttgaagtcatgcaaagtctattttaagaccacagtattttcaaactaaaaattaaaaagagttaacaggaaaatccccaaacaattggaatctaatcaatatacttctaaataaataatccataggtcaaataggaaatatccaggaaaacacacacacacacacacacaccc

SEQ ID NO: 134052 - DNA, 476 bp, Homo sapiens
gatattcttactaacaattttaatttatttcaatttaaggaaagcaatatgaagaacatacattaaatattttcccctccatgttaatgtttcagttaagtagacgaaggaattcagatttagtcttcatgtaaaacaggtaactttgctcaggaaaagaaaaacctacctgttttctatgactcgtgacatatattctctggtagtccttgtgatcagacatacacataccacatattgattacaaatagggtattaaacaaagtaagtaactctagaccctaccaccacttcagtgacccgaaatccactatttaccaacaatagctagtaatagcaatttttggtcacataattaagcagcattttctttccctgattatttaagaaaaactaagtaaatttatctcactgaagaatattttaagccttaagtcaacattaaatttcttgttattgattataaaccagtatac

SEQ ID NO: 134053 - DNA, 157 bp, Homo sapiens
aaaaacaagaaaacaaaaaaacttcttaacttgattttactgccactagggggtgcctggtaattgagtctttgtattaatataatttctttctaggggaagaaatggtataaactaagagcagcaaaattaccatatgagtgcctataattgtaaa

SEQ ID NO: 134054 - DNA, 132 bp, Homo sapiens
acacagactttgagttgattgttagaattatgcttaagaatttaaaggaaatcataaatataatgaggaaaggagtggaaggaaaaggacaacatcaaacatttagagctgaaaatgcagctcttttatcaa

SEQ ID NO: 134055 - DNA, 274 bp, Homo sapiens
gttttaccatgttgcccagactggccttaaactcctgagctcaagtggtcctcccacctcagcctcccacagtgctggcattacaaggtgtgagccacggtgccctggccaacgtggctttctaataaggaatcatccctgtgtctcaggcataaacttcctttttttttttttttttgggggggggtttttctttttcccccaggctgggggcccagacccttaaaatttgttacccgagccttcaatcccttggtttaaggggtccttcttc

SEQ ID NO: 134056 - DNA, 411 bp, Homo sapiens
aaaacccatccctacaaaaacacaataattaggcaggcatgatggtgagtgcctataatcccagctattcaggaggctgaggcgggagaatctcttgaacccaggaggcggaggttgcagtgagccaagattgcgccattacactccagcctgggcgacagagcgagactccctctcaaaaagaaaaataaaaaagaaaaaagaatattaggaaaaatatcttaatgcaaaatatattaattagtaatctgccaacactgagatgtactataaggccaagaagaaaaggaatgatatctagagtcttgtcattttttaagtcattgcttttagagatttttttaacctcacatatatttttgtttcttagcataagagggaggaaaatcaaaagctcaaatagagaattta

SEQ ID NO: 134057 - DNA, 514 bp, Homo sapiens
gcatggctagttgggaggtcattatagtcacctagggaagaaatggtggtggcttggcctaaggtggttatagtggagatggaaaggaactgttcggggaggaacaatcagtaggtctttctaaaaggttggaagaagtaggaagtaaagaaaagaatcaaagagggcattgccatttttgcctgagtagtgggtgaatcatgttctgagaaggaataccatggggaattggctgctaaaccaaggttttctattgggccatgttaaattagagaggactattagacaaccaagtggaggtgtcaagtgaacgattaaatgtcagaatcgaactcagagaagaggtcctctcttggaactggagatactaatttaggggtagtgttagtgttcatttgcctgttggcactctgattcatttcctgctctttcatgctctactctgtatggcttgaggatgaggtgctaccaggagagtggggtgtgcaaggttgacccacacaaactacatctc

SEQ ID NO: 134058 - DNA, 316 bp, Homo sapiens
ctcagctatttgggagactgcagtgggaggatcactgaactctggaggcagaggttgcagtgagccaagatcatttcctgcactccaggctgggtgacagagtgagactctgtctcaaaataaatagatagatggatagacagatagatagcttttaaaggtagatttttccaataaaagtaatatatgtttatggtaagttttcaaatagtataaacatgtctcctcccaatttttccagttctgaatggagaataatgaaccattgttatatttctatacacaaatttctttcttggacaactttatataacag

SEQ ID NO: 134059 - DNA, 452 bp, Homo sapiens
tacaaaccttgattggattctgggtcaaattttgaagaaagcagtggctcacgcctatggtcccagtgatttgagaggctgaggcaggaagactacttaaacaccggagttcaaggctgcagcgagctatgattgtaccactgcactccagcctgggcaacagagcgacacactgtctggattaaaaaaaaaaaaaaaagaaaaggaaagtaaagcaggaacttcccacagattttgaataaaagctcaaaattaaaacagaggtaaaaccaaaaccaaggggatatgagaagaaaaaaaaaaaggacagttaaacagatgtcagaaaactcaccagaaaacaaaattgctacagagcatatgaaaattgtttttccaagaattaaagctacttaatgaattcctgactcacagaaatcatggtaataataaatgtttattgttttatgtta

SEQ ID NO: 134060 - DNA, 416 bp, Homo sapiens
gatgagcagggcactggcttgcaagctctgggtgcagttccttttagtcgcactgttgaagtgtgttaactaaatctgacagacgtgaatctggtcacgtgaatacctgggataatgtccgtttattattaaacacatcatttcctgagattcttagcttgatgtttaaaatcatctctcttgctaggaaattaataaaatatgcatctgacacaattatgtccacacctacaatcctgatgtcaaacaaaaagccccacaaatctagaaactagagaacgttgtatataagaaacaggtgagaaagaggcaactcactaagcttattgattaaactttgaaagaataaaacatatactgtgggaaacatcggcaattgaaggaacaattgctgtacttgtgaatcaaattcattc

SEQ ID NO: 134061 - DNA, 460 bp, Homo sapiens
agaactgacaagcaaattcggtaaagttgcagtatacaagatcaacttacaaaaatcagtagcatttataaatgccaacagagaaaaaactgaaaaggaaatcaaccccatttacaaaacgtacaaagaatatataatacctaggaataaatttaaggaaggaagtgaaagatctgtataaggaaatgaggatgaagaccaaatatatatttcacgatattacagtcctacgttttctttatccattcattcactgatgtgtgcttaggttgattccatattttggctactgtgaatagtgctataataaacatgggagtgcagatagctcttcaatatatatttttttcttttggatatatacccagcaatgggatatattggggcagttctagttctttttgttttgttttgttttgaagactctccatactgttcttcatagtggctgtactaattt

SEQ ID NO: 134062 - DNA, 676 bp, Homo sapiens
ggctgagacgatggggttttctaaatatacaatcatgtcatctgcaaacagggacaatttgacttcctcttttcctaattgaataccctttatttctcctgcctgattgccctggccggaacttccaacactgtgttgaataggagtgatgagagagggcatccctgtcttgtgccagttttcaaagggaatgcttccagtttttgtccattcagtatgatattggttgtgggtttgtcataaatagctcttattattttgagatatgttccatcaataccgaactaccttgacgtcacaaggcaccagcagtacccatgattgcttttgcatcgtcagtgtagcaatgatggcagatggcaaaatggcaaataacatcttaggattattatgaaagtatttttgacgttattactccctgaatgggtcttgaggacctccagaagtctgtgcttcacccagtgagaacagctacaagacacctatcctggaggtatgaacgagaaatactgactgtggggaaaagaccgtggctattaacaaaaatggcttgttttgcctcaaaatttaccatgttgagcaagctggcagttgctaaagtttggccttaccttctccactgacaacttgcaatgagtatgcacattttaacattatgatagaagctattttttga

SEQ ID NO: 134063 - DNA, 424 bp, Homo sapiens
cttcagcagttatcctccgtgcccagcgttgtttcagctgctcctgctcactccacgcccccccactccccagctcgaatcagtttgaatcagatcctctggtgtaattgtcatgagcagtctgggtctctccattctgaaagccagattctaatagtgtacccgatgtaaacaacaggactaagcactgacttttgttttttgaaaattgtcagttaaaaaatttgtgagccttttttttaggattacagtaataatgtaacaggctcattgaaactggaaatcacaaacagggtttaaagatgacagagcccttcatctttcagcatttggagctatcactgatgctttttaagggctgtggatacctctcctgtgctttttttttttttttttttggagacagagtcttgctctgtcgccc

SEQ ID NO: 134064 - DNA, 405 bp, Homo sapiens
aagcgatcctcccgtctctgcctcccacagtactgggattacaggcctgagcctctgtaccagctccatcaccccttccctcagatgtttttctctgtagtttctaataaccgagtgattgcacttttcctgctcttagtgcagaaatgcatgcttatacttatttcgtgcctttgtagtctgcttcggctatttgggcaattgtttctattttatgttaggcaggatactttcaatctttttttttttttttttaattgagatggagtttcgctcttgtcgcctaggctggagtgcaatggtgggatcttggcttactgcaaccttcgccacccaggttcaagtgattctcctgcctcagcctcctagtagctgggattacaggcacctgccaccacacctggc

SEQ ID NO: 134065 - DNA, 505 bp, Homo sapiens
agtgtcacattgtgaaaagaacatttggaatggggcatcttattgccaccatcttggaaaatatattttactacagtgactttcataggacagacactaaataaatgagatttcttcaagccaaagtgggaacaggtccacctaggcaagagaaccaaatgtgaaaaagtacatggtttgtttgggaacaggtcggccttgttttggagcgagaatcctatggtagagggttgtaaagagatgatgctgagaacgaagggttggaccagattgtgaagggccttttatggggaagccataaaggtttgtaagtagttaactgatgacaagttctttgttgagaattggtgggaatgtgaagggtggattttgagcagtggttctaaactgtttcactgcttctcatcatttattacccaaagaggatttttagcccaaagatagggggatataggagggatgagggggagcaggtgtagtacttgtatcagaatctcattttgag

SEQ ID NO: 134066 - DNA, 272 bp, Homo sapiens
aaactaacccttgtctgcctggttgtcctactcagaaagagctttctgcaatcacttactctcccacctgctcaggcgactaatgttgggccatgggaaggaaggaaatccagcccagtggaaaggcttctctcatcccatactccaaagaaccttaacctggttgtcacgagagcaggacaggtgctggagagccctgcccttccaaagtggatggaatatccacccatctgcttcaaagccatgaggcccaggtttggttgtaattggaa

SEQ ID NO: 134067 - DNA, 732 bp, Homo sapiens
ggaagtttgatttttaatgttttgaggagctgccagaactgttttccacagtcgctgtaacttttcgcattcccaccaacagtgtacaagaattctagttactctgcatcctcaccaacacgatattttctgggttttcatgagagtagtcatcctactgagtgtgaggtggtaattcattgtagtttcaaattatatctccctgatgatttagtgaggttgaacatcttttcatgtgcttattagccatttgtatatcttctttggagaaatgtctattcaagtccttttccaatctttcaatttagttgtttgcttcttttcttgttaagttttaggaattctatatatattttgatattaatcccttaatagatatgcgatttcaaatattctttctcattccgtaggttgcctttttattctatcactcatatcttttgatgaacaaaacttttcattttcatgaaatccaattttttttcttttgttgcctgtgactttggtgtcattgccaataaatcactgtcaaatgcaatgtcatgaagcttttgccttatgctttctaataacagctttatagttttagtcctatgtttcgatctttgatccattttgaggtcattttgtacatagtattaagtaagagtaatgtcattcttttgcatattggtgtccagtttttccagcaccatttgttggaaagactctcttttctccattgaatggtct

SEQ ID NO: 134068 - DNA, 404 bp, Homo sapiens
taacattccacaggggaggagatggatgccaggagaggtgagatgattcttattactcttccagggtgaggttagtgatggacactgggctggaacctggctctgatgtcctcatcccgtgatgcacagcagggtaagaggcactgaatgtagcaccatggcttattggagggaggcatccatgtgtagcttgagtctgaggatgagattctattgttgaagtcctacaacatattaataaattggcagccaactagactctcacagtttcctatggtcttccctctgctgagtgctcgtgggaagctgagttcagctgcctcacatttgtgggagtctgttagcagtgtgtaggtactggctgaggttctgtgtgagtgatccctggagagcagtgggggtgg

SEQ ID NO: 134069 - DNA, 362 bp, Homo sapiens
  misc_feature (14)..(15): n is a, c, g, or t
agctcggtaccccnntctgactacgcggctactgcagcctttgcccctcccgctcgcacagggcaggatgtgaccttttttcctcgttgatgccgccactgaacaccttaacccgattttacctcagtcacagctgtgctgggtggcatgaccccctccctaggtgtaatgcggggtcccacccacgtctccccggggacagcccctctcactccccttgcagagagcctggggaggggctgagggaggatgggatggttcactaggaatgtttttaattccaaaggcagtgacatctgttcgtgggggccttaccaccaggctctgtttatccagccgggggagtcttgcaggtcgtctga

SEQ ID NO: 134070 - DNA, 375 bp, Homo sapiens
tgttctttcttcccacatgtctgtgtagacagtactgtagaaggcctgtcgatttcatttttcaaattaaagtataatttaaatacagtaaaatttaccttatttaatatctattttgacaaatacatgcagtcatatagccagcacagtcaaggtatagaatagttccattacccccccccccccttgcaaatatcctttacccttttatggtcaactttgtcccccatttccagcccctggcaactactgatctgtttctgtccctatcattctgctttttccagaatgtcataaatagaaccatacagtatgtagtcttttgagtctggtttctttaacttaatacaatgtttgagggttatccacatcatc

SEQ ID NO: 134071 - DNA, 419 bp, Homo sapiens
tgtgtctcggaaaaaaaaaaaaaaaaaaggcaaatcccggccgagcctttggctcacgcatgtgatcccagcacttttgggaagctgaggctggaggatcacttgaggtcagaagtttgagaccagcctaggcaacatagcgagacccccatgtctacaaaacaataattagccaggaatggtggatgagcctgttgtcccagctactcgggaagcagagacgggaggttcgcttgagcctgggaggtcgaggctgcagtgtgccctgatcgtgccactgcacgttagcctgggcaacacagcaagaccccgtgtcttaaaaaaaaaaaggtaaataagagttggggacacttttctgcgagttggagaaaccaaaccccctcgacgagtcttaagtagtattctcaggttgtctggcc

SEQ ID NO: 134072 - DNA, 526 bp, Homo sapiens
aaactccaggggggtcacgggaatgtccccactcccgccatagcccacgcaggggcagagcccacccgaggccagggaggtgtgcctgctgctgccccacagccgcagggaatggcgttctcttcctctgaagccggggcctgaagagtgccctcctggggaagatgtggaccccggggctgccatggagacagggactccagaggccgattccatgccctgcttgagcccctgagtctagtgggacctgagagcctcccctggggtcttcaccttggtgaggaagcaacttcccttttctgctcaatcgagtttaatgtggattctgtcacttgcacctgaaggaggcctaattcacaggaaggccatggctgaacagggtcctcgcttcctccatgggggtggggccgcagggacacaggcagatgaaacagcaactctagccagagggaagctcccggtgaggaggccgggcaagcccggcacagctgctgcagccatctgggcctcacacaccacgctaggc

SEQ ID NO: 134073 - DNA, 2863 bp, Homo sapiens
tatgatcaaattagactgtgcctggttgggtggtaagatcactctgaaagaaagctcactgtgaagagatgaaaggtggaggcagagctgtgaggtcatggggaaaagcctgctttccttataagtcctgctgttcatgttggaataaggatctgctcttccttgtttccatgcattttgcaggattccaggtaccattaccacactcttctgacccatgaaaccaactggctgctcacacatcaccaaacaggttgggggttagccttcagcacaggtggatacatctgggattcactgagattcctgccctctcctgcttcctagtggtttgggacaggccctctgcccatcgtcagcagttttttgctttcatacaaacctggaaggcactggcatctgcctaggaaagtggatctgtgaagaacagatgaactcaatcctttctggagtctgacaaagaagggataggcttccttgacattgcctgtcctgacaaggcctccctgacattactcctccaatttcacagttaccttctgtaaatctattttctcatctactgaatagaatcaggcgccctttttgtcttcccacctcttatctcttggcaattttaaggggaattaatgcaagaacaactttagtgtctcttgggaaaacaagccaaccaaatacaaaacccattaagcctactagggtgagtcctcttaacatgggaaggcgatgattatgcaaacaccggagttccctcctcttcagttcctaagaataaagaacaggtatcaagaactttctttaaagttagtgtaactatagttaacaaagtatccattgaagtttagtgcctgtaggactgagccagtgctttatcaacccaacacatcatcaccatgtgcatactctagaaaaaaaaatagcttccttaaaagttacagaggctcttaacgtgttaaaaccgaaaaatcacatttttcttgatttcaaatatgttctacggccttactgttgggatgatatttagtatgtaacttagcattccaatttctcaagaatttttaggccgggtgcggtggctcatgcctgtaatcccagcactttgggaggccgaggtgggcggaccacgaggtcaggagatcgagaccatcctggctaacacggtaccccgtctctactgaaaatacaaaaaaattagccggacgtggtggagggcgcctgtagtcccagctactcaggaggctgaggcaggagaatggcgtgaacccggtgagcggagcttgcagtgagccgagattgcgccactgcactccagcctgggcgacagagcgagactctctcaaaaaaaaaaaaaaagaatttttagcaaaacatcctgtttttacttaaaattcttctcatatttattatagttagaaggcaaagatcaagatgacctgccgtttgactgcttttacatcaaactctgcccagtatttgcagcacaactcaggggaagggccttagcttacaggtactcccagccttcatctgcccctgcagagcagtggctgtcagccggatgcggcacttttctgtattttcatccacacagctgcccagccagagttcgcaacactggatatttacaccaaataattgtggttgacttgtctgaagccagctgacaaaaggatcagcttttcccacttgtattttttaaaaagagggattgtgatcattgtcacagagtggggtgctggcctctcatatatatgatatatatatatcattttatatatatatatatatcatatacataatttttactgctgtctctagttttaagtcccaacaataggaaggccgatcagctatattgatatatttaaggctgtacttaactaatttgggctgaggatgaatatatcagccacagcacattaaagaatgagccaaggatttgtcatggttggtcactttttaaagtatttgattactgcaactggagaatgaaaagtgtatattggtgacgccaacctcagtttctgagcactcctgctctgtggtgagaatcagacaaaaattcatcggggtgaaaaaaaaaaggcattacctgattcacacccttgtcttgctagccctcttccattcatttctcacacagcactttgctctgttaaatcctctctctgtctcagaccattgcttgccccttcaaagggtatggttcaggctcctttcaagacatttggagtttctctctggggaaagagagccccctactggtttggcttcagtctaggtccaccatccctctcgatctggcatcttggagattaatttaaaaggcaagctcaccacaatgtaagcctatggtctggccaaccttgcttttgggaactgtgacaccaaagcccccaggactatctgcctctccaggagccagatagaatgacatgcctttttcctaattgtccacattccacccccaacccactgccactgtgggccaagccatccatcttgcaatcttcatctaaaacagctctcatttcatgccagttttgctcaaacctgcaccgtcacaagatattcagaagatgaaaacgtagaagacacccctgaattaaaaacacttacatagcagtggctggaattactccaaaacgtgcccagtgatcgcactgtaacatgggattttctcacccaaataggcaactcatgcttcctgagtgtaatcaaagcatgtggtgttttggggccatatgcaccaggtttctattttagaaaccttcagctgtcttgcttatgtaccgtatgtaaatttattctttttaaaaatcacttttatttgattttgacttattaaatgctttaaaagcca

SEQ ID NO: 134074 - DNA, 3289 bp, Homo sapiens
tatgatcaaattagactgtgcctggttgggtggtaagatcactctgaaagaaagctcactgtgaagagatgaaaggtggaggcagagctgtgaggtcatggggaaaagcctgctttccttataagtcctgctgttcatgttggaataaggatctgctcttccttgtttccatgcattttgcaggattccaggtaccattaccacactcttctgacccatgaaaccaactggctgctcacacatcaccaaacaggttgggggttagccttcagcacaggtggatacatctgggattcactgagattcctgccctctcctgcttcctagtggtttgggacaggccctctgcccatcgtcagcagttttttgctttcatacaaacctggaaggcactggcatctgcctaggaaagtggatctgtgaagaacagatgaactcaatcctttctggagtctgacaaagaagggataggcttccttgacattgcctgtcctgacaaggcctccctgacattactcctccaatttcacagttaccttctgtaaatctattttctcatctactgaatagaatcaggcgccctttttgtcttcccacctcttatctcttggcaattttaaggggaattaatgcaagaacaactttagtgtctcttgggaaaacaagccaaccaaatacaaaacccattaagcctactagggtgagtcctcttaacatgggaaggcgatgattatgcaaacaccggagttccctcctcttcagttcctaagaataaagaacaggtatcaagaactttctttaaagttagtgtaactatagttaacaaagtatccattgaagtttagtgcctgtaggactgagccagtgctttatcaacccaacacatcatcaccatgtgcatactctagaaaaaaaaatagcttccttaaaagttacagaggctcttaacgtgttaaaaccgaaaaatcacatttttcttgatttcaaatatgttctacggccttactgttgggatgatatttagtatgtaacttagcattccaatttctcaagaatttttaggccgggtgcggtggctcatgcctgtaatcccagcactttgggaggccgaggtgggcggaccacgaggtcaggagatcgagaccatcctggctaacacggtaccccgtctctactgaaaatacaaaaaaattagccggacgtggtggagggcgcctgtagtcccagctactcaggaggctgaggcaggagaatggcgtgaacccggtgagcggagcttgcagtgagccgagattgcgccactgcactccagcctgggcgacagagcgagactctctcaaaaaaaaaaaaaaagaatttttagcaaaacatcctgtttttacttaaaattcttctcatatttattatagttagaaggcaaagatcaagatgacctgccgtttgactgcttttacatcaaactctgcccagtatttgcagcacaactcaggggaagggccttagcttacaggtactcccagccttcatctgcccctgcagagcagtggctgtcagccggatgcggcacttttctgtattttcatccacacagctgcccagccagagttcgcaacactggatatttacaccaaataattgtggttgacttgtctgaagccagctgacaaaaggatcagcttttcccacttgtattttttaaaaagagggattgtgatcattgtcacagagtggggtgctggcctctcatatatatgatatatatatatcattttatatatatatatatatcatatacataatttttactgctgtctctagttttaagtcccaacaataggaaggccgatcagctatattgatatatttaaggctgtacttaactaatttgggctgaggatgaatatatcagccacagcacattaaagaatgagccaaggatttgtcatggttggtcactttttaaagtatttgattactgcaactggagaatgaaaagtgtatattggtgacgccaacctcagtttctgagcactcctgctctgtggtgagaatcagacaaaaattcatcggggtgaaaaaaaaaaggcattacctgattcacacccttgtcttgctagccctcttccattcatttctcacacagcactttgctctgttaaatcctctctctgtctcagaccattgcttgccccttcaaagggtatggttcaggctcctttcaagacatttggagtttctctctggggaaagagagccccctactggtttggcttcagtctaggtccaccatccctctcgatctggcatcttggagattaatttaaaaggcaagctcaccacaatgtaagcctatggtctggccaaccttgcttttgggaactgtgacaccaaagcccccaggactatctgcctctccaggagccagatagaatgacatgcctttttcctaattgtccacattccacccccaacccactgccactgtgggccaagccatccatcttgcaatcttcatctaaaacagctctcatttcatgccagttttgctcaaacctgcaccgtcacaagatattcagaagatgaaaacgtagaagacacccctgaattaaaaacacttacatagcagtggctggaattactccaaaacgtgcccagtgatcgcactgtaacatgggattttctcacccaaataggcaactcatgcttcctgagtgtaatcaaagcatgtggtgttttggggccatatgcaccaggtttctattttagaaaccttcagctgtcttgcttatgtaccgtatgtaaatttattctttttaaaaatcacttttatttgattttgacttattaaatgctttaaaagccaaaaaaaaaaaacagacacaacccctccatcctagccacacaaacaagaacggggcggcgggccaccagaaaatatattcctcccgccggagcgggcgccacaattcgatcgcacacgcacccactttcgtcctaagacaagacggggccccccaacacagagcggcacactatcaatatcacgaacgacagagcgcgcgccgcgccttctacacacacgcgacgcgaggacagaaaaactcgccgcacctgcggcccgctagcaggaaaccccacacactctcggcggccggcacaactggcccgacgcccccacccgaactaactccccgcggaagataatacctaccgaggcgacagtggtgcgccaccacgccagcgtatggcgccggcaaaatgcgtcccgagtgatatgacaaacaaaacg

SEQ ID NO: 134075 - DNA, 3339 bp, Homo sapiens
cgcttccagcgccgctgcgggctcttccccgctccggatgaaggcccccgggagaacggcgcggaccccacggagcgcgcggcgcgggtccccggggtcgagcatctccccgcagccaacggcaagggcggcgaggctccggccaacgggctgcgcagagccgcggcgccggaggcttatgtacagaagtacgtcgtgaagaattatttctactattacctattccaattttcagctgctttgggccaagaagtgttctacatcacgtttcttccattcactcactggaatattgacccttatttatccagaagattgatcatcatatgggttttggtgatgtatattggccaagtggccaaggatgtcttgaagtggccccgtccctcctcccctccagttgtaaaactggaaaagagactgatcgctgaatatggaatgccatccacccacgccatggcggccactgccattgccttcaccctccttatctctactatggacagataccagtatccatttgtgttgggactggtgatggccgtggtgttttccaccttggtgtgtctcagcaggctctacactgggatgcatacggtcctggatgtgctgggtggcgtcctgatcaccgcactcctcatcgtcctcacctaccctgcctggaccttcatcgactgcctggactcggccagccccctcttccccgtgtgtgtcatagttgtgccattcttcctgtgttacaattaccctgtttctgattactacagcccaacccgggcggacaccaccaccattctggctgccggggctggagtgaccataggattctggatcaaccatttcttccagcttgtatccaagcccgctgaatctctccctgttattcagaacatcccaccgctcaccacctacatgttagttttgggtctgaccaaatttgcagtgggaattgtgttgatcctcttggttcgtcagcttgtacaaaatctctcactgcaagtattatactcatggttcaaggtggtcaccaggaacaaggaggccaggcggagactggagattgaagtgccttacaagtttgttacctacacatctgttggcatctgcgctacaacctttgtgccgatgcttcacaggtttctgggattaccctgagtctcaaacagttggaaactagcccactggacatgaaagccaagacataggaaagttattggtaggcaaatcttgacaacttatttttctttaacaacaacaaaaagtcatacggctgtcttgctactaccagataaatgatgctgctgtgtgaaaggaagaactgtctcatagcggtcattggtcgtccgtggtggttggttgtgctacagttgaacccaggctaaagaccataatccggatctttaaaggcacacaccgcgccccccccccccgcgcccggcccctgctcctctcgctgttgcacgggctttggatctagtcatgggctggcaggaattgtggcctggcttaggaatagctatgagccccactgggttctggagagccagtagagatggggtgatctgggaggctggaggtagagcctttcttttccgttacaaccttgcctagcatggagttatttctaaaatgggaactttggtctaggagaaggggtggcaccatatgaaacggcattccttggacagggtgacttccttatcgtttatttggtgattttttgttttgttttgtttgagacaggatcttgctctgtttcccaggctgtattgcgccactgcactccagcctgggcgacagagcgagactctctcaaaaaaaaaaaaaaagaatttttagcaaaacatcctgtttttacttaaaattcttctcatatttattatagttagaaggcaaagatcaagatgacctgccgtttgactgcttttacatcaaactctgcccagtatttgcagcacaactcaggggaagggccttagcttacaggtactcccagccttcatctgcccctgcagagcagtggctgtcagccggatgcggcacttttctgtattttcatccacacagctgcccagccagagttcgcaacactggatatttacaccaaataattgtggttgacttgtctgaagccagctgacaaaaggatcagcttttcccacttgtattttttaaaaagagggattgtgatcattgtcacagagtggggtgctggcctctcatatatatgatatatatatatcattttatatatatatatatatcatatacataatttttactgctgtctctagttttaagtcccaacaataggaaggccgatcagctatattgatatatttaaggctgtacttaactaatttgggctgaggatgaatatatcagccacagcacattaaagaatgagccaaggatttgtcatggttggtcactttttaaagtatttgattactgcaactggagaatgaaaagtgtatattggtgacgccaacctcagtttctgagcactcctgctctgtggtgagaatcagacaaaaattcatcggggtgaaaaaaaaaaggcattacctgattcacacccttgtcttgctagccctcttccattcatttctcacacagcactttgctctgttaaatcctctctctgtctcagaccattgcttgccccttcaaagggtatggttcaggctcctttcaagacatttggagtttctctctggggaaagagagccccctactggtttggcttcagtctaggtccaccatccctctcgatctggcatcttggagattaatttaaaaggcaagctcaccacaatgtaagcctatggtctggccaaccttgcttttgggaactgtgacaccaaagcccccaggactatctgcctctccaggagccagatagaatgacatgcctttttcctaattgtccacattccacccccaacccactgccactgtgggccaagccatccatcttgcaatcttcatctaaaacagctctcatttcatgccagttttgctcaaacctgcaccgtcacaagatattcagaagatgaaaacgtagaagacacccctgaattaaaaacacttacatagcagtggctggaattactccaaaacgtgcccagtgatcgcactgtaacatgggattttctcacccaaataggcaactcatgcttcctgagtgtaatcaaagcatgtggtgttttggggccatatgcaccaggtttctattttagaaaccttcagctgtcttgcttatgtaccgtatgtaaatttattctttttaaaaatcacttttatttgattttgacttattaaatgctttaaaagcca

SEQ ID NO: 134076 - DNA, 904 bp, Homo sapiens
accgccattgtgtgggcagatggtatgtcagtctgtcaggggtgatcggtatctggaggtgacactgttgcgtcagtagcaggtacgtagaatggaacccagagtcctgcccctttccacctacatgcattacctgattcacacccttgtcttgctagccctcttccattcatttctcacacagcactttgctctgttaaatcctctctctgtctcagaccattgcttgccccttcaaagggtatggttcaggctcctttcaagacatttggagtttctctctggggaaagagagccccctactggtttggcttcagtctaggtccaccatccctctcgatctggcatcttggagattaatttaaaaggcaagctcaccacaatgtaagcctatggtctggccaaccttgcttttgggaactgtgacaccaaagcccccaggactatctgcctctccaggagccagatagaatgacatgcctttttcctaattgtccacattccacccccaacccactgccactgtgggccaagccatccatcttgcaatcttcatctaaaacagctctcatttcatgccagttttgctcaaacctgcaccgtcacaagatattcagaagatgaaaacgtagaagacacccctgaattaaaaacacttacatagcagtggctggaattactccaaaacgtgcccagtgatcgcactgtaacatgggattttctcacccaaataggcaactcatgcttcctgagtgtaatcaaagcatgtggtgttttggggccatatgcaccaggtttctattttagaaaccttcagctgtcttgcttatgtaccgtatgtaaatttattctttttaaaaatcacttttatttgattttgacttattaaatgctttaaaagcca

SEQ ID NO: 134077 - DNA, 1314 bp, Homo sapiens
cgcttccagcgccgctgcgggctcttccccgctccggatgaaggcccccgggagaacggcgcggaccccacggagcgcgcggcgcgggtccccggggtcgagcatctccccgcagccaacggcaagggcggcgaggctccggccaacgggctgcgcagagccgcggcgccggaggcttatgtacagaagtacgtcgtgaagaattatttctactattacctattccaattttcagctgctttgggccaagaagtgttctacatcacgtttcttccattcactcactggaatattgacccttatttatccagaagattgatcatcatatgggttttggtgatgtatattggccaagtggccaaggatgtcttgaagtggccccgtccctcctcccctccagttgtaaaactggaaaagagactgatcgctgaatatggaatgccatccacccacgccatggcggccactgccattgccttcaccctccttatctctactatggacagataccagtatccatttgtgttgggactggtgatggccgtggtgttttccaccttggtgtgtctcagcaggctctacactgggatgcatacggtcctggatgtgctgggtggcgtcctgatcaccgcactcctcatcgtcctcacctaccctgcctggaccttcatcgactgcctggactcggccagccccctcttccccgtgtgtgtcatagttgtgccattcttcctgtgttacaattaccctgtttctgattactacagcccaacccgggcggacaccaccaccattctggctgccggggctggagtgaccataggattctggatcaaccatttcttccagcttgtatccaagcccgctgaatctctccctgttattcagaacatcccaccgctcaccacctacatgttagttttgggtctgaccaaatttgcagtgggaattgtgttgatcctcttggttcgtcagcttgtacaaaatctctcactgcaagtattatactcatggttcaaggtggtcaccaggaacaaggaggccaggcggagactggagattgaagtgccttacaagtttgttacctacacatctgttggcatctgcgctacaacctttgtgccgatgcttcacaggtttctgggattaccctgagtctcaaacagttggaaactagcccactggacatgaaagccaagacataggaaagttattggtaggcaaatcttgacaacttatttttctttaacaacaacaaaaagtcatacggctgtcttgctactaccagataaatgatgctgctgtgtgaaagga

SEQ ID NO: 134078 - DNA, 1730 bp, Homo sapiens
cgcttccagcgccgctgcgggctcttccccgctccggatgaaggcccccgggagaacggcgcggaccccacggagcgcgcggcgcgggtccccggggtcgagcatctccccgcagccaacggcaagggcggcgaggctccggccaacgggctgcgcagagccgcggcgccggaggcttatgtacagaagtacgtcgtgaagaattatttctactattacctattccaattttcagctgctttgggccaagaagtgttctacatcacgtttcttccattcactcactggaatattgacccttatttatccagaagattgatcatcatatgggttttggtgatgtatattggccaagtggccaaggatgtcttgaagtggccccgtccctcctcccctccagttgtaaaactggaaaagagactgatcgctgaatatggaatgccatccacccacgccatggcggccactgccattgccttcaccctccttatctctactatggacagataccagtatccatttgtgttgggactggtgatggccgtggtgttttccaccttggtgtgtctcagcaggctctacactgggatgcatacggtcctggatgtgctgggtggcgtcctgatcaccgcactcctcatcgtcctcacctaccctgcctggaccttcatcgactgcctggactcggccagccccctcttccccgtgtgtgtcatagttgtgccattcttcctgtgttacaattaccctgtttctgattactacagcccaacccgggcggacaccaccaccattctggctgccggggctggagtgaccataggattctggatcaaccatttcttccagcttgtatccaagcccgctgaatctctccctgttattcagaacatcccaccgctcaccacctacatgttagttttgggtctgaccaaatttgcagtgggaattgtgttgatcctcttggttcgtcagcttgtacaaaatctctcactgcaagtattatactcatggttcaaggtggtcaccaggaacaaggaggccaggcggagactggagattgaagtgccttacaagtttgttacctacacatctgttggcatctgcgctacaacctttgtgccgatgcttcacaggtttctgggattaccctgagtctcaaacagttggaaactagcccactggacatgaaagccaagacataggaaagttattggtaggcaaatcttgacaacttatttttctttaacaacaacaaaaagtcatacggctgtcttgctactaccagataaatgatgctgctgtgtgaaaggaagaactgtctcatagcggtcattggtcgtccgtggtggttggttgtgctacagttgaacccaggctaaagaccataatccggatctttaaaggcacacaccgcgccccccccccccgcgcccggcccctgctcctctcgctgttgcacgggctttggatctagtcatgggctggcaggaattgtggcctggcttaggaatagctatgagccccactgggttctggagagccagtagagatggggtgatctgggaggctggaggtagagcctttcttttccgttacaaccttgcctagcatggagttatttctattttagaaaccttcagctgtcttgcttatgtaccgtatgtaaatttattctttttaaaaatcacttttatttgattttgacttattaaatgctttaaaagcca

SEQ ID NO: 134079 - DNA, 525 bp, Homo sapiens
agttattcattaagaaaacaaatacagaatttattccaaaaggtaaaaaaggtgaaagaagatacgtaacatgagtagtatggttgttggaagcattttttcgtattttcacttcaaagttttagaactttacactttctttgaacatgtactgtaaaataaaacaatgcaaaaattgtgttttaaatatcaaattagccatacttgattcaaattatacctgtatacaaggaaacactcattggttcacactgttcttttctctccttcccaaaggatgtgctgggtggcgtcctgatcaccgcactcctcatcgtcctcacctaccctgcctggaccttcatcgactgcctggactcggccagccccctcttccccgtgtgtgtcatagttgtgccattcttcctgtgttacaattaccctgtttctgattactacagcccaacccgggcggacaccaccaccattctggctgccggggctggagtgaccataggattctggatcaaccatttcttccagctt

SEQ ID NO: 134080 - DNA, 2929 bp, Homo sapiens
cgcttccagcgccgctgcgggctcttccccgctccggatgaaggcccccgggagaacggcgcggaccccacggagcgcgcggcgcgggtccccggggtcgagcatctccccgcagccaacggcaagggcggcgaggctccggccaacgggctgcgcagagccgcggcgccggaggcttatgtacagaagtacgtcgtgaagaattatttctactattacctattccaattttcagctgctttgggccaagaagtgttctacatcacgtttcttccattcactcactggaatattgacccttatttatccagaagattgatcatcatatgggttttggtgatgtatattggccaagtggccaaggatgtcttgaagtggccccgtccctcctcccctccagttgtaaaactggaaaagagactgatcgctgaatatggaatgccatccacccacgccatggcggccactgccattgccttcaccctccttatctctactatggacagataccagtatccatttgtgttgggactggtgatggccgtggtgttttccaccttggtgtgtctcagcaggctctacactgggatgcatacggtcctggatgtgctgggtggcgtcctgatcaccgcactcctcatcgtcctcacctaccctgcctggaccttcatcgactgcctggactcggccagccccctcttccccgtgtgtgtcatagttgtgccattcttcctgtgttacaattaccctgtttctgattactacagcccaacccgggcggacaccaccaccattctggctgccggggctggagtgaccataggattctggatcaaccatttcttccagctttcatacggctgtcttgctactaccagataaatgatgctgctgtgtgaaaggaagaactgtctcatagcggtcattggtcgtccgtggtggttggttgtgctacagttgaacccaggctaaagaccataatccggatctttaaaggcacacaccgcgccccccccccccgcgcccggcccctgctcctctcgctgttgcacgggctttggatctagtcatgggctggcaggaattgtggcctggcttaggaatagctatgagccccactgggttctggagagccagtagagatggggtgatctgggaggctggaggtagagcctttcttttccgttacaaccttgcctagcatggagttatttctaaaatgggaactttggtctaggagaaggggtggcaccatatgaaacggcattccttggacagggtgacttccttatcgtttatttggtgattttttgttttgttttgtttgagacaggatcttgctctgtttcccaggctgtattgcgccactgcactccagcctgggcgacagagcgagactctctcaaaaaaaaaaaaaaagaatttttagcaaaacatcctgtttttacttaaaattcttctcatatttattatagttagaaggcaaagatcaagatgacctgccgtttgactgcttttacatcaaactctgcccagtatttgcagcacaactcaggggaagggccttagcttacaggtactcccagccttcatctgcccctgcagagcagtggctgtcagccggatgcggcacttttctgtattttcatccacacagctgcccagccagagttcgcaacactggatatttacaccaaataattgtggttgacttgtctgaagccagctgacaaaaggatcagcttttcccacttgtattttttaaaaagagggattgtgatcattgtcacagagtggggtgctggcctctcatatatatgatatatatatatcattttatatatatatatatatcatatacataatttttactgctgtctctagttttaagtcccaacaataggaaggccgatcagctatattgatatatttaaggctgtacttaactaatttgggctgaggatgaatatatcagccacagcacattaaagaatgagccaaggatttgtcatggttggtcactttttaaagtatttgattactgcaactggagaatgaaaagtgtatattggtgacgccaacctcagtttctgagcactcctgctctgtggtgagaatcagacaaaaattcatcggggtgaaaaaaaaaaggcattacctgattcacacccttgtcttgctagccctcttccattcatttctcacacagcactttgctctgttaaatcctctctctgtctcagaccattgcttgccccttcaaagggtatggttcaggctcctttcaagacatttggagtttctctctggggaaagagagccccctactggtttggcttcagtctaggtccaccatccctctcgatctggcatcttggagattaatttaaaaggcaagctcaccacaatgtaagcctatggtctggccaaccttgcttttgggaactgtgacaccaaagcccccaggactatctgcctctccaggagccagatagaatgacatgcctttttcctaattgtccacattccacccccaacccactgccactgtgggccaagccatccatcttgcaatcttcatctaaaacagctctcatttcatgccagttttgctcaaacctgcaccgtcacaagatattcagaagatgaaaacgtagaagacacccctgaattaaaaacacttacatagcagtggctggaattactccaaaacgtgcccagtgatcgcactgtaacatgggattttctcacccaaataggcaactcatgcttcctgagtgtaatcaaagcatgtggtgttttggggccatatgcaccaggtttctattttagaaaccttcagctgtcttgcttatgtaccgtatgtaaatttattctttttaaaaatcacttttatttgattttgacttattaaatgctttaaaagcca

SEQ ID NO: 134081 - DNA, 273 bp, Homo sapiens
cggcttcccaaagtgctgggattacaggtgtgagccactgctcccggccgctggctgtgttctagtattgaggagagatgggagctgctggcagctctccgtcctggtgaggcaggggattaggggcagcacagaggaggaatttggagagtggagtgtttaagatcttcgtggagcttgctgggagatgtctgaggggtgggggcaccttctccagcatcacaccagccgccccctccgcagttctctttgatgcagtactctgaagaattc

SEQ ID NO: 134082 - DNA, 387 bp, Homo sapiens
ctgggattagagacatgaggcacgtgcttattttgtatatatagtagagacagggtttcaccatgttggccaggctggtctcaaactcctgacctcaaatgatccgcccacctctgcctcccaaagtgctggaattacaggcgtgagccaccatgcctggccacacctcagtggttttctaactgtgcccacagagctcttaggtctcagccagggtctctggaggtccctgttccatggggctcaggaagaaggagccagacgccaactgggctcttgttccctctgcccctgcctggcaatttgtgtgtttattcattcacctcaccggacaaacatgccccaggaccatgttacatgccaggcctcatgcgggtcatcagggca

SEQ ID NO: 134083 - DNA, 276 bp, Homo sapiens
gaatggctgtttttaaaaagattcttcagatgactctaatgtttagctcagggtgtgaaacactgccttagcagaactagggacaagagggaggctggagaggtttctgtaggttttcttcagtctgtttatcaggagacagtacagaatgggactctgcctttttcccccagtcgttctgatgttttgctgccaaaatagatatacctgcaatgtcttgtttgtctttatttggaaatagtagacagtattgatatggagtggatagtggagtac

SEQ ID NO: 134084 - DNA, 363 bp, Homo sapiens
gcatgagccactgtgtccagccaatttttattttaatggtattcttctttccctattattttacctggacagacttaacccagaggatagaggaacctcatcatggatcctggtccgcttttagcttaacagcatccaaagacaaagggtcagagatggtagcaaccctagtgtggttgattacacagtagtggtgttattttgttgtcataggatgcaaatatcaaagttgtatctcttaagatctttctgtgtcagtacataaaagctttctcagtctttttaatgctgcatagtattctacacagggcactattctatactttaaccagttcccattggtagacacatttttttccagtc

SEQ ID NO: 134085 - DNA, 529 bp, Homo sapiens
attcgtatctgttcacccaaaattggacacttactgtgttccagacctaatctaagctctttacatgttttatctcatttaagcctctccacaatcttatgaggtatgtatgcactgttaccattcccatgttagatatagaaaatccaggcatagagaagataaggtctcaaagtcatgaagctaacaagtggtacagccattatttgaacccagtttactccagatcccacactctaaatcacaatgcagcatggatgcctaatattctcaggtcagtccatcaacttccaagtaaatgagtctccaaaagcatcaaaggtattatttccttaaaatgattaaatacatggatttgctttcaaattcatgtttctaatactcaactataatatatcttaaatctctggaagtcctttaatcaatttttcagatgaatttttttttttttttttttgggaaaaagagtttggcagggtcacacttgtgggagggaaggggagtaattggggttcagggaaacctcggc

SEQ ID NO: 134086 - DNA, 239 bp, Homo sapiens
taatatcaggagaagcccctgggatggccttgcctgctcatttgatcaagccttcccattactcatgttttcagaaagtgctgcttgtcttcttttccatgtgccctgtgtgaaaacttaaaaagtttggagatggcagatcacgaagagccagggtaggaaagtcaatgtggttgtcttctgaacacccagcgtcttccattccagagcaggtggcagcagagagttgacactgcctc

SEQ ID NO: 134087 - DNA, 360 bp, Homo sapiens
  misc_feature (53)..(53): n is a, c, g, or t
cccggtggttccttgtcttatatagtgattcagttctctgaaacgggtttatngtccccattttaaagaagcagaaacagggctgcgcgcggtggctcacgcctgtaatcccagcatttgagaggccgaggcgggtggatcacctgaggtcaggagttccagaccctgttactccctgttcctgggaatattcactcagaatctggaaaactgtatatccccgacattacagaaggggttcctgcgtgaggtgagaaggagacagagaggtgatctctcaaaggtctttcagttgtatgattcagggtgtccaggttcccatagggatcattagggtttgattatagacaaagggaaaca

SEQ ID NO: 134088 - DNA, 228 bp, Homo sapiens
tctatactttgccactcctcccacctgtaagaatttacaagtccccatatgtgctgagcagtctctcccactctgttttagtttctgtcatgtcctccatggggcatgtcctccttctacttgtctgtctggccaatctgactttattttaaatctgagataaactgtgtcctgtctgaaaccttccctgatttttttcaaggtagaagtcatcatatcttttttttt

SEQ ID NO: 134089 - DNA, 910 bp, Homo sapiens
gatgcatcttatttctttataatgatctgggtttaaaccttgaaatcaagtcccagaaacacaaactttatgaatcaaatacttattataaatattaatgtaattgtcagaaaactggtagaataagaactttttcttagataaaaataaaaactgtgtgtgttgaatttgaaattagtcgccctttatacgtggggatatgttccaagaccccagtggatgcctgaaacctcagatagtaccaaacttcattgctgtcggttgaaacacatttctcatgtcttccactcatgtatttaatgccttttccatcttaactaataggcatttatcacgtttctttttccttctttataatttcatagatagaacatcgtttcttaccatagtaacctcagcgtaggatttttcctttcctgttcaagttaagaacgtttatcttttcacttaaagaaagcagtttatgccttctctttggcatatttaaattgccagcatcatttgcactttggggctattattaaataaaataagagttacttgaacacaacactgagatatcctgataactgagatctggtaactgagatggctgcctaagtgactaaagggcagatagtgtacacaatgtagatgcactgggcaaggggatgatttacgtcctgtatgggctggagtagggtggtaggaggtttcatcatgctactcaaaatggtgtgcagttaggttggtacaaaagtaattgtggttttgccattttaatgacaaaaatcacaattacttttgcactaaattagtatatgaactgtttatttctggaatttttcatttaatatttttgggctacagttgacctcaggcaactaaaacctcagaaagggaaattgtggataagggaaggactactata

SEQ ID NO: 134090 - DNA, 382 bp, Homo sapiens
caaaacaaccagttaaagtttggtgttcgcttctcacaaggcttgagatgtcctgtgctcaaaaccaggcaccaggaaggggagtggacaaagcaacaggaacagaggcggcagcagcaaagctggctctggaaaaatctttcaccttgcttcgctctatgggcttttcattccacagacatgcctgtacttcccattcacactagagcagtgagagagaacacaggtcctggagccagttgactgtggttcaaatcctgccacaccccttgctaactaggtgatcttagacaagtatttcacctcttggtatctcagtttcctcatctgaaaaatggggttgttgtaaggactaaacaatttacatgagacagcacatgta

SEQ ID NO: 134091 - DNA, 266 bp, Homo sapiens
agtttatcgatgccacttgccgggtggtcttgggtgaattacttaaccacccttagcctttttttctctgctgtagagtgactaacagagccttcgaacagggtctgggtagacttgggggcggtggagagtatctcgaagactttccaaaggcttcgaaagcacatgggtggttttaagagaagcagtgtgcagattcccaacctccactttctccctgatacggtttggaactgtgatctcacccaaatctcctgtcgaatggt

SEQ ID NO: 134092 - DNA, 355 bp, Homo sapiens
ctctactgaataaaagcagagtgacttacaattgagataggccaatctaaaactgaaaagtctaaaatgtcaaacttttaaaataaggggatgttcactgcttatttgactcattaaaaataaaaatacctagtgattgtgaatttaaaactgtagacttatgatttgtgcattttatatatgttattcttcaattagaagttcaagaaataataatgggaggcctgtattaaaccatttatataaaagtttctcaaccataatggaaagatcaagatgtctagcataatttgaaagtatgtttctatttgacagaaaccttggcttggaaaagttaaactctaaatatttgtac

SEQ ID NO: 134093 - DNA, 521 bp, Homo sapiens
ttattggttgtctggtagaatatagcatccattaattttcactgaatctgaaatactaggaacttaaaggcaccagtgaaagtactgggatatgcctaaacaataagagatagtcaaagttaaacacacagaaatattttctgccattcacctatgctctcctactgtaccccatccatttttactttccaaagaataaaggcaataaaattatccctccaaaatttgattgctagtatcaatggggatgtgtgagaatgtgttttacacagctaaaagcatctgtaagtatgtatttggaaaggtatcctaaaacatttattactccttaatattaaatgctcagtttttttgtttgttttgttttgttttttgagatggagtcttgctctgttgcccaggctggaatgcaatggcacgagctcagctcactgcaacctctgcctcctgggttcaaccgattctcctgcctcagcctcccgagtagctgggattataggcgtgcgccaccatgccccact

SEQ ID NO: 134094 - DNA, 257 bp, Homo sapiens
tttccagcttttgtgctcctaatctctatgcctttattcatcctttctaatatttcactcctacacattaactaaaactgtttaattaatggcagattcctcagtgaccaaattgactccctcattttgtatcccttctcctagaacgatctgtgacattaaattccaccattcatgctctgtatttttcattgcctttattgacgtctgtgaccataggacactttgctatgcctactttttaatttttcaccacc

SEQ ID NO: 134095 - DNA, 161 bp, Homo sapiens
tacacaaagaatttatgactaacatctcaaaaacaaatccaacaaaaaacaaaaatagacaaaagtgacttagtttaactgaaaaacttctgtacagcaaaggaaataattgagagaacagacaacctaacaatgggagaaaacatctgtaatctatgcct

SEQ ID NO: 134096 - DNA, 258 bp, Homo sapiens
cgactttctaatttgtaaagtgaaataattagtctgactaagcatccctttcattctgtaagtttaagcaagctgtgtgtcttaacggtagtgacaggtattcacgagttgttttgcgatgaaaagtgaagtgactggcttctgtttaatggctagaaaaccaagtgggagaattaaacaactgttaatgagttaatctgcaggtttaacaagattttttactttaggagtcgtttgctggtactctttaagcttttt

SEQ ID NO: 134097 - DNA, 450 bp, Homo sapiens
  misc_feature (442)..(442): n is a, c, g, or t
gactccactgggggttaactgtgcagccacagcttgttgctctatttattataatccacataacactgcgtttcatgtttgtctctcccaccagcacctaaaatccctaaaggcctgtaacttatttctctatcctagtgcctatcacagtgcctggcacctagtaggaactgtggcatggatatttcaatgaagaaaatctctttgttttcctcccagagtgctggctcttgcttgcttacttggcttattatgggttttgtattttacagcatcgacagtataaaaagagcaagacatttctgaagcataattaaatggatgaatgcataaatagatagaatcctcctggccccttagacgctctctcggtggggacgctctctcggtgggtaaagcaagacttgagggaatcgtgagcaaatgggcacatccgtacggncccggggt

SEQ ID NO: 134098 - DNA, 263 bp, Homo sapiens
tcctttccctgggccatcaagacatacttcctgaaatcttaaagacataatctctactcttatttatttatttagagacagagtctcactcttgtcaccaaggctggagtccaatggcatgatctcagctcacaacaacctccgccttccgggttcaagcaattctcctgcctcagcctcccaagtagctgggcttacagcagccaccgccacgcttggctaagttttgtatttttagtagagatggggtttcaccatgttgg

SEQ ID NO: 134099 - DNA, 268 bp, Homo sapiens
gctacttctctcattttacaggtgaggaaaatgatactctgaggggttaagtaactgtacagtcatatagctatgtaggcagtgccaatattcaaagtcatgaatgtctgagacattaactcaagcttttaggctaaggtgggaggctcgcttgagcccagctgctcaagaccagcctgggcaacatggcgagaccccatttccacatgcatacatatatgcatacatacataactcaagcttttatcctgaggagaagatagtgaca

SEQ ID NO: 134100 - DNA, 901 bp, Homo sapiens
gcagagatttgtatgttactgaagttaaactggtataaatacaaattagaatgttacaactttaagatgttacatttaactgcaaagaaaatagcaatcaaatatatagctatttaacaaaaagaaatgagaaaggaatttaaacatgtcactacaaaaaatcaaccaaacaaaacaagacagtaatgcaggaaatgagagacaaaaaagctataagacatgtagtagaaaatagtagcaaaattacagaagtatcttacaaataattactttaaatgtaaatgtattgacccctctaatcaaaaaacagagattggtagactggattttaagaaaccatgatccaactatatggtatctacaagagactcactctagctgcaaagacacaaataggttgaaaatgaaaggatggaaagggtatttcacacaaatagtaaccaaaaaagagcaagagtggctaaactagtatcagacaaaatagactttaaatcaaaacatgcttacaagagacaaagaaggacattatatattaataaaaggttcaatacagcaagatataaaaattatacatatttatgtacctaataacagataatcgaaatatatgattgaaaggagaaaaagacagtctatgataatagttggagacttcaacatctcactctcagtaatggttagagcaaccagacagaagataagtaagaaaacagaggacttgaacgtacagtaaaccaactggatccaatgggcatacagaacattctacccaacaacagcaggatacacattcttctcaagtgcacttggggcattttccaggaccatctgttaggctgctaagtaagtcctaatagattttaaaaggtagatatacaaacatctgtctgaccacaagata

SEQ ID NO: 134101 - DNA, 395 bp, Homo sapiens
ctgcttcagctgctgggacagcagttggatgccagtcatcagccatcagttccttcaggtatgacccgagctgcgggagctgccttgcccaaggtcacgcacttgcagagactgaccacatccaaggactgatccaagaggaggcacaaacatctggcttgctctgcccaaggtggaatgattctgatgggccatttttaccttcagagctccccttgggatccgaagaggctttggttgggcctgcagtatggatgcacttctctctgtgcccactcctgcttccctcccttccattcctcaggggttaattctaagtaaatgtcatgcacactaaaatccatctcagagtctgtttcctgtggatcccaatctgaaaagacatttctaactag

SEQ ID NO: 134102 - DNA, 741 bp, Homo sapiens
ttgagccatggcaccaagaggaatgggtgtgtttatgaaatcaaatttagttcataagaatattccatcctttgattgtgctgaacatgggttggataaatcaagggtcaaatcatgtcctgtgcaaccttgtagttgcagtaaaagcttaatgtagcacaagtgtgagtcccttctcctaacagcagcttcataaagggaatctactatactcaccaaagcaaacaaaaaaacctccaagcttttaaaactcttctcttgagtttctatgctaaagctaaatgtgtttcttttacaaaaggaatctcctacggggaaatctgaagcaattgggtcacttctttgttttattccagtagttgttcttttttgccatttaaaaggcatgtcccagatttatcaattagaggtttgccttactatgtctcactgacatataaatgcacagaagtttcaagccaaacttgacatgactatgggaagagaagagaaatgcctgattttcaacttctatcttgagagcattgtgtattcttaaaatggtcctaatcacctctgtctcctatatgcaacattttattagctagtcctggattgaggactttaaaatgtttgatgtggcttgctctaaatagagagagtcatacctttcctaagctcctccagattcagttgattaaagcagcttgctttagtaattatatttcaaaataatctattttcacttatttttaacatata

SEQ ID NO: 134103 - DNA, 510 bp, Homo sapiens
atttggaaaaagcatattttcaggtatgattaagttaaggatcttgaggagagattatcctggattgtctccgtgggcattaaatcctggcacatatatccttataagagggagataaaggagatttaacttcagacagaagagaaggaggccctgtgaccaagaaggcagagcctggagtggtggagctgcaagccaatgaatgccagcagccatcagaagctgcgcaagtcaaaggatggattttcccctcagcctctgagagcactggctctgctgagacctagatttcagcccagtgatactgattttggacttctgatatccaaaactgtgagaaaataaatttctgttgttttaagtcaccacatttttggtaatttgctctaacagccacaggaaagtaacatacatgcctacctgggtccagttgtgtcctgtgactcctgctttcctgggacaggcaggctgctccgtgcctcctggccatcctactgggtgctggacgct

SEQ ID NO: 134104 - DNA, 2871 bp, Homo sapiens
tctttgagaaatgtgaactggctacatgctctccccgtgatggggccggagctgggctggggacaccccgcggcggcgacgtctgctcctctgattccttcaacgaggacaacactgccttcgccaagcaggttcgctctgagaggcccttcttctcctccaacccagaactggacaatctgatgatccaggcaatccaagtgctgcggttccacctgctagagctggagaagggaaagatgcccatcgacctggtcatcgaggatcgggatggcggctgcagggaggacttcgaggactacccagcctcctgccccagcctcccagaccagaataatatatggattcgagaccatgaggatagcgggtctgtacatttggggaccccaggtccatccagcggggggctggcctcccagagtggggacaactccagtgaccaaggagtcgggctggacaccagcgtggcctctcccagttctggtggagaagatgaggacttggaccaggagccacggcgaaacaagaagagggggatcttccccaaggtggccaccaacatcatgcgagcctggttgttccagcacctctcacacccgtacccctcggaggagcagaagaaacagctggcgcaggacacggggcttaccatcctgcaagtcaacaactggttcattaatgcccggagacgcatcgtgcaacctatgatcgatcaatccaaccgcacagggcagggtgcagccttcagcccagagggccagcccatcgggggctataccgagacagagccacacgtggccttccgggctccagcatcagtggggatgagtttgaaactcggaaggagaatggcattatctatagaggctgatgcgggagagacccagcctccggctgtgacccccagcctcacacctggctctggttcccgcctggtcctctggcttcaggatcccacctccaaaggcctctccgctcaacgcctacctccctagggccctgctgggacatgggggcctgagtgcccacccaaggggctctcaaggacaccggcaaggcctccaggctctgagccccgcttctgccttcacctctgcctgggacccgagctgggctcctgggccttggtccccagaagatggcagctagggcctcgccgcgaggacagagaagggacagggtggctgggcagtcagggaaggagggtcgcccggatccgacattttggagagattctttcaccctcctgtcccccccacctcccttctctaatttcttctttttttaatgataaagtcttaaaacacagaaaaaaaaaagacttcagagaattaggtagatgaagcactttatacagtatatatcttcagcttaaatttgttttgagtattttttttatttttaagtaggcaaagatttaaaattttttatttttagtaaatgtttgaagcaaactaaaaagacgtgggcaatatttaccaaaacaaaacagaacccaaaaaattgtacatcttgatcttagcaaatatccttattgtagagacacttaataaagagatggtattttaatatctgcagttctgaggtagggtgtaacttagttctacattgtgatttaggaatttttaaacctttcttcttcaggggagaagtgacccaggcctcgagtttagtgctaaagccactagtgtacttatgctgtcacctaaccaccacatgcgacatggaggcagaggctaaatataggggctttcttaagaaagtgagaggaaattagcaagcattattagtgtttgactactgctatcaagtgaattcaaaggaaacaggtttttatgccatatttaagttacagaaaccaggcatgcttagaatagtttctaaggtgacagagtgagactccatctcaaaaaaaaaaaaaaaaaaaaagaatagtttctagaggttattggagaatagaaagctaagaaaacttggtatacatttacaattgaaatataattacactttttactctcagaatattattcagattagacttcctgtttatcttttatattcttgcattgatataatgcctgatccttcaaagttctttcacatattatatgatcttctttatgaaaaaaagtagatgctttattctgatatattcagtttcccactttaggcaaaagtggattaatagaatgatgaattcaaagtagatgaggaaaatcaggcacagagaagtaaaggtaggtacagacccaaattcacacaagataatgacatcaccagcgtttaagttgatcatcaaaggctgggctggatttgtcttgctgtatgtgtcaggaaatttatacctattacattttccattttctcaaaataagtcacatgattgtaatgtttagctgcaacttttctcctaataaatagtgtcatgaagaatgttatagtgcgaagtttgtacatttcagggtcagttatacaatgtgaactctttatctacgggaatgagaatggaggatcattgaaggccatgatataaacaaatttgcatgttgaagcctgtataaaacatggtacagtgagtgaatgcccccatccccaagaacactttatacatattaaatggatatatgattactgtgcaaaaattcattctggaaatgaacatatatttgagcactaatatgtaatgtacatcttctgccctaaggagaaaataaatcataaaacttgttttacattcaaaattactttcccgagcatgtcttagagtaatctacgtgttgatgtatgtaaattgtattttaggtaggcaaagaaacaagtctggttatttatgtaaaaactagtctaataaagtgagtggctttatcactt

SEQ ID NO: 134105 - DNA, 2430 bp, Homo sapiens
tctttgagaaatgtgaactggctacatgctctccccgtgatggggccggagctgggctggggacaccccgcggcggcgacgtctgctcctctgattccttcaacgaggacaacactgccttcgccaagcaggttcgctctgagaggcccttcttctcctccaacccagaactggacaatctgatgatccaggcaatccaagtgctgcggttccacctgctagagctggagaagggaaagatgcccatcgacctggtcatcgaggatcgggatggcggctgcagggaggacttcgaggactacccagcctcctgccccagcctcccagaccagaataatatatggattcgagaccatgaggatagcgggtctgtacatttggggaccccaggtccatccagcggggggctggcctcccagagtggggacaactccagtgaccaaggagtcgggctggacaccagcgtggcctctcccagttctggtggagaagatgaggacttggaccaggagccacggcgaaacaagaagagggggatcttccccaaggtggccaccaacatcatgcgagcctggttgttccagcacctctcacacccgtacccctcggaggagcagaagaaacagctggcgcaggacacggggcttaccatcctgcaagtcaacaactggttcattaatgcccggagacgcatcgtgcaacctatgatcgatcaatccaaccgcacagggcagggtgcagccttcagcccagagggccagcccatcgggggctataccgagacagagccacacgtggccttccgggctccagcatcagtggggatgagtttgaaactcggaaggagaatggcattatctatagaggctgatgcgggagagacccagcctccggctgtgacccccagcctcacacctggctctggttcccgcctggtcctctggcttcaggatcccacctccaaaggcctctccgctcaacgcctacctccctagggccctgctgggacatgggggcctgagtgcccacccaaggggctctcaaggacaccggcaaggcctccaggctctgagccccgcttctgccttcacctctgcctgggacccgagctgggctcctgggccttggtccccagaagatggcagctagggcctcgccgcgaggacagagaagggacagggtggctgggcagtcagggaaggagggtcgcccggatccgacattttggagagattctttcaccctcctgtcccccccacctcccttctctaatttcttctttttttaatgataaagtcttaaaacacagaaaaaaaaaagacttcagagaattaggtagatgaagcactttatacagtatatatcttcagcttaaatttgttttgagtattttttttatttttaagtaggcaaagatttaaaattttttatttttagtaaatgtttgaagcaaactaaaaagacgtgggcaatatttaccaaaacaaaacagaacccaaaaaattgtacatcttgatcttagcaaatatccttattgtagagacacttaataaagagatggtattttaatatctgcagttctgaggtagggtgtaacttagttctacattgtgatttaggaatttttaaacctttcttcttcaggggagaagtgacccaggcctcgagtttagtgctaaagccactagtgtacttatgctgtcacctaaccaccacatgcgacatggaggcagaggctaaatataggggctttcttaagaaagtgagaggaaattagcaagcattattagtgtttgactactgctatcaagtgaattcaaaggaaacaggtttttatgccatatttaagttacagaaaccaggcatgcttagaatagtttctaaggtgacagagtgagactccatctcaaaaaaaaaaaaaaaaaaaaagaatagtttctagaggttattggagaatagaaagctaagaaaacttggtatacatttacaattgaaatataattacactttttactctcagaatattattcagattagacttcctgtttatcttttatattcttgcattgatataatgcctgatccttcaaagttctttcacatattatatgatcttctttatgaaaaaaagtagatgctttattctgatatattcagtttcccactttaggcaaaagtggattaatagaatgatgaattcaaagtagatgaggaaaatcaggcacagagaagtaaaggtaggtacagacccaaattcacacaagataatgacatcaccagcgtttaagttgatcatcaaaggctgggctggatttgtcttgctgtatgtgtcaggaaatttatacctattacattttccattttctcaaaataagtcacatgattgtaatgtttagctgcaacttttctcctaataaatagtgtcatgaa

SEQ ID NO: 134106 - DNA, 1159 bp, Homo sapiens
tctttgagaaatgtgaactggctacatgctctccccgtgatggggccggagctgggctggggacaccccgcggcggcgacgtctgctcctctgattccttcaacgaggacaacactgccttcgccaagcagtatggattcgagaccatgaggatagcgggtctgtacatttggggaccccaggtccatccagcggggggctggcctcccagagtggggacaactccagtgaccaaggagtcgggctggacaccagcgtggcctctcccagttctggtggagaagatgaggacttggaccaggagccacggcgaaacaagaagagggggatcttccccaaggtggccaccaacatcatgcgagcctggttgttccagcacctctcacacccgtacccctcggaggagcagaagaaacagctggcgcaggacacggggcttaccatcctgcaagtcaacaactggttcattaatgcccggagacgcatcgtgcaacctatgatcgatcaatccaaccgcacagggcagggtgcagccttcagcccagagggccagcccatcgggggctataccgagacagagccacacgtggccttccgggctccagcatcagtggggatgagtttgaaactcggaaggagaatggcattatctatagaggctgatgcgggagagacccagcctccggctgtgacccccagcctcacacctggctctggttcccgcctggtcctctggcttcaggatcccacctccaaaggcctctccgctcaacgcctacctccctagggccctgctgggacatgggggcctgagtgcccacccaaggggctctcaaggacaccggcaaggcctccaggctctgagccccgcttctgccttcacctctgcctgggacccgagctgggctcctgggccttggtccccagaagatggcagctagggcctcgccgcgaggacagagaagggacagggtggctgggcagtcagggaaggagggtcgcccggatccgacattttggagagattctttcaccctcctgtcccccccacctcccttctctaatttcttctttttttaatgataaagtcttaaaacacagaaaaaaaaaacttggtttgagaatccttttatctttaagagcgcaagattaaactgct

SEQ ID NO: 134107 - DNA, 2663 bp, Homo sapiens
tctttgagaaatgtgaactggctacatgctctccccgtgatggggccggagctgggctggggacaccccgcggcggcgacgtctgctcctctgattccttcaacgaggacaacactgccttcgccaagcagtatggattcgagaccatgaggatagcgggtctgtacatttggggaccccaggtccatccagcggggggctggcctcccagagtggggacaactccagtgaccaaggagtcgggctggacaccagcgtggcctctcccagttctggtggagaagatgaggacttggaccaggagccacggcgaaacaagaagagggggatcttccccaaggtggccaccaacatcatgcgagcctggttgttccagcacctctcacacccgtacccctcggaggagcagaagaaacagctggcgcaggacacggggcttaccatcctgcaagtcaacaactggttcattaatgcccggagacgcatcgtgcaacctatgatcgatcaatccaaccgcacagggcagggtgcagccttcagcccagagggccagcccatcgggggctataccgagacagagccacacgtggccttccgggctccagcatcagtggggatgagtttgaaactcggaaggagaatggcattatctatagaggctgatgcgggagagacccagcctccggctgtgacccccagcctcacacctggctctggttcccgcctggtcctctggcttcaggatcccacctccaaaggcctctccgctcaacgcctacctccctagggccctgctgggacatgggggcctgagtgcccacccaaggggctctcaaggacaccggcaaggcctccaggctctgagccccgcttctgccttcacctctgcctgggacccgagctgggctcctgggccttggtccccagaagatggcagctagggcctcgccgcgaggacagagaagggacagggtggctgggcagtcagggaaggagggtcgcccggatccgacattttggagagattctttcaccctcctgtcccccccacctcccttctctaatttcttctttttttaatgataaagtcttaaaacacagaaaaaaaaaagacttcagagaattaggtagatgaagcactttatacagtatatatcttcagcttaaatttgttttgagtattttttttatttttaagtaggcaaagatttaaaattttttatttttagtaaatgtttgaagcaaactaaaaagacgtgggcaatatttaccaaaacaaaacagaacccaaaaaattgtacatcttgatcttagcaaatatccttattgtagagacacttaataaagagatggtattttaatatctgcagttctgaggtagggtgtaacttagttctacattgtgatttaggaatttttaaacctttcttcttcaggggagaagtgacccaggcctcgagtttagtgctaaagccactagtgtacttatgctgtcacctaaccaccacatgcgacatggaggcagaggctaaatataggggctttcttaagaaagtgagaggaaattagcaagcattattagtgtttgactactgctatcaagtgaattcaaaggaaacaggtttttatgccatatttaagttacagaaaccaggcatgcttagaatagtttctaaggtgacagagtgagactccatctcaaaaaaaaaaaaaaaaaaaaagaatagtttctagaggttattggagaatagaaagctaagaaaacttggtatacatttacaattgaaatataattacactttttactctcagaatattattcagattagacttcctgtttatcttttatattcttgcattgatataatgcctgatccttcaaagttctttcacatattatatgatcttctttatgaaaaaaagtagatgctttattctgatatattcagtttcccactttaggcaaaagtggattaatagaatgatgaattcaaagtagatgaggaaaatcaggcacagagaagtaaaggtaggtacagacccaaattcacacaagataatgacatcaccagcgtttaagttgatcatcaaaggctgggctggatttgtcttgctgtatgtgtcaggaaatttatacctattacattttccattttctcaaaataagtcacatgattgtaatgtttagctgcaacttttctcctaataaatagtgtcatgaagaatgttatagtgcgaagtttgtacatttcagggtcagttatacaatgtgaactctttatctacgggaatgagaatggaggatcattgaaggccatgatataaacaaatttgcatgttgaagcctgtataaaacatggtacagtgagtgaatgcccccatccccaagaacactttatacatattaaatggatatatgattactgtgcaaaaattcattctggaaatgaacatatatttgagcactaatatgtaatgtacatcttctgccctaaggagaaaataaatcataaaacttgttttacattcaaaattactttcccgagcatgtcttagagtaatctacgtgttgatgtatgtaaattgtattttaggtaggcaaagaaacaagtctggttatttatgtaaaaactagtctaataaagtgagtggctttatcactt

SEQ ID NO: 134108 - DNA, 100 bp, Homo sapiens
tatcattcttctgctcagggaaattttattctattatttaattttatagctcatctttaccttcacaacttttatcttcatgataatcttttcaactaat

SEQ ID NO: 134109 - DNA, 348 bp, Homo sapiens
atcactgtgtcgacggctcagtattgagaacactgttatcaagctgaaatgttaaagtaataagaaaatattgtaaaacttcaagcgataggccaggcacagtcgctcatgcctgtaatcccagcacgtttggaggccgaggcaggcggatcacttgaggtcaggagttcgagaccagcctggccaacacggagaaactccatctctactaaaaatacaaaattagccaggcatagtggtgcatgcctataatcccaactactcgggaggctgaggcaggagaatcacttgaacccgggaggcagaggttgcggtgagccaagatcatgccaaactctgcctcagaaa

SEQ ID NO: 134110 - DNA, 388 bp, Homo sapiens
ctggtcctccctgctgccccagctccactccctggaggggatcacagcagtttctttttgacatttatttccagatttctaaatgacacatttctgctgctatttctagtcgtttccatttaggatgttacttccctactttctctgggacacatcagctcatctcttccttccttgttccatcctcctgatggagttatgtcactgtttattgtttttaatcattgagtgtttacctaattgcgggtgacgtgaatatgcatgagctaccatgattgcattcccttgttggcacaacttttgggtttccttggagttaatacattgtgattgtttaaatcagtttcctagatgtcttgtctcaaatttactccagtttcctcttccc

SEQ ID NO: 134111 - DNA, 1016 bp, Homo sapiens
acaggccgacagatagaggaccgtgtggccctgctcctctctgaggaagtggaattgtctagcacgccaccacttcctgccagcaggattttaaaggaagggtgggaaagagcgggccagtgtcctcctccacctgaacgcaagcagagctttctgtgggagggcagcgcactgactggggcctgggccatggaggacttctacacggccaggctggtccctcctctcgtgccccagcggcctgcccagggccttatgcaggagcccgtgccgcctctggtgccacctgagcactcagagctgagcgagcgaaggtcacccgctctccacggcacccccactgcaggctgtggctccaggggcccgtcgccttcggccagccagagggagcaccaggccctgcaggacctcgtggacctggcgagggagggactgagcgccagcccgtggcccggcagtgggggcctggctggctcggaagggactgcagggttggacgtggtgcccggcggccttcctctgactgggtttgtggtgccatcgcaggacaagcacccggacaggggcggccgcaccttggtaagaactggctctggcccgcgctctctggtcccggccatcccacttgccatgtgtgtggtggggttggctcaccgctggcctctggcccccaacgcaagtgcagtggcctctcaaggcctctgctttccagaaggctgccacatcctgacatccgtgagcagagccacggacccacagccacctcagcgcccctctgggggctctgccacgagacttctgccttttctgtctgtgactccatggggcaccttggggttgaggccccagagcctgccctgtcctgggtcccaggagtgtagagggaccacagtttctcagcgcggttgccccatccaggcacgctctgctcgttcctcagtagttgggagctcaccaagggcttgctctccctcccctctgtgcgggtcctgggctccagagcacagctgagcagc

SEQ ID NO: 134112 - DNA, 722 bp, Homo sapiens
  misc_feature (454)..(454): n is a, c, g, or t
  misc_feature (576)..(576): n is a, c, g, or t
gatcttcggtggtggagacggggtttcaccatgttggccgggctggtctgggactcctggcctcaggcagtccacttgcctcagcctcccaaagtgctgggattataggcctaagccaccgtaaccagccagaattttttttttttttaaagcaccagaacatgggggaaagattgtgtctttaacaaatggtgctgagaaaactgtataaccacatacaaaagaatgaagttggacccttaccttacaccatatacaaaaacacaaaacttattaaagattaaacataagacctgaaaaaaaaaaaaaaaaactctcgaactagtttcctcttcttcttcttctcagatgtgccgaagggaaaaagggccaggggaaaagaagggtggctccgggccccagctgtgtcgtgaaaaagcagggggctaaaaaggtgggtgaacccccgtgtttngggaaaagggcctaagattttgggcttgggacgggacttccagcccaaaagagacctcacccgttttgtgaaagggccccgttatatcaggttgcaggggagagagccatcctcttataagngggctgaaagtgcctcctgggattaccagttcccccaggcctgtggaacggccacaaggtactcagctgtttaggtggcccacaagttcgaccagaagacagcagagaaaagcggactgttggccgggcgaaaaaaggtgttgcag

SEQ ID NO: 134113 - DNA, 313 bp, Homo sapiens
caaatggtgctgagaaaactgtataaccacatacaaaagaatgaagttggacccttaccttacaccatatacaaaaacacaaaacttattaaagattaaacataagacctgaaactatagtgctcctagaagaaaacatggggaaaagcttcatgacaatggatttggcaatgatttcttggatatgacagcaaaacacaggcaacaagacaaaagatagacaaatgggtttgcaacaaacttaaggatagctatacagcaaaagaaatgaccaacagtgaaaaggcaacctacagaatggggaaaaaaaaag

SEQ ID NO: 134114 - DNA, 631 bp, Homo sapiens
  misc_feature (525)..(526): n is a, c, g, or t
  misc_feature (528)..(528): n is a, c, g, or t
cattatactgaacaagccgaacccgtgggatgtaactataaaaaacaattttttgtccacgactagcctttaaagttactctgtagccatagttaatgttcctgaactttcatttaggctaatgatcatgactttggtcactcccaagttataaaaacaatctgacttttaaaactgaaagatccagctgggcatagtggctcccacctgtaatcccaacaatctgggaggctgagacagaggatcacttaatcccaggagctggagaccagcctgggcaacatagggagaacccgtctctacaaaaaaatttaaaaaaataaaaaaacttagccagatgtggtggtggcggggagggtgttacttacctcacatcagtgctaataagaggtcagtgtcaataaggggtagatctgtttccagaacagatctgcctaatcccaaagttgatgccactttattcacaacaaaatgcctccatgagcacattcttcgaaaaatcattctcattcatttttttattannancacaattgtaaccattatactgaacaagccgaacccgtgggatgtaactataaaaaacaattttttgtccacgactagcctttaaagatactctgtagccata

SEQ ID NO: 134115 - DNA, 373 bp, Homo sapiens
actcagtcatggaacctgggtcctgcctccagctctggcactaatatgtcatgcaaatttcacagctttgcaagagcttttgttaaatcaagggttgaatgatcccttagagctttcccaactctatgattatcaagtatgtttttcagctaacgaaaaacagaaaaaaaaaatgtgagaactagaagagctggggtctttcattagattttctagaaataagaggttcttgtaagaaactaagactaataataggatacttacaagatcacagggcattttgaaaagcaatttaaacttaaactgcaggtgatggagaagaaattgtaaaatacaaactgaattttaaaaaatcctaacaattaataaactt

SEQ ID NO: 134116 - DNA, 314 bp, Homo sapiens
cagacttggattgcctcataggaataaggagtccttggacagcatagtatatgcttttacccaacaatccagtacaatatcatgattaacctatttaaattatacattccctcagttactctactggcttgcctaatgtttcacagtgtctaatggaaattctacatatactaacaatgggaccgtataggctaatttaaatgtcacatctttggttactggttgaagatattatttattataacaacatcaaataatgtttggtggtagaatctttcatggggtctgtgggggaaaagtcaggaagagagaca

SEQ ID NO: 134117 - DNA, 507 bp, Homo sapiens
tgactctagacgatcccgttatacttgctctaatgtgcacgccatggagctgttatggctcgatcttggatagctcaagctgtcctcccacctcagcctcctgagtagctgggactacaggtgtacaccaccatgctcggctaatttttatattttttctttgtagaaatggggttttgccatgttacccaggctggtctccaacttctgagttcaagtaatctacctgccttggcttcccaaagtgctgggattacaggtttgagccactgcgcctggcctatactagcttttgaattcctggaaaaaatataaaatgacagtatcaatttatctgactttttctcttttttatattaagccctccatcaagtagaaattgagctctttcatgcagggtatgatgcttcatgcttgtaattccacctctttgggaggcctaggcgaggggatcaattgaggcctggagttcaaggctgcagtgaggtgtgatcccatcattgcagt

SEQ ID NO: 134118 - DNA, 188 bp, Homo sapiens
tccacttctttgattattgtttatatttgggaaagctggaggagcatggttttgagccttttcctgaatccaagtttttctagcatgcgatcgttctgtagacaaggcgctgtgtctcggagtccgcggcgaccgtgcccgctgggagcgtctcccaagtccagcaaaatgtgcaactggttttatgg

SEQ ID NO: 134119 - DNA, 680 bp, Homo sapiens
gagataggagtccaacttcatcattttgcatgtaggtattcagacgtcctagcactatttgttaaagagactattctttacctatttaatggtcttggcattcttattgaaaatcagttaaccatacgtatatgggtttagtttggggcccacgattctatttcactggtctatatgtctgaccttatgtcagtaccacactgttttgaatactgtagtaaattttgaaattggaaaatatgagtccttccacattgttcttcttttttagtattgttttggctcttcaggaccttttgcaattccatataaatttgaggatcagcttttcagtatctgcaaaaatgcaattagaactttgacagaagggctgggcatggtggcttaggcctgtaattccagtgctttgggaggctaaaatgggaggatcacttgagcccaggagttggagaccagcctgggcaacatagcgagacccccatctctataaaacattaaaaaattagcagggtatggtggtgcacacctgtagtcccagctacatgggaggctgcattgggaggatcacatgagtccaggagttggaggctatggtgaactatgattgaaccactgctagattgcactccagcctgggtgataaagcgagaccccactccccacctgccgccaaaaaaaaa

SEQ ID NO: 134120 - DNA, 278 bp, Homo sapiens
cattagtcctatctctttaggggccatttcagatttttcttgacagtcttattttattcactctggttcagtgttgccaacccaacaattctcagccaagcctccaaaggaaatacaatctgcttgctgcgtcagatcacttggaaacagatacgattggcttggagtcactccatgcggggctgtaaaattgttctctccttctaagtgggttgggttaagcccaagctgaggcaagagatttccaaggaatacagagcagaggactgtagtaagtg

SEQ ID NO: 134121 - DNA, 235 bp, Homo sapiens
gatgaggctgtctcaggcacaccaggatgtgtggtcacttaaattacacaacttcttaactctgacagaatggtgcctgcccttgtggagtctacagtccactggatgggagacaagaaagtggcaatgctaatgcagcatgccaagtgtcaggacatgggggttttaagggaccatgagaagttgggagcacagagaagggcccctgatttggtctctgggggtcagggagggc

SEQ ID NO: 134122 - DNA, 295 bp, Homo sapiens
gcagtgagctgagatggcaccactgcagtccggcctgggcgaaagagtgagactccatctcaaaaattaattaattaattaattaattaaaaaataaaacaacactgtgatgttaaggccctattttccaggatttatcatgattggttttattgagtaaagcctgggcaaaagacttaggtgtcaatttcgaaagactcatttaagtatctttttagaagtaacattatgtattattattgttgttattattattaaagttctgtgccaatcattattctaaatgtttgacatt

SEQ ID NO: 134123 - DNA, 784 bp, Homo sapiens
gggctctgaggactgccagcacgctgtcacctctcaagaagaatccaggtggggctatcaaacaacagaagcagtgattctggaataaaagcattttttttgtctaagatgaaaagttactacagggaactctcttgatctattgttttatactgttaaagaaagtacattaatgaaatgtgtcagggtaagatggcagtctcagcacatcaaatgatgcaggcaagaatatagcaaagtaatatctatcagcaggtcaataacttagaaaagcttgaaatgattgagaaatgtgcatggaagaaggtagtattctatagctattcaaggcaatgtatcaaagaagtgtaaaaatatacattagaatgggtcagttattcttagatcagaaggaatgggataaagaaatgatctgagaacagaatataggaattatgtggcttggaagtagagagagaaaagacatgaacatttatcaatgacaaaatgatcacaatacctttgaggtactggatttgagggaaaagattcttccaaataagtgatcactctgattaggactgaacaaaatgactgatttcactgctcagtcctcagactgccaacctttctacacccctgctctgagcgtgtgtgtgtgtgtgtgtgtgtgtgtgtgtgtgtgtgtgtgtgtgtggagataaaagaagagggtgtgggaatataagggggggggggagagaaaaagtggggggtgaaataaagagagggagaggaataataggggggggagggaacaaaaagt

SEQ ID NO: 134124 - DNA, 218 bp, Homo sapiens
aacaaacccaaaaaacagccagagaaggcaagagccctggaatggcctaaggtgggaaactgctgccctctcagccgcggggtccagtgtgtgatagtgaaatctctcgttatcttaaattctctcttcagggacttaaacagaaattaacagggctgggtgcagtggctcatgcctgtagtcccagcactttgagaggctgagagggggaggattgc

SEQ ID NO: 134125 - DNA, 367 bp, Homo sapiens
ttttgatatgaagtctcactctgtcgctcgggctggagtgtagtggtgcaatctcggctcactgcaacctccacctcccgggttcaggtgattctcctgcctcagcttcccaagtagctgagactacaggtgtgtgccaccaagtgggctaatttttgtatttttagtagagacaggaatttcaccacgttggccaggctggtctccaactcctgacctcaagtgatccacccgctttggcctcccagagtgctgggattacaggcgtgagccactacaaacctaatttaagttgtgtgcctcctatggagaagcctgaaactgccttctttgatttaggcctgatttcttcatgaatggattagga

SEQ ID NO: 134126 - DNA, 255 bp, Homo sapiens
tacaggtgtgagccaccgcgcccggccacttctgtctagttttaaaacattttcatccaaatggaaaccctatgcccattaagcagttgttccccatttcctcatctccccagtccctggcaaccactagtgtactttctgcgtctgtggatttatccattctagatatttcgtataaattgactcaagcactgtgtgtcctttagtgtctgagttcttccacttgccatagtttttgaggttcattcaggtagt

SEQ ID NO: 134127 - DNA, 405 bp, Homo sapiens
tgagctgtaatcgcatcactgcactccagcctgggtgataaagtgagatcttgtctcgaaaagaaaaagttatatgtacactatgctatagtctgttaaatgtgcagtagcgttgtgtcttaaaaaatgtgcatactttaaaaatgctttatttaaaaaaaattctcctgatcatcttgagccttcagggagtcatgatctttttgctggtggagggtcctgcctctatcttgatggctgctgactgagcagagtggtggttgctgaaggttcgggtagctgtagcaatttcttaaaataagacagtaataaagttgccacatcaatggactcttcctttcacaaaagatttttctgaagcatgggatgctgtttgataagcattttacccacagtagaacttct

SEQ ID NO: 134128 - DNA, 772 bp, Homo sapiens
ctcctgggttcaagtgattctcctacctcagcctcctgggtagccgggactacaggcgagtgccaccacacctggctaatttttgaagttttagtagagacgggatttcaccattttggccaggctggtttcaaactcctgacctcaggtgatccacctgcctcggcctcccaaagtgctgtgattacaggtgtgagctactgttcccagacatatgccatgatttctgtcacttctgggtatgcagctattgactgatttttttcctgattatgggtcacattttcctgcttctttatgtgtctagtaatttctgattgaatgccagacattattagtccatattgtgaagtgtttggattttattgcctccttaaaagaggggaaggaatttgaattatttgcaaattagtttgatcctttatgagcttcttttaagacttatatggcagattgaaagtatcatagctctcttttatctgcagggaatatgttccaagacccccagggggtgcctgaaaccatggacagtaccaaattttatatacactatgtatttttgcctatgataaaattcaatttataaattaggcatggaaagagattaacacctgataataaaattgaacaattataacaatatactttaagaaaagttatgtgaatgtggtctctctctctttctctcaaaatatcttatactatattcaccttttttgtgatgatatgagatgatacaatgcctatgtgatgagacgaaggaggtgaatga

SEQ ID NO: 134129 - DNA, 205 bp, Homo sapiens
tgagaagcagcttttcagctgtgacaggcaaggcccagcaggggaagtagctcactgtctggtttgatttaagatcactgccaaaaaattttcttcattaacttcacagttatctaagctctatgaaggcaggggtttttgtgttttgcttataggagtatgctcagggcctagaacagtgcctgggttatagtaggagctcaaa

SEQ ID NO: 134130 - DNA, 274 bp, Homo sapiens
tgaaatattctatcccagcagaaaatcttccagtgagtcaaatatctgctagtgagttgacaaaaaaaatctagagctctttccgtcagcacttggaaatattcttattgttactgttggatgacccctggtttgtagacaccgcctatagggcaatggttgggttcagaattacagagtgagaggcataagcatcaaagcacagagaaacatattaataaaagcctctgagaaataaaaatgagatcccaaatccaccaactgactgaacaga

SEQ ID NO: 134131 - DNA, 327 bp, Homo sapiens
ataagataaagtgtgtgcattaactagctgacagcagccactcagccaattatgggattcatgtctatcctcagtatcattcacaaatgtcagttcctagatgaagccacaccaccctaatcgcacacacccacatcctcctctgtatgaactggtttacaaagcgtgcttgcaatgggggctggatggaacattgttgggcaaaatgaagttgtagacaacatgctgccctcatctgcccacccacccccaccccacagctcagggacaagccagatgcctcccccagagaaggcaggtgcttccgaacctgcacatcctgctagc

SEQ ID NO: 134132 - DNA, 201 bp, Homo sapiens
cacgaaacttacatcctagtgagaaaggtggacaaataccaacaaacatagtaagtaaattatacaatatattaagtgacaaaaagctatggggaagaagtaaacttaagtagggtaaggcaatggggagtgtgtgtgatggaggggcaagctgtgatgttaaattagggtcaggaaatccttactgaacaggagattcga

SEQ ID NO: 134133 - DNA, 409 bp, Homo sapiens
cctgtttcttgttttcttccaggaagtcacattgcctgtgtcctcccagaacctaagagacaagagctggctggcctcaggggccagcagccaggctctcctgtggctgtgggacccccaggctttggagcaagcctgctctgagttctttcctgcaagggttcgggatcctcatctcactttacattgtcaagggcccaaccctcggagcctctcttcctccccgtctggtccctgcttctccactgtggggtttgcttcggctgtcccatctccatgctctcagccctctcctcctgtctctgactttggaacaccacctcaccttggctttcagctgtgtgactgccctcaccccaattctctcttgtcatgaatcaggaagccccaaaccttcggcagagcaatg

SEQ ID NO: 134134 - DNA, 343 bp, Homo sapiens
cgggtgcggtcccacccaggccacctgaattcagaatggcctggccagtatgtcagggctccttatcacaagcaacagaaaccctttctgcctgcccccaaaactcatatagggcgtgggcttctccagaggcagatgccggtcaagagacaggacagacatctatgagcatggggaggagtggactcccagcccggatccaggagaagcgctgttgggacaataggcagccagcacctgagtcagaggtgaaggtagcctctagcagcagttgtcaccaccccgcccgtgcctgtcccacccttcagtttgttccagcaaacttccacctgtgtgtacctgc

SEQ ID NO: 134135 - DNA, 707 bp, Homo sapiens
gtttagatacgttcacagagccccttcaatattagagcacagtgaataagagcagaatgaagctctcagaaaaataagaattgcattggaatcccacctccaccactcactgtctgtgtaacactgagcctcaaactttagtttctatgtctagcaaccggagactgcagtagtgcctacttatagttagaatcgtgagatcatgcactaagcacagagcttagggtcagtaagtgggctccttctttttctccctttttcttcttcttccatcgactgtctaaatcgcatcaaactcattattttggtcatatataatagatcctttatgtttttgatgatttgatttcagattctctttcttgacagaggttgatctggcctacgtatggtatgccaggaaggatcaatagggctacagaattttaggcaaggagaagataacttcttgtgctctcttatggtcaatttctctgttaaaatgtgaaattctgccattcctttaaggaaggtggtaatatcatgttgctttgattttaatgagatttgttcagaaggtagaaccctttgagggctccttcatgaaacaccaacctcagctgttttacattctgcaggtgttatgtaaatgccaaatattaatgttttactatctagtaaaagagatgaaataagatttttgttgctgcttgtttcataggctgcaa

SEQ ID NO: 134136 - DNA, 437 bp, Homo sapiens
gtgcaaaggtcctgtggggtggtggggaagtggggagtgggagcccgagtcgtgctagagtggagtgagaaaaggcagaggaaggtatgaggccagaggtaactgatcatgtgtggcttggcaggttatatgatcatgtgtggcttggcaggttagaggagttttctagggctgccgtaatgaaatatcacagagtgggtggcttaaataatagaaatttattttctcagttctggaggctggaagtccaagatcaaggtgcctgcaggactcgtttcctccgaggcctctctcctcagctcacagatgtgcatatgcagccctggtgtctctgtatgtcctaatctcctcttcttaaaagcacaatagtcagattaggttaagacccaccctggcagcctcattttaactcaattaccctccccccactccccact

SEQ ID NO: 134137 - DNA, 633 bp, Homo sapiens
agggtcaaaagtaatagtcctaccatctgtttgtgtggactgcagaattccctccacagcctgttcagcagagggactgctcctgagcccggagccacagcatcaccatattacaacacaggctgcagttctggaggttcagacttgcccaggcacagattatgacccttgaaatatcataacctcctacagaaacagcccgacattatgtgattggcttatactttaaagccttatactaataagttccattgtactcgtgaggaagaaatttgctggaagatagggaagattggagaatggctgaacttagaaagaacaacacttaaatagtgagttagaacatttagtacagggccaggcacggtggctcgcacctgtaatcccagcactgtgggaggtcgaggcaggcagatcacttgaggtcaggagttcgagaccagcctggccaacatggtgaaaccccgtctctactaaaaatacaaacattagccgggcatgatgttacacacctgtaatcccagctactcaggaggctgagggatgagaatcgcttgaacccaggcaggggaggttgcagtgagtggagatcgcgccactgtactctagcttgggcaacagagcaagactgtc

SEQ ID NO: 134138 - DNA, 574 bp, Homo sapiens
gatcctgaaatgaaaccaattttatcctcactttcagagtactttagtgtagtagaggacgtatgcataaaaatgtactatggaaattcacaaaattaacggattctcaaagcagctattgaagattccacaactccagttagtccttgctggtcattaaaagggacaccagaaaaacaaataactaataaaaaatacgagttaaatggctataatgcccacctgtttggaaaaaaaaaaaaaaaaacaaaaaaaaaaaaactttttggggcgctggcggccccgaaaaagtttttaaaaaaacaccttcgtggtgggcggcacgcgaggggcccccaataaagtgacaaagcaaaccgagggcccatacgggttccccagaggaaaaactcgcggcgcacaaggaacaacatgccgggggattctcccaaaattaaaaaaaagcccggggggagaaccagacggttttctgaaacaaaatcccaaggggagacgaggagggccacaaaacggggaaccataacaaaaggggatccaaagcagaaacctgaatataaaattaagccccatcgtg

SEQ ID NO: 134139 - DNA, 766 bp, Homo sapiens
ctctatttgtcaaggtttgtttgtttgttttacattactgactccattttgattctgacaacttttacaatatgatacagcaagctttttcagatattcccagttttacatgtatatgtgtgtgtaggactgtgcagttctatcacatatgtttgtgtatccactgctatagtcaagctacaagacagttccaacagcataaggatcccttgtgttgtttgtcctcttataaccactcgctacccctaacctcctgtcctggtctctaatcctcggtaaacactagtctctagctttataaatttgtcatttcaagaatattagataaatagaatcatccagtcttttttttgtttttttgctgaatagaatttattgtgagggaaggaaaaaaattttcatccaccctcttaggttcagtgactggggcttggaaattaaataacaaaagacagattaacagtagtaaaaggtttatttcctatgcataatgagcaagtacctggctcattaaatagttaaagggttttgtttatatacctaccttaggtatataaaggaagggggagaaagggcctctataggaaaaacaaataggtctctttgggaaagacaaacaggtagtaagaaattgtgtaatgatatttgcctattcatcttcagggccaaaaactccccaggagggggaatttctaatagcctcatttcccagaggttgctgctttagtcagttaagggaagctcctagaaggcttttcctccactt

SEQ ID NO: 134140 - DNA, 460 bp, Homo sapiens
acaaaaagtctctgtgtctgctacctaattctatcacactgatctcttctgcaggcatagtcattggttcttccctttattcttatggcaggcaacactttgatgttactcattcattcccccatatatatatccattcatcaaactcttttcaagttaggtcctggggatactgtggtaaactggacagacatgtttcatattctcagagcacatacagtctagagggattttgtacactggagacttaaagcagacttggcttagacaaggagtcagaagaagcttccaggcagaaatgattttaagttaagatctgtggtggtgagaaagttctcttctggttcactatggagggtagaggggagggaaagatgatggtgtcatggtgcaagatgaagctggagaagaaaccatggccagaacacatgtatatattattgcaccttagattttctcc

SEQ ID NO: 134141 - DNA, 219 bp, Homo sapiens
gcctccagaaccctgaggcctccacagcacaatgcttccttcctagtggtgggaggggcaagatacaataattggtcctttaaagaggatgtcctggcatgccccactgcaagggtcccctcaaatatcacagatgtggcaggtccctgaatctctacagggtgagtttctcaccctctgcagtgtgtgtgcctcaccaatgccttgccacttcttggc

SEQ ID NO: 134142 - DNA, 241 bp, Homo sapiens
ggatcagagatctctggggagaagccaggtgattgtaacctatagtctaggttgaaaaccactggtattacatgatgtctgagttctttgctgccgctacaattcactagacatatagggtttggggttcatttttgtttttgtctctgggggatgaaaatgttctaaaattagattgtggcaatggttgtagaatcctatgattaaactaagaaaccactgaattgtacattttaaatga

SEQ ID NO: 134143 - DNA, 217 bp, Homo sapiens
gcataccaagatgaacagttgcacatatacacaccactcctgtagcaatacagcaataatttaaatgacagataataagagcctgaattaagtcataattagaggaggcagaggagatagaatatcaagataattaggaagtagaatctaaagggtttggctactgattagctgtgggagtgggaaggtggaggagtcaaagatatctcagatttcc

SEQ ID NO: 134144 - DNA, 607 bp, Homo sapiens
catggtggcgcgcgcctgtagtcacagctactcgggaggctgaggcaggagaatcacttgaacccaggaggcagaggttgcagtgagctgagatcatgccactgcattccagcttgggcgacagagagagactccgtctcaaaaaaaagtaaaataaaataaaataaaatactgtgcatccaagcagtggaagaccagctgtgaaatgacatacagccttaaaaaaaattctgtctatatatctccacttgtaggtagagaaatgcaaacatgtccatgtgttcatatgttcacagcggcattattcataatagacaaaaactggatgcagcccaagagtccattaactggcaaatggataaagtgtggtatatctatacagtacaatggaacattattctgcaataaatgaatactacaatgatgaaccatgaaagcatcatgctaagtgaaagaagctagacagaaaaacaacagtgtatgtccagataaaacgtccagaacggtgttaaaagaaaaacactggtgcttgctatggcagcacatatactaaaattggaaccatacagagaagattagcatggcccctgcaaagagataaaaaaaa

SEQ ID NO: 134145 - DNA, 492 bp, Homo sapiens
caacaaaagccacatttaaagttttgttttgggagtctcgctctgtcgccaggctggtgtgcatccaagcagtggaagaccagctgtgaaatgacatacagccttaaaaaaaattctgtctatatatctccacttgtaggtagagaaatgcaaacatgtccatgtgttcatatgttcacagcggcattattcataatagacaaaaactggatgcagcccaagagtccattaactggcaaatggataaagtgtggtatatctatacagtacaatggaacattattctgcaataaatgaatactacaatgatgaaccatgaaagcatcatgctaagtgaaagaagctagacagaaaaacaacagtgtatgtccagataaaacgtccagaacggtgttaaaagaaaaacactggtgcttgctatggcagcacatatactaaaattggaaccatacagagaagattagcatggcccctgcaaagagataaaaaaaa

SEQ ID NO: 134146 - DNA, 243 bp, Homo sapiens
tcacccagattccttcagctacttcatccgtgtatattggatatactttcctgcctgtttcaaattttccacactaaaaggcaagcaggcaggagggggcaggggtgtgggtttctaaggacagacaaataggagagctgaagcccagctgcctgatcttcaggcaaaatacagttaattgttcaacgagtttatgaaaggatgctgggttctcattttgaattcctttcttccttcagtaat

SEQ ID NO: 134147 - DNA, 194 bp, Homo sapiens
ttgagcactaaaaaactgtattgcacgaaaacccatccctaaagtctccaaaacagccacattgttagaaaagtatccaatgcataataatttcattgaatatttgccaaataacatttttagatggacaaacatatctattctattaagtcaatacaaaataaatagcatcaaacaaagaactgatagtgatt

SEQ ID NO: 134148 - DNA, 346 bp, Homo sapiens
tgcggctaacaccccgtctgtgtatctcacaccagccaagggctttgttttcctcctgtcactttgttcatatttctttcatatgtcacattgacagcatgaacaaagatgagaacaccacaattggctcccggtcaaccatgttagatggcaacttgccttcaatatggtgaaacacatcagttaagactagggttgtgagtggcagcgttttctgcagggacacttgatcttttagtaaatatggggtgctctctttcaaagaagctgtctttcctggcaccccatagtaagacacggagcaactacattgcaatccattggtcagtggtgaagtaaggacgga

SEQ ID NO: 134149 - DNA, 573 bp, Homo sapiens
atatatacgtggcgtaaaatgtacatgaaataacaagtcactactcaaaaagtacattttttttctcctcagagccttattagcaattggcaatcttaaaatttcatctcctaagcagggtccttatcagatattccttgacccccctatgttaagtgtcttagccactcattgttaagccaactgctaaaatcttagaaaaatatttcagccttctcctaccccatcccccacccccacaagcttctagcttcttctacctacagcaaatgttaaaactggtcagaagttatattatttactctgagaataatagtcttttgcagttgatgcatatcttgtcacccaaccacagtaattataggtttgatgtgaactgcacactaattatttttattattccagaggtttcataagcaacaatcctcccttgctcccaaatactctcacactctgaggaagggctaacatctaaaaatatcatcttaagtatatccctgaagataaaataaatgctagcatatgcatttaatgtttgctcctcctgcccccatctttcaaccattcgcacca

SEQ ID NO: 134150 - DNA, 435 bp, Homo sapiens
atcatcccagggcctgcatcgtgcctgggagggacgtgctgccaagattcagaggccacctaaagctactggcctcacaaccccatggccttataaccccagggcctgcatcatgcttggcagggactgctgcccagatccaaggcttgcaaacctgtctctttaacattcagatgagctctgcctgagtctcctctgctctgtagagtaccagcaattaagagttaacttgctgagtagcagcaattaagaattaactctgggattctttgaaaacaggacaatgccatgtgcaaatctctttattctcctggatgaatgattaacgatagcaggagggaagacagcagagacattcttgccagaaatagatccacactcacccagccttccacagttccaagaaccaatcacatttcctaaaacaatattttc

SEQ ID NO: 134151 - DNA, 147 bp, Homo sapiens
attttaattatgttactaaactcaagtttattttcttctcaataccagtcacataacaagtgtctccaacaagcctggttacccttaaattagtaaatacaacccgaaaaataacattttatgtttacacaatttaatatacaattt

SEQ ID NO: 134152 - DNA, 794 bp, Homo sapiens
aagtcccagattgaggaaaaaaggaacatagtctctacctcttcctgagaggaaagtcagtcaacgtgtaagaggagcagtagaaacgcattagtccagccaacgtgaaagtggaccgtagatctaaaacattttgggtatgcagttcagccagcccttactgaggcagttctgccaatcaggattcaagttttatttcctaagagttataataggttttatttgtgggcattgatacaaaatacgctgtgttcaagctatggagcctgccactgtagttactagagttacggttcaaagctatttctgagagaaagccacttcatcctcaaaacccaagaggcccacttaaagtgatgcgaattctcatttcaggtttttaaattatactaaaagattctagtaagaaaattttaatatgtatgtattggtgttctttttacatttcatttaatgaaatgtctactgtcaatacgataaagcagaacccagtggagtaagaatacacgaaactgccaggcacagtgggtcatgcctgtaaacccagcattctgggaggccgaggcgggtggatcacctgaggtcgggagttcaagaccagcctgaccaacatggagaaaccctgtctctactaaaaatacaaaattagctgcggtggtggtgcgtgcctgtaatcccagctactcaggaggctgaggcaggagaatcgcttgaacccgggaggcggaggttgtggtgagccaagattgcgccattgcactccagcctgggcaacaacagcgaaactctgtctc

SEQ ID NO: 134153 - DNA, 312 bp, Homo sapiens
aaaatataattttatattatattgtaatttatatagttgccattttgggttcaacatggctgaatattgttcaattcgtatgattcgacccaacagactcagagttttacaattctcatttaaacacttggctaacacggatgtattctataaaaaggaaaataatctccttttgtatggataaataaatgaagggtccaatggcatttcagtgatgaaagatccattactgctgttcctcagtccctgaaacatagagcaccctcactgggtaatctgggatacagggggaatggaatgaccactttgtta

SEQ ID NO: 134154 - DNA, 545 bp, Homo sapiens
cgggtctctggaacagtcaagcctgttcttctgaacctgattttctggccctccgagattctattaaatatctaatattttttaaataaatttctttttttcttaaagtagctagaatttttaaaaagaagcctgactgaaaaacagtatataaaaagacacgcgaagagcaagaaaactttgataaaagagaagaagaaagaaaggcagagaattactcttaatcagaagactaggaacaattgaatgtttatactagatacggattaaacaaaggtttattaagctcttagtacataacatacatcgtgtgggcactttctcattcatttccttatttcatgctgtctacaattttatgagaaaggtagacttattatttttaaaaacaagagatttaagaccctaaaaagttgttgtgttgaacgaactaggaatcaaatccaggtttctactttcagtctcatggtctctgtgctacaccagaatgcccttcactacagtctcagctaagtacaatactgaaaattttgctgaatattaca

SEQ ID NO: 134155 - DNA, 373 bp, Homo sapiens
ctttaagtgtgtgcaagaagaacattctcagagatagttggagtgcctgggagcggctagaaaaaattagggaaatgatgccaagatttagccacaagtgatactactaacttaagaggctgctcctgatctcatgggggtcttaaattcttccctccagtccctctctcgtgggttgtattagaaagattactgcagcgactttaagcacaacaggttggattcagattagatttaaggagggacttccaaacaaatgcttttgaagacatgagcttgtaagtgaacagagagaaaggtatcatctaccttttagaagccttaagatgctgggcacaggtatattttgcattcctgaaaagctatctgctaa

SEQ ID NO: 134156 - DNA, 500 bp, Homo sapiens
ctaatcacttagctctttgcctggagcagggcctggcattcagcaggtgctcatatgtgagcggcgctggtggggaatcagggcccgcatgacccagagcagctgttgtaagacatgggtccagcaaagcattcctcatgctgctgcctgcacttaccctctaggaaggccagcctggaggagccacttctgcccttcaggcaaatgataactgagcacctgtctgtgcgggtgctaggtggaaaggtccagagatggcagtggcctggtccctgcctggggcaccttctctccaccaacagacacttacccagctggttaggcctgttctcaccccgcagtctgtagttagcacccaggctgggaacaacagcctgtgttcctctccctttccttggtaccttctcttcttgttcctttatttttttctgaagagataggatcgccctatgttgtccaggctggactcgaactcctgcccacaagccatcctcccacca

SEQ ID NO: 134157 - DNA, 121 bp, Homo sapiens
tgctatggaaatagttctactgtattttaaaatttgtatttttattgttatatttttgttactttttaaaaaatatttttgatccatggtttgttgaattcatgggtacagaatccatgga

SEQ ID NO: 134158 - DNA, 436 bp, Homo sapiens
aaatccagacctgtctgattgcaaagcccatacttgactctgaggccaccttcctgctgcagtgaaagtcatttcttccatttcctcagtagggatccagagatcaaggcaggagagaatctttgcttcctctacctccttttctttccccctttctctaaaagcttgtggggaaactggaagggaaagagaaagttctaattgacacctcccactccccagtttttctagagcttaaatagtatatggcatatactgctgtattgttttggttgcatttttcccacattgagtataagttcctttagaaccctatattgcatttctttgtatagcttttgtcttactagtatcataaacgatttactctgcccataccatgcagaacttggagcagacttcagaatttttagaatctaggatttatcctcttttc

SEQ ID NO: 134159 - DNA, 502 bp, Homo sapiens
tcagatttctctttcttacttcatctctcatatttcccacttctttaacacaggcatctttcctgcatttggatcccacctcagagcttttgcactggctgtttcctctgcctggaaggctcttccccaagatatcagcatggccttccctgatttcctttaggtttttacttaaatgtcaccttcccatgaaggtctttcccaatctcaaatggcagcccctctctaacttccattcctgctttatttttctctagtatttcccaccatctaaaatactgtacaccttatttctatatcgtttctttgcctgcttcccactagaatatgagccccatgaaggcaagactgttggtcagttttgctcactgctttacctccagtacaagagcagtgtactcactaagtatttgttgaatgactgtaaaaaggggctaataatacctactacctcgtggattattgtgaagatgaagtgagataaggcatgtgaagttcttgg

SEQ ID NO: 134160 - DNA, 1213 bp, Homo sapiens
acacctgtgtcttccacttgctgttttatttaactcacggctactgtcctaattttagggatgctaaaatagtttgttttaaaagaggtttgtttaagaaagcagtaggtacattatgtttactagacaggcccttggaccagctaagcgacagggaacctggtacattatgtttagttactgttttcttctcaaagttaaccaaagctaaataactttcctatgtaaaatgtgctgactcccaaaagaggagaaatgcaatggcttgagcttgcatgtgtcacaggtttgtggagccttcagccaggtgatggtcttcagctaaagagccagctgcatcttggtatctcttcctctgctaacttcctacttttagcaaaattctttcacttggaactctagctgatccttggccaggatcagatcctcaaaaggaaatattcagttagcagtggatattgtacaagatgtaacatggcttagaggaaagagtgtagacccagcgacagatcatcagtcactcaaatcctggttctctctcttcctccatctgtgactttgaacatgctacttggaggctcagcttcttcaccatcaacaggaggattacatctaatgcaggcaatcatctattacagatgccgaataaatgatatcaaagagcatagagaaacaaaaatcttttatgatgtacggaaaaaaaccatgctgatacagctggctattcagggtcacccagcagtcctccagcaaggtagaaacaccaaatcaatgagtttatgctagaatttttcacatggccactggaccattgtggaagtagactggttgaaatattcttagtatgacatagtaagttatatttgtttgaaccttatcctgtgaaagcattatctgtcccaaacagtatatgccttttatcagggacacattaaatataaatgtttaaccaaagaaagttgttcttataatgtaattataacagggatttataagagggaattataagagggattatgaaagggaattacttttgagcaaggggagccatttgggagtgcttcaagatacccaatatgatatacacaattatgatttgtcagtcaaaaataatattaagaacaaaaaaagagttaaaaaattctgatatgagtgtaatatacttaatatgtaggatgtctcaaatttccagtaaataaattttaatgtccca

SEQ ID NO: 134161 - DNA, 952 bp, Homo sapiens
acacctgtgtcttccacttgctgttttatttaactcacggctactgtcctaattttagggatgctaaaatagtttgttttaaaagaggtttgtttaagaaagcagtaggtacattatgtttactagacaggcccttggaccagctaagcgacagggaacctggtacattatgtttagttactgttttcttctcaaagttaaccaaagctaaataactttcctatgtaaaatgtgctgactcccaaaagaggagaaatgcaatggcttgagcttgcatgtgtcacaggtttgtggagccttcagccaggtgatggtcttcagctaaagagccagctgcatcttggtatctcttcctctgctaacttcctacttttagcaaaattctttcacttggaactctagctgatccttggccaggatcagatcctcaaaaggaaatattcagttagcagtggatattgtacaagatgtaacatggcttagaggaaagagtgtagacccagcgacagatcatcagtcactcaaatcctggttctctctcttcctccatctgtgactttgaacatgctacttggaggctcagcttcttcaccatcaacaggaggattacatctaatgcaggcaatcatctattacagatgccgaataaatgatatcaaagagcatagagaaacaaaaatcttttatgatgtacggaaaaaaaccatgctgatacagctggctattcagggtcacccagcagtcctccagcaaggtagaaacaccaaatcaatgagtttatgctagaatttttcacatggccactggaccattgtggaagtagactggttgaaatattcttagtatgacatagtaagttatatttgtttgaaccttatcctgtgaaagcattatctgtcccaaacagtatatgccttttatcagggacacattaaatataaatgtttaacca

SEQ ID NO: 134162 - DNA, 991 bp, Homo sapiens
tactactactaaattcgcgcccgcgtcgacgaaatgcaatggcttgagcttgcatgtgtcacaggtttgtggagccttcagccaggtgatggtcttcagctaaagagccagctgcatcttggtatctcttcctctgctaacttcctacttttagcaaaattctttcacttggaactctagctgatccttggccaggatcagatcctcaaaaggaaatattcagttagcagtggatattgtacaagatgtaacatggcttagaggaaagagtgtagacccagcgacagatcatcagtcactcaaatcctggttctctctcttcctccatctgtgactttgaacatgctacttggaggctcagcttcttcaccatcaacaggaggattacatctaatgcaggcaatcatctattacagatgccgaataaatgatatcaaagagcatagagaaacaaaaatcttttatgatgtacggaaaaaaaccatgctgatacagctggctattcagggtcacccagcagtcctccagcaaggtagaaacaccaaatcaatgagtttatgctagaatttttcacatggccactggaccattgtggaagtagactggttgaaatattcttagtatgacatagtaagttatatttgtttgaaccttatcctgtgaaagcattatctgtcccaaacagtatatgccttttatcagggacacattaaatataaatgtttaaccaaagaaagttgttcttataatgtaattataacagggatttataagagggaattataagagggattatgaaagggaattacttttgagcaaggggagccatttgggagtgcttcaagatacccaatatgatatacacaattatgatttgtcagtcaaaaataatattaagaacaaaaaaagagttaaaaaattctgatatgagtgtaatatacttaatatgtaggatgtctcaaatttccagtaaataaattttaatgtccca

SEQ ID NO: 134163 - DNA, 366 bp, Homo sapiens
aagaatataattttgacattagaaattgaagtaaagtggagagacatggggttagaaacaaggagagcacttaggagagggttcttgggaatggttctgtacactcaagctgctgctggcagaggctaaatgccacagaagctagaggggaagaatcagctaacctttggttattgaataagtttacaaaggtgaccatcaagtgacttagcaggactgaccctgagaataactatgtaatttttttaaatggcaaatgcaggggaaacaggtttatgtgaaagaaatagggacgatgaccacttcagacatgtttaactaaatatgctatgtgaatgcatcaagcttgtaatatacatgaggcac

SEQ ID NO: 134164 - DNA, 438 bp, Homo sapiens
gaaagagccagacatcgggctgtgccgcggttacgcgggggagccatctcggcacgcgaatcgggcagcaccagtaaagggtttagataactggcaaccccttatcgacaccaggcacgctcatccacgcaagcatccaatctcaacttatccaacaccaatctcaactttatcaacacagacacaacatacacaccaggcatccaatctcaactcatcatacaacaccaagacacactcatccaccaggcatccaatctcaacttcatccaacaccagacacactcatccaccaggcatccaatctcaactcatccaacaccaggcacgctcatccaatctcaactcatccaacaccaggcacactcatccaacctcaactcatccaacaccaggcacgctcatccaatctcaactcatccaacaccaggcacgctc

SEQ ID NO: 134165 - DNA, 777 bp, Homo sapiens
gtacattttcagttatttgacccttgatttaacgatgtagtcctctgtgcatgtttttgtgttgcaaagaagactcacattttagaatctttttttcatcctgggttatgagataatttacaagcagaatttgaatttcttcatacctgcaaacacagggaaaaaccatcaattttactttttatttgtctcagttatgtgtgctgtttagttttagtccagacataactttagttgaatgattttataacaaacatacatttttgagtttttatatttttggtctgaaatatttagcttgctatttttgaaacaagaagtgtaaaatgtatttttatttactctttttgatatatctctatttataaatattttagcattcagcaacctttctaaatgtttcaatacatgtactatctattaaatgtgtatgtatttccaaaaaaaaaaaaaacaaaaaaaaaaaaaaaacctttttggggcgcgccttgggcctcagaaaaagcttttcaaaacccttcgcgtgtgggcccgggggcccctgggcgtacgggcaaccgtgggccaagggggtcacctcaaggaaaacccgggggcaatgagaatcagagggcttggggttttcttcgcccatatttaaaaaagagccgccgggggaacaaacgcaagctttttctggagacagtttcccaggaagggaagctcccggaggggccactaacggggattcttatacaccaggggggatccacaggggaattccgttttaaaatggcc

SEQ ID NO: 134166 - DNA, 621 bp, Homo sapiens
catgcatagtagctcacggctgtaattccagcactttgggaaggcaaggcaggtggatcgcttgagcccaggagtttgtgaccagcctggacaacatggcgaaaccccttctcctccaaaaaaacaaaaaaattagctgagcatagtgccatgtgcctgtggtcccagctactctgtaggctgaggtgggaggatcctttgagcccaggaggtggaagttgtggcgatccaagatcataacactgtactccagcctgggtgacagagtgagaccctgtctcaaaaaaataaaaaattattaaaaaaaaatatgttgcatatgtataagagaacccataggtaaggggaaggcatacatttttctacccagttatgtgtgttttgcgaaaatgtctcttttatcaaaataacaaataattaggagtacaggctttagagttgagcagacctaagtagctgtgaaactgtgcaatttatttaacctctcaaagtctcagttttgtcaactgtaaaacaggaataataatagtatcagcatactaaaataaatcattcaataaacatttatcaaatgccttggaagttaaatgcaaagcactgttttccgtgtactggggataa

SEQ ID NO: 134167 - DNA, 402 bp, Homo sapiens
ctctctttgctaatgaccaccagcccagattctcagagaggttgactttgttaacacaagcagctggggttggtgagagtccaggtggtataaggaacatcacgtgcagactcagtaattaaagaaaagctggtgagggggcgagtgggcacggctgtctctaggagttcttttgaaatgggcttcacttctccctctaagcccgtcccttttgttctctgcctctgagagccagtgctgtctggctggttatgccgtctcccacggagtatgcctccttctgctcctcccgcaaaccatcgctgtctgactggttacgtgggccatctcccactgagcccgcctccttctgctcctcctgcaaaccatcctggctacttttgctttttttttttttttttt

SEQ ID NO: 134168 - DNA, 639 bp, Homo sapiens
gaggccattccattcctgttttcccccactttcttacagttctaggccccagaggctaagtgtagcactgggggttcttggggtgggtctcacataaaccacctatccacacacagcaactgcagagtggcctcctctcacacagcttggctctctctgtggaagtgtggggtacagggaggtcatcatccctaagttgttacccaggctacactctgttatcgcaggggccacacatctggggcaatacctgtttaggagccccggggaccagtcaggggtatgagtctatggagcatgcatgcacacacacacgtacacacacagaatggccactggccctgatggaggcagtgttgttacctggtcccaggagactgatctgacctccaggctttaccgaggggtaactctcactaatgccaactccctgatcatagatttggcattgacatgtgatctaagttgcattgctcactccagggtgcctgctccaggcatctctaccaacctgagtggggttacaacctaggaggaaccagcagcccctgaaggacctcctgcacatctcagctaccatgactcagaaataaagtcaggtgacccagtggctaccagccctgcaatttggtgggtgag

SEQ ID NO: 134169 - DNA, 647 bp, Homo sapiens
acatcacatgcctatttatatcctatgagatcttctgtgatactcatcagagaaattgataagactaggggcaagaaattaaaaatatatcttgaaggacagtggcagttttttaaaactttatccatgactaaaaataaaagcaatcaaggcaaaaatattttaattacttataagcaaggtagcaaggatcatataaagtcaactcctttcctttcatatatactcagggaataagaaacaaagacactttcctaactgtaaagattatgagagatgaatgtcatattgtagactattttctctaaattacaagtataagatggacatttgtttgtattacgtagttaacataggtactagctagaaccatatgcagtaggtcagtataacttttgaagtcctttccaatcctttgatttccactgttagtttgtcaaattacagctgttatctgacatttcttgaatagcagtggtgtacgaggtacagtgtagaaagtccaccatggttgtggttcaatcatttattctctaaaagagatgatacctttgtaatcaagataataatatcagatgattatggtaagccagacactcaaacagaaaatgagtaattcctgcaggagtatcttgctagcaaaaaaa

SEQ ID NO: 134170 - DNA, 863 bp, Homo sapiens
attgtttggaaaagaatgtttaagttgtgcataatatatatatatatatgccattatttttgttggacatttaggttcccaagtttttgatattttagaaaaattgtaatgaacattttgctaaatagatgtttgttctaatctctgtttatttttgaggaaagagcctagaagtggaattgcaggaatagtgaatatgatcatttttaagtttttttgttttttttttttaattgagacatggtctccctctgttgcctaggctggaatgcagtagtgtgatcatggctcactgcagccttgacctcctgggctcaagcaatcctcctacctcagcctcccaagtagctgggaccacagacgcacaccctgaaccccccgttttcaaacaagatttcgaattgtttgaggtcaggatttctcaaacgtgatttcctttcttggcattttgagtttttgaacaataaatttttttcccagaattttttaaaaaaacaacacaaaacacacaaaacaacaacaaaccaaacaaaaaacaacaacacaaacacaaaacacaacaaaaaaaaaaaaaacaacaatgcttgcgcgagaggcggcgcccccgccacgcagtatgtgttcgaacagacgcacgagggggcagggagaccattgagagtatatgagagtgagggagacgggtggtaagggaggaaaaaccatagcgcgcctacaaacgcacagtagagcacgaacaaagataacacacatgagggggtagaaaacagacagtattactaaaacaacgacgcaagatacttgagcggataacaacacgatcaccttatatacagagcacctaacggccacgtaatactaac

SEQ ID NO: 134171 - DNA, 317 bp, Homo sapiens
cttgcttctcctttcccctgtgtttgggaccctgggcggacctttcccagcaggaaaggctgcagggtttttcagcgggcgaggatgcatctagagccccctggtgtgccgctcccctagctgtgctgctttccccggcctcccagaaagtgtgtgggggaagacagcgtgggcattcagcaaggggtgctctcccctttgcctcccaccccatcctgctcttccatgctggcctagaactttggggccacattgtatctctaggattctttccctttcagccaggagtttttgtcagacctgggaaagtgggaccc

SEQ ID NO: 134172 - DNA, 317 bp, Homo sapiens
taaagttaataattgctagaagttgattaacatttttgcaaaattgtttacgggagcctctaatagagatcatattaattaaatttcacttgttttccctcccctttgttaccatctagtagatgtgctaataagcaacaaaatggacaaattgcttgataggagatgcagctaacttggactcttagaatcacacggtttgcctagttagaattaactgaaaacatatttttttaacttcaactagtatttatgcttgaacattgtcatggagaagaacttgttatattttatagcagaataaacagaaatagttt

SEQ ID NO: 134173 - DNA, 273 bp, Homo sapiens
gactgagcctaggatatagctagggcgaggaggttgcacatgaagaaccaaccaaagagagagatgaagatggtcagattacagaaccggaacacatctcacagaaacagaagccaagagaagaatttccaaagaaggtgattgctgttagcaaatgtaataacttgagatgtgtgatgaatgaatacagttgtttctagctgtaaagaagtttcacttcagcgagcgctgtggctcatgcctgtaaatcccagcactttgggaggccaagga

SEQ ID NO: 134174 - DNA, 232 bp, Homo sapiens
catcatctacctcttgtccatcatcaaaccttcctctctgggattatcttgctttcctcctgttgatataaatttctgcaaacatcagctttcatcaaaaaaaatcccacactggtgatctacaagaaaaactgtcctgcaggtgtgattagcacagtgtttaaattctctttaaataactatgagatctaacttctctagaaaaaaactgaaagctggccactgtggccag

SEQ ID NO: 134175 - DNA, 390 bp, Homo sapiens
gatagaatgcccaatggccaaagatgaaacaaatctcagcaacaaagtaaataatgcaccttaggattataacccaaaggataaagtaagtacccatgagtccatgtgtgtatatgacctgatggagcagtagcatctctcctatacagaaaaagcccaaataattatgtagataccccccgcccctcaccacttcaaggagatagagcttaactctccacctttcgagtatggattgtgcttagtaacttgctttaagagtacaatatgtaaagaagaaaaaaaatttatagtaacctggcaaacactatcttggccaggtgatcaaaatttgtattaatataatgagtgataagccctattaaaaatatgcacccttgatgtgatgaa

SEQ ID NO: 134176 - DNA, 1033 bp, Homo sapiens
cgcatcccttccctgtctttgtggattggcctgtcctggacatttcatagaaatgggatctcacggtgcgcagccttctgtgtctggcgtctctcactgagcgtgacgtcctcaggtgcgtcctcaggcgcatccgcgctgtggcctgcgccagcctcgctcctcttcctggctggtggtcccaccgcgtacacgtgccgccgcctgttttgctgctgcttttgagctgagaattgtttttatgacttttaaatagctagaaagggatcaaaacaagactgtctcacgatgtggaaattacatgaaattcacagttcagtgcctgtgagtagagctgaccggccgcagttcagccacacatggactcattaccgaagctgcctccacccaggcagcctgagccagcagctgtgaccggcaccctgtggcccacacggccagaagtgtttgccatctggccccccgcagacgcggtctgctgcctgtggtggagatcactctggaggcggctgtcatcggccactcccgggagccctctcctaccctcagtcctccatccctggagcagttagccccatacctgggccatgctggggcgggccctgcgcccaggacggatctcatgccttctcttttctctcccccggtgatttctccaagccagtggaatcctgaagggcttcgacccactcctcaaccttgtgctggacggcaccattgagtacatgcgagaccctgacgaccagtacaagctcacggaggacacccggcagctgggcctcgtggtgtgccggggcacgtccgtggtgctaatctgcccgcaggacggcatggaggccatccccaaccccttcatccagcagcaggacgcctagcctggccgggggcgcggggggtgcagggcaggcccgagcagctcggtttcccgcggacttggctgctgctcccaccgcagtaccgcctcctggaacggaagcattttcctttttgtataggttgaatttttgttttcttaataaaattgcaaacctca

SEQ ID NO: 134177 - DNA, 921 bp, Homo sapiens
ggggaggtcaaagggcgcggggcggtgcctgcgaagagccacacggcgcgacaagatggcggataaggagaagaagaaaaaggagagcatcttggacttgtccaagtacatcgacaagacgatccgggtaaagttccagggaggccgcgaagccagtggaatcctgaagggcttcgacccactcctcaaccttgtgctggacggcaccattgagtacatgcgagaccctgacgaccagtacaagctcacggaggacacccggcagctgggcctcgtggtgtgccggggcacgtccgtggtgctaatctgcccgcaggacggcatggaggccatccccaaccccttcatccagcagcaggacgcctagcctggccgggggcgcggggggtgcagggcaggcccgagcagctcggtttcccgcggacttggctgctgctcccaccgcagtaccgcctcctggaacggaagcattttcctttttgtataggttgaatttttgttttcttaataaaattgcaaacctcacaaaaaaaaaaaaaaaaaacaaaaaaaaaaaaaacaaaaacaaacaaaaaaaaaacaaaaaaaagggggggggggccacgatacaaaaatccccggggggggcaccaaataaaagggaacacacgtgcgggacaaaaggggccccaaagaggggccagaacaaagaagagcgggcgcgaaaaaacacggggacactgcgcaaaccgcggcaggggggaaaaactgtaggaaaaagaagaaactagtgggggggaggacaaatttggggagacaaactacccagaggatgagtaacagacccaggaggaaacaataaatgaagagtgttatgtggtgtctaaccacggaagatgtgtgctgggtgaagaagtgcccacgaatattttagaaaattag

SEQ ID NO: 134178 - DNA, 505 bp, Homo sapiens
gctgccactggtctctaggggccatgggtctcagccgtgggagccggggacctgccccacagagcgcatcccgtctgaggtccctgcgtgctcgtggcgcctgcagggtgcaggtggggaggtcggagcgagggtcttgggtgggtggggggtctcggaggcttcctggaggtccctcagtcctctctatctgctcctccccagaccctgacgaccagtacaagctcacggaggacacccggcagctgggcctcgtggtgtgccggggcacgtccgtggtgctaatctgcccgcaggacggcatggaggccatccccaaccccttcatccagcagcaggacgcctagcctggccgggggcgcggggggtgcagggcaggcccgagcagctcggtttcccgcggacttggctgctgctcccaccgcagtaccgcctcctggaacggaagcattttcctttttgtataggttgaatttttgttttcttaataaaattgcaaacctca

SEQ ID NO: 134179 - DNA, 608 bp, Homo sapiens
ggggaggtcaaagggcgcggggcggtgcctgcgaagagccacacggcgcgacaagatggcggtgagcgcgcggcggaatctggagccggggggcgtggagctcgggccgcgctccaggtctcatgcgctctgctttccccgcaggataaggagaagaagaaaaaggagagcatcttggacttgtccaagtacatcgacaagacgatccgggtaaagttccagggaggccgcgaagccagtggaatcctgaagggcttcgacccactcctcaaccttgtgctggacggcaccattgagtacatgcgagaccctgacgaccagtacaagctcacggaggacacccggcagctgggcctcgtggtgtgccggggcacgtccgtggtgctaatctgcccgcaggacggcatggaggccatccccaaccccttcatccagcagcaggacgcctagcctggccgggggcgcggggggtgcagggcaggcccgagcagctcggtttcccgcggacttggctgctgctcccaccgcagtaccgcctcctggaacggaagcattttcctttttgtataggttgaatttttgttttcttaataaaattgcaaacctca

SEQ ID NO: 134180 - DNA, 525 bp, Homo sapiens
ggggaggtcaaagggcgcggggcggtgcctgcgaagagccacacggcgcgacaagatggcggataaggagaagaagaaaaaggagagcatcttggacttgtccaagtacatcgacaagacgatccgggtaaagttccagggaggccgcgaagccagtggaatcctgaagggcttcgacccactcctcaaccttgtgctggacggcaccattgagtacatgcgagaccctgacgaccagtacaagctcacggaggacacccggcagctgggcctcgtggtgtgccggggcacgtccgtggtgctaatctgcccgcaggacggcatggaggccatccccaaccccttcatccagcagcaggacgcctagcctggccgggggcgcggggggtgcagggcaggcccgagcagctcggtttcccgcggacttggctgctgctcccaccgcagtaccgcctcctggaacggaagcattttcctttttgtataggttgaatttttgttttcttaataaaattgcaaacctca

SEQ ID NO: 134181 - DNA, 760 bp, Homo sapiens
taatagtaaatattaaatggtttccatcagcaattccagcacaagtttcccgggatggtaggcaaaatcaagctacccaagggtctcatgatgaggtatgggggtcactgaggaaacccccaaagtcattgacccctccgcgcaacctccacacaccaggggggccctgcaaaatgagggtggggctgataaaatggtcaataaggggagacaggatacagggtgagggaacagggtctacgctggtatattggcctgcaggaacggaggaggaggcgcaggacgcaaagatggcggataaggagaagaagaaaaaggagagcatcttggacttgtccaagtacatcgacaagacgatccgggtaaagttccagggaggccgcgaagccagtggaatcctgaagggcttcgacccactcctcaaccttgtgctggacggcaccattgagtacatgcgagaccctgacgaccagtacaagctcacggaggacacccggcagctgggcctcgtggtgtgccggggcacgtccgtggtgctaatctgcccgcaggacggcatggaggccatccccaaccccttcatccagcagcaggacgcctagcctggccgggggcgcggggggtgcagggcaggcccgagcagctcggtttcccgcggacttggctgctgctcccaccgcagtaccgcctcctggaacggaagcattttcctttttgtataggttgaatttttgttttcttaataaaattgcaaacctca

SEQ ID NO: 134182 - DNA, 692 bp, Homo sapiens
ggggaggtcaaagggcgcggggcggtgcctgcgaagagccacacggcgcgacaagatggcggataaggagaagaagaaaaaggagagcatcttggacttgtccaagtacatcgacaagacgatccgggtaaagttccagggaggccgcgaagccagtggaatcctgaagggcttcgacccactcctcaaccttgtgctggacggcaccattgagtacatgcgagaccctgacgaccagtacaagctcacggaggacacccggcagctgggcctcgtggtgtgccggggcacgtccgtggtgctaatctgcccgcaggacggcatggaggccatccccaaccccttcatccagcagcaggacgcctagcctggccgggggcgcggggggtgcagggcaggcccgagcagctcggtttcccgcggacttggctgctgctcccaccgcagtaccgcctcctggaacggaagcattttcctttttgtataggttgaatttttgttttcttaataaaattgcaaacctcaaaaaagaacaaaaaaatagcaacacgacgcttgcaagcgaatcaagaggggagtacaaaaaggaccgggcgggaatgctacacgggggcagacaccagacgcgtaaggccagggcgccggagcgcagaagagcctggcacaactttgctggacgcggggggagaccc

SEQ ID NO: 134183 - DNA, 822 bp, Homo sapiens
gggcagctgtgccacgcacacctcctccccgcagccccaacccatctccagagagaccaagatctgctctggcagcagccattctggcgacaacattgactgggcggacggttgctattcctcagcctcgccagaggtcccggtctgagagtgatgtgagcagtgttgaacaggacagcttcatcgagccctatgccaccacctcacagctgaggcctcggccaaatggcagagtgagatgggaagaagatcttctttgccatcctttgaaacactggactatggggacgaagaggacattgaaactcagctgtcatccagcggcaaggaatgggggatgtcagtgcccgggaggacagaggaggccacagtgatgacctgtacgctgtgccacacagaaatcaggtgccattgttacatgaggtgaacagtgaagacgatgaaaatatttctcatcaagatgggtttccaggctcccctcctgcaccacagtggacacaacaaaaagatggtaaacaccctgttctgaatttaaaggatgaaaaacctccattatgtgagaaacctccaccctccccaggtatttgccttttgaattatattatgatgaaaagcttggtttgagaatatccagattaattttatctgaaaataaagattacattttcttttttcttgaaaaaaaaaaaaaaaacaccgcgggtttagtcggggggggaaaaggggttggaagggccatggcaaggtgttccggacccacttttggaaaggggaaattgccggccccaaagggggggaaattcgaaacagtactaagagggg

SEQ ID NO: 134184 - DNA, 674 bp, Homo sapiens
tcgcctgatctgacctgaaggaggactgacttcaggacatgacaagttcctcagggcaaaagagttcaccaactggtttcctcactgtcaagaaagaatctggggtgagaaacaccaggtgcctaagaaggcaggagaggaagtaccactgacccttggctcactcaccttttgaactcttaatgatgtaatttgtggcaaacccaaaggttaccatgatgtgttactctgctgagactggtggctgagtcatgatgggaggccagtgtgtggagtgggtcactgggctagtgacaaagccagtttactgcccaaccccacatctcagtagagttgctctttccttactgaaccaacaaccaggcccacagaaaaagcaaactctctagtgctaggggttaaagtattagaaatcgatgattcttagatagggaataggcaccatccttaacaatagtcacacatttgaggatgtctacacatactcttcccaaatgctaagggtctctctgctcaaaagggtaaggaaggcaagcttcgttgacatctcagtgttgggaaagcagcctgtcttatgtcctgggcatggaggaaactgttgagatctgttgggctgcttttagcaggttagattgaaggggcagctcttccttgcctgcttctagctgagcccc

SEQ ID NO: 134185 - DNA, 567 bp, Homo sapiens
ggttgggcatgtgggaggagcttattaaataggttcaatcgccttttatgttttgaatgtataataaaaggcgaaagatttataccatctgaagagaaagcacagtatatatttttggatgtaatataaaaaagtacagggttttaatagggcagacctgggtttatgtcctggtctattacccattgtattcactgattcaacctttttcggacctactctgtgcaaagcactcttctagatattggggatattgtactgaatgtgatagtttgaggctttactcttatggggttcacattctagcaccttgggcaagatgtttaagttttctgaacctcatttttgcctccaacagttcaagtaaattcagcacctatgacatgctgggtattacactaagtttggcagcacaagaaccaactagatagaacctacgttttcaagtacttttacaagtccaatgggggcagcagacaaataatcacgcaaattcaggtgctgtgagagggatcaggacccattgttacgggcaatagcaaactcagtcctgggtgccatggagat

SEQ ID NO: 134186 - DNA, 770 bp, Homo sapiens
agtctcagttttctcattagtaaaataggaaaataatacttccctgtagggggtgcttagtgtaaagattaaagttgatttatatgaaatgcatgatgcttggcaatgtcaatgtttaaaaaatgttcgttgtaataattcatgtaagtaacagtaagctataagtatagcctgtattatttgtagatgttggctgtaataattatcattgttcaaatcaaagccaattcctagttcttagccttatggtaggacatttttctctgctactgtaatagtgttggaaccataaaccttccttttaattatatgttatgcaagtggaacaattagtaatggctttataaagattacaaatctacttataaaataaatcaaccacataggaataccttcattatccattttcttacactgggacctaattacttttaaggctcctaatataatttcagctctatgaaaaccaactaacaacttctaataatgcatttgattcacagttgttgatttgcattaccatgaatagttaataaatagaacagaaagctttctcttcttaggacttattagtctccttgattcataattattaatggtccatagaatacaatgtatagtttaattacaagatgtcataatcacagtcctaagatcttatgataaagataataaaggaaactgcaagactgattccactgaattgcataatgctaccatgaaagctccacaaaggtagggatctctgttttgttaacttctgtagtccc

SEQ ID NO: 134187 - DNA, 762 bp, Homo sapiens
gaagatcctctgttttatataaagaacacttttatgtaaagtgtttctacagaaattcccattcacagcagctgagtgtgcacccttaccctctgatttcaacagtgactcagtggttcctggattattgaagtctgctggacaaagcttgtgcttcatggtcatcctgaccattttgttcagcctcttggtcaatttgtccccagtattatgtatttaccttactttttagtagcaggagccagtgtcaaataagttagatggaatactctgagagacagacagaatccagctgatattcaacaatcttatattgatgttgatgtaattagaaaaagtagacctggcatactgaaaataggggaggaacttgggtataagattctttatatcttcagtccagtcttgaggaagatgagagacccaaataggtctctgcttataggcacttccatatcaagagatgttttgcatggaatgattctttgcggcaaattcagatatcttgtaacaaattttgttctgccttcctttgtcccatccaaaagcattttaaattcaatattgtattttagttatttggtttagatatttccagagctaggacaatatcttattaatctgtatagcccaagcttagtaaaatttctttcacttcatagacttacaaaaagaataaatgaataatcattctgaagctcaattcatcatttttctctctgaataggcttcccttcctgactttcataacaacctaccata

SEQ ID NO: 134188 - DNA, 754 bp, Homo sapiens
atttctttggttcattctacaaatacttattgagcatccgctatgagcccaggaattgtgctgagggaagggggaatgcaagagaccaaagggaactgaacctgtctctatccgcccctgtatccctggcatgctgggaggacggggcaaatggggaatagaactaccgtttatagagcatctattctgtgcccagctctgaattctcacaatagctctgtgaggtcgcctgtattacaaaagtcaaactgtcctaaagacaagggaccaacagccagctaccttgcatctatagttggatacctctcaagcttctctgggaatgaactgaactccactcagctagaaaaagccccatcctgacaccttcctttccctcatttcccactagtcccgctgattgcatctctttgcttcatctacttctctctgctgcccataagcctttgaagtctgcgttctcctgcttggattaatacaatgtgctggctgggggtggtgtctcacacttgtaatcttagcactttgggaggccgaggctggcagatcacttgaacccaggagttcaagaccagcctgggcaacatggcagaaccctgactctacaaaaaaatacaaaaactggcggggtgtggtggcatgtgcctgtagtcccggctactcgggaggctgaggtgggaggatcacctgagcccgaggaggaggtcgaggctgcactgcactccagcctgggcaacagagtgagacctggttt

SEQ ID NO: 134189 - DNA, 374 bp, Homo sapiens
agagttactcctaacctagatctcctgacctagccacagttccttgatgtacctgtaagactgcctgccttccaggagttacttatgatgcttctggtgtttctccctgcccctttccccgttgatgttgacgaaccatcttcttagcagcccgagcttaatctttatgagccatgacctgttgatgcaagtgatatttcatctaccttggccccatcacctagtaatatgtataaacccttgggaacagaattgcataaaaatctcagttactaggccggtctgattgtagaccagtgattggtttataaccagtaattgatcacaactggttagatttctttgtttcttcttcactcccactgcttcactta

SEQ ID NO: 134190 - DNA, 579 bp, Homo sapiens
aggcttgtggaaactcaagtcccaactgctgggatcagcaattcccctctggccaaggctggtttgaatgttccctctgtgggcagacatcagctaagtttggtccagttttctttctgctataacagaacagcactgagttcggtggctcataattgctatgctctccttccaccagtgcccagaaatgctctccacaccacatcaccacgccctggggggtagggaaggggtagcatatgcaattcaagactggtttttgtatctcttcagtgcctctttcagcaagataaagttaaaaccaagtaccatgactgctcacctgatttgtagttcttatgaaggtgctttttaatatagttgtcaaattggtgtccttgcagggggtgattggtgaagccttctattctgccatcttgctccgcctctccaattagccatttttaataccttgtatcttcaattgagaatttttgaagtctcagattgatattatggcagaaaaggaggaatcacacacagcttgtctttggatgaccaaaagcaaacacctgtcttttttttttttttttttgcctc

SEQ ID NO: 134191 - DNA, 300 bp, Homo sapiens
aaaacctttcccctgttgcttccggattgaatcatagttaggaaagcttttcctattcccagcttagaagaggaattcacccatgtttttttctagtactgattttctttattatttaagtttagatctcatatctatctggagtttatcctggtgaacaatgttaggaagtgatctacttagattcttttttatatggctacctacttgccccaatatttttttttgaagtccagtgaaaataaaataaaatatcactttttgtttacatgtctgttttatgtagttctgggttgatat

SEQ ID NO: 134192 - DNA, 882 bp, Homo sapiens
atttcaggaagaaatggtcaacattgtcaagtgctgcagagagttccaatcatatcagaattggacagcatccgctgcacttggcaatgtgcaggtcactggtggcataaaaggggctgagtggccaatggaaagggagggagtaaagactgtgttaacttacaagtgagagtttatgcatgtatgatatacagaggggctgacaaattacccattggtacaatgttcattatttgggtggtgagtacattggaagctcaaatcccaccgctatgcaatatatccatgtacaaacctgtgcatgcacccccagatcaataattttaaaaagactgttaaccagcttcggggtggaggaagatggggaccaggaatgagcatggaaacgaggagggtttttaacatgggaaagaccacagcatgtttctaagctaagaggaaacacgatctcgttatgagagttagaaggacaaggcctgaagagaaggtggagggaggaaaattagggtgagctgaactaggacaaatccctccccacctaacagagggcttatgcatggactttacattcaacacccattctacattcaacacgcatggactttagaacttgaatatgtctgttaatgttatgatctggaatatctccattacaagtttctttccactgggcttaaataaaacactttcgtcttttttcccccagaaaaaaaaaaaaaaaaaaatttttcggggcgggccagggagtttaaacactctgggcggggccagaagaaatgcagggtccagaaacggcgaactgggcgtcccaaaccggggcggtcggaccaggctgttgtctagccgccccacgcccgcgccgaacagcgaaaaaaaagaaaa

SEQ ID NO: 134193 - DNA, 643 bp, Homo sapiens
atttcaggaagaaatggtcaacattgtcaagtgctgcagagagttccaatcatatcagaattggacagcatccgctgcacttggcaatgtgcaggtcactggtggcataaaaggggctgagtggccaatggaaagggagggagtaaagactgtgttaacttacaagtgagagtttatgcatgtatgatatacagaggggctgacaaattacccattggtacaatgttcattatttgggtggtgagtacattggaagctcaaatcccaccgctatgcaatatatccatgtacaaacctgtgcatgcacccccagatcaataattttaaaaagactgttaaccagcttcggggtggaggaagatggggaccaggaatgagcatggaaacgaggagggtttttaacatgggaaagaccacagcatgtttctaagctaagaggaaacacgatctcgttatgagagttagaaggacaaggcctgaagagaaggtggagggaggaaaattagggtgagctgaactaggacaagcaggacagatgggaggcttcaggggcccagggaggacacaggcatgagttagggggatgctgctgctgctcctcaaactcatcccacacatagagtccaacgcccaagctctcact

SEQ ID NO: 134194 - DNA, 784 bp, Homo sapiens
gcagagcatactaattccccatggatgtgctatgtatatgtgatcacaagataatattcagccctgcaaagaagcttaaaggacagagtaaccaaagactgaacacagtacataaggtaatttcacagtagggcaatagtttgcttaattgtcctagacagaactgatattgataccctcaattcccctgtcacttaagataaagtcaacaatttttgtttctttctttcatctgatagttccaataaagtatgttgctacagtttttaaggggtacgcattaagcaaacgttgcgaataatagagagaattaatacaggagtggaggcataaagtcctcacctaataagaaacgttaagccatgaaaaaaagagtcatatcaaggacaatatattgaaatgcaattcaagtcatctcactctatagtcccagagaaggcaaaatgtcacagttacatttttttattcaccaatgaatattgtttaaatttacttataggaggttttgcttaagttgattcatttatctagaagttcctctgcttgtctaagcaggagggctcaaactgttggtttaaggactcctttttaccctgaaaaattattggatacctcaaagagcctttgtttatgtgagttatatctacccatatatgccatataattaatttaaatggagaatttaacttagaacttaatttactttaaaataacaaaaatacaaccagtatatgttagaaataattaacataagaaaactgactatatttttccaaataaaaat

SEQ ID NO: 134195 - DNA, 422 bp, Homo sapiens
cctctggccttctgaaagttcaaaatgaaggaaaggatagcgtaaggcaaaccaggcaagcactgcccgcagctattgtgtgccagaggccatgccaggtccagaagaggaagcaaagagaataacaggacgccatctctatcttcaaggaatttaaaacgtagtgggagaacttcactcacgaacaatcaacaaaaaacaagataaaatgtgcctttgtgaggataagagccaagtactaggcagcaaggagaaaggagggattcagattccgactgcgaggaccggaaatagggcgtgcttggaggaggcttaaggggcgagcacagtcttatctgactggcggcttcagggacaggtttctccccatcttgaggaaaccgggaaaatcctttaagtgagcacaatccacgaaggctggg

SEQ ID NO: 134196 - DNA, 634 bp, Homo sapiens
gtctgggacatatgatagatatatgtttaagttttaaagaaatggcaaacttttccagagtgcttgtgccttttttattttctttccagcagtgtagtagaattcaggttgctctacattctcaacaacatttgatactgtctttttaattttaaatattcaaataggcatattttggtatcttattgtgtttttaatttgtatttccctagtgacaaatgatgttaaacatcacttcatatgcttatttgccatttgtatatattctttgatgaaatgtctatgcatatgttttgcctgtattttaattggattatttagcttattattgcattttgagagctcttcctatattctggatacaagtccttttgtcagatgtgtgtttgcaaatattttgtcccaaaccatagcttgtctttttcctctcaatactctaatggaaggataatatataaatgcaattttgttttagttttttaagtcctctgttagccatgaagagggacttaaattaagtatacaaacaaggttgcagagataatctaaccttctaagagaataaaatattctaaatcttttgcatatgcatataaaccataatatgcaaaacagattaatatgatgttatatg

SEQ ID NO: 134197 - DNA, 758 bp, Homo sapiens
tgtttagtaatgtgttatttaatctgtaaatattgttggattttctagctattctcctattattgattttctagtttaattccaccgtggtctgaaagcagaccacattttgtgatttctactcttttaaatttcttgagttttgttttatggtcccgaatttggtctatgttagaaaatgttacatgtgagtttgaaaagaatgcatattctgctattgctggttgcagtatatagacttcctttatattgagttgatcttggtgttgttgagttcagctacatcctttctgattttttgcctgctagatctatttctgagaagtgggggcaattgaagtctccaactttaataatgaattattttatttttccttgcagttttgtaagtgtttgcctcatgcattttgctgctctgttattagggacatacatactaagtattgccatgttttcttggagaatcaacacttttattattatataatgcccttctttatccttaataactttctttgctctgaagtcttctgaaattaatatagctacatgtgtttcttttcatcagtgttaccataatacctctgtctttatccacttacttttaatataaatgtgtctttatattcaaagtggatttctcatagacagcatactggagggtcttgttttttgctctattatatttctgtcttttaattggtgtttttagaccattgacatttacaatagaccattgacatttacaatgattattg

SEQ ID NO: 134198 - DNA, 275 bp, Homo sapiens
gggggacagagccagatgccaggaatgagaggccaaggcagcattcctgggtagtagctggaaaggaagggcctctggggagattgagaggtgggatgtgaccctcatatgggcactttgaagagggtttgtcactgtcaggccagaagaggcagaggaaggagggggcccagcaagttgtcagagggacacattctcagtcggagcctgagattcatctttcagcacctaacttcacaattccagatggctctccttggggagttctttttctc

SEQ ID NO: 134199 - DNA, 204 bp, Homo sapiens
cggtgtgctggggtgatctagaggatcccatatgctgtctcagcctcggagtagctgggataacaggcggagtgccaccaaggccctggctaatttttgtatttttgtagagatgaggtttcgccatgttggtcaggctggtctggaactcctgacctcaggtgatctgcccactgtggcctcccaaagtgctgggattacagg

SEQ ID NO: 134200 - DNA, 262 bp, Homo sapiens
gcctcctaaagtgctgggattacatggtgtgtgccaccatgcctggctggccagaatgtaaatgataactgttttgcttcctcctgtgtccagtacataatagggctccaagtcagtatttgtgaggcaggtgcatgcctcttagttgcggtcctgagggcatggccactgccacgttctggacagtcagagtcgctgctgcccctggaagatgaccgcgatcatgaagcccaggagagctcgatgctttttgcctttccct

SEQ ID NO: 134201 - DNA, 538 bp, Homo sapiens
ggtgaacttagatggggagcccattcataattgatttttgttttttcacttgcatgcatagtagtcaaacaatatagaaaagtattcagtgaaagtctctctctcgatctatctctcatctatgcccagtcccctccttggagaggatcactgttaccagtgtctgctacatccttcctgagaggctgtaagctaggggtcggccaactgtgacccatgggccacatccagcccactacctaattttgcgtgacccttaagctaagaatggggtttatatttggtgctgaaaaaaaaatcaaaaggagaatgatgttttgtgacacatgaaattcaaattttagtgtccacaagtagagttttattgaaacatagccacactcattcatctatgcttttttgtttctgctcatttgtttacttatgagtggctgcttttgcactatgatggtagcattgagtgtaacagggactgtatggcctacaaagctaaaaatatatatctaaccctttacataaaaagtttgctgactcctgc

SEQ ID NO: 134202 - DNA, 790 bp, Homo sapiens
atttattttaatagtatataatttattattttaaataactgaattaataattgcatttaaacttaattagcatagtattttttttactgcaaataatgctttacaccaaaatgctgacaatgatcagattaggttgagaatatatatgattataggtggtgattaatattttaggaagtaactagagccggcatttgggggtgttgcggacgattcttacgaatccagacaatttgctcttttaaacgcggccttgcggttgtctaacagtgagaatagatgactaactgaatttgtcagactccctgccttctgtcataataacgacgcagaattgccaccgttatgtgtcttggaaatcttaaattctttagctctcacacacaaaaaattgaacggaagatacttggagagccagggtccattcagcacagcgcggctgggtcggcttccattcctgggtccgcagcgccctcgtgtggtaggtgcccagccttcctggctgcatctcaggccagggtacccattgatccttacttcccagtacagtagctgccttcctgggtcacaccccatcggaggtcacgatctaccaggaggttagccacccgctgtggttgtcttgtagttcttcgcaataagttactggctaggagtgcttgtaataagtcctgagtaggacatggcgattccattccttacacatgttgtgtacacgcagttatcctcaactggttggttggaccgtggcgtttatttccacaaagcagcagtttcctaaaggatggtt

SEQ ID NO: 134203 - DNA, 370 bp, Homo sapiens
tatactttttcctgaccgatatcttctcacacacagaaatattagtgatattaaatataccagttgaaaacaaacatctaaatggtacggttcagaatgttggtgttgaagtaacccagcagctgacagcatggagtaactattcttgccgtgtaagattatactctaaagatctggatgactgcccgggagtggtggcccatgcctgcaatcccggcacttcgggaggctgaggcaggtggatcacctgaggtcaggagtttgagaccagcctgacaaacatggtgaaaccctgtctctactaaaaacacaaaaattagccaggtgtggtggtgcacgcctgtaatcccagctactcaggaggctgagt

SEQ ID NO: 134204 - DNA, 465 bp, Homo sapiens
aattgcacagggaagaggtagactttggggaaatggctgtgatgtgtctgggaacattctgtcctagacacagagctctcagttgtggcaccagagccactagatcatgatggagaggacattagagacccttctcatatttcctaggtatcaacgggccttgggattcatggggtaccttatgaaagggaggcacgccaagtgatgcttaaggctgattttgctcctgcaggatatgggctagaaccagacatagcctgatttaaaggaaatgaagcaagtgacattttgcacatttgggtttggtagctacaaatccatatctactataggagaaaagggtctttatggaaattgttttattgtctgtgtggcaactgactctaaaatcagttgtatatagtgtgatgtgcatgtacacgttaaatacacctcatatcccagaggtgatcaacataaacagag

SEQ ID NO: 134205 - DNA, 601 bp, Homo sapiens
aatgagataaagtgatgagatgaaatgaagtgaaatgaaataatggaatgaaattgaaatgagatgagatgaaatgagaaaatgagatgaaatgagaagaaatgagatgaaatgatgaaatgagatgatgagatgaaaaatgatgagatgaattgaaatgaaatgaaataatgaaataatgaagtgaaatgaaatgatgaattgatgatattgaaatgaaattgaaagatgagatgaaatgagatgaaatgaaatgttgaaatgatgaagagatgtgacatgaaatgagctgaaatgagatgaaatgaaatgagattaaatgatgagatgaaaaatgatgagatgaaaaatgatgagatgaaatgatgagatgagatgagatgaattgagatgagatgagatgaaataatgaaattaggtgaaataatgaaatgagatgaaataacgaaataaaattgaaatgagatgagaggaaatgagatgaaatgttgaaaagaaaggaggaaatgatgaggtgagatgaaatgatgagatgaaattgagatgaaatgagatgaaaaatgatgcgaaaaatgatataaaaaatatgacatgagatgaa

SEQ ID NO: 134206 - DNA, 617 bp, Homo sapiens
tctgatccagtttcggtccgcagtgtcgattatcagcacatagaaacagaaagcagcgtttgacagactaagacatcaagacattattctggatgaatatcttaggctgctgcagagaaacagaactttacatgagacaacgtgtctgaaagtagactgacattactgcctacacttagattattatatgacggtcatatcaagtacaaattcagtccacgcactgaccccatggctgcactctctttgaacatatgatgaatgaaatgaatgttttgagtgggttattgtaccgtttaatatatttatgcactagaatccccatctgccttagatttgggcataactgagtaacctacaccagtttttctatccccatagaggtcttgctccagcctagcttcaagaatgactattgtaggcatccagatgttaatcaaccgagcatatatgctcacagttgttttgaagaatgctttttaatgtcaccttcctgcaattttaaaattatttgtgtcttgagctaccaaatataattacattcctgagcacattaaataccataaaacttttcttatgaatgacagaatcttgagctatcaatcaccatacccctg

SEQ ID NO: 134207 - DNA, 489 bp, Homo sapiens
taaaagggatctgagcaccccacctagtcatacacagcagcctttgtcaggagacacacacatgccctggtggtaggaatcaaatcgacaccatcccacccaccttgcaaaacccaactccacatgaaaagcctcctgagggcatagtaaccttttaccctggtagacatgtgcagccgcattacattacaataccaacctaatcatcacaatagtgattctcacaacattaccaagtggagcaaattttcctttacatggaaaactattaacagtaccaaatggtttttacaataagtgcttatttctttttgctgatttttttaaaggctatttttttttatttggtaaagagataacacgagttttatttttacaagagtgcctcctgccctatgaagaagcacacacgatgcatacaggcctaacgctggactaaataggtggtctctgcatcgatacccactagctggccccctgaggtcatgg

SEQ ID NO: 134208 - DNA, 153 bp, Homo sapiens
cccactcacctagtgtcttgtagttatttgtttataccttgcctcccttgttcttctgtgagcttcctatgaatagcatcatatttttccacttttgcatcacagcacatagcacaatgcctcacatacctaagatgctcaataggattgtta

SEQ ID NO: 134209 - DNA, 625 bp, Homo sapiens
agctgacacaaatagaaacgggagagaatgtcacaggaatggagctcgaatttaagcgtctagccagctcaaaagctcacacctcaaggtttatcagtgccaatcttccatgtaataaattcaaaaatcgccttgttaatattatgccatatgaatccacaagggtatgcctgcagcctatccgtggagtagaaggatctgattacatcaatgccagttttattgatggatacagacaacagaaagcctacatcgctacccaggggcccttggcagagaccactgaagacttctggcggatgctctgggaacacaattccaccatagttgtgatgctcaccaagctgcgtgaaatgggcagagagaaatgtcaccaatactggccagcagaacggtctgcaagataccagtactttgttgtagatcccatggctgagtacaacatgccacagtatatcctaagggaattcaaggtcacagatgccagggacggccagtcccgaacagtaaggcagttccagttcactgactggccagagcaaggagtgccagagtccggagaaggattattgacttcatcggcaagtcataaaacaaagaacagttggcaagatggaccattcag

SEQ ID NO: 134210 - DNA, 498 bp, Homo sapiens
ttgcaccttctggctgcctgagctgcacacctgcaggaccccgggcttcccagtaccaggagccacctgggaaccatttaaaaactcagctctcaaactagccatttcctccctcaagaaatcagtgagaaatgaccgccctggggtgatggcactggggaacaggaggaggcccctagagaccaagggagaggcactgcccaatctgtggtttccatggtttctgtccccactgcagctgcaaagaggcaggagctccaatgccagggttgctgcccatctgtgttggaggccacctgggagagatgccatgccagcccttgcaggtgcagagtcccactgcatctgttcttgacagctgagagcagatccagccccgcccagtgaagccccgctctggtcttatgaaaatgagaactgggatctgaactaggatcttaaggcttggcgggctgggtgagccacatttcactcccctgccccagtctccacccatgg

SEQ ID NO: 134211 - DNA, 353 bp, Homo sapiens
ttccgccatctcttccttgtcatcaggtgtaccaagtgtcatggccacctccagataacaccatgtgttcagaacatcacggtgacctgtatttgcatattaaagggctaaggtgggagggccaggtttttcgagagctatgtaaatgacacacctggtcaaaccaatcccctgggccctatgcaaaccagacaccacctcctccaggatcccaatataagcaaccacttttccactgcacactgggttttctctttgttcaaatcctccctacctctgtctctgtatgggggaggtgttttcttcttccttccttctttcttgcctattaaacttttcactccttaaaacca

SEQ ID NO: 134212 - DNA, 457 bp, Homo sapiens
cagcggaacaagcaaatatggatcattttgtgtctgtgacaattgtgctgctgttaggggacagatcattacagaacacattacttccaaagttttgggtttcattgcagtgttctcattctatagtcaaggatgttataaaaaaggaagtttaaaacaacatattttaaaaagtagattgtcgaaaaaaatctaggaaaagtgcaataaggtagtcatttgaggctgggtgcagtagctcatgcctataatctcagtactttgtgaagctaaagtgggagtatcacttgagtgagaaatgtaagaccagcctgggcaacacagtgagaccctgccttttgttttcaaaaaaggtagttattcaaatattaaactctggcttaaatttcatttactcctaattgataaaatcatttgttatagtgtggttgcttgttccgctgccaaacctcgtgtt

SEQ ID NO: 134213 - DNA, 351 bp, Homo sapiens
taatagaacacagctggattctcatatcagtttcttcatctactctgttgcaatatattgttttggttgatgtatatgaaaaaaattcagtctcacacagatatacagttggaatacaaggaagtattttaatagctttttcaggtaattttgggatatattttgattctacaaaggcagatggcagtttcttaaaagttaattgtggtgtggatctgaaagcattatcagtgaacatttttcaaatgctattacattaaagtgcactggttgattttgtactttgaatgattttttttactaatgcatgattttgtgatatcaggcattgctcatcttgaaaatatttat

SEQ ID NO: 134214 - DNA, 307 bp, Homo sapiens
ttttgatgtcattattccagcctaactaggcctgactgaaatgtctgccacttgccctgtggtcatattctgtgagcccctggtgatttcatgatgggatttctagttgatctaaggctagaagaaatagaaatgtattacaatgccttcgatgacaaaaataatgatttttacctatgacctatatttaacaaaatgataatacgtagcattgaatgaaagatagtcggctgggcgcaatggctcacgcctgtaatcccagcactttgggaggctgaggcgggcagatcacgaggtcaggagatca

SEQ ID NO: 134215 - DNA, 469 bp, Homo sapiens
gttgaatgtttcatgtccaatggaaaagattgtgtattctgctgttgttgggaggagtggtctataaatgtgaattatgctgagttggttgataatattgctcgggtgttctatatccttactgatttactatgtacttgttctgtcaattatgagagaaaagtgttgaagtctctaactataaatgcagatttgtttgttttcatttttatcagattttgctttacatcttttaaagctctagggtacatatttagaattgttatgtcttcttagagaattgactctttttgcaagacatagtatccttatttatcactgataatatttctcatcctgaagtctactttacctattagcatagctacccttgctttcttgggttagtgtttccatgctttaacttcttccatctacttatttttaagctgtctgtatctatttgacctgtctgtacatatgtaaagtg

SEQ ID NO: 134216 - DNA, 693 bp, Homo sapiens
taagctaaatcttcagaagaagaaataagaaaacatgaatccagaaaaatactggatctgaccaagccctggtcacacaatcctggaaatgtagcattcacagtgaaaggatgtacttggaacaaaactttcccttcagaaggaaggttagtaaatgtggaaaaaatgaagaacacaaagtaagatgatagaaataaattcaaatatatctttagttacaataaatgtaaaggtactgcactttttagttccaagacaaagattgttaacactgcatttccaaaaatccaggtatatgcagtttgtaagtgctatgcctaagttataaatttaaaaatggttaaaaataacaagtgaaaaataatatatcagccaaataataatcaaaagtaagcttggatagatatagtaagaaataacactttaagaatgaaaagcattgctacagattaaaaagactattacaatttgataaaagattaaaatattctgaaagatacagtttctaatttatatctgaagtctggtttaaatttttttataaagctaaaattaactgaattataaggggaagttaacaaattttcagtaggagatttgagcataatgttctctgttaatgattgaccaagcaggtcttaaatctgtaagcatgttggaaagttgagctctacaaatactgcacttgatata

SEQ ID NO: 134217 - DNA, 123 bp, Homo sapiens
attcataatagccgagaggtggaaacaacctcaaagtctataggtaaatgaatgaaatgaaaaaactgtggcgtgttcgtgcaatggaatactatccagccttattaaaaaggaaatcctgcc

SEQ ID NO: 134218 - DNA, 475 bp, Homo sapiens
cattttaagtcatctctgggaaagacttgctccttggcatttctttgggctaggtaaactgaattggatactgtgtgaactcattcatacatcagttttcttggctcacagtacagatttgtatactatttgatctttttaaattaccccatgccaactttaagcctgtactaagatttcatatagtaaaacattattttattcgggcacagctaatttaaagttacatatgtgcaacgctgaaatgtacctttgtactaaaagtttgataattacattaatagagtaaattacactgaagagatgtttcttaaatatcaaaaatgtccaaattaaagaacttccttctaaccactaaaactaccttggcattgatctgcttgcatttaaataatacgttaattacgaatggctcatattaaatttatcaaccaattcctggtgggtcctctacttgaaatcatgttcatataat

SEQ ID NO: 134219 - DNA, 491 bp, Homo sapiens
ccctcactctgtccctttctcttccgccttttccttctcgcctcacccacctgcctagctactgcccctgcctcctcctcggctcatttctgcccccatcctagcatttctgtgcttcctggtcctacctgtgccctctcccgactcctcggtggaatctgtgagctgccccttggcctctcccctgtcctcttgtctcagaattctcgttgaaaagcctccttgctggagagaaaaggggactgggggagatgagacccccgattcctgctctattcacttgctgagtgaacttgagcaagttgctttccctttgaggcctcagtttccccatccgtcagccagagttcggcctctgttgaggcctaaggtgttttccagcgttgtgattcactttttgttgcctcgtagcttgaccttaccaaagtttcccgtggcgcaagccttcaccccatgactcaccgcttccccatccgtctgaaccagaaata

SEQ ID NO: 134220 - DNA, 309 bp, Homo sapiens
gtgtgcttcctggctggctgtccctcctcagggcaagcaatgttcccaaagggaaaggccttccttgggaaggtgtaagggagactggcctggggtgggccagcctgctgggactcaggatgggggaggtagagggaaacacaaaggctggtcttggcgaggaagggcctttgtccttagggtcccagggaggccttggaggcattttcaggcagaagtggcaccggtgggtcagctgtgagtgagtgtggatgggaggaggtgaaccccatggtgagagggactggacctgcgtgtgtgggggtcggg

SEQ ID NO: 134221 - DNA, 342 bp, Homo sapiens
aattaatttacatagatctattgcacaaccatatgcaatagcaaacactaagagatgacatttgaattcctagtccttgcttagatgggaaggggattgtaagcgttttaactatcccctttctcaatgtaattgtgagaagattccatttagaagataagagagagactaaataaatttctcaacatgaaatccctattttaatacacaatataatatagtaaagtcactgaaatgactgtaagactgtgcagacattgagctattagatccagggacagcccagatcccctggggcctgtactggccacatatcagaagcctagagctctgcttaattgg

SEQ ID NO: 134222 - DNA, 740 bp, Homo sapiens
caatcagttagaccagaaattctcagaagggagtatgccttaaccgtaaagagggctagaagagctgtggcaagatgagggcatttacagccctatcttatccatatggacaggtgcccccacatgcgtccatttataggctctccacaagggttgcattccattcccagagctatgaaaatctgcatttctggcataggaatcttggtgatgtgaaacctccctgactgcatgtctggtcataggctctctgcagggggaagcacatcacacgctgttggctcattctggcagtccaacctggcattgtctttacacaatcctgcatgcaactttgtattcacaataatcaggagcatttcatcttttattccgtagcaatagtttcagggggtctgcctacaatgattattgtaaaaattcaaataaaacaaaatttttatcttagaaactgaaagttcccctgtcatctgaaccttaaagacaactattgttaatatattattatttcaaaaattgtgggccagcagtggctcacgcctgtgatcccagcactttgggaagctgaggtgggcagttcacttgaggtcaggagttcgagaccagcctggccaacatggtgaaaccccgtctctactaaaaaaacaaaaattaactgggtgtggtagtgcatgcctgtaatcccagctactcgggaggctgaggcaggagaattgcttgaacttgggaggtggaggttg

SEQ ID NO: 134223 - DNA, 466 bp, Homo sapiens
caccatcttgactgcttaccaacagaagcgccaaaaccaaacttgaggatgtccacaagcttgctctacacttctacattcatcctcatcttttttgtgtgtgtttgtggggtaggggaggtgcagtgtttactcagtgatctttctactttctagaaagtgtctgtccttcaaaactatttaagagcctctcattagtcattttttctcttatatgctctggttgagcttgaatagaccagttgttgcttaagaaagaaactgaaaagattttagcttttcagtcctatttggcagaggacttcagctaccttcttatggtctttggctgtgttggtgccctcatgtgctctgggctaagccacatactaaattgactttttggtttgtatacccttgctctcgccttctgatgaaaacaccttaccctcaccaccaccatctttgctctcctttcccaaaactc

SEQ ID NO: 134224 - DNA, 432 bp, Homo sapiens
caccttgatttcacacttctggcctccaaaactgggagataataaatttctgttgttttaagtcacctagtttatggtattttgttataataccctaggaaactaatgcacccaccaaataaaacaatgcccatctggggtgccaccaggataaggcgaatgtggaatgagtgatgggaaaagaaggctctgatgtatcagcttggccctagcgtccatctacagaggctgaaacagttacatttagttatgacttttccttgcattcttacatgaagggcactcatggtggccaatggcacgattcagatttaggtgaaactgaaatgacatcaccacatgatgacacatcggctgatcggagtttgtgggaggaaaccaatgtcctcagtgtcctccaagcaaaaggcaagaatgtgctgagaggcacag

SEQ ID NO: 134225 - DNA, 317 bp, Homo sapiens
cagagtagagatctcataacacacaaggcttatgacagggtcctcaaaaaaagtatcattaaattagaaggactaaattagacctagacagaccaggcacggtggctcatgcctataatcccagcaccttgggaagccaaggtggatggatcacctgaggtcaggagctctagaccagcctgaccaatatggtgaaactctgtctctcctaaaaatataaaaattaactaggcatggtggcgtacgcttgtagtcccagcttctcaggaggctgaggcaggaggaaaatgggaaattggatatgaaagaaatacaca

SEQ ID NO: 134226 - DNA, 415 bp, Homo sapiens
catcagcgccacctcatgttccttgctctgcttctttgatcttattttctaataaactctaatatagttgtggcatccttatcttctaacagagtttataatttactatgatccatctattccctccagtctctacagtagaaagtaagttctttgtaggcagaaagtcatgtgggttttgttcattggtgtaacccaagctccgtgggttcatggtgcatgactggcactcagtaagtagttaaataaaaggtgaactttcaaagtcatccactttatgttttgtaattcttagttgagagttctttgttagttaccctttaatcttaggcaaaggctttaaggctctcagaggcctcaaatcctgggcctgaacattttgaacctaccccaaaagaaacaagacctctatttg

SEQ ID NO: 134227 - DNA, 177 bp, Homo sapiens
ttttaccttttctgtgaaagggacaaaatcaaagtttagtactgagatttttgtaaaaaacactcaaagtagaaaaagaatttttttttcagacttttaacatgatgttctgtaacagttattttctttaaaatttggtatggtgttaagagaatagaactaagtaaatgtgaaatt

SEQ ID NO: 134228 - DNA, 432 bp, Homo sapiens
ccccctcgccataaaataaaatgtgggatgggatcaagaatttaaatctttgaaaggcacttcagccctcattttgtccaacctgtatatggagctaggatctctttctgcagtattcacaagtaccaacagtcccatctttgtctgcaaagacctttccactgattcacaggtctgttcttttgttccttattttttctttatatcaaacttaaattctctatcctccaattctcaaaccccaatcttagttatgcatcatgaggcttttggagaaaacctgcctaatggtctatctcccttcctgtgtattcaacctccccttttcagctggcattttgcatgagcattgaatcatggtcaggtcttgcagcttgctggggaagctccttacaccccttgtcctttcttcacctctcaccttctctctcc

SEQ ID NO: 134229 - DNA, 547 bp, Homo sapiens
taactgatcacagggaacactgattagtatcctaaacccatgaggttgggtcagttcaggcaccaagaaactataattttctcttgaaattctgattatctcaagttcctataggggttgtatcacaatgaatacaggtccttttaagagatttggtacactaaaatagctagattctgaaaatgcagaaacaaatgtgcagagacaggagaagtctagagcagggaaaagtcgagacaattccaaatgctcttttggctgaagcctgccccaacaacaacaaaaaaaagtagagatgtattttccctgtacttttgcccacgttattcagtgatggataataatttttccttccaagactattcctttaaggctcagttcaaactccaacacctccatgaatgtatatctaccccagtttccagatatctctttattttctgcataactgtagcacctactgtggatagcacccatctgacataagtatggacacatgtatatctagtttacttggagttctagaattctaaggaacctagaagac

SEQ ID NO: 134230 - DNA, 682 bp, Homo sapiens
ccagtctgtcaaaagttttggtaaactttaaaagaaacaaagacagtaaaatgtcagaaaatatgaaatacacaatatttgtcacatcacatagatcactggtagataaataactatagtatgatatggccaactaaataattttaaaactgctaaataatacaacttattcccagaaataattcccaattaggtaatcacgcttcattaatcataactcccaagttcacaaaagtatggcaaagctaacgcattcatgctctgctgacagtgtaaactcgctcaagtctttggggaggcaaaaatctggcaactgtagaaacatttatatcctttgactagtaattcatttgagattagtatcctatagaaacaattcataaaagaaaaaatgcacagagatgttcaattcaatgtcaaaataggcataaactgaaaactattattttcctgtcaggcatttagaacaaatttaatacttatttttcaactatcaagtaacaatcaaatatcataaaggttatacaacatggaaaaatacaatgctataaaagtaaaataaaacttatttgatataattctgtaaaaactgcaatatatatgcacaaactagaagaaaacaaaaataatgaacacaattatttgttagtatggcaaaacaagttgatatataaaaaaattg

SEQ ID NO: 134231 - DNA, 430 bp, Homo sapiens
aaatataattaaataaaatgtcctgtcagacgggcagaatacggaactcacatagatatcaagctggaaaatcacatctgtttcttaaatctaataatagaataaatataataaggaaataaatcactcacttcaaaaaatccactccgaaatactgatttaacaggctatctgtattataaccatagcccaaaagaggctctaaaataaggccttaaaagacaatcagttataatacacttagatgttcacaatccttacatctgttcaaatacagattttataatttataatcataaatttacaatctagtttctgtttgattcttgaactcaagaccagaattttaacttaaaccattagattaagtgtatgaggcacgttttcattttttttttttttttttgagacggaggctcgctttgtcgcc

SEQ ID NO: 134232 - DNA, 137 bp, Homo sapiens
tttcctggcgcacttctgccagctcccgggtgatgctggggtctcctgagcccctcgaatgaggccaggcaagcaggcgttatgccagacagccgccaacagtgtgcgtcgctgctttccataagaaaaggcgcctg

SEQ ID NO: 134233 - DNA, 496 bp, Homo sapiens
tctgacccacaggagacaaaaataactcagatgcccgggagtactttgagaataatatcacacttgtcaaagtgggtctaatgatgtcagtcatctttttctaccttgcatttcttcattgcagcttacactgacaaatgataccattcctatgtccacagttttctttgattaaaaacccacagagaccacaatactaatatgaccactaaggctgaggcttgaacgaaggttttattctccagaatctgttcaataaaccaatttgatttttataacaaaaaatgtgatacataatttgctcccccattcagtagagattctggacaatggcatcacagaatattggagctagaaagaaacttaaagattactttcatgttattttactgatgagaaaacagatgcccaaagaggaaaaataataactttaaggtcaaaggcaccctgtgggagaggaaaagtaatcaggatggctaacaggccctgggagaag

SEQ ID NO: 134234 - DNA, 569 bp, Homo sapiens
  misc_feature (33)..(33): n is a, c, g, or t
  misc_feature (112)..(112): n is a, c, g, or t
gtctcctagaggtatccccgtcaacgctttatnttcggctgtggctacttgaggaccagttaggagaggcacaagatgaaaagtgccctcactgttccctcgatgggaaganccttccctcactccctcaggaggctggttcctcccgcaggttgctcagcccagaggccagctggctagagcagtcccactccactgacaccctccctgagtatccacatccagcacattataatagttcaggaaaaaggtgatgagagaacatgctaatggagatggagaggagtggggaaggttttaagaaatatttaggaggcaagaatagaaataacttagtgaccaatttgagaggtttgacaacagagtagaataggtcattatcttaccaagctagaacaataaaagagtgagtttggatgcctgcaaggataattgactaagttgtagacctggtgtctgcgttttgtgggtgaccaggtagagaggtacagataatggaaacctgcagtttaggagggatgtcaagattaaaggcagaaagctagacttcattgttatatgtgtgcact

SEQ ID NO: 134235 - DNA, 416 bp, Homo sapiens
tccatcatattttggcctagctgtcaacagagttgacaacctcccttacaaagtttgaacctagaatctcaaatacatttgcttgaggaaatacaattcaaaaatctgccaacgtgtttgtttagaagaaacaggtatggccagtatggtagcttatgcctataatcccagcactttgggaggctgaggtgggaggattgcttgaggccaggaattcaagaccagcctgggcaacatagtgagacccccatctttaaaaaaaaaaaaattttatcaaaagcattagccaggcatggtgttgtgtacctgtagtcccagctactcaggaggctaaggtgagcccaagagttcgaggctgcagtgagctgtgattatgccgttgcactccagcctgggtaacagaagaccctgtatca

SEQ ID NO: 134236 - DNA, 574 bp, Homo sapiens
aatacatgaggatttattataccagtatactctggggtacatttgaaaattcttataagattttttaaaagtcaaattcaatattgtatctactctaaaggctactttctcaagaccatacaccacaaatcatgaaacatcaatgtagtgaaatataatgagacattaaaatttacaaatatgtcaactatttcaacacaccaaaatgtatacatgaaatgttagattaaaatccacgatgtaaaatctatttacgctaaccaaaatctgagttttaagcttcactcagtacaacaatctctctcctaaaatcagcccatgtctaaaacttcagacattcctcaaaatttacagaatataaaaacttagccacccgattgtttaaagtgaggttagttcctaatacctcatagtatcaaaccaagtataatccaatttaggtaactctaagggtgatatagacttgaagacacatgggaggagaattcccatttactaacacctgctatttgctaatcatacagtatctcatttaatcttatattatctcaaactcatgcttccatcaaataaa

SEQ ID NO: 134237 - DNA, 553 bp, Homo sapiens
atgtgctgggattatacatgtgggccattgcgtcctccctggaccgagattcttgaatatgtagtgcccagcaccagcaggaagtcagtgagtagatttgaccattggttggatgtatatctgtgacttagggtccataaagatcttttgaagaactgggcactaatcccaacttcgcattagacaatgttgccaagcaggtgggttgttttttagcatatttgagaagggggaaagagcccactaactttctgggcaaatttgggcaaattaccaaccattgtgggtctcagtttcgactgttaacagggttgcctgagcattgccagtatatatgatgaagtattggccaggtgtggtggctcttgcctgtaatcccagtctttgggaggtcgaggcgggaggatcgcttgagtccaggagttcaagaacagccgaggcaacatagtacgacctcatctctacaaaaaataaataaaattggccaggtatggtggcacatgcttgtagtcccagatactcaggaggctgaggcatgagaattgcttgagcc

SEQ ID NO: 134238 - DNA, 272 bp, Homo sapiens
ggctgaagcatgagaatcaattgaactgaggaggtggatgttgcagtgagcccacatcatgccactgcactccatctagcctgggcgacagagccaaactctgtatcccaacaaaaaacaaacaaacaaacaaaaagatgtaatgtctcacctatgagattagcaaaaatccaaaagtttgacaatcctctctcagcaaagccttggagacactccaacattaggcagacactctaacattactgatgacggcactagctctagggaacgac

SEQ ID NO: 134239 - DNA, 540 bp, Homo sapiens
gaaaaataataatataaaaatatccggccaggcgcagtggctcacgcctgtaatcccagccctttgggaggctgaggagggtggataacctgaggttgggagtttgagaccagcctggccaacatggtgaaatcccgtctctactaaaaatacaaaaattagccgggcatggtggtgcatgcctgtaatcccagctattcactaggctgaggcaggagaatctcttgaacctgggaagcggcagaagttgcagtgagctgagatcacaccattgcactccagcctgagggacagagtgagaccctttcccaaaaaaaaaaaaaaaaaaaaaagcattacaagttggagtagcctgggctcccgtgttggctttattactgagctgtgtgcaggtggatgttttgctaaatctttctatgttccacgttatcaagaccctttctctcttttcccaaagctctcgtatcaattccatttaagccaaatctcattatttcattgcttttttttttaattatcctatttttaaaattattctcc

SEQ ID NO: 134240 - DNA, 426 bp, Homo sapiens
cctccacccacctctctacctgcccaggctccagaaagccaaaaagagctggagtcaatgaccttctccagcatctgtgtaaacctggaaagttacttacctgttttaaaaaaagaggaagacaatatccatagtacagatattttcccgggtaaggattgtcataataatggcctgtgaaggcccttagcaaagtgctggcataaggcaagcgtgtaataaataactactggcatgaaggcctctggtgatcagattagccctctgtgactttcccctcccctgggttcccataagaaatggctgaaccactcctttggcctttttcaaacacagctttgtaacagttgccaattttccttctatgagtagctcatttccccaactgcaatgcaaacaatgcttatcactcaacaaatatttgct

SEQ ID NO: 134241 - DNA, 282 bp, Homo sapiens
gcagctctgtctgcaccaggaggacaagccaggctgggtggccaaataaggcccgaacctctgccaccagctcctctgccaccagctccttctgccaccctgggcaaggtcgcaggctggtgtcgcgtctgtgtgtgactgttattctgtatgtgactgtaactgtatagctgtgttattctgtgtgactgttattctgtgtgtgactgtgtgactgtgttattctgtgtgactgtgtaactgttattctgtgtgtgtgactgttattctgtgtgttactgt

SEQ ID NO: 134242 - DNA, 429 bp, Homo sapiens
gcagctctgtctgcaccaggaggacaagccaggctgggtggccaaataaggcccgaacctctgccaccagctcctctgccaccagctccttctgccaccctgggcaaggtcgcaggctggtgtcgcgtctgtgtgtgactgttattctgtatgtgactgtaactgttattctttgtgtgtgactgtgtgtgactatgtgtaactgttattctgtgtgcgactgtgtgttactgttattctctgtgtgtgactatgtgactgtgtaactgttatctgtgagtggctgttattccctgtgtgtgactgtgtgtgtatagctgtgttattctgtgtgactgttattctgtgtgtgactgtgtgactgtgttattctgtgtgactgtgtaactgttattctgtgtgtgtgactgttattctgtgtgttactgt

SEQ ID NO: 134243 - DNA, 692 bp, Homo sapiens
gcctcttcaaacaaaataattaccatccaataatttcatatccagcaaaactaagcttcataaatgaaaaagaaataaagtttttcagacaaacaaatactgagagaatttttcactaccaagtgaacactacaagaaatgctaaaaggagttctaaatcttgaaacagaatatcaaaatgcacaaaaatagaaccttcttaaagcataaatctcacagaacctataaaaaataccacaatgaaaaaaatctaaggtattcaggtgacaactagtatgatgaagtacctcaaatctccatactaacattgaatgcaaatggcctgaatactccacttcaaaggtacagaatggcagaatggataaaactccaccaaccaagtatctgttgtcttcaagagactcacctaatgcataaggactcatataaacttgaggtaaagggtggaaaaaaatattccatgcaaatggaaacaaaaagcaagcaggaatagctgtccttatattagacaaaacagactttaaagtaacaacagtttaaaagacacagacagacattatacaatcataaaaggatcagaccaataggaaaatattataattgtaaagatacgtgcacctaacataggagcctccaaatttataaaataattattactaggcctaagaaataagataaacagcaacacaata

SEQ ID NO: 134244 - DNA, 527 bp, Homo sapiens
tagccagacagagccccaactgaaagtgaagagaaaacaccttccctgttagggcaacttcattacccttgtgcgtggtgtgtgtgtacttgcacacatacacagcccatcaggaaaatatcacagctgtgacagcagctttgtcagagggatggaatgatacatggtgtttctcccttctgtttttccgggatttgtaaagaggagacactattttcatcattgaaaacagtgcatattctaagggacagttcatccccgccttgtcctttgacctgctgtgcggtcctgggcagcttatcccacccatggatttggtttcctttattgctcaagtttggctgggggattttcttttggtttcactcccgccttcagcatgaagctgcagtgatttttcttgagtgggtgtgtggagtggggacagatgcaggagtgggagctgtgtttctagcctcatggtggttctcaatgtctgagctggttggacgacactgccctggaccttggagaagcctgtcctggac

SEQ ID NO: 134245 - DNA, 401 bp, Homo sapiens
caatagaaccttctgcgataatgggaatgttctctatctgtgcggtcccgtatggtggccactagctgcaatgtggcaaccaagcacttagaaagcggctaggtgctagggcaatggaggagctggattttacattctatttcattttaatttgtagcagctacctgtggctaggggccgctgtgccggacagcacagctctagaggcaccgggaggaagagactgtgagataggaattatttttctcattttgtctaggaggaaactaaacaacagagtggttacaacactggccagaaatcacagagctagcaggaggcagagctgggactccagctgagatccgagcaagggtctgagctcatccatcacacctgggtgacttcagactctgtagtct

SEQ ID NO: 134246 - DNA, 936 bp, Homo sapiens
tctacctaagaggtaacatgttagcataggcattagacaaggctgcattgtgaagtcagagtgactgtctggggttgtcactgtcatcttccaagctttctcctaaagaagaaaattgacataatgctctcagacttggcacatgggaccagtgccacagcaagcactggttctagcctgctactggtttttggtaaaatgcagttttcagaactactcaagggtgtaataagattaatttttatgatattagatataatatgttaactttttagctattgttaatcttaaacactgatggctttatttttattctatttaaaaaaataatttttgaggccagaagtgctgggattgcaggcatgagccaccacgcctggccctataaccgtttttgagatttaaaaactgaaggtcatgtgattgtgtaaatatttaaaaagtgatcatattaaaaaatatcatagtgatggcacattgataagattcaagaacattttgggcaaggcaggcagtcatgaggatctccttaagcagtctcttgtgaagtgatcggtaactgaattttgctttttgggtggtcttcaattatgtctgctttatctgttaggtttcactagctattacattcatgcaactccagaaatttacctccaatttatatgtgacttacaacattttcttatgtctggtaaatatttgaaaggattgaattacaaagagacggataaggccatgaagctaagacaaagttttgggtatgtgcatgtaaatgcaatttttctcaggaagaaatacaccatgatcagataactcaaaagttttataaccttgataaatagatttaccttcgtttctgttgtttttgaagaagttaaatgtctgctttaaatgtttccctgagtttcaagttttcttatttcagactcataatta

SEQ ID NO: 134247 - DNA, 268 bp, Homo sapiens
tccccttcgaccccaagttcatcacctaccccttcgaccagaacaggttcgtccagtacaaagccacttccttggagaaacagcacaaacatgacctcctgactgagccagacctgggggtcaccatcgatctcatcaatcctgacacctaccgcatcgaccccaatgttcttctagatccagctgatgagaaacttttggaagaggagctgtagttgccccctacctctcccacctcttgctcttcaataaaatgatcttaaactgc

SEQ ID NO: 134248 - DNA, 150 bp, Homo sapiens
cccattctcagggaggcgccaggaagatggggtttacttagtctccatcctcctggcctcctgtctgcagccctccctgactacccacaggtggcctggtgcttgccctgagctctctcagtccctgggctgcccacctttgctgatagg

SEQ ID NO: 134249 - DNA, 795 bp, Homo sapiens
tgattctcctgcctcagtctcccaagtagctgggagtacaggcacgtgccaccatgcccggctaagttttgcttttttagtagagacgggatttcaccatattggccagggtggtctcgaactccccgaccacaaatcatctgaccacttctgcctcccagagtgcttggatttcaggcatgagccaccgtgctcagcctgggattttgcatttcaatctttgattcattttgagttgctttctgtacatggtgagacacaggggcccagtgttatttcttctgcatccagctagccacttatcccagcaccacttactgatagggagtcctttctccatcgcttatttttgttgatttttttcaagcatcagatggtttcagttgtgcgggtttatatctgggtcttctaatctgttccactgctctgtggaaccgggtccccagcttttcagtgaaaatgccaagccattacattgtctatggatgttttcttagagtgtttcctttgttttaatgttttgtttatacctttagcaggctgcgtgcatggatttcttttctaaaatacatgcgcaccctgttttcttgtgggagttttgtggtttcagaattgagttttaggtctttaatgtattttgcattgatttttgtgttgcatgacataagggtcctatttcagtgttttgtatgtgaatattcagtttgctcaaaatcatctattaaacagtctctttttcccattgtgtctttttggtgttcttttgaaaaaatgtgttcactatatgtaaattgg

SEQ ID NO: 134250 - DNA, 675 bp, Homo sapiens
gagggtgggtgaaaacacaggccctagtgtcaggctgctgagattcaaatcctagctctgccatttcccagttgagtggccttgagtaagctgtttacctgcttgatgtctgaggctaccttcagactcaaatgtggtgtcacctcattcccaaactcattctaaccagcttcttacaagcagcgtgattttgtgctatttctgaaatttcttctcaatctttttattttggccaggttatttacctttagtgaattccatcttctgaaaacaatgcttttgtgggtcttcttgcaactgaactacaagattcaggcaattccgacttatgaaaccgtgatgacattttttaagaggtaatataacttagtgttgattgatgaaatacacaaatactgaaatgtacaaacactgctcataatatcacgggggaaaaccatcagtgatataatttttcatagcatcattcagagggcactgtttttttaatagggcctaagattataggatgctttcaaaccaccaaattacctggaaaagtaaacaacatgtaggtgttgtactatgagataatcaggtgcttctgggaacttgctgtgtccagtaacaggcatgaggcaaaaggtactcctctcttcaggaaaatgaccacactaccctggcctttaaaacttc

SEQ ID NO: 134251 - DNA, 491 bp, Homo sapiens
tgtcctagttcttgtcctagtgctgaatttatgtgtgtcttcttttcttatgagatgtgagtcaagagacaatctgtctcatgaaactgggaaacattaatctgtcttgatctcacttgagttccgattgttcttctttgttaaaatggaatgctgaactattaacaatttactttctgtcatttgaacgtttgaaaccatctccatttggctgatggtaactcctatgtctccaggattcattccgatctggtccaggaattttttcttatatttgattgatcatccctaacttcaggtgagataataaacattcatcatgggtagaagtcataaggcttggttctagcattggtcctgtcttgctgggcaccatcaaacaattattgattgtggttctactctgctacatgcctacatgagctccaagtggtatgcctgaggtggtccaaggtgggccagccaccaggtttcagttttcctgggtagga

SEQ ID NO: 134252 - DNA, 152 bp, Homo sapiens
tcctgaaggaggagtggaagttcaccaagaggagaagctggagaaaggatgcacctgctgtttcctgtggagggggagcaggtggagaccaggggccacagtggtgacccagcattagcgtaccccatgttggcttctccttccctatctca

SEQ ID NO: 134253 - DNA, 436 bp, Homo sapiens
gcctgagcctcccaagtagctgggattataggtgcgcaatgccatgtccagctaatttttgtgtttttagtagagacggggtttcaccatgttgcccaggctggtcttgaactcctgggctcaagcaatccacctgccttggcctccaaagtgccgggattacaggcataagccactgtacccggccccaactaatttttgtattttttgtagagatggggtttcaccatgtcggtcaggcttgtcttgaactcctgagccgaagcaatccacccgccttaccctcccaaaggtgctcagattacaggcttgaggcactgtgcctggccatgggtgccatctatctaaagagtgatgaacttggtgttaaaccagtaattgaaatcaccaagttcctaccatcatgagctcagtctagtggaggagacagatgaac

SEQ ID NO: 134254 - DNA, 370 bp, Homo sapiens
ctagaggaccccggcactgcttcggatgctcaggtatcctttgctattcaagtcgatggtccaatcctttgtccttactccacccctattcttcctagagctaggagttccttctcctgggatgttatctacatatcccaacaagcccctcctgagtgcattaacagaaaacattaagaccaagcaggacccatttctgcatcagccacttaaagctgttcttcctgggacatttgtcgaccttctccagcttgtttccatttcagaagcagtgctaagacccatgccaggatggaattccattttcaaatgaggtttcacaagactttttatcagacttgcagagcaattacattggctgggttctctc

SEQ ID NO: 134255 - DNA, 712 bp, Homo sapiens
gaggggggcggggcagccaccaagcactcactgagtcccagggagtcaagatggcagcctccaggaggccacacaggaccctgagaaaacagaggagggagacagcccagaaggtgcactgggcaggtgaggggagaggcacagctgcggaggtgtgctggccccgccaccctgtgaagtcggctaggaatggtttcccagaagtggataaggaccgatcactttggatttaaccttgagaagaggatgaacctgagatggaaatgaaggtttcctggggcaggagggacacattcagagggctctgagcctgtctgttcttcagaaagacagagagacaacatttgcagggccctgtgaacctacccgctagggcctgaagggcctgataggcttggtgggcctgatgggcttgatggtgggaagtagagagttgacccttcttactctcacccttgaagtttgcaatgctgggaagcacattagattcacccacagagctttagaagaatacccaggcctcagccccattccctagagattctgatttaatatgggtgaggcatgaggcccggacatcatcccagaaaattccagtgtgcggccaaggttgagaattcctgacctagcccatatgtggccaagaaacaagcacccctggtcccagcccctgctccatctgcctctgacttctcctctcctagggtccagg

SEQ ID NO: 134256 - DNA, 289 bp, Homo sapiens
ctggggtgcgcggggtgggcagagcggcggcgccattttggctggagctgcggggctgtggtgggtgactccgtttccaacgtgcgtgtcagtccgccggggcctggagggctgcgcctgcgagtctcatcccccactggcggttcgcgccggaatttgtctcaagggctttaatgcttcggatcacttatccctttgccagctgctgttcgccctcgaatgtccattttggtctgtgcttccacactctctttaaacatggtcttgctgatgagagcgcccggcgcgt

SEQ ID NO: 134257 - DNA, 257 bp, Homo sapiens
tgtggttcttgctggccttcggctcttttttctttgggtggatccctcttcagtagaaatatcaaataagtggtctgtccactgacggcggaaagctttctcgggttggtggatctttctggtacctcctcgggggaagctttcttccagctttggccattgggagctctttcagttgactcctagatccctttgacatacccccatcattaggagcaggagagagttctctgttcattactttgatcattttctta

SEQ ID NO: 134258 - DNA, 688 bp, Homo sapiens
gtagtcccagctactctcagaaggttgaggcaggaaaatcgctcgaactcggaaggtggcggttgcagtgagctgagagcacaccactgcactccagcctggacgacagaacaagactctgtctcaaaaataaagtacaggcatcaaaagcaaacatagacaaatggaattacatcaaactgaaaagcttctgcacaaaaaaacaacgcatgaagagataacacacagagtgggagaaaatatttgcaaactatacatctggttaatatccagaatatataagtaactcagacaactcaatagcaataaacaaaaacaaaaacaaaaaacaaaccaaatagtccaattttaaagtggaaaaaagacctgaatagacatttctcaaaataagagttacaaatggccaacagatatttgaaagaatgctcaacatcactagtcatcagggaaatgcaaatcaaatccataaacagatatcatctcactccagttagaaccattattatcaaaaagacaaaagacgagtgttggcgaggatgcagacaaaagggaacccttacacgctgttggtggaactgtaaattagtacagctgttgtagaaaacagtatggaggttccccccaaaattaaaaatggaactaccatatgatccaggaatccaactactaggtatacatctaaaagaaa

SEQ ID NO: 134259 - DNA, 212 bp, Homo sapiens
caaggcaaaacttactatttccccatggaaatgtacttcttcttttattctcaccctgttgatagataatagttaaaattgataaaaatagataagaaatagataaaattgtatacagataaacaaaatagataaaagagttaaattaaaaaacaaccactttgtaaatcttctcttttattttgctgttcgtctgctttgtgctgtggaag

SEQ ID NO: 134260 - DNA, 660 bp, Homo sapiens
gaagttgataagatcaaatttgcattttagacatatctttctattggtgatgtgaaggatggagaggagtccagaagagaaattgtgaaagttgactgtcaggcagaatgactggaggtggtgaagtggggatatatgtgaaatctctcagatacagcatcaatagaacttgtgggtaaatgcaaaagatgaggtaacttagtatcccttgaaatgaccaagtccaggggccttttaccagcatagttttcatgataccactgttgcttttattcactctctaagtggaaactcttcacatgagaaacataaattaacttgtgggaaggcctgggagtgggtgcagagactctgggcccccaaaactgctgagtcctatactcttctacccaagtccacaggagcacacacaaccatggcacccttaggcaagtatgtgtccttccactagcggcacgccctcacgcttggtggtagcatcccagctgtgctccaggcaccctctggccctttagctgcatctcccacacacctgccattctcagaaacctgctcctgctgccatcactccaaatcagaaggggtacctggtgagctggtgagtgtcggactgtggggatgcaccatgagggctgtagcccagcaggattccagaaagaa

SEQ ID NO: 134261 - DNA, 940 bp, Homo sapiens
gaaataaaaatcaaaagcagaaactagcttaagttgctacagtgatgaagaaaacaaaccagctcattactttaaaaaagattcagtgaaaaccacaattgactaagcttgaatttttcttccttttcctagctgactcaaaagcaaacacacaaaagcctccagctagagtcactgttttttttttataattaatcattaacaaaacatttatgaaaatccaaatggttttaaaattacttcaacctggttctcttaatagggtttgatttattcatcagaaatctgatttccagctgtactctctcacttttcagcaactatttataaaataaccaagagttctaccacaagcacagaacccccagaaaagcaaaaaggcctcagaacaactcttaatattcatacgttaacactcttgccacttactcatcagatcatattttttcacttaatattaatgtactttctaatccacaataatgtagcgtaacttaatttaaaatgaggagaggaaggttagaagcagggaggaactattaatgaccacccgtaagtaatgaccatctgaaatactatgtctcagataaaaattcagacattcagcatggggaaggagcactgcatataggagctaagaaaaagtacacactttaggctgggtgtggtggctcatgcctgtaatcccagcactttgggaggctgaggcgggcagatcatttgaggtcaggagttcgagaccagcctggccaacatggtgaaaccctgtctctactaaacatacaaaaaaattagctgggcgtggtggtgcacgcctgtaatcccagctactggggaggctgaggcaggagaattgcttgaacccaggagacagaggttgcaatgagctgagattgcaccactgcacttcagcctgggtgacagagtgagactccatctc

SEQ ID NO: 134262 - DNA, 908 bp, Homo sapiens
aatgagttagctaagaggtttgcatattttacctgtataggaccagacagcaaatactttaggttttctgggtcataaggtgtctgtcctgactactcagctctgactctgtttcagggaaatggctgcagataatatgtagatgagtatcagctgtgttctgattaactatttatttatttatttatttatttattttgagacagagtctcactctgtcactccagcttgggcgacagagcaaaactctgtctcaaaaaaaaagtcagttagcattgaaacatgcatatgggaaaaacttgcatcaatgaagaaatatactcttaatcagaacaggacaaataacctaaagaggagggaatgaagagcagtgagaggcctgacagtgggaaaacaatgcctctcgggttggaaggcagaaagccaaaaatgcgaaagatacaaatgggtacgaagattggagtaagaaaaaagctccttggaaacaggagagacatgattatctcaaagagaaagcgagaggcatgtttggaatctgaagctgaaaacactcaaaagacagatacacagattgaccagaggcttcagagataggcatgagttgaatgacatgtgcagacagcacagcaggatgagcaatgcacggtgaatgtgaggctgaaatactcagaatcatgatgaaagaaaaacacaaaccaggtacactaaggcaaagctgggtgagacagtccaggagacaagtcatacagctttgtcatggcacaacaagacgcaaataggtgagacctaagggaggagaaaaaaatctcaggtgatggctacatgggcatttttatttacttatttttatttatttatttattttattttttagacagcctgggcaacagagccaagaccctgtctca

SEQ ID NO: 134263 - DNA, 607 bp, Homo sapiens
taaccaccctcctctttccttatgcccttgtctgctccagccatgcccatctctattcagttcctccaacccgagaggcattgtttcccactgtcaggcctctcactgctcttcattccctcctctttaggttatttgtcctgtcctgattaagagtatatttctccattgatgcaagtttttcccatatgcatgtttcaatgctaactgactttttttttgagacagagtttcgctgtgtcgcccaggctggagtgcagtggtgcgacctaggctcactgcaacctctggttcctgggttcaagcgattctcctgcctcggcctcagcctcctgagtagcgtgaaccacctcacctggctgattgttgtatttttagcagagacagagtttcaccatgttgtccaggctgatcttgaactccaacctcagtgatccacccacctcagcctgccaaagtgctgggattacaggtgtgagccactgcgcccggccacatgggcattttttaaatgcctattaggggcgagtgaagctggttctggagaagggatctctgggaaatagtgaattatataccttagacaaagaggctggagaacagtgaa

SEQ ID NO: 134264 - DNA, 349 bp, Homo sapiens
gagacgggagaatcacttgaacctgtgaggcggaggttccagtgagctgagatcggaccactgcactccagcttgggcgacagagcaaaactctgtctcaaaaaaaaagtcagttagcattgaaacatgcatatgggaaaaacttgcatcaatgaagaaatatactcttaatcagaacaggacaaataacctaaagaggagggaatgaagagcagtgagaggcctgacagtgggaaaacaatgcctctcgggttggaaggcagaaagccaaaaatgcgaaagatacaaatgggtacgaagattggagtaagaaaaaagctccttggaaacaggagagacatgattatct

SEQ ID NO: 134265 - DNA, 177 bp, Homo sapiens
accgatccggattaaggggccggaggcgggtcctgggcaccagcggttccgacccccccgccctccgcgccgcacccgagtggcccccagccgagcgggcccccacctcctggcccggcctgggccctcctgcgcctcccttggcctttgtccggcgccaggaggccggtcccgcgc

SEQ ID NO: 134266 - DNA, 316 bp, Homo sapiens
acacaataaaaagagaaaatgagcataaaaatctaagaaagatacccatgcttaagaagtggatcaaggccggacacggtggctcacacctgtaatcccaggactttgggaggccaagtcgggtggatcacgaggtcaggagttcaagaccagcctggccaagatggtaaaaccccgtctctactaaaactataaaaattagccaggtgcggtggcaggcacctgtaatcccagctgctcaggaggctgaggcaggagaattgcttgaacccgggcggcagaggctgcagtgagccaagatcgtgccactgcactc

SEQ ID NO: 134267 - DNA, 473 bp, Homo sapiens
gtgactcaatacacataaagtgcttagaagagtgtccggcacaaagtcaatatttggaaatgttagcaatcatttggaaggtgcttgacgcacagcgttgatcgataaatgggacctattcttcttggtagcactgctggtctagagcaggattctggtttctgagctctccctgctctcaacctccactccaccccatcctgacttaaaattaaggactggaaatatctctagccatttatggtcacaggtaatggaggttcaaagtgtgtctcatagagtgatgagaaaagtaggagtctacactctgagccagatcccaagacgctattgagcagagtccaaaaggggtgaggcccaagaggaaagcagctgaggggcagagctgtgggaactctgctacagaagtgattctcttaagagaggcagggggtggtggggagagttcagtgagcagaactgtgagcaggcgg

SEQ ID NO: 134268 - DNA, 447 bp, Homo sapiens
gtagtaggcgaggggggcagatcacgaggtcaggaggcacgaccagcctggccaaagagaccagcttggccaacatggtgaaacccatctgtactaaaaatacaaaaatcagccaggtgtagtagtgcacgcctgtagtcccagctactttggaggctgaggtgggcagattgcttaagcctgggaggtggaggtaacaatgaaccatgatcatgctactgaaaccagcctgggcaacatggcaaaaccccatctctacaaaaaatacaaaaaattagctgggcatggtggcgtgtagtgcaggttatttggggggccaaggtgggaggatcagttgagcccaggaggtcgaggctgcagtgagctgagattgcaccactgcctgagtgacaaagtgagaccctgtcacaaataaacaactttctactgttagataaccaaataatt

SEQ ID NO: 134269 - DNA, 689 bp, Homo sapiens
gatttgcaactaactcaccactgcccttctgatcaccaaattcatatacctttcctacttcctcatacctcttgacaaaattggtacattttaccttctttatgattttctccatgcatctctttcttttctctgatgtatatcaagtatatcattggcaaaagcattggactgatataaatcagaagacctagattcatgacttaggctctgcttctttctaacggtgattttaggcaagttttaagtttaaatactctggacttctgtttcctattttttaaatttgtggcaatacttaggttcttacaggagttaaataaattaatatatttgaaaggactctgtaaaacctttgattatgttaagggacacatagtctaaagagtcctgacttagatcacaaaatgataaggcccttgagcatgtaaaaaaaaaaatgtattcaagcagattgaagttaaaattaagaaatgtcaaccaaaacacttaggtaacagttctaagaataacattggacccttacttatgaatcttagcccttattatcccataattattcatgaacaaatttacccctgttattctatgagcttctagaatacagaatcctatcaaatttatctttatatcttcctacaatgccttgcacaaaataggtgctaaataaataccttcaaggaatgaaa

SEQ ID NO: 134270 - DNA, 687 bp, Homo sapiens
gcatatatctaagcagaaggtagataatcctgaattatttcattgaaaattcccatttttaattcacctttttctaagcattgtaatttaataggcatttcacttttaaaacagcagagtgaacagaataaaaaagcattagtagtagaattaccaactcttagctaacttagaattattatttgtaattataatgtatttttgggttattagaaactgcttttttggttaagatggaattatttttaagaatttctcttttgttaaccaattccatctagaatcctaattctggatgaaattgtattagtgatatgataggtgttacatgttactgcttattttccaatattaaaaaaatcggtttttagtttcagtggtagacttaatagttatagtgaattgacttggttactttagagactgattcaagattgaggttactgtggggattcatttgtgtgattaaaataatcttggttttcttaaatttttttgtaatgcactggacaacatgctgaaattatggcttattatattagtgaattttgtattcctgaaacagcataccaagagacactagaacctttgacagaacttttctgaaacccaaatgaatgccaaaattaggcatgcttttaagatgcaaagggctgggttttatcttttactgtctttcttgcttat

SEQ ID NO: 134271 - DNA, 307 bp, Homo sapiens
tgatattcaaaaaagaaaaagattgatgctcagtgaatcaaagcaaagtactttctaggtaaaagtgacaccatctcatccaatgtctctgaaagatctcagttgcacagtctttggataaaaagggttataactaaataatactacaaaatgcaatttacacaatgtgctgactacacatttgtatacccagcatttattaatttgggaagcaaccaactactgtaacttctctttactttttcataagaaaatgacaatgaggaaggaagtgcagcagaaatcttgaacattaccactattatgc

SEQ ID NO: 134272 - DNA, 229 bp, Homo sapiens
gtattgttttgattattactatttctggtaacacaggcccatcttcctttcacacagcaggtaaggttgctcaggctgggactgttacgtcagaataacaaaagctaagcactcctcctgaaaccaggttctctcatgtcttgagtgtgctgtgcctttataatgaaagaaagctcgaggaggagtagggtcagctgccatttattgcccaacactgtgctgctagtgt

SEQ ID NO: 134273 - DNA, 277 bp, Homo sapiens
atgacagtcatttgcacaaaactaaatatatcatcaagtctgaaatcctgaacttcattcatggcttaatttattttgtgatcagatctaaaatattagcaaatatttcacactagaaaactgtgttttatataactactgtttagcatatgagattttattccgtaaaaaacatccacagccattaaatatagaattctaaaagacacaaattatcctacagacatgtaacctataaatacagaatacacattttgtatggccttctttttttgag

SEQ ID NO: 134274 - DNA, 279 bp, Homo sapiens
ggatcctattatatgctgtctcattgtagttttgatttgtctttctctgatgactagtgatgatgagcattttttcatgtttgtggctggttggatgtcttcttttgagaactgtctgttcatatattatgcccactgtttattggggttgttttttgcttgttaaattgttttttctgagacggagtcccgccactgcacccagcctcaatatttatttcaatacagaaacggacttaattgggtattttgttgaaggcaaatagtagcaaagtggga

SEQ ID NO: 134275 - DNA, 783 bp, Homo sapiens
acaccagtcactttgttggccttgagattgtgtttctggtctgcctcagcatctgactttccaccccgggatgcgtttggtctgttttgccagttagagaactggagacacctgagcctgagctccttcctaatggttacatttccctggtagcatttgtcactagggcttctaaatttggccatcaggatttcctcaggcttggaaggttaacacatactgcccaagagggaggcaatataatgtaacatgggtgcctcagcttcctcatctgcagaatgggctgaggataatacctcgtcacgatcacccggaacagggcctggcatactttacctagcgactttgtagggacttagtgaatgttccccaacagatctgtcacagaaactgtaaatattgcccttcaccccttccgcacctcttgcagcagtgttatccaggaaggttggaaaccttaggagatgaaggggcccttttctcagggcactccaagagaaccctctcagtgtcttttaaaattgtcaaggtcccagctcatagcagttcctcataaaataccattcctgtgccgggcgcggtggctcacgcttgtaatcccagcactttgggaggccgaggcaggcggatcacgaggtcaggagatcgagatcatcctggctaacacagtgaaatcccgtctctactaaaaacacaaaaaagtagccgggcgtggtggcgggcgcctgtagtcccagctacctgggaggccgaggcaggagaatggcgtgaacccgggaggcg

SEQ ID NO: 134276 - DNA, 688 bp, Homo sapiens
aaatgctcatttttgaatgaagaagccaatgaaaacactaaaaatgagtttgaaagtgatctctaatgtgtgactcaaggcatcggtaaaattagctaggaacacactatgcaatttagaaaacctggttgacttttataaaattacttttcattgtgattttaaaaatacataacataaaatgtaccattttaaccatttttaaaggtacagttcagtggcattaaatacattcacattgttgtgcaaccattaccatcattcatctctagaaccttttttcatcttgaaaaattgaaattctgtactcattaagcaataacttctcatttctgtcttcacattcagaccctggaaatctactttttgtctctatgaatttgtactctatacctcgtatgagtggaagaatgcagtatttgtccctttgtgaccaacttatttcacttaacatatcttcaagattaatatatgttgtagcatgtatcagaatttcctttctttttaaggccaaataatattctatggcatgtgcataccatattttgttcattcatctaactgtgggcacttgagttgcttccttccatcttcagttattgtgaataatgctactataaacataagcgtgcaaatatttctttgagggttttctttcagttcttttgggtatgtaaccaagagtgga

SEQ ID NO: 134277 - DNA, 351 bp, Homo sapiens
cctctggcctgaaagtgctggagtcaggacttgaacccaggtctgtataactgatcatgtgcttgctacctcagcaagaggaatgtttacaagacaaggacttatctcacagttgtcttattcctctcttggtgttttgaatagccattatccagtatcttttgaatatatttcaattgttggtgcagctgtaatttacttaataacttttaaacatagtgaaatgaagcacatagatatgtttctttttttttttttgagacggagcctccttctgtcacccaggctggagtgcagtggcatgatttcagcttactgcaacctccgcctcccaagtttaagcgattttcc

SEQ ID NO: 134278 - DNA, 206 bp, Homo sapiens
caggcctccccagtggggattgctgtcttcccctccacacctttactactcctttattttattactgctgggcacgtctgtcttgttaccgagttggcattgattttagacggctggccctctgctttgtaagttcccagagggcaaggtccctgtataactgtccccactctagttagcatttgggaaacgctggttggattgtg

SEQ ID NO: 134279 - DNA, 275 bp, Homo sapiens
gctgatcacagtcatgagcttactctggtcagagatctctatgagctctgagtactggattcagggcattcacatgccgtgtattttttctagttaagagaggagggtttctccatgttggtcaggctggtctcgaccaactcctgacctcagatgatctgcctgcctcaggctcccaaagtactgggattacaggtgtgagccattgtgcccttaaaccttccaatctatgaacatggaatgtctttccctttatttatttttatttttatttc

SEQ ID NO: 134280 - DNA, 426 bp, Homo sapiens
gtgagatgaaattatgtgaaaaagaaggcactcctttaccatttatttttcaattcttctgatcaggtcaaggagaacattttaattcgatgctagtaggtcattaacacctccacaggtctcagtctcagagccttctgcaggcaacagcatccagttaagatttcatagccttgtttagatcccattacgcttaccttccattcatggctggtggtgctgttttgtcttttgtagcaatgacataagatttcctttttaaagaaatacattaacatttaaaaagtgaatcaatttaaataaaatatattaagtaaataatagcacaggtggtacctggatacaatgaaaagtaatcatgaaagtatcttggtatacggaaatggcagagattgggaagatggtaggcaaataaagtaaatttga

SEQ ID NO: 134281 - DNA, 456 bp, Homo sapiens
aaccaggtaagactttttaatccagaaattattcctattccctgcaatgtatagggtgctttctatctgcaaaactctaaactcaaatttctgcaggttcagattccaactgtctcatgcgcagagactctcccatcacaaaattcttcccgctccagccatcatctgtttcctcctcagcctttcccttgaaatccagagccctttcctgtccgttagaggcaatcagtcatgtttcagtgaagcttgaggcactgggccccccagtgaacaaaaccagacatcctgaccccctactcctgcggtctctgcagggcttgctttagcatgcttggcttgtggggagggggtgtggcagccattcccacacaaggtcacgcagggatgccacagtgcgtttcaagagtaggaatccacagccttctctccgtaactctgggccttgctgtaaatagc

SEQ ID NO: 134282 - DNA, 280 bp, Homo sapiens
cagaattagaattttgtcatttcgttgttgcttctttccactctagagatttcaaaaaggaagagattgctaatgatgatactgaggtatctcctctcttggggtaaaggagacttgctgtctctaaagggacctctcaagatagagattgcatttcttagtagtttaccatagtaaagagtctgaaacttatagaccctgtagcctagtatttctacagttacctaatttttgtctcaggttcatatttacagagttcatgagcttgatataaaaatca

SEQ ID NO: 134283 - DNA, 736 bp, Homo sapiens
gaattacagatacctttttcagagactgcatgctagtctctcatgattcccttatctgttatattgaagtcgtgtgtgatcgcacgggaaacttgcttttgttatttgccatcaccaaaggacccttctgaatgaagagcgagggcagctggctgttgggtgtgtggcgtgttgtcatcacttgaacacaggattattaaaggtgcgcaggattgttaaatgtgcctgctgtcggctgatgtcagatgatcccctgggaaggtttatttatttatttatttatttatttttaccctgcaggctccagttctgcttcagcagatctgggatggaggctgagactccccgtgatgcccaggcagctgttcatgagccccctttggagtaccattgagccaaggtcctctagcatggccgagtgctctctgctcttgcagtgaggcagtctctgcttttgttctgctcagggctgacctgttttggggggcttcctccactcttggggggcttcctccacttcctggctcttttccctcatccacgctgctcaagaccccatttcttccctgctgtctcatgcatacatccacgctcctcccaaacctctgttcctgtcactccagcaggctcctccatctccccaggccaccctcctaccaccaccactcccaccaccacatcagagtccttttttttccagttactacttgattgcccccctccccacttcacccct

SEQ ID NO: 134284 - DNA, 531 bp, Homo sapiens
ttaatatgatataattactataaattatataactatatattgttttatatataattatatatctttttaatatatatacacccatatatacacatgttcaagaaaaggatgagactgatcatgatgaaaaagaattatagggaaatgatggatctggaaacaggtcagtgatgactccagattctgtcttgaatgactgtggtggtgataagggctgcgatgttactacacaagatagggattatagaagaattttgttgggaagagcagatgctgcctgttgtattttaaatgctagcatgggagattctggtggttcctatttagcatatagttatgaatgtatagtttaggttacaagtcagtgagtttcaaatacagatgattgttgaagttgtggaaatcagattgttgggggaaagaaaaattaggaaaaagatgttcacagacaaagccttgtggaatgctcacatttaaaggataagaggaagaagaacaagaaacatagatttgagaaagagtaagaaaaat

SEQ ID NO: 134285 - DNA, 185 bp, Homo sapiens
acctgtaatcctaacactctgggaggccagggcaggcagatcccctgagttcaagagtttgagaccagcctaggcaaccttgtctctacagaaaaataaataaataaataaataaacaaacaaacaaaccaaaaattagctgggtgcagtgacacatgcctgtaaccccagctacttgagaggct

SEQ ID NO: 134286 - DNA, 608 bp, Homo sapiens
tcgtgaagatgccgtgggccgcggagctgcgcggattctgggctgtggggcgggcacggcctttccggaggcgccgctcctgggcgtcctttcaggcgggcgtggaggcgccagcctcgggcgcgtttagcctcgggcgcgtttagcctcgacctcgggccagcccgcttgccgcgccgtggccctaaggagcggctgccctgctggaccgcatccaccagcagcctggctctgccgctatcgaaggaggcttttaaagcgctggggttacaggtgtgagccaccattcctggccgtgtattttttaatggttatatttattgactgttttaaattttttaagtgacttttgcttttggtatggtgtagcgaaatctcccctcaaattatacatatattcattcacctgtggtttttttttgtagacattcttagggtttccattattttaaaatttaacccactgaaagtagttgtatgaaatagctacgtttattttctttcaaatgtattcaatttgtcagttaaaagacacactgctggttgggatttttctttttccttgggacagggggttcccctttggtggccccgggctggcgtccacg

SEQ ID NO: 134287 - DNA, 392 bp, Homo sapiens
gtacgtcgtccgattagctcctgacggtacatttccagaggaaaccaaaagttgtttaggaaaggaaagtatttgtaatttataccatttaacagctataaatagtatacatgggccgggcgcggtggctcatgcctgtaatcccagcactttgggaggccaaggcgggcggatcacaaggtcaggagtttgagaccagccttaccaacatggcgaaaccccgtctctactaaaaatacaaaaattagccggacgtggtggcgcgtgccttaatcccagctactcaggaggctaaggcaggagattcgcttgaacccgggaggcagaggttgcagtgagctgagatcacaccattgcactccagcctgggcgacagagcgagactccgcctc

SEQ ID NO: 134288 - DNA, 256 bp, Homo sapiens
ctctcctctagactaagtgatatcttgaataggccccatgtcaggataatggtggcagagctaggacttccctgagccctagacaaattttctttgtattataccaggccaatttcttcatacaagtaggacagcccagctgcaaggaattgccctagggtattcactagtgaattaggaaggagcttgtgttattctgtgcatccagccactgttaaaaaatatgtgttgggttgggggcaggaatttcagcatt

SEQ ID NO: 134289 - DNA, 219 bp, Homo sapiens
gcccatcctgggagctggagtgcatggatgtcggagggtcatgttttccaaactgtggaagaaaaaacaaaaagctatgttcttccaggaggtatttagaacggagcttgagtttgggattcagatgcctgggcctgtgtagttcacttgtggggcaccccagcaggggcctcctaatggaaaatgcatcctgagagaaggagttaattataagcttag

SEQ ID NO: 134290 - DNA, 836 bp, Homo sapiens
ggcaggataatcgcttgaacccgggaggcacaggctgcggtgagctgagatcacaccactgcactgcagcctcggtgacagagcgagactctgtctcaaaaaaaaatagtactaagatagcaatcttatatacattatctcatttgagccttacagaaatcctggaaagtagccagggcaagtatctacattttactcatacttaagttgaggcttgaagaggttatgtgacttcccaaggttacacagctgttagaaacagaactatgatccagatcttttaattactttgctagtgggttataggttccaagcaattattggttctcatacctatgtgcaccttgatcatactttctcagtgtaattatcgattaacaaagaggcaaaatgaagtgcacttggaattacatggggttttgtacttagccagcccttttcttggtacatgaagaactatacacttgcatccttttttaactttcatatttcctttcaatctctaggttggacaagatgctgccaattcatcaaacccaaagaaagctgcagagatcactgttatccaccagacatacttctgaaaagttctgctctatctcaaagactgaatgatactacacagtcctctccctattaatatgggcacattcttgccaatttcacacttgtatcttcagcagggacattacaatcaaacaccaattcctggttaatgaagggagagtgtgggcttagcagagttaccctcatgcccctatctgagccacaaccttctgtaattcacttcatacatccatctaaatggatacctttccatcccctcaaacgagaac

SEQ ID NO: 134291 - DNA, 547 bp, Homo sapiens
gtaacaaatgtgccactcaatgcaagatgttagtaatgggggcagtgggtgggagagttgtatacatgtgagaggtatgagataaccctattttttgttcatttttctgtaaacctaaacttgctttaaaaagaagtctaaataaaaaagaaaaaaaaaaaaaaaaaaaaaaatttttggggggcttgggcccccgaaaagactctttccagaaaaaccatctgcgtgtggcggcgccgggggccccagtgagaggttagaggggaacacgagggcccatgagagcgtgttttcccgtagagagagaaccgcggggtcccattcacactatgagggcgtggggcgaattctctttccccccaatattacaaaaggcgctccgcggggggtaacaaaccgacgaaagggtttcttgtgaaaaacaaatctcgagaagagtggagagttttcggcgagaggctatcatattaggggggcatttcttactacaacaggggagtgatctcacaagagcgagagcctctcgaattatttcaaaatttacgcc

SEQ ID NO: 134292 - DNA, 862 bp, Homo sapiens
ctcttcagaggtcctgggccaaagagcttccaacctaaatagagcttgggcaagcctagaatctagaaaaattaagcagcttaactggtcagcctgacatccactgttgtggctgcctggcagatggtatttaagccccacaattgttccctaaggccaacacaggaaatctgattcctggagcaaataaatgaacgggtggtagtagggggcatgaggggagaggctttgactctgttctaatttatttagagcaaatcaaaacactcctcaaatggcatctttctgcttttatcactagttccgtgttttttttcttgttttgtgtctgtgtattttcatttctctgtcatccgtcctttcatcttgaagcaaatctcttctaactccctcataccccagaaattgattcattctattcaaatgcttaataattcaggagattattatttgtttgagccctatcttctttttttttttgagagggggtcttactatgttgaccaggttggagtgcaatggatattcacaggcacgatcatcgcacactacagtctagaaatcctgggctcaagcgatcttcctgcttcagcctccccagtagctgggattacagggggccagagcacagccctattttcttttccttttggcaagatcatctcagcagaggccagaagagaccctcaactgttcaatgaatatttacggttgctttcttccttttatgagcctcttgcatactttgaaagctttaaatttatacctataatacaacggacatcccctatcccagaagaccattcctccctgtacttcagctctttacttcctcccaaataaaacctaacttttctaacta

SEQ ID NO: 134293 - DNA, 1020 bp, Homo sapiens
ctcttcagaggtcctgggccaaagagcttccaacctaaatagagcttgggcaagcctagaatctagaaaaattaagcagcttaactggtcagcctgacatccactgttgtggctgcctggcagatggtatttaagccccacaattgttccctaaggccaacacaggaaatctgattcctggagcaaataaatgaacgggtggtagtagggggcatgaggggagaggctttgactctgttctaatttatttagagcaaatcaaaacactcctcaaatggcatctttctgcttttatcactagttccgtgttttttttcttgttttgtgtctgtgtattttcatttctctgtcatccgtcctttcatcttgaagcaaatctcttctaactccctcataccccagaaattgattcattctattcaaatgcttaataattcaggagattattatttgtttgagccctatcttctttttttttttgagagggggtcttactatgttgaccaggttggagtgcaatggatattcacaggcacgatcatcgcacactacagtctagaaatcctgggctcaagcgatcttcctgcttcagcctccccagtagctgggattacagggggccagagcacagccctattttcttttccttttggcaagatcatctcagcagaggccagaagagaccctcaactgttcaatgaatatttacggttgctttcttccttttatgagcctcttgcatactttgaaagctttaaatttatacctataatacaacggacatcccctatcccagaagaccattcctccctgtacttcagctctttacttcctcccaaataaaacctaacttttctaactaactatttaagacttggaatagtccgcttgactagaagaaggggaagaatgtttgtaaattcacctctaatcggactttgattctactataattcagcagaaaattcatagcgctgtgatttttagatcgacctcacataaaacagtccctgcactcgc

SEQ ID NO: 134294 - DNA, 1085 bp, Homo sapiens
aatttctgtcttcaactttggacatttcttaactattaactgggattacttcctttttgctcctctacaacccattctctacacagaaactgtagtgatttctttcaatgtgacattagattctactacaaaaatcaccaatggctgcttactgtaactagaataaaattcaaacttaaaaaaaaaaaaaaaaaaaaaaaaaaaaaaaaaaaaaaaaaaaaaaaaaaaaaaaaaaaaaaaaaaaaaaaaaaaaaaaaaaaaaacaaaaaaaaaaaaaaaaaaaaagaaaacaaaaaaaaaaaaaaaaaaaaaaataaaaaagaaaaaaaacaaaaaaaaccacaagaacaggaaaaaaacgcggaaaacacgagagcccaccggggaccaggagcaccaccttaccccgcggcgagggcgagacccacacggccacacaccaccacacacaacgagactctaaacccccgacggcaacatatacacaacgcaacaacagagaaccacaggcgcgtacacacccaaccccacccaataactcgcgccaccagacacacactcaccccaaacaagcagaaaaacaaaccccacgaaaacagaataaaaaccgagacacaccgaaccaaaacaccagcccacacgaactacaaccaacacacacacaacacaaacaataaagcaaaagagacacataggccgcaaagcaaaggaagcagagacgaaacgaagagagccacgcgaaagacgacgcgtcaaaacaggagaccgaaaaacagaagacagcgagaaagggagaaagaaagcagaaaaagagacggcgacacaaaaaacgaagaaagaaagaccagacacaagacggaacagcaaagcagcagggagcaccagctgaaagagggaaggcgcagcaaaacgagaacaatccggagaggcagaccaagacgaagaccagagagcgaaagacaagccgagcagagcggcaagcaaacacagacgaagactgggagcgaaacatacgagagagcagagaagacccaggaacggggagccggcccacgacaccacacagatcgagaaactgcaaacag

SEQ ID NO: 134295 - DNA, 278 bp, Homo sapiens
  misc_feature (26)..(26): n is a, c, g, or t
  misc_feature (36)..(36): n is a, c, g, or t
  misc_feature (59)..(59): n is a, c, g, or t
  misc_feature (63)..(63): n is a, c, g, or t
  misc_feature (95)..(95): n is a, c, g, or t
tgctgcttcgccacctgctgcttcgncacgaaaganttcccgtgccgtgggagcaagtntggnacctctggtcggaacggagagtcgcagctgtntgttagggctaggatggctccgggatgcgcgtaagggcccgcctggcaggacgactgagcaagtccttggaaaaccagagatattagagcggtgaatcgcgctggtcacgttggacacctgcgcgttaggagattctggagccagagggagagaacccagaaactccccgggcggcgacccag

SEQ ID NO: 134296 - DNA, 472 bp, Homo sapiens
cagtccgttcgactgagctctctcctgtgctcccaggcctcctggttgtgttcgcacctgtggtcctggggctgaaggcaattaccttggctgcactcctactggccctggctacctactcggaggagccctgggcaagaagatgtcaagaccacaggcccagcaggagccatgaacaccttagcatggagcaagggtcaagagtgaggggtcagccccagagtgaggaccctctgagttggagaggagccagggctcctcaaccatttccctacctccagtcccagcctctaggtgcccccaggcctcatgacaaactcctagatccctacatctggttttggtccacctagtgaaattcccttctttgcaccgggcttccctctaaaatgtctccctttctctttttggcctgttcaagacctccttgcttttcagtccctggctcagtcgaacggactggggtaccgag

SEQ ID NO: 134297 - DNA, 788 bp, Homo sapiens
ggataaatccttttttggtcatggtatataattattttaatatatttgctggatttggtttgttagtattttgttgaggattttgtatctatattcataaggaaaagacgttagtctgtagttttcttatgatgtttttgtctgattttggtatcggggtaataatactgacctcctaaaattagttgggaagtattctgtctgtttctagttctaggagacaatgtagataactggtattatttctactttaaatgtttggtagaattcaccagtgaagccatctgggcctgggctttcttgcagaaattgatatgatgattctaaaattcatatggaaatgcaagggacccagaatagccaaaacaatcctgaaaaagaataaagttggaggactcacaattcccaatttcaaaacttaccataaagctacagtaatcaaaatagtctgttactggcataaggatagatacatagatcaatgggatagaactgagaattgacaaataaaccccacacatccatggtcaatttttggcaagagaaccaagaccactcaatgggaaaagaatagcctcttcaacaaatggtgctgggataacctgataaccaccttcaaaagagtgaagttggacccctacttcactccatatttaaaagttaagtcaaaatagatcaaagacttaaatgtaagaactaaaactataaaactctttgaagacaatttagaagtaaatctttgtgacctgggttaggcttcttagatataataccaaaagcacaagtaa

SEQ ID NO: 134298 - DNA, 468 bp, Homo sapiens
ctgcccactatactccattacactgcccacgtggtgttcctggagggacaaaacacccacaggtaaccctggctgactgttaccaattcccctccctgttatccatagcctagttcctttttgaggctcctgaagaggaccctgagcctaaaagaaggccatagatctgggaagaaattaatcccacattacttgtcagcagtggcacagactccctgccattacctaggttacctgactggagtttaagccactaccgatcactcccctatttaccttaattaatcagattggcatggctccctcaggaggggtgctcagacctccctgtgcccctgggataagtgaggaagttggggagcgcttcttggcgaaaagacctaagaattgcagggaggcagccctggaggccagggcgggtaggaacactaacagaggggccgcctgcaccaggtgggacagaagagg

SEQ ID NO: 134299 - DNA, 524 bp, Homo sapiens
ggtgatggagcaaaggtcagcggtggccaggggctgggtgtggctatgaaggggtggctgccttgtgatgattcaatatgctatgtttttcctttgtggttttctgtatctatgttttatcttattttttttgagctctgtcacccaggctggaatcagtggtacgatcttggctcactgcaacctccacctcctgggttcaagcaattctcctgcctcagctgcccaagtagctgcgactacaggcatgcgccaccatgtccggctaatttttgtacttttttttgagacagagtttcgttcttgttgcccaggctggagtgcaatgccgcaatctcggctcactacaacccccacctcctgggttcaagagattctcctgcctcagcctcccgagtagctgggattacaggcgcccactgccacaccccgctaatttttgtatttttagtaaagatggagttgcaccatgttggccaggctggtctcaaactcctgacctcaggtgatccacccgcctcagc

SEQ ID NO: 134300 - DNA, 1202 bp, Homo sapiens
ggactttggcagattgtgctattacattgggctctaactttctggcacccgcaaggcagacctatgatgtccacatggctgactcttgacccctggccattgtgagcagaggaatcaagggtttagggaggcagtattgggcagtgtggaagagttagatgagatgaagcagttagcacagtgcttaacccatactaagtgcccccaaccctgccagccaaattaggtgcatagttttcagcttgggtctggattcaacagcattcccgctgcccactaaaagggtgggcttggacagttcctgaacctccctaaatctgtttcttcatctttaccacacacagtctgtctcagtggtggtgtggattaagtgaggtgctagcacttattaggggaagatcctccagacctgcaaagcagggctgcagccccaattctgacccagccctgctgtgtgtttgccgcaaagaggtttggtgtgtgcgagacatttctttatgaaccatttacactgctggaaatgtacccactaatgtgatggcaagaacttcaacaaattgcttatgaatcaggctctcaatggaagaagttaatcctctgaagagggggaagactggactttcagaagtatgttggggatagagaatgaagtttgagtcagcagagctctgccttcctgtttgtcaaagaactagagtctgggagtcttgcaagatggagctgggcttctgaagaacccagtgggtaggtactgggcatccattagacggcagtgctaagtcggtcatgtgcagcagaaagacctccccactgtgaacaacaaaccactttcctcctccagtggcccattcatttggattgatacactttttcagtgtcagaaatgcactttctccctctacttgtctgaattacgatgctctgctcaactctgtggacagtgtttcttgaatttccttttccaccgccttttcccactcaagaaagtggagagaaaaacagggatgcaggctgtgggtcttgtggaagccctttacaaccattaaataaagaacaccagctgcattatgtgtgtttagaacgagaagttgtttgtacagtatttttctattgaccgcttccgtcttgcctgaaacctgggcattctttctgtagtttctctgaattttctgtctcacctcctcacccctacccttgccttt

SEQ ID NO: 134301 - DNA, 397 bp, Homo sapiens
ggtgggcttccgggcaatgctctgcgcactgccccacatcagggctaagaggacaccgtgtccccaaggatgcagaaacttttggcatctgtgactcccccagtcccagattctactccacatggctctcccttggctggttctgacttacatactttctctataataaaactcattgtaaagacagtactttcctgaatcctgtgagtcattctagtgaatttttgaaactgaaggtggttttggaaacctccggactcacaactggtgtcagaagtgggggcaggactgggcacagtgattcatgcctataatcccagcactttgggaagccaaggcaagtggatcgctggagcccaggggttcaaaaccctcctgggcaacatggtgaaaccct

SEQ ID NO: 134302 - DNA, 422 bp, Homo sapiens
tactgttgcagctgtcagagcaacctaactaggggctctgttcccagcagcagaacttatggaatgtgaggcgtgggcggatgtggcagtcatacttcctgccctagaggatggcagtctatcacaagagaatgaaccaatattacagtgcaaggtctcaaagagtgtcctggagtcattaatttccttccattcattcccgagttccagctgtcacttctctcagtccagctgcttgattttcctctggttttaagataccctagtttttttaaactaataccccttttagctgttgagttggatttctgccatctaaaggagactagtaagatttctaagtttcggatgaataaatacatttgatatgaaagataccaaaggattaagattttttttgagacggggtttcactcttgttg

SEQ ID NO: 134303 - DNA, 205 bp, Homo sapiens
tcctgggcctcaggtgggcatccggggtttcgatctcagctcctgctgacaagccggggccttgagttgttcggaagttccactttcctcctttgcagattgcaggttaaaatactgacctctgtgggccgggcatggtggctcacgtctgtaatcccagcactttaggaggccgaggcgggtagatcacgaggtcaagagatgg

SEQ ID NO: 134304 - DNA, 658 bp, Homo sapiens
gccaattaatctctcttccctttggaaaaactggactgatacccggcttacagggttctgggccttacaggtgagaaaagaatgtcacttcctggcaggcccaggaccctaggatatcttgaggatctcaacaagagaagaattcatccaaatctgtaggtattgttattggaaaggggtactaatacagactccatttaatacagacacatttaacgcagtgtgtcgagggaactttatagcactaaatgcccacaagagaaagaaggaaggatctaaaattgacaccctaacatcacaattagaagaactagagaaacaagagcaaacaaattcaaaagctagcagaaggcaagaaataactaagatcagagcagaactgaaggagatagagacacaaaaaacccttcaaaaaatcactgaatccaggagctgtttttttaaaaagatcaacaaagttgacagactgctagtaagactaataagaaaagagaagaatcaaaaagacgcaataaaaaatgataaaggggatatctccactgatcccacagaaatacaaactaccatcagaaaatactataaacacctctatgcaaataaactagaaaatctagaagaaatagataaattcctggacacatacaccctcccaagacta

SEQ ID NO: 134305 - DNA, 256 bp, Homo sapiens
gggagtttcagtcattcaggtatatagaaagatgttgtccagggatcagtactcctgcctccataaatagcagcatttatctagtagagcaacaaatgcttaatactgtgattcagagagatcccaaacatcattagtagaatacacagtggaggtctattttataagagaaagcttagtttgattttttttcttcaatttcgggtgtttaaagggaatagttggaggatgctgtattagtggacttctagcgact

SEQ ID NO: 134306 - DNA, 280 bp, Homo sapiens
ggagaccttagacatagaggaactctcagacttgaactctacagggtggtgttgccggtaagatgggcccggtcagacctgagcactcctcagtcggctgacctctccagggtccccagcgtggccacgcctgcttggagcacagcctcgggtgtcaaggggtgataactcctgggggccccacatcacagctcttgcactggtgaaccatgcctgaccagcagagaggtccagcagagcgtcccctgtaggatacgcaccagcccactcgtaccctcct

SEQ ID NO: 134307 - DNA, 181 bp, Homo sapiens
caagatatggcggagggggaatttggagagattcaaagagtgagagagcctgaaggggaccacatggaaagcatgaaaaggactgtaggcctgaaggctggcccctggcagataaccagccgggaaacgggggccttgtccctacagctgcacgaactgaattcagccaacggcctgagtg

SEQ ID NO: 134308 - DNA, 481 bp, Homo sapiens
tttaactagtactgttataggtttagttttttcttgagttagttttggtagtttgtgtgctgctaggaatttgtccattttatctaggttatctaatttgttagcatataattgttaatagtatttccttacaatcctttttatttctgtaagattggcagtaatgtccccactttattcctgattttagtaacctgaatctttttgtcttgctcagtctttttaagggtttgtgaacattattatttcaaacaaccaaattttggttttgtggattctattttctactgtatatttcatttatctctactccagtctttactatttccttccttctgctagctttgggtttgatttcctcttctttttctagttcctgaaggtggaaggttaggttgctgattctaggtattttttaatgtaggcatgtgcagctataaaattgcctttgagcactgcttttgctgcattccaaacgttt

SEQ ID NO: 134309 - DNA, 1188 bp, Homo sapiens
gtgaagatcattgacaagatctcaactgttttcctccagtctccagaaactattccgcgaagtaagaataatgaaggttttgaatcatcccaacatagttaaattatttgaagtgattgagactgagaaaacgctctaccttgtcatggagtacgctagtggcggagaggtatttgattacctagtggctcatggcaggatgaaagaaaaagaggctcgagccaaattccgccagatagtgtctgctgtgcagtactgtcaccagaagtttattgtccatagagacttaaaggcagaaaacctgctcttggatgctgatatgaacatcaagattgcagactttggcttcagcaatgaattcacctttgggaacaagctggacaccttctgtggcagtcccccttatgctgccccagaactcttccagggcaaaaaatatgatggacccgaggtggatgtgtggagcctaggagttatcctctatacactggtcagcggatccctgccttttgatggacagaacctcaaggagctgcggcgaacgggaactgaagagggaaaataccgaaataccatacaacatgtccacggactgcgaaaacctagcaaaagaaatacctcatactaaaacccagcaagagaggcacaacagagcaactcatgccacgatcgaggatgactgtgggacagaaagatggatgaactaaagcctaacgtgaggcacatccagactacgaggacccggcggacagagctgatgaaggccaagactaaacacggcaaaaacacagaaatccagaagagccaaaacacaccacgggaacgccaccaacacagacagggcaaacagagacccgacaatgatagtagagacaacagaaagcagatagaaccaccaggaacactagagtatcgggaaacacatagacgagagccacaacacaaacatacaagagcaaacgagcaggagcactgcacaaccaaatagaggagcggcactagcacacgagcagcgacaaatacccgcacagagacttaaagagagacggaaaagccagaaagatgcgactgcaagtgcaagccgcagcacaacaaggcggacacagacgaaagacgcacacacgcctcgtgcaagctatcgtgcgtaagagcgagcaggcgcacctacaacaggaagacgcacgcgaa

SEQ ID NO: 134310 - DNA, 420 bp, Homo sapiens
cccttggatctaattaatgaggtcaatatctttgatctgttacagagatataaggtgaagaagtcagacttgtaattatttagcacgtcaaattcaccttaatatacagattcttagaccctcttcccctcccccaaagattccaactcaatagatctggtgaaaaccaggaatctgtaaacgcccagtaattcagaagcaaacgtaagagatcaaattctgagaaacaatgtgtttctctgagaaagagaggaacgggattcattctgtaatgacaggacaaattcatgtaccattcaaaacgtctttcacaactaggactcatatttattatttacgtttacagacttattatacttgtagccctacgcccaaggctctatcatcatttacaatccagtcacttcctcaaacaaatgt

SEQ ID NO: 134311 - DNA, 384 bp, Homo sapiens
ctgctgaggggttacccagcctgattgcttctgttggcagcaagctcacgacttccacctctggactctgcccgttagaaatggtttcttataggccaggcgcagtggctcatgcccttaatcccagcactttgggaggctgagaccagcggatcacttgagcccaggagttcaagaccagcctgggcaacatggtaaaactctgtctttacaaaaaaacaaaaaacacaaattaggcaggcatggtggcccacacctgtagtcccagctactcaggaggctgaggtgggaagattgattgagcctgggaggtcaaggctgcggtgagccgtgatcgcatctgtgtgctccagcctgggcaacagagtgagatcctgcatcaag

SEQ ID NO: 134312 - DNA, 222 bp, Homo sapiens
aaaaaaagatatgactcactagaagctcagatgatcattagcatttttttagcaatgaagtattttaaataaaactgcatttttttagacataatgctattgaacacttaatagcaaccatgtaaacataacttttatatgcactggacacccaaaaagtccacgtgacttattttactgtggtagtctataagcaaacccacaatttcttcaaggtatgcc

SEQ ID NO: 134313 - DNA, 253 bp, Homo sapiens
gaaaaggctggggagcagatcctgagccaagaagtggcatgacgtattttcaagagaacccctggggtttctatgtggagaacagactaaagggagcaaggtccgaagtggggacaactgttaggaggctatcataaacatccagccgagacataataaaagtttgggccagaataacagtagaggtatggtcagattcagtatatatcaaaattagggtataggtaggaacataaagagatgagagcctgag

SEQ ID NO: 134314 - DNA, 709 bp, Homo sapiens
gaaggaaagggtgacagttaccagttagattcaatacttctcagcttttctatgatcagcattatttggcacacacagaaaccacaactttaactttccacatttaccactgttttatgtgatttgggtctagaaggaaaatggtcaggggccaattttctaggaaccagggaggttatgttattcctggattacaccaaatactggtcattaaaaaaaatcgttttattgcagtataatttatatgccaaaacttcacccactgtaagagaacagctcaaggatttcgggtaactttatattgtgcagccttcaccacagtccagtgttagaacatttccacggtcccagatagctccctccaagcctagtacttttgattgtttgtgaattctgttatgtatatgttcaaacacctttccaatgaataacaatgccttttagaactcttcgtattttttcattgttctagattgagtaaataggtcgcaggccacctgtttcattaagttagtcttgataaataagttcgtgaggtttgtgccatttgcctaaaatgaaatacttcaaccagtgagtattattgtaataatgaatatgtgccaggtactgctttgccatctcttaaaataatgctttagaagtatactcacggtttaaaagagtactctgtttatgttaatgcaatagtcatatatttgaacaccca

SEQ ID NO: 134315 - DNA, 1247 bp, Homo sapiens
tttctattttcaggacttattttctgaatattctttttttcttagatggagaaaaaccttacaatttcaaaacctgaggatattagtggcagttccttaaaaatgttttcttctcccttcacagtcccactttgctccattttgggttgtgggttttgattctacctttcaccctagaggcattcctcaaatggctggtgatccttgcctgtctgcacatattgaagagggggacaataagctgactggaagcaaccggctcataggagtaggatttgttgactctggcattcctgaaactgctgcttccctggagacccccaatatcagctgccaaattttgcacagaatcttctcatctcctggctggaagcataagcctggctaccagcattcagacagccaagtaggggaaagtgctaagcattaaatattctgaatacaggctgggcacagtggctcacacctggaatcccagcactttaggaggccgaggcgggtggatcacctgtggccaggagttcgagactagcctggccaacatggcgaaaccccgtcgctactaaaaatatgaaaaaattagccgggcgtggaggcacgcgcctgtagtcccagctactcaggaggttgaggcaggagaattgcttgaatccaggaggtggtgcatgcctgtagtcctagctacttgggaggctgaggcatgagaatcaagtgattcttgcacctgggaggcagaagttgcagtgagctgagatcacaccactgaaccaccgcagcctgtcttaaaaaataaaaataaagaagtaacatttttgggaactggtgtgcctggaaacctttttattccacctacccttacactaattgaggctggagataacattcccttggaattttaaagatattgatctactttcttctcatatctgatgttatttgaggcattcagattctcagtcctttgtatgaaacttttaaaattttttctagttcaggtattccttgtagtgaaattcacaatggcataccctagtgcgggtctgtttttatatattgtgctgggcactggaaagccatggctttcagtttcattggtgatttcctctgctgtttcttctgttctctttatggcatgcttattattcagatctgaggccttttgttctggtcttttctttcctactttctgcagtgagtcaagattgtgccacagcactccagcgtggcaacagagcgagactccgtct

SEQ ID NO: 134316 - DNA, 162 bp, Homo sapiens
ccctcaccccccactcttaggtatgtatgatgctaatcttgtccctaagtaagtttcttcctgctccttttgtatcttcctttctgtctttcctcctaccttttgtctcttggtgttttgggactttttttttttttttttttttttttttttttttttttt

SEQ ID NO: 134317 - DNA, 308 bp, Homo sapiens
ccaggctggtctcgaactcccggcctcaagcaatctgcccgccttggccccctaaagtgctgggattacaggtgtgagccacctcgcctggtcctgagtgcatattttagagaataaaatcacccaactgcccagcagatacatgaggatgagtgaggttaaagaggacacaagctgtttcttagatattaatgtcaaataaaaggttagttatcggctgggcgcagtggctcacgcctataatcccacctcactcaaatctctatcatgataaacagcatcgctggctgtcagacaagctcgtgact

SEQ ID NO: 134318 - DNA, 439 bp, Homo sapiens
ccttggctttatcttctctctgctccctcctaggctataaactcgggaatgaatgaatggacagatgaaccctgccagtataattgtaaaccatctaatcagaaactcaaagggcagcagataggaggccacagctcagggtgttccaaaggcccagcccagggcgtgactgaggggtgtggtagtcaagggggtgaccttaaaacctggcgtctgtctttgtcattttagtcattccatccgcagcgcctgttgagcacagccgtgtcttaccaggcgggtgctgagcgcacacactgagagaccgtggtcttggcacacgcgtagtttatagtatgagtggggtatgccgcaagcccatgtctgttccctgctagcctgggtggacagtgatggctgtcactgcagacatgggatgagaagcttcagtggtgaggtg

SEQ ID NO: 134319 - DNA, 834 bp, Homo sapiens
tcactgaagtaaggaggagaaatagtttggagggcagagtgtggtaatggtaggaaatgacagttatcatttgggacattttgaggtaatggattagaagtactgaggccttaacccaaacacagtacaaagagacaaaaagaaaaaaatgtagaagtgctgtcaagaatcatggaggatgtattgagatgacatggtataaatttgtgtataggaaagccagaacaagataaagtgagaatgatggaaaaaacaatatcaaaagtatgtcgggccaggcgcagtggcttacacctgtaatcccagtactttgggaggctgaggagggagaactgcttgaggccaggagttcgagaccagcctgggcaatccagcgtgaacccccatctctaaaaaaaaaaaaaatttaaagagataatgacagagttttctgaaactgaaagagagaccaaatttttcattcaaatggagagtgtactctgactatcaagcaggaaaaataaaatatataaaatctgtagtaagttctatcacaatgaagctgcagaacatgcagggtaaaagggaaatggtaaaagctgccagaaaaaaagggagtgtcttcaatggaacaataattaggctggcagcctgctttcctgtagcaaccgtgcaagctgaaggtggcacagcaatagcttcaaaatgctgtgagaatcgccgcccactcctcactgtgtgtgggctgggtgtggcacgctggcaactctccccaaacgactctggatgctggtgtccctagaatctcttgggtctaaagattgatcttcttacctcctataattcctgaggtgg

SEQ ID NO: 134320 - DNA, 451 bp, Homo sapiens
cccaatgatagaatgaaggcaagcctgatactttgtatatttgacctattaatagaaaaataccgtgtgatgatgagcccttaataaacattaaataagaacaagagttctagcttgatctgtgggctgattgattttgtagagtttcttaattgacttcattttttaataaaatagaatatgcctgagagagtggaagaaagaaaaataagctaattggaatagaggtattgcatcattgatttgaatttattttttgctatgctttctacattgattaattgttctatttgaaatttttagttgaatggttcacaggcaaactaagatgtataatatttatatgtagctgccactgtggctcacctgatatatcattgtcattctatttaaggatccttagacttaaaattctttacaatacttgcatattccccacatgctcacacat

SEQ ID NO: 134321 - DNA, 318 bp, Homo sapiens
atttaaccctccaagcttatttgccaacgtgtgaactgaggataagaatatctgctccttagagtgttgatcaagtacgtagcatggcgcctggcactgagccctcagtaaaaggtgattccatgttgattcttctcctctgaagctaaaggctgtgtcgctactgcagtttctgtctgcttcaccctgcatcgtccctgccggactaaactcccttaagtggcgattttgcctctattgagtaaaaacttagcttttccccattgcttatcttttccatctcgacttttctgagcaacttttaatatacaacttaaa

SEQ ID NO: 134322 - DNA, 458 bp, Homo sapiens
cagacaactgaatttaaaagtaagcaaaagacttaaaggagcatttaatcaaagggaatgacaataccggattaatttgagatatagaaaatagcttaccaaaaagatgagccatggccatgtgtcaacaatatccttttttgagagctcaattaaacataataaaaccagttataaaagaattagaaaaacatgtaatccccatgctttggaaggccaagttaggaggatcagttgaggttaggagtttgagaccagtctgggcaacatagtgagacctcatctctacaaaaaattaaacaaaaattagctggctgtgatggcaggtgcctgtggtcctagctacttgggaggctgagatgggaggatcacctgaatcctggagtttgaggttacagtgagccgtgaccacaccactgcactcaagcctgggtaacagagtgagaccctgtctctta

SEQ ID NO: 134323 - DNA, 343 bp, Homo sapiens
gctaatatgctggcaattcggcttattaagcgcgttctgcgtagtaagtgagtggggatctcaggccagcggggggagcccagggcacagctccagcagggctggcccctcagagcttccaggctgcagcaggcaggggttggaagaggtgagaaggagcagggcagtgagtgtcccaggaagcccattcccggaacagcgtccttgggttggttctgggaactggggacaccaggaaggcccaggggagtggggctgctgggaatggcctgggggaggccacgaggtgggtcaggggtggagctgggtgttctgggcgggcctttgaagcccactggccttc

SEQ ID NO: 134324 - DNA, 434 bp, Homo sapiens
acgcatccagacaggaggtacaagtcagatctctgtatgttcaggttaaaacgatagaaataaatagacatacccacaactttgaaacctggacagagttaaaggggaccaaagacaggaaggtttcttggttttgtataaatatgtcgattcacacatgcgtttctgaaaatctttatggttctccccccagcttggacactggccactgtaaataatgctagaaggttctggtgccttcatggcaagattacaggggataggaatcacatttatcaaatatgtgaaggactgtcactggaagaaggacattagtgatctgagaaaatccccagggcaggactaaggtcaatgtgttgaagataaaggggtataggtttcatttaggaggtgctctcgtgtcataatctcacccaaaatggcccagagccccc

SEQ ID NO: 134325 - DNA, 313 bp, Homo sapiens
aagtgtattatcatacttatatactggactgacatagaaaaatttccatggcatagtataaaaataaaaagcaagttcctgaacaatatatgtaagaatggcaccattttttgtataacatgtgcacgcacacacgtttatgtagcaggaataaaacattttttgtctgttttttaatcgactgacattaaggtttctgcctgtgtttagaaaaattccttacataagacgggtacatagacagataatcaaagaccagtagtatctcccctgaatttggaaatagcagcaagttaagaagcaaaagaaaata

SEQ ID NO: 134326 - DNA, 319 bp, Homo sapiens
gggatattttagttaagctgtcccacccagctacagtggcagaagttgggaagagggcccactcataaatctttattgaactttaattaattaattaattatttgccattgttcataggaatttgaaagggaaagacatattgaataaccatgcctatctgactttatagaaatggtccaggttcttggggttaatgtgacttttattatttgataggcacgcatttgtttaacaatgacaataaccggaaaaccacagaagtataaataccagtaatgaaaagttcaatgcaaagaggaaaaaaaagaagaagaaaaa

SEQ ID NO: 134327 - DNA, 397 bp, Homo sapiens
acatacagtattctgcttaactcaattcacagttaatagccttcacggtactgaatggtcccaaatagttattcaaatttttgaagagtatcttggaccatttaagttaattctactgaatacagctgtggacaacccagttgggggtgtgggggacaatcttcattcacatctcaccataatgtggtatgtccatcatatttgaacattttattaaaactcaatacctaacggtcaatacaaaccagactgccagtgcatacagactagcctgaaaacagtttttggaaaaaaaaaaaaaaatgcagtctaaaaatattaactatacaaacatcacatctattgaaaatacacatttcacattaaacacaaacaaaactttaaaggtacctactag

SEQ ID NO: 134328 - DNA, 558 bp, Homo sapiens
gaggactaacagcaataataaacaggaatttttatctttaaatctcttcataactttaattagttaatctgcacaaagctataataggagacaggtatggtgggagttatctccatttcaaagctttatagttggtccaaggtgacaggattaagttttcaaactggcattagaatgcggagaccattgtctgctcaactgtgtttactagtttgcatggctatgatgcctggccaagcacacagacactaattggaaaaagagatatagatacagtcccttaattgactaactttaaaattgagcaaagtgagatagggctgtctttgaaattagatcaaaatatctcaaacaaaatgttatcagccacttaaaatggttgttaccatcttgttcttcaactgttgaagtttaccactgctgacttcactctgtcagcaatctttgagctgttcattcatgcactcatatcatacctttcatgatctttgagcacctactgtgtgtaagacattgggcaaggacccatccgtattattacagccattacccttttgt

SEQ ID NO: 134329 - DNA, 293 bp, Homo sapiens
ggctgaggcggaggcaggattgcttgatatgagggagattgaggctgcagtgagctgtgttcacaccactgcactccagtctgggcaacagtgcaagaccctgtcacttaaaaaaaaaaaagaagcacttcccatcagaactcccagaaagcagtgagtccaccctccctgcacatgcacaagttgggtggggacaggcaggaagggagctcatctaggtgtcagcgtaatattgaggggcagtggcagtggcagcatgtgctttttccaccaatgccccagtgtctcaaaag

SEQ ID NO: 134330 - DNA, 636 bp, Homo sapiens
ctagcccttcactttataggtaaagaaatcgaggctcaacataataagggaaaaagaaataaaagcccaaaggaaaaatggaccactcctacagagacctccaaagacaatggtgtttctgaggttgtacttccaccttggccctgaacttcttggcagccaaaccaaaaaagggagagatgggagctagtaatttcttttaatcataaaggaaggatcttggcttttcccagcactggctacttaaatattcttacatgaatttctagactctgccctgaatatctggcctcaacaactttacataaataagtgcataagtggcaggtattggcctcaacaaaaacttttcatagtaaatataataaaagattttataaagggaattctgtgagggtccaaatgtataataattagacttattgatatatattaagtacctaagtgcactattgtagagtctcaatgaagaatataaatataaacaaaaaagataaggagctgaaaaaaccaggagattttccattctacctgtcatactattttttgcctttgcaaaattctgtcttaacttctttcagtgcttacaagtaagttaaactgaattcattttttccaagaactggaattagttgg

SEQ ID NO: 134331 - DNA, 416 bp, Homo sapiens
ccatctggcacgaggactggtgggaacccagccccctacaggacccaggtctcaccccctggacagatgcttctcccaaaaccgtccctgtcctcaaggagctgataacccaggaatcgtggttaatggtgacattggctaacactggatgttgctttcctttaaacctgcagttagctttcttccagcagaatgctgagatattactcctgtgttcacatgtggaaatgcagcatggctgcaccatttcaccatttctaccactctaatcattgtagcttcctcttgctctctttttaagctaagccttagcctggcttcttgtacctatagggagttcaattcatttaccaattcactcaacaaatatttgagtgcttctctggtggaagactaccattccaggcttttgggat

SEQ ID NO: 134332 - DNA, 539 bp, Homo sapiens
cctgttatggtgccagaaattccaccatttataattccttgggggtgagacatcatatcttcccactaggctcccttttccaataataataataacaataatagcaacatgtgcatgtccaggggtgtacagttaacccaggactttcccatcccccaccctcataacagctcggtaaggcaggtactgttttagctattttggacgggaaaccaggactcagaggggtggtgggacttgcccagggtcacagagagcagtaggcgactagactcaggtccaggtctgactgcagagtcctggtctcaatcttggtccccctaggcaatggcagcttgaggtggtggtgcctttgggttcctggaggagggagccatcctcggccgcaggcctgcaaggggccccctcctgggttggggcagggaccagttgtatcccaggttcctcgccttttcctctacagccagacatctctccagtctcaaacctggcggaagtttgacaccacagggatctgattcctgctgagggcctcagat

SEQ ID NO: 134333 - DNA, 869 bp, Homo sapiens
agataaactatgtaaaccaaatattttaaagtttttatatttggtttgaatcaggttagtgggggagagagcgagggggaagaaaataagggcatatacacagtgttttgaacatattcactgagttttagaaggtgatacgctgtctatcttaattaaacaggcatcataaccatttttgcacgtggcccagtgtgaacaacctaggagagccatttgttcaattagtggagatacagactcgggtctgttctatgcaggttgaggcatggtcactactgtttgcctatttctaatcactgaaaagaacttaaagcactgactatggctgtgagactacaaagaacgaagttaaaattatgccttatatcttgagcacaatttccccattctataattttccttggtgttatatcttgcatttttctaaaaggggaaaagagagtgaaagagcaaaaacctaattattgaaactctgtcctcaaactcttttctgaaacttgctctaaggatgaggggtatttttctggcctcatgaaaggatgccctttcttccttggccaacatgaatgagaattttcctctttcttgtaaagaagagagacttcttatgaatgaggctttttagggagggggaagggggttgtctaaaatcttgtgtttatacatcaaaaaatccagtttaacttaaataatttattactttgagtttcacttcactgcattaattgtattaattttatacacgactagacaataaggccaaaattcaatgcctttattctttaaatctgtttctagcatgttgactggcactaagtgaatgaataaacagttaaacaaatcaatgaattcaatgattcttaaaa

SEQ ID NO: 134334 - DNA, 402 bp, Homo sapiens
tcccaccaaagcttccacccttcagtctacgtagatcattgttctgtatccccttgatctatatccttggttgaggaatggaagttctgtggccagcagatagggattccagagctgttcagcttcattattgaaagggaggcacattcatggcttacctcaagatagtgggggaagcaagagcacaagaaattgaagagggaaattagggtgcctaatgtttaaactgtcacaacagttagataatgttgacttccgctgttttctctctggaccacagaattgtttgttaaatggaagcagtgcagtcaaacgttttcaaaagaattgagttcactctaaaaagtactgtttttccccactttctcctgctattcctcagtcactggcactaaaaaaaga

SEQ ID NO: 134335 - DNA, 170 bp, Homo sapiens
gttaacatccccaacttcttcaaaaacagtttctatatttgtgtgctttcacctgttgtttgagctgcaagttttttcttaagttagagtttcttcctaaattaatttttcatttttggtgaattgaatgtttttaggaactgtaaagagaaaatctgaggacaaacagg

SEQ ID NO: 134336 - DNA, 831 bp, Homo sapiens
gagctgtccggtaatagaaagaagctgcagaaccctgttgtcttcatcttttgtttaactcatgcaacatttgaaagcacgtttgcctacaagaaataaaacttaagttgtgaaatggcttattaatgaactcagatgacaagaaaccaaaacagcgggcctggctgaaggattcatccctagccctgaaagccagcggggtctttctgtaacatcaaaggcacaaacaattgaaccgacatggggacttattctgtccagcagccctggtggcctcagaccatccgaagcaagggtaacctaccagaaagctgctagatgttccccactacagtgaaggattaaacaaagaatgaagaagaagtaggactcaagaagtaaatgatccaactcaagaaagaggtaaagggaattccttttaaaggcttcaagacttttctttcccactcctccctgcccatgcgagggaggctccattttaaaatgtacacacacacaaaaaaaaacggatttgaaataagggcatagcctgaggtaacttacccccaccttggcttccagagcagcttggatttcccgatctttgagcaggtcagtgatttggggccccagtaaaagagccgggctattcttctgaaggctcatgaaaagtcacttcttagtggcatagcgagaccacggggtgttcaaaattattccgtagaggcctgtgtgggccccgttcccccattgactttgtttgacggcttcgccattttgggcccgtgccaatccccccgtttttggggcttaacgggccctaaagttatatttttaaaggggttgaaccca

SEQ ID NO: 134337 - DNA, 322 bp, Homo sapiens
ctcacaccttatacaaaattaactcaaaatggatcacagacttaagtgtaaaactataaagcttttagaaaaaatataaggaggaaaatttttggatctagggttaggccaaagagttcttagacttgacaccagaaacatgatccattgaagcaaaaatttgattaattggacctcatcaaaatcaaaaaattttgctctgcaaaggatctgttaagaggatgaaaaaacaagctatggaccaagagaaaagatttgcaaatcacatatcttataaaggctagtgtctagagtatataaagggctctcaaaactcaacagt

SEQ ID NO: 134338 - DNA, 744 bp, Homo sapiens
caacaagcctctatccagagctcagaaactgaaaaaaatatattacatttttcttatacaggcataccttggatatattggaagggagaggctaaaaatctctcatgaaagcaccagtatctgagtgctgaccacggtaggcttctgcgcttacagaggagctgcatcacagatgagagaaatacaaccaagacttcaactacaattgagcagaaagcctcccataaacatgaagacaattcgtaaccagagtttaagttttataaaggtgtctaaaaatatcttattttgaatcatgcaaaagtgatccagtctggaagcattgtaaaaataatgcttccttcccaggctgggtagtttgtaaaaccctagagactagaatttcctcaagcctattttatcctctttattctggagaagaaaacaaatcaagaaatcgaaacacttgaccttggaaaggatctcatcctttgttacagactggctgactctgaatatatcaggaatgtacttcctagaccccaggactcaaatataaccagagtgacagatagggcaggtctgagagaagtagcaaacgtacttcatcttagggtcagaaagaaacatgctggtataattctaacttagaaaataaccaggtaaggggtcttgtaaacttcatacaatgctgctgcctctgagttattaaaaaaattactaacaggcttctgatcaactaaaggaataaaattaggtgttcaa

SEQ ID NO: 134339 - DNA, 401 bp, Homo sapiens
gactgttgcttcctctgcctggcttgtcctcttctctctgttaactcctgctctttgtcaagatctagctcagattattatttcctctctgaagactcttcttggtaaagttgctcgctctgcactgcttcctcagatctttgtgcccttgttacgtgctttttaatttgttttatggctctatctccctaactagactgaaagcacttgaggatggtgaccttttcatagtctttttgttatttgggcacttaacacatagcagctgccccatgattgctggtcccttttctttctctcctcgccaaccacccaccctgttgtcagactgaaataagcccaaaagtccatggaagttggacagctgtattgacaactgagctatgtccaggatcaagcta

SEQ ID NO: 134340 - DNA, 363 bp, Homo sapiens
gccagaatgaccttctaaaaattacatattttatcatgtgtcactcatgcttaaaatatcacaataatttcccattgcatttcaatataaacacaaatcttcaaatatggtgaacaaagctaagcatgatctggcccttgctcatctcagccatatcatttcatgtaattaattttcatattattagactcctagaagttatcaagatcttttcctacactatagccatcacactcacatgcctctacttctatctgggatgctctcgagaccccattctttacctggctaaatgtctgttttaatttatatttcaaagcttagcttaagtgacacttgcttacagaagtctcctttgaccca

SEQ ID NO: 134341 - DNA, 137 bp, Homo sapiens
cagctcttctatatttgtgtgatgggcacagaacaccttcatatgtatgctttcttatcctcatgatcagccaacagaggcatgaatctaccaaaagaggcaaattcctccttaaaaaatgcagaattttaggctgg

SEQ ID NO: 134342 - DNA, 318 bp, Homo sapiens
tacaaaactcagtatatctaaattttgcctttgcataattaatagtgcataaatctatataaattacttacttaacaaggtcattttttctgctactataagcaacctaggaacactagtgattaggtggaacgttttaaaagcattttaacatcatcagcaggacccacccagacaaaagacatagtatttcatactaacgtacaagttatcaacttatttggaacaaagctttaacataactcatgttcatatagactagatatttaagtatgcaaaaacaaaatagaagaaaacagaagttagcattttatagca

SEQ ID NO: 134343 - DNA, 788 bp, Homo sapiens
tgccaggacttgcaggatatggtggcaggtacagcattttactagacatgaaatatgtattgtccttgtcaaaaggctattccctaatccatttacataagcctctgtccttcaaagacttttacaaattgttcatgttcagcgatcattccagttcttcccaaaagccatatatctataattcacagcagcttatgtacaaatattttgtttgcatctgattcactgatgttcaactgcatgacgcaaggcaagcagtacccgggatgtaaaaggtagcagaaagaacctggatactgggatcaggcagattgaactataatgttttatttttaattttggatttctcatctgtaaaatgggagcatttatatgatttggtagaataaaatgtataaaagatctatcaaaaaaaaaaaaaaaaaaaaaaaaaaaaattttggggggggcctggggcccgaaaaatttcaaagaccacttcggtgtgggaggcgggcggcccaagagaggacaaggtggacacgagtgcgcacaggggtggacccccgaaaagaaaccgcgggccgaggaacaaggtgcgtcggtgtttttcccaacaaattaaaaaagcggcgggggaacccaagagctgttttctggaaaccaatcccaagagggggattctgggagcacataaggggatctcacaagagggtctccaaggcaggcgaaataaaatgacgagcggcggtgtgggaagagagagagcgacaaagaaaagagacacaacgaagtacagcatgaaacac

SEQ ID NO: 134344 - DNA, 552 bp, Homo sapiens
atttccattcttcacaagaattatgtgcattttaagcatggttgaaatttgctgccacaaccataacattaaaatttggagatcattgtagattcatgcggttgtaagaaataatatagagatcttgcataccttccacccagtctcccaaatgataacgtgtgtgtaactacagtatactggacattcctcccccttttttttcggagaagttacagattgcctcataatcctgtggggatactatgtggctatgatgagtgatgactacactgaaataggagaactagacggtttcatgataacctgatttttttaaatccagagctgtctgaactggaggattcagcagaacaacagtatccacatttaattatgcatgaagtccccttttctctaccttaagcaattaatttcctcccaaaattcaatgtggaggaggttagaaggcacatctggtccctctgccctcccctgcctttactttaaaccactggttttacctgttttgtaatgtggaggtttcactggcaattttatttcaagaagaaa

SEQ ID NO: 134345 - DNA, 719 bp, Homo sapiens
gccaaaactcagaaggagtaagaggcaactgcctcaaaggtactcaggctgcgggtaaacatttgacggaataaatgctctttattcacagcctgtgttgaaatctccctgaggatgactcaccatgccttttcccaacatcaggcccaggaagccacggactttcccatgtcatcactgacttgcaagcctggggcaaaaccacagtccacccagcacagaacttggttctgcgaccagaaccaaagatgaacttgtaccctaggaagatgtggtcttctaagcctgacaaaggacgtcaattttccccattcctctctcttaattcataatagaagggtttggttaattacacctgggataatgaataactaaaaatgtgttcttcgctacgtaaacagaacacattctctattcatttacagttaacatttcaacttcctcttagtctcacctcccaggacaagatcaatggacctacattcatctaaccacattgtcgattttccaggcttcttattttctccatcttttttctagttgaagattcctcattgttttagactttcttcatcacagctctcacatggcagtccagatttgggttatttttaatctttttggagttatttcaagttgtttgtctagtttaaatccaggcagacttcaagatttttccctttgttcctgtacaacactggtgaaaggagggtgctcca

SEQ ID NO: 134346 - DNA, 660 bp, Homo sapiens
tattcacagggtctggggattgggatatggatgtgtcttttcaggagccaccatttaacccactaaattcattatatgctgtttaatgctgtatcttccttttggattgaagagatatgcttctgtttgaagatgggcaagtgggctagggaatttttggctagtaggtagaaaggaactttaaaaatatttctggttggtgctgtttagtaagtgcttgttaaactttcagaggtcaaatatcttgaacacaaattggagaaggagtaaatcagtataaagtgaaaaatatgatattttctccaaaaggcagtcactgactgctttggcagaaagaattgaggtgattactcaagagttccaccaaattgttgtgctagcttttacatttgcaaactataaaaaacgggactaaattaagtagcagctcactttttttattaacagtattacaagttgactttttcatttcttgtgtaattgagataaaagggggggtgtgtgtatgagagagagacaaagattttgttaatggttttagtatgattcatttcttatgtcatatgggcattctaatttgagtcatattaattaaggtgatctatgtatgtaaactctttgagggagggacttggcatgccttgtatacagctagatccc

SEQ ID NO: 134347 - DNA, 240 bp, Homo sapiens
taaacagtgttgaactatatgctgtctcataaacccagttgggcaaatattataggcctatttctgtcacctctggctggtggagtgtttgtatttgtccacacatcctttatgcccagggcacgccctggataggagaagcttgtgccctcccagatggaaaatgcccataactcatcagcccaacattggactgctaattgtaggcctggattcatagtgttcttgaaagcttcaggg

SEQ ID NO: 134348 - DNA, 398 bp, Homo sapiens
ctcaggctcctccacggtaaaaacttggtgccatactcttaagcatatacggtcatacagacaagaccgaggctagtctttctgggctatactaacccttttctcatgtcagcagcttttgtcctgaatgtagctccttggtaacatttccttggaaagatctgaaaaagagccttcacttggaagccaagagctcttgatcccagcaggttactcacttgtcagtgtccatgtagctgactcaccttaggcctagatgttagaatccattttcttaccaacctcacacagttatagtgcaacatgagtcatttgttgcacttctatgaatgagttattgagcatttctatacatgcatttatatatcaatcaagataggctaggttacgctgcggta

SEQ ID NO: 134349 - DNA, 150 bp, Homo sapiens
agggcagggtccagagaagctactgcaaccacgcagcctctccacaggactgtctttctacattaaatgttactgaggaataccaatttaaaatcagagtcttctcttcgtatctcattaatttgcttgcagttgcttgtagcacatctc

SEQ ID NO: 134350 - DNA, 685 bp, Homo sapiens
agttcataaaatttgggttgtttttaataatagttatagcaatagtaaaaaatttctttttctacttactatattatgtaaggtgaaatacttgggattaaactgaaaaccctaatagattctagaatcaaacaaatgggggttcaagtcttggttctgatgcttactaaatctttgaccttgggtacattatgtaatctctctttgtttcctcatctgtaaaacagggataataataactatgtcatagggtttatgtgaggtttaaataataccctgtttataaagcccttgcatagtgcttagtagtgtttaataaatggtagtagttactttgacaaaaaagtatgagtcctaatttattgtgaaactaccaccaaaatcaattaacaatccacccaaattttgtaaaaggtgtttggaatgtctttctgtccccaaagcttgttgatcttgtacttttcaattaatttattattgtcctcttgagatttaacctgcaggccagtggtttctaaatgataaactgtggattggtgctggttagtgagaaagttttcactgggccttggtgaaatggaagagtaagcaggacaatgtaatgatatcataaagttaaccttaactcagagctcagcgcctgctctttttagcatgtgcgcacgcgtgtatgtgtgtgtgtgta

SEQ ID NO: 134351 - DNA, 104 bp, Homo sapiens
tgtatgcctggtgtgtatgtgtatgtgtgtgagctggtgtgtgtatacgtgtgtgtgtgtggttaatgtgttgttcatgtatgaggtgatggtggtagtagtgt

SEQ ID NO: 134352 - DNA, 598 bp, Homo sapiens
  misc_feature (598)..(598): n is a, c, g, or t
gtgtatgagccaagaacttagtggacatatctgtactggagataaaatttgggagttgtcagcaaataaatggtgtataaagcaatgagactgaagagatcacacacagaatgagtgtaaatacaaaatgagaaattcaaacactgacccttaggctgctccaaagtttagttagagacaatggagaccaaaaaggagctgccagaaacataggagaaaaaaaaaaaaaaaacgatgcgggtgggcgccgccggggcccccggagaaagaccttccaaaaccacactggcgggggggcgcggggggccccaaggggcaagggagaacggggccaaagaggggtgccccagagagagaacaccggggaccacggacaaagagggaggagggaattctctccacaccaaataaaaaaaggcgccgcgcggggggacacacacgggagaggagtttggaggaaaaaagaatccacgagaagaggagatgtctggaggagaggcacaaaagagggggggactcatttcaacaggagggagcccacaaggaggagactcccgcgaaatctctacaaattatgcccccagagcggggggtgaan

SEQ ID NO: 134353 - DNA, 429 bp, Homo sapiens
gattcagcaggtctggggtgggactgagagcttgcatctctaacaagctcccagcgaggctgatcctgttgctccagggaccacaccttgagaaccactggttgggcattgatgaggtcaaccaggagaagcagtgtcccctagaactggcaggagagaaaggacaaggctaagaaacagtgaacaggagtcaagtaaatgcagctgccaacaggcgggggtccttgagttcacattcttggttccaggtgacgtttcctgggagtcaacaacccttctcctatgaaaaagaaaagggccagacacagtggcacacggctgtaaccccagcactttgggaggctgaaagcgggaggattgcttgagcccaggagttttagaccaacctgggcaacaaagcaagatcttatctgtacaaacaaaccaaca

SEQ ID NO: 134354 - DNA, 361 bp, Homo sapiens
ctaatttgtcccaacttctattcttgccctagcccctaccacaccttcctcatctagtgctctgagtacagtgatctttctaaaatataaatccattcgtgtcaatcttttcatttaaaatgcaaaataaactctaactttggatacaagggtctactctacctggttcttgattgtccaacctcttctcaatgtccctatcccattcactgactactacccagctatgcatttttttctgttactacacatgccatggcccatacaacctgtttgcctattgtcttttttcttcctcacccagctaacccacccctactcagctcattcctcatatgccagatcaaatgccacttcctca

SEQ ID NO: 134355 - DNA, 750 bp, Homo sapiens
ggaattttttagcaatattattgtaggattaataatattaaatatatttaaaaatactaaacatcataatatctgctcttcagagaaagctcagtgaacctcctgattggtagattaatattttgctgttttcattgaggcagtctgttatatcttataaaggcatcgcagtgggttaaaaatatttttttaaatatgttcctgctggaaatcagctgcaggcaaagtttactatttctctacatgagaaaatacaaggtttttaaaaaaataatttgtggctattactgtcagagattatacagctaatctttgatggtataccactttaattctaaaattatgtcctttagcttctttttagatgaagtggattctgataatttctaattgttgtatacttatttttatgtgaaggggaaaagcatactaactgcgtttaaggctatgagagcagtgggtgacagaaggggaagagaggagagagaatttcaataaaggaaatgctgccaaaattcagaagaggaaaataaataatgtttagcagcctagccaactcttctgctaggaagatacattattattattccaattggctgatatctaatagtgttgctagggatttgatgtcagaactgttcctacagaattatttgcctagccttttggctaacaaaaaaaagaaatagccagaagacttggctgcaggtagctttgaatatttgtaaatcttttcataatttattttaa

SEQ ID NO: 134356 - DNA, 324 bp, Homo sapiens
gttgagcagggctgggagaaggctgtgggcagggagcagtgaggatgggaagcatgcctgtccttcctgttgccattggcccttgccaccttatggactctacgtcgaaagtgcgcaggtttgggcaagaagggatctcctcagttagtgttaagagctggagctaggattgtgttaactcgttcaagacacagcatggtactgagggaattagtatttattgaatgcttgctatatatgccaggccctgttttagagattttctttaaaacgcccatgggaagaggagggaaagtaaaggatgaagtaaagccagaaatagaa

SEQ ID NO: 134357 - DNA, 206 bp, Homo sapiens
tgcctaggagttgcactgatagcctagactgactttcaaatttacttagagacccagagcactttagcccatggtgggtcgcaaagtttgcaggaactcaaattccactgggatccataatttccctcttgttagggctggtttaaatgccccctctatagggaccagccctacagggcctgtgggtttttctcctcgtgtgtgga

SEQ ID NO: 134358 - DNA, 812 bp, Homo sapiens
cagagatttgctgtgcttgtccaagaaagcaccctatgtgttcagagtggccgagacgggacctctcccacagcctggcaccaggtcctggcaggaagcagcccagtctgaagaactcagacaaagagaggctcatcaagaccaggcaagagaagcagcagtgggtgtcagagcaaccagactggcaggagctccctccaacccctgaggctgaggggcagggctgggcaatggtagcacctgagcccattaggacctggaccctggagggagccggcaggccctgggcaaggcaggctttaagaagtgcagcgaggaagagtctgtgtggggtggcctgggtggtgggcacggagccgggtggttgcctttcacacaggcagccctggccctcagccatgggtggggctggcacctcagtgattggatggaggaagtgctaccagcttctgagaagcatctgagtgtcaacaagctgacactaaaagggggtctgagtggggagtctctgctctcctacacaatgtgctccagaaatgtgctattcggagctttgcctgtgaccccctgcttcggaagcattcctgcccatgtgccccactgatctctgcttttcctggcagcctgtctggagaaccgacccctcccagggaaggtcatctgtgttatgggcgtgggagcatctgctatgaactgtgtcctcgtaagagacccccatgaagagggggtggcctcatctgcggccccattggccgctgtgcccacagcccacagtgagagcaaggttggcaccacacagattgccatgaggg

SEQ ID NO: 134359 - DNA, 798 bp, Homo sapiens
actttttatagagtaactcttaatctgggtttttctggtatttcttgatgattagactgagcttatacatttttggcggggataccacagaaatggcattgttcttttcagtgcaccgtatcatggtgtcagttgtcccattacaaggatgttaattttgatcacttgtattaggtgatatctgctatattactctactgtaaagtttctaattttttacgttaagttagtaagcattttgtggggaaatactttcagatgataactattttgtttctcaacaaactttcacacactcattttagcatccagtgatatttcttggtggaattaattgttactctggtgttgccaagtggggattcttccaattgtattattatttctgtgtttattctgtggcattctactataaggaaaatattctactaaagccttggaatcagccatttctccaaagagccttagtttcttttagtggagaatggtttttagaaaccatgatctgagcctcctgggttgtcattgcttttaggcccctttgacagaaagagctaggaaacatgtattagaaatcacaagttttcctgatatctccagttccagtccaaccgctacagggttcttccttgccttttcctattccttacttttatcttcttccacagtcaaaaccctggcactcagcattatcagtgtatttgttcattcacaaaactgtgaatgtttaaagtgttaggtatgtatgccttttgtaattaaaaataattttaagtttaaaaaaaaaaactctgggta

SEQ ID NO: 134360 - DNA, 877 bp, Homo sapiens
actttttatagagtaactcttaatctgggtttttctggtatttcttgatgattagactgagcttatacatttttggcggggataccacagaaatggcattgttcttttcagtgcaccgtatcatggtgtcagttgtcccattacaaggatgttaattttgatcacttgtattaggtgatatctgctatattactctactgtaaagtttctaattttttacgttaagttagtaagcattttgtggggaaatactttcagatgataactattttgtttctcaacaaactttcacacactcattttagcatccagtgatatttcttggtggaattaattgttactctggtgttgccaagtggggattcttccaattgtattattatttctgtgtttattctgtggcattctactataaggaaaatattctactaaagccttggaatcagccatttctccaaagagccttagtttcttttagtggagaatggtttttagaaaccatgatctgagcctcctgggttgtcattgcttttaggcccctttgacagaaagagctaggaaacatgtattagaaatcacaagttttcctgatatctccagttccagtccaaccgctacagggttcttccttgccttttcctattccttacttttatcttcttccacagtcaaaaccctggcactcagcattatcagtgtatttgttcattcacaaaactgtgaatgtttaaagtgttaggtatgtatgccttcatttcattatttacccagtagtcattcaggagcaggttgttcagtttccatgtagctgtttggttttgagtgagtttcttaatctgagttctcaatttgactgcactgtgtctgagagactgtt

SEQ ID NO: 134361 - DNA, 418 bp, Homo sapiens
attctgtgtcccacttcttaggaagccaggggagtatgtgtatgattttacaacataagtgagaaggatgagaagaggaagacatgattcacagaaacagaacataccaacttagagcagttaggattgaagcaagaggctaggaagaaaccaaaagaatatttgaatcagtacatctattaatatgttcaggtatttggaaattacaggtgttttacagatctgatataggtacataaaaaaactaagcaattaaaaaagcttagcagttattcagagaaaacaaaagattatttaagaaaagataggacggctgaggtaggagaatcgtttgaacccaggaggtggaggttgcagtgagctgagattgttccactgaactccagcctgggcaacagagcaagactcttgtctcaat

SEQ ID NO: 134362 - DNA, 593 bp, Homo sapiens
ctcgatctcctgacctcatgatctgcccgcctcggcctcccaaagtgctgggattacaggcatgagccactgcgcccagcctggtgagttttataacttccctttctctgcccacctccaacctagctattggatttctctgttgaacaatgttagcacttcactaaagactgctgcctggatgtgagggcgatctggctgcaacatgttaccccactgatcgccagggttgattcagctgacctggctggctaggtgggtgtccccttcctccctcactactccatgtgcaacctcctgaagctgtgcactccgttaaagaggacaaccatccccgatagacaaggaccagtcttcggtcaagggcatacaagtagctgtgctcccctgctagaccctcccaacaagctctcaagactgctgtctgccaatctgtatccagagttggaaaaaagaaagaaaaaaaagaacttgtcccagagtgttccttactgagttataaattagttgtaatttggaaagggaacattctgtggtagatagtgattgaaaattcaaagatcaaaatattaaaggatgtatattctgagaaa

SEQ ID NO: 134363 - DNA, 399 bp, Homo sapiens
gtaacagtgcagtgaggtagatgctttaatgacagaatctgtatagtggggaccccagggatggagtggttatccttaactgaagaagtcattgaaggtatcactggaatgactatatctgaacctgaattttatatagttcctaaagtgaagaaggggaagaaggacattccaggagtaatttttaagatgtatgcctcgtaactgatagatgaaatataaactccgtaattacatgccattgcactgaaagctgttataatgtgtattttttttataactataatttccattttttggcctatagctctgctttttgttcttagagttaaacattgttctccagtagggtgatttaaattatgtatttgtatgtgtgtgcatgtgtgtgtggggggg

SEQ ID NO: 134364 - DNA, 207 bp, Homo sapiens
ttgcaatggattttggtccattgatcataatgacatgtgacatctatttcaacacttagtatgtggcaaacatggtgctttgtatgtattatcacttttactgcctacatcaacaacattatgatgtaggtggttctgttccctcagttttggagaacaggaaatggaggcacagaaagatgacataactagtctgaggatgtaggg

SEQ ID NO: 134365 - DNA, 563 bp, Homo sapiens
catttcttgaccgtacagcctccatcttcaagccagcgacggcacaatagatcctttctgtgcttcaaatctctgacctccgtttctgatcttgacacccggatttaaaggttcaggtaattaggtcaagctcagcaggacagcctctccttttgtgttcaactgtgccatataaagtaacgtcacgtaatcgcatcatattcacgggctccccacacgcgcaagggaggagattacatgagggttagcgtcactggggttctcttacgattctgccttatatattttacaggtggaattgagagatttctgaccaattctgggtttctagcttggacagccggtagggggcggggggtggtaacatatttaactaatagagagagagtgcaaggaagaggaggaatttggtgagtgtaaggagactgtgtccaggcagagctggctagaaggccatggaagtgtggctcagcccagctggatgagataacacactggtggtgaaagcaacaagggtggaaaagaaggtccagccagggagtggaagatgagaagacaggaga

SEQ ID NO: 134366 - DNA, 493 bp, Homo sapiens
ccccattttacagatgaggaactgagactcagagaaggggagtaaagtgcccaaggacacacagcaagtatatggcagaactggaaaccaagttcctgcagctggctccagagctggagccccaaatcacacactgggagttcagcctgtgtgcaccccttcctcgggcttgcaggatgaacagctgccttctggatggtctgcatgggaagcatattcagattgtgatttataaaacacaatgaagataatagaaaccagccctgacacttacacagggctttgtgtttccagatacctttttttatcccagtcattgctgtgtcttcctggctccctcgtgaaggggtgaacaggtatcgcctctctagtttcccaggaaatccagggccacactgtaagccaggcacagctggccagaggaatcagctggcctctgattccagatcacggcacactctctctccttacttttttaacatgttattttttc

SEQ ID NO: 134367 - DNA, 366 bp, Homo sapiens
ctttgcctcaagtgccacctgtatgtttccccttatttaatttagcatcacaacagctttctaaaaattgtcttttgggctgggccactaaaaaagatcttttggtctctaattgtgtttagtgctccataaaataaaccgccaaacagataacaaggtcaggtagcctttaagaccaatataagttagcaggaagtcatacattaattgttcaaggccgggtgcagttgcttatgcctgtaaggccaaggtgggcgcatcacctgaggtcaggagttcaagaccagcctggccaacatggtaaaaccccgtatctacaaaatacaaaaattagctgggcatgatggcgggtgcctgtaattccag

SEQ ID NO: 134368 - DNA, 494 bp, Homo sapiens
actgctttgagagcctctaaaactatgatccagtcttaataataacgtaataggtatagttccacacactgaaatagagatgtcataaactgagtagaaatgtgctttaaacacacacacacacacaagcacacacacacaacaccaaatccagctcaacattgtgaattagaaatccaaagcccaaggaagaccaaaagttcaaggttgcacattgggttaggacagaaattggcctctgtctcaggcatcgcaactcacactacagtcctctcccaccttgctgggatgctttcactaagtctactctccagagcaatgtttctgtattagtaaggatctccagagacatagaaccagtaggaaatatatagatttataagaggggatttattatagaaattggctcacatgagtatggaagacaagaagttccaggatatgtcatctgcaagctgtaaaaccaagacagccggagctgcattcagttagag

SEQ ID NO: 134369 - DNA, 264 bp, Homo sapiens
ggcaaaagagtgctttcatggaagcaaacaaagtaatattgcattctttccagaagattaatttggctacaatatatggaagataaataacaatgggatcaattaaactagttcagaagtatttgcaatatcgaagtcaagatacatcatgaatcctgcctcttcggtcctcgtggcagtaggattgagaagaggtggggaacaggaccatgatatatatactgtgcaagtagacaactgatgtgagaccatgtgaaaaatacc

SEQ ID NO: 134370 - DNA, 551 bp, Homo sapiens
aaaaaaaattgggagagtggggcttaaatccacgtgatgtcagacacccgggaggcagcgaagcacagaggaaagaccatggattgagagtaactggcaccagccctcactatgccacctgccagctgtgcacctttcatcaattactccacacctctgagcctcagtttcccctgcggtaagatgctgatagcaacggtactagtgcttcccagagctgtgtgatgattaggttagtatataacttaagtgcatccccggataaacagggaagtcttggaacaccacagttttattctatttcaggtcttaagctactacgacttatattgtggtaaatctttgaagtcttccaaagcagatctgttgaaactcaaaacagcagtttaagattcccagggctaccttctgccctactcaaaaaattcacaaaatgccaacaacgatgttaaaatcctggtgggagctgtcgcagagctcagccatcaacctttgccacttcctgttcatcagcagtacagccccagcacatggacgtcacagagaaatcc

SEQ ID NO: 134371 - DNA, 391 bp, Homo sapiens
tctagcaggatcttggaactgtttcggatgctcagtgggagggagggccacgagtgattagcaatgacatttcagccacagtgggatcccgaagcgggctgtaaatgacatgtatgttattctgttcagcccaagtgaagaacggacatcaagtgagctcaggtcccaggtgacaggaagtgccactcaactttttgatatctgtgtcatgacactgcttactatgattacggtcattagctagtcacttatcttcctttatgagcaattgtagcagctaccatttggggacttctgagccaggtgtggttctgagggctgtataagcatcagcccgttttacagatgaggaaactgggacccagggggttaagcaacctcgaccaaggtc

SEQ ID NO: 134372 - DNA, 216 bp, Homo sapiens
tctgggatcagaatcctgaatatggctaaaagatgtacgtcttagtacagacatttatagatgatgatgtttaataccgtagcgatcagattccaatgaattaaactgagagaagaaaagaaggaagaaggtagttgaacaattttagaatggttgtttggtcaagaattactaaaatgagaaaatatttaaaagttgtttgaatttttattttat

SEQ ID NO: 134373 - DNA, 358 bp, Homo sapiens
agcacttctcactctgtgggaggcacaagaatgcccccctccaaagagatacacatcctaatccccagagcctattaatatggtatgttatatggcaaaggggggattaaggttgcaaatggaattgtttgctgatttgctgactataaaattgggagagtatcttggattatccaggtggacccaatgtaatcacaagggtcctgaatcttggaagaggaaagcagaagagggattcagagtggtgtgacgtgagggcttagcttgctgttgctggcttcgaggatggaggaaaggggctaggagcccaggaatgcagcagcctccagaagctggaagaggcaaggtaaaggattct

SEQ ID NO: 134374 - DNA, 569 bp, Homo sapiens
ttaagagacagggtctttaaaaaagtcctgcagtctgcagtcgcccaggctggactgcagaggcacaatcatagctcacggcagccttgaactcctgggctcaagcgatcctcccacttcagtgtcccaagtagctgagactacaggcacacgccagcatgcccggctggttttttaatttgtatttcctttgagacagcatatctctctgtcgctcaggctggggtgcaatggctcaatcagctcactttagccttgaactcccgggctcaagtgatactgccacctcaacttcccaagtatgctactacaggaacacaaactccttttttaaattttttgtggatatggggtctatgttgcctaggctggtcttgaactcccaggctcaagcagtcctcctacctcagcctccccaaatgctgggattacaggtaggagaattgcttgaacccaggaggtggaggttgcggtgagccaagatcatgccactgcagtccagcctgagcaacagagcaagactctgtctcaagacaataaaaacacacaaaaaattaactcgccatgat

SEQ ID NO: 134375 - DNA, 182 bp, Homo sapiens
accctgtttatgccttatcctactgttcacaacgccctgtgtattgtggatatgtttaatgttactcttccagactttgggatcaagttccaagtcatctcaaaaaagtgaggctttccatgcccttgcacccacctccccagacaccttttctccagcttcactgtcccctggaattccaa

SEQ ID NO: 134376 - DNA, 351 bp, Homo sapiens
acttcagcgtttcaatagcaaccactctaatattttcagccacaaattggaagcgggccccagtgaaagaacacaagaagaattcatggaaagaatcttaaaaaatactgtgttgtgctcagacaaaggaagagtaggcaagcttcctcaagggatatctgcatgtggcaggtggattctggtcttcgtaattaatgagagttgtactgtatagcagatgctattgaaacttctaaaactaggcctagttttagaagtttcaatagcacctaaataaaaccaaccccaggcagcaatgcctagttttagaagtttcaatagcagaatcatgtactaccgggccgagctcga

SEQ ID NO: 134377 - DNA, 215 bp, Homo sapiens
tgaagaacacagggttgagtgaaagcagaaaagggaataataaggcaagagagagagacaagagaaaaaccaggcaagggtaggtcagatagaggtccaaggaaaagaagaaacccacgtaaggaagacataaatagaaaaataaagaagtagacatagtagacatagtaggcatagaaggacaacccaactggttctgaggtaagtgaatgaaa

SEQ ID NO: 134378 - DNA, 283 bp, Homo sapiens
ggtcctctaagaacacggaaaccaaggaaacacacctcttgccccaaacaaggagatgttaggtagtgcaggttcccatggaggaaatgagggaagcagaagcttgtttggagatcaggctgcactgaacacacaggcagcaggctgtgactcttcacgctctgactctaccattttaacctggctcctcctggggcttcagaactaagtgagccttattccttccggacatatcttatctctttgccttttaagtatttcttcatgttcaacttgtctctat

SEQ ID NO: 134379 - DNA, 257 bp, Homo sapiens
ggcactagcgccccaagtcctgtgtgctcagagcctcccaaggcttccagtccagcaccctccccgacctcggccacagctgtcacttgtgcccatggagcgctagggcccggcactgtgcctgctgatcactgggctccgtgtgttttgctgcgggaagaaagggaaggagggagaggagggtagggaaacaggtaaccaccacaaggtatgaacaaggctgtgaaaaatgtaaatgccaggtgttgtgaaacaga

SEQ ID NO: 134380 - DNA, 720 bp, Homo sapiens
agaagaggatttttggttgatgtcagtttctaaagaatggattataaagaatcacaacttacaaatgaaacatagactcaaaaaaaaactttaaaaagtcactaatacacaagtcacaaccatttgaacaggtaaagctagtgattaaatggttatcatattctcaaactagagcaaagttttatttttgaaagtcatgcttagtcagaagcctcaggaatcaagttatttagtaattaaatttattacccagaaaaggaaaagtcacacagctggtgagaaactaatgatgtcagcatgtaaaattatagtgcgtaaaatgtttggataggatgcagtatgagaaattgaaggctttgctctcaaacagagtaagttgacgtattgatgacatgtcacatcatgcttaagaggttttgtgtaatacatgaaaaacaacagtttctctccagattgatgagtcaacagatttcagcgagaaatgtcataatgttgcattgtaagatttgtaaataatggtgaaatttaagaaaacgctttttctgctgcaaaaagtttcaaacaacaggtaagtgccaggttaaatttaatatcttgtttccatatcttgaaacaaaacaaaaattgaatgttggagtaactaagttggtatttctgtggatgctgcctattcagtggttgactctatcagaagtttcacctctttcaaaaaaaaaaaaa

SEQ ID NO: 134381 - DNA, 535 bp, Homo sapiens
ctgctctttacatataacagctccatggactttgctccttggtatttacaatgtttaattgggttgctttgaaataacatttatctgacaaaggctgatatctaacctagtcagaaatttcctaaagtttcaggatacagattatgtgatacagatagctttcttactgcatgagtttagtaatttcataaaatcacataggtaaggatgagaaaaatgactctttattcccatagtactgtaagtcacatgtagtttcttgaaatgatattctgaaaaaagtattcaccaaatgccatcattttgaactcactttatactgactcttgatctgatgattggcctcagtggcctttcaggtaggaaaagaagtatggaagagcggagtgagctgtttgttaagttaaaagaaattcatagattactgacaaatgtggagtcattctaggttttaataaatttgactccgtttgcagcttagggtgaaaaggggttaattttcttttagtaggtgaaaaggtgttaattttctttt

SEQ ID NO: 134382 - DNA, 446 bp, Homo sapiens
acgctcgctctgtgggggagagggggccccgggagagggagggatggaggagcggggagctccagccagagaagaggaaagagaaaggagagagctaggaactgggaaggaaaagagctaggaggagaccatgagacagaaagagaagagggtgaagagagaggatagtggctgggaggagagaggaggagggaggagcacagagggagaggagaggaaacagccagagaatctgctagaagggagagaggagagagaagagccggacagggagagcagaagtgagaaaaaggagggtggccacagagaggacagcgagaaaaagagaacaggtatcgtgtgttccccatgtcggaattctctctctctctctttaagacagttaatgctgttacagatgctaactgatgccaggacggccatgtcacaaacgagtcctacagctt

SEQ ID NO: 134383 - DNA, 611 bp, Homo sapiens
acgctcgctctgtgggggagagggggccccgggagagggagggatggaggagcggggagctccagccagagaagaggaaagagaaaggagagagctaggaactgggaaggaaaagagctaggaggagaccatgagacagaaagagaagagggtgaagagagaggatagtggctgggaggagagaggaggagggaggagcacagagggagaggagaggaaacagccagagaatctgctagaagggagagaggagagagaagagccggacagggagagcagaagtgagaaaaaggagggtggccacagagaggacagcgagaaaaagagaacaggaagaggggaaaagagaagaaatgggagagggaagaagggtgggagagaaaacggaacagagagggggcacagacagcggactggaccgagagggagatggagcggtgcggagggggagagagaaagagggagggaaggagggtaggagagggctggagataggggaaaagagaaaaggagggtaggagagggctggagagagaagggaagttaagaagggaaggagagagacagacattagggaagaaggaaaggagaaaggaaaaaatacaaaaaag

SEQ ID NO: 134384 - DNA, 837 bp, Homo sapiens
agagctgggaaatgtttgtgatgaaaattattaggaataaggaaataatgatgctgtgtgagaaagcaagtagacttaaattctgagatagaaacatctgcaatcaacatagagaaggctactttacaaaaatgttatttcagtgcccgtatggacaaatctctttaaaaggctttgtctactgtgtacataaaggaacttataagcttcataaagtgcttatttttctctaggaagcccatgtgatagctctctcctctgttttcccactccttccccagcttttcctgctgcccactgctccaaacactgacatccagtggccagagaccagtccaaatggagcactaaaactacatatagatagtgatcatattgtttaaaatgttattgcaacatggtgtgtaaagtgcacaggtctgaaatatacagctcaataaatgtttacatatatatgcgcccatataaccatcattcagatcaagatgaggctcccagtcagtcctcatacataaccaccactctgacctctgtcactgttgttgacattcctatacatggaattatccagtctataggtttttgtgtctggtttaatttgatcagcattatgtctgtgaaatgcatctatgttgttgcatgtagcaataacagtagtttgttctttttcgttgctctgtagtattccatcagataaatacatcacaatttatccattctcccactgatagacattttggttgtttgtaatttttagcttttgtgtttaaagcagccataagcattcttgtgcatatattttaatggacacgtacactcatttctcttgtgtgtcca

SEQ ID NO: 134385 - DNA, 690 bp, Homo sapiens
gtgaactgctaaccatattcccaacacgtttgagcagttagcacagtgcctgatacagaactgttttactagcagtttgagaggtagaatagcacggttaagacttaaaccaccgagcgcggtggctcacgcctataatcccagcactttgggaggtgtgtggatcacgaggtcaggagttaaagaccagcctggccaagatggtgaaaccctgtctctactaaaaatacaaaaattagccgggcacagtggcaggcccctgtaatcccaactactcgggaggctgaggcaggagaatcacttgaactcgggggacggaggttgcagtgagtcgagatcacgccactgcactccaacctgagtggcaaagtgagactccatctcaaaaaaaaaaaaaaagacttggactcggagttttattcccagctctgcattcaccagctgtttgcctttgagctagttacttggcccctctgtacttccatttttgcatctgtaaagtgtgaataatagtatccacctcacagggttattgtgaggattaagtgacctgctgtttagtaaattctatgcagatgtgtgctattatcattgctattcttcctgagtcattcctccagatgggccattctcagattaggtttaaagagttaaatgactcccccccaacccccccacccccacccaata

SEQ ID NO: 134386 - DNA, 235 bp, Homo sapiens
  misc_feature (208)..(208): n is a, c, g, or t
attagctagcgctcgctctactctctctaacgggaaagcagcggaatacaagagactgaactgtatctgcctctatttccaaaagactcacgttcaactttcgctcacacaaagccgggaaaattttattagtcctttttttaaaaaaagttaatataaaattatagcaaaaaaaaaaaggaacctgaactttagtaacacagctggnacaatccgcagcggcggcggcacggcg

SEQ ID NO: 134387 - DNA, 192 bp, Homo sapiens
caggcatatgagatttttcaaagggaagatatcctgctccctttgtccctgaatgacacatggtgaggaaggagctgagaagaagtgttcccactccctacactcataccagtgtgacaagtccacaaggggatgtagcatccccagaccattctgagggttaacagtccttcttacagacttcatttcttt

SEQ ID NO: 134388 - DNA, 375 bp, Homo sapiens
caggagagaacccctggaaatcaggttaaccagaaacaggatagataattacaggctaatcaccgacaggcgtggttcacagccccctccaaaccacctttcgagggatgatattgccagttatggttttacccaggaactgaccttggcccagagccttcaattcactcggctagggactttgcataccagagaagtcattcccagccaatagatatactttccacattccctttaaacaaggcttgtgttggtgttaagataagctcgctaagggtaactaaaggacagggttggaaactatgaaacaaggataggaaaagtaggctacataaataggagcccctggaacaactttatgagcagccccaggga

SEQ ID NO: 134389 - DNA, 182 bp, Homo sapiens
cataaaaatgttttattcataaatgagaacattatgtactgaaaaggaacaaagatgatggaacaaaaaagacttcttgagaattaaaaggtgattgagaaaataaacaactctaggacaagattcaaaaagataggcaaggaagctttccagaaaatcaactaaaaggatgacagaaaaag

SEQ ID NO: 134390 - DNA, 713 bp, Homo sapiens
gctgtgggtcagaaaagaagcgacaccgacaacatttggggacttgaccctgtttgcattgcggcatgtttgaaacattttttaatggaaatttgggaatagagggccgggcgtggtggctcaggcctgtaatcccagtactttgagaggccgaggtgggcggatcacaaggtcaggagatcaagaccatcctggctaacacggtggaaccccatctctactaaaaatacaaaaaattagccaggcgtggtggtgcatgcctgaaatcccacctcccaagtagctgggactacaggtgcacgccaccacgcccagctaatttttgtatttttaatagagacggggtttcaccatgttggccaggatgggctcgatctcttgacctcgtgatccgcccgcctgggcctcccaaagtggtgggattacaggtgtgagccaccatgcccagcctctgcatttatttttatttatttatttttatttttattttgagacagtcttgccctgtcacccaggctggagtgcaatagtgtgatctcagctcactgcaacctccacctcctgggttcaaacgatcctcctgcctcagcctaccgagtagctgggagtataggtgcacgccaccacgcccagttaacttttgtattttttagtagagacggggtttcaccatgttggccaggctggtctcgaactcctgacctcaagtgatc

SEQ ID NO: 134391 - DNA, 716 bp, Homo sapiens
ttgaactctggcctcaagtgttcctcccatctcagcctcccaaagtgttgggattacaggtgtaagccactttgtccagccctcattgtggttttgatttgcattgccctaatagctaatgatattgaacaccttttcatgtgcttatttaccatccataaatcttctctgatggactacctcatcaagtgttttgccctctttttaactgggttattttcttatcattgagagttctttatattttccctttaccagtcctgtatgagataggtgatttgcaaatattttctctgtctgtgccttgccttttcatttgcttgtgtttttcaaggaagttcttagttttgatgaagttcaatttattaattttttcttttatggattatgcttttgatgcaatatctaagaaacttttgccaatccaagctcataaatatcttctatgctttcttgtagaagtttttattaggttttaggtttttcatgtagttttatgatccattttgaatgaatttttaaatctgatgtgagaggagtctttcctttttttttttctttttgtttttttgagacagagttttgctcttgttgcccaggctggagcgcaatggcgcaatctcagctcactgcagcctccgcctcctgggttcaagtgattctcctgcctcagcctcccaattagctgggattacaggcatgagccaccacgcctg

SEQ ID NO: 134392 - DNA, 451 bp, Homo sapiens
taagtaaagtgaagagctgtcttttagtttttaatagaagaacttgtacttcatttattcttcaatggaatcccgcccctcactttagccaaatgatttctccaaatcctcatttttttttgttgtacaaatagagtcgctcaattatctcccaaggctctacaaaatcgaaataactttttcctaagctaattattgtggaaagttccaaaaagtacatgtgtacattttctaataaaaatatacagtgattatcatagatcgattggtctggtttaagtcaaattccattaatcaaaaccttcaatcaacggatttatcgtggatgcatacatttggtttctaatttatttattgtctacattctgcttttagaagaaaagggaaaaggaccaataagcaggtggttagtattaatttagtaaatagaaactacatcttcaatagtata

SEQ ID NO: 134393 - DNA, 740 bp, Homo sapiens
gggtttgggtagtatatttttcagtataatttagagaaatttcatgaaaatggcatcattgggggatttttctgtattttcaattaaataaaaatatctttaaggtttagggacagtgttgaacacagaaaagttatcttctgttcgcaaaactcgtatcattccatttatcaacatcctgctttttgataaaaagacttcaacaatttccttaagattctaacaatgtacgcaaaaatttttcaaacatggtattcaatagtcttactttcgtcagtcccattattatattactttgagatatgccctttttgttatagaaagggtaaaatagtttgcctgtgttcccctgtcaaagtataaattaatatctgattttcttggtttttaaacaattgcctatttagacttaattttttctgatttaaaaaaatcagtgcaataagttcaaggtcttttatcaacataactacagttaatgtattttatacttgaaaatagctacgagtagattttaagtattctcaccacaaaagataaatatatgaggtaacacatatgttaatttgcttgatttagccattctacaatgtaaacattttatttatttttatttttctttattaattttttttgagacagagtcttgctctgtcgcccaggctggagtgcagtaacacaatctcggctcactacaacctccgcctcctgggttcaagcgattctcctgcctcatcctc

SEQ ID NO: 134394 - DNA, 6377 bp, Homo sapiens
ccttttctttatagttgtcatggatgatgatgatgactcgtgtctccttgatcttattggagacccacaagcattgaactattttctacatggacctagtaataaatctagcaatgatgacttgactaatgcaggatattctgcagccaattcaaattcaattttcgccaactctagtaatgctgatcctaagtcatccctcaaaggtgtaagcaaccagcttggagaagggcccagtgatggactgccactttcaagtagcctccagtttcttgaagatgaactcgagtcttctcctcttcctgatctcactgaggaccaacctttcgacattcttcagaaatccttgcaagaggccaatatcactgaacagacattggcagaagaggcatatttggatgccagtataggttcaagccaacagtttgcacaagctcagcttcatccttcttcatcagcatcctttactcaggcttctaatgtttctaattactcaggtcagacgctgcagcctataggggtgacgcatgtgcctgttggagcatcgtttgcaagcaatacagtgggtgtacaacatggctttatgcaacatgtggggatcagtgttcccagccagcatttgtctaatagcagtcagattagtggttctggtcaaatacagttaattgggtcatttggtaatcatccttccatgatgactattaataacctagatggatctcaaatcatattaaagggcagcgggcagcaagccccatcaaatgtgagtggagggctcctggttcatagacagactcctaatggcaactccttgtttgggaactctagttccagtccagtagcacagcctgttaccgttccatttaacagcacaaattttcaaacatctttacctgtgcataacatcatcatacaaaggggtcttgcaccaaattcaaataaagtcccaattaatatacagccaaagcctatccagatgggtcagcaaaatacatacaatgtgaacaatttgggaattcagcagcaccacgtacaacaagggatctcttttgcttctgcaagctcaccccagggctcagtagttggtccacacatgtctgtgaacattgtaaaccaacagaacacaagaaagccagtcacctcacaggcagtgagcagcactgggggcagtattgttattcattcccccatgggccaacctcacgcaccccaaagtcagttccttatacctacaagcctttctgtcagttccaactcggtacaccacgtccagactataaatgggcaacttcttcaaactcaaccctctcagctcatttctggccaagtggcctcagagcatgtcatgttgaacagaaactcttccaacatgctcaggaccaaccaaccatatactggaccgatgcttaacaaccagaatactgctgtccacttagtgtctgggcagacatttgctgcctctggaagtccagtgatagccaatcatgcctctcctcagcttgtgggtggacagatgcccttgcagcaggcatccccaactgtattacacctgtcacctgggcagagcagcgtttcccaaggaagacctggcttcgccaccatgccatcggtgacaagcatgtcaggacctagtcggttccctgctgtcagctcagccagcactgcccatcctagtcttgggtctgcagttcagtctggttcatcaggatcaaactttacaggagatcagctgacccagccaaacaggactccagtaccagtcagtgtgtctcatcgtcttccagtttcttcttccaagtctaccagcaccttcagtaacacacctggaacaggaacccagcaacaattcttctgccaggctcagaaaaaatgtctgaatcagacttcccccatttctgctcccaagaccacagacggcctgaggcaagcacagatccctgggctcttgagcaccacactgccagggcaggattctggaagcaaagttatatccgcatccttaggaaccgcacaaccacagcaggaaaaagtagttggatcatctcctggccatccagctgtgcaggtggagagtcattcgggaggacaaaaaaggcctgctgcgaaacagctaacgaaaggagctttcattctccagcagttgcagagggaccaagcccacactgtgacaccagacaaaagtcacttccgatcactaagtgatgcggtacagagactgctctcctaccacgtgtgccagggctccatgcccactgaagaagacttgagaaaagtggacaatgaatttgagacagttgccactcagctcctaaaaaggacccaagctatgcttaacaaatacagatgcctgctcctagaagatgccatgcgaatcaatccctctgctgagatggtgatgatcgataggatgttcaaccaggaggaaagagcttccctgtcccgagacaagcgtttggcacttgtagaccctgagggttttcaggctgatttctgttgttccttcaaacttgataaagctgctcatgagacacagtttggccggagtgaccagcatggcagtaaagcaagcagctctctgcaaccgccagccaaggcccaaggcagagaccgagccaaaaccggtgtgacggaacccatgaatcatgaccagtttcatctagtgcctaatcacatcgtggtctctgcagaaggaaacatttctaaaaaaacagaatgccttggcagagcactgaaatttgacaaagtgggcttagtgcagtaccagagcacgtctgaagagaaggccagccggagagagcctctgaaggccagtcagtgctctcccggccctgaggggcaccggaaaacctcatccagatcggatcatggtactgagagcaaactgtcaagcatcctagcagattcgcacttggagatgacgtgtaacaattccttccaggacaaaagtctgaggaattctccaaagaatgaagttttacacacagacatcatgaaagggtcaggcgaaccccagccagatctccagctgacaaagagcttggaaaccacatttaagaacatcttggaactcaaaaaggcgggacggcagccccagagtgaccccacggttagcggctctgttgagttagatttccccaacttttctcctatggcttcacaggaaaactgcctggaaaagttcatcccggaccacagtgaaggtgttgtagaaactgactccattttagaagcagctgtaaatagtatcctagagtgttaatagcagcagtcctccccctaccccgccccgagaccccaccccgagaccccaccccggaccagttacattcgttcctggcaaaagcaaatggaaatggtctcctgtctccagcctgcttgatctttcatcacaggttattctttctaatctcaatcctgttctttgtttaagagcaatacttgtcgtgattacagggagatcctttagtaaaattaatccttggcagaaagcagtctgataggccccactcatttcaagtgttatgaaagtgcttataggcattttgtttatttgttttgttttttaaaaacactgtaactcaatgagaccacagtatacttggcccttggtaaaattttgacaatcataagtcatttgaaaagaacagacttactaaaatcaaacgagacggatagaagctactttttaaagaatatcccactgcatctgcaaatttagttttgggtttttttattattattattttgagtttttttgtgtgtgttttgttgttattgttgaggggaagaccacatggttcttccccctcagccatctttgagcagtaaattgctggctgtgctgccagggacccgcagccctggtggaaaagccagtagcacatacgcagggcattgcagggcttccctattgatggttcaagtgcttttctgatgcttccggagcaaaacctcatgcttttaggcatatctatgttgaatttcacctagggaatgttctgttcttagttacagcagcaaaatttgaaataatttcaccaggctaaataaaggaaaatggaaaccagttaagaggcacagtgtacagaggaggccgggatagagccatgagggttataatattaatatgtatatatgtaaaagcatatatatgttaactattgagaaaaaacaagttttgcattttataattggatatagtcaacatataatgtatgtttttgtttgttgctggattttgtttcatttaacctctctttgcaccctctcccacaacaaataccaagcatcaaaagcactttcatttgaaaattattatgttgtaatttttcagtttaaactttaaggagactctggccttgtttatgcttcttgtctgagaacagtagtgacccctggcagcaattcattaccaaaacacagacaaaccaaaggtaaccagctagcccaccactgaaaggaaagatctgagacatgggattcccatttgagagccaaaggatatgccctgtcatggtttctgtttggcctgtgttcatattagtgagcatggcttactgctttatttatttttatttcttgtcagggagtattctccgttttcctttctcgtatacctgccccaggttatcccatttctgttgttacctttattcttaatgtcattgtaaccatcacttatctcctctcattgggaaagctacatgatagtatttttatgcactcttctcccacacatacacacacgtgcatgtatctgagctgctcggatccagaggtcatttttgttacagtgtgtgcacactcactctccttcttagtgtgcatactctctcatttattctgtttatctccctggctctggaggtgcagccactggtcttcactttaatgtgttgccagaatctgcttctggctgtcgccaacatggggatgacccccattgtcatcatgttgggcatttcttttccagattggcctgtgatggaaaggaaggcttctaattagaaaacacagcaacagaagacctataccccggtgcccctgtgtcccactacacacagaaaaccctgtgagatggccagtcttcataatagcaacgtaccttcaccccagccacatgccccagccaatacaaattggaaaatctggcccattttagggttaccattttttccttatttgtgccaatgtccaagttgcagatttcccctttttcctgtattgtaacatattagataagttggtgtcgccagttggtactttctgtttgggtagtcctagggtaacaccctgccctaaactccatgatttcataggcttttcttcccttggggctcatgctcccctaattcctagcaagatgatccttcctaatcaaattcttctcattgcagaactttatccctggaagccttcatgtgggctgctagtgagttacattaattactgcaaatcagtggaattctcaagagacaagataagcttcatgtacatttgtcacctctctttcttccctatcctgccctgctgtcccaatcctagcttttctatataccatcctaaagggtttttaagccctaacacttgtctagcaaatggagagcctaatttaccaaaatgaaacttgtaaatttttgtgtcattgtatgtaagtttactttttatggaggaaggattctagataatgacaaatgaagattatgacatgtatttcactcctgtgattaggttctacgcacatgggtcataactcgcatgtcgagccccctctagtgaagggtaggagagctcagcctcggatggccaacattcagttgttcaggttcattcgtcaaagttaagttttagaactatttgtactcagtaacaaaaatcattttcttttttttttttttttctgttgtggaaaagcgtgaatttgttattaagcatttgattttctgtgtccttaagtacttcctgaagatgaagcaaaattttaatctggcaattatgaaaaagaaatattttagctctgaaggatttagtagattctgttagattagggaggccttacagactgactttacttaaagaggacgcgtcactcgctgtcagtgtggtgtgggctttatttgcttaaataccttcatttgtatagtacgtctcacttgaaattgctttgtatacattttgtaaaaatatttataaaatgttttgtaaaaaaaaaaaaactataacaaattgcagtttattttgttatgttggataaatactgttaaaagaaaccagtcagtaactatattgttaatccatggttaggaaatgtttagttggagattacaaattgaaacaaccattgcaatacagccaaagatttgggaaaatgtgaaact

SEQ ID NO: 134395 - DNA, 6203 bp, Homo sapiens
ccttttctttatagttgtcatggatgatgatgatgactcgtgtctccttgatcttattggagacccacaagcattgaactattttctacatggacctagtaataaatctagcaatgatgacttgactaatgcaggatattctgcagccaattcaaattcaattttcgccaactctagtaatgctgatcctaagtcatccctcaaaggtgtaagcaaccagcttggagaagggcccagtgatggactgccactttcaagtagcctccagtttcttgaagatgaactcgagtcttctcctcttcctgatctcactgaggaccaacctttcgacattcttcagaaatccttgcaagaggccaatatcactgaacagacattggcagaagaggcatatttggatgccagtataggttcaagccaacagtttgcacaagctcagcttcatccttcttcatcagcatcctttactcaggcttctaatgtttctaattactcaggtcagacgctgcagcctataggggtgacgcatgtgcctgttggagcatcgtttgcaagcaatacagtgggtgtacaacatggctttatgcaacatgtggggatcagtgttcccagccagcatttgtctaatagcagtcagattagtggttctggtcaaatacagttaattgggtcatttggtaatcatccttccatgatgactattaataacctagatggatctcaaatcatattaaagggcagcgggcagcaagccccatcaaatgtgagtggagggctcctggttcatagacagactcctaatggcaactccttgtttgggaactctagttccagtccagtagcacagcctgttaccgttccatttaacagcacaaattttcaaacatctttacctgtgcataacatcatcatacaaaggggtcttgcaccaaattcaaataaagtcccaattaatatacagccaaagcctatccagatgggtcagcaaaatacatacaatgtgaacaatttgggaattcagcagcaccacgtacaacaagggatctcttttgcttctgcaagctcaccccagggctcagtagttggtccacacatgtctgtgaacattgtaaaccaacagaacacaagaaagccagtcacctcacaggcagtgagcagcactgggggcagtattgttattcattcccccatgggccaacctcacgcaccccaaagtcagttccttatacctacaagcctttctgtcagttccaactcggtacaccacgtccagactataaatgggcaacttcttcaaactcaaccctctcagctcatttctggccaagtggcctcagagcatgtcatgttgaacagaaactcttccaacatgctcaggaccaaccaaccatatactggaccgatgcttaacaaccagaatactgctgtccacttagtgtctgggcagacatttgctgcctctggaagtccagtgatagccaatcatgcctctcctcagcttgtgggtggacagatgcccttgcagcaggcatccccaactgtattacacctgtcacctgggcagagcagcgtttcccaaggaagacctggcttcgccaccatgccatcggtgacaagcatgtcaggacctagtcggttccctgctgtcagctcagccagcactgcccatcctagtcttgggtctgcagttcagtctggttcatcaggatcaaactttacaggagatcagctgacccagccaaacaggactccagtaccagtcagtgtgtctcatcgtcttccagtttcttcttccaagtctaccagcaccttcagtaacacacctggaacaggaacccagcaacaattcttctgccaggctcagaaaaaatgtctgaatcagacttcccccatttctgctcccaagaccacagacggcctgaggcaagcacagatccctgggctcttgagcaccacactgccagggcaggattctggaagcaaagttatatccgcatccttaggaaccgcacaaccacagcaggaaaaagtagttggatcatctcctggccatccagctgtgcaggtggagagtcattcgggaggacaaaaaaggcctgctgcgaaacagctaacgaaaggagctttcattctccagcagttgcagagggaccaagcccacactgtgacaccagacaaaagtcacttccgatcactaagtgatgcggtacagagactgctctcctaccacgtgtgccagggctccatgcccactgaagaagacttgagaaaagtggacaatgaatttgagacagttgccactcagctcctaaaaaggacccaagctatgcttaacaaatacagatgcctgctcctagaagatgccatgcgaatcaatccctctgctgagatggtgatgatcgataggatgttcaaccaggaggaaagagcttccctgtcccgagacaagcgtttggcacttgtagaccctgagggttttcaggctgatttctgttgttccttcaaacttgataaagctgctcatgagacacagtttggccggagtgaccagcatggcagtaaagcaagcagctctctgcaaccgccagccaaggcccaaggcagagaccgagccaaaaccggtgtgacggaacccatgaatcatgaccagtttcatctagtgcctaatcacatcgtggtctctgcagaaggaaacatttctaaaaaaacagaatgccttggcagagcactgaaatttgacaaagtgggcttagtgcagtaccagagcacgtctgaagagaaggccagccggagagagcctctgaaggccagtcagtgctctcccggccctgaggggcaccggaaaacctcatccagatcggatcatggtactgagagcaaactgtcaagcatcctagcagattcgcacttggagatgacgtgtaacaattccttccaggacaaaagtctgaggaattctccaaagaatgaagttttacacacagacatcatgaaagggtcaggcgaaccccagccagatctccagctgacaaagagcttggaaaccacatttaagaacatcttggaactcaaaaaggcgggacggcagccccagagtgaccccacggttagcggctctgttgagttagatttccccaacttttctcctatggcttcacaggaaaactgcctggaaaagttcatcccggaccacagtgaaggtgttgtagaaactgactccattttagaagcagctgtaaatagtatcctagagtgttaatagcagcagtcctccccctaccccgccccgagaccccaccccgagaccccaccccggaccagttacattcgttcctggcaaaagcaaatggaaatggtctcctgtctccagcctgcttgatctttcatcacaggttattctttctaatctcaatcctgttctttgtttaagagcaatacttgtcgtgattacagggagatcctttagtaaaattaatccttggcagaaagcagtctgataggccccactcatttcaagtgttatgaaagtgcttataggcattttgtttatttgttttgttttttaaaaacactgtaactcaatgagaccacagtatacttggcccttggtaaaattttgacaatcataagtcatttgaaaagaacagacttactaaaatcaaacgagacggatagaagctactttttaaagaatatcccactgcatctgcaaatttagttttgggtttttttattattattattttgagtttttttgtgtgtgttttgttgttattgttgaggggaagaccacatggttcttccccctcagccatctttgagcagtaaattgctggctgtgctgccagggacccgcagccctggtggaaaagccagtagcacatacgcagggcattgcagggcttccctattgatggttcaagtgcttttctgatgcttccggagcaaaacctcatgcttttaggcatatctatgttgaatttcacctagggaatgttctgttcttagttacagcagcaaaatttgaaataatttcaccaggctaaataaaggaaaatggaaaccagttaagaggcacagtgtacagaggaggccgggatagagccatgagggttataatattaatatgtatatatgtaaaagcatatatatgttaactattgagaaaaaacaagttttgcattttataattggatatagtcaacatataatgtatgtttttgtttgttgctggattttgtttcatttaacctctctttgcaccctctcccacaacaaataccaagcatcaaaagcactttcatttgaaaattattatgttgtaatttttcagtttaaactttaaggagactctggccttgtttatgcttcttgtctgagaacagtagtgacccctggcagcaattcattaccaaaacacagacaaaccaaaggtaaccagctagcccaccactgaaaggaaagatctgagacatgggattcccatttgagagccaaaggatatgccctgtcatggtttctgtttggcctgtgttcatattagtgagcatggcttactgctttatttatttttatttcttgtcagggagtattctccgttttcctttctcgtatacctgccccaggttatcccatttctgttgttacctttattcttaatgtcattgtaaccatcacttatctcctctcattgggaaagctacatgatagtatttttatgcactcttctcccacacatacacacacgtgcatgtatctgagctgctcggatccagaggtcatttttgttacagtgtgtgcacactcactctccttcttagtgtgcatactctctcatttattctgtttatctccctggctctggaggtgcagccactggtcttcactttaatgtgttgccagaatctgcttctggctgtcgccaacatggggatgacccccattgtcatcatgttgggcatttcttttccagattggcctgtgatggaaaggaaggcttctaattagaaaacacagcaacagaagacctataccccggtgcccctgtgtcccactacacacagaaaaccctgtgagatggccagtcttcataatagcaacgtaccttcaccccagccacatgccccagccaatacaaattggaaaatctggcccattttagggttaccattttttccttatttgtgccaatgtccaagttgcagatttcccctttttcctgtattgtaacatattagataagttggtgtcgccagttggtactttctgtttgggtagtcctagggtaacaccctgccctaaactccatgatttcataggcttttcttcccttggggctcatgctcccctaattcctagcaagatgatccttcctaatcaaattcttctcattgcagaactttatccctggaagccttcatgtgggctgctagtgagttacattaattactgcaaatcagtggaattctcaagagacaagataagcttcatgtacatttgtcacctctctttcttccctatcctgccctgctgtcccaatcctagcttttctatataccatcctaaagggtttttaagccctaacacttgtctagcaaatggagagcctaatttaccaaaatgaaacttgtaaatttttgtgtcattgtatgtaagtttactttttatggaggaaggattctagataatgacaaatgaagattatgacatgtatttcactcctgtgattaggttctacgcacatgggtcataactcgcatgtcgagccccctctagtgaagggtaggagagctcagcctcggatggccaacattcagttgttcaggttcattcgtcaaagttaagttttagaactatttgtactcagtaacaaaaatcattttcttttttttttttttttctgttgtggaaaagcgtgaatttgttattaagcatttgattttctgtgtccttaagtacttcctgaagatgaagcaaaattttaatctggcaattatgaaaaagaaatattttagctctgaaggatttagtagattctgttagattagggaggccttacagactgactttacttaaagaggacgcgtcactcgctgtcagtgtggtgtgggctttatttgcttaaataccttcatttgtatagtacgtctcacttgaaattgctttgtatacattttgtaaaaatatttataaaatgttttgta

SEQ ID NO: 134396 - DNA, 5421 bp, Homo sapiens
acagtggaacgtgacaccatgacacttcctgcatacacggttcatcacccactcacccccccaacacacaacctcactcactcagaacttaacggcctcctccatctttacctgtgcataacatcatcatacaaaggggtcttgcaccaaattcaaataaagtcccaattaatatacagccaaagcctatccagatgggtcagcaaaatacatacaatgtgaacaatttgggaattcagcagcaccacgtacaacaagggatctcttttgcttctgcaagctcaccccagggctcagtagttggtccacacatgtctgtgaacattgtaaaccaacagaacacaagaaagccagtcacctcacaggcagtgagcagcactgggggcagtattgttattcattcccccatgggccaacctcacgcaccccaaagtcagttccttatacctacaagcctttctgtcagttccaactcggtacaccacgtccagactataaatgggcaacttcttcaaactcaaccctctcagctcatttctggccaagtggcctcagagcatgtcatgttgaacagaaactcttccaacatgctcaggaccaaccaaccatatactggaccgatgcttaacaaccagaatactgctgtccacttagtgtctgggcagacatttgctgcctctggaagtccagtgatagccaatcatgcctctcctcagcttgtgggtggacagatgcccttgcagcaggcatccccaactgtattacacctgtcacctgggcagagcagcgtttcccaaggaagacctggcttcgccaccatgccatcggtgacaagcatgtcaggacctagtcggttccctgctgtcagctcagccagcactgcccatcctagtcttgggtctgcagttcagtctggttcatcaggatcaaactttacaggagatcagctgacccagccaaacaggactccagtaccagtcagtgtgtctcatcgtcttccagtttcttcttccaagtctaccagcaccttcagtaacacacctggaacaggaacccagcaacaattcttctgccaggctcagaaaaaatgtctgaatcagacttcccccatttctgctcccaagaccacagacggcctgaggcaagcacagatccctgggctcttgagcaccacactgccagggcaggattctggaagcaaagttatatccgcatccttaggaaccgcacaaccacagcaggaaaaagtagttggatcatctcctggccatccagctgtgcaggtggagagtcattcgggaggacaaaaaaggcctgctgcgaaacagctaacgaaaggagctttcattctccagcagttgcagagggaccaagcccacactgtgacaccagacaaaagtcacttccgatcactaagtgatgcggtacagagactgctctcctaccacgtgtgccagggctccatgcccactgaagaagacttgagaaaagtggacaatgaatttgagacagttgccactcagctcctaaaaaggacccaagctatgcttaacaaatacagatgcctgctcctagaagatgccatgcgaatcaatccctctgctgagatggtgatgatcgataggatgttcaaccaggaggaaagagcttccctgtcccgagacaagcgtttggcacttgtagaccctgagggttttcaggctgatttctgttgttccttcaaacttgataaagctgctcatgagacacagtttggccggagtgaccagcatggcagtaaagcaagcagctctctgcaaccgccagccaaggcccaaggcagagaccgagccaaaaccggtgtgacggaacccatgaatcatgaccagtttcatctagtgcctaatcacatcgtggtctctgcagaaggaaacatttctaaaaaaacagaatgccttggcagagcactgaaatttgacaaagtgggcttagtgcagtaccagagcacgtctgaagagaaggccagccggagagagcctctgaaggccagtcagtgctctcccggccctgaggggcaccggaaaacctcatccagatcggatcatggtactgagagcaaactgtcaagcatcctagcagattcgcacttggagatgacgtgtaacaattccttccaggacaaaagtctgaggaattctccaaagaatgaagttttacacacagacatcatgaaagggtcaggcgaaccccagccagatctccagctgacaaagagcttggaaaccacatttaagaacatcttggaactcaaaaaggcgggacggcagccccagagtgaccccacggttagcggctctgttgagttagatttccccaacttttctcctatggcttcacaggaaaactgcctggaaaagttcatcccggaccacagtgaaggtgttgtagaaactgactccattttagaagcagctgtaaatagtatcctagagtgttaatagcagcagtcctccccctaccccgccccgagaccccaccccgagaccccaccccggaccagttacattcgttcctggcaaaagcaaatggaaatggtctcctgtctccagcctgcttgatctttcatcacaggttattctttctaatctcaatcctgttctttgtttaagagcaatacttgtcgtgattacagggagatcctttagtaaaattaatccttggcagaaagcagtctgataggccccactcatttcaagtgttatgaaagtgcttataggcattttgtttatttgttttgttttttaaaaacactgtaactcaatgagaccacagtatacttggcccttggtaaaattttgacaatcataagtcatttgaaaagaacagacttactaaaatcaaacgagacggatagaagctactttttaaagaatatcccactgcatctgcaaatttagttttgggtttttttattattattattttgagtttttttgtgtgtgttttgttgttattgttgaggggaagaccacatggttcttccccctcagccatctttgagcagtaaattgctggctgtgctgccagggacccgcagccctggtggaaaagccagtagcacatacgcagggcattgcagggcttccctattgatggttcaagtgcttttctgatgcttccggagcaaaacctcatgcttttaggcatatctatgttgaatttcacctagggaatgttctgttcttagttacagcagcaaaatttgaaataatttcaccaggctaaataaaggaaaatggaaaccagttaagaggcacagtgtacagaggaggccgggatagagccatgagggttataatattaatatgtatatatgtaaaagcatatatatgttaactattgagaaaaaacaagttttgcattttataattggatatagtcaacatataatgtatgtttttgtttgttgctggattttgtttcatttaacctctctttgcaccctctcccacaacaaataccaagcatcaaaagcactttcatttgaaaattattatgttgtaatttttcagtttaaactttaaggagactctggccttgtttatgcttcttgtctgagaacagtagtgacccctggcagcaattcattaccaaaacacagacaaaccaaaggtaaccagctagcccaccactgaaaggaaagatctgagacatgggattcccatttgagagccaaaggatatgccctgtcatggtttctgtttggcctgtgttcatattagtgagcatggcttactgctttatttatttttatttcttgtcagggagtattctccgttttcctttctcgtatacctgccccaggttatcccatttctgttgttacctttattcttaatgtcattgtaaccatcacttatctcctctcattgggaaagctacatgatagtatttttatgcactcttctcccacacatacacacacgtgcatgtatctgagctgctcggatccagaggtcatttttgttacagtgtgtgcacactcactctccttcttagtgtgcatactctctcatttattctgtttatctccctggctctggaggtgcagccactggtcttcactttaatgtgttgccagaatctgcttctggctgtcgccaacatggggatgacccccattgtcatcatgttgggcatttcttttccagattggcctgtgatggaaaggaaggcttctaattagaaaacacagcaacagaagacctataccccggtgcccctgtgtcccactacacacagaaaaccctgtgagatggccagtcttcataatagcaacgtaccttcaccccagccacatgccccagccaatacaaattggaaaatctggcccattttagggttaccattttttccttatttgtgccaatgtccaagttgcagatttcccctttttcctgtattgtaacatattagataagttggtgtcgccagttggtactttctgtttgggtagtcctagggtaacaccctgccctaaactccatgatttcataggcttttcttcccttggggctcatgctcccctaattcctagcaagatgatccttcctaatcaaattcttctcattgcagaactttatccctggaagccttcatgtgggctgctagtgagttacattaattactgcaaatcagtggaattctcaagagacaagataagcttcatgtacatttgtcacctctctttcttccctatcctgccctgctgtcccaatcctagcttttctatataccatcctaaagggtttttaagccctaacacttgtctagcaaatggagagcctaatttaccaaaatgaaacttgtaaatttttgtgtcattgtatgtaagtttactttttatggaggaaggattctagataatgacaaatgaagattatgacatgtatttcactcctgtgattaggttctacgcacatgggtcataactcgcatgtcgagccccctctagtgaagggtaggagagctcagcctcggatggccaacattcagttgttcaggttcattcgtcaaagttaagttttagaactatttgtactcagtaacaaaaatcattttcttttttttttttttttctgttgtggaaaagcgtgaatttgttattaagcatttgattttctgtgtccttaagtacttcctgaagatgaagcaaaattttaatctggcaattatgaaaaagaaatattttagctctgaaggatttagtagattctgttagattagggaggccttacagactgactttacttaaagaggacgcgtcactcgctgtcagtgtggtgtgggctttatttgcttaaataccttcatttgtatagtacgtctcacttgaaattgctttgtatacattttgtaaaaatatttataaaatgttttgta

SEQ ID NO: 134397 - DNA, 478 bp, Homo sapiens
caatccctctgctgagatggtgatgatcgataggatgttcaaccaggaggaaagagcttccctgtcccgagacaagcgtttggcacttgtagaccctggtaagaaacatcgcagtgaaagtagtggatagctcctgccatggttcagggaccatggggcctttggcagtctgtctgaactttgggtaagaaacttgaaggtagaacgtgaattctggggagagctgggcacggtggctcacacctgtaatcccatctacttccttctcctctttggcctgcacagccaatgtttgttggatggaatcatctttttagatttcaaggctatattccctagaactcacattttagaatttggtgaacaaattcatgttcacactatacatacatactcttcgttgttttgtagatgtcatcaaagctctatttcacttcgattatttccagcattaacactttttccactcttgtgtaac

SEQ ID NO: 134398 - DNA, 1901 bp, Homo sapiens
ccttttctttatagttgtcatggatgatgatgatgactcgtgtctccttgatcttattggagacccacaagcattgaactattttctacatggacctagtaataaatctagcaatgatgacttgactaatgcaggatattctgcagccaattcaaattcaattttcgccaactctagtaatgctgatcctaagtcatccctcaaaggtgtaagcaaccagcttggagaagggcccagtgatggactgccactttcaagtagcctccagtttcttgaagatgaactcgagtcttctcctcttcctgatctcactgaggaccaacctttcgacattcttcagaaatccttgcaagaggccaatatcactgaacagacattggcagaagaggcatatttggatgccagtataggttcaagccaacagtttgcacaagctcagcttcatccttcttcatcagcatcctttactcaggcttctaatgtttctaattactcaggtcagacgctgcagcctataggggtgacgcatgtgcctgttggagcatcgtttgcaagcaatacagtgggtgtacaacatggctttatgcaacatgtggggatcagtgttcccagccagcatttgtctaatagcagtcagattagtggttctggtcaaatacagttaattgggtcatttggtaatcatccttccatgatgactattaataacctagatggatctcaaatcatattaaagggcagcgggcagcaagccccatcaaatgtgagtggagggctcctggttcatagacagactcctaatggcaactccttgtttgggaactctagttccagtccagtagcacagcctgttaccgttccatttaacagcacaaattttcaaacatctttacctgtgcataacatcatcatacaaaggggtcttgcaccaaattcaaataaagtcccaattaatatacagccaaagcctatccagatgggtcagcaaaatacatacaatgtgaacaatttgggaattcagcagcaccacgtacaacaagggatctcttttgcttctgcaagctcaccccagggctcagtagttggtccacacatgtctgtgaacattgtaaaccaacagaacacaagaaagccagtcacctcacaggcagtgagcagcactgggggcagtattgttattcattcccccatgggccaacctcacgcaccccaaagtcagttccttatacctacaagcctttctgtcagttccaactcggtacaccacgtccagactataaatgggcaacttcttcaaactcaaccctctcagctcatttctggccaagtggcctcagagcatgtcatgttgaacagaaactcttccaacatgctcaggaccaaccaaccatatactggaccgatgcttaacaaccagaatactgctgtccacttagtgtctgggcagacatttgctgcctctggaagtccagtgatagccaatcatgcctctcctcagcttgtgggtggacagatgcccttgcagcaggcatccccaactgtattacacctgtcacctgggcagagcagcgtttcccaaggaagacctggcttcgccaccatgccatcggtgacaagcatgtcaggacctagtcggttccctgctgtcagctcagccagcactgcccatcctagtcttgggtctgcagttcagtctggttcatcaggatcaaactttacaggagatcagctgacccagccaaacaggactccagtaccagtcagtgtgtctcatcgtcttccagtttcttcttccaagtctaccagcaccttcagtaacacacctggaacaggaacccagcaacaattcttctgccaggtaatgccctttcccaaataaatatttggctgattatagaatg

SEQ ID NO: 134399 - DNA, 883 bp, Homo sapiens
gctgctcagctcgcatgcttgccctgccttgggaacaaggtttctggatagtggggataagatgttcagcgtaatggtgtgatgtttgctataggaaggcagcaaggcaatttcttagtattagttctgctcagctctagaaaatgttttccttgattgccaagaactttcccagctcaattcaaaactcgaatttgatgaaaggaggctctgcaattcagcctcctttaatcagaattcaatcttgggctggggtggggagagtggagaatgaatgagaatgaatatgtctgtacagcggcctccttctgcccctgatacccagattcaccatgttctcctttccgcctgtcttcgttgtcttcctaacgccaggttcagtttgtgggctctggattctattatgcggataggcagtttctgtttgttctacagattcacaactgtatgatagcaactggatgttataactggaaactggagtagaataccaacataccccacacccatgttagggaggcagtgggaatcactagtttagaaaattcttgggactcagttctcttttccttttggcctcagtaggcgtcaagaggagatgggaaatctgattgacctgtcatttctgcacactgttataggcacgttgctgacaagcctcagtttctttaaacttgtttgtgttcagatcttttccaccagaccagcatcagcagggtctggtttgtggtgttacgtactcctcttctgttgggctggagctttgaacagtttgccctttataagcctgcagcattaatagggaaagactgaggggcacccaagggggtgtttatagaatgggctttataaaactcccagctgccccgtaaaacaagagttc

SEQ ID NO: 134400 - DNA, 483 bp, Homo sapiens
aattcaagttgagatttgggtggggacacagccaaaccatatcaagggggatgaggcactgagactagttagaagatggcagcaatagtttaggtgggagattatgacctgaattaaggtatagaaatgagcataggttaccagattccaaggatatttagaaggacttggtgaccaagtgcaagtaggtgtgagcaggtggaagggcttaaagccatctctcagccttctagattaagcaaatgggggcgaggtaagtgcagaaaaaggaattcaggagagaaattaaatttgaagaagacagtgaatttggttcagcatactggcttagcatttgtggcgagtggaatatcagtagagatgttcactgggcagttagagtcatgacaggccggggcctttatggagtgctatttgtattacagatgtaagggagctcacccgcacacagcatgaagctagagaaaagaactgggctaagag

SEQ ID NO: 134401 - DNA, 529 bp, Homo sapiens
gactgatggttctgattttggttcagaaaaataattgcatgactgtcctaaagtggaaagagaaaaacctcaaaaattgttaacacatcaattacatcaaccttttctaattacaactctgcatttcattattctgcaggcaaaatgagtaccttaagtctagagccccaggtaaacaaagcctttccctgtcctcatttcaaaactttgtttttataaacattccccgtcccctaaactgaactacagcagcacaatgatcctgttgtgagcactgccttgacctctataggacaacagattgttgttcacttagcccctcagagttaaatcagttttaatacagaagtttctgtcttatcaaaggaagtaaagaagtaaaaacaaaaaatgaacgtatacaagcacagatttttgagcttcgattgtagagaaatggtagttatgtggcttgccaagaaagtgcatcacctacttctgcttctggggacagaggtgaaggggtctgttctggaactttctaaggagg

SEQ ID NO: 134402 - DNA, 546 bp, Homo sapiens
ggcgacaggtccctgtaatgccagctactcaggaggctgagggtgagaatcacttgaacctgggaggcagaggttgcagtgagctgcagtcatgccactgtactctagcctgggtgacagaatgagaccctatctcaaaaaaattaaaaaaataaaaaaaaaataaaaattagttgagtgtggtagtgtccgtctgtagtcccagcaactcaggaggttggggcaggaggatcacttgagcccaggagttcaaggctgcagtgagctataattgcaccattgcactcaagctcaggcaacagagtgagaccttgtctcaaaaaaaaaaaaaaaaatttaaacaagcgacagtaatatttcattagaaatgtgatgaatgctatgaaggtgtagaggatgtctttagaatatataactgggagggagaccttttgagttaaggcaggtgctggtcaggaaagtcctgaggaagttacatttggattgagaggggaaagatgaggaggagcaggcttgcctgaggcatggtaggcaagagagaaggac

SEQ ID NO: 134403 - DNA, 314 bp, Homo sapiens
gagtcccacaattctcatcctctgtgcttcttctcttgttcatcccatctcctgaaatgtcccccaatctgccttcccataaccgaattctatccattattcaagggccagttcaattcttctaagaagtttgccctgaattccacaactgagtgagagtactccatcatcagatgtgcttgattcatctcggagtttaacccagcgtgtgacacccaggtagagctcagtgagcactggccgagtgaatgatgagcacataaatgcaataccagcttctcttgccccagggtttcatccctgcctttccctgt

SEQ ID NO: 134404 - DNA, 727 bp, Homo sapiens
gtatttttagtagagatggggtttcatcatgttagccaggctggtcttgaactcctgacctcatgatccacccatcttggcctcccaaagtgctgggattacaggcatgagccaccgtgcccggcctctccaccctgtcttctataccactctccctcactggccatagcttttaggggtgctatacctcccactacagccagcatacatatgtcttgatttatacagaaggtgtgatcctgaaaatctgtttataaatcttgcctgttttggtgaatacagtaaaaagccttccaggagacgtgttgatacacaacatgttatatataattcagttttcctttagctactatattaattttgtatgcagagtatttttaaattgctatccatgctgtgcttgctcctgccatgtgaacctgagacccccagaggaccatccactcatctccttccccctagtgtcagtatctcagccctttattcatcctgaaagtattggtgagcaaccctctgtgccaagtcttgtgctagtgaactctgggaacaagtgaaccacgcagcatttacctccagggagctcatagtcacaaacagggaattattacacggtgtgctaacagattggcataggcaattagtgggaacaccagcctgagggcatccaggggaaggatgcagacgttctggcagaggggacagtttaaccccagtgaggaggtgggaa

SEQ ID NO: 134405 - DNA, 164 bp, Homo sapiens
taaatagagacgaggtctcgctgtgttgcccaggctcgtctcaaacccaagagttcataatgttagcatttagataatctccaggctctggaggcactttcctcaggtgaatggggaatgcagttcatacatttacatatttgtcatgttactatgtgaggata

SEQ ID NO: 134406 - DNA, 436 bp, Homo sapiens
caggctgagccacaaatgggccattggttctacagagagagaggcccaagacttcaaaaatggcgacactttgaaatttaaggttagcctccactgataaaaacagttctggttttaattttcatatgtgatagtcgcagcaaacagaatggttggctatctttccccaacactattcctgaagtgacaattctgcatatattcagtgaccatgtgtacatccttttctgtgacgtttaatttcctacgtcctgtctcttttggagggtcttccctatatttgatcctgatttagacgcagtcccagtgcctgttattctctgtttctcatgtcagcctgtccattttcctctgtcctagcttgcttctcatcttcacacagtgtctgttgtgatgtggttttgcatgtgagttccctgcttcagagtttggaaat

SEQ ID NO: 134407 - DNA, 344 bp, Homo sapiens
tctgatcatgaggaaccaattacaatactaaaaagtgctttataaaatacaatattcagttgataggttgagaaaataaaaacatacttgcagtaatacttaaataaataataaatagaatatgcattctgttgttgggtgtagtgttccataaatgtcatttaggccaagtgattaataatgttttccaatcttctctttctttacgtctatacttggtctttgccagaaggctgagaaaaaattatccttatcctgtatccttctttattttttcctacttcttccattatttaccaagagagctacttaaagctattaatatctagatgtgattgtgcatt

SEQ ID NO: 134408 - DNA, 396 bp, Homo sapiens
aggtactggcaagcaaggtgagctgaactaggaatagcagttgaactttaaaggagctctgtacattccaacttatggcctgtacaaggggatggagtgatagggaccctctaaactaaaagctaaccatctgaagctctctttcaggacaaagtcttgtactgaggagaaactactgggaacagaatccagcagaacagagacaggagaagaaaaggaagaaggtggcccaaataaagaaccaggaagagtaatgaccagatgtctgaaagtgctaggattccctcttcccctccaccagaaaagtcaaaagagggagctctagagccagaaagctaaagtcttcctgcccacttctctctctcagtttatgaaaattaatttcctgcaaatcaa

SEQ ID NO: 134409 - DNA, 263 bp, Homo sapiens
tgtggggaacttccacggatgggctgcagcctggctggaagagagtgcagaaatggaagccaggagccagccaaggagaggcggccctcctatagtacactgggacttcccagggtatatcctgagggggagggtggctagaagtggagcagccctcctgcagaatcataactcaggttccaattattcagattgtccaggtccaggaaatctcaggccttggatttggcttaaggtggtcccagactggtatgatcccaaca

SEQ ID NO: 134410 - DNA, 473 bp, Homo sapiens
gcagagggggtggagcaggtggagggaatctgttgttgaagacttctgtcacctatgtgtggttatgtgtgtttccgcctcttttatgaggcgcgacctttaccaagagaaagaactgacactggaatcctgctaacagaactgttgatatcaacatataagatgtatccatggtttgtttatttagcaactatttatttgtttttgtgacagttttgctcttgtgggctggagtgcagtggtgggatcttggctcactgcaacctccgcctcctgggttcaagcgattctcttgcttcagcctcccaagtagctgggattacagacccctgccaccacgcctggctaatttttgtatttttagtagagacggtgtttcgtcatgttggccagagtggtctcgaactcctgacctcaggtgatccacctgccttggcctcccacagtgctgggattacaggcgtgtgccacca

SEQ ID NO: 134411 - DNA, 273 bp, Homo sapiens
tgggcgactctagaggacctcccccgactagcccgacagggagaaagctgctgctatcagcggcaaagcagtggccctggtccctgtccttgtggagttctccatcaattcccaatggtcaagacaaaagagctgcgtggaatggctggagaagccaaatgccttacctgaagtctcttgtgagtgaactaagcacctcataacaagtgttgggacctaattattttgtacatcaaactgtgctagtcacggggctaatctgactagtcgggg

SEQ ID NO: 134412 - DNA, 331 bp, Homo sapiens
aaacatgctgctgtggctgaactaagcccgggcactgagtgcagaaccaaggcttcccccacctatgcactcaagccccgacagtggactctcgacaggagaaagctgctgctatcagcggcaaagcagtggccctggtccctgtccttgtggagttctccatcaattcccaatggtcaagacaaaagagctgcgtggaatggctggagaagccaaatgccttacctgaagtctcttgtgagtgaactaagcacctcataacaagtgttgggacctaattattttgtacatcaaactgtgctagtcacggggctaatctgactagtcgggg

SEQ ID NO: 134413 - DNA, 752 bp, Homo sapiens
ggacgtgtgcgtgacctaggagtggggagcaaggtggctgggatcctgcagtaagtaggttgtgggtgtgtgcccctaacagtcttcaggtcacatttactcctgtccttttcttcaagatggagggatccctgggcctggacctcaactgctatccttgtacccccgggagggtttgtgaccctatcctgtttggaaaacccatgctgccctcttttccctttatgtgtaattacggttggatcatctctgtgctttgctcagattctccttcctccctctggggttgaggaggaggagacacatctgaccaattaatgtgtgtttgtgaaacaggcagcagcaaacagtcatttcagcttcgaggaattaggctcacacagggtggagagatcagagcccttcagggggaatatttctgaacaaatcacggatgattaaattctctaagaaacagctccctacctaaatgagagtgagaaagatagggaagaaagcctgtctgtttccagccatgtgtccagagcctaaggggttgaggagagtccccaagcccctacaggcctcccttttctgtattaggctttgctctgcagccttgagttaatttcacccctgctgctttgtcttgggggagggagtgctggtttaggctgttgtgaggagatgactgttctgctgccacacacaatagtcgtgtcattttatcgggagcgctaccccagggctgagaactgctgcagcagagataa

SEQ ID NO: 134414 - DNA, 741 bp, Homo sapiens
agggacgactagaggatacccccgcggtgtgtgcatgcactaagtaggttgtgggtgtgtgcccctaacagtcttcaggtcacatttactcctgtccttttcttcaagatggagggatccctgggcctggacctcaactgctatccttgtacccccgggagggtttgtgaccctatcctgtttggaaaacccatgctgccctcttttccctttatgtgtaattacggttggatcatctctgtgctttgctcagattctccttcctccctctggggttgaggaggaggagacacatctgaccaattaatgtgtgtttgtgaaacaggcagcagcaaacagtcatttcagcttcgaggaattaggctcacacagggtggagagatcagagcccttcagggggaatatttctgaacaaatcacggatgattaaattctctaagaaacagctccctacctaaatgagagtgagaaagatagggaagaaagcctgtctgtttccagccatgtgtccagagcctaaggggttgaggagagtccccaagcccctacaggcctcccttttctgtattaggctttgctctgcagccttgagttaatttcacccctgctgctttgtcttgggggagggagtgctggtttaggctgttgtgaggagatgactgttctgctgccacacacaatagtcgtgtcattttatcgggagcgctaccccagggctgagaactgctgcagcagagataa

SEQ ID NO: 134415 - DNA, 388 bp, Homo sapiens
gaactcacctctacccctcaccaccctttcctgaaggcaggactttacaattcccccaaaacctgagcttcttcagcagctacggaactaacatttatttaggcatctacttcttttattttttttgagatagggtctcactctgtcacctaggctggggtgcagtggtgcaatcatagctcactgcaacctctacctcctggactcaagcgatcctcctgcctcagcctctatgcttggctggggtctacaggggtctctcagaaaaagcctggctccgtcccctggcctttctttctggtcggctcttgagaactacaaggacagaacccacaaatgcccccatgacccttcccccttatcttttcgcgtcccagattcctgaaat

SEQ ID NO: 134416 - DNA, 530 bp, Homo sapiens
taggaaaaaggtaatttgtagtctaacgatatacttgctagatcagatcatagatgtgctggaatgacagagtctaggcattttacacacagagtatttgaattcaatttttcagacccttggtaggatgctcagtattattctgaatgtttctcccattgttacgaagttagctgcggtagattgatgtgtaaatttgttgatgtgacactgatgataaatgttttggaacaaaattacttgttaagtagggatgggggtgagaaattcaaataacccggaggcagaaactgctttcaggagctttatcttacaacgtgttcaactagattcaatctctgcttcaggagaggcatgttagagacatgaggaaggcccaagggaaaagggtgtcctttattgtttaatgaggagttccaagcaagatcagggtaattatagattctagatctctaaaggaagaaagaataaccagggcctttctagggataaaggaaaggaaatacatcatgattgacatggagaggtgc

SEQ ID NO: 134417 - DNA, 530 bp, Homo sapiens
tttaatgatcgggtggggcggggggggggtctccctgtgttgcccaggctggtcttgaacttctggtctcaacctcccgaagtgctgggattaccccgcccagcccaaagcaaccccaatttaataactgattggttataattatgtagttctgttattcggattatttaggtggatggttcctggttatgtaatcagaggtaaattgctgatttggggttaagttttctttcccttcaagttaattacaagaaaggcatgaagtacctttaggttttcttggtgaggaactcagggcaccatcatcacttaagggaggagaccacccctcatattgtcttatgcccaatttctgcctccaaagaaagaagaagtaaaaactaaaaggcagaaatgaaatccacaggcagacagcccggcgccgcgtcctgggcctggttacagattgacccttgacctgaccggttgtgttatctatagattccagacattgtatggaaaagcactgtgaaaatccctgtcctgttctg

SEQ ID NO: 134418 - DNA, 652 bp, Homo sapiens
ttagaacaatggcaaaatagacttatgatgtatatcttgttttaaaattagcaatacatgctatttggggaatgcataaaattgtagtattaaaaaatccataatcccaccatgatgatcattttcaaatatattatttttatacatttgggaatatatactttgtacaactcgtattctgttttttcccccacctacccttatagcttaatatttgccatgctgttgaaaacgccgtttatccatttgcgatgtctggatactgttgtagtggtagattggtcagattgggatgagaatagcacttttcattcacatttgatgaggacataaattagtgtagcatttctggaagcagtttagcaatatgtatcaagaaccttgaaaacatccatactatttgtttgacccattaattctacttactaagaatctattctgatccctaatgtaataatcaaagatgggaacagatatttttacataagagtgttcattgtagtactgtttgtacaagtgaaaatctaaaaactaaatgttcaacagtagggagttggttaagcaaattatagtatatttatatgatgaaatattatgtaactattaagataatattttaagaaacagattttttaaatgtatgtattggaca

SEQ ID NO: 134419 - DNA, 390 bp, Homo sapiens
cttatgttgaccaccatctttaagaactgtaacactcaccgtgagggtccgtggcttcattcttgaagtcagtgagaccaagaacccaccaatttcggacacactcctagaataaattcattcaatttcagctgatttgacacatcagattctcacttttgctctcttgctcttttcaactttctgtctattcagtttttgcctttatcaatttcttcattctaaaacaacctgtgggctaagtgcggtgggtcagaacataagcttatgttctgacccacctttgggctctaggaggagagggtaggagagagtaagaagaccacataggaaatgaaagcaagagatgatggtggcttgggtggcactggaggtggtgagaagtgaatg

SEQ ID NO: 134420 - DNA, 760 bp, Homo sapiens
gaaagtaaatcatgagaaagggtttgactgaagtaatgggggctgcccctgaagccttgtggcagtacagcccagaaccaaacttcagtttcaaaattgtctttcctaatgcctggctttctggatggatcacagggcccatgaaaacatcgagaaaagaggtgaagaaagctttctatggtttgaatcttctggaaacatcagagaaagactgtccttgccatccatactataacaaaacttcaggactttgggcttcgggttcatggtttcacaactgagaagggttcatccaccgttttggaactgtgcacccattggaacccttgaggtaaagctaaccagggaaatttctcccaagaagaagatggcatccttgatgtgaacagcttttcccaagttcacagattaagacttctactgtcacaaaactctgatctttgaatgttttttcttgcttatgcctctatgaacaatagaagtggaaacggggtctgttatgtgcactaatggggtgtacttttgtgaaggagtttgcagccatccttatacatggataaccttaaactttgatagataaatgatgaaggcacaatgtaaataagaaactttaatgttgcctcatatgtacatatgttgcctcataatcagtcaaaaccaaaacattgattcactcctcttaacccacatcatgggttaaaaacaacattaacagaaggccttcactcttctaaaaggacatcattttttaggtcctttt

SEQ ID NO: 134421 - DNA, 468 bp, Homo sapiens
  misc_feature (1)..(1): n is a, c, g, or t
  misc_feature (9)..(9): n is a, c, g, or t
  misc_feature (365)..(365): n is a, c, g, or t
  misc_feature (368)..(368): n is a, c, g, or t
  misc_feature (413)..(413): n is a, c, g, or t
  misc_feature (439)..(439): n is a, c, g, or t
  misc_feature (456)..(456): n is a, c, g, or t
naagaattnggcacgagggatatgaacacatacatacacatatgtacacattcatagatacacacacctcaacaataacgttatgaaaacatcaacaacaacgttatgaaaagttcaacaacagtgttatgaatacactcattcatcactagtactgttctcctgaacatgatatgtgggggggaggggatctatgtatcatgacctctccacatctgcccgcagactacccctttttcttctgcaccacccttttccgtaccctcagtgcttggcagtgcctagctttttccaggtgcctgtttgcatgagcactggggagtgccgcaagcttattcccttttagttgaggggttaattttagnttnggcactgggccgtcgtttttacaacgtcgtgactggggaaaaccngggcgtttacccaactttaattcgcnttgcaggcacatccccntttttcggccag

SEQ ID NO: 134422 - DNA, 108 bp, Homo sapiens
atttctcagcttatcagtaagaacactgagaggttatgacagccatagtttaggggcatgcagtattagggacagaggcaaggagttgctcaagctcagcagatacta

SEQ ID NO: 134423 - DNA, 338 bp, Homo sapiens
tggatttcatagattcaatgtacttaagtcaactataattaattttgatgttaaaattattacaactttagccattgataattaaactggctcctgtgtctgttgaactgctgcttgctttctggggcacaaggcttcccttgtgccttgtctgccttgcctgttctggagctacacttggccatttctccaataggaatggtatgaaatacttgaatttaggtgttaaacatgttcattactctcaggatgtgattacttctgagccattttctatggacagtattgactttaaaattcattcattcatttttatattttcaattcaattttttaac

SEQ ID NO: 134424 - DNA, 764 bp, Homo sapiens
gaaatgaaaagacatactcaagatatggaacctggcagatgtaactaatgattagatgtaggagcaaagggggaagatggtatcagtggtgaccttcagatttctggtgtaaagtcctgggaggatggtgataacacagtaaagaagtgaaaacaaatggtttgaaaaatagatgtcttgaaagtcaggtaagtctcactcatttcaccccttctcagcttgataaaactacctaaaaatgcaacagtttcctgacagactactggttacaacacattctcccaaccaatttatatcccttaagttttggttatatgcaacattaatgtaatttggctaatttaaaccaaattaaaggggttggagaatttagaagaattctgggatagtttatataacttaaggaagagctgaacaactaagcttgacaatgggaactaaggtgcttccatgatcctcagcagcatgatctttctagaatgcattgtaggtggcttccctgtcttttctgtgtatctgttcaagcttcaaatactaagacagtctagtacaatgtgtttcgttttgttttgtttttttgagataagatcttgctctgtcacccaggctggagtgtagcagcatgatcatggctcactgtagcctcaacctcctgggctcagccacccaagtagccaggaccacgggcatgtgccaccacacctggctaattttactttttatagacacaggggtctcactatgttgcccaggttggtcttgaa

SEQ ID NO: 134425 - DNA, 657 bp, Homo sapiens
tattatccacacaggttacttaaaaacattctcggttatcttgaaattagaggagacatagcatgagtgaaattatcacagactttgggcctgatgtgaaaacaaagttgaaattaattaattgctaattgcaaagataaaagatgccaggcatggtggctcacatctataatccaagcactttgagagaccaaggcgagtagattgcttgagctcaagagttgaagaccagcttgggcaacatagcaagaccccatctctacaaagaaacaaaaattagccaggtgtggtggagtgggcctgtagtctcagctacttgggagactgaggtgggaggatcacctgagcctgggaggtccaggctgcagggagccctaattgcaccactgtattccagcctgggtgacagagcaagacctcccaaaaaaaagaaagataaaaagtatttatttgcatataacctgctgctttttagacatggcttcctgcctgtttagcaatatcataatgaaatccaatacttccaccagatctgggatctgattagatcaatctgtaaaacaaaatttaatcattaagtaatttaaagaggttataatttctaccaggcaagtctggacaacagtcttaagaaagtatcccttgtgccaactgaaa

SEQ ID NO: 134426 - DNA, 333 bp, Homo sapiens
accccgtatcccaccccttcagggctcaggcctccactagaaggtgactcatggccagggaatgccagtgagagccgatgagtggctgcatctggctgtagagtagccagtgcctagtgtggggtagtcagcagtgctcggaggacaattcacttgagctcctgggcccctttccctggaaataggtgtatttttgacagggtcttgttgaaacaacagttcagagcacaggcatgactccaggagtagggatttatggcatgtgggacaggctggttgtgtgcccagcccagcatgagcccctcaggcagcgccatgcacatgggccactga

SEQ ID NO: 134427 - DNA, 231 bp, Homo sapiens
gatcactaatatttttaaggagtagctcacaattaccagactgcactcaaaacagcagaaattctctccaagaaaatgtgtaaatagctagtttctacaggagaggaaacctctctgagtttgtcaccttcagctttggttcacactccacctgacccatttaattatacaagggcatcagtcattgaaagctaaaattaacagttcatgacttttgccagagagctctga

SEQ ID NO: 134428 - DNA, 424 bp, Homo sapiens
ggcaaagggctctgaatatcaggccaccttctggagttttgggggtagtttttgaagatcatatggaaacacatatgaagatggagggcatggggcaaatatgcgatatacaagggtgacccctcaaagccggctcactgagccaactgcaggcaaagtgcaaagttgtaaaaatcaagcccttagtgagcctcccaagccaaagaaaccagaggccctctgtctgttttccctctatcctctcttcccaaatggtttgggcaggattcaacgctaatggctgggaaagggcgtctgtgggctctccctgagatacacccacgtccctctggcatggggtctcatggcaacagcagatggctccctggtgtggtgggtttgcgtggttttctctctattttccttgttttggtttttgagaatg

SEQ ID NO: 134429 - DNA, 284 bp, Homo sapiens
tatgtgtcccctctaagtttcatattgaaatataatccccaactttggaggtggggcctggtgggaggtgtttggatcatgggggtagatctctcatgaatgacttggttgccatccccttgatgataagtgagttattggtctgagttcacacaagatctggttctttaaaagtatgacacctacccctctttattcctcctgctcccactatgcataagacacctgtcccctctttgcctttcatcatgattggaagcttcctgaggccaccccagaagcag

SEQ ID NO: 134430 - DNA, 250 bp, Homo sapiens
tatgtgtcccctctaagtttcatattgaaatataatccccaactttggaggtggggcctggtgggaggtgtttggatcatgggggtagatctctcatgaatgacttggttgccatccccttgatgataagtgagttattggtctgagttcacacaagatctggttctttaaaagtatgacacctacccctctttattcctcctgctccctccatgtggcttcaagccaccagggcacagccccccgaaca

SEQ ID NO: 134431 - DNA, 723 bp, Homo sapiens
cgggctgcaggattcggcacgaaaaacatatggagacgtttatacccattgatttgacaactgaaaatcaagagatggacaaggaggaaaccaagacaaaaccaagacttttaagatatgaagagaaaaaatatgaagatgtgaaaccattagagactcaaccagctgaaatagcagaaaaggaaacattggaatataaaacagttagaacattctctgaatctttgaagtcagagaaaacagaagattaccttagagaaagtataattcaacaacatatggtttctccagagccagcttcccttaaggagaaagggaagtcaaggagaaaaaaggatcaaactcatgcttgtccaaatgttaggaaagccaggcctgtgtcctatgatagaacagaaccaaaagatgatgatgtgataagaaatattattaggctacgagaaaagcttggttggcaaactatattaccgcagcacagtttgaaatacggaagctccaaaattgcaattcagaagattactttaaagaaacctttggaagatgatggagaatttgtttattgccttcctcggaaaagtcctaaatccctttacaatccatatgatcttcaggtagtatcggctcatactgctaaacattgcaaagaattttgggttattactgcttcatttatctcaaaggtaatgtttaatggatgttttaagctttcagaattatattaca

SEQ ID NO: 134432 - DNA, 1156 bp, Homo sapiens
aggcggttacggccaggaggcgtcggagcctggcgtggtagggctgtgctgcgcggtccttcccattcaccctagtctggcgctcgccggcgtgggcgggccggaccttcgccgcttccaggaagggccacaacggccgtcggaccacggcgcggcggccagttcctttatagttttgttcagaaaaacatatggagacgtttatacccattgatttgacaactgaaaatcaagagatggacaaggaggaaaccaagacaaaaccaagacttttaagatatgaagagaaaaaatatgaagatgtgaaaccattagagactcaaccagctgaaatagcagaaaaggaaacattggaatataaaacagttagaacattctctgaatctttgaagtcagagaaaacagaagattaccttagagaaagtataattcaacaacatatggtttctccagagccagcttcccttaaggagaaagggaagtcaaggagaaaaaaggatcaaactcatgcttgtccaaatgttaggaaagccaggcctgtgtcctatgatagaacagaaccaaaagatgatgatgtgataagaaatattattaggctacgagaaaagcttggttggcaaactatattaccgcagcacagtttgaaatacggaagctccaaaattgcaattcagaagattactttaaagaaacctttggaagatgatggagaatttgtttattgccttcctcggaaaagtcctaaatccctttacaatccatatgatcttcaggtagtatcggctcatactgctaaacattgcaaagaattttgggttattactgcttcatttatctcaaaggttattaatatagttggtagtgtaaaggaagtagaactcatacctactttggaatggctatcagaaagaagacattactatttattacggcaattcaagatattttctgatttccggaagtcagggaccccgaacggagggaccggccgaagccatggcagaagaacgtggattgtgaagatttcatgaacatttattagttccccaaattaatacttttataatttcttacacctgtctttactgcagtctccgaacataaattgtgaagatttcatggatacttatcacaataaatacccttgtgatttcct

SEQ ID NO: 134433 - DNA, 1727 bp, Homo sapiens
accacatctttgcatgaggtagatctgtatgtgcaaataaagaaatatctctaatatgcagtatcaagtgagaatggaggaaaaacttctatagatatatgaatatacacgtagatacatatgtgctgataaaaatatgtatacttttctctctggaataaatttttttatgtggtgacattcagataggggaggggcactcatgggaagagagagaactccttgatgaagggcatgtagtttttgaatgtcaatatagggtatgtgggtggtgagattataagattatacacacatttctgtagctaaaattaagttcataaatactacttttatagaaaatgtaaaaattatgagactcaaatctgaacagctatttgtgaaaagtatctcagggtgaggaggaagtttctcttctctctgttggagcacaagaaatagcattagaaaacgacaagtacagaagcagtgtgttgagggaaatcaaatttgggtatagataaagtggctgaggattcatacatagaaaaagcttaattataaaggcaagaagttacaagaagttatcagccaaatacaggctttcttaatttcttgaaaatggtacatattttttaaagaaataaaataatgcttttgtgctttattttgtaggttattaatatagttggtagtgtaaaggaagtagaactcatacctactttggaatggctatcagaaagaagacattactatttattacggcaattcaagatattttctgatttccggtgaggtgaaaaaaatgaaaccaattctttgtagtttgatcctattgaaggagcagttgcctgagtgacatctgggttctactacagtaataccagtagaaaatagtactaattcttttatctaaaaattttttacggaacaccccatttcctctgtaacttatgaagaaatgccaataattttggcatttaagaagcatttttcctttcagaattaataaagcatttgttacctgtaacttatgaggaaatgccataagttacagaagaatgagatgttccataaaatttctttagataaaggaagtttactcttttcagtattaaaactcttaattttagtctctttggataaatattgtaaaaatattttatggtcaagcaaacttaaatacaccctacagttgactctggaacaacgcaagggttaggggctctgaccccctacacagttgaaaatttgagtataacttttgactctacccaaactttgctattaatactaatagtctattgttgacaagaagctttatcagtaacataaacaatcaattaacatgttttgtctggtagatatatactgtattcttacaataaagtaagttagaggaaagaaaaaggaaaatcataagggagagaaaataaatttactactcattaaatggaagtagatcataataaaattccttcatcctcatcattttcacattgagtaggctgaggaggtggaggaaaagtagaggttggtttttgttgcaggaagtcagggaccccgaacggagggaccggccgaagccatggcagaagaacgtggattgtgaagatttcatgaacatttattagttccccaaattaatacttttataatttcttacacctgtctttactgcagtctccgaacataaattgtgaagatttcatggatacttatcacaataaatacccttgtgatttcct

SEQ ID NO: 134434 - DNA, 941 bp, Homo sapiens
aggcggttacggccaggaggcgtcggagcctggcgtggtagggctgtgctgcgcggtccttcccattcaccctagtctggcgctcgccggcgtgggcgggccggaccttcgccgcttccaggaagggccacaacggccgtcggaccacggcgcggcggccagttcctttatagttttgttcagaaaaacatatggagacgtttatacccattgatttgacaactgaaaatcaagagatggacaaggaggaaaccaagacaaaaccaagacttttaagatatgaagagaaaaaatatgaagatgtgaaaccattagagactcaaccagctgaaatagcagaaaaggaaacattggaatataaaacagttagaacattctctgaatctttgaagtcagagaaaacagaagaaccaaaagatgatgatgtgataagaaatattattaggctacgagaaaagcttggttggcaaactatattaccgcagcacagtttgaaatacggaagctccaaaattgcaattcagaagattactttaaagaaacctttggaagatgatggagaatttgtttattgccttcctcggaaaagtcctaaatccctttacaatccatatgatcttcaggtagtatcggctcatactgctaaacattgcaaagaattttgggttattactgcttcatttatctcaaagagatacttggtcatttgtggagcagtttatatataagaatctccttgggagcatgttatttaatagtgaagtttttccttttgtgtagagatttaggtttgaagattcaactttaataaattttttcatctatcaaatactttgttaatacttggggtaaatttttacaggaagaactacaaaacaagcatttgctagcttaatgggaactataataataaagaaaagaatattctttattggcacatt

SEQ ID NO: 134435 - DNA, 1915 bp, Homo sapiens
aggcggttacggccaggaggcgtcggagcctggcgtggtagggctgtgctgcgcggtccttcccattcaccctagtctggcgctcgccggcgtgggcgggccggaccttcgccgcttccaggaagggccacaacggccgtcggaccacggcgcggcggccagttcctttatagttttgttcagaaaaacatatggagacgtttatacccattgatttgacaactgaaaatcaagagatggacaaggaggaaaccaagacaaaaccaagacttttaagatatgaagagaaaaaatatgaagatgtgaaaccattagagactcaaccagctgaaatagcagaaaaggaaacattggaatataaaacagttagaacattctctgaatctttgaagtcagagaaaacagaagattaccttagagaaagtataattcaacaacatatggtttctccagagccagcttcccttaaggagaaagggaagtcaaggagaaaaaaggatcaaactcatgcttgtccaaatgttaggaaagccaggcctgtgtcctatgatagaacagaaccaaaagatgatgatgtgataagaaatattattaggctacgagaaaagcttggttggcaaactatattaccgcagcacagtttgaaatacggaagctccaaaattgcaattcagaagattactttaaagaaacctttggaagatgatggagaatttgtttattgccttcctcggaaaagtcctaaatccctttacaatccatatgatcttcaggtagtatcggctcatactgctaaacattgcaaagaattttgggttattactgcttcatttatctcaaaggttattaatatagttggtagtgtaaaggaagtagaactcatacctactttggaatggctatcagaaagaagacattactatttattacggcaattcaagatattttctgatttccggtgaggtgaaaaaaatgaaaccaattctttgtagtttgatcctattgaaggagcagttgcctgagtgacatctgggttctactacagtaataccagtagaaaatagtactaattcttttatctaaaaattttttacggaacaccccatttcctctgtaacttatgaagaaatgccaataattttggcatttaagaagcatttttcctttcagaattaataaagcatttgttacctgtaacttatgaggaaatgccataagttacagaagaatgagatgttccataaaatttctttagataaaggaagtttactcttttcagtattaaaactcttaattttagtctctttggataaatattgtaaaaatattttatggtcaagcaaacttaaatacaccctacagttgactctggaacaacgcaagggttaggggctctgaccccctacacagttgaaaatttgagtataacttttgactctacccaaactttgctattaatactaatagtctattgttgacaagaagctttatcagtaacataaacaatcaattaacatgttttgtctggtagatatatactgtattcttacaataaagtaagttagaggaaagaaaaaggaaaatcataagggagagaaaataaatttactactcattaaatggaagtagatcataataaaattccttcatcctcatcattttcacattgagtaggctgaggaggtggaggaaaagtagaggttggtttttgttgcaggaagtcagggaccccgaacggagggaccggccgaagccatggcagaagaacgtggattgtgaagatttcatgaacatttattagttccccaaattaatacttttataatttcttacacctgtctttactgcagtctccgaacataaattgtgaagatttcatggatacttatcacaataaatacccttgtgatttcct

SEQ ID NO: 134436 - DNA, 1091 bp, Homo sapiens
aggcggttacggccaggaggcgtcggagcctggcgtggtagggctgtgctgcgcggtccttcccattcaccctagtctggcgctcgccggcgtgggcgggccggaccttcgccgcttccaggaagggccacaacggccgtcggaccacggcgcggcggccagttcctttatagttttgttcagaaaaacatatggagacgtttatacccattgatttgacaactgaaaatcaagagatggacaaggaggaaaccaagacaaaaccaagacttttaagatatgaagagaaaaaatatgaagatgtgaaaccattagagactcaaccagctgaaatagcagaaaaggaaacattggaatataaaacagttagaacattctctgaatctttgaagtcagagaaaacagaagattaccttagagaaagtataattcaacaacatatggtttctccagagccagcttcccttaaggagaaagggaagtcaaggagaaaaaaggatcaaactcatgcttgtccaaatgttaggaaagccaggcctgtgtcctatgatagaacagaaccaaaagatgatgatgtgataagaaatattattaggctacgagaaaagcttggttggcaaactatattaccgcagcacagtttgaaatacggaagctccaaaattgcaattcagaagattactttaaagaaacctttggaagatgatggagaatttgtttattgccttcctcggaaaagtcctaaatccctttacaatccatatgatcttcaggtagtatcggctcatactgctaaacattgcaaagaattttgggttattactgcttcatttatctcaaagagatacttggtcatttgtggagcagtttatatataagaatctccttgggagcatgttatttaatagtgaagtttttccttttgtgtagagatttaggtttgaagattcaactttaataaattttttcatctatcaaatactttgttaatacttggggtaaatttttacaggaagaactacaaaacaagcatttgctagcttaatgggaactataataataaagaaaagaatattctttattggcacatt

SEQ ID NO: 134437 - DNA, 2734 bp, Homo sapiens
  misc_feature (67)..(67): n is a, c, g, or t
ctgatgcagtggatcggattgttgcataccggttgggcatcaggcaggctggacagcagcgctggtngggagcaggagattaaaataaatgggaatattcaaaagggagaattaattacatataacttgacagagctaattaaaccagaagcttatgaagtccgactgactcctctcaccaaatttggtgaaggagattcaacaattcgtgtgatcaaatatagtgctcctgtaaatcctcatttgagagaatttcattgtggatttgaagatggtaatatttgtttgttcactcaagatgatacagataattttgactggacaaagcaaagtacagcaacaagaaatacaaaatatactcctaatacaggacctaatgctgaccgtagtggctccaaagaaggtttttatatgtacattgagacatcacgacccagattggaaggcgaaaaggctcgacttctcagccctgttttcagcatagctcccaaaaacccttatggacccacaaacactgcatattgtttcagcttcttttatcacatgtatggacaacatataggtgtcttaaatgtttatctacgtttgaaagggcaaacaacaatagagaatccactgtggtcttcaagtgggaataaaggacaaagatggaatgaggctcatgttaatatatacccaattacttcatttcagctcatttttgaaggtatccgaggtcctggaatagaaggtgacattgctattgatgatgtatcaattgcagaaggagaatgtgcaaaacaagacctagcaactaagaattccgttgatggtgctgttgggattttggttcatatatggctttttcccattatcgtcctcatctctatcttaagtcctcgaaggtgaccttatcctggcagaggctataaaagattcaccaggcactggcatgaagaaagagtctttgtaaatggacattgaacaaacaaactaccaaagattcctccactgactactgactcaaaaataaaataataaaaacaaatttttttaagcactggggataaaaagacatcatggaagtataacttattccagactaaacataaaagataatcttgacctgagtagagaagagaccttcaggtgcttttgtggctaaaaagattacagcgtcatctggttgaactctggaaaaaaaaaaaaaaaaatgaaaaaaagaaaaaaaaaagagctatagaaatccttgtcaaagcacaaagtcatggctggttttgtttcaaatgaatagtttgcttgttaccatggaaacctaatggcctgccaacaaaaacctcactgtaaacagggtacgtgaagagctggcatttattttccttacgagaaggttttcgtagagaattaaataaatgtaggcccttttacctttggctgttacccttccttgaaaataacccgaactcagaattatttaaagcattcatgtttctccccaccttatccccatcccacctttattattattatttttctcccatggctaagctagataactgtatgctgtctctttttgcatgcactactatccaggatggtaaacctgggcttacatgttacacaggcttatcggagtttgcttgcggccacttgaacacccaaactacgtcatctgttccaatgaagaaaccaaaccaccatcttttataaattgccatggaaaccaagtgccttcaatgaaacaagcctgaataattttcaactcagaagcttgcactgctaagagtggtttgtgtaaaactattttataaacaaactacagagcctaaatgtgcaaattacaggcaagacaacaaagccgcttctgaagaagaaaggaccgaagctgctgcgtaagcccatgcagacaagatatttgttgtttaacctcctagacagccatggcctttcggcttattgtccattagaaaatcacttccattgagaccagacatggagcaacactttttttcttccaggttattaaatgggtcaaccagagcaaaaggttattaagaatacttagtgcagaaggtggtaaaacacaaaagtgatttttttactctaacctccatttgaaatgaaattggccctagctttagagggaacaagaaaatgtttgggattgcagtgcatactaactctacagtggaactgggcctgaaaaatctggctttattctaaactctgagggtaatatgcctctgccctttagtcagactctgtgcaaattgtgaaatattattttattattttcaccaagattataaaaacacttttacaaaaaaacaaaaacctgtaaaaataattttgagctacctgacgacaaatcatatctttaaccagccagttttccaatgcattgtaaatttcacttaaacctgttggttatgaaaatttgaagatcattttcccttaaattatcctcagcttttaacttcatttaaaaagacttttgtcctaagaagaatattattattatatgttctttcaacacccccaggattaaaaaaaatgattatgcaagcaattggaatataagtattaaattatagcatttgcaaatattaatataaaagcacaacaaaatgtagtggaaaatgacaaagcttgttttttaaaacaattctgtagaaatgtttgtgcaaattcagtaattcaacttaaaatataattttacagctatgttcaataaagcctctttccaggtaaggta

SEQ ID NO: 134438 - DNA, 2890 bp, Homo sapiens
  misc_feature (67)..(67): n is a, c, g, or t
ctgatgcagtggatcggattgttgcataccggttgggcatcaggcaggctggacagcagcgctggtngggagcaggagattaaaataaatgggaatattcaaaagggagaattaattacatataacttgacagagctaattaaaccagaagcttatgaagtccgactgactcctctcaccaaatttggtgaaggagattcaacaattcgtgtgatcaaatatagtgctcctgtaaatcctcatttgagagaatttcattgtggatttgaagatggtaatatttgtttgttcactcaagatgatacagataattttgactggacaaagcaaagtacagcaacaagaaatacaaaatatactcctaatacaggacctaatgctgaccgtagtggctccaaagaaggtttttatatgtacattgagacatcacgacccagattggaaggcgaaaaggctcgacttctcagccctgttttcagcatagctcccaaaaacccttatggacccacaaacactgcatattgtttcagcttcttttatcacatgtatggacaacatataggtgtcttaaatgtttatctacgtttgaaagggcaaacaacaatagagaatccactgtggtcttcaagtgggaataaaggacaaagatggaatgaggctcatgttaatatatacccaattacttcatttcagctcatttttgaaggtatccgaggtcctggaatagaaggtgacattgctattgatgatgtatcaattgcagaaggagaatgtgcaaaacaagacctagcaactaagaattccgttgatggtgctgttgggattttggttcatatatggctttttcccattatcgtcctcatctctatcttaagtcctcgaaggtgaccttatcctggcagaggctataaaagattcaccaggcactggcatgaagaaagagtctttgtaaatggacattgaacaaacaaactaccaaagattcctccactgactactgactcaaaaataaaataataaaaacaaatttttttaagcactggggataaaaagacatcatggaagtataacttattccagactaaacataaaagataatcttgacctgagtagagaagagaccttcaggtgcttttgtggctaaaaagattacagcgtcatctggttgaactctggaaaaaaaaaaaaaaaaatgaaaaaaagaaaaaaaaaagagctatagaaatccttgtcaaagcacaaagtcatggctggttttgtttcaaatgaatagtttgcttgttaccatggaaacctaatggcctgccaacaaaaacctcactgtaaacagggtacgtgaagagctggcatttattttccttacgagaaggttttcgtagagaattaaataaatgtaggcccttttacctttggctgttacccttccttgaaaataacccgaactcagaattatttaaagcattcatgtttctccccaccttatccccatcccacctttattattattatttttctcccatggctaagctagataactgtatgctgtctctttttgcatgcactactatccaggatggtaaacctgggcttacatgttacacaggcttatcggagtttgcttgcggccacttgaacacccaaactacgtcatctgttccaatgaagaaaccaaaccaccatcttttataaattgccatggaaaccaagtgccttcaatgaaacaagcctgaataattttcaactcagaagcttgcactgctaagagtggtttgtgtaaaactattttataaacaaactacagagcctaaatgtgcaaattacaggcaagacaacaaagccgcttctgaagaagaaaggaccgaagctgctgcgtaagcccatgcagacaagatatttgttgtttaacctcctagacagccatggcctttcggcttattgtccattagaaaatcacttccattgagaccagacatggagcaacactttttttcttccaggttattaaatgggtcaaccagagcaaaaggttattaagaatacttagtgcagaaggtggtaaaacacaaaagtgatttttttactctaacctccatttgaaatgaaattggccctagctttagagggaacaagaaaatgtttgggattgcagtgcatactaactctacagtggaactgggcctgaaaaatctggctttattctaaactctgagggtaatatgcctctgccctttagtcagactctgtgcaaattgtgaaatattattttattattttcaccaagattataaaaacacttttacaaaaaaacaaaaacctgtaaaaataattttgagctacctgacgacaaatcatatctttaaccagccagttttccaatgcattgtaaatttcacttaaacctgttggttatgaaaatttgaagatcattttcccttaaattatcctcagcttttaacttcatttaaaaagacttttgtcctaagaagaatattattattatatgttctttcaacacccccaggattaaaaaaaatgattatgcaagcaattggaatataagtattaaattatagcatttgcaaatattaatataaaagcacaacaaaatgtagtggaaaatgacaaagcttgttttttaaaacaattctgtagaaatgtttgtgcaaattcagtaattcaacttaaaatataattttacagctatgttcaataaagcctctttccaggtaaggtatgacaagcagtatgtgtgtttgttgagcaatgttcacttatcactaaaatgaaattagttatacaatttattggttaccatgggataaatcttcagtgctccacataccttaatgtctgcagaaagaaattttaataggaactccctgatgcactc

SEQ ID NO: 134439 - DNA, 655 bp, Homo sapiens
  misc_feature (67)..(67): n is a, c, g, or t
ctgatgcagtggatcggattgttgcataccggttgggcatcaggcaggctggacagcagcgctggtngggagcaggagattaaaataaatgggaatattcaaaagggagaattaattacatataacttgacagagctaattaaaccagaagcttatgaagtccgactgactcctctcaccaaatttggtgaaggagattcaacaattcgtgtgatcaaatatagtgctcctgtaaatcctcatttgagagaatttcattgtggatttgaagatggtaatatttgtttgttcactcaagatgatacagataattttgactggacaaagcaaagtacagcaacaagaaatacaaaatatactcctaatacaggacctaatgctgaccgtagtggctccaaagaaggtttttatatgtacattgagacatcacgacccagattggaaggcgaaaaggctcgacttctcagccctgttttcagcatagctcccaaaaacccttatggacccacaaacactgcatattgtttcagcttcttttatcacatgtatggacaacatataggtgagatagcaataattactgattcttacaaaattaatgataactaagaagaaaaaggttcataaacacacagcattaaaacaatttttggtc

SEQ ID NO: 134440 - DNA, 744 bp, Homo sapiens
  misc_feature (454)..(454): n is a, c, g, or t
  misc_feature (478)..(478): n is a, c, g, or t
caagccttggcggcaaaggagagtgggacgtaagtctggaaatgcatggcacggatgaaggtttggctccaaacacccttgcacactgagccccaaacacgaccatctccacaaccccacagacatgcacagccctcatggccacagatacgactgtgcgccctgtcacatccagcctccctgacacccacatatccacagtcccaggcacacagccactcacaatacacatacacaattccaattatgcagccacgcatacaccgtgccatgtgtcttctgtttataccaccacaaatgcatcatacacagtcacaaaatcatcacacacacacatatacgcaacatacacacatacgccacccattcctccacagcaacactcacaagggcacatacagcttcatacacacaacgccttgcacttgaggagccaatgggaagaaatccaagnaacggtgactattagtattgaccngtacttctagaaacctggcttagggagaaactgtaataaatgttatgatttgtagctaacgtgtattgaataagatctgcccggaactgtattaggtgctttctgttatctatttaatcctcatcacatttgtgggaggaaaagggactatttattttgcacatattgcagataagtaaattgaggattagagatgtctaggaataaactagtgtatagtgagccatgatcaccccagagcgactgaccggggggtcctctagacc

SEQ ID NO: 134441 - DNA, 462 bp, Homo sapiens
  misc_feature (434)..(434): n is a, c, g, or t
  misc_feature (453)..(453): n is a, c, g, or t
caagccttggcggcaaaggagagtgggacgtaagtctggaaatgcatggcacggatgaaggtttggctccaaacacccttgcacactgagccccaaacacgaccatctccacaaccccacagacatgcacagccctcatggccacagatacgactgtgcgccctgtcacatccagcctccctgacacccacatatccacagtcccaggcacacagccactcacaatacacatacacaattccaattatgcagccacgcatacaccgtgccatgtgtcttctgtttataccaccacaaatgcatcatacacagtcacaaaatcatcacacacacacatatacgcaacatacacacataatgccactggtcaacccacaatgccactggtcaacctcacaatgccactgtgtcaaccctacaatgccactggtcanacccactgattgggtaccntgatgctct

SEQ ID NO: 134442 - DNA, 413 bp, Homo sapiens
tccttgaactcctggggtcaaaagatcctcttgccccagtttcccgagtggttgggactacaggtgtgtgtcaccacgcctggctaattattttatttttcgtagagacaaggtctgactgtgttgcccaggctagtcttgagctcctaggcttaggtgatcctcccaccttggcctcccaaagtgtcaggattataggtgtgagccactgcacccagcctggatttgctcttttatcaagaggttaatatttattcttccgttcagtgaaccgtgggattgaattcccccagcgattgaaatgaaagggcttatgtataacatttcctgaggaatggtagtaccagagttcagaggagacctcaggccatttattctataaactcagaagctgtagttctagatgatgtggc

SEQ ID NO: 134443 - DNA, 128 bp, Homo sapiens
atacatgccccccactgggatggctaacctttttgtgggatagaggcttaatgataattgattacattctggaattcttggtaaagaatacaaggggtcttaggagccaggttttttagtaagggggc

SEQ ID NO: 134444 - DNA, 319 bp, Homo sapiens
ggaggtgaaagtgagggaatgccttagaattaaaatctctgccttgggagagttggtaaatttttttaaaaagctgaaaattttatgacccgtaaattatgtttattatgaaagctaagaaaatagtgagacatgatttaattttgttgatgggtgcacgggtcagaataattttatttcctgtgtcttagaatcaccttttgttattccccaaggcccttggtattttataaatgtattgccaggctattctcagggagtgttatatatcttccatgaaatgtaatagagatttaaaagataagttgtatgtcacata

SEQ ID NO: 134445 - DNA, 163 bp, Homo sapiens
gcgtatctgaacctgggccctgtaggggccatgccccaggcccaccatgaacctggaagggctggagatggttgctgtgctcgtggtcctcgctctgtttgtcaaggtcctggagcagtttggcctctttgagcctgtctccttggaaggtaatccaggtgtc

SEQ ID NO: 134446 - DNA, 302 bp, Homo sapiens
gttctgcagtcctttaatcttgtttttttaacattaccagagaggaaaaatattaatattctgtgatgcaatcaatatcttctctagtaacaataccctgttccacactgttctatacaaacacagattctaccctgaatttcagaaaccactaggaaaataacagataacagagaaattagagctcttaggtttaacttagagccaaaatcaaaagagaagagaattcagagagaggaaggaagaagctgagagggtcgtggtgtagaacacttactttcaggaacacagtgtcccttaga

SEQ ID NO: 134447 - DNA, 320 bp, Homo sapiens
gaaaagtccaacaagattttttaaaaatgaaacttggaacttcacttgaaatgcccaaggatatccaaaaatagttggaaaaagcagggcaatgaaggatttgtcttccccgacaccaaaacttgctacaaaacgacaccatgtaaaagtgtgatattgaggcagtttataactatatatattatcagtgaaacagaaaagtcaatcgatgaaacagatctgagtataaatgagaatttaacatatggttaagttagctctttaaatttattggggaataatggactattatatgaatggtgctaggatttggagacaca

SEQ ID NO: 134448 - DNA, 481 bp, Homo sapiens
caccgtctaaaattgattcattacttagctgactttgcttatcacagtagaggcggcctggctggcatgttatacttcgttgggttttgagaggccctgaaacattccacaacatgaagacaagcttgttcggttcctttgtagtagagtggggaagggggctggtggtaaaggggctctctgcccattagtggggaaggggactgcaacaattcagtttacttctttgagcatttgttgagcatctgctatgtgccaaacactgctataagccaagcagaatgaaatatgacatagtccccctatgaaactgcagtccaggttcccacacaagggtagagcattgtatggacaagtacaattgtgtatcctccctgttccaggaagaaataaatggcatgctgttctcttaatggccttttatactgttcgctagaggccatccctcagtttggggcatttcagctgatgacaaggacag

SEQ ID NO: 134449 - DNA, 883 bp, Homo sapiens
gtgcagggctgagactaacaagacatgattgaatgggggtggacgaacacccagcacctcagaagagacctaaacagatactgcccagagctgcccgtggaccttgtgagggcaccagggctgcctggccgtgtgtgtgaaggggcctagaggtttggttgacatctaggacaaggtgaggacaggacgctggtgcctccttactctcaccgcatgaacagaagcagggagcccagccgagggaggtggaggcttctggagctgatcctgctctgaacgcatcggcactggtgcttggctccaggcgacacgttgtaagagggaccttgacagcaagcatgacccgggcagctgtacccaagggcaggagggacttgacaccacagcgaaggaagagcaggtagaggacgtggtgctgtttagcttggataagcagagtgataacagaccaggagatgtcagaagggtctttatggggtactggcctcgtccctagtggctccagagagcaaggtggcacccatgaacagaagcacaaggaaccagacttggctttgtaatagaagaagaaatttctagtaatcagagctgttcaagaagggaatcagggccaggtacggtggctgggtgtaatcccagcactttggtagtcgtgggcgggtggatcgcttgagctgaggagttcaagaccagcctgggcaacgtggtgaaaccccatctctaccaaaaatacaaaacaattagctgggcgtcgtggcatgcgcctatggtcccagctacttgggaggctgagacacgagaattgcttgagccctagaggcagaggttgcagtgagccgagatcgtgccactgcactccagcctgggtgacagagctagctag

SEQ ID NO: 134450 - DNA, 240 bp, Homo sapiens
ctggtgggggatattgatcatgggagaggctatgcgcgtgtggggatagggacaaggggtatgtgggaaatctctgtaccttcctctcaattttgctttagataattttgcttttgggtactggttcttgggttttaagtaaatatttatatttgtattgactttgccacagtaggtacagcaaatttgctctaaaactgctctaagaaaataaagtcttaaaaaaaagctggtgaggag

SEQ ID NO: 134451 - DNA, 650 bp, Homo sapiens
gttacgtgacttgtgtctaaagctatcagtcagctggagctgtgaaaatcagtttgcatgtgtcaacaatttaatcttctaatatgcttgccaatagaaaactgacactagaattatttttctgtatttactgactagaaagatatggttatcaagtgcactgattgaaaaatctttaaattccagtctttaaatcgggaccatatgtgtgttctttccctagccaaatctatttgtgcattcacccacacatgtgtatacatatacacacacagtacagttacattgatatgtgtttgcgttatatatgtatgtattcacacagagcatgcatatgcctcatgcatattcatgagctttaaatgtgcttatagattaagatataaggatgttggggaagtttccctatctgttaactgagaataatactactgcctaccttccaagcaccttgtaagaattaaattagttaatataagtaaagttcttagaacaaggcctggaacatagtatgtttcctataaatattagcttttattattttagagtatgtcttcattctgtcagcttcaaatgggcttcaaaatttagcttcagaggcagtatggcaaagcctcagaattattgcataattcatttgatgaatttac

SEQ ID NO: 134452 - DNA, 747 bp, Homo sapiens
catatggccttccctagtggtaatctttgagagattaccactatcccaaattttatattaattaatgatttcctttgtagtttcagtacatatttgtatgtctgaatcatattctttagttttaccggtttgcaaaattttgtttaaatgaaatgatatcatatgtattcttctcacttgtttttttcccttcaacattatgttttggagataaacccatgttgtgtgaagctatagttcattagtttccagtgttctacaggatttcattgtacaagtgatcaatactttatttatatgttaccattaatgagcgtttgggctgtttacatttggggtctgctgtgtacatgcttgcaaatatctcctggagaacatatgcaaaagtatataactagaagtagaattactaggttggagggtatatgtgtgtttaggtttaacctgtaatgctctagtgttgtctaaaatagcaacaccagtgtacactctgacatctaaaggggtttctctgctccagtccttatcagtgcttggcattgtcaaagttaattttcaccaatctagtgggtatgaaatggtatctcctggttttaattttcatttccctgataatgtggaatgctcatctttttatatgtttattgccatttatgtttcatctggtgcctctttttgcctttagtgagtcccagttgtctctacaccatctaatcattgggtctttatttccccactgatctgcca

SEQ ID NO: 134453 - DNA, 515 bp, Homo sapiens
gaccagaggctgtctcagaactccagtgagcttcagttttcactgacaggaaagaaactagatccattctctgaagtcagtgcgcctcacttttctcagtgcacttggactcttctctacgtgttctcaccccagtgtcttgtaggttctttcaggacccagcagttctacttggcacctgttaataaaagtgcttcctccagaccctcacagaaggcaaacttgtaccaccacgaatccatcttcaggttgtattggaggcctacttctcagcattaagccccagtcaactaaaatatctgtttttcaccaatagttttgttttgtttcgtttcgttttgtttttgaaatggagtctcactctgttgcccaggctggagtgcagtggtgctatctcagctgactgcaacctctgcctcccaggttcaagcgattctcgtgcctcagcctcctgagtggctgggattacaagtgcccgccaccacgcccggctaatttttttttgtatttttagt

SEQ ID NO: 134454 - DNA, 424 bp, Homo sapiens
gaaatgaagcactacatgctgagcactgtacaaagtaaactatggatgttaatagagtgacagaaagacaatgaatgagaaacatgaaaccagccactggaggaacagtaaatactacaggcaatttagaattaccttcttgaggccgggcgtggtggctcacgcctgtaatcccagcactttgggaggccaaggtgggcggatcatgaggtcaggagatcgagaccatcctggctaacacagtgaaaccccgtctctactaaaaatacaaaaaaattagccgggcgtgatggtgggtgcctgtagtcccagctactcgggaggctgagggaggagaatggcgtgaacccgggaggcggagcttgcagtgagccaagattgtgccactgcactccagcctgggcgacagccagactctgtctca

SEQ ID NO: 134455 - DNA, 647 bp, Homo sapiens
ctatctttcacgacgtgacattggcattttgaataatccaggccagttgttttactttaggtcatcaaatatttacaaatacttactctgtgcccgattctatactagactctagggagacagaggtgagacagactccatccctgtgctcaaagagctgagacaggtagagatatgtgaacatgtatgtggtgaaagcagagcacagaggtactctggcccagcaaagcatgatgagcaaggagtatggtaaaagaagaagtcaagggaggattcctgggggaggcaatgtcagagcagagtctcttcttcagaactatgcatgtggctggatcaaataagaggctggtgaaaactaaaagaggcccagccaggcacagtggctcatgcctgtaatcccagcactttgggaggccaaaagtggatcacctgaggtcgggagttcgagaccagcctggctaacatggtgaaaccctgtctctactaataatacaaaaattagctgggcgtggtggtgcatgcttgtaatcccagctacttgggaggctgaggcaggagaatcgcttgaacctgggaggcggaggttgcagtgagctgagatcgcaccattgcactccagcctggatgacagagcgaaactccatctc

SEQ ID NO: 134456 - DNA, 595 bp, Homo sapiens
tgtggtggtgggtgcctgtagtcccagctactcgggaggctgaggcagaagaatggcgtgaacccaggaggcggagcttgcagtgagccgagattgcaccactgcattccagcattccagcctgggtgacagagcgagactctgtctcaaaaaaaaaataataataataataataattttacaacacctataggctattgatctgagttaataattaaagaaatataaaagaacatggtgctgaagtataatatttcatctactgaatcacaaatcttgaaaagaaaggccaatatccaatacaggtgaaattaatacaactgtaactattttgtggcatgataaatttattacaaaccatttagaacagtttgaatatatttggatataaatataaaaggtttgcatataaatataaaaaacatctaagaagtgttgttattttattcagcaatcttcctagaattaggaaaaaactgaaaagaaaaagaatattaaaaaatagtccctacaataattattataagcagcctacttaataaaaagggtaacggattaataagtaaattatattacatcaactccacatattatg

SEQ ID NO: 134457 - DNA, 444 bp, Homo sapiens
ttacacttttgtgttccatctaccaccatccaccagtctatttattaacttagcaagaggacaagtaaagggccctcttggcttgattttgcttctttctttctgtggaggatatactaagtgcgactttgccctatcctatttggaaatccctaacagaattgagttttctattaaggatccaaaaagaaaaacaaaatgctaatgaagccatcagtcaagggtcacatgccaattaacaataaattttccagaagaaatgaaatccaactagacaaataaagtagagcttatgaaatggttcaataaagaaggaaaattgcatagtcatgagaccagttgtttaggtgcctgaaagagccagtgttaaaatggcatgagattcgtgctagggatgatggtgctttcattgtctttgctttacacatagtagacactcaatag

SEQ ID NO: 134458 - DNA, 577 bp, Homo sapiens
gtgactagaggacccctctgcttcttttcacaactgaattttgcattctctgtctgcatgtgttgcatatttttaaaagacatgtatgagggttgcccttgcaggatggaatgcagtggaattagctagctaattctgccacagtcgttatgtgaattgggcaatgacaacctctttgagcctcagcttcttcatctgtaacgtgataatccttacctcactggggagtgatggagacaaaatgaaatggcatatatagaattgcctagcaaaccatgtctacatattagagatagtcaataaatggcaatttacctcttctttccttaagtcattccctccctctctttccgcctcccatttttttttcagaagctattataaaagccaaggtctcagcacctaaaggcattataaggttctgaggatagggagatgcactttctattgtgaaacactctcagcatccctgggcaagggacaatgtgtgagcaaattggatctatttcttaggaactgaagagggagcagcaggggtacgcgctccaaacgcaacctgggcctaacggttccggta

SEQ ID NO: 134459 - DNA, 473 bp, Homo sapiens
tgccattctgatccaatagacaaataaagtgcttgagaaatcagacttttatcattggccccaaaatgggcctatttcagcttgtcagaagttgtgtgaaagtcagattttgaatttggatttcctcttttggcctgtttttatcagactacagaggcagtgccaaatatgaactgatacggagcccagagcaacatgcatccctgctttcctccttgacgggtgtccaggaacctcctgtgtcctcagtttgcctgcatagaagcctggggaaagggtggtgatgtctgctctgaaggggtgagcagaacagccagagatatacaggtgcaactctatccaccagatgaggggatggcagccccaggacatacgcggaatggtgccgggccaggaaccagtcaggtccacacaggagcatgcataactgtgacattcaaaatgacagccacaatctaacagttaatgctgat

SEQ ID NO: 134460 - DNA, 284 bp, Homo sapiens
caaagtcatcctctttttggtgtaagaacttggggatctaatcatcatttgttcctgaggacctagaattattttctaagaaaggccttattttgcttgcagaaaatctgttagcttcttcttggcaaagataagatggccctctagttagatgaaagccaaaatgatacatccttaccatctgttcatttgatttgtagagaatatggattccgagtatctgtgccagagaatatatccctgaactctctattgtctaactcacatctactgtggaaaatgtg

SEQ ID NO: 134461 - DNA, 648 bp, Homo sapiens
aggtgattccagtatgcacactaccagagactacgtgctttcagttgccaggctcagccatggggagccatgggaagttttagaacaggagaggagcccagtttagagtttaaggaaaatcattctgtaggaggaacagaatgtaatcttgtgtgaaaagggtccggaagccccaagggcagtggcaggatcctgctagggtgatggtgatcagccatcccagtttgctcaagactggggtgtctcctgggacatggaacctgcagtgctaaaaccaagaaagtcctgggcaaacagggatgcttggtcatgctagattctcctgatgtagttctgttttcccagatttttggggagactgatgccacagacttcgcattctagaaattcctaagaaaaggctgtccatctccctgtggtgcattcacctgagtctctgagccctggcaggcgccatctcttctccacccagcagagtgatcctggcctatggaatataatttagcagtaaaaaggaacaaactactgattcacacaataatccggatgaccctcaagaatattagcctgagtaaaagaaaacagatgcaaaagagttacatactgcttaattctatttacatgaagttccagaacaggttcacccaa

SEQ ID NO: 134462 - DNA, 313 bp, Homo sapiens
  misc_feature (5)..(5): n is a, c, g, or t
ctgancctccagactgcttcagactccgatgtcacctacaatctctgtgcacacctcctcctcctccatactagtctcgtaaattctccctgcttaaatacttcttttcattccctcttccctaatcctactgcagtacttcctctcttaaggagccgggaccttgcgtgatgcaacatgacactgtgtggacagttgttttaatagtaccgggggttaggggctgtggcctttctgaggcacagtcgtaggaatgttgataataaaagcgatgataaaggtgttacagctgtaagcaggcacgtcctgggca

SEQ ID NO: 134463 - DNA, 831 bp, Homo sapiens
ggggaaaattgcatgaaccaggaaaggtttattgccactgttattacatgcaaatcaatttgtgttctgctcatttataaccctggagttcagtgcgatagcagtttaaggaaatgagtttgtattgcatcaaaaaatggtaatactaattagttacactgggtattaagtgtgctgtatgacagagctttttaattctgtgattgatagattcatgagtgtcttgcattggtgattggtacagaaaacttttcatacatgtcagccaaaatttttatttggacagcattaactcctggagaccaagcacttcttaaaataaaatacaggcttcggtttcgcctttaaaatgatttgataatattattttcaatatcacaatccagggtcatttaaaacttgtttttaggttgggatcctgaatatttatgaatcatatgatgttgggaaaagtggcaagttgacttatgagtgctattgtctttttacacactcaaataagaacacaaggtgttacacctctttttagagctcctactgctaatccttgtaattttaagtactgtaagctaaaaactcagaggcctgctaggatctctttcaaattgtggcctttaatttaaatcatgccctttaacatttgcgagatttcatctgtcttggatttcattctagtattctaaatttcttcaattctaaatagaagaaccacaagagaactgagtaaatatgcttgaaatgtattgggcttacactgaatatatgatttgttgatatttgtgaccattgtggtctatatccattatacagccagggaagacaaattgatcc

SEQ ID NO: 134464 - DNA, 316 bp, Homo sapiens
ctccgagctggtgtcacttgtaatcactggcttttcagggaacccattttattacggcttcttgagttttcttttgtgaagccacagccagtccttcttggctgactccaagtgtggtcaggaagcagtggtaacccatgtctgtctattgcaagtctacactgccacacaaagcctgaggtacagctgctgctgcgggtctgttgatctgaactgctgatttgaagtggattgagaggatggaacaatagaaggaggatatggctcaggacagtcaagtactggaagaggaaaggtacaaagaggtgttggcact

SEQ ID NO: 134465 - DNA, 326 bp, Homo sapiens
acagtgataagtcagcatccatcaacactgagacaagacccttcaccagcaaaaggatgaagacctgctagaggatcagataatagcattttcatcaataaactatttttaaatttaagtatgtacatgttttagacataatgcaattgtacacaatatgctatggtatagtataaacataacttttatacgtactgggtaacaaaattgtgtgactcactttatattatattcactttattgcagtctggaagcaaacttgaaatatctctgaggtatgcctgtatttatttatttggaaagagttacaatacaaagggggagct

SEQ ID NO: 134466 - DNA, 191 bp, Homo sapiens
ctcaggtgttgctattggtttttggatccacactttgcagagcaagggtttagagctgatgaagcctctgcccagctgccagctcacacattcctgtgaaagagccagggggtgggtctgaggagccccattttacagatgagatgactgaagtaggggtggggaagctcgcttgctggacattgagcatt

SEQ ID NO: 134467 - DNA, 310 bp, Homo sapiens
agcaaatgcaaaactgctcagtagggattcttctggatcccatggtatacagtattctcacagaaaaaagcaacccccttgaagatgagccctcaataaaaatgaaaaacccggccgggcacagtggcttatgtctgtaatcccagcactttgggaggccaaggtgggcagatcatgaggtcaggagctcgagaccagcctgaccaatatggtgaaaccttgtctctgctaaaagtacaaaaattagccaggcatggtggcgcacacctgtaatcccagctactcaggaggctgagcaggagaatcgctt

SEQ ID NO: 134468 - DNA, 335 bp, Homo sapiens
gaaaaataccttgagaatagatactatttaagtgtgctggtgctttcctattattgttagtagtaataataatctcaataaataagtgagttgtatcttttgaagtttctagagggttggaaataaatttcaaggtgccagtgttcatagctctcctttctggtcgttgaaaggaaacaagagcattcataggcttcttttggacctcttgctaggagatgtgtgcgtcatacccagttagtatatgggaaatttaatgaatttgggaatttaaagccatacccaggttttcagtctgccttcctcctcagctcagccgtctcagcactctaccc

SEQ ID NO: 134469 - DNA, 404 bp, Homo sapiens
attagaaaagctgatgtgtcacgacaggttattaaaaagatcaagtaatacacatcccatctccatttgctctttacctttgtggcatcaagagtgattgcttgggtcgggcgcggtggctcacgcctataatcccagcaatttgggaagccgaggtgggcggatcacttgaggtcaggagttcgaggccagcccagccaacatggtgaaaacccttctctgctaaaaatacaaaaattagctgggcatggtggcatgcacctgtaatcccagctactcaggaggctgaggcaggagaatcgcttgaacctgggaggcggaggttgcagtgagctgagatcatgccattgcactccagcctgggcaacagagcgagactccgtctccgtctcaaaaaaaaaaaa

SEQ ID NO: 134470 - DNA, 775 bp, Homo sapiens
ggggcccatcttttagaagcggttccctcttggggaagacctctggagaatcccctctctccttgcctaccaagtgctgtgggtgccaccatccacactgccatggaactcacagaggcagggaagctgctcaggagcttctaggtgaagtttgtgtggagtttggttcacagtagagagtgggttgtgtgtgagtccagggtggtagtaatggtggccctgagagtgtgtaatgcatcctccaccatcatccccaccccaacatctctctagttcttccctctgggccacctcctgcttaagtaacaagcttccttcagcccctgtcaaatgaattaaagaatagctttagaggaattatacaacgtcataaatgaagattagtgggttttttttttttttggtgggggggagttgaatagagtctttattaatgttaatttcacctgcttctttattttaaaattccagggtacatgtgtaggatatacaggtttgttacataggtaaacgtgtgccatggtggtttgtgaagattcgagttttagaatttgggtttctctcttattgttgggactatttaattgcttattagacacccatgaggtgttggcagcatatggaagatgtagggaggtttcctgatcagtggacttatattcttatcaaaaatgacagaacagctgggcgcagtgcctcatgcatgtaaccccagcactttgggaggctgaggcaggcagataacctgaggtcaggagttcaagaccagcctggc

SEQ ID NO: 134471 - DNA, 474 bp, Homo sapiens
cctcagcgcgaccctggagctgggggtgtttttaagtttggggcgaggccggtgaagccgaggcgcgggcggcaaggagcgctggagagcgacggggctcggcctccgcggctgcccaggggcccggggcattccgagaagagaaaaaaagcttgtacttaaatacttcctgcgaagttttgactgagacgctgcaacaattcccgagctgtttcatcgtggcaccttcctggtggcaggtggattagcacattgtctgcaacccaggaggacttggaggaaagtcccagctctgctgattctagctgagtaaccttggcaaaggtcacctcacttctctctgagtcttattttctcatctgtaaaatgaggaggaggaggaggatcatccaaacatcacgggacttcgttaaatcagtgcttcggggcacttagcacagcgcctggcgcaaggtaagcacttgataaatggga

SEQ ID NO: 134472 - DNA, 321 bp, Homo sapiens
aatacttaagtaaaaattaattttattaaaaaagtcacagaagttttgccttaaagatggatcctacaatattacaaaagaacacttgtgttactaaactttgtaattgctccttttcagtatttctttttcaagaaagatcaaggtgagctgagtgaattctggcagtccatgaagtaaagaggggtagaaaggtatgtaggtgaaatggctgaagtagcaggtagggcccagaaaacactgggtttcacagacactattaaaaacaacaaaatttattatattctgtctctgggcataaataatcacacctcaaaagga

SEQ ID NO: 134473 - DNA, 670 bp, Homo sapiens
cgttatccccacttcacagatgaggaaataggttccgaaaagaaacttactgaaggacacacagagggtcgagtcagagatccgctccaagccctatcttactctagtggccaccttctttttacttcacatcccatcataaaatataaaactaaacgaagtgttgatggttgtttaatgcgagcaatgcaggctgccaagtagaacaattaagactctgaaatagctattttgctttgactacttggcttatttaacaatctacagttactagctagatggataattgtacagcctctcaattactttaggttatgtggacataagcctggcgccgtttgattctgactctaatgatatttaatttcatattcctaatagctccttgtctagtgagtatcctagaggatagagaaaggtacactttgaggataacctcagttgcatgtactcaagcggtcttcaggtagcatgcatgccctccctttaaagaaacttagttcaggaaagttaggctgacaaataaatatactaggacatcatggtttcattacagaatgactctctcttttaaggggattcaccaccatttttgtctccttagcaagacccactagcatatttaaaatattattttaatatatgaatataaattatacctctttttaga

SEQ ID NO: 134474 - DNA, 223 bp, Homo sapiens
atgtcatatagttcgaattatacagtatatagccttttaaggttggcttcttttactaagcaaatatccttttaaatacatagctgagcttgcaagaaaacaagggaaatgacatccccagaagtcaaaaatgtagaggaactggaaaatcagcactaagcagggagtgatactctggttgctctgttgtatgtgtctgcatatgcatgcatgtatgcacata

SEQ ID NO: 134475 - DNA, 163 bp, Homo sapiens
cgagatcgcgccactgcactccagcccgggcaacagagcgagactccgtctcaaaaaaataaaaaaaataaagaacattggacaacatcgatcagcacgatctgactgatgcctacagaaccctccacccaaccacagaggaactcatgttcttctttttttg

SEQ ID NO: 134476 - DNA, 758 bp, Homo sapiens
acccattatgtcccccacttttggtatatgtgggctactgtaaggggacttggagagaaaggtcatcagcaatgttgttattatccttatgatacaggatcatgtcaatcaatcaagagaatctaagtaactgatccaaaattaaatttgaattacctagaccatcttttcactaggctgccaccaagagagttaagaaccaggctttctaaacccttcattctaaatcaagggaatgaaagaagaatcatgcctaggaatggtcaaggcagaatcctaaatggtctatatagttcccccacctttcatcttgattattatccaggaagcagccaaagggaatgctctctttcagagacagccaaatccagtgaccaaactgccttactaaggaagaggtgagaagagtagagctggaaattttcctatgttgatttttgaggagatcctttcaatgctcaaactgaccaggtgcctgtgggtgttacagagcacgggagcccattgaataccttgaccagcagctctgtaacatcagaaagctgaaaacatgacacagattaggatcaagaaccatggtagtgtggccagagttggctgattggactggaagagcaacactgtgacctgaaaaggcactgacagcagtgaggcagcactttagcccagaacagttagtaaaagtttcaacttagtcatttttccaggaatgaataaaagcaatgcctcatgtgttgtggcctccttcactactaaaa

SEQ ID NO: 134477 - DNA, 290 bp, Homo sapiens
agctgggactacaggcaagcgccaccacacccagctaatttttgtattttttgtagagatggagtttcaccatgttagccaggctgttctcaatttcttgacctcatgatccgccggcctcggcctcccaaagtgctgggattacaggcgtgagccaccttgcccggcctcaggtcaagttattcttagtgcgctcactcggagactattgaaattctgctgaggatttaactgccatatagttaatatagttaagcaagactaggaaacctgttgagcacaatgcttct

SEQ ID NO: 134478 - DNA, 879 bp, Homo sapiens
gtggatacattaaggttgaggagtctatattagagatgcacatggagatgcagagtagtccattgaataaccaagagtccaggtgagacctcaaggctggagatagagattccatactcaactttcctatatgtttgaagagtttcatgatacactgtagtgggtagagggaagaattgtattttgttattaataacagtcctgaatatcattggctttgacaaaatgaggacttcttttcatgtcaataaatatggatggtggccatcaagggctgatctgagagcttgaaatgtcatacatgccccagcttagttctgtctttattttcttctgtcttagcatgtggcttgcatcttcaatgttgcctcatggtcacaaaagggctgcccagctccaaagtccatattcttagggtggtgagtgggtgctgatggcagcctggtttgaaaatctccactggagagaagacacagcaggattcagatgcaaatgaccagagcactccaagttggaaagaactgctgagcgggtctgtagagcccatcgctctctcctgtctattcatcagctaggctgaagctcctgacagactcacaccagtatcttgctgctccagaaaggtcgaagatggcagttttcccaaactccggcttgcccagatgtctgctcaccctcattcttctccagctgcccaagctggtttcagataggtctctctctctggcctgcagagttaaaacatctcaataaatataaagtataaaaagaagctggagcccaaccacttcggcacatgttcacaggatctcggggctgtgtcacaagccactgggcactcatatctggctgagaataaatctcttgcaatattttaca

SEQ ID NO: 134479 - DNA, 689 bp, Homo sapiens
taaggcatgggagtatacttttgtaacaaatagctgagtctcagccaatcccagtagccgaacttcagtcggcggcagtcaaccctgcagccaagtgatcagactatgttcaaataaggccaactctgagctgtaaccaattaagctgtttctgtgtgtcacttcccttgtggaatggagctcactgaacctctctgatggctgcccgatcgttctgatgcttagggtggtgagtgggtgctgatggcagcctggtttgaaaatctccactggagagaagacacagcaggattcagatgcaaatgaccagagcactccaagttggaaagaactgctgagcgggtctgtagagcccatcgctctctcctgtctattcatcagctaggctgaagctcctgacagactcacaccagtatcttgctgctccagaaaggtcgaagatggcagttttcccaaactccggcttgcccagatgtctgctcaccctcattcttctccagctgcccaagctggtttcagataggtctctctctctggcctgcagagttaaaacatctcaataaatataaagtataaaaagaagctggagcccaaccacttcggcacatgttcacaggatctcggggctgtgtcacaagccactgggcactcatatctggctgagaataaatctcttgcaatattttaca

SEQ ID NO: 134480 - DNA, 275 bp, Homo sapiens
taaggcatgggagtatacttttgtaacaaatagctgagtctcagccaatcccagtagccgaacttcagtcggcggcagtcaaccctgcagccaagtgatcagactatgttcaaataaggccaactctgagctgtaaccaattaagctgtttctgtgtgtcacttcccttgtggaatggagctcactgaacctctctgatggctgcccgatcgttctgatggtttgcaaattgttctttgttcaaattaaaccctgctaaatttaatttgtctaaa

SEQ ID NO: 134481 - DNA, 341 bp, Homo sapiens
ggcaaatccagaatctgcagcgtgggccagcaggctgaagacgcaggagagctaatggtgcagaagctgatgtcagtttcacaaggttgacatgcgacaatcacagaaggtccacgtcagaagaggcttcatcaatccccagtcaatcccaggctctcactggacccaggacaaagaggagaccaaaggaagggctgctccagcagcaccaccagcacccacatgggaatgggggcatccgtccaccacccagcagagatggagggacttgctgcagggcttctgcatcagaggggaccctcatggctctgttgttaccatggtaacaaaggggccacaga

SEQ ID NO: 134482 - DNA, 305 bp, Homo sapiens
cagtaagagaagaagtaacgaacaaaagatatacaactagaaaacaatcaataaaatgacaggaatgagtacttacctatcaataaccctgaatgtaaataaataacattccctattaaaagatatagactggctgaataaaaagaaaaatatgacccaactatatgtggactacgagaaactcatctcaccaataaagacacacatagtcttaaagtgaagggatggaaaaatatattcatgcaaatggaaaccaaaagcaagcaggagtagctatacttacatcagataaaacagacatcaag

SEQ ID NO: 134483 - DNA, 257 bp, Homo sapiens
gggagagagtggaagggcctgttcccagcccatcaaagtggggcgcccttctcatatctacttctcagggaaaacctgcttttctgtcttcattagaaagcaccagggctactgacacaactctacaactctagggaggaaaggatttaaaagtgagtgaactcaataattagataactgcacattaaaccatagtgaggtattctttttcacctttctggttgaattgacaaagatcaaaggctcagaaaatgtgt

SEQ ID NO: 134484 - DNA, 399 bp, Homo sapiens
ccagaggaaaagatagagtacctgtgggatgttctgggagatggtgtcattaaagtttttaccgctgggagcctctcccttcccatctgctgctctttctactatgccgccttgtgttgtgctgacccatccaaagtgcttcataaatttgtgggacgccaaatacaaagcattgtcctcccttctgtggacatattttccttgattgtggggtgcccttgtaagatgctcaacaaaacctggcaagttttgtagtaggcattggcttggaagaaagatggacagccagatgtgttaagggtaggaagagtttgcttatttttggttttgtttagatgaatgtgatcattaaatttataaaaatgtaccagcagtgaccctggtaaccctgtggaaaag

SEQ ID NO: 134485 - DNA, 155 bp, Homo sapiens
gtgctctgcttgtgcacggactctgggactctcaccctgcggagcgtttccctgggggtctgcccacttcctgggaggggcgccaggcctgggtggagcgctctgcggcagagcccagcaccttatacctatgtatgggatagaggtaaaatctt

SEQ ID NO: 134486 - DNA, 381 bp, Homo sapiens
tccagattgaaggacatccaaaaatgcctccccctggaagatattgttgggtccagaaaatatccaggtgaccagagagacacagtgtttggaggtgagggtggattgagggtcagctggtgagtatgtatgttacctacacatctggagattgagttgcctcctgggtccacccacatccatctgccctcttccaattccttcccctcactagacttaaatgatcttttcaagaggcatatctggtcatgtgtttcctttgcttaaatgcttctagaggtttcaactgtttttttaaggtcaaggcagatgtccagaacgtggacccctccatctcgccagactcttgtcatgccatgccttctgggttgcagccagagt

SEQ ID NO: 134487 - DNA, 127 bp, Homo sapiens
cctttgtataccaacttttaaaatttattttttttcttttgtattatctcttctatatgaactttagagtcagcttatggattctgttaagcattttttaattttattggggtttctgtttggattg

SEQ ID NO: 134488 - DNA, 610 bp, Homo sapiens
cagggtttcaccatgttggctgggctgctcttgaactcctgacctcgtgattcgcctacctcggcctcccagaatgctgggattacagacgtgagccaccacgcctggccaatttttgcatttttaatggagatagggtttcaccttgttggccaggctggtcttgaactcctcaagtgatccacctgccttggcctcccaaaataataggattacagcatgagccactgctcctggtctaatttttaaaatcccttcttaaattcacaagtcattcaaacgtgtggattaaacattatctattctgctgatttaacattttaatataaaaaacaggaagctattaatttgtaatgtaatgaaagctatgatgttttgatggagaaagtactatggacacaaaatggaaaaaagcattaaatctcttttcaggggtttagattaaggaaatctccaaattggttttcttttgagctggactttaaaaataggagtagatatatatataggaagcaagcagtagtaaaggcatcagtaactcttggatttgcatgaataattcattctaacaagatcttcagtttaagggaaagggagaagcagggaaaaa

SEQ ID NO: 134489 - DNA, 763 bp, Homo sapiens
cacctgcgtgtgctcacagagcatatggatttttccctgcggtgccttcacttgtggctggaagagccttctctgtgatcctgtgtcctgggtgctctgttggcctccttcttgccaccgaggaagacacggaggctagagagggctcactgaacagtgaaatgattggaacctaaggagcttcagcagaaggtgtcatgatggggctaggctctcccgagggctgtgtggcctcagcgtcttgttgggcagatcctgctccctgacacagcggggctaagagccagcctgtgtcacacacctgtgaattaacatgcctggctgaccctcactggagaagggctacacgtttgtgacgaaagcagaagaggtgtttattgtagaccaaatccaagctgtcattttacttttattagaaattatttgggatttggctcatgcctataatcccagcactttgggaggctgaggtgggagaatcacctgagctcagtcgtttgagactgccttggcaacatggtgagacctcatcttctactcaaatttaaaaaattagccgggcgcagtggcgtgcacctgtactcccagctactcaggaggctcagttgggaggatcacttgagcccaggaggtggaggctgcagtgagcccagatatgctcatgaagcactgtgggtttctcctgcagtgcaccaccgcactccagcctgggtgacggagagagaccccatctcaacaaaaataaaaaagaaaagaaaatggg

SEQ ID NO: 134490 - DNA, 396 bp, Homo sapiens
ttaggcagattaaacgagtcctggccaggtgcgtggctcatgcctgtaattccaccacatgcatgctcttctggagcagaatccctgcctgcctcgtcgcctcaggaagtggcctacaccacccctgtccatctgacccatcttatgggtcagatggactcctgatagggagacttggtgaatacagtctccttccagaggtcgggggtcaggtagctgtaggtcttagaaatggcatcaaaggtggccttggcgaagttgcccagggtggcagtgcagccccgggctgaggtgtagcagtcatcgataccagccatcatgagcagcttcttaggcacaggtgcggagacgatgccagtgcccctgggtgcagggatgaggcgtaccagcacagag

SEQ ID NO: 134491 - DNA, 222 bp, Homo sapiens
aaaagtacacttactgtccaggtcttggtttctaagatcactttccaataaaaggaaccaaggtttcttggagtattggttggttctaggactagaaccaggaaatatacaagagaggaaatatacaagatgagtctggagcatcttatagtgccaaaatgtaaaaagtgcttaaaatcaaacaaaattcttgatatgaatttgccaaaaattaaataaaac

SEQ ID NO: 134492 - DNA, 792 bp, Homo sapiens
agcgagactccatcttaaaacaaacaaacaaacaaaaaaactgggaagaacacaactatgctgtttatcgtgtgtggatttgtcattctggctttgtgcaacagaaaaaccaatattgtacaaataagatgtttattttcctcttgtaatgaaaggtccagagatggggcatgctgggctggtgcagttgtgccaggatattaacaagtattcacctcctttcctctgtctgttcagtggtttttgtacatgtggtcccaaatgattgttatgcctccaggtatttctttcacattctagtcaggaagaaggggaagaggcaaaggctgaaaggcaaaagagactgtgccaaccaaatggtaagcaaatgccttctatggattagaggaacacaagggaaaacaggttgtgaatggctctggggaagccagtcagtaatagtctctgccacagtgtggaacaaagggttcaatgaaaggtgggaaagaaatctttgagttaatgttaagcagttaaaacccacattcttaatgataagtacaatttatgaactataactgtctcccacactgtgtaaagacttttcataatcaaccaaaacacattttgttgactttcatgtccatgtaagtataaagacttaacatttaggataattttttttaagcaaagccttataatgctgatgttgtccttatctttttagataagtgataggaaaacaccacagagaaatttggtatttataatagtgaagagaacagagtcatattagattttacctttgctcta

SEQ ID NO: 134493 - DNA, 235 bp, Homo sapiens
ggatgctctgagcctcagtttccatatttacaatctaccctctgtgacagacttgtgaatgtagctgagctatcatgaatataaatatgttttttaagtacaatcattcttctgatgtaattaacctgaagctggatgtgagcaccttcctatgatgttggaaagcaaagtccctgtattggatgtaaaaggcaagaagatgaaacagaaaggcctgttcacggtgagagggaga

SEQ ID NO: 134494 - DNA, 242 bp, Homo sapiens
tgtgcagatgcaagaggcactgaagaggcagtacaggcaggacctaggttgaccggctgtagagggtgacctggaagagaccagggtgacgtctccctgggggatggttgtactgcagcccacacaccgagaggggatgcgggatcaatcacaaacggtgagactgaagtggccgttggtcccatgggtctggagtttaggagggagacctggagggaagataccaggtcagagcaggtaga

SEQ ID NO: 134495 - DNA, 305 bp, Homo sapiens
ctaccattgaattatttcgtcatgttctatttaattattgctttaattggcattggtgaccacaaataataataaatactattaactggtgtaacagcttcactagtctatttcactgccccatgctgttgtaactgaagcccccagcacaagcattcccagctcgtggtcatctaagacctttgaggtcattcttacatgcattgctagtgttttccatattccttgatggtagccaatttttccttcttaaaataactttcttcattcctagtaagcttcatatgtattttatgtattcttcc

SEQ ID NO: 134496 - DNA, 637 bp, Homo sapiens
gaacattctctacttaataagaaaaacaaagatgactcaacatacaatgtcagaccatcagaagatataaatttagatataaaatataaggaaagaagtacctgcatgaaagaaacacaaaaaccttattatggtgaagttataaaaaaatcattcagtacatttaggtcattaaacattggagccctggaagagctgcctgaagtgaataaacctgctttccttctagaccctgagaaatactttaggaaagaaccagaggaagagcgtccccaaattctggaggccccgtcactttttaaaactttgaaagctgtatttgatgagaaaaacctgtttcccaaggaaattctgcatcatgaacgaaaagccaagcaattatgccaagaaaaaagttgtgaagtgaagaaaaataagaagtaattacaacagaaaaaccttcactgttacataaggtacagatataaaatgcagaaaaagcatcaagaattctgccttttattttattttatatttaaacttcaggaagttttctcttcatgggataatttagtactgcttttatctatcatctgtcaatttctctgtattcttaataaaataaatattgaatacaaaaacaacaaaacaagcccac

SEQ ID NO: 134497 - DNA, 410 bp, Homo sapiens
gcatgcctgtaatcccagctactcaggaggctgaggctggagagtcgcttgaacccaggaggcagaggttgcagtgagccaagatcacgccatcgcactccagcctgggcaacaagaacgaaacttcaaaaaaaaaaaaaggactatgtaggactccaaaagagatattttcagaaaaaaataaaagtgacaacacgagtgataatgttaactatgcagaaaattgtataaaggagatgttttgtaatatgattaagatgttcaaagaaacaaaaaataaggcagttattcactacagtagaggcagaaagctgtacaaaaaaagaaatgtaatcatggttacaaattagttctccagtgaacaatatttatatagccataataataaaaaccctgaatctgaattcagt

SEQ ID NO: 134498 - DNA, 756 bp, Homo sapiens
taatatgttgtttttgaggttcatccatgttgtagcatggagcaggcttcattcctttttatggctgagcagtatctcattgtatggctagactgtgtttttcccattcttagatgaggaatatgaccatggtttatcctttcgtccattggcggacatttggagcatttctaccctttgggattgtggatagagctgccgtgaacatgggtttcatgtatttgtttgggtacctgctttcagttctttggggtctctacttaggagtggaatttctaagtcatcatgtaactgcatttaatctttccttgctttctttagccaactttgctgacagatacctaagtgtagtgtctaggggctgactgccgggagacggagccaggctgtgtagaggggattggctttggggaacttgctttgaccacagcacgtctgtgttgacctggacccacatttgctccaatccacattcctggggagggtggttctcctgtattgactgttttccttcaggtgcttggatgaagctgaaaagacactaagaccttctgtgcctcagatccctgagtgcccgatttgtgggaaaccgtttcttaccttaaagagcagaaccagtcacttgaagcagtgtgctgtgaagatggaggttggcccccagctcctgcttcaggctgtgcggctgcagacagcacagcctgagggtagcagcagcccacccatgttcaggtaagtcgacgaaaaggaagaaaacca

SEQ ID NO: 134499 - DNA, 623 bp, Homo sapiens
gtgaaccatatatgtttcatcatcatggagatcttggagaattatctgagcaccaggttcatatgtattcgatctcagaggcatctattggacaacaaaacactctttcattctttggggtctctacttaggagtggaatttctaagtcatcatgtaactgcatttaatctttccttgctttctttagccaactttgctgacagatacctaagtgtagtgtctaggggctgactgccgggagacggagccaggctgtgtagaggggattggctttggggaacttgctttgaccacagcacgtctgtgttgacctggacccacatttgctccaatccacattcctggggagggtggttctcctgtattgactgttttccttcaggtgcttggatgaagctgaaaagacactaagaccttctgtgcctcagatccctgagtgcccgatttgtgggaaaccgtttcttaccttaaagagcagaaccagtcacttgaagcagtgtgctgtgaagatggaggttggcccccagctcctgcttcaggctgtgcggctgcagacagcacagcctgagggtagcagcagcccacccatgttcaggtaagtcgacgaaaaggaagaaaacca

SEQ ID NO: 134500 - DNA, 1252 bp, Homo sapiens
gtgaaccatatatgtttcatcatcatggagatcttggagaattatctgagcaccaggttcatatgtattcgatctcagaggcatctattggacaacaaaacactctttcagttgtgaactttatttatttattattattattttttgagacagagttttgctcttgttgcccaggttagagtgcagtggcacgatctcggctcactgcaatctccgcctcccaggttcaagcgattctcttgcctctgcctcccgagtagctgggattacaggcatctgctaccacgcctggccaattttttgtattttcagttgaaacgaggtttcaccatattggccaggctggtctcgaacttctgacctcaggtgatccaccccccgcctcgtcctccaaaagagctgggattacaagtgtgagccaccgcgcccggcccagttgtggactttaacagagggaagctttaaacatgtttaaccacaggcccaatttgaacaaagatacttcaatcattatagagaggaaaacagtactttttgttcaattgtgcaaactctccaagtatctaatggagaagtagagaagaaccctaatgaaactgagtgtgaatgaggctcagctaggcttctacttgggttcactttctcatctgtctgcctgtcctgggattgaccctcgctcctctgaagaccagcctgaaagccttaaaactggtcagatgatggatgagtctgatgaggactttaaagaactctgcgctagctttttccaaagggtgaaaaaacatggaatcaaggaagtgtcaggagaaaggaagacacaaaaggctgcctcaaacggcactcagataagaagcaaattgaaaaggaccaaacaaactgctaccaagaccaaaacccttcaaggccctgcagagaagaaacctccgtctggcagccaggcccctaggactaaaaagcaaagggtaaccaaatggcaagcaagtgaaccggcccactctgtgaatggggaggggggtgtgcttgcctctgctccagatccacctgtgctccgggaaacagcacaaaacacccagacgggtaaccagcaagaaccatcgccaaacctttccagagagaaaaccagagagaatgtgcccaacagcgactcccagcctcctccttcctgtttgacaacagcagtgccaagtccctccaaaccccgcacagcacaattggtcctacagcgaatgcagcagttcaagagagcagaccc

SEQ ID NO: 134501 - DNA, 235 bp, Homo sapiens
aaactagttgataaaggactcttgaaacttgcgtctaacctgtatctggtagaaaagtcttttatttctccagctacaacagatggttgtgaatattttcctccttgccagagaatgtgcccaacagcgactcccagcctcctccttcctgtttgacaacagcagtgccaagtccctccaaaccccgcacagcacaattggtcctacagcgaatgcagcagttcaagagagcaga

SEQ ID NO: 134502 - DNA, 177 bp, Homo sapiens
gtggttatgatatttagtggcaattaacttgaactaatgaattcatattggaattgatactaattttgctacttattaccgttactattatcctgttatatatatctatatataggctgtgttatgtatacctatattctatccatatggagatatttcagtaatttaacaatggta

SEQ ID NO: 134503 - DNA, 316 bp, Homo sapiens
aaaggccagtgaagggctgtgcacatgtccagagctgtgtgcatactcaggagacgtgaaaaggccctaaacaattacctgagattgaccctgaggttctatgcaagtggcaaatgaaggctaagacagagttataaactgccttcctgaacattgaaaatgcaccccagtatacacacagggactcttagctacagcaaaggtctgtgattctggtatttaaggaaatatctgtccaaccattatctgactactaacctaatgaagcagtcacttcagtggccacacatgacaaagagtattactttacagaatt

SEQ ID NO: 134504 - DNA, 634 bp, Homo sapiens
gtcaataacctgactaagataattgatgtgagcttaagcacaaaggaggcatggctgagctccatggagaaggactgaggtatgatttttaaaatgaggcttataactgctgacatttttataagagtcaaactgaccccagtggagctcatcccacactgcatggggtctatctgcttaaacaagcattctgttgagttcctgatttttatatcctgacagagaagaaatagctttgtcctgagaaattccattggtaagaatcaatagttacctgcttcttctatcaaactttaatatgattcatgtataatgttttgatttgagctggtctgcagcctggtaagcctgccaagttgccttcaagatataagctcagataattacatgagttgacctattgaattatttcagcaaatttgaataccgctgaaatttgtatgtggaaaatgaagatttggatcttggcatactcgatattggattgctattgatttcagaaggaacagatcagcaggttcagttatgtcgtgtggtctcagaccattagcagaggaaaggattcctgaattcccatctacttattgttgtcagggtccagtgcagagcatttacgtatgataaaggggaggag

SEQ ID NO: 134505 - DNA, 550 bp, Homo sapiens
aggctgtgttaattatgcctcaaattcatagttccttctgaatatcctgttacctagggactaaattgtaaagttaacctttaataaagtttgaataacatagagaagaagagggaaggaattgatttataaacttgcccgtttccctgtaataaggaagaaaatatgtatagctgctgtagaccttgcttctgtaactggttgagagattgtagttcatatttataactacttctgctgtacattccatgtttcctttgttctcattcaagatctcagctggtggggtaacctaaatcttcattaataaagaatatggctttgggaggctgaggcgggtggatcacgaggtcaggagatcgagaccatcctggctagcacagtgaaaccccgtttctactaaaaatataaaaaattagctgggcgtggtggcgggtacctgtagtcccagctactcaggaggctgaggcaggagaatcgcttcaacccaggaggcagacgtggcagtgagctgagatcacaccactgcactccagcctgggtgacagag

SEQ ID NO: 134506 - DNA, 740 bp, Homo sapiens
cctttgttgaggtggaagtggtggatgtcaatgaaaacctccacactccctatttcccagactttgctgttgttggatctgtaaaggaaaactcacgcattggaacaagcgtgctgcaggtgactgctcgagatgaagactccggaagggatggagagatccagtactccatcagggatggcagtggtcttggaaggttcagtatagacgacgagagtggggtcatcactgccgcagacattcttgatcgggagacaatggggtcatactggctaacagtgtatgccacagacaggggcgttgttccactctactccaccattgaggtctacattgaagttgaagatgtgaatgacaatgccccgctgacctcagaacctatatattatcctgttgtcatggaaaactctccaaaggacgtatctgtcattcagatccaggctgaagatcctgactccagttccaatgaaaaactgacatacaggattacaagtggaaatcctcagaatttttttgccatcaatatcaaaacagggtccttgctctgttgcccaggtggaaatgcaggggcatgatcgtaagtcactgcaatctcgaactcctggattcaagggataaccctggctacaggctcttgaagtagctgggactattggcattgggcccgcatggccaggtaatttttcaaataggttggggaggcctcctattgtttgccaacggggttgatctcctgggcc

SEQ ID NO: 134507 - DNA, 453 bp, Homo sapiens
cggtgactctaaggatccccgcttgcttcctcttcagcccagtgggaacagttcttctgtctaaccttgcggggttgctgttacagtccagagcaagactggatgtggacgtaaggtgggagagttgcagcctgcacccctgaaattcttaaacacccaggcttgttcatgacacaccatcatgcacacactcattgtgtgcatggccagggagagggtgagggagctgggtgacagcggctgcctccctattctgatggactcagtccacaccgatgtggactcacaccctctatgccctgaacgaagaccattagtgcagacgtggatggggccttatggctcacattatcctgagagctgggcagcataacggcgtgcggtatgttcacgagcaaatgggggcctggggagaaggagtgccctcctgaaggccacatggccaagaagcag

SEQ ID NO: 134508 - DNA, 2952 bp, Homo sapiens
ccggggtgctcaaagtacctgtagctgcggcgctgaggtcggaacgtctgcgtgtgtgcgggctggttttgtggcggctgctgctagagctggagcatttgccgggttggtggctcctgcacatttttacagttctccagtccttctctttcgtcagtataaaagattaaactctacagaagaatgcaatcaagtgatggcttttcctttagaatttgaatatggaggctacaggaacagatgaagttgacaagctaaaaaccaaatttatatctgcttggaacaacatgaaatatagttgggtgttgaaaacaaagacgtattttagtagaaattctcctgtattattgcttggaaaatgttaccattttaaatatgaagatgaagataaaacgttacctgcagagtcgggatgtacaatagaggatcacgtaattgcaggaaatgtagaagaatttcgtaaagatttcatttctagaatatggctgacctacagggaagaattccctcaaatagaaggctcagctttgacaacagactgtgggtggggctgcacattgagaactggccagatgctcttggctcaaggactcatactacactttcttggtagagcttggacctggcctgatgctttgaatattgaaaattcagactctgaatcatggacttcccacactgtcaaaaaatttactgcatcatttgaagcatcactttcaggggaaagagaattcaaaaccccaacaatttctctgaaggaaacaattgggaaatattctgatgatcatgaaatgcgaaatgaagtttatcataggaaaatcatctcttggtttggtgattcccccttggctctttttggcttacatcaactaatagaatatggaaagaagtctgggaaaaaagcaggagattggtatggaccagctgtggttgctcacattttaagaaaagcagttgaagaagcaaggcatcctgatttacaaggaataactatttatgttgcacaagattgtacagtttacaattctgatgtaattgataaacagagtgcttccatgacttctgataatgcagatgacaaagctgttattattctagttcctgttagacttggtggagaaagaaccaacaccgactacttagaatttgtgaagggtattttaagcctggaatattgtgtgggtattattggtggcaaacctaaacagtcatattactttgctggatttcaagatgacagtttgatttacatggatcctcattactgccaatcttttgtagatgtcagcataaaggatttccctcttgagacattccactgcccttctcccaaaaagatgtcttttcgaaaaatggatcccagctgtacaataggattttactgtcgaaatgttcaggacttcaaacgagcttctgaagaaatcaccaagatgctgaaattttcttctaaggagaaatatcccttatttacttttgtaaatggtcattccagagactatgattttacatctactacaaccaatgaagaagaccttttttcagaggatgaaaagaaacaattaaaaagatttagcacggaagagtttgtcttgctttaaagattagcacatttgtgcttgataagaagaattccattgaaaggggaaaaatgaagagaaacaagtatatctgaaatgtttattttcacaaatatcttaattttatatgttctttaaaaaagaacatttgaaaatataacagttaaagatatttttctaaaagagaaatgatttaatgaatcttgctttctaataaataaattgagtgattctggttgcattcctatttccctaagatctactagtgataattctaccttaactgtaagccttttagtcttcaaagtcttccacctgagcccattgttctcatggaggttttgtgatattaaccctcccccaaagactgggatcaccaaatagtttcaaaattctcagtttgtactgaagaccagaagatcagagaaggaaactttaatgctgtctagcctcctgctattaatgcaatcaaagaatacttttgcatatgtcttgataattaaatagtatttgttaactgtgatatgcatacacttatataagcagaattatgagttaaagtaatacttagcaatatgattttataatggctcctcattatgcttgctgttgaaccttttatgaggagtgaatataaagtattggttttccctcacaaatttaaagattatgttattaatactattataactgcatcaatcaagtcagataaaggcaactataaaatagtagtagtgtttgtttcctatctcaagggcgaaattttatgggaactcaatttattatgcagtttttaagtttaaaataccaagaaagatgtcactagattctcttctatgtgatttttgttttttatataaagcagtgtagtggtgtttagaagctgaggccacctgtaaggcaaatctgccttaagtgtattatgtgttacttaaaggcaaatttgtgatctaaaagtacaagagtgatttttgagctaggattataaaatacataataaagatgtgagaagataaaatgcttttgttttggttttaatgttgggattattttaatcctttcatttgaaaaatcagtgtctcaaatgaattctgttcatttataataaatgcatatattgctctgaaaacaatattaatttttttaagtggagctttcatgtttcagtgtagaaacgtgacttataaagacataaaattgtgtatcatctaaagtcattgatctcttccatcagaaaacctgtttgtttagagttgcatgtaaagctgaaagagagggtgggcggattgttttagtatacctgatgagaaaaatcaggtttgacatttctcagtgaagattacttactgagttgaaataaatagtctgaaatcta

SEQ ID NO: 134509 - DNA, 572 bp, Homo sapiens
ctataaataaacaatacaatgctaatcattttttgtcttttagccagaacaggcaaaggagtagcactgggtgaatgtaaatgaaagaagctaacaggagaggttcagggctaaaacagtagatttgtcgtgtggtcttagtgtgcactattgcatccaataaggaattcttctatactttctgttacagatgctgaaattttcttctaaggagaaatatcccttatttacttttgtaaatggtcattccagagactatgattttacatctactacaaccaatgaagaagaccttttttcagaggatgaaaagaaacaattaaaaagatttagcacggaagagtttgtcttgctttaaagattagcacatttgtgcttgataagaagaattccattgaaaggggaaaaatgaagagaaacaagtatatctgaaatgtttattttcacaaatatcttaattttatatgttctttaaaaaagaacatttgaaaatataacagttaaagatatttttctaaaagagaaatgatttaatgaatcttgctttctaataaataaattgagtgattctg

SEQ ID NO: 134510 - DNA, 433 bp, Homo sapiens
atgaagtataatgagttttataagataaatataatacacagaaagctgactatgctgaaattttcttctaaggagaaatatcccttatttacttttgtaaatggtcattccagagactatgattttacatctactacaaccaatgaagaagaccttttttcagaggatgaaaagaaacaattaaaaagatttagcacggaagagtttgtcttgctttaaagattagcacatttgtgcttgataagaagaattccattgaaaggggaaaaatgaagagaaacaagtatatctgaaatgtttattttcacaaatatcttaattttatatgttctttaaaaaagaacatttgaaaatataacagttaaagatatttttctaaaagagaaatgatttaatgaatcttgctttctaataaataaattgagtgattctg

SEQ ID NO: 134511 - DNA, 424 bp, Homo sapiens
gttacccgcctccgcggcgtctctgtgagagaagtaagaaggttacagctacaattcttctttgagaaatatcccttatttacttttgtaaatggtcattccagagactatgattttacatctactacaaccaatgaagaagaccttttttcagaggatgaaaagaaacaattaaaaagatttagcacggaagagtttgtcttgctttaaagattagcacatttgtgcttgataagaagaattccattgaaaggggaaaaatgaagagaaacaagtatatctgaaatgtttattttcacaaatatcttaattttatatgttctttaaaaaagaacatttgaaaatataacagttaaagatatttttctaaaagagaaatgatttaatgaatcttgctttctaataaataaattgagtgattctg

SEQ ID NO: 134512 - DNA, 1687 bp, Homo sapiens
cccagagggagtggaaaggctttgaaagtcagtataaaagattaaactctacagaagaatgcaatcaagtgatggcttttcctttagaatttgaatatggaggctacaggaacagatgaagttgacaagctaaaaaccaaatttatatctgcttggaacaacatgaaatatagttgggtgttgaaaacaaagacgtattttagtagaaattctcctgtattattgcttggaaaatgttaccattttaaatatgaagatgaagataaaacgttacctgcagagtcgggatgtacaatagaggatcacgtaattgcaggaaatgtagaagaatttcgtaaagatttcatttctagaatatggctgacctacagggaagaattccctcaaatagaaggctcagctttgacaacagactgtgggtggggctgcacattgagaactggccagatgctcttggctcaaggactcatactacactttcttggtagagcttggacctggcctgatgctttgaatattgaaaattcagactctgaatcatggacttcccacactgtcaaaaaatttactgcatcatttgaagcatcactttcaggggaaagagaattcaaaaccccaacaatttctctgaaggaaacaattgggaaatattctgatgatcatgaaatgcgaaatgaagtttatcataggaaaatcatctcttggtttggtgattcccccttggctctttttggcttacatcaactaatagaatatggaaagaagtctgggaaaaaagcaggagattggtatggaccagctgtggttgctcacattttaagaaaagcagttgaagaagcaaggcatcctgatttacaaggaataactatttatgttgcacaagattgtacagtttacaattctgatgtaattgataaacagagtgcttccatgacttctgataatgcagatgacaaagctgttattattctagttcctgttagacttggtggagaaagaaccaacaccgactacttagaatttgtgaagggtattttaagcctggaatattgtgtgggtattattggtggcaaacctaaacagtcatattactttgctggatttcaagatgacagtttgatttacatggatcctcattactgccaatcttttgtagatgtcagcataaaggatttccctcttgagacattccactgcccttctcccaaaaagatgtcttttcgaaaaatggatcccagctgtacaataggattttactgtcgaaatgttcaggacttcaaacgagcttctgaagaaatcaccaagatgctgaaattttcttctaaggagaaatatcccttatttacttttgtaaatggtcattccagagactatgattttacatctactacaaccaatgaagaagaccttttttcagaggatgaaaagaaacaattaaaaagatttagcacggaagagtttgtcttgctttaaagattagcacatttgtgcttgataagaagaattccattgaaaggggaaaaatgaagagaaacaagtatatctgaaatgtttattttcacaaatatcttaattttatatgttctttaaaaaagaacatttgaaaatataacagttaaagatatttttctaaaagagaaatgatttaatgaatcttgctttctaataaataaattgagtgattctg

SEQ ID NO: 134513 - DNA, 2114 bp, Homo sapiens
ccggggtgctcaaagtacctgtagctgcggcgctgaggtcggaacgtctgcgtgtgtgcgggctggttttgtggcggctgctgctagagctggagcatttgccggtcagtataaaagattaaactctacagaagaatgcaatcaagtgatggcttttcctttagaatttgaatatggaggctacaggaacagatgaagttgacaagctaaaaaccaaatttatatctgcttggaacaacatgaaatatagttgggtgttgaaaacaaagacgtattttagtagaaattctcctgtattattgcttggaaaatgttaccattttaaatatgaagatgaagataaaacgttacctgcagagtcgggatgtacaatagaggatcacgtaattgcaggaaatgtagaagaatttcgtaaagatttcatttctagaatatggctgacctacagggaagaattccctcaaatagaaggctcagctttgacaacagactgtgggtggggctgcacattgagaactggccagatgctcttggctcaaggactcatactacactttcttggtagagcttggacctggcctgatgctttgaatattgaaaattcagactctgaatcatggacttcccacactgtcaaaaaatttactgcatcatttgaagcatcactttcaggggaaagagaattcaaaaccccaacaatttctctgaaggaaacaattgggaaatattctgatgatcatgaaatgcgaaatgaagtttatcataggaaaatcatctcttggtttggtgattcccccttggctctttttggcttacatcaactaatagaatatggaaagaagtctgggaaaaaagcaggagattggtatggaccagctgtggttgctcacattttaagaaaagcagttgaagaagcaaggcatcctgatttacaaggaataactatttatgttgcacaagattgtacagtttacaattctgatgtaattgataaacagagtgcttccatgacttctgataatgcagatgacaaagctgttattattctagttcctgttagacttggtggagaaagaaccaacaccgactacttagaatttgtgaagggtattttaagcctggaatattgtgtgggtattattggtggcaaacctaaacagtcatattactttgctggatttcaagatgacagtttgatttacatggatcctcattactgccaatcttttgtagatgtcagcataaaggatttccctcttgagacattccactgcccttctcccaaaaagatgtcttttcgaaaaatggatcccagctgtacaataggattttactgtcgaaatgttcaggacttcaaacgagcttctgaagaaatcaccaagatgctgaaattttcttctaaggagaaatatcccttatttacttttgtaaatggtcattccagagactatgattttacatctactacaaccaatgaagaagaccttttttcagaggatgaaaagaaacaattaaaaagatttagcacggaagagtttgtcttgctttaaagattagcacatttgtgcttgataagaagaattccattgaaaggggaaaaatgaagagaaacaagtatatctgaaatgtttattttcacaaatatcttaattttatatgttctttaaaaaagaacatttgaaaatataacagttaaagatatttttctaaaagagaaatgatttaatgaatcttgctttctaataaataaattgagtgattctggttgcattcctatttccctaagatctactagtgataattctaccttaactgtaagccttttagtcttcaaagtcttccacctgagcccattgttctcatggaggttttgtgatattaaccctcccccaaagactgggatcaccaaatagtttcaaaattctcagtttgtactgaagaccagaagatcagagaaggaaactttaatgctgtctagcctcctgctattaatgcaatcaaagaatacttttgcatatgtcttgataattaaatcatattgctaagtattactttaactcataattctgcttatataagtgtatgcagatcacagttaacaaatactatttaag

SEQ ID NO: 134514 - DNA, 1408 bp, Homo sapiens
ccggggtgctcaaagtacctgtagctgcggcgctgaggtcggaacgtctgcgtgtgtgcgggctggttttgtggcggctgctgctagagctggagcatttgccggtcagtataaaagattaaactctacagaagaatgcaatcaagtgatggcttttcctttagaatttgaatatggaggctacaggaacagatgaagttgacaagctaaaaaccaaatttatatctgcttggaacaacatgaaatatagttgggtgttgaaaacaaagacgtattttagtagaaattctcctgtattattgcttggaaaatgttaccattttaaatatgaagatgaagataaaacgttacctgcagagtcgggatgtacaatagaggatcacgtaattgcaggaaatgtagaagaatttcgtaaagatttcatttctagaatatggctgacctacagggaagaattccctcaaatagaaggctcagctttgacaacagactgtgggtggggctgcacattgagaactggccagatgctcttggctcaaggactcatactacactttcttggtagagcttggacctggcctgatgctttgaatattgaaaattcagactctgaatcatggacttcccacactgtcaaaaaatttactgcatcatttgaagcatcactttcaggggaaagagaattcaaaaccccaacaatttctctgaaggaaacaattgggaaatattctgatgatcatgaaatgcgaaatgaagtttatcataggaaaatcatctcttggtttggtgattcccccttggctctttttggcttacatcaactaatagaatatggaaagaagtctgggaaaaaagcaggagattggtatggaccagctgtggttgctcacattttaagaaaagcagttgaagaagcaaggcatcctgatttacaaggaataactatttatgttgcacaagattgtacagtttacaattctgatgtaattgataaacagagtgcttccatgacttctgataatgcagatgacaaagctgttattattctagttcctgttagacttggtggagaaagaaccaacaccgactacttagaatttgtgaagggtattttaagcctggaatattgtgtgggtattattggtggcaaacctaaacagtcatattactttgctggatttcaagatgacagtttgatttacatggatcctcattactgccaatcttttgtagatgtcagcataaaggatttccctcttgaggtcattttgtgatccagtattttaattcagaaaaatttgagaatacataaatgaaacatgtaattattacatggttttgattgttttcccagttggtgcttttacagactaaagtaattttacagaataaaataacttaaatcact

SEQ ID NO: 134515 - DNA, 1712 bp, Homo sapiens
ctataaataaacaatacaatgctaatcattttttgtcttttagccagaacaggcaaaggagtagcactgggtgaatgtaaatgaaagaagctaacaggagaggttcagggctaaaacagtagatttgtcgtgtggtcttagtgtgcactattgcatccaataaggaattcttctatactttctgttacagatgctgaaattttcttctaaggagaaatatcccttatttacttttgtaaatggtcattccagagactatgattttacatctactacaaccaatgaagaagaccttttttcagaggatgaaaagaaacaattaaaaagatttagcacggaagagtttgtcttgctttaaagattagcacatttgtgcttgataagaagaattccattgaaaggggaaaaatgaagagaaacaagtatatctgaaatgtttattttcacaaatatcttaattttatatgttctttaaaaaagaacatttgaaaatataacagttaaagatatttttctaaaagagaaatgatttaatgaatcttgctttctaataaataaattgagtgattctggttgcattcctatttccctaagatctactagtgataattctaccttaactgtaagccttttagtcttcaaagtcttccacctgagcccattgttctcatggaggttttgtgatattaaccctcccccaaagactgggatcaccaaatagtttcaaaattctcagtttgtactgaagaccagaagatcagagaaggaaactttaatgctgtctagcctcctgctattaatgcaatcaaagaatacttttgcatatgtcttgataattaaatagtatttgttaactgtgatatgcatacacttatataagcagaattatgagttaaagtaatacttagcaatatgattttataatggctcctcattatgcttgctgttgaaccttttatgaggagtgaatataaagtattggttttccctcacaaatttaaagattatgttattaatactattataactgcatcaatcaagtcagataaaggcaactataaaatagtagtagtgtttgtttcctatctcaagggcgaaattttatgggaactcaatttattatgcagtttttaagtttaaaataccaagaaagatgtcactagattctcttctatgtgatttttgttttttatataaagcagtgtagtggtgtttagaagctgaggccacctgtaaggcaaatctgccttaagtgtattatgtgttacttaaaggcaaatttgtgatctaaaagtacaagagtgatttttgagctaggattataaaatacataataaagatgtgagaagataaaatgcttttgttttggttttaatgttgggattattttaatcctttcatttgaaaaatcagtgtctcaaatgaattctgttcatttataataaatgcatatattgctctgaaaacaatattaatttttttaagtggagctttcatgtttcagtgtagaaacgtgacttataaagacataaaattgtgtatcatctaaagtcattgatctcttccatcagaaaacctgtttgtttagagttgcatgtaaagctgaaagagagggtgggcggattgttttagtatacctgatgagaaaaatcaggtttgacatttctcagtgaagattacttactgagttgaaataaatagtctgaaatcta

SEQ ID NO: 134516 - DNA, 1566 bp, Homo sapiens
tttttttttccttcctttctccacccggccaagaaaaaaaggttatgctgaaattttcttctaaggagaaatatcccttatttacttttgtaaatggtcattccagagactatgattttacatctactacaaccaatgaagaagaccttttttcagaggatgaaaagaaacaattaaaaagatttagcacggaagagtttgtcttgctttaaagattagcacatttgtgcttgataagaagaattccattgaaaggggaaaaatgaagagaaacaagtatatctgaaatgtttattttcacaaatatcttaattttatatgttctttaaaaaagaacatttgaaaatataacagttaaagatatttttctaaaagagaaatgatttaatgaatcttgctttctaataaataaattgagtgattctggttgcattcctatttccctaagatctactagtgataattctaccttaactgtaagccttttagtcttcaaagtcttccacctgagcccattgttctcatggaggttttgtgatattaaccctcccccaaagactgggatcaccaaatagtttcaaaattctcagtttgtactgaagaccagaagatcagagaaggaaactttaatgctgtctagcctcctgctattaatgcaatcaaagaatacttttgcatatgtcttgataattaaatagtatttgttaactgtgatatgcatacacttatataagcagaattatgagttaaagtaatacttagcaatatgattttataatggctcctcattatgcttgctgttgaaccttttatgaggagtgaatataaagtattggttttccctcacaaatttaaagattatgttattaatactattataactgcatcaatcaagtcagataaaggcaactataaaatagtagtagtgtttgtttcctatctcaagggcgaaattttatgggaactcaatttattatgcagtttttaagtttaaaataccaagaaagatgtcactagattctcttctatgtgatttttgttttttatataaagcagtgtagtggtgtttagaagctgaggccacctgtaaggcaaatctgccttaagtgtattatgtgttacttaaaggcaaatttgtgatctaaaagtacaagagtgatttttgagctaggattataaaatacataataaagatgtgagaagataaaatgcttttgttttggttttaatgttgggattattttaatcctttcatttgaaaaatcagtgtctcaaatgaattctgttcatttataataaatgcatatattgctctgaaaacaatattaatttttttaagtggagctttcatgtttcagtgtagaaacgtgacttataaagacataaaattgtgtatcatctaaagtcattgatctcttccatcagaaaacctgtttgtttagagttgcatgtaaagctgaaagagagggtgggcggattgttttagtatacctgatgagaaaaatcaggtttgacatttctcagtgaagattacttactgagttgaaataaatagtctgaaatcta

SEQ ID NO: 134517 - DNA, 1584 bp, Homo sapiens
ccgcgctctgtaagcaattaacgtttgtctgacccgtgacgaagtgtgagaggcggtctactatgctgaaattttcttctaaggagaaatatcccttatttacttttgtaaatggtcattccagagactatgattttacatctactacaaccaatgaagaagaccttttttcagaggatgaaaagaaacaattaaaaagatttagcacggaagagtttgtcttgctttaaagattagcacatttgtgcttgataagaagaattccattgaaaggggaaaaatgaagagaaacaagtatatctgaaatgtttattttcacaaatatcttaattttatatgttctttaaaaaagaacatttgaaaatataacagttaaagatatttttctaaaagagaaatgatttaatgaatcttgctttctaataaataaattgagtgattctggttgcattcctatttccctaagatctactagtgataattctaccttaactgtaagccttttagtcttcaaagtcttccacctgagcccattgttctcatggaggttttgtgatattaaccctcccccaaagactgggatcaccaaatagtttcaaaattctcagtttgtactgaagaccagaagatcagagaaggaaactttaatgctgtctagcctcctgctattaatgcaatcaaagaatacttttgcatatgtcttgataattaaatagtatttgttaactgtgatatgcatacacttatataagcagaattatgagttaaagtaatacttagcaatatgattttataatggctcctcattatgcttgctgttgaaccttttatgaggagtgaatataaagtattggttttccctcacaaatttaaagattatgttattaatactattataactgcatcaatcaagtcagataaaggcaactataaaatagtagtagtgtttgtttcctatctcaagggcgaaattttatgggaactcaatttattatgcagtttttaagtttaaaataccaagaaagatgtcactagattctcttctatgtgatttttgttttttatataaagcagtgtagtggtgtttagaagctgaggccacctgtaaggcaaatctgccttaagtgtattatgtgttacttaaaggcaaatttgtgatctaaaagtacaagagtgatttttgagctaggattataaaatacataataaagatgtgagaagataaaatgcttttgttttggttttaatgttgggattattttaatcctttcatttgaaaaatcagtgtctcaaatgaattctgttcatttataataaatgcatatattgctctgaaaacaatattaatttttttaagtggagctttcatgtttcagtgtagaaacgtgacttataaagacataaaattgtgtatcatctaaagtcattgatctcttccatcagaaaacctgtttgtttagagttgcatgtaaagctgaaagagagggtgggcggattgttttagtatacctgatgagaaaaatcaggtttgacatttctcagtgaagattacttactgagttgaaataaatagtctgaaatcta

SEQ ID NO: 134518 - DNA, 1579 bp, Homo sapiens
agtttggttttttgattgacgcaattgttttttttgtgtatttttatatatgtcattatgctgaaattttcttctaaggagaaatatcccttatttacttttgtaaatggtcattccagagactatgattttacatctactacaaccaatgaagaagaccttttttcagaggatgaaaagaaacaattaaaaagatttagcacggaagagtttgtcttgctttaaagattagcacatttgtgcttgataagaagaattccattgaaaggggaaaaatgaagagaaacaagtatatctgaaatgtttattttcacaaatatcttaattttatatgttctttaaaaaagaacatttgaaaatataacagttaaagatatttttctaaaagagaaatgatttaatgaatcttgctttctaataaataaattgagtgattctggttgcattcctatttccctaagatctactagtgataattctaccttaactgtaagccttttagtcttcaaagtcttccacctgagcccattgttctcatggaggttttgtgatattaaccctcccccaaagactgggatcaccaaatagtttcaaaattctcagtttgtactgaagaccagaagatcagagaaggaaactttaatgctgtctagcctcctgctattaatgcaatcaaagaatacttttgcatatgtcttgataattaaatagtatttgttaactgtgatatgcatacacttatataagcagaattatgagttaaagtaatacttagcaatatgattttataatggctcctcattatgcttgctgttgaaccttttatgaggagtgaatataaagtattggttttccctcacaaatttaaagattatgttattaatactattataactgcatcaatcaagtcagataaaggcaactataaaatagtagtagtgtttgtttcctatctcaagggcgaaattttatgggaactcaatttattatgcagtttttaagtttaaaataccaagaaagatgtcactagattctcttctatgtgatttttgttttttatataaagcagtgtagtggtgtttagaagctgaggccacctgtaaggcaaatctgccttaagtgtattatgtgttacttaaaggcaaatttgtgatctaaaagtacaagagtgatttttgagctaggattataaaatacataataaagatgtgagaagataaaatgcttttgttttggttttaatgttgggattattttaatcctttcatttgaaaaatcagtgtctcaaatgaattctgttcatttataataaatgcatatattgctctgaaaacaatattaatttttttaagtggagctttcatgtttcagtgtagaaacgtgacttataaagacataaaattgtgtatcatctaaagtcattgatctcttccatcagaaaacctgtttgtttagagttgcatgtaaagctgaaagagagggtgggcggattgttttagtatacctgatgagaaaaatcaggtttgacatttctcagtgaagattacttactgagttgaaataaatagtctgaaatcta

SEQ ID NO: 134519 - DNA, 1764 bp, Homo sapiens
ccggggtgctcaaagtacctgtagctgcggcgctgaggtcggaacgtctgcgtgtgtgcgggctggttttgtggcggctgctgctagagctggagcatttgccggtcagtataaaagattaaactctacagaagaatgcaatcaagtgatggcttttcctttagaatttgaatatggaggctacaggaacagatgaagttgacaagctaaaaaccaaatttatatctgcttggaacaacatgaaatatagttgggtgttgaaaacaaagacgtattttagtagaaattctcctgtattattgcttggaaaatgttaccattttaaatatgaagatgaagataaaacgttacctgcagagtcgggatgtacaatagaggatcacgtaattgcaggaaatgtagaagaatttcgtaaagatttcatttctagaatatggctgacctacagggaagaattccctcaaatagaaggctcagctttgacaacagactgtgggtggggctgcacattgagaactggccagatgctcttggctcaaggactcatactacactttcttggtagagcttggacctggcctgatgctttgaatattgaaaattcagactctgaatcatggacttcccacactgtcaaaaaatttactgcatcatttgaagcatcactttcaggggaaagagaattcaaaaccccaacaatttctctgaaggaaacaattgggaaatattctgatgatcatgaaatgcgaaatgaagtttatcataggaaaatcatctcttggtttggtgattcccccttggctctttttggcttacatcaactaatagaatatggaaagaagtctgggaaaaaagcaggagattggtatggaccagctgtggttgctcacattttaagaaaagcagttgaagaagcaaggcatcctgatttacaaggaataactatttatgttgcacaagattgtacagtttacaattctgatgtaattgataaacagagtgcttccatgacttctgataatgcagatgacaaagctgttattattctagttcctgttagacttggtggagaaagaaccaacaccgactacttagaatttgtgaagggtattttaagcctggaatattgtgtgggtattattggtggcaaacctaaacagtcatattactttgctggatttcaagatgacagtttgatttacatggatcctcattactgccaatcttttgtagatgtcagcataaaggatttccctcttgagacattccactgcccttctcccaaaaagatgtcttttcgaaaaatggatcccagctgtacaataggattttactgtcgaaatgttcaggacttcaaacgagcttctgaagaaatcaccaagatgctgaaattttcttctaaggagaaatatcccttatttacttttgtaaatggtcattccagagactatgattttacatctactacaaccaatgaagaagaccttttttcagaggatgaaaagaaacaattaaaaagatttagcacggaagagtttgtcttgctttaaagattagcacatttgtgcttgataagaagaattccattgaaaggggaaaaatgaagagaaacaagtatatctgaaatgtttattttcacaaatatcttaattttatatgttctttaaaaaagaacatttgaaaatataacagttaaagatatttttctaaaagagaaatgatttaatgaatcttgctttctaataaataaattgagtgattctg

SEQ ID NO: 134520 - DNA, 2136 bp, Homo sapiens
gacccgagtcagcagtggcaacctgctcaggtccccttccacgccatggaagctttgttctttggctctttgcaataaatcttgctgctgttcactctttgggtccacatggcctttatgagctgtaacactcaccatgaaggtctgcagcttcactcctgaagccagtgagatcatggacccctggggagggacgaacaactccagacgcgccacctttaagagctgtaacactcactgcgaaggtctgcagcttcactcctgaagtcagcgagaccacaaagccaccagaaggaagaaactccagacacatctgaacatctgaaggaatgaactctggacacagcaatctttaagaactgtaacactcactgcgagggtccatggcttcattcttgaagtcagcaagaccaagaacccactaattctggacacatttttggcagcccagatgggactatcgcctatcaccaagcgtcagtataaaagattaaactctacagaagaatgcaatcaagtgatggcttttcctttagaatttgaatatggaggctacaggaacagatgaagttgacaagctaaaaaccaaatttatatctgcttggaacaacatgaaatatagttgggtgttgaaaacaaagacgtattttagtagaaattctcctgtattattgcttggaaaatgttaccattttaaatatgaagatgaagataaaacgttacctgcagagtcgggatgtacaatagaggatcacgtaattgcaggaaatgtagaagaatttcgtaaagatttcatttctagaatatggctgacctacagggaagaattccctcaaatagaaggctcagctttgacaacagactgtgggtggggctgcacattgagaactggccagatgctcttggctcaaggactcatactacactttcttggtagagcttggacctggcctgatgctttgaatattgaaaattcagactctgaatcatggacttcccacactgtcaaaaaatttactgcatcatttgaagcatcactttcaggggaaagagaattcaaaaccccaacaatttctctgaaggaaacaattgggaaatattctgatgatcatgaaatgcgaaatgaagtttatcataggaaaatcatctcttggtttggtgattcccccttggctctttttggcttacatcaactaatagaatatggaaagaagtctgggaaaaaagcaggagattggtatggaccagctgtggttgctcacattttaagaaaagcagttgaagaagcaaggcatcctgatttacaaggaataactatttatgttgcacaagattgtacagtttacaattctgatgtaattgataaacagagtgcttccatgacttctgataatgcagatgacaaagctgttattattctagttcctgttagacttggtggagaaagaaccaacaccgactacttagaatttgtgaagggtattttaagcctggaatattgtgtgggtattattggtggcaaacctaaacagtcatattactttgctggatttcaagatgacagtttgatttacatggatcctcattactgccaatcttttgtagatgtcagcataaaggatttccctcttgagacattccactgcccttctcccaaaaagatgtcttttcgaaaaatggatcccagctgtacaataggattttactgtcgaaatgttcaggacttcaaacgagcttctgaagaaatcaccaagatgctgaaattttcttctaaggagaaatatcccttatttacttttgtaaatggtcattccagagactatgattttacatctactacaaccaatgaagaagaccttttttcagaggatgaaaagaaacaattaaaaagatttagcacggaagagtttgtcttgctttaaagattagcacatttgtgcttgataagaagaattccattgaaaggggaaaaatgaagagaaacaagtatatctgaaatgtttattttcacaaatatcttaattttatatgttctttaaaaaagaacatttgaaaatataacagttaaagatatttttctaaaagagaaatgatttaatgaatcttgctttctaataaataaattgagtgattctg

SEQ ID NO: 134521 - DNA, 1776 bp, Homo sapiens
ccggggtgctcaaagtacctgtagctgcggcgctgaggtcggaacgtctgcgtgtgtgcgggctggttttgtggcggctgctgctagagctggagcatttgccggatgtcagcataaaggatttccctcttgagacattccactgcccttctcccaaaaagatgtcttttcgaaaaatggatcccagctgtacaataggattttactgtcgaaatgttcaggacttcaaacgagcttctgaagaaatcaccaagatgctgaaattttcttctaaggagaaatatcccttatttacttttgtaaatggtcattccagagactatgattttacatctactacaaccaatgaagaagaccttttttcagaggatgaaaagaaacaattaaaaagatttagcacggaagagtttgtcttgctttaaagattagcacatttgtgcttgataagaagaattccattgaaaggggaaaaatgaagagaaacaagtatatctgaaatgtttattttcacaaatatcttaattttatatgttctttaaaaaagaacatttgaaaatataacagttaaagatatttttctaaaagagaaatgatttaatgaatcttgctttctaataaataaattgagtgattctggttgcattcctatttccctaagatctactagtgataattctaccttaactgtaagccttttagtcttcaaagtcttccacctgagcccattgttctcatggaggttttgtgatattaaccctcccccaaagactgggatcaccaaatagtttcaaaattctcagtttgtactgaagaccagaagatcagagaaggaaactttaatgctgtctagcctcctgctattaatgcaatcaaagaatacttttgcatatgtcttgataattaaatagtatttgttaactgtgatatgcatacacttatataagcagaattatgagttaaagtaatacttagcaatatgattttataatggctcctcattatgcttgctgttgaaccttttatgaggagtgaatataaagtattggttttccctcacaaatttaaagattatgttattaatactattataactgcatcaatcaagtcagataaaggcaactataaaatagtagtagtgtttgtttcctatctcaagggcgaaattttatgggaactcaatttattatgcagtttttaagtttaaaataccaagaaagatgtcactagattctcttctatgtgatttttgttttttatataaagcagtgtagtggtgtttagaagctgaggccacctgtaaggcaaatctgccttaagtgtattatgtgttacttaaaggcaaatttgtgatctaaaagtacaagagtgatttttgagctaggattataaaatacataataaagatgtgagaagataaaatgcttttgttttggttttaatgttgggattattttaatcctttcatttgaaaaatcagtgtctcaaatgaattctgttcatttataataaatgcatatattgctctgaaaacaatattaatttttttaagtggagctttcatgtttcagtgtagaaacgtgacttataaagacataaaattgtgtatcatctaaagtcattgatctcttccatcagaaaacctgtttgtttagagttgcatgtaaagctgaaagagagggtgggcggattgttttagtatacctgatgagaaaaatcaggtttgacatttctcagtgaagattacttactgagttgaaataaatagtctgaaatcta

SEQ ID NO: 134522 - DNA, 724 bp, Homo sapiens
atctaagactccattcacttattgcatagagctaataaattaaacaattcatctatgtgttaatttttgtgcttaatctttctcattccttctctaaatcaagttgaacttccatgtatctgtttctttttaatgttaggatagcaaagtgtttacataaggattttagggactaaagaccaaaaatatttctggctgctgggaaatcagattggtggtggggtctatcttcaagtttatttcccattgacaaggcatatttgaaaaaatatgtttatttggattaagaacttgggttctgatttgttgtactattttatatgtaattttatggctgaggatctgaacgtacattagaaccctcatgtaaactctcaggtttataaactgatacccctgttgctatgaatttttttgaaaaaatcttattcaacgtaactactatattccagctggttgtacgtcccaaaagtctggtcattgtataaatggaattatttttattttcttccctctgaatatttggcatatttacttttatctatgtctaatcttatctcttatccatatggaaaggcgagtttgaagtgtccagtcacacaaatctgtctgtctataaatagacagccatactttatccaactgtgctgaaacacatagacatttaaaaccaaatgaaatatcaacccaactttcggaaaaggactattcatgtcctttttga

SEQ ID NO: 134523 - DNA, 383 bp, Homo sapiens
tgtgacagtcattgggacggaacgtcagtttgaaggcgggctcagagttgaggggagggtctggcttctgtggagctctacgtgctggtcactatggtcgtagtaaccgttgtccttcagttacggcacagaggctcacatggaggccaatccaatggtaccatcccaggagggagggcgtgctccagccttagtgcccgcagcctggtcctgccactagcctagccgccctggctctcttcctgctctttgtcttcctcactctgccctctgggccctgccggcacctgccgccacacctttcctcctcttacagttctggctggcctctgccctgtcagatgtcagagggaatctttacagtgcgtcccagtcctcggccc

SEQ ID NO: 134524 - DNA, 539 bp, Homo sapiens
atgctgagtgtctagaggatccctttcagtcgagacggattcggacttggcaggagcaaagactgctgtgggcaccacgtaagagtctggtgctgcctactgaggagaaaggagtcagggtcttgtgggtgctggtgagctggaagctggtccacaactgcacctgccacaggaggactaaataaaacaagaggcaagtgatggacgaatggagtggctgtccagttgcttcgtgtcactctgtaaagcatactaggatcttcttaaaagggatggcctcaggttataggcagcatgatggctagttttaatgaatttaatgctggcttagagccaggggtggggtacagcccagagggtaggttattgcaagtcaggaccagaggtggtggcccagttgggtggctggatacatttagagggtgtgggcaagcctgtggctcttattcacaggattcactgcctggaacagtctaggcgtggctggattttgggctttggatcgcaaaagaggtagaccctgcccactgccatcctgc

SEQ ID NO: 134525 - DNA, 607 bp, Homo sapiens
ggattccagcactgattgaccatgttgacataattaaaattttcaaatcctgttcactggctgtgatagagtaagaatttagttaaatcccaagagccaacctgtcctattacctttagaagtgaatatacctcctgccatctgtacttcctcccctgcccttctgtagaggtagctctcttccccactgactccacactgcacttccaacactagggacctctctgttcagatcttacttcacttcctggcagcattcagcatcgttgagccttaacacccttttctcctgacttctatgacatcatacccttctgggtttcatgctgctttcatgaccattccttttctggcccttttctcactgctgcaatcctgctggtctcccattcagaccagtctctcatactgttctggctatttttcaaatatgtcaccaatacttattttggaaaatgttatgtattcctgcctcagggtcttaacactgaccttttcctctgcctgtctttttgttccctttttgctcacgtctcaccttttgaatgatgcttatcctgactcctctttaatttcactacggtaaccacactcctgagccacactc

SEQ ID NO: 134526 - DNA, 301 bp, Homo sapiens
cagcttttgaccttttcctgcatctaaatggacattcatggcggcaggaggtgctagactagacccagcagaggacctacagcccaccatgtggctcagcttaggacgtgggagtagagtttccagagcatacacttgtcagggccaagggcttgtgcaagtaagtgggaatagaggcggtgctcatttgaggagagtgtgtgccagcccagcggccacgtaccaggtacctgggccctgcagctgtgtccagtccaaggcagagactgaatattctcctagagcatctagaaatgggcac

SEQ ID NO: 134527 - DNA, 787 bp, Homo sapiens
ggataattttgcctgagatgttccaactaagtattttgatcaaactttatagtggaaatggtagagcatggccataaaaattgttttccctaggttttgcttaatcttggtttaaaccagatttactagtttccaggataaactgagaaatttatattagacttttacacaatttcctagacttatctagagaggtatactaattacttttgtattaaagagattgctgaatcttttgaatattgcagaggaattgatcttgtcaatattttattttttgaaaaagatcatagagtaatatgaaactctttgtatgacattggcattctaatttggttttaaaaaaatgcagtttatcagaagtccccatatggtgcttaatcagacgttatagacagaaaagatggaatcctgtttcagaaccagcatgcatagttgtgcagattgtatactgtaccatgcattagttgaggcattcatgcaagagtcaacttgtgtattaggacagtttctggctgatggcagtaaagtgtctggaggaaggagcagctatttctgtttttacaaagactttgtaggggctagcagtagtactgtggcctatattttcagtttctatttacaaatgagtacttgttgaagtgattgagaagaatgtgtacatgatatctcattttatgtgatattactgcatactgtagcactcacttattggcaacctcagttatctgtaacagagtccacagccaaaataaagtaaaactgggccagtgaagtgaaaataaat

SEQ ID NO: 134528 - DNA, 462 bp, Homo sapiens
tggcatgtgtatcagaggcttgtcttgatttccacagataattttcgtactaaattgacctttctcgaagtgaactacatttctatcctctgtaaagtttaacactggacatcacaaaatggtaccccgcaagctgaatctagcaaccagatatgttttgtttggcttatactgtgtttagagaaacatttgaacatttttacactaaattgataattttacactaaattggactttctttaaatgaactacactttatatcctctataaactttaaaaccggatgtcacagaatgacaccctttaagctgaatccagctacacgatgtgttttgtttggcttaaatagtggttaaagaaacatttgaattagtttccatcatttaaaaattaagagattctacataaaaatctggattcctggcttcttttgaaaagtaggatgagttggcaatgcccatc

SEQ ID NO: 134529 - DNA, 283 bp, Homo sapiens
accacgttgccaggactcggctcctcggctcaaggaaaagggacagcggttccgtggctgtgctctgacacacctagaaatttcccgctcaagagagcaaactgaatcctttagtattaatgatttctcttcctcccaaaacccactaaaatgatgaaaagcaggattggaaagcacttccagcaatgcctgggagcggacggacaggtgcatcagctgacaagaaacacagaggaacttcccgaaactagagatctctggggatggagctgcttgggaaggc

SEQ ID NO: 134530 - DNA, 168 bp, Homo sapiens
gagattctaaaaggcgggatggggttgaaaaaatacctgttggttagtgttcactattgaaccatgagtacactaaaagctgaaagcccagattcgccattatgtaatatatccatgtaagaaaactgcccttgcaccctctaaatctataaaaataaaatagcaaca

SEQ ID NO: 134531 - DNA, 289 bp, Homo sapiens
ctagccagcatttgccagattctttcttgcttcatctcctttatcatctttctgtttcaagaagattttgcttgctttagtcattagacttgacctctattttgagtactgccagcctgtggatgtcctgctatcaactcttcaaattcaccatgtctaagatcaaaccactttcctgtatccaaatttatcctccaagacttgctatctctttgaaattactattttcccagacaccctagatagaaatcagaaatcacatttgaccttcctgcccttcttcacccat

SEQ ID NO: 134532 - DNA, 719 bp, Homo sapiens
ggactgtgcaccgagccttgggaacctacatgttgccccttgtctttcttttcacctgaaacaattagtttggcatattggacatgctgaccttgaagggtttatggaatgtttagatggaaatttctatgaaaccactggacatgttagtctagagcccttggttaagggtttatagtgagttagttaaaaaggcttcccagtgcacttcccacttttcagtctacccaatcttttaggatgtgcagagaagaagtgtagtttacatgtggtcctgttgctctgttcctggaagggagttcaaagggaagagaccaagtctccactccaatataaaccttctgaaagtttttttctttcaatggctccaaattgcacactctacaattgagaagttcagaaaattgagtaactcatattaaaattttcaagaccgcaaaggtttttcacataatagaacaattttaagggtgaagtaaatgaattcaaactaatttatttttcttttcatatatgtctaataaaaatgactgacggattgtttggactttaacgtgtttagatgtgagtctccccccttttattcagtgacaagtgcaaagcaacttgccaacaatttttttttcaattttgtaattttaacactgacaataagaaacattctatagaaagtttgactttgaactggaatatttttgccatatctctgcctagaggga

SEQ ID NO: 134533 - DNA, 148 bp, Homo sapiens
tcagctcggtaccgacgctctctctgtggggagctgcgtacaggagacctgagttcctcgaatagggcacagcttgaaaggatgtttgaacaagaagatctttatgccattagtatctagcaagagacaaaccttggaaacccctctc

SEQ ID NO: 134534 - DNA, 294 bp, Homo sapiens
cattctgtactcccattctcactctaagccctgggcagaccaaaatcctttagttcccctgattgctccttctgcctaagatagtctatttactttctgcctgaccaactacagttcattctttaggcattgattgcattgtcacatgctctcagaggcctttcctggccacccattctggctttagcctgccttttctctgcatgcctgcaatgccctgcttttccctcacccatcccttctcacactttttttttttttttgaaacagagtctcgctctgtcgcccaggctg

SEQ ID NO: 134535 - DNA, 432 bp, Homo sapiens
aatatgctctaactcttgtgtaaatacagtctgactctccttgaatcccttaagtgtgatgtcatctgggaatgttcttcatagaaataacagatttgaagagcctaaagaccaattttatattttattagtaatttggtattcatccagatggggaaagggaccagaaaatatcccctttcatgagaatgttataaatcacaaattcccttaaaaatgtacaggcagcttcataccagatactaccacaaggatgaggaagacacagtccctgaactttgtatccatctaatgataccacttactcagcaccacatacttgtattaagcacatcatgtctattatattatttaatctaatggaaatgttattattccaattttatacttgaggaaacaggcctagagaactgtctttcctcttgggaaaag

SEQ ID NO: 134536 - DNA, 135 bp, Homo sapiens
tcacttctgaggttagaaaacaacaataaaatcaacctacagaatgcaaaagaaagaaagatcaaagcagatatgaattaattagaagatatgagagaaaaaccagaattgacaaatacaaaagttgatttattg

SEQ ID NO: 134537 - DNA, 810 bp, Homo sapiens
ctgtgggttatcaggtaatggaaacttcattatttatttgctggcaggatcatacaatgaacacggtattttcaagtgagatctgaaagtgctctggcacttaaacatttagtattttatcttaaacatattctagatcatttgactcataactgtcacttgaccctggggtcaaaatttgcatttgtgtttatgtttttagtgatgccaagtaaatactgttttggttgttggggactaatattaaggaaaagaatagagatgttcttaataagatggttttgagttaaatgaccaaattattttgtaatatgtggcattaatgtcgcataattgaaactaagaaaaagtgcatgtcttattatgaggcactcagtagtccagtcattccaaacttaaaagatatcttgtggtgcagttggtacattttcatgttgtgagcagagatttaaattcagcaaaaccacatcacctgtttttttaaagtgtaacttgttaaatttaaatttgtttggaagttttattagtcagtattgggtggtatatggtaatcagtcagtaattgctaatgtaagtataggtggttatatagatactatgcatacgttattctggttatgtcggtaggtttataacttaggaactatttgtctttgaacctacggactttccttcaagcggttccacgtgggggtcattccagcaccgttagagggtgcccggatcactttaaagggggggggcgcccccacacgggggggcacactggacccataaaaccacggcggccaaggggcgtcacccacacgc

SEQ ID NO: 134538 - DNA, 220 bp, Homo sapiens
tgctgggattacaggcgtgagccaccgcgcctggccaaaaagctgattctttagtgaaattggcaaacctctagaaaaagacagagaagatgcaaaattaccagtatcaggactgaaaagagatatcacaagagaccccataggatagatataccatcctccatgatatgattatttcacattgtatacctatatcaaaacatctcatttatcccataaa

SEQ ID NO: 134539 - DNA, 373 bp, Homo sapiens
tcaagtcccattctttgtgttgacagaatcttccgccagtctttcctgtatcagcaaatggcaccatcatcaccctgctgctcggaataaaaatagaggagttaccccggatgcctctccattttcaagcatcatattcagcccatcagcaagtcctaggatctgtaatctccaaaatatacccagagttcaaccattcactccgtctccactgccagcacccgagcccagccaccaccatctcctgccagaccgcctgtcctggcctcctgcctggtctccctgttccactcccgtgtcattgtcatctattctccacaccacagccaggccctctatttaattcattaaacagattgtatgagtcccctga

SEQ ID NO: 134540 - DNA, 323 bp, Homo sapiens
aaaatgaaaggattggactgaatgatttcctaagtttcttctggttctaaatctttcattttttactgtgtcatcaagtatcctttcatctttggagctgtttaaaaatggttaatgattagcttacaaaaatcagccaattcctctaaattatcacttagtcctatttgctaaacttataatctgtgaaactgttagcacatagaacatttatactaacctctcatttgctttgtagattctagcccatgaggcaaattaattgcataactgatacacctaagtatacagaatacagtcatgcaacactagacacattcata

SEQ ID NO: 134541 - DNA, 581 bp, Homo sapiens
tgtcaactctgtttttcctccatgtttttttcttcaagatttggcctctactactgcctgatagagcagatgagcaggcaggatggtagccccaggggtaccagcagcttccatatgaggaaccaaggccttagatgtgtggcctaccctctcccagcacacagtgctggctccaaggagagcaagcacacatagttaatttggggggcaacccattccatgcaaccattgtagctatgtaactttgagtcagctggtaaatatgtatatcttgtgttaaaaatgacatttctggccgggcgcggtggctcacgcctgtaatcccagcactttgggaggccgaggcgggtggatcatgaggtcaggagatcgagaccatcctggctaacaaggtgaaaccccgtctctactaaaaatacaaaaaattagccgggcgcggtggcgggcgcctgtagtcccagctactcgggaggctgaggcaggagaatggcgtgaacccgggaagcggagcttgcagtgagccgagattgcgccactgcagtccgcagtccggcctgggcgacagagcgagactccgtctc

SEQ ID NO: 134542 - DNA, 5747 bp, Homo sapiens
  misc_feature (5686)..(5686): n is a, c, g, or t
ctgcttacctccccacgaacttgcacatctccaatgcagaggagtcctttttccttaaagaagccaaccaagacctcacaaggaactccagtctgcaggcccgggtggagccattcttcatctaccgagccaggacaccccctattatcaatgccagctatggcccattttcagtggagaagataatcccccaggagctcctgttgacatctacagcctttggaaacatggacaaatttcccttcaactggaaattgaaatcccacatccttgacagctccatctactccaacagacccaaagtgcagaccttgttttatgtcactggcatgggctgggatgacagtgaccttacggaagatctaccctgtgtcaagatgtttgctttccctgaggccagggaagtggcagccagctgtcggctgcaaggggccccagggctgtgtgtggctgagctggagctgctgcccgagtggttcagctcaggcctggacctggaaccagaggaggagatcccagccctgctcgggggcaccacgatggagctcttcttcacgctctacccagctgacaaggctggccagtgtcctctggaggaggaaggcaagtgggagaacaatatccactcgggcctggagagcccccagcaagcgtttccagcccgagagaggattgggagtgtggtggtctacccaacccaagatgatctgaagtggtccctggtgagcttggacgagaatgtggtcatctcggtacctctgaatctagtccgggaaggggacacggccacctttttggtctctctgaccagtagctctgtggcagaccagttcactcttagaattaaggcggcagcaggtgtgaagataacggcagtgagagtcagcagtgaggaccaatgggcagtccaggaggaaattgataatggcagcactcagacgtcggccaccctcacctgcatgggccatcgcccggacacgcagagcagggtaaatggatccttctatgagatcttgcaagtggactttggaattgataatagcagtgacctggctggggcccagcagattacctggcaggtggagtacccgattgaggactccatgagtgagctggtcgtctccgagatcttcgtcagccagacaaccttcgtgggcatcgtccctcttgccatggacaccgaggttttgaacactgccattctcactggaaagcctgtttcagttcctgtcaaagtcgtgggggtccaggaggatggttctgtggtcgatgtgtctgagtctgtggaatgcaagtctgccgatgaagatgtcattaaggtaaggggggatttatctacagctgtcctaagtgctcagagctttttgtcgttccttcttttgtctccaaggtcttgttctcactgagcatcccatgctctaaagggctggaggccagaatgacctcacgaaggaggaaacagctgaccgcagagactccctggaatcagcaggcggctgcagcaggtgatgctgcttccctctccctggaaaggggaatccctgacccttaatctccagcagaaagaatttattctcctccccttcttgtctcccctattcttctctctatctttcctcgtaagacaatattttcctaactttagcaatccaaataagaccttctcattttttgcaaactcactgtgcctaataatattatttactcaatatattttctttaaatgccttgcttctttcgggtagccagttagctcagtgggttagagtgtggtgctaataaatgcattactttttcaaacttaaaaactaatttagcttcattataagacaataaagtccgtgagcttggtgtattacattttttgttaatatgcattaaaataaataactattcaaataaaattaagttcacccatgtgccacctaactgaacttgaatataaccagtgggatacagtttaggaaatgggacatttctgctagattcttcactcaaattagctatgtttctgactccaaattctgctaggaaccagaaaatatttttttcatgctctctgaaggggtctttttgaaccaccaaatttaatatttctgcctattttttcttagcacattggttgctattgcttttgcagcagagacctcagggagaaaggatttgaatttttagaatgactgatccttcctcctttaaattattaagagagccccaaagtccaatctattcagctattttagaaaaatacaataactcagagttctgcccttcctcacattctacaagctcttgtttagaggttacatgaaacttggtctcagtattgaaaacttcgtggtagacaggaaaacctttaggggtttccctatagtagaaaaggtctgggaggggttgatttcttcttgttgtgacctacaggatgctgtgtcttaagcaagagacagtttcggaaaaaaagactgatgtattcgtgaggtctaattaacaaagaaattaattcctaggaaactcaagtttggcatagactctttcctggacatggaatgctcatcgtccttagatatggaaggtggactggcttaaaacctgcacacatagccctgcctggggttcctggtggtccttgtattctgtaggcaggtttgattaaatatatggccttaaatattcagagtttagaaagagctgagccaagtcacaggagattatatgcaccaatgacaaatatggatgatgaactgctgttggttgctattgacaatgcgcaagttttacactatttttactattcccatgtcattctagaaaggagacactgataagagatggtatctgtatgcttacgtcataatgggctcaaacaaatgattcagtctgtagtttcctaagccttttgttctgacctaagagcctgctatgaagccccatggggtggaatcctccttctcttgccctgaagagctctactctagaggggcaggtccaagttcacagatcccgttattgccatatacctggttttctccactccacacaaatgtactaaaagtatcctctgctcatcctcatagacgttgttttggaagatgatacctttttgctcagctgtcacctatatagcctcaggaggatggggattcgtctaacaaattattgcccagtcttcagaggaacaaagtgaaacctgcagatcgcaagctcagagctgtattcacactttttaaggggattccaggactgttgcaagtttgggggcttgtgtcaattgaggcgatttaattaaatggctgtgatgcatttactatggcttcagtgtcaatgtttgtagtaaattttactataactccaagttgaatggagttgtccacagagctatgaccttggcatcatcccagggacatcctcaaatacatggcacattcattagcaccctttggagagatcctctgagtctgtggagttgtcacacagtcatacttcagagtacagaaaacactgaatgatttttagggagagtcttgcagggctcaccaaagatctttgtgccttggaaccatgagttagataagggaaaaatgtgaatttagaaagatgtaagttatggtaatatccaaacaaatgaacttgtttggcctgtgattgtatgacttttgcgggacagaatcagaggacatacatgattttgaaaagctggaaccttggcctaatctggcaagattaaaagagataaatgtaaaatttcaagttgacaactatagtagtccttccttatctgtggtttcactttccgtggtttcatttcactgtggtcaatcacagtccaaaaacgttaaatgaaaattttcagaaagaagcaattcatgttttaaattgtgtactgttctgagtatcgtgaagaaatcttgagtcttcctgctccatcccacctgggttgtaactcatgactttgtctggcatatccatgctgtagataccacccacctctgagtcatttagtagctgcctgggtgatcaaatagactgtcgcggtatcacagtgcttgtgttcaagtcacccttatgttatttacaaatgaccccaaagtataagagtagtgatgctggcaattcggctagaccaacaagaagtcataaagtgcttcttttaagtgaaaaggtgagagttcttgacttaataaggaaggaaaaagatcatatgctggagttactaagatctacagtcagagcgaatcgtctatccatgaaatcgtgatgaaggaaaaaacattcatcgtagttttgctgtcacatctcaaatacaaaagttaaggccacagtgtgtgataaattcttcattaagatgtgaaaagacattaaatttaggtgaaagacatgaacagaaacttgttctgctggatgacagtctgattcagttctatctgtggtttcaggcatccactgggggtcttagactatattacccatggatgggaggagactgggagactgctgtacttttaggttaaaaaaaaaaaaaacaagtagaggattgtgtgtgtgtgtgtgtgtgtgtgtgcgcacacacacaagaagccttagcgtttttatcagtattgggatccagtgagtcaactgtttgataaggctgctacaggttgatttttattagcatgaatgggtgtgtgcctcagagcagaggtcacaggcaggcagtctgcagaccagatctgacccagaagtgtgtggggggtgcggggagggtctgcatagtttaaaaattgttacttaatttgttgcccccatgtaaaaattggcaagttcgcacagaaatctggatttacagtttcttatgaaaaatcacaggaccaggtggtcctgggtctccatgatttcctgtgaacctcgtctggagttgaagagaggatgctcctctgcataaaacctgtgccctccagctcactgtagtctccaccactcccttttgtctttcacatggaggttgaaggatatttgtcatttctggtcacacttgtgctcctagtttttgatagtggatttcagaggaaggtgagatattttttgtactccagtctctaaaaataaataagcaacaaatgatagacttcactctctcactctgatggagaattctgtatctttctaggccgtaagaagaacaataaaaaattgggttgtgctctgccaaaaagtgtctgagaggctgaggactcttgaaatcaaatcacaggagaaatgattgaaggaagtgtgagtgttaagcctattgatgagaagaaaaggctcaggggtgaggtggagagggagacatgacagctttttgtaagtctttcaagggccatcatgtagaagatggagtagctttgtgctttttagattccaagaatggaagttgaaaggtaccagttttagctcaatataaagaaaaagactgcagaggtagtgagttctttggttgagcttccagacatgtgatgttgctaaagatcctgactccaccttcctcaccgtttgaccttgggcaaattacttaccatctctgagcctagtttccttatctataaaatggggatggtaatgatacagtggaaacgtacttttctagagatttgttctaaagtcacagcaaacggcagaactaacaataaccaaactactccctaatccttgaaaatccccagtctcnctgggtcatccagattgcgccactgcaccccagcccgggtgacagagcgagactccgtctc

SEQ ID NO: 134543 - DNA, 929 bp, Homo sapiens
ctgcttacctccccacgaacttgcacatctccaatgcagaggagtcctttttccttaaagaagccaaccaagacctcacaaggaactccagtctgcaggcccgggtggagccattcttcatctaccgagccaggacaccccctattatcaatgccagctatggcccattttcagtggagaagataatcccccaggagctcctgttgacatctacagcctttggaaacatggacaaatttcccttcaactggaaattgaaatcccacatccttgacagctccatctactccaacagacccaaagtgcagaccttgttttatgtcactggcatgggctgggatgacagtgaccttacggaagatctaccctgtgtcaagatgtttgctttccctgaggccagggaagtggcagccagctgtcggctgcaaggggccccagggctgtgtgtggctgagctggagctgctgcccgagtggttcagctcaggcctggacctggaaccagaggaggagatcccagccctgctcgggggcaccacgatggagctcttcttcacgctctacccagctgacaaggctggccagtgtcctctggaggaggaaggcaagtgggagaacaatatccactcgggcctggagagcccccagcaagcgtttccagcccgagagaggattgggagtgtggtggtctacccaacccaagatgatctgaagtggtccctggtgagcttggacgagaatgtggtcatctcggtacctctgaatctagtccgggaaggggacacggccacctttttggtctctctgaccagtagctctgtggcagaccagttcactcttaggtaagaggctttgccaggtgggatggaacagaagccaactcttagtaatcaatgaattgtcaatgaataaaatgggtgttgatcattt

SEQ ID NO: 134544 - DNA, 372 bp, Homo sapiens
gctgggccgcatgagagtgcacgcatttatgctgtctgaaggtcacaatcacattaccatatcaagctgaaaatgtcaccgttatctgcagttagacatgttttattgggaatacatttttcctctctgaatctgttatgaatgcgttggttggctgggttcagtaataaatatgtgagacctttcatttcaaacaacaaaaacaacaaaataaaacacttttcaggtttctgttataagggaggagagactcagtcctgggagagcagccagcaaggtctgccatgatggccaaatgaaaccattgttcccctccatccatccccccacacctactccttctccaggcttgtttgagtagatggcaccccc

SEQ ID NO: 134545 - DNA, 318 bp, Homo sapiens
ggattctttgatgtcaagaagggaaaaataaaagcatttttccttcccctctgttgttttctacagcagaatgtgaacaggaaataaagtgagctttgctccctaaattctccctactgaaaaatgcaaataagagctgtgaaaaagaaaaatattgtcagtgaagaggaaggagactttgatgaaaacacattaacttgaaatcaatattctgagttttgtatctacaatccccgagcaactttgtgctcaactttatttttagaaacttttagtacctgaaagagtaggattatggcaagaataatggcaatgctt

SEQ ID NO: 134546 - DNA, 251 bp, Homo sapiens
atgttttgagttggcaatgttgaccagctactaaaaattgttccaacaattaaaccaagaaagaaacacaagtaattattaccttcaccatgacaatcaggtcataactggaggataattttaggatgacagtaacaaaaagaacaatagctcgcatttccagtgcacttaccataagctaggcattgttctaagccctttacatggatgatttcaattaagcctcacaataatcctatgggtagatacca

SEQ ID NO: 134547 - DNA, 511 bp, Homo sapiens
ggccaagtttgctcacttcacctgtattcatgctttacgactaaggaatcagtggaactgagatctttaaagcctgtggtatttgatctcacaaaatgcatctttcccaaaagataagtaattcctaaaaactggcagtgaagacaggtgtgtgcagggttccgtgggtctctagattccacactgtattgggcagccccatccaacccagtccagcccctcatgggtccagcgccttggtggtccagcttcttgatggctcatctgagagacatggcaccatctccctcagggtgcagcacagattggaggcttcttcctcattgcctgagaacttggctcatttacgaaattgtgggaaaactgaggagtgtggatttctccccttgattggcatatcggcatcaggaagcagtcaatttgagagcagaaggcttattctaacccaactgttagaattctaaaggagaaaaaataattcaatgaaagtgtttataagaataaagcaagt

SEQ ID NO: 134548 - DNA, 597 bp, Homo sapiens
tctgttatttcaaatcagctgaaaactattctttattctgaacgtttgcccattttctttacctgctattgttgtagtttctctcaactatcaccatctaaccttcaaagagaataaagtaaataaaagcagcattctctcttgggctgccagccccctctggattttctttatttcatgactgttaaaaaattatggctacaaacagggaaaagagaaagaaatcaggcttttcttcctcagtagagaccgtatttctattcaggcagatgagaaaaatctagatttgataggaataaaaataagggatttattttgactattctttttgattttatattacttaactttttataagtgagaaaccatatgtaaaatgttaaacaagtttcttggcaaatggcagatgtttcatatattatctcctttcatcccctttccacccaacactaaaacaaattgtaggaccgggaaagcaaagtcagagcatgaacctgtatttgtgccatcccaggaccctttagacaaattgaattttcattcttataccagtcagcatgaacaagtgcaatttactgtagccccttttctgtataa

SEQ ID NO: 134549 - DNA, 552 bp, Homo sapiens
gaatccagaatttttctagctgagaggcaatctcagtcaggcatggtggctcatgcctttaatcccagcacttggaaggctgaggctggagtatcacttgagcccatgagtttgagaccagcctaggcaacatggcgaaacccagtctttactaattttttaaaaaactttttgtagagatggggtctcaatacgttgtctaggttgggcttgaactcccgacctcgggatcctcccatctcagcctcccaaagcgctgggggtacgaagccattatgcctggcccctatttttgaggaataaattcaagatttttttttttttcttatgaatcttagacttctggttagtggcgtgaaaacagagtttttagcatttagttctggcaatattaatccatttatattatttgaaggttgtgctgtactttttaaagttaaatgtctaactttcgtagttttcatagcagtgataaatatttacaacaaaggatatggagagaaattattattttttttccttcaagtttgaattcatagaaatgacatattt

SEQ ID NO: 134550 - DNA, 415 bp, Homo sapiens
gttttcttagtgggacagttgcacaagtcattttcccctccttgatctcctttctcagctgtgaaatgggtcaataattaatatctaccatgcaggccgggcgcagtggctcacgcctgtaattccagcactttgggaggccgaggcgggcggatcactaggtcaggagattgagaccatcctggctaacacgctgaaatcccgtctctactaaaaatgcaaaaaaaagttagccaggcgtggtggcgggcgcctgtagtcccagctactcgggaggctgagacaggagaatggcgtgaacccgggaggcggagtttgcagtgagccaagatcatgccactgcactccagcctgggtgatagagcgagactccgtctcaaaaaaataaataaataaatatctaccatgcaaaagg

SEQ ID NO: 134551 - DNA, 526 bp, Homo sapiens
tattcattaatgccatcagcgggggctgtctctacacatggacgtgggacacggaatttgaaaccatgacaaataccaaatgacttttagctactgggccaaacccaataactcaaggtgtaactacttcatttaacagcctaatctcaagacactctacaagtaccacagatgtttgaacaaaatgcaaaaggaaagtacaattattacgattttgcacatgagaaaactaagtccctaaatacttgatacttcctcgagtaaggaagaatatcctggacccagatccatcaatggataagatccatcaacatcatattcttatttccatgatttgaggaggctgaaaattccattagcttctattagggcacaataatgagtgccaattatgaagcagagtcagtggcacgtcccattttggacgttagctgtgaattcctctgaattgtgcaggttgttcctgatctaactcagccaccgcatgggggtaagcacgggggcatctgctggagctctggtcatt

SEQ ID NO: 134552 - DNA, 626 bp, Homo sapiens
tgggagacttcactcttctccacttatttattcagttatttgcttatatcagtatggactaaatggatattttatgggaatatgtttttaatatggtggaaattaataatataaccagctcccagttgaagttttctcagattacatttttctttgaaacagaaatggagatgtttgttaagatccagttggagcatatgttatctcagattactcattaatagaaaaaaatctcagtcatatctggaaattacacaatctgccagggctcatgtgatagatacctgcctgcacagtatttaagagttcatgcacccttcttgttttgatagatacatgttttcatcactgccgttgttacttcctttctgtcaagaggtgaataacagtaggtggacaaagtttagggagccacatttaccaacttctgtgaatatacccaagaagattctggcaaaacatagattcaaattacagttgatgctgtggatggctatgggttaactactcttctactttgacacggattatttgttgcttttatgtttctaaattctcaattaaaaagaagtgtatccttaatctggccaactgaaagtgaacttgttcattcacctctaccttgc

SEQ ID NO: 134553 - DNA, 482 bp, Homo sapiens
taagtgggtaccatttgtatttccattttcagataagaaaactgaaacagatgttcagcgacttgcccaatctcagaaatctactaaggtgtaaagactgggttcccacccaaccagacggactcaagaacacacacactgcctctgcaccctctgctgccaatgaaaatgtgaatggaccagttgtggtggctcacgccttaatcccagcaatttgggagaccgaggcaggtggatcacgaggtcaggagatcaagaccatgctggccaacatagtgaaaccctgtctctactaaaaatgcacacacacacacacacacaaattagctgggcgtggtggcgtgtgcctgtaatcccagttacccgggaggctgaggcaggagaatcgcttgaacccaggaggcagaagttgcagtgagccgagattgggtcactgcactccaccctggtgacagactgggactctgtctcaaaaaatatat

SEQ ID NO: 134554 - DNA, 565 bp, Homo sapiens
tcattgtgtatttaattcagcccaagaatcaattatagtaaatatttaattcaggcatctttaagctatacaacccatgaaacttaatgttacgcatttcgaaaccataatgatatgatggtgcccaccttcattggaacatttttcaccgctgcttctccagtgtattttcttaaaattaaaagcttctgcacattggaaagagaacttcccttggagccagagcattataatcacagctctgtcacattctagctttatgtctcggtgatatgatgtaaccctagttcagtttcctcatctataagatggcaataataatattgtcctgtgcttcacaaaagtgccaagaatattaaatgacataatgtacatatgcaaaaatactttataaacagtaaacacaatttaagtgtatattgattcagtagaattgctgctctcgtaacacagattgcagctgatctgagtaacattatcaaatagattctagtgtctcactgttaaatgtagcgtctggctttctacaagagaaatgcctggatataacatctcagtgatgagc

SEQ ID NO: 134555 - DNA, 308 bp, Homo sapiens
ttaagagaagcatttttaaataaaagttcagcctgttacaaaattccctaatgtgagatacaggctggaatgaggcaattccacagagaaatcattgtgggaataattcacatctaatgtagtttcatgaaggatgctatttccagagtctaactttttctccctttttctctcactttttgattttattgctgtttttttttttttttacattaggagaaattgaaaacctgtttaggtttcatagcttcacatttctgaagcaagtgacacagcagagagttgggatgcatctgatttgtgcctca

SEQ ID NO: 134556 - DNA, 270 bp, Homo sapiens
tcggtgttcaggcatcttctgcatggggcaaacatccagaggagcagcagacatcatgaccagtgtaccacactcctgagagtgtggcatggtactggaccaaaagacagccaagggagcagtagtgaggggctttagccctaagtggggaaaaaagcccaaagaagcacagcaagatgcagacacccaagtttagccaaagtggtcaagtacttgttggcaactgagttgatgttgtaggtggagcctgagaagtggagatgggtgagt

SEQ ID NO: 134557 - DNA, 534 bp, Homo sapiens
agaaatattatatttcctttttgtttttgagactgggtcttgctctgtcacccaggctggagtgcagtgatatgatcatggctcactgcagccttgacctcccgggctcaagtgatcctcccacctcagcctcccaagtagctgggaccacaagcatgtgccatcacaactggctaattttctgatttgttgtagagatgaggtgtcacgatgttgctcaggctagtcttgagctcctgggctgaaacagtcctctagcctttgtctcccaaagtgctgggattacaggcataaaccaccatgcccagccttattaatgtaatgcatttgattaaaggaacctgccctagatcctgctaggggttacataatataccatatatggccctatactgcctttctaaaatctgaaaagttcttcattctgaaacatgtggcaccaaaggtttcagatgaaattggggacctttattttctaaatcacagaccccccccccaatagcttatcaacttttgttaagatatcaatgcctt

SEQ ID NO: 134558 - DNA, 303 bp, Homo sapiens
gttcccatattctacaatgttcatatgtaaaagaaataccacctgtcacacaggataaattccttcagtttagtagcttgcagttacatactatccaaccaccattatttatttcacaaaagccttcacacacaccatacaatggaatattactcaaccacaaaaaaggaatgaagtagtaatccatgctaaaatataaatgaaccttgaaacattatgccaagtgaaagaagccagaaacaaaaagctatatattatatgatttaatttatataaatgtccagagtaggcaaatctatagag

SEQ ID NO: 134559 - DNA, 343 bp, Homo sapiens
gacatgcagctggtgaacgaggcgccaggaacagctcttagacttatccactgtaagtgtgtctgcaggcatgtggaatgaatggccacacaaataaatagataaagaaactaactgtgggatgaatgaatgaatcttcccaaatgccaacttcaagctgccattccctgatgcaggacagcaggaaaaaaggggaagttgggtggtgggatgtatttttcatgtctgtgagcctcatctaattccataaaggattcagttcacactaaaatcagaaatgaaaatccagacaagaaaagccaacatcaacattaatcatcattaccagcacttagcatttgta

SEQ ID NO: 134560 - DNA, 227 bp, Homo sapiens
tgtgaaaccctccagttcctaagcttatagactctgtggacaggagaaggaggccagaagttaaagtgcatcgagaggtcttgttagtggaatggccactgcattcccttttcttttttagtcagcctggaatttggagtttgagctctgaggcagggagacctgggctggtgtggagtggagtggtgcagagttgtgcagttgtgagctggtgtggtgtagagtgg

SEQ ID NO: 134561 - DNA, 670 bp, Homo sapiens
aggcttgaattttttcccagaaagtgagtttttcttctctaccgcatgactgggctgcaaagttttcaaactttcatggtctgctttgctgttatatatagtgtctagtttttaataatctctttgttcacacatatgagtgtacactttcagaaacagccaggttacatcttgaatgttttactgcttacaaatttcttccaccagccttgtcctaataaaattaagttgtatcatttaaaaaaaacaaaaaaaaataaaaaaaaacaaaaaaaaacaaacacaaaaacaaaaaaaacaaaaaaaaacacacaacaacaatacacagaagaaaacaacaacacaaccacgccacaaacaagtcacccacgaatacaccgagacacaacacatgaaacaggacaaaggaaatagaaaaacataacgaatacagtgaacggccacgcaacacccgagagcaacacaaggcagcgcctggcacacaaacacagacagcaggagcaggcccgaagcgtggcgcccacaccagagatgacgaaacaaacagaccacagaagtcatgactaccccgacgacaacagccgctaaagtcgacaaaaaatgaaagctgctcccactaagcaacaaatgacaagggccgcgtcaaggcgcaccacggaccacaagccat

SEQ ID NO: 134562 - DNA, 190 bp, Homo sapiens
acaatgcaaacagctataaactggtgaatgcagaaacagaaggtagcactcacacacagtgaaccattactcagcaacggaaaggagctactgacatacccaacaacacgggtgaatctcagaagcattattctgagtcaaagaagccagacccaaagacagcatactatatgattccatttatagaaaa

SEQ ID NO: 134563 - DNA, 737 bp, Homo sapiens
cgcggtgtctcacacctgtaatcccagcactttgagaggttgagacgggcagatcacgaggtcaggagatcgagaccatcctggctaacacagtggaaccccgtccactaaaaatacaaaaaattagccgggtgtggtggcgggcacctgtagtcccagctacttgggaggctgaggcaggagaatggcatgaacctgggaggcggagtttgcagtgagccgagattgcgccactgcactccagcctgggtgacagagcgagactctgtctcaaaaaaataaataaatactaaatactactactggtactttcaggcaggcaacacccttaacctctaaacagaacgaactattttccccacatatggttttcagagcactaggaagaaacactgaaacagaaaggcatctgtttagaagcagaactttaactccttgtaaaacagcctgcccgtacctgtggccaaagcaaaagcaaacgggctaagtggcccagaccctcctaactctgcctgtctttcaagagaactcctaccatccccagcatgcagttgcttttgagctccctttgtatctcaaaatccataaaaatgttgagtaccacagatcgttctttcaatcatcagttcagaatacagaaacagaccaaaggcaatgcaaagacaatctataatttaaaaattccttgacctctatctgcctcgtaagtccatctagctaaaatgtacatttcatat

SEQ ID NO: 134564 - DNA, 281 bp, Homo sapiens
tgatgatggccatcttcgggaggtcacaagatttgtaacttccccagtcgctcctatagataacatcattattgtcaaatagtgtctaagattggtctttgagatatttttcagacttttgcattctgatgacagcccaaatgcacagcaaggaactaagtcataccaaggaatgaagtcaactggtcctgtgactactccccctcccctgaaactgactcagcacacaaagacagtttaaacactcttctgatttcatccccaaccatcaactgcaccca

SEQ ID NO: 134565 - DNA, 454 bp, Homo sapiens
aaactcaatcaacaaaggcggaagggaagtctaaaatggaaaactgattcaaaccaatgaatccaactgtatttcaaataaataacaacactgaagggggagatggggttaaaacaaaacaaaacaaaacaaaacaaatccaagtgacttatgaacacagaacttgaattactgcaggtgaggggtgcagtcccaatgagatgggggagaaccgcaaacaaacccggaatgcctgcgggcaggtttgcttctgtggtgtcctgggcagagcaattctaaagcttttttagacacatctcaggactgagtgagtgcacgtactaacggtgctgggagtcacagtttcagtaggaggaagacaaaagtctggaaagggaggaagtcaggaagttaactcatgattcctgagtatgcacaggtagacgtgtgtgtccatgagtgtgtctatacctct

SEQ ID NO: 134566 - DNA, 427 bp, Homo sapiens
agcgtgaggcggaggatgcacagagcgtgaggcgggggttgtgcagagcacaaagcggggaggtgtgcagagcacaagatgggggtggagagcatgaggcaggggtgtgtgcagagcacgaggcggtggggtggagagcaagaggcagggtgtgcagaacccagtggctgtgcagcgtagcaagataccagatacggtccctggcaagaagctgagatacctccactggtacagagataggctcacaaacaccgaacaagatgagccatttctcaaattttctgttttccaaaaataagaacaggaaggactcttccacagcatccagcctgtgcaaacctccctcctctgggcagatgggaccgttggtccttcccacagctggtcaggaggaccaggatgcggccaaaaccctctctcaccttcc

SEQ ID NO: 134567 - DNA, 664 bp, Homo sapiens
gtctcttagtataaaattaccatgttttaccactcagattatgcactgcacatctgtgaggataccattctcatagtctgtgatgtaaaaggaaccctgtcggttgtacaaatcactttgcttcttcaaggtttttgatatagccatagaactctttattttcacgaaatcttgtatagaaggccagcctataaaagaaataaaagtgaaactgctctgtttgaaacagagatgagagtttagagccctgcctgctcagtttccctctttttctatgcaatcaattgctgtggtgcttcctaggatccctaggattcctcagaagagttttgaagtctctagactagatcatgaatatagttctagccattcagaattctataatctctctggctgagtatcaaatacatccgtcgcaccatgtttggcactgaaagtgggtaggaatgggagccatggcccctgatctccaagagttgataatattgttttagaggtcagcagaaaatgggaagggaaaatgaacttaaataagatctcataaatagaaacacttattcagaaaagaagggctggggcaatgaagaatgactccctaaagacagtaacattggaatggagcattgatagaagagatgtggagaggcagaggggaaaagcagca

SEQ ID NO: 134568 - DNA, 449 bp, Homo sapiens
ggatcacctgaggtcaggagttcaagaccagcctggctaacatggcaaaaccctgtctctactaaaaatacaaaaattagccaggcatggtggcacacgcccatagtcccagctacttgggagattgaggtgggagaatcacttgaacccaagaagtggaggttgcagtgagccaagatcatgccactgcactccagcctgggtgacagagcaagactctgtctcaggaaacaaacaaaccaaccaaccaaaaaagaccagtgagccaaacggaataaaaagagatcaacatttaggcacataatattcaaaaagaggaatttttgaaagcagcaaaagaaagatgacttaccatatataagggaacaacaatatgatcaacagttgatttctcatcagaaaccatggatgccgtaaggcaggaagatgacatattcaaagctgaaagg

SEQ ID NO: 134569 - DNA, 855 bp, Homo sapiens
gccgaggccgcggagctcgcggaggcaaggccgaggataaggagtggatgcccgtcaccaagttgggccgcttggtcaaggacatgaagatcaagtccctggaggagatctatctcttctccctgcccattaaggaatcagagatcattgatttcttcctgggggcctctctcaaggatgaggttttgaagattatgccagtgcaagaaaggcaaggaccctgttgccgggccagctgccaaccaagggtttcacgggcattgtgtgggcctcatcggggggcactacaaatgggccaacgtccgggtccgggagttgttaaacggtgcttccaaaggatgtgtggcgggcaccgcacatttcctgtggtggcccaatacaatcccgtggccacaaaggctcttcccattcgttccccctgttgtctggcaagcagggcataacgtggggggggaaacaacagaatccggcgaaaggcccccaacaaatggtccccttttggcaactgtgtcgacagtgccagctgcaagacgcttctagttggtcttggttacgccctcattcccttgcaaaccccagggggcacagttggcattttcggtctctcggacaagcgttgttggcctaaaagaaggctgctacaattgactgggttgggtaatccgaatgacgtgtaacacccttccatgccggggggttgcaaatgtgccaccctgggcaacttcgccaaggccacctttgatgccatttctaagacctacagctacctgacccccgacctctggaaggagactgtatttaccaagtctccctatcaggaattcactgaccacctcgttaagacccacaccagag

SEQ ID NO: 134570 - DNA, 242 bp, Homo sapiens
ctagggtttgtggatatagtgatttctgccatcatgcaggttaccattgaagcagagattatagatgttaatcagaagtataatgagtgccaaaaaggttatatataactatatgtgtgtatgtacaggatagggggctggcaatatataaggagaggaatggcagtacattaagaggggaccctaacaggctggacagagttgatgcaatggtaagttctgagtagaggccattgtagtgt

SEQ ID NO: 134571 - DNA, 621 bp, Homo sapiens
  misc_feature (257)..(257): n is a, c, g, or t
tctaacctttctgttacaactgtacctctccttctgtactgaaagtcctggttttcaagaacacagggcacgatagaattagaacatcccacaattactcatttcttttatttatcttacacttacagctgtctcagaataacaatagaaatacaaccacaaataatatggcaattgaaacaattaaaaagttttcatttgcttttctcattctttcccaatttttttttttttggagatggagtctcgcgctctantcggggtgacagagcaagactccatctcaaaaaaaaaaaaaagaacaaatttgggtcaaccctaaggggttataaaaacacaacaacaacactcactattacgacatcggaaagagccggaaatccccaaaaattaaaacgacaccagacagaatcgacacccctattcgcgacaagggacacaaagacacccaaagactgagcgactggtgcccatgagaccttagaagaaacgtagagcaaacaccacacaagtggcaccacagtaaaaaacaacacacccatctagagggagagaccagatcacacaaggcacgagtacggggtggaacacgtgtatctggcccaaacgaaaggagcgaca

SEQ ID NO: 134572 - DNA, 385 bp, Homo sapiens
ccaatcaacatgacatctaacctctccaatacagaaaaaaaaatttcctcatttcaagcttttaaagttttataggatattagttcagatgtcagagcaaacagccaggcagtgctattccttgatgttaaggaagaatagaaaagcatcagggaaacgcaggtgagattgcctggacttttgatgggggtcagagaaggccagccctggtcaagccttccagtgacctgcacctctgtcacacttattgcagggcctgcatgctaatcatcagcaagccctgggcctgcctgcggtgacagggagacttcatcttgcatgcgactatgaataattcataaacatggttatctggaaatatgtggtcatcattagcattttaatg

SEQ ID NO: 134573 - DNA, 755 bp, Homo sapiens
gaagaattgtggaaattaaatcttttttcctttcagaggaagaaagatatgtcaggttttcaatacaaaaagaaaaaacgtatatgtatttattgaatgcttcattctggacccaaaattaaatacataacatcttatttaatgctcacaacattttatgaggcaagagatgagatgttcgtttgatatatgaaaacagtgactatactatcaggcaacctacagattgggagaaaatttttgcaatctacccatctgacaagggcctaatatccagaatttacaagaaacttaaacaaatttaccagaaaaagacaaccccatcaaaatggacaaaagatatgaacaccccatcaaaatggacaaaagatatgaacaccccatcaaaatggacaaatgatatgaacagacacttcttaaaagaagacatttacgtggccaagaagcatatgaaaaaagctcaacatcactgatcctcatagaaatgcaaatcaaaatggcaataagataccatctcacgccagttaagaatggcgattattaaaaagtcaggaagcaaatagatgctggcaaggctgtggagaaataggaacccctttacactgttggtgggaatgtaaattagtgtaatcattgtggaagacagtatggtgattccccaagaatctagaaccagaaatatcatttgacccagccagcaatcctattactgggtatatacccaaaggaatataaatcattctactataaagaga

SEQ ID NO: 134574 - DNA, 377 bp, Homo sapiens
ttgcaggttctgtcatggatccattcaataactaactggtttagatcctggttaagaggtttctcctctctctttccccttaactacaccacaatgtcaaataagctctagcttaggcaacaggggatatcagtatattcttagcttcctttcaagaggagaaggctattccagcctttggctttaagcagtaagcatagctaatactcctcttatggaacatttttagtccttgtttacccagaggagggggaactttgagccactattgagtgctcatagactcagagctttgcaggtccacagcttatatccccattcacagccttgtgtttcttctcatcttcttgtgacttagcctttctaaataaaaagta

SEQ ID NO: 134575 - DNA, 416 bp, Homo sapiens
tgagaacaggaatgttgtctttgcttttcattgctgtgccccctgtaattacagcagtgattatttatttatttattgggtatctcattgtggtttttcttttgttacttatttattttattttattttagattcaggaggtacatgtacaggtttattatgtggttatagtgtgtaatggtgaggtttgtgcttctagtgtgttcatcacccagacagtgaatgttgtacccaatagataatttttcagccctcatcttcctccagcacttcccctttcaagtccccagtgtctattaattccatctttatgtccacatatacccatcatttatgtcccacttagaagggagatgatgtggtatttgactttctgtttcggagttagttcatttaggataatgacctccagctcc

SEQ ID NO: 134576 - DNA, 701 bp, Homo sapiens
tgactcaagggtttaaaaccactgatcatgcattattgtacaaataggctattctgccccaagggtgactcctgagaagctagtctttaaaatatcatcacagacatccctgtggatgtggaagactgtgcattctcaagctgtaccttcttggaagcaatgagagagggatgaaatatgctacacattttgagatcctcaccaaatgtgggaccagaaaatgaaaactttctgatatgtgctatcagcctgcacaacacacatgcatccagagacaaaaggtaaaaatataactggtaattaaacataagttttgaccagtaagtggcttatgccaatccaggaacacatcctaggtagcagagcaaaaaaagtaaaaacaaggagaaaggggggaaaaacaaggggaaaaaaaatctagcagagatatgagaggctaaacatagttaaggaaatagactttgagaattagttcagtcaagtaactaaacaaataaacaaaatggccaagtagacaacagctaccacctgcaggggatgaataacgagagtcactacaatctattagcaaaatatcaagttttaaagaaagacaattataaagcattcaaaggaacaggaagaatctaacacacacacacacatacacacacatcaggcagtagaaacttcctctgaaggtggaattagtaaataaacat

SEQ ID NO: 134577 - DNA, 394 bp, Homo sapiens
ggagggtaaggaaactgaaatatgacaaggttaaatgattcagatgaggggccggaaagcacgcctcccgagacccattcctggaagcgggtctttaaagctgctctcagtttaaaatcaaccaaatgctcagatatcagatgcggaaactgaggcacagggaatttgaacaacttgctcaaggtcataaagctagaaggaggcacagccaagcatgggcttgtgtgacctcaaagcctatgttctcgccactgctctaaactgtttattctgttggcttgtcataatgattgaagacaatgtatataaatcacagagggtaggactcagcttgtaatatgtcctccatacattttatcgaacattattaattaataaacaacagataaataac

SEQ ID NO: 134578 - DNA, 182 bp, Homo sapiens
gtgctgaatacttcttgaataaatcagaaaatgacttagatgtaaaagtaacatctttgttgcttgattcaacatagcttactcatttcattggtccagttatagattctgttagatatgagttctaaatttcttttcaaagaatcaatatgtcagtatgttcaattctttgccttctactt

SEQ ID NO: 134579 - DNA, 815 bp, Homo sapiens
gtttattctgagttttgctaatacagaaagaaacattttgtttgtgaagtgatgttggccttataatgcatagcacctgaattcagtatattgccatgatatctttttctaaaccatttgtgttcatttgagagctgattaagtcctttgctttttttcttttttgagacagggtctctgtcacccaggctggagtgcagtggcacagtgacggctccctgcagccttgacctcccgagctcaagtgattctcccacctcagcctcctgagtagctgggactgtaggcgtgcgccaccatgtctggctaatttttgttattattttttgtagagatgaggtctcactatgttgcctaggctggtcttgagcttctgggctcaagcagtcctctcaccctggcctctaaatgtgctgggatctatagccctttgctttttgataattcctgtattattttttggaaattatccattctgacagaaaagagcctgggtggagaagaagagaaaggatggtaaacatataacttacaaagtaactattaagataatattgttgggattaaagcaaaaacccatagtgagttatgggtatttgtaatgaatattaacaggaaccctgaaactaatctgttgagtcctaacaggaggttcaaaatgacaatatcaaacaatacctttttaaacttttatgttttaattttttttgtacagacagtctcactgtgttgaccaagctggtcttgaactcctgacctcaagcagtcctcccacctcagcctcccaaagtgctgggattacaggtgtgagccac

SEQ ID NO: 134580 - DNA, 561 bp, Homo sapiens
gccctgaccgtgtgacttggagggcacaggcaaccaggcagaagcatccccagcaccactctcctgtcttctgccctagtttactacaccagtgtagcctggggcatttttgtcccagacctcctttctgcccagtgttttcctaagaaatagttactactgggaaaaaaagtcataatatccctgaatgtctgctttacagaagagatctgtggtctcaagcaggtaggtcctttaatgcattgtattttaactaatctattcacaatatgctctaattagtgttactactctagtaaaaattaaactagtaacactacattttatatggtatttgctacatggcaagcactgttctaaacactttgcttatgttaacccagttaatcctcacacccactttacaatataggttctgtcattggcctaaggtcacagagttagtgagaggtcatactgaggttcacacccacaatgcttggcaccagaagtcagttctcttaacctcttcttacataatgcaatgcagttgaattgcaaacccatgactttttcttcatg

SEQ ID NO: 134581 - DNA, 305 bp, Homo sapiens
gtcttagtatttaatcctcatgacaactttatcagatgtgtagtactatctttatattatggataagaaaatataggctcaaagagagtaattaacttgtccaaggctttgtcaatgaaatgctggccatagcaatattgggcagctttgcctctgtgccaacacccgtgctgctctgaccagactcccactgaagtctgcttaagctgctgctaagaccactttggatctcacaatctagcctctttcaaggggaggcctaaacaccatgcctcacatccctgtttgtttcagtcactacccgc

SEQ ID NO: 134582 - DNA, 836 bp, Homo sapiens
ttcgataaagaaaatatggcatatatatataccatggaatactatgcagccacttaaaaaagaaagaaatcatgttctttgcagcagaatggatgcaactggaggccattatcctatgcaaattaacacaaacacagaaaaccagttattgcatgttctcacttataagtgggcactaaatcttgggtagacatggacatacagttaggaacagtagactctgggaactccaaaaggtgggagggagagaaaggggcaagagctgaaaaacttcctgttgggtattacgtccactatctgagtgatgggatcaatagaagcccaaatttaatattatccaatatacccttgtaacaaacctgcacatgtggcccctgaatcaaaaataaaaatggaaatttaaaaaataaaggtaaaaaatttaagatgctgtattaataaacactctcaacctgtacaaaaattttaaaaagggttagatagattgtattatttctatttaacgaacatttaatttgatattaagaagataatgctaaatattactttaataaggaaaaaataattcaataatcaatgtaaaaatccatatacaaattactcatagtgaataaatataaaacatacacctgccaacaaacacacacacataagaaactggacagggccgggtgcggtggctcacgcctgtaatctcagcactttgggaggccgaggcaggcggatcacgaggtcaagagatcaagaccatcctggccaacgtggtgaaacccgtgtctactaaaaatacaaaaattagctgggtgtggtgatgcatacttgtagtcccagctact

SEQ ID NO: 134583 - DNA, 441 bp, Homo sapiens
ggtcgcacttctgcacccaggcgcacttcggcacccaggcgcacttctgcacccaggcccacttctgcacccaggcgacttctggggtgcatgcacgaggggtcttcctgctgtagggcaggccagatggggctcaggctgtcggggcgctcacacctggcgctttggctgtcataggtgcggctgactgcacagaagtcactggggcctttgacttctacacactccctgtggggctccgcactgtgcccgtcaccgagagccagtgggtgagagccagtttcatttgtggtagaggcagcagaggttgtagaaatgctccttgaggcagatgccacaccccagtttcatggagtgatttgggctgagccgagtctgcagcaggcagaaggctctgagatgttgtcctagcctgggcagaggacaattcagagctcgggg

SEQ ID NO: 134584 - DNA, 533 bp, Homo sapiens
catcctataatgacctctgactctttctgcttctgcttaaccttcacatgtcttgtttctcattatttcttagtgatccagacaaggaacccctttccttatttttttccccaaattactcacataaggcgttggttgatgtgacaggctttgtctaattctgggagcaaatgggagggagtaattttgtacctatgtaaaaacaatttagaattgaatattagacatctttgaacttaaatgtcctttatccattacaaattttttacaggtcaccttactcttcagggttccaatacgctgcttggttaattctctcttcccttcttccacccctttcacctttattcattaattcattcacccattcactgatccaacaaataagcattgagtgttttccctgtcaggtgctggagacacagtgatgatcaacataaactcacaatacacagtctagggaaagagaataaaatctcaagttttcagtgcaattgttagcttaatttctgtgtggcatgtattctaaaaag

SEQ ID NO: 134585 - DNA, 215 bp, Homo sapiens
caggtggtggtaagagctttgaaagaataagcaaggtaactaactggtcagaggaagggagatgggtgcattccctcagatagaccgccccagaggtctgcctctctgacatgacatttgagcagagacccaacaggaaaaggaagaggctgctctatggccgggtacggtggctcacacctgtaatcccagcactttgggaggcccaggcgggc

SEQ ID NO: 134586 - DNA, 428 bp, Homo sapiens
ttctcttaactctgaaagaaggagttaatgggtattagggacatctagcatctcagcctgcagccagccccctaccaaggttatctccttctaacttcagttgatctgtgctaagagaacacatgcaaattcttactatcatttaagaaatgcataggaaaggccgggcacggtggctcatgcctgtgctgaggcgggcaggtcacaaggtcaagagatggagaccatcctggccaacatgatgaaaccccatctctaccaaaaatacaaaaattagctgcgcgtggtgccacgcgcctgtagtcacagctacttggcaggctgagacaggagaatcacttcaaccccggaggcagagattgcagtaagccgagatcatgccactcactgcattccagcctagggacagagcgaaactccgtctcaaa

SEQ ID NO: 134587 - DNA, 652 bp, Homo sapiens
cacagatctgtttctgaagtctctgttttataccattggttatttttatctgttaataggcaactgccacactgttttaattgttataaatttcttataaagtttgatatcttatcctataaatcatatttgtcatagatattcttgacacttttcttgtacaaataaatgttagaaacagcttgttttgtaaatagctttttgtgattttggttagaattgcatttaatcttagatcaatttcaggagaattgacattgcaataatgttggggttctccattcataaatatggttatcaccaattcatttagatctttttaaatgtacttataaagttttgtaaattttttcttaaagaacttgcaaatcgtatactagaaatggcattttaagccttcaatttcttatataacaatcgtataagatagcaattgattttttaatcaacccttttttcttcaactttgatgtgctttttattaattccaatggtttgaaatattctgagattttccacttaaattatcttgttgtctgttaaaagcaatggttttggccgggcacagtggctcacacctgtaatcccagcactttgggaggccaaggcaggcggatcatgaggtcaggagatccagactatcctggctaac

SEQ ID NO: 134588 - DNA, 561 bp, Homo sapiens
  misc_feature (136)..(136): n is a, c, g, or t
  misc_feature (144)..(144): n is a, c, g, or t
  misc_feature (153)..(153): n is a, c, g, or t
tgacagatacgatcgagctcggaccctagtttagaagttcaatagcaataacaagcaattctttctcctggggaagaagacactgagtcgaggaactaataactaatgaattttttttttttggagatggagcctngctctatngcccaggcnggttaaataaatgtatgtaggtgttatatcacacccctgaataattcctccgaatcggggtgggggtgtcagtcatctgtactccacccagaagtcaatgccacattcctgagtctacatacccgtgaaatgataggaacccatgtgcccataaggtcctggaggggaatgcaaagttggtcaagacatgggagctagacagcaaggaaaaggaattgcaaagggaagttagtagttaaataagttaccacatatccatgtaatataatactaagatagacaaatgcaaagttgtagaaaatagttaaggaatattttcaagatactgtatcagagaaatcactttacaaaacaggttgaacaatacaattatatctacgctattggaagttctccactaggggttag

SEQ ID NO: 134589 - DNA, 220 bp, Homo sapiens
gaaagataagggaatactaaaaacaactttgtatacataaatttgacaacttgaattggaccaattcctcatccaatatgaactaatatgatgagtcctataacttaaggcaattgaatttatgattaacaaacttccaaagaagatttgtccagacccaggtgatttcactggagaattctgccaaatgtaaaagaagaattaacatcaattatacaca

SEQ ID NO: 134590 - DNA, 303 bp, Homo sapiens
tgaaagctagtaaaaacttatactactttggttaagtttttgtgtggcatataatcatcaatagaaacatagaagtaacattaactgtcccatttttttattgtctccctgtataaactatcattttaaaaaatccaactgccagcatgtccaatttctccaaattcttgaagcaaataaaataatgataaatgctgcattcaactctaagacatacaatgcattgcttttaacgtctctgatcacggtggatttacaactgatgacaggtctgagtctaacaggcagtgctttctttctttc

SEQ ID NO: 134591 - DNA, 241 bp, Homo sapiens
tgttaagcgccatctgttcatagtagccgtgcactgcctcatctccctgtataaactatcattttaaaaaatccaactgccagcatgtccaatttctccaaattcttgaagcaaataaaataatgataaatgctgcattcaactctaagacatacaatgcattgcttttaacgtctctgatcacggtggatttacaactgatgacaggtctgagtctaacaggcagtgctttctttctttc

SEQ ID NO: 134592 - DNA, 542 bp, Homo sapiens
gtttaagtatcatattgtcagtactaaccttttgtttattaggacataagacctaagaatctagacattaatctgatgtgattgttctgtttgttatagttagcctgtactccctttttttgttctttgtacttcccctttcattttgagtacatatatgtgtcatttgtaactgcagatttttccaattattcttcctcagtcttttcctttgggtaagtaactcagcatacataattcagccacctggtaattgtaacgccaccatctctccactaaaagaactgtagtagcatcaggctaaatagcattaagttatctaacacattacagtagagtaaaccaattccttcaggtatacttttctcttccatttttggcttctcactctcttttttttgtttgtttttatagatgggtcaatgcccattatcactctagatggataagggagccttaattatatacttatatttttgcactgtcagattggagtggggtaaaaatgtttcttcttttatgtctaatactctttttttttt

SEQ ID NO: 134593 - DNA, 712 bp, Homo sapiens
caagggcaggagttcgagatcagcctgaccaacatggtgaaaccccatctctactaaaaataccaaaaattagctgggcatggtggcgggcgcctgtaatcccagctactcgggaggctgaagcaggagaatcacttgaacccaagaggcagaggttgcagtgagcgagatcacaccactgcactccagcccaggtaagagtgcgagactcgtctcaaaaaaaataaatgaatacaccaaacaaaaataaacaaaaaaaaagtagggaatacaaaataatctcagaaggttacattcaaagttaaaaatgaaaataaatactaaaaaaaatttgtaatgaaaaaggtggtgtggtcattagagaaacgcaaatcaaaaccacaatgagataccatctcacgtgagtcacaatggctattgttaaaaagtcagaaaaacgacagatgctggtgaggttgtggataaaaagaaacatttatacactgttggagggagtgtaaattatttcaaccattggggaagacagtgtggcaattcctcaaggacctaaaaaaaaaaaaaaaaaaaaaaaaaaaatatgttctgggcgccatgggcccctaaaaaaattttttaaacacatctgtttgggcgcgcggccccatgtgtaagtgcaccgggcaaggggtcccaagagacacccggaaacaacggggggggttctcccaattaa

SEQ ID NO: 134594 - DNA, 365 bp, Homo sapiens
ttcaggtttcaaaacaaccttatgatgtaggcgttttcccattttatgaatgaagaaactgagggatacagagtttaagtaatttgctcaaactatacagctagtgactgccagagctcagttaagcctttttgtttagtgcctggggttttgggccaggtcctaggcattttggaaaactgaagagagaactaggcaccacagagctgggctaaaggagctgacactgtggtgggattcctaatagaaccctgtggtttgctggcacagggccctctacaggcaggtggggtaagagctggggcagataaggaaagacaccacagtttaacatctgatgctcagctcagagaggagacctctct

SEQ ID NO: 134595 - DNA, 368 bp, Homo sapiens
caacagagtgagactctgtctcaaaacaaaaacaaaaacgaaaacaaaaaacaaaacaaaaaaacaccaaaaaacaagtaaggggggcgggatgcaaaatgcttggcaatcccaccccaattcaggcaggactggtttccccaagagattttctgaggcagccagctcctccgtggcaggacttgccatggtaaagggtagggccgggtgaggcaggggagtgggggctggggatgatgtgtaatatttccatcggcaaataacaagattcccacccccaaggatggaaagtattaagtgtatcgtctcacaaagcaggaagcaaggctggcttcccggctgttgattcagcggctcagtgacatcag

SEQ ID NO: 134596 - DNA, 128 bp, Homo sapiens
tggtagtcactagccacatttggctcttgagcacttgaaatgatgcaagtaaaaccgaggaactgaatatttaattttttgttgttgttgtttgtttttgagatggagtctcgctctgtcgtccaggc

SEQ ID NO: 134597 - DNA, 361 bp, Homo sapiens
acagtctctcaaacactaaaataaatttgtatgcatttttattgtaattataaaaccaaaatttttctgaaatttgactctgattgctttatacttcctgaaattacctctgcaacatcaaaatttatttaaagcaaagtactgtcacctttaatacactactgggatgaaaacataaaagcgtattctaaagccaaaaacaaacttttaaagaaatatactagctattatatacaaaattatcaaaatatgagtacagatacataacaaattcttgttgaagttgaaaaaagttggttactaatattaacagttcaccagttactttttattatggcctctgaaccttgaattaccttca

SEQ ID NO: 134598 - DNA, 449 bp, Homo sapiens
ggtgcactgtggtgccccagtgcctggaacagtgttggctgcctggaacagtattggtgcacaatatgcagtaggcattcaattagtgcttgctgaatgagggagcctcagcgttttaaaatcagaccttgaaaacgttgcaaagttcttagaatcccaggcttgaagaattggagactgggaggcagtgaggctgggtgagtctggaaggctgcgggcccatctgccccatcctggtcggctgtgtgtgtgtctctctttttgaatctgtctctgtctttttctctctctgtcactgtctctttctgtctctgtcttgtttacctccttctcattgtttctctgtgtgttgtctgtctctgtttctgtctctctcttttctctgcctcttctctcctctcctctccccacagcttccttccctgcccccctcctcctttcttcctctc

SEQ ID NO: 134599 - DNA, 771 bp, Homo sapiens
  misc_feature (5)..(10): n is a, c, g, or t
  misc_feature (12)..(15): n is a, c, g, or t
aagannnnnnannnntgtatataaaagtagtctttcataactgtctgtatttctaagttaatatataagtttatctagataaaaaatacttaagaaacataaaccaaaatattttatgaaattgtttttatattagctaagtataaatttattgctgtataacaaattaccacttggtggtaaacagtgaacatttatcttaacagtttctgaggttcaagaatttaggagcaatttacctgagtgattctatcttagattctcttataaggctatatttaagattttggttatagttgcagtgatccgaaggcttcactggagcaggaggacaagcttctaagatgactcacttacatgccactgcaggagtcctcagtgtttcactggcttttagcagagtgcttcattccattgccacatagacctgtttttggtgttacttaagtgccctcacaacgtggcagcttcctttttccagaacaagggtaaagagataaagactgagccacaatgtcatttataatctagcctcaaaagttacacacagtgttttctgtttgttgagcaaataacttctattcagtatgaaaggtgctttacagggcatgaataccagagatggggatcgttggggccatcttggagactagctaccacgttaagaataaataatacttcttaaattaagcatttttatttcatattacaccatgtcagaatgcatttaggctttactcagtagcctgcagaccggaaaatttcaaaaaa

SEQ ID NO: 134600 - DNA, 866 bp, Homo sapiens
taaggtctcaactgtatgtcttagaattcctgccctacacccctctatccctcaggcacgtgggattcccctacccactcctgtctgtctagtgtttttatttgaaccacatacactaacaagcgacctgtgaagagtgtttctacctgttcttgatgggaggatgctatacctatgccagcattttctgaaaaactttagagctctcagctagccagaaatggactctgccctttcctgtttcaaaggtcagctccaccagcctgagctgcccactcagtttgtttcctgttagagggacaccctcagctctcagctcttttaaacagcaaagatgacagacatgtcctgaataattgaactcaaataaccttccctctttatttttccagaccatttcctggttagtcagcactcaggtctttctaagggggagagaattctccatagacccctaattacatatttacagtacttggtgtttcatttttgcaataacatctagtagggtcctttttctttatatagaaaaacatgaaaaagcaagacatttcataatcactggttagttaactttggttaatttttttcaaagcacatagtaagaaaattcaagcagtttagaaaagtataaaattccatttactaccactgtagtcccttacccaaagataattactgctactgttttcttgtgaatcttgggaaagtaaattttgtaagtatacatgcatacttccatattgctgctccgtgtagcactgattcattataatgctatttgactataaaatatttcgtacaaaattattcatgtacatatgccagtccataataattcactcttattttgcccatcctaagga

SEQ ID NO: 134601 - DNA, 328 bp, Homo sapiens
tgagtaatcaatattgtggaaaagtgctagagcagacctaccttatataaattaatttgtttgaattgctctattcactatgaataaatatttattggagtaccttctatatgctggggacctcagccatgagatacgcaggtggaaaaaataacacttaagcagcttattgtatagcagagaggtggttgaattgatagacaattaaaatacaacgtgttgaaaggcctgttaaagccacagggtcactcagtggcaggagggattcagtcagcctgggccagccatggcaagtaagtggcctttggaaagttaccaaggtaagaca

SEQ ID NO: 134602 - DNA, 265 bp, Homo sapiens
attaaagagaataaatcagtgaaggagaaagaagaggtacaataaagcaacaaaacctaaagttggttttttgaaaagattaataaaatcagtctgggcgtggtggctcatgcctgtaatcccagcactttgggaggctgaggcgggtggatcacttgaggtcaggagtttgagaccagcctggccagcatggtgaaaccccatctctaccaaaaatacaaaaaattagctggatgtggtggtccacacctgtaatcccagctac

SEQ ID NO: 134603 - DNA, 475 bp, Homo sapiens
tgatagctgtgaagaggcgctctgctaagtgtcattgaccttagaatccacaaagctctggggctttggagacttagaactttattttgctagatttaaagtgtactcttctcttaacgtagaattcatgtaaaactacatcataagacacacctatcaacccagcaggctaatttattcaagaatcaactgacaggcagaccagaaattttttgtcagtttggtaagtgtgaaagtaaagccaaattattattatttaagaactattacatttattcttaatagaaaagtagtatggttattttttaaaaatccaatcccaatatgtgcgagtcctttctcattccaccttatgagataacaaatgttagcagcttagtctgtatatattcttcccaagtgtctgtaattgcaataagctccattgctctattgctttatttttctgtagttctctagttatgttttgcactcc

SEQ ID NO: 134604 - DNA, 430 bp, Homo sapiens
agctgtggatggagagaagctgcctggcacaagaaaaactagcacagcgggagtcactgctgcaaaggtcaagtctgaattggtcttgccaatctgcactgctctctggggaagtcaggttgttgtataaaggcttgaagcggaagtttctgaagcagtcaagataaggagggaggaacacaggtggtgagaattgaagatcagcttctaggagaaaaggaaatagctaagccttcggggtcagtcatctctagtactgcacactcagctatgagggagatatcaggagaagagagaaaggactctctgaatacaagtccttgcgggctggacaaagtggaagctgtcagcctcccatggcgtcttgcttaggggagctcgtaccttgtgcaagactgagggccttggcggggaccagtgctgttctatg

SEQ ID NO: 134605 - DNA, 231 bp, Homo sapiens
caggtgatccacctgcctcagcctcccaaagtgagatctaagtctttaatccattttttttatggcaagaggtagggttctagctttattcttctgcatatggatatccagttgtcccagctccatttattaacgagactgtcctttccccggtgtatgtgtttgacacttttgtagaaaatgagttcattatagatgtatggatttatttctatgttctctattctgttc

SEQ ID NO: 134606 - DNA, 738 bp, Homo sapiens
gctctgtgaaaggtgttctgttttttcacctagctgcatctaaaatcaattgaggtcatagatggaatgtaaataaggaatagtgtggatggacaggatgggaagccagcagtgcactgttgagttatatcatattgctaatctgttacatagtggttttattttattcctacagctgtacttctagtgtacttaattaggtagtgcctaagtgcccatcatattcattttctaaaaaagtttgtctgcatgtaaactgttgtagtttggataatgtactttaaaatatcttccccagaaagcttaaaaatgacttccctaaaaattttcataagtgctaataaaatgaactccaatctattttcaagtcatacccttcggttcttttctgcttcacttagacaattatatttaatcattataaaaagatggagtccagttccttaaatcctcatcttcttagaattcatatttgtaagaattctaaatgttgttaaatagagtttgacatggtatcattgttaactagtgaatacaaatacttacataaatagaatatgaaattttgatttaatacaatcaattctattcaacaaacaatcttgccagacataacacatactctaaaatcaactacacaatctgccataaaagaatcctcagcaaattaaaaaaccaacatcatatcaaccacattctcagaccacagaacaataaaaatagaaatcaatactaaga

SEQ ID NO: 134607 - DNA, 364 bp, Homo sapiens
attgacattttatatcccctccaaaaaagggcagctcgactcccttaaagaaaaactccaccgcggcaagttaaggtttaatcctgccccctacaccccaccagccacatgctcaccaactatcatctgcaggattccgggagctgtttgttctctcatatctaacagagctacacagggaagtcgagaacccaacatataagaaaggtttcacagctgttgttaaccctggctatactttaaaatctcccagggcactttaggaaacccccagaggttctgattcaattgcagccaggtggggtcttcacattagtatgttttagaatccaggtaattccaatgtgtcttaaaatgacccatc

SEQ ID NO: 134608 - DNA, 416 bp, Homo sapiens
ttctttctcttctctttttccttccttccttcctcccctctttccttccttccttttctttctttctttttcttttctttcttccttccttcctttctttctgtctttctcttctctttttccttccttccttcctcccttctttccttccttcctttcttcttctttttctttcctttctctttctttctttcagaactgcaagccagatggaatgactgaacagtcccagctcggccttactgcacctgatggccccaatagctccaggactatcttgcctcgcttgttcagcccagagccgctcccctacttctcctcaggggacatagatggggcaggtggcctgggagatggcacactctctaactggccctctctgagtccctgtcacaccctcagccagtggtgagggg

SEQ ID NO: 134609 - DNA, 189 bp, Homo sapiens
tttccagggggacattttaaaggagaagtagatttcaagtaaatgattgcaacttatcgaaaataatgtgctacttagcatctgcggcaaacatcctggcaggcagcgagaggaagcagcactggagcagatgggagtgattaggctctgattttcagacgggcttttttgtggtggttgttgcctcca

SEQ ID NO: 134610 - DNA, 281 bp, Homo sapiens
atgaccatgcacttgcagttaaagaaaaatcccagtttcactcaagaatgacctcgatgaaccagtaagaaaagatatttactaaatcttgacccttgagggctgcatgtcttttaaaaaataatagctttattgggatataactcacataccgtaaaactcactctttatacaattcactggttgtaactatggtcatagagttgtacaaccatcatcactatctaatttcagagcatttttattacctcaaaaggaaacccataccctttagcagtcac

SEQ ID NO: 134611 - DNA, 380 bp, Homo sapiens
gatgatttaaaagatttaaaatcacttcctattttgaaatgatttattgtgatcatagatttgaaattttaaaaaattatgtacctgcttgtagaatgaaaagtacacaaccttataaacaagctgggttttttaaaaaatttccactcattttactagcatttagaatctcaaaaactgggacctagatttagccagaacccagaaaactgggacctaggatctagccagaacccagatttaacctcactgccatgcctcataccctatagcagccactgtaacctacaaaagcaagtccaggtgcttcaaccataacacacacagaccggggctggccctttaccactatccatcattgtctcccagcattccctgtc

SEQ ID NO: 134612 - DNA, 376 bp, Homo sapiens
agtggaaggattttagaggaagggaagacagaaggggattattgggccagattaagggatgtttacagagttaggaaattcagagttccatggataatgggtcagaggagagggctggacatctggggcgattgaggcaatgggagggaagatgggattcattttgatggtctctaaatgaacttgtactaggtcaatgtttcttgaattaggaaacccacaagactacagccacatgctcaggggaccagagtgtactaatgaatttttaaattttggattgtaattttaatgataatctaaaacttgatttcagttcccagattagtttatgttaatttggaattgttaccatatagtgctattgaaacttcta

SEQ ID NO: 134613 - DNA, 498 bp, Homo sapiens
acccaaacaaaccggctgcagctgtataaaagtacagcacgtacaacagtgcacagtacataatatgtgataatgataataagtgactatgttattggtttatgtatttactatactttttatagttatttaagagtgtacaccttctacttattaaaaaagttaactgtggccaggcgccgtggctcatgcctgtaatcccagtgctttgggaggccgaagtggctggtctcaaactcctgacctcagatgatccgcccgcctcagcctcccaaagtgttaggattacaggtgtgagccaccatgcccgactctttttaattcttaatgtggctacttgaaaatttaaaattacagatgtggcttgcattctgtgttggtaagctgctttagagcatttcttttaacaccaggagttcttcccctcatcatctttttggctgagtcgtcactgcagcgctcatagccccgcatgtacctctccagccagaaccctta

SEQ ID NO: 134614 - DNA, 518 bp, Homo sapiens
acagggtcctgagctaggctgccccagcacgggcttgtcaccaaggctgccagggatgagtgagcgcagctgggcgcatcagcccctcctgcttgcccaccccagcccagcctcccagcgcaggaggagcatttagagcacctactggtttatgccaggcactttccagaatcttctcatttaatcttcgtcatcacctttacagccagacacttcctccttttacagatgaggagatgggggctaggagggttgagtaacttggttccagcactcagaagtggccaagtctgagtgtcggcccaggtcagcccagctctggggttcctgcagggcctgccgtggtgcccgtgctgcggtgcccgtgctgcggtgcccattctgtgccacacccttcttggatttgggctgcgcacaggctgcaccgcaccacctgcgctgggttgtgctcaggctgggacagatgtgtgttgctgtcccctgccatggactatctataggtgcagcaagatcctgcc

SEQ ID NO: 134615 - DNA, 395 bp, Homo sapiens
ctgcaaacctgtcgctacctgagttttgcgtgtttctctacacgcagctttgccaggtagctctctctgctacttctgtcccttcgagcatggcatggaagcagtagaaagagcctcagccttccttggagtcttgccacttccccagaatgccactcacgaagcagaaggcaggcttctctccctgggccctgttgctcctctgctgttaccagctcccctcaggttctccacctgctcccagcgtggacatgttcccctttctggagggaagccctttctcccctcacaccatttttctccccagtccactctatttcactcagcagtctgggctttagaaaaccggtaagagactcaagctatttcttccttcatcttatttcatttctcct

SEQ ID NO: 134616 - DNA, 172 bp, Homo sapiens
tataacattatcctttttcacaggtaaggaaattgagactctgagatattggataaggttctcaacaccatataagcagtgagtgctagagctgggattggaaccagttttgtttatcttccagtctttgttcttatccatcttactatgttctctctctctggaagattta

SEQ ID NO: 134617 - DNA, 474 bp, Homo sapiens
aggttgcagaggtatccaacatatctgtcatcattgtcttcattatcaacatcatagcaaagatttgctgcatggtcattacatggcagacacttattccttataataatctcaggacggagtttctattctcattcctattttgtagatcagaaaactatagaagaggttcagggaagttaacttgtccaagatatttgtttcacctggcatcggaaccaagatttgcgttattccaaagtgctgcccctagccaccatgctgagatgtgttcagttcccacaggtactgtagtcaacatgccaacacacttaatgcagttaaaatttggctcgtgtgtagatttaacagcctacagtaaacatttttttcccttaacttttccccagtatcttgcctaactggcttatgtagttcactagctaaggtataaccgcctgtaatttatttgtttctttttcccaactttttttt

SEQ ID NO: 134618 - DNA, 395 bp, Homo sapiens
ttattttctcatggtcatacagaggaacagagttaggattcagatcaagagttgaccgagtcttcctgttccaaaatatgaagcctgaccacatatacccagtgttaccataagaggaataaaaggacacaaggccgtggtggctgctgatgtctgttccacatgccaagctggagaaaagcttgtgaaaaatttgacatgttcacagcatatgatttggttagtgggaggtgatgattcctcaacttatgtcactaaaaatcaatccatcttcttccatttttgatcagattatccaacaatgattttagtcaaattagagcacctaatgcccttgaaagttattttgaacttttttttttttttttttttttttttttttttttttttttttt

SEQ ID NO: 134619 - DNA, 698 bp, Homo sapiens
gagatttttaaaaatacacaataaaaagctaaaaagtggtaagtgttatggggacaagaataaaatcaggaaaggagggcatgggttattaaagtattaaataatacatcatccctgagaagattaaatctgaacttcagttactactccccttgccctgcaaaagactggatacaggcaggcgtttcttttctaaaattctgtgctgtacagcaaacgtttatatgcttctctggaccccatacttctttctatgcttcaccctatagactaatgaaattaactatgcaacatttgcatgatttgattacaaaggccatttctccatgaagagacctgagcctggggacccagaggggttgtgtggtggctaaacttctcacttcctgtgttttaggataaagtatcagcaactgataacctgagatatttcttactttcaacctgaaagcacctaatataccaacaatagctgttctcccattttatagctgttgtttacacacacgactcattcattaggtttgaaaaacgtgttaacgaacactattagaaacaaatattagaaaatataaacttctgtaaattctggatattgagaacttaggtgtcttatttttagtattattctgtaattttttaatttcccccctacaaaagaggcaaataaatactgcattccccattttatagatgaa

SEQ ID NO: 134620 - DNA, 452 bp, Homo sapiens
ccccgagtcaagctatggcaacactttatgataaacacatttttttttgttcgtttgtttcccagttatggcccgtcctcattttttactaacaggcccatggctatacaatatttctgatcctgttgaccaagtagtacccaattttggcaagaaagtttaaggttatataactgagtgcaacttcaggttctctgactcttgagttttttaattcttaagacttcttttctgacttttatgtcttatgactcacactacattcataccacatttggtttcctctcatcatcttaacttctgcatgaataaagtctgaagtaaccaccttttggaagaaacactgtggctatgtgtcaagggtggcagtgttagctgggagaaggcctttcccagaagatctctgtgtaagagcctggccttccacagtcatttgaatgtccatcataaga

SEQ ID NO: 134621 - DNA, 725 bp, Homo sapiens
accttaaaatttaaaatatattcattcctaagaattctaatttgttacgcttattatgtaattttgttccatagcgtcacaattcatagtggaaggtagaacatttaaatgacttctcctctccagtgtttccaaaaattattgagtgcctgtatatttacagaccacaatggttacttaaaaataggcaatgtcatttaatgttatataattatgatatagggcagcactatacaatctaaaaaattgttttattaagtcagtcttatctttaactttatcctctctggctgtgcttagcatttgattctcagaataattcacattttactaccccaacaaggctaagaaactgaatctgtgacctcgttcttttctgatgtcctcaaaacaccagacacaacctctgaatgttttttccaggatatatagcatacagaaagactactaaggttacaaaagaataatagagtattaagggaagcaacattcagcaatttttctttctacccagaactaaaaatcatttgctaaatgtgaggccctctaacgaataatacctgggttaatgcttaggaacaaaagaccttcgttgaagtttatattcccctccagctctaaaatgtgactctgttaaacaattgtttaagaatacacagttacttatatttctagctgtgtgacaaaaatacctccaagaacaaattctggaaattctgaccccg

SEQ ID NO: 134622 - DNA, 422 bp, Homo sapiens
gacactgtcctcagactttaatttatttgcccccaaggatagacttagagggacattgaggaaaataggaagcacagtaatttaactgggacatacagaagttgtttagaatctggattactaaaaacagtttgttaaatagaagcagggtaatttctagccccattcctttctccattcctctagccctgcgttcaggactgagtaagatgaaattgcacaatgacaattgtcaattaatctatgaagattgaaatcgaacactcttggaggaaaaaatattaacagggttcccttatggagaatttctaaatttataaaagcacatgtgtaagattttacatttgtgtgaatcactaatgttatctacaaaaatgttttagcttaagccttaagtttaagtctatgtaggttggagaacc

SEQ ID NO: 134623 - DNA, 1377 bp, Homo sapiens
agtccaccgctgcttgccgcgcaggtgggggagacctggctggccggaactgggattcggggggagcattgcccttcggcgtaagcgctgctcaggtagagcccagcgctccgcttctccacagaacgtgctggcgcgcgcgtcagaagctaaccgcacagaggctggagtgcagtggtgtgatcatggctcactgcagcctcaacctccctggacttaggtgatcctcccgtctcagtcgctggagtcactgggactacaggcacgcaccactactcccagttaattttttttgtattttttgtagagtttctctacgttgcccagactggtctcaaacactttggctggagatccgcctgactcggccttctgaagtgctaagattacaggcgtgagccgccatacctggtcgctgtttcatattatatatgcaagaagtagagaaatcaaatctaataaaaataaatggacctcagttcacttttggacagcagaaaaagcaaactgtggaaagcagaattctacaatggcacgctggttcccaccccttggtgtacatgctctgcatgaagtgagcaggacctgtgaatataatgggataatcactcctgtgattacattatgttatatgattccattcccctcctggctttgaagaagtgagctgccatgtcatgagaacaccaggtggctaggacctgaagatagcctctaaggagctgaggatgtcaccctgctgacagccagcaaggaaatgggtacctcagtcctatagctgcaaggaattgaaacctgccaacaacctgaatgaacttggcagaggactctgagcttgtgatgagaacacatccccagcttgaaatcaaatcgacatattgattttagcactgtgagatactgagctgagaacacagttcagctgttcctggacttcagaaccacagaactgagatgataaatgagtggtgtttcaagttgctaagtttgtggtcatttgcttacagtaattgtaaactaatacacaagtgtaagtttgttttcttagagaagaaaaaaaacggggaaggaggtaagtgttaaaggatcaaaactctgacaaaaggctggttgcagaacatgacaggttgttgcactggaaactatttgtcatgcaagtttatgttaaaataagtagcttttgaggactttcatttttggtcttgtaaacatgccatttaatattgtccaactgataatactttttgcaaacagaaactgttaaaacctttaaagcaaatattactgtagagaagaagtaatgtgttatgaaactgtgaggatactaagaaggatcctacttaagtttcttcagcataaataaacttgagcgtttcg

SEQ ID NO: 134624 - DNA, 1233 bp, Homo sapiens
agtccaccgctgcttgccgcgcaggtgggggagacctggctggccggaactgggattcggggggagcattgcccttcggcgtaagcgctgctcaggtagagcccagcgctccgcttctccacagaacgtgctggcgcgcgcgtcagaagctaaccgcacagagagtttctctacgttgcccagactggtctcaaacactttggctggagatccgcctgactcggccttctgaagtgctaagattacaggcgtgagccgccatacctggtcgctgtttcatattatatatgcaagaagtagagaaatcaaatctaataaaaataaatggacctcagttcacttttggacagcagaaaaagcaaactgtggaaagcagaattctacaatggcacgctggttcccaccccttggtgtacatgctctgcatgaagtgagcaggacctgtgaatataatgggataatcactcctgtgattacattatgttatatgattccattcccctcctggctttgaagaagtgagctgccatgtcatgagaacaccaggtggctaggacctgaagatagcctctaaggagctgaggatgtcaccctgctgacagccagcaaggaaatgggtacctcagtcctatagctgcaaggaattgaaacctgccaacaacctgaatgaacttggcagaggactctgagcttgtgatgagaacacatccccagcttgaaatcaaatcgacatattgattttagcactgtgagatactgagctgagaacacagttcagctgttcctggacttcagaaccacagaactgagatgataaatgagtggtgtttcaagttgctaagtttgtggtcatttgcttacagtaattgtaaactaatacacaagtgtaagtttgttttcttagagaagaaaaaaaacggggaaggaggtaagtgttaaaggatcaaaactctgacaaaaggctggttgcagaacatgacaggttgttgcactggaaactatttgtcatgcaagtttatgttaaaataagtagcttttgaggactttcatttttggtcttgtaaacatgccatttaatattgtccaactgataatactttttgcaaacagaaactgttaaaacctttaaagcaaatattactgtagagaagaagtaatgtgttatgaaactgtgaggatactaagaaggatcctacttaagtttcttcagcataaataaacttgagcgtttcg

SEQ ID NO: 134625 - DNA, 384 bp, Homo sapiens
aaattcacctgtagaacgagctacaagagagaatggcaataaatgaacaaaaagttatcaaaaattataataaaaaacagaaataactcagctgccatacattcaactttccctagaactgagaaagaagcacgcacctataagttgctttgtacatccgatgagaaatggcaacaaggaaaagactgctccccaaatgtcttctctaattcttttactgcaccttttcagaagagggcttatagaagtgtaggtagtctccccacacgcacagggaggctcggtcagcggagcctaggcttcaaacattccagtagcaaaccctgagtgcgtgtgggagtacaacgtgataaacagcataaagacatcattaaaacacaatcc

SEQ ID NO: 134626 - DNA, 343 bp, Homo sapiens
gcgggggtggtggtggtgaggcttcaaggtgcggctatggggggctgcttgtcctctcctttcctgctgattctcccgcaatggtagcccaagcatccatgcaatttgtgagtcagaatgctcagatgctgttccagggaacagacgggccgagcttatatcacagatctatcgtcgtcatcatcatcaccgtcattaaaaaaaaaaatcaggctaggctctgtggctcatgcctgtaatcccagcattttgggaggccaaggcaggtggatcccctgaggtcaagaattccagaccaacctggccaacgtggcaaaaccccctctctactaaaaatacaaaa

SEQ ID NO: 134627 - DNA, 268 bp, Homo sapiens
attaggcgtggtggcatatgcctgtaatcccagctgcttgggaggctgaggcagaagaattgcttgaactcgggaggtggaggttgcagtgagctgagagcatgccactgcactccagcctgggtgacagagcaagactctgtctaaaaaaagaaaatgctatacgatgtttgctttctttcattcaaaattatgatgagcaaaatatgtaaatctagtttattcattttaacagctatttaatattttataaatatgccacagttta

SEQ ID NO: 134628 - DNA, 531 bp, Homo sapiens
agtaacaaaattgaccaaatcgggacttggaaacaggagctgatgtgccagcatacattttgagctaattttcacattcatcagcttttgaaaatatttacaggttggcttgctttgctgcctgactgtgaaggatgggaaagtatttagtgctccttataggctgtgtggaaattttcttctggagagagtttggttgggataatgattgagctctaaactgggaataaagtcatctgggttttcctttcacctgttttgtgatcataggcgtagaattaccttattaattagtgttgattattgtgtaatatttgagttatagggtattttttagcacatcatcacagcagaattttccacctggagtgtgttcacgaggacttcggggtattatgaagcgctctaataggcgcctctctttagatagtggaggaattgaaactgtatttgggaagtatgtcctgcgttggaaaacagcatatactttttttctttttaacaattgaagtcgttgctttttgggaatcc

SEQ ID NO: 134629 - DNA, 355 bp, Homo sapiens
tgcagtggcactgtctcagcctcctgggttcaagcaattctcctgcctcagcctcctgagtagctgggattacaggcgcctgccaccatgcctggctaatttttgtatttttagtagagacagggtttcaccatgttggccaggctggtatcaaactcctgacctcaggtgatctgcctgcctcggcctcccaaaatgctgggattacaggtgtgagccaccgcgcctggccccatgtttcactttttgtatttaccatcatggtcaatctccctactcttccaccaggaacatcaagaaatgtaggtgtcatcctaaaccccagcatcagtcattttagatattcatagtcatc

SEQ ID NO: 134630 - DNA, 161 bp, Homo sapiens
ctggtgcattcttacgagaaaccaatttatttgggctacctaggcctctgtttcttcaacacagagacaaatggcgtgtggctcagtcatcacacagcccacccgtccaacccattgtctgatgaggaaatacagggctgttcctttctggaaatgtgtca

SEQ ID NO: 134631 - DNA, 471 bp, Homo sapiens
cgtcgtggctcacacctgtaatcccagcactttgggaggctgaggcaggtgggtcacctgaggccaagatttcaagactagcctgggcaacatgatgaaaccctgtctctacaaaaaatataaaaattagctaggtgtggtggcgtgtgcctgtagtcctagctactcggagactgagctgggaggatcacttgaccctgaggggcagaggttgcagtgaaccaagagtgcgccactatgttccagcctgcgtgacagagtgggatcctgtctcaaaaaagaaaaaaaaagaaagaaagaaaagaaaaaagaaaaagaaagaaaagaaaaaaagagaaaggcccctgagaaacaagggaaaagaattaatgaccaaaaaactgacagttttcttgctaaactttcacaaactttgacagtctatgtaatcttgccagataattgaagtaaaaagcttggatatcaagttga

SEQ ID NO: 134632 - DNA, 111 bp, Homo sapiens
gccccatcaggaggtggacactcggtttgccctgtgccccatcaggaggtggacactcggtttatcctgagccccatcaggaggtggacactcggtttgccctgtgcccca

SEQ ID NO: 134633 - DNA, 257 bp, Homo sapiens
cgcactcaggacactagggggcgctcagaaccatcagggggcaatcaggacaccagagggacttcagaaccaccagggggcgctgagaaccaccagggggtgctcaggacatgaccggccctcaggaccaccaggggattttcagaacaccaggaagcactcaggacaccagagagcgatcagaacaccagggggcactcagatcctccagggggcactcaggacaacagggagctctcaggacaccagggtgagct

SEQ ID NO: 134634 - DNA, 354 bp, Homo sapiens
cttttccttccaaatgcagtgttccattcatctgccaccagatggcagagaagagcagagaataaattcctaaatatcaaaagaaagactgacacctggagaagtccagccctcttgaaggaaggcaaacctaaatcttttaaaatagaaaagcatcttatttttaaaggcttccagagacatcaagttcacaattttcccctaacttactgttgggaaacctgttaaaaatatacttcactaaagcacagcctaatggagctcagaattgttaggcaaattcataaatccagaaagagctaagaatcactttagctcaaaaaggtacaaaaaatggttttaaaaagaacgact

SEQ ID NO: 134635 - DNA, 445 bp, Homo sapiens
tatttccaagggtttttttgaagagtcataaaggatgcacttgaaggctgtctgatcattccttgacatgggcagaattatggggagcatttgatgaactgagtacccagctaagtcaggcagctgtgggcagtggaaaagaatgatggatgtgagctgggctgggaggcagggaatgggaagcagtcagaggagggaggggctttcttatgctttatttcaccaaatcctcacaagaaacttgcaatggaaattgtattgttcccttttatatgtgaaaaaacggaggctcctggagactgagagatttgtttgcataggcgatgcatggaagaggcagggtctaaacccaggtagtttgaagcagtgctcttctttacatgctacaatacatagccttacccacagcagacttggaagtcactgtgcttgaattttctttggc

SEQ ID NO: 134636 - DNA, 499 bp, Homo sapiens
cccggggggcagaagttgcagtgagccaagatgatgccactgcactccagcctgggcgatagagcaagactcagtctcaaaaaaaaaggttacccagggtcaaggagaagagagccagttttttcctgcaaatgtgcacagaagttactttgtgtgctagatgatttccatttgcctctccagtccactctccattctcacccactcatgggctgtatcagtggctaccttgccctctgtcatctagtaggtttgacaaaagaggcatctacaggtacaggaggacaggcagagtggaaggtcaggatatcgattctgccagttcccttcctgctgtgttgctgtgagttggctgtgtccatctacctatgaccacaactcctgtcgaaaagtccctgctctctccagactcagacagatgctcctgtcccttgccctttcagctctagggtggtatcagctccccgctcttgctagacctgaggtgccccattattct

SEQ ID NO: 134637 - DNA, 1361 bp, Homo sapiens
tctctttcccatgagtctaatcctctagagaagggaacaggggaggaggttctgttccgttcagttccagcttgacggagggttcgtgcagactacacagtcttcagctcttggctttcatggttacccctgacatcaaatccagcccacagataagggggagagaggtggagtgtcacagtggctttggccaggtctggaaacagtgtacatcacttctgcccacttcctcttggccagaattcagtcacgtgcctcagccaattgctaggggctgggtagccacttcccagcagcaactctgcaggagggaaggggggcctgatcttggagggcagctggctgcctctgccacatggacaatctttgttttcgaattgttgcttgtcagtgtacacctaagttaccttctaagtatctcaggtgtctgctaaccaccttgttttgcagctactcctgagtcacagctgtttggcttctaaatctgtgacagctgctgtgagtctaaaatagcagagcaatcacagactcttgttgcctgccaaactgggatggtgcctgccccttgctcgagactttgcatggagatgtgtgaagtcacagacgtgctttgtgccattttataaaataccgggtttactccgagggtttgtttattggtccccaattctccccaccttccttcttctgtgaggctaacacattggtttgtgagacagtttggagtattttgttttagggggtgtcaggacattttgaaaggtagagaaagtcaggcttcccagatgccctgcaggaaacctgggaaattctccagattcctgctcctaaaaggtcatggctgctcattcagggtggaaatgtgacacttccccagaagcctcactgtgctctggtctaggagactcacaccagactcacacctcaccccaacacacacacacaccccaccccaccccccccacacactacatacaccatacaccacctacaccacaccacacacatgcacacgtatacaccacataccacacattcatacacaccacacagctgagggcctgctttgggggaaggtaatttatttttgcctgacagaagaacgtgcctcacaccatgtggctgtggaggtggggagggcaacgtagtcttgagagttcatcagagtcacagctgttagggaagtgcctgggcctggggccaaggtggacagtgaaacaggaaggctgcccccatttccacatgtgctcacatggggctcccccacctgaggcctccaactacaggtgcacccctcccctgacagcacccacctctggtgggagtcttctgtatgattaataaaaagcgtagtaataata

SEQ ID NO: 134638 - DNA, 252 bp, Homo sapiens
catccttcagatataaagaatgttgactgtataaaagctgaatttttttccgggggtcagcaacggacattaaagaaactgtgtgttgtgatactgtcatttttagtggagcaacaggatactaggctgggtggttctcaacaggatattaggcagggttgtggtttagcttatgcctatagtgaagccactggtttcttttttcttttcaccaaaacctccattattttttagaacaacattagtcttaaa

SEQ ID NO: 134639 - DNA, 492 bp, Homo sapiens
agtttttgagtcctgtgttgagtttctagatgctgggaggctagaggataggaatgtcaactttgataaattgcatgcagggaatttgcatttaaagatgatccaagggccaggtgcggtggctcatgcctgtcatcctcaactttgggaggttgaggtgggtgggtcacctgaggtcaggagttcgagaccagtctggccaacatggtgaaaccctgtgtctactaaaaatacaaaaattagctgtgcgtagtggcagatgcctgtaatcccagctacttgggaggctgaagcaggagatcccttgaactcaggagatgcaggttgcagtgagccaagattgcacaaacgcactcgagcctgggcgacagagcgagactccgtctcccaaaaaaaaattgcccccaaattacatctgaatggttcctctcttctccaagaggaacaccaaggttcctttcttctcccattcttgacgcagaaagcgcctaa

SEQ ID NO: 134640 - DNA, 504 bp, Homo sapiens
ctggggctgcagacctgccttcaccaccgcccttgcatcaccgctggccatctgtggttggagccctggccaggccgtgggccgccacaccacacagactgaccctgccggcctctgactcggaaggtcccctggggcaggtttcccgcctggccggtgctgggcctgtgctgaggagtcacagacctctgtttgaacacagcccaccctgggaggtgggtggtggcatcctaggctctcaggcggggaaactgaagccctgcattacagtcaatggcagagctgggatttgactgcccggcgttcccactcgccctgtccatcatctgcaccagggctgcctgcctgcccctgccaagcccttcgtggggagcactgggctttacccgttttgcagctccttcctgccaggaaaggctcagcatgtgcagcccaacctgcactcacggtcccagccctccagaggccaggcagagcccacagagcttgcgtggcagtggccgc

SEQ ID NO: 134641 - DNA, 1048 bp, Homo sapiens
  misc_feature (75)..(76): n is a, c, g, or t
gctcattttctcttgccaccgccatggaagaagagtctttcacttcccgccatgagtctgaggcctccccagccnngtgaaactctttggcttctcgattggttctgaactcccaggaaggtgaaaaagcagcgtcattacttagcaccggaagccccggcactcaacagggatactgtgcagtcctgcatgtgagcagctcaagagttcttttcaagtgagacctgctgctaggagagaagtaagctgacagcacccagcaaccacactgttgagaacccctgtggcatcatgttcctgctgaggccggccactttcttgccaaactacttgcagccagtgactgagcatgggaaagcgagaccctagagcccagctattcctgcccagtgcaggactcctccagacttccagactgcactgcagactgaggcacttcctagctgagcctccttcttttcttctctcctttcagctgctcctgctccattgcccatttctctcacctttatcctgcacttctgcttccatcttggcatcttcttccctcaagacccaacctgacaccatcagtattattacactcttcatttcccagtggaggaggtggggatccaggcaagaaagacaaagcgtaaatatgctccctttaaaattttgtactgctctatcgcttctgggtctttgggctaagatcaagtgtaaaagtttgtactactcttaggtttgaggttcacatgaaaagaacatctcatcaacatttcaaaagaaaatttgaatgaattgtatgttgtactagtgtgtaaaagagagaccgagtcatttattcataaaactgagtccagtgggacctgcccattcaatgcaaaaatgcaaaggtatgtaggatcttagaaaatgaaagacaatgctaaagacaggaaccatttccagcatctgttgttgaggtccgaatctggaaagactcagaatgtatttatcagaaaaacaatttccccagtaagacaatagctgcaaagctggtcatcacatgcaaatcttgaccttc

SEQ ID NO: 134642 - DNA, 459 bp, Homo sapiens
ctactcttcattgtcagtaggaaatattcctcctttgctccttgtgtagaggaggggtcacatctgtttctgtgcctttctgcacctctcctttcttacagtaagcctgggagaaggaaacagttccatcttgtgtctctctcagacccacctgcctacagagaaggcgtgttcctggtctgctcatcctataacaagctgatcagggcagtcttggtctaggaagctgaggacacctgcactcgcctgtgaggggacagtgattaaagctttcctatttagagctgaaattcagggttaggaagcctgtctaggagcagggcagccagatgctctggcctcatcatgttagtattcaagctaatgctttgatttccacctttctttcagctttggcttctcgattggttctgaactcccaggaaggtgaaaaagcagcgtcattacttagcaccggaa

SEQ ID NO: 134643 - DNA, 379 bp, Homo sapiens
  misc_feature (19)..(20): n is a, c, g, or t
gaccctagaggaaacccgnngcttatcgatgccactggtgtttatcgacgccactggtgtttatcgacgccagtgttgtttatagatgccactgcactccagcctgggcgacagagcaagactccatctcaaaaaaacaaaaaaacaagcatgtatgtatcttgcttgggattgtcttcttaaatctgtaaattggagatgtttttaaatgtgtttattcataatttattaaatgtgatttccattcgtgttatttatcttaatgtataaataattttttaaattatctacatagtaaatattctcttctggtcttttactcttctttcactttgtttcccacagcttccccaacagacatacattgccaaacttgtgg

SEQ ID NO: 134644 - DNA, 1370 bp, Homo sapiens
gagcggagccagctctcggctcgcagccgcagcgccccgcccccgcgctccggacctggcaggcggcggctgcagggcaggtccagggccacatggctgagggggacgcagggagcgaccagaggcagaatgaggaaattgaagcaatggcagccatttatggcgaggagtggtgtgtcattgatgactgtgccaaaatattttgtattagaattagcgacgatatagatgaccccaaatggacactttgcttgcaggtgatgctgccgaatgaatacccaggtacagctccacctatctaccagttgaatgctccttggcttaaagggcaagaacgtgcggatttatcaaatagccttgaggaaatatatattcagaatatcggtgaaagtattctttacctgtgggtggagaaaataagagatgttcttatacaaaaatctcagatgacagaaccaggcccagaagtaaagaagaaaactgaagaggaagatgttgaatgtgaagatgatctcattttagcatgtcagccggaaagttcggttaaagcattggattttgatatcagtgaaactcggacagaagtagaagtagaagaattacctccgattgatcatggcattcctattacagaccgaagaagtacttttcaggcacacttggctccagtggtttgtcccaaacaggtgaaaatggttctttccaaattgtatgagaataagaaaatagctagtgccacccacaacatctatgcctacagaatatattgtgaggataaacagaccttcttacaggattgtgaggatgatggggaaacagcagctggtgggcgtcttcttcatctcatggagattttgaatgtgaagaatgtcatggtggtagtatcacgctggtatggagggattctgctaggaccagatcgctttaaacatatcaacaactgtgccagaaacatactagtggaaaagaactacacaaattcacctgaggagtcatctaaggctttgggaaagaacaaaaaagtaagaaaagacaagaagaggaatgaacattaatacctgaaactataggaaaggttaatttgcctataattatatatacattccatagtcatcaaggaatatattgtgcagagagagtatccttgactgcttaagtcagccagttcagcatggataccaacattagcttttcttcttggttatatcatctgccaaaaatagagaacttatgatctattcatgtgtgtttcaggcttatttgggaaactaatttgacttaatcaccacttcatctaattttagcaaggtaacagttgcccagggcagtacctgaattaactgtccatttcagtacatgtcaagtgcctt

SEQ ID NO: 134645 - DNA, 486 bp, Homo sapiens
tacttggccaagaacctgaccatttaccaggtgcatccatacagtaaatatctgagtgtctcttacatgcctggcatgtcccacttcacccacaggaagaagtccattttataaatgaagaaactggggctcaaagaagtatgtgaacctaaggtttcagtcttcttaaatcctgcttcttgatctcctctaataccatagcacactcaagaaatgagcatctttaattgtgcttggattggcagaatctgcctttagctggaggagcagacgtaatggctttaatgagctacttaactactttctagagacaaccaagagacacttgaagagcccagtctgagacctggttccacctttccatcccttctgtgtccctgcctccagcccccacccccaggacacatctggcagtgaagggactccaattcctgttctagggagtggcccccacttgtgctcaaagtataattaagtggcttaaaa

SEQ ID NO: 134646 - DNA, 745 bp, Homo sapiens
aaaaatcactgctgtgatagaattctaactctggaccagattgcctagatccaaaacctttttcttgttatgcagtagctgtcctagcttcaggcaatttgcctaacctctctgtgcccagtttattcagtggggataatagttcttacttggattatgactttaagtcatgtaaggccccagaaacaatttgggtaagaatacaagtgaaagttgttactataatgagccattgatactgataggagaatatcataacttttaagtatgttaggaggcaaaaaaggctgagaaacactgggatcactttatttgtttccaaataattttgctttttaaattcattacaagtcattgggacaccttgtggcattgagcaattagagcaattaggtaattcagtttagggtaaggacttagtatgagtttcagtacttactttgtgattttgtatgcatttaatctcagcctcatccactgtttggaggtaataaaatctattattacctgataataatatcaggtgtatcagtgcttgtatccgttaaaagcactgaataagtgtttgttgaattaagtgaacaacttcaggttcttgtctttttaatggtgatggtggcaataataatagttaacattcattgagaactttccatgactgtgtgtcaactcatttaatcttcatgaggaaacaggcatggggaggctaagtaatctactcagattgcatggctagtgatagagc

SEQ ID NO: 134647 - DNA, 228 bp, Homo sapiens
ttggaaataagtgtctagctaagtgtcaggagataagtcaaaatggagattgtgattcgtcagcatgtaggtgatagttaaaaactggggaagtatgtaaaaataaaagaactgagactagatctctgagatactattatttcaggtttaccagtgaaaacacacagggattggaaagataggagaaccaggacaaagtagaagctatttcagagaaggcaaggtaag

SEQ ID NO: 134648 - DNA, 259 bp, Homo sapiens
ctcgaactcctgacctcaggtgatctgccctcctcagcctcccaaagtgctgggattacaggcgtgagccaccacacctggcctgaacctctggaccttttagttatgtaaggagtaggccaatacattttttccttattgtttaagcctggttgatttctgttttctgtcacttgcaatcaaagcctcagaaataatacacctctcaacactatcccacttaacgatatgccttagctacactcagcaactggaaatg

SEQ ID NO: 134649 - DNA, 257 bp, Homo sapiens
actccaaatctaccctttatttcctgctctatgataatgaagctggaccctgtaaaattctccctccactagctggcacaatgttaagctttctcagtagagggtggtggagagagagagagagagacagagagaggcaaatgagagagagatactctgatgaggccatgatttttctcctcctgatttcagcatgcccctctaggcaagctacagcagcacatgaagcttgcacatacctggcagccacctctcca

SEQ ID NO: 134650 - DNA, 777 bp, Homo sapiens
gtctgttttctaatgtatattcttgctctttccatttttctaaaactattaattaaacattaagccaacttatttaaaagagggaaaaatgggaaataacctaaaatcctaataattggatgtcacttaagaacctacaaaacatacactcaatgaacaatacacggccattaaaaagtgatagataggctgctctgtctatggagtagccattctttcatttgttcacttccttaaaaaaaaaaaaataatggctaagtattaaaataggaaaatgtccattattaaatacaaaagggcatggcacaatagttatatgaatatgttttattaatagctatgtaaaagaagtattcataaaaaaaatctgaactctaacacaagagaaattaacagcagtttcgggagtgcataatgagcttttgacagatgtcttggctgggcgcagtggctcatgcctgtaatcccaacactttgggaggcctgtaatcccagcactttaggaagctgaggcgggcggatcacaatgtcaggagttcgagaccagcctggccaacatggtgaaaccccgtctctactaaaaatacaaaaattagccgggagtagggtgcacacctataatcccagctacttgggaggctgaggcaggagaattgcttgaactcaggaggcagaggttgcagcgagccaagatcatgccactgcattccagcctgggcgacagagcaagactccatctcaaacaaaacaaaacaaaacaaaacagagagatgtctt

SEQ ID NO: 134651 - DNA, 299 bp, Homo sapiens
tgaataaaatgttacttgcatctcctcattgtcacagtgttcgtattacatactttctttaaggaaacagagctaaaaaaaaacaaaggacaataactgcatcaacaacatgttatacaccagaggaaatgcggcgacttaggttctgtgatgggaaacccggatttttttgttgtacttgaaatcttccgtagaacgtacgtgtttgcatgacccagaaaggaaaacacattggaggactttgtactagttccattctaattctgtaaaattctcacaaattcaggcatctgttaacc

SEQ ID NO: 134652 - DNA, 612 bp, Homo sapiens
tcatagtgagcaaagacaaagagaaaaattaagacatatctcttcactttccccatcctcccaaatacaaacacgtatttctgaatagtcttcagcaagttttgcttcttagacttggccaagatttttagcaagcacttacccactgggcctgcttgtatgcattgcctttgaggatcctggaattgagtgtggtgctgaactgtaaggtagccttaccctttaagtcagctgtctaataaaatcaccttgaaaatctaaatagaatttccaatcttccgtggtgtgtggctcaatattacagcctagtggttgtcagaaatcacagtgactcactagccagctctgggtgggactctgttctttcgtctgatattcacacttactgcaccactctctcttcatgtggttcccttagtgaattctgttgcttcctggaatctcattgagtttctgctctgctcttcttggaggttctttccagctttaaacatgaataaaggctaggaaagccaggccatgattcaaccaggccttgtcacacagtcatagttgcctcataccaggatttaaatatggtccccactttggactttcctgacccatgcaccc

SEQ ID NO: 134653 - DNA, 266 bp, Homo sapiens
ggtgacttagaggatccgatgggggcgtcgtcaatgaagggctgaggctctggtctgggaggccgggccacctaccaaggcagccggccctgtcaaggatccccggctcttggcctttaagagcagtgaatgctcctgccagcacactggcttcaagggccagctcctctgctccagagccttgctcctcttccctgcctcccctgtaacctcgggctgtgattgtcctgttccttgcacccttcagtttagatcccgattgccat

SEQ ID NO: 134654 - DNA, 541 bp, Homo sapiens
actcacttcacctcttagtcttccagagaggatctttcatcctgccatcctgaggcttctatttttgaccaatagctctaaagaccacgggttcccataacaacctgatatccctttctcatccctgccatccctgaataaggcttctaatttattatgctttaacaagttttcaaatagcaagcgagacacgctggaatagttgagagagccccaaacactaaataagccaaattttggggtaaaaaaaataaaaaaccaagaaaccagacatagaagcagaacctaaagcatatttatcaaaacatctttgtttaaaaaaaatgtcttcagtggtcgtcttggctggtgggattttaggtcattttaattatctttataaaactttattctctcgaattttaaaattaacatctatttctcttataattaaaaattaaatgttatattttttaaaaagtatagtttatttattccagtagtaaaacattgttgaaaaaccaagagaaaagcaagaagaacacgagagagagagaaaaat

SEQ ID NO: 134655 - DNA, 422 bp, Homo sapiens
acattcatatggctaaaaactattcagcaataaaataaatgacatatggcattaacttacactacattggccaggtgtggtggctcatgcctgtatcccagctacttgggaggctgaggcagaagaatcacttgaatccagcaggcagaagctgcagtgagccgagatcacaccactgcactgtagcctgggtggcagagcgagactctgtctcagagaaaaaaaaaatctttcatatttcaaaattgagactgtctcaaccaaaatcatcaccaccctcactctccctattcagaaactattgagtcaggatggaggaagaagggatcttttgtgtctgagcatgtattcttttattttgcttctttagaaagctctaaaaggattcagggctgggaggtatgcaaactgaagtgttcttg

SEQ ID NO: 134656 - DNA, 120 bp, Homo sapiens
tcatccccagggatttagtgccaactcttacctacagtaaacaaaaggccacgtagacacagcgccgcgaaaggtggggcaggggagtgcgtactgtctgctcactcaaaaattcacatt

SEQ ID NO: 134657 - DNA, 389 bp, Homo sapiens
accggggcagagcgggggtggggggggcgtgccacacacttttacacaactaggtctcctgtgaactcaaggacaagagctcggtcatcaccaggggatggcccaggccgttcatggggaagccgcacccatgacccaaacacctcccaccagacccacctccaacactcgggatcacatttccatgtgagatgtgggtagggcaaatatccaagctctatcagatgaattaaaagatgttctgatgggtacttggttgaatgagttaagttactatctgaaggcctggaatcaatagaaaggagtgtctgggttaagagaaggggctgtggagaccaaggtccttattatgtggatgaaatctcataggtgtccacccttagaggcaa

SEQ ID NO: 134658 - DNA, 705 bp, Homo sapiens
ggcaaaaacctgtttctacaaaaatttaaaaacattagcctggtctggtggctcactcctgtcatcccagctactcaggaggctgaagttagaggatcgcttgagccaaggacatagatgctgcaataagctgtaatcaccactgcactccagcctgagcgacagagtgagacccgatctcagctcatgttttagctcatgttgtgaaatagactctaaatcaaacacaacgcatggtatatttttttcatttggataggtatacataaaccatagattgtcttttcagaagtaataagtccagcaaaaaaatggtgagatcttattccctgctgtttatgacaatactcagactcttaggccaatttagcttctgttaagttttatgaaagttctttttggctttcttccttgagaactcgagaattattttaggatgcagataaagtaccacatatgtacataaagtcagcagtctgcttcagttaaaaaattctggacagttatgcttatgcagaccagaaatctattattactggaggaaaagggaagcaactcctgtcatgtggctaaaacacaatattttaaatatccaaggtcttttgtaaatttatttcacagtacattctgtggttcagaactacatatagttctggtgaatagacgcccatatttcaagagttgtataatattcttcaaataaaa

SEQ ID NO: 134659 - DNA, 603 bp, Homo sapiens
aggtataaattttaaaataataatcaacattttgacagaaaaatgacaaatcttaccaaggaggaaaatcagattcacattagtgtctctctgtaatagtaaccaatgccagaaacttctgtatccatgtttatacagttctgaaatatatatatttctttcagaactgtgtatatatacaaatatattttgtatatatttatacaaaactgtatatatatatacacacacatacagttctgaaagatcgtgtatatgtatatatacacactcacacacatatacagttctgaaagactacatatatgtatatatgtatatatgtgtgtatatgtatatgtatgtgtgtgtgtgtgtgtatttacatatatactcctcttaagaatgatataaccatttagcaattaagttgagccagataatgaatgagtaataatagaaaattgaaagaaagaatctaggggagaaaatgactgattgtgagcacggatttacatgatctccatatgtatataaatttaatatttttgtcacttatggttatatgagtatgccataaacaatgtcagtacaaaataatgacttaactaacaaattaagatg

SEQ ID NO: 134660 - DNA, 405 bp, Homo sapiens
cctagttctcctggacgtaggtaaaataaagtacaaactttaagctttatttaatatctataactaaataattctatttgttacataaattgacattaaatatgtagattctaaatctgagaatgcactagatactgtcaatccaaaaatccattcatcttacctccaccactgatagttcatctctttcctgtactgccatgcacaatttctcgggagcttgctcctgtattggggctttaatctttttcaatgatactactacatgagctgattttaagcccctcctagactcgtagtagaaatgtctccattgagatgaataactcacatgttttccaggaacgatactcacaggtatgcagtctgaaacagccacaaacatgttctcacatttgtttcaac

SEQ ID NO: 134661 - DNA, 409 bp, Homo sapiens
ccccagctcagcctaggcaacagtcgtgggctctgtgtctttctgcctccctggtgatatactccaggttaaccagggtggcctgtcctcatcttataacttgaccttgttcaggccatctctgcccatttgtctcatgctcatcctcttggctctgttgcccaagatggaagatagtgcttaacaggaagcctgaaactcagcaaacactcataaaacaggaagagctgtggccactgtccttgtaactgttgctattctgtggaggccctagaggagcaggtccctccctcccagggagctgggcctcttccgctttcccttagcccctgaccacctgcttggttcatcttggcctcagtcatactcagtggctccctcccaaggctaccttctgctgccagtgcag

SEQ ID NO: 134662 - DNA, 399 bp, Homo sapiens
attcttggtaaattctaaacttcaacttctgttttaaggaaacacaaattcatccagtgttacaaattctgcagcaggtgttgaagatcttaacatcgttcaagtgactgttccagataatgagaaggaaagattatcaagcattgaaaagattaaacagctaagagaacaagttaatgacctctttagccgaaaatttggtaagtttttatatctttttatatccagaattcatatacctaaaatacttctttttaaaagaatacttggccaggtgcattggctcatacctgtaatcctagcactttaggaggctaaggctagagaatcacttgagcccaggagtttgagaccagcctgggcagcaaagtgacaccccaggtctacaaaaggaaaaaa

SEQ ID NO: 134663 - DNA, 1750 bp, Homo sapiens
attcttggtaaattctaaacttcaacttctgttttaaggaaacacaaattcatccagtgttacaaattctgcagcaggtgttgaagatcttaacatcgttcaagtgactgttccagataatgagaaggaaagattatcaagcattgaaaagattaaacagctaagagaacaagttaatgacctctttagccgaaaatttggtgaagcaattggcgtggatttccctgtgaaagttccctacaggaagatcacattcaaccctggctgtgtggtgattgatggcatgcccccgggggtggtattcaaggcccccggctatctggaaatcagttccatgaggaggatcttggaggcagctgagtttatcaaattcacagtcatcaggccgcttccagggcttgagctcagtaatggtgagtattctacagtgggaaaacgcaagatagaccaggagggccgtgtgtttcaagaaaagtgggagagagcgtatttcttcgtggaagtacagaatattccaacatgtctcatatgcaaacaaagcatgtctgtgtccaaagaatataacctaagacgccactatcaaaccaatcacagcaagcattatgaccagtatatggaaagaatgcgtgacgagaagcttcacgagctgaaaaaagggctcaggaagtatctcttaggcttgtcagacaccgagtgtcccgagcaaaaacaagtgtttgcaaacccaagtccaacccagaaatcccccgtgcagcctgtagaggacctagctgggaacttatgggagaagttacgtgaaaaaatcaggtcttttgtggcatattctatcgcaatcgatgagatcacggatataaataataccacccagttggccatattcatccgtggtgtcgatgagaatttcgatgtgtccgaagaacttctggacacggtgcccatgacgggtacaaaatctggcaacgagatcttttcgcgtgttgagaagagcctgaaaaagttctgtatcaactggtcgagattagtaagcgtggcctccactggcaccccagcgatggtggatgccaataacgggcttgtcacaaaactgaagtccagggtggcgacgttctgcaagggtgcggaactgaagtccatctgttgtataattcatccggaatcactctgtgctcagaagttgaagatggaccacgtcatggacgtggtagtgaagtccgtgaactggatatgctcccggggactgaaccacagcgagttcacaaccttgctctatgagctggacagccagtatggtagcctcctgtactacacggagattaagtggctcagtcgcgggctcgtgctaaagagatttttcgaatccttggaagaaatcgactccttcatgtcatccagagggaaacccctgcctcaactgagctccatagattggatccgagacctggccttcttggttgacatgacgatgcatctgaacgctttgaacatctctctccaaggacactcccaaatcgtcacgcagatgtatgacctgatccgggcgttcctagcaaaactgtgcctctgggagactcatttgacgaggaataatctggcccactttcccaccctgaaattggcttccagaaatgaaagcgatggcctgaactacattcccaaaatcgcggaactcaagaccgaattccagaaaaggctgtctgatttcaaactctacgaaagcgaactgactctgttcagctccccgttctccacg

SEQ ID NO: 134664 - DNA, 527 bp, Homo sapiens
attcttggtaaattctaaacttcaacttctgttttaaggaaacacaaattcatccagtgttacaaattctgcagcaggtgttgaagatcttaacatcgttcaagtgactgttccagataatgagaaggaaagattatcaagcattgaaaagattaaacagctaagagaacaagttaatgacctctttagccgaaaatttggtgaagcaattggcgtggatttccctgtgaaagttccctacaggaagatcacattcaaccctggctgtgtggtgattgatggcatgcccccgggggtggtattcaaggcccccggctatctggaaatcagttccatgaggaggatcttggaggcagctgagtttatcaaattcacagtcatcaggccgcttccagggcttgagctcagtaatggtgagtattctacaggtgagaagaacgttccggcaatgttgggccatgggaagtgtcttggtgggcgctcaccacggggtttttgcttccgtgagcctgggacccaagtatgca

SEQ ID NO: 134665 - DNA, 130 bp, Homo sapiens
gtatcagagtggtagttgccctaccacttacctgatttattaacataacattttctttatctgcacatttcctaacaagctcggtgacaaaagtcaatcttttgtcaatcctttatgcctggataatcaa

SEQ ID NO: 134666 - DNA, 538 bp, Homo sapiens
agacacatttcagtcgctctagagtaacagcctggaaaatgtcagagaaaactgttccacgttatgtttctaatgtttcaaggcctttcttgaaaacatttcattttgaccacagggacttcttttctttagttgttgagaccaaataaagtcagtaaatagctttgtttttagaggtgcaaatattctaagaactgtattgaaaagttcaattcacattaattaaacatcctttcttaaaatagtttcacaagtactggagatacaaaggaggttatgacaatttcccctagagccttcacttattcaacataattttaaatgaatatttattgactgcccctcatgtcacccacttttataagcatcagagataaggcaatgaatgaagtagtcaaaacttctgttatcagaagctcatacacttacggtaggaaagtaggtattatttactgtggcagtgttctcagtactttatatgcttttattcatttaattatcacagcaattctatgagaaaataatattatttttagga

SEQ ID NO: 134667 - DNA, 1043 bp, Homo sapiens
agaggtcaaatagtcctagaatcaaatctcagatccacctgtcactagccatatgacaccaggaaagttttacaccactctaagcttctgtcttttcatcggcaaaatggaaataatgtctacctcacagggttattgtgtggattaaatgagatacagggaaagtatttagcacagggcctggcacataggaagtgcccctcaacagtaccttcctttttccatatatatatatatggaaaaagaggtaacacataaaacactaggacatggttactgactacttgtgggagagaaagaaaaaaagctaagtgcaaagaatcaagcctggtatgttagtttttactgactgagatgcatccaagatgggattagacatacaagataacttatcagggaagacacctgtgagggaatgtggggcaggcatgaaggtagtacgggagaacccacagaccactatgcagagctgattcctgtgaaaaagaaagagaaagaagttttaggtaccaattcaattataagagtttttgcaaggctgatggggaatcctccaaccagtcacccattagagttaaagagagcctcagagaactagacttgctttcacgcccttgctgggagcctgtaggaaagaagctttctgtgcaaaggaggtggtgaatttgaaatgcactgacctgggccttctgtcaatcaagtctctgccatggagacctggcagggtctcattcatgactgccacaacagagacactgagaaaaagatgcaaccatgaaaaggtgcaaaggtggcaagttctaatgacatagaaaatagcaatcagcctttctcacatctgaaagccttccaaatatctgagcacagtagagaattgacagaggactgatcaccaactgagaaacagggtgagagggaaaaaaaaactgcaagaatataatcatctcctatcaattttccaacagaaataacgtagtccttgaagaaacaattatagagtacctcatgttacatgcttgttcctgaggctcccccatgtaaaa

SEQ ID NO: 134668 - DNA, 230 bp, Homo sapiens
cactgggattacaggagtgagccaccgcgcctggccgtgtgtgcgtgtgtgtgtgtgtgttttaatcctatctaatttttccaacagttttttgcatcctaagagagtttaggagtagaattatcaataaggaatttcatacatagacctggagttgcaaaaatatatttggagaagagagctttcccattgcccttcaagtcatacctcatatcttttaaaattttttt

SEQ ID NO: 134669 - DNA, 147 bp, Homo sapiens
atgaaccactccgatctctgcctccctcttcatgtcacctctactctgtatgtcatcttcttttctgtctcttatgaggacacaccattggatttagggcccactctaattcagggtgatctcatatttctaaataaggttacactc

SEQ ID NO: 134670 - DNA, 379 bp, Homo sapiens
gtacaaagtgttctgataaagtaccaatgaaaatataaacctggagatggagagtgggagataaaaggtacaatagatgtgaatgtgctttgaacattagtatagaaagtgcccgccaggcgcagtggctcacacctgtaatcccagtacttcgggaggccaaggcgggcggatcacgaggtcaggagttcgagaccagcctggccaatatggtgaaaccccgtctctactaaaaacacaaaaactagctaggcgtggtggcgggtgcctgtagtcccagctgctcaggagactgaggcagaagaatcattcgaacccaggaggtggaggttgcagtgagccaagatcatgccactgtactccagcctggacaacagag

SEQ ID NO: 134671 - DNA, 415 bp, Homo sapiens
cagcaggacttcttggagcctttgatatcctaatgcaaactgtgaaactctaagagctggccatattgtgcaacattctccaaagttctctgatggatccttggcatatcatgagactaaggagaaacattgctgcaatcaataaaaaggggagcacttgatccttacaacatcatttgtctagtaactggaggaagagaaaaagatttttctgcaagttggggatttcaaattaagggagaaccatattgcaggccctgaagctctgcccagaaaacagaccaatttatgcaggataacagttggtcaagtgattgacccaataaaattattaagatggccaaagacaccatcctgaaaatgcacagtggggttattctggtcttcttaacgactaggttggccatttggtatc

SEQ ID NO: 134672 - DNA, 682 bp, Homo sapiens
taatttttttgtatttgtagtagagacggggtttcaccatcttggccaggatagttttgaactcctgacctcatgatccatctgcctcggcttcccaaagtgttgggattacaggtgggagccactgcgcctggcctaaccaccaccaagattcctaaaaggcgaataggaagcagctgtggcttattggaaggaaagaatggcagcaagtcctgggggagctgtgcccgcaccagatctcccgttagggcagccaaggccatagagagtggaacagaatggaatctgtctctccttaagctgttgaggatgacgccaggtcctgggaaaatgatactgtcttggtccagcctccacctctgcatctccaggactgatgttccccctgttaaaggagctggatctccctttgtcacccaggctggagtgcagtggcgtgatcatgactcactgcaggcctcaacctctcaggctcaagtgatcctcctgaatagttgggaccatagaaacacaaacagcagaatggctccatctctgttgaagacttccatcaactagaaccacgagggctgatggacagaccacaaggccagtttgttccagttcaatgattaaaagaaccacagacgtgagccaccgcgcccggccaaaaccctgcttttaataaagtgtgaaatggtaa

SEQ ID NO: 134673 - DNA, 817 bp, Homo sapiens
tcgacccacgcgtccgcggacgcgtgggtcgcccacgcgtccggacccacgcgtccgcaaagtgtagccaggcgtggtggccctgtagtcccagctactcaggaggctgaggcaggatgtcttgagcctgggaggcagaggttgcagtgagctgagatcaccccactgtactcaataataaataaataataaataatataaaatgcatcaaagtgaagaggggtacttggggatttccaggtctaatccctttattttacagaaagaaacagagactcaaagcaaagtaattcataagtggtgaagctggggctaaatccaagtctcctgccactgcgcacttcagggttagagcagtgctaggagtcccaccagggcctgggtgagagattcattcttaaaactgggcgtgaagtctcagtcactgagaatgcttggtgccagctcccatctctaaggactgctttgagggaaggagttgaatccggccccttccccaaaccagggtaatgtatcatagagcagagagcatacataatcttgggaagagggatagaagtgacaaagatgggccaggcgcagtggctcacgcctgtaatcccaacactttgagaggtcgagatatgcagatcgcttgagcccaggagttcgagaccagcctgggcaacatggtaaaaccccgtctccacaaaaaataaaagataaaaattagctaggcatgatggcacatgtaggtagtcccaactactcaggggctgaggcaggaggatcccttgagcccgggaggttgaggctgtagaaagccaagatcatatca

SEQ ID NO: 134674 - DNA, 420 bp, Homo sapiens
cagattgcgccattgcactccagcctgggcaacaagagaaaaactccatctcaaaaataaataaatatattaataaataaataagaagtataggcattctcatacataacctcagtaaataccattaagaaaataattttagacatggtgcagttgctcatgcctataatcccagcactttgggaggctgaggtgggaggatggcttgagcctaggagtttgagaccagcctgggcaatatagtggcaactcttctctacaaaaacctttaaaaattagccaagtgtggtagcatgcacctgttgttgcagcaactcgggagcctgagatgagaagattgcttgagccagggaggcagaggttgcagtgagcccagatagttccactgcactctgggggacagagtaagaccctgtctca

SEQ ID NO: 134675 - DNA, 309 bp, Homo sapiens
atattttaacccttaggaatatctgaacatgagtgtgtttgtacacataatttaaaaattaaatatgtttcttttcatggcataattttctaaaggaaggagggacaggacttaccctcgctagagtctttcgaacattctggcttctttgctttgctctttttgtagggtggagagaggccttttggctctaacccctctggaatcacgaagatttaatattctcatttaaatatttaccagtagggttcaaaattatgtgaaatttaaaaatgttttcttcttagtaaacctacacacacgctgaat

SEQ ID NO: 134676 - DNA, 337 bp, Homo sapiens
cagagtactcactgcaggttgttcgtgggggccggtgcatggcatagggaaaggaagacaaaacaggagaagttagcagaggtagggaatggggtagagactggatcatagaaggagttgtttgccatgcttacccttaaaggctttctgagcagtcatcctgggatggacagggcagggagtggagagaccagcgagcaggtttttgttacggttcgagtgagggttgaacacaggcagtggtggtggagatgggttgcagggataatcttgagagagatttaggagacaagattcacaggttggaatggatgtgggagaaaggaggagcttaacg

SEQ ID NO: 134677 - DNA, 569 bp, Homo sapiens
gtgggagacatggagagtactggcctttggccacgttgtgagagaacaattcctttgtgcagggttcacaggaaatggaacctgacccattaggcatcagcccccggtcaggcaacatcaccccttccctgggtaggtgtgtgggtggaggggctgtgggttccttagcctctctcctaagccaaacccagcaaacgtctgccttggcaacccctcagggatgacagcactgccatgctctctggcaggcataatgttgccactgtgcctgaggccaacaccctgcgtcaggctgcaaacatccgttcccttccctgtggggaggcaggctctgggggccttagtgggagactctggacagggccaagagactgttgtatgcacactgcctccagcctgtcaagaaggcggcgtgcctggcatcccttctactggtgattggtgcagatcccttagctttttaaagcttccttgttttgtctgatcacacacagcagagctgccctgtatttggcagttggcagacagacccatcactccccaccatgtccacagtcacttgtgcatcc

SEQ ID NO: 134678 - DNA, 496 bp, Homo sapiens
ggcatcctaatgggtgtgagatagtatctcattatagttttgatttgaatttctccagtgattagtgatgttcagcatctttccatatactttttggccatttgtagatctttggagaaatgctattcaagtcctttgctcacttttgaatcaggttgtcagtttcttttgttgttgttgatgagttttaggaattctctatatagtttgaatattaattccttatcagatatatgatttgaaaataaaaagttctgtctgtgggttgtgtttttactctgttgatgttgtcttttcaagcagaaaatttttaaaattttcatgaagtccagttgtctattgttttttggttattgtcgcctgtgcctttggtatcatatccaagaaattatttcccaatctagtgttgtgaagggttactgttatcttttcttcttctttttttttttttgattatactttaagttttagggtacatgtgcgcaacgtgcaggtt

SEQ ID NO: 134679 - DNA, 364 bp, Homo sapiens
aaagattccatctctttaactttagttaggatggaatttgaactcctggctcttttgagtatagaaacccctagtaacaatttaagttccttccatttttcttttaaactccttattcccagcagcagtattctacattctaaccaggttctcccagctttgagacgtctcagacttaccagttctccaaaacgctattttctttaagggtgacaccttttaaaaattaggcacctcaaatatctactgcttttgagcttttgagttttgcactgtaaaaagaaaaatacacagtgggattttaagtcaaattagtttatctaatttttagggaataatttgaagcatgctttgtttgcataga

SEQ ID NO: 134680 - DNA, 392 bp, Homo sapiens
tataaagaatagggatttgctttatgtattcaaaattctctgagtgccccctttctctgttaaaattcaggttctgatcatttttctaagccagttttcctaagtccaaaaggaatacttttagctgaatttaaaaaataagtgcaccttgtcaaatgcttgtgtttttacacttgtgtttgtgtgtatttaataatcatatatacgtgtaatactaaagagattttcagctattaaattttaaaactgcttacatgtttaaagaaactgaagagtgagaaactacacaaccaagcagttatttggtctctgagatctatacttaaccctcttcagctattaatgttacctgcacactagggtatgaatcctcttttttttttttttcaccc

SEQ ID NO: 134681 - DNA, 724 bp, Homo sapiens
gggtgggaggagggagaaatcaggaaaaataactaatgggtactaggtttaatacctgagtgacaaaataatctgtataacaaacccccatgatacaagtttacctatatgacaaacctgcatatgtacccctgaacttcaatgttaaagaaaaaagtaaaataaaaaagaaatgtacttcacctagtgcctacatattatcagctctctataaactgtagctgtattagacctcactttttaacatctgggacatgctatggggtggaggtgggaggatgacatgaaatgtaattaaactaaatggtcaaacttcaaagaggtcaaatgcttacagtagcctgcaacaatgttccataaagtgaccgtgaggactcttgtgacagcacctgagcatttctttgaatctaaccaggtgtgttggtttttactttatgctaaaaggatctcatgccatgagtattttgtgaccttccagctaatttaaatattgcttactgatttggtgttatacatctgttgtccaatacttctatccatcatccactgattccacattctgcttcctggcactgagctttttactcatggactctcagctttaaactgtttccacttgctaaacttcaacagaactgtcctttaacacctttctaattttttaaatgttcagctttagccactttgcacattttcaaatgtaataaagcaaagatccttgaga

SEQ ID NO: 134682 - DNA, 407 bp, Homo sapiens
caggttgatccaaagcgctgtcctggggagaggtctgtatctgggacagctgaggatggtggccctacattgcctgccattttatttggtttccaaatgggccaattgagcaaaagaaatactttctatctacgctgtcagctttcatcagttgacattgcctagcaatgtgtctttaaactatatttgctagggaagcaatgggatttggcatctggaaatagaaccaaaatcatcctgtttgcccgcagcagtggaagatgtgcaggggagagggactggctgttttgatcactggagagttcaaggggcaggagactgaagactgctgaggccaaggctacagctcttggggaagaaggaacctggggcagggctgagctgcatgggatcgactctgacgcacc

SEQ ID NO: 134683 - DNA, 387 bp, Homo sapiens
accagcgtcagggaaagacggaagatcggtcagggttggtttctccacagaaagtgcacatgtgtgggaggggccaactgagtctattttcaacctcacaactctgccctggccagcactaatgaacttagtgattgagctgggattttcaagcaaagggctgaaggtgccatctggcttttttgtgctgcttatagtaaactgtaagagtgataaattgaaggaagaattgttaaacatgaaggaaccaagacctgataattttgaaaagtctcaatctctctggacagcaaaatatgctagaattaagaaatggcttttgagtactttcaggaaaacatggtatagacatatagccacaggtaagactacataactactggttag

SEQ ID NO: 134684 - DNA, 368 bp, Homo sapiens
gaagggcagtcagggaaggtgctgccacagggaggtgcacatgtgtgggaggggccaactgagtctattttcaacctcacaactctgccctggccagcactaatgaacttagtgattgagctgggattttcaagcaaagggctgaaggtgccatctggcttttttgtgctgcttatagtaaactgtaagagtgataaattgaaggaagaattgttaaacatgaaggaaccaagacctgataattttgaaaagtctcaatctctctggacagcaaaatatgctagaattaagaaatggcttttgagtactttcaggaaaacatggtatagacatatagccacaggtaagactacataactactggttag

SEQ ID NO: 134685 - DNA, 1203 bp, Homo sapiens
tataggcatgagccactgcacctggccttgtgttgcttttgacagtgctggagacttacagtttattgaccttcatataacagttgtttgagtaccctctgtgttccagtcaccatgcagaggtgacaagcaggagctgttttctgcatcatagagagttatgtgataatcagttaagtgcagaatccttcactttctaggaaaggaaatactgcagttgtgaatgcagttgagaatggtttgaagccaattagtaaattggaatagttactgatgatgaaatacttacctccaggaattttttaaaaaactttaaaaccttggtaaaggcatttggtgattattttgctggattagaaaaccttagaagtttttacagctttgatataaagtacacctgtagaaagactgtcacctggtacttccctaaaagacagcagtaaaattttgcactcttttttaaaagaaagaagttaagtttcatcttaatgtctagtcagcagagagagggaagtatgtaacgttttaaacctttgctaccgaacagaactttctgtgattatggaaacattctgtatctgtgatgtccagtatcatagctgaaagctggcccttggccatgtgaagtgtgactagtgtgactgaggaaccggtttttaattttatttaactctaatttaaatttaaatagctacatggggctgatggctatgataatggaaagagcagatgtagaacaacataggcccaagagctcacagaccatgtctgttttggacaccaatttcttgccctacttgtattccaaacacattgacatgttcatgtgtaaaataaatatgaatgaatatatagatgaacgagtttgagaagttttcatcctttgaaagataagctgtttcagttgtctttcatgttattccctgtaataacttacaattgttacatagcacatataatgtgttttccttataatgaattttttttcgtttcttgcgatatgcttggtcatattattcatttgtttagtttttggcatttctttaaaatgtgagaatgactttagggtatctcatcaaactcaaaagctactgtttagattttagtttttcaatctacgggagagaagttgagactgagaattgagattcatcataatggactcttgacatttgacatcaatagaacagttgttactgttct

SEQ ID NO: 134686 - DNA, 296 bp, Homo sapiens
gcaagctcatggaattccaccacagccatggattattcattacacaaaccagagagacatctgtaattacactgtcactgtaaccattgcagagttatctgctgtattctgaaacagggagactctcctgaaaaatcctgacctacactaaccagctctcagtttgcagagatttgatggagcccagagagacctgggctccgggaggttgaccacgagctggtttgtctcctggagggaggcgatgctcctacagggtggtctggcctctttaagagaaaaaaaaagttacacag

SEQ ID NO: 134687 - DNA, 402 bp, Homo sapiens
tttgttgaaaatagtagtttcaaatgaaaccattttttcctgggtatttagttaaaggcttctgtgcattgggagtgttctgggtagtggaggtgacatggatttagccagctaataaggtagctggtccagcatctgctcctgatctttgaccttcatagcatcagcgttagcgttcagtggaatggcgggctcgctttggagaatgccttaccgtgtgtgatcctttgtgtcaggctgacctcatctggataaggaacaggactgggtagaatggatcactggcagttctgtgagcacttaggtggaggcagagcccactcaactgggactcctgaaaggttgggcattgccctttagtcctgcctttcccaggtcacttgctcaggtagtttgatgcct

SEQ ID NO: 134688 - DNA, 485 bp, Homo sapiens
ttgtgctagctgacctccacctcggctctctaaacctcacccactgtggaagaaaggggaggtcccacggtacttgccttggcctttcttcccagagggaagctgtgttgactttgaaagaaaacagttaatctgttccagcccttaaggatgctctattgcaattgtttgtattgcctgtgtacttaactatccccacctgtttaggatccctttggcccagttccattttcttctgccaagtctaccagagtcaccattagcattagttgtcttaaaaggctttttgtaaaagcaagatgtatttgatgtttaatcatttgggaagtaaaaaagagatatgatttaaaatttacatatttaaacacaggagaagcaaccacactgtcttttggctgtgagaggcacatgtggttgtggaggcttttatcagaggataactatgtcttctccaccaaagagggcagtggtgtgccctcctccct

SEQ ID NO: 134689 - DNA, 426 bp, Homo sapiens
ttattgatgcctttaataatatatcattttctagaataaaaatagtctgagtacttttacaacgatcttttaaaaactagcccttttcattagagacgctctagtttttaacattaacaaaaaaagccaaaataattaagtgaagtgactgagaaaacacagcacatttaataaatttcaagcacctcaaaatttctcttgccctcatctgaaaaattaattgcaactattaccaacattttccctctctctacaaagttcaataaataagtaaaaacacctgctaagcttttaaagttaactacttttttaccctgctctaacatttggctgaaaacaacttgcaaagagagaaaacccttagacaaacttcttatatttcaaaggacttgtaaaagagaatctgctgacatattagatcctttt

SEQ ID NO: 134690 - DNA, 672 bp, Homo sapiens
tttttttctaaaatattataaatttagaaaaattttgcaaacagaaaacactgtagggacaatatatgataagtaaattgtacttcagcaactcattgctttttagataccactgaattatttgcactaatggaggaacattgttataccaacctatttatatttgatccacattttaagattcctgttcagcttatttactttcttacttatgtcttatctggattcttattaacgttagttctcccttacttgcttggaggagaaatcattagaaacatgctgagaactgggagatggccacttcaagtttaaatttgctatgaagaagctaccaataaccttctttcagtctaaattaaggtggcctgtagttttacaacccaaagcatgattgtgggatgctaatttagggaactattctgcagaaaccatgacacaatcagcttgctggtccgtatttagaaccatacttggaaattgtgctcaggtctgcaatttgtaattcatgggtaggggttgaatctagaggtggctgagagttcagccacaaaggtgataaaaggattgggaaagaactatgaaggaatttaaagaaactgggattagcttggaaagagaggaagataaagagcaatttaatcgcaatctttatgtacatagagaagctta

SEQ ID NO: 134691 - DNA, 691 bp, Homo sapiens
cagttaggatctttctcatcttaatattacagaagcttctttatccctctgctttcctttctttgtccctttcttcttctttgccttcatcaacaaacatttcttcagcacctgttatgtttcaggaagtgtgccaggttcagggaatataaagatgattaagcacagtattgcgccttgagaacttttcctctcatctatcagtcttactgaattcctatgctagtttcattccttctttgctccattcttttgcctctttcctagccaaggattcaacctactccccatttccattgaagatagtgcctttcctcactttgttcttgatgattaaggcaacaacttggttacagctggaggggtaaacattagagccaggtttaagcctgcttagcttctctgtgtttgaagtcgtaatattcctactggaatctggttgcttttagaggagatttttcttcacagtcatctggctcctggatctttgatgtgagtcaaaacttaggactaggagggtcacagagaaagctatgaccctgactttatttaaaaacatacgtgaattttttttttttttttgagacggagttttgctcttgttgaccaggctggagtgcaatggcacgatctgggctcactgcaacctgcacctcctgggttcaagtgattctcctgcctcagcctcccg

SEQ ID NO: 134692 - DNA, 161 bp, Homo sapiens
cctaatatgctctgctttgatttttaaagtaaactttaaattttgaaaaaatctcaaacttacagaaaaatgtcaaacagtacaaaaaattctattatcctgagttatctgagagtaagttgccaacaaattaacattgatacattactaccacttaatct

SEQ ID NO: 134693 - DNA, 800 bp, Homo sapiens
aggatatgtaatgatccaaatgatatatctgtatgtgtataacttcacataaggaaaataacttaaaaactttaaacagacagcaaattataacaaaggcctgtattctctgatagagtgactgggtatttataacataagtgttaagtaatcttcaagcagaaaagataatacatggaaaaatctcacactagtaactatcagtactaaagtaagctatcttagcaaaacttagaagtgacagctgagccagaggagtagagtgagtgaaagcattctaaatttcacaaccctagtgacaacaaatgtttgccttcatggaagaacaacatttgttcttgcaactaatcagaacttacatatttttaacaagtagctttctaaaagccactaaagccctttggaatattttttaaaacaacttcttttgaggttatggagatttttaaataggtcaggaaattatttctaagttgttatattgtgaagataaaaaagttttggtaggtaatatgtttgcagccacaaaagcacaaaatacaatgtttttaatattcaagatgtttcaaaatgttctttacgtggcacaaacttttttctaaaagtattcacagacttctggtcatctgattttataatttttgtccttgtaatttggcaaagagctaatacaggtttaggggaagggttaactctgccatttccttgttcccatatgcttgcattattactgttatcttttaatctattgattttttttttcctagaaatctttttgtgccactttccattttgtgtgg

SEQ ID NO: 134694 - DNA, 578 bp, Homo sapiens
tatggaacacacagggagggggtttgaattctagacttggggatacaagttttgtgtgagtagcacatggctgggggtgagtaggtgtgcggagagaataggcgacaagaggaaggacagaataattaccaggctggataatccagccttgcacaacggagcgctgctgataaaaaggggtcgtgcagtgggttttgtatctgttgtggccactttaataacacgtctccttgaggatagagaggcatcaccaccacgctcctcccatgaccctgcatgatggttcttcagtgccccgtccctgcccgacatcacattacacattcacaggcttattacctgtcgctcccactaacgagtaagctcacaaggatgaggactttgtttcatcctcattttcccctagaggatggaacagcttaaatgaacagaaaataatgaacagaagtatccctaaaacagaagccttgctatttacacaagaaacactgaaaagagacatatttggaaagcttgagaggaaaatggcagtcccgagtcaataaaaggcacacatttaaaactgccttcctctcatc

SEQ ID NO: 134695 - DNA, 361 bp, Homo sapiens
tagtccgttcgactgagcacagaataaggatcaggaatcaggcctgcagccttacatagatcatcccatttagtcctcacagcactcctgcaagaaaggaattgttgttcctattgttcagctgaagaaatgggatggagactaaggtgaagtgacctgcccagggttatacagcccctccgaggcagggcttgtatttgatcccgagcctggctcctccttcgccatgccagcaccaggagggtgctatactgggtctcccctactatttcccaaaccttggatctttggttttaacaaagctacagaaccttttattgtagttttcaaactgggttcctctgaggtaccctgggggctg

SEQ ID NO: 134696 - DNA, 753 bp, Homo sapiens
ggaatataaaacagttatgctaaatatgtttaaagtaataagggtagagagcaaagagcaagagactatcaaaaatgacctggtagatttgaaaaataactaaacagaatacatagaaatgaaaaatacagtaattgacattaaaaacctcaatgaagctttatacatcagttgaaaataaattagtaaactggaaaataggtctgaaaaaaattacacaaaatacagcacagaggtacaaagagatgaaaaaagtaagaatggttaaaagacatggaggacagaaaaagaagattcaacatttatctccttagaattctagaaagaaaaaatacacagaatggctattattaaaaagccaaaaattaacagatggtggtgaggttgcagagaaaaagaaatgcttatacactgttggtggaagtataaattagttcaaccattgtggtagacagtgtggcgattcctcaaagacctgaagacagaaataccattcaacccagcaatcccattactgggtatatacccaaaggaatgtaaatcattctaggacacatgtacgtgtatattcactgcaacattattcacaatagcaaagacatggaatcaacctaaatgcccagcaatgacagactggataaataaaatgtggtacatggaatactatgcagctataaaaaagaagagatcatgccctttgcagggacatggatggagctggaagccattatccttagcaaactaatgcagaaa

SEQ ID NO: 134697 - DNA, 735 bp, Homo sapiens
ggatagcgccactgcattccagcctagatgacagagcaaaaccccgtcttaaaaaaggaaagaaaagaaaagaaaattgtccctattttcccataagatttttctcaaggaaattgcagacagcaattccttcatgtgctgaaatagacacaaactcttaaaaacagtatctcactcagatggaaaatggcattcactcaacaaatgttcactgagtatccttctatgccaggcaataccacaggtcctggagagagagagtagtaaacaaaactaagcaaaaatctttgccttcctagaatttacattccagttgggggaggagggacacaaaacaaaataagtaaaacatacagtatattatatttaattaagtgagaagaaagaaaaacaggtaaatggcactaaaggtatggcaggcaggtgtacttctatagagagagacaggacaggcagcactgaggtgacactctgaataaagacctaagcacgtcttgtcggagggaaagcattctccatagaggtaatggcaagtgcaaacactcagaggcagaaacatgctggcagtgctcagggaacagagctgaggccaatgtggccgggatgatgcgtgcaaagcattaagaaataagaccaggaaggtgagcaagggctaggtcacatggcatcttataagcctatggcctttactctgagtgacatgggaagtcactgggggattctacgcagaggcgt

SEQ ID NO: 134698 - DNA, 116 bp, Homo sapiens
caaacaaactcactgaagtttgagaatcaagtgtctggtcatcagcagtgaaccagaagacagaatatggaagcaagtgggggtgttgagctagttcgtttgtgcctcagagaaca

SEQ ID NO: 134699 - DNA, 543 bp, Homo sapiens
taaatatttttagtagagacagggtttcaccacgttgaccaagctggtctcaaactcctgacctcaggtgatcctcccgcctcggcgggatccaggcgtgagccgcggtgcccggccagttcagtgttctttagatgtctgttagatcaactggtagagcttgtgactatgcatatcttctgtgtccttactgattttttactaatgctacagtgtattgatagttatgttaaaatctccagcggtaattctagatctgtctacttgagcagtttttgcttaaagtattttgaagccgtcatgtgtacacatttaggattgttaagtcttccttataaattcagtctttcattttcataacattttaaccttatttctgttaaatgtcttgatgcctagtcaaattatttgaccacccttttgctcctgtcaagcctgggcctttgttagtttgtgcttatttattagggttttgctcgtagacttagacagtgactcttagtctaggaaaggttcatcctcatgggcctcagccacatgttc

SEQ ID NO: 134700 - DNA, 855 bp, Homo sapiens
tgatttcatccacaaaatacattggggtcattaaaatctgctgccctatccctttcttgtgccctactccaaacccagtccagaactgtccctgagaagtctgcttattccagagctccctgtataaccggcctctgcacattaggaggtcaagagtcacttcctcctccactgaaccaacaagaaccactgggtagaacctccaagtcagaccagccaagtacctcccctgtggacaacctcaacctgcattcacatagggaaagccctctgccttatctgaaactctatgtggctcctctaaatctgacacttggagcaggttgttacacttgtgtgcctcaccaccatgcctgcacacttcacgcttcacgaccccactcatacacacacccccaacaattccagcagattcttctgctgttggccaggacaccccctcccacagactgctcagccacagccctgctgcacatgcttatcttgccctgctaattagcaactctaagagcaatggttcctaccatgaaaatctctttgccatgatttttatttggtattggctcacttttttgtccctaggaaacacctaagggatctggaagtggagaggcagctgatagatcagccactgcacatcttcagaagggtaccctaggctaaaaatcaacaccactgcctaatgtgacggcctttaagagtagcccaggggccgggggcagtggctcacacctgtaatcccaacattttgggaggccgaggggagggggtggatcacctgaggtcaggagttcgagaccagtctggctaacatggtgaaaccctgtctttagtaaacatgcaaaaattagctgg

SEQ ID NO: 134701 - DNA, 777 bp, Homo sapiens
tccctcctgccttcagacatcagactccagcttctttggcctttggactcttagacttacactagtggtttgctgggggctttccggcctttggccacagactgaaggctgcatcgtcagcttccctacctttgaagattttggactttgactgagtcactattggcttctttcttcctcagcttgcagacggcctatcatgggacttcaccttgtgatcaatttcattcctgcagaaaccacaataaagggacgtgccctcagttgccctgtctccctctgcctcatgactgaccgcggtgcatgacctgagtggccttgtgtggcctgctgctttctccccagtgaactgtgaatcgtcgtcatggggtgagatgaacattctaaattggtgaaactttgagcaggacaaccttcgcccgcacacagtatcctcattttccacctggactccagtcttttacttcccttatctacctttctactttacacaagtgatccaccgttcaaggttccactaatcggcatcgtctttgcctgtatgggagctggtgccaaaacaaactcacttgtactcttgcccctaatttcatttcaactttgtctttctgaattttcactcccacattctccttggagtcataacctccgataattctttggtcccaggcactcgctcccaaacgtaatacctattttcgctcccgactttcctcgattacttcgcgcacgacaccgggcatagaccggtggtgcgacagactggatcatggtaac

SEQ ID NO: 134702 - DNA, 170 bp, Homo sapiens
ccccttatccagagtgcaagcactctctgggttccagaaacaccattttcacttcttcaggactcttcctgctgttaatagtgtctgtgcttcaaattgattgattcccttaacctatgtgaataaccccctttctacaatctcttgaaccatgggaggtggactgtgtt

SEQ ID NO: 134703 - DNA, 290 bp, Homo sapiens
ataggatttcgtcatgttgtcctggctggtctcaaactcctgacctcaagtgatccgcctcccaatgtgctgggatcctgttgaatatttttaatgcagcttaaatttgtataagccttcaattttgatttgtaatgaagacaggagcagaaatatattttgtggtgccaccaagagagttcagcaaatccactgtaagttgtgtgagtacatggctcacctatcaacaatagctctttctaaacttgaaggtgagaactttagtaattttgctttgtcatggttgaacg

SEQ ID NO: 134704 - DNA, 336 bp, Homo sapiens
ggccaggctgccttcatatattttaatccaaataatttactgcaacagtctgaatgcaaaagcaaattttagaatattcttaagacattaaaaagatttgtaaaaatgtaaaacaatgcctctcatctcactgtttttgaaactaatttttcataagcatatttttggttaatgtgtaatagttttattctttctttttgagtcggagtctcactctgttgcccaggctggagtgcagtggcacaatctcggctcactgcaacctccgcctcctaggtcaagcagttttccctgcctcagccacccgagtagctgggattacaggcagctgccacc

SEQ ID NO: 134705 - DNA, 163 bp, Homo sapiens
ctggggtcagacagaggcacatgtggcagtttcgtttaactgctctggaacaggtggatgactgcaggcctgagaagttagggaggcttcttgaagaggctagatctgaacaaggccaacccacaactccctcccagatctagggaggaggaaaacacatttg

SEQ ID NO: 134706 - DNA, 299 bp, Homo sapiens
ggttaatgtaccaaagtgtagcttcattgggagttatgagcacatttcataaacataattccaggggttcgcctgtgatgacatcattccttttcacaaggtttatggatatccaccaagttgcccctcacgttatcccatggagacttttcccagctgagaaacagatgccgaaacagagacacaaccacttgggggaaacatgcaacagctgtacaaaggtgtcaaggggagggaaaaatgaaagtgtcaagggatgttgtcaccaactcagacagaatgggtcactagaaaaagtg

SEQ ID NO: 134707 - DNA, 313 bp, Homo sapiens
gaagaatggagaagaattgtagggcccaagatcagagagatgagtagggccagatcatgtgggcaagcttttatgtattagcacgcttagaattaatattctgcttgagaactaacctgatatttgaaacagagtgaaaaagaaaatacctcccacagtatacttcatagcttcttatttagcccaagctgtcagggaaataaagtccagctatggctaagtttcacataatgcactgctttggagtttttgtctcatctgttagagtaagataagtaccacatactattataaggctatatagcataaaatg

SEQ ID NO: 134708 - DNA, 741 bp, Homo sapiens
gaaagaatgtagattattggttgtcagggcctaggaagaggagagaatgagaagtggctgctaataggtacaaagtttattttgagggtgatgaaaatattctaaaattagatagatgtgatatttgcacaagtctgtgactatactagaaacctctgaattgtgtactttcaaagggggataagggtggattttacaatatatgaattatatctcaataaagctattttattaaaaaagaaaaaaaaaaaaaaaaaaaaaaaaaaaaaaaaaaaaaaaaaaaaaaaaaaaaaaaaaggaagggggggaaaaaaaaaaaaagaggaaaaaaaaacataaaagggctgcccacaaactagaggagggtcgaaaaacaacactcaaacacagcgccgcggacaccccggacaacaaacaacacacagcaactgaagcgacgaacaaaaacaaacacacagcaacaacccggatgcacacccctgcagcgtgagcgaacgaccccaaccacacattgaccccgaggggagcggacaacaccaaccaactgtgcagaagaacacaacaaacactgaggcaaggaagaaagacaaaaaagccacccaccagggcggccaccctaacacagacaaccacaaacaagagggatacacaggtacgtcgcagaaacacacagaccacaacttggacctgagacgcgacaacagaaacattgtgcccaccaacaggcaccagctaaaaaca

SEQ ID NO: 134709 - DNA, 1281 bp, Homo sapiens
atcatttaatcctcacaacaaccccatcagataaagtgatactgtcattcccattttaaagatgataaaactgagtcacagttaagttgcttgcccacgttcagagccagtaagcagcagaggtgtagagccaggcactctgactccagagtctgtaggctaaatcactgcacaatccagcatcccctcagtggaaaaagagctctgatgggcacgtccacatgaatgggcaggtcgttgccgcatttcatagacctgtctcaatacttgaatggttgcaacagtgcttaagaatttgccattggttgggcgcagtggcctcccagcactttgggaggccaaggcggatggatcacttgaggtcaggagtttgagaccagcctggccaacatgatgaaactccgtctctactaaaaatacaaaatttagctgggcatggtggtgcacatctgtaatcccagctactccagaggctgagacaggagaatatcttgaaccctggaggtggaggttgcagtgagctgagatcacaccaccgcactccagcccaggtgacagagcgagactaactaaaaaaaaaaaaaaaagccatcactattttagattatctaatcatctcaccagatttagcaaataaaatacaggatgcccagttaaatgtgaatttcagattaacaacagacaattttgttatatcccaaagattgcatgggacatacttagattaaaattgtacattgtttatctgaaattcaaatttaattaggcatcttggattttatctgacattcctattcctgaaagacaatagaatggcaacttatttcactttatatttacctcaaacaaacatccgtcttttttacaaaactctctttttcccaaacagtctgtggctttttctttaaatcaagttacagcaaactgtcatcgaaatccagcctgctgcctgtttctgtatgggctgcaagctaagattttttttttttttttacatttttaatggttgaaacaatcaaaagaaaaatgctatattctatgacacattaaaataatatgaaatttgactttctgtgcccataattaaaatttcattgaatcataaccaagctcatttgttacatatgatctatggctacttgcacattacaacagcagagttgaacagtttcagtaaagaccgtgtgacccacaaagtctaatttactctcaggccttttacagaaaaagttggccaacccttttcttggacaatttctcattcatgatgggtaataaaca

SEQ ID NO: 134710 - DNA, 335 bp, Homo sapiens
acctcagttgagaaccactaggctagtgagcactacagtctagtgtgggaaacggacaaccacacagaaaaatgacatccatacacgcattgtgaaacagtagactacttatgagcgacatggggttcagtgatggagaacagcaagaggtggcttctaggacactctcaaattcactttctttttcttaggctgacacttaaacaccatgtagtgcctcttgaatagccacacaagtttgtttatattatgtcagcattgtgagtttgcaaacatttgacaaaatttatttactaaaggtaatatctaaaattagttgtcctttattttaaaag

SEQ ID NO: 134711 - DNA, 664 bp, Homo sapiens
catccaagatctttcctcttgaaggaggaattctgaaagtgtttgctctcagcccagctctaacgtgtcattatagaggaggtctccaatttgaaatttctgagtgactttcataacattgtaatgtagagatgaactttttacctgattactattggcagaatctcctgctgccagtggggatcacgccactctgcctgttctcttccacggagcttagcacagactctttggtaaaataatcatttgcatacacaactcatcatctaagaccgtgtttgatatttgctcattctttatgtgtgtgtttcctggagccctcactttagaggtcagaagacttggacctgaatcctggctttactacttctggtagccatgaaaactttgacaagttattttatctcccttagcattagttgcaaaataagaataacagtttctacctccttgggttgatttgaggatcaagtgagatagcgtgtgtcaaatcctgagcatgaggcctggcccaccgtgacagcggataaataaagtctaacattatcaggaatgatgctcttgagtgggacagagatttgatcctacgtttttcctcgtagggagaaattctgcaatgctgccttgtcgctgttccatgttgtggagccagtgtgacttgctg

SEQ ID NO: 134712 - DNA, 518 bp, Homo sapiens
gtaaataaaataaaatataacatggacatttcaacagaagctatatggtaggcaaaggaggcagcatgaaatttacatgattaaaatacagctgcctttagacaacaaaaatgctgaaatgtgccataagcttagagtagttctcaaataattctcaaatggcacagggaaaacacttttagtaactgatcagagaagaagcaaaaacattcaccttcaaaatacagggcttcgggccgggcatgatggctcacgcctgcaatcccagcactttgggaggccaaggcaggcagatcacgaggtcaggagttcgagaccagcctggccaatatggtgaaaccccgtctccactaaaaaatacgaaaaatcagccaggcgtggtggcacgcgcctgtagtctcagctactcaggaggctgaggcaggagaatcgcttgaacccgggaggcagaggttgcagtgagcagagatcgcgccactgcactccagcctgggcgacccactgagactccgtctcaa

SEQ ID NO: 134713 - DNA, 787 bp, Homo sapiens
ctatataaatcagttgaaactgagcagtagtttcttaattcccagatctttagtatttctcaatcctaatccttgtgtttttgacattgttgagcctttgagcttcccttggtttctcttgctgaaccttcccgtttatccgcctgcttcttttctttccttcattgtgtcctcacatggcttctctaaagttttgtttctattaatttcatccattctggtcttggactgtatgtgcttccctagtcaacctttttaacctcaagctagcatctgacctctagagccagatttatctccgccttttagaatgctgcatcaggatatgccggtgtgttggatagtcttcatgcctaccctcaggctcagtaatttgctaagagcattcataagactcagcatgtagtcatactcatggctatgatgtattttagtgaaaggatacaaagcaaaatcagcaaagagaaaagacacatggggccaagtccaggagaaaccaggcacaagcttccaagggtcctcttccagtggagtcacacaggatgtacttaattcccccagcaacaggtagtgacaatatgtgtaaaatgttgctaaccagagtagctcgttagagatttggcacccagggtttttattatgggttggtaatgtaggcatctctgcctagaacataccaaaattctagactccctgaaggaagataagtgttctgcataaaccctgtagtttgtataaacattttaagcacagtgaaccacctttttcagttctgggaatggtagga

SEQ ID NO: 134714 - DNA, 1421 bp, Homo sapiens
gtagacacttctcaggttataattcagactcaataacaaagccagaaagttcaggaagggtagggtagtgctgtggtctgaatgttgaaatcctaactatcaaggcattaggaaatggaacctctaaaaggtgattagatcatgagggcagaaccctaatgaattagtacccttataaaagagaccccagagaactggtttgccccttctgccttgtgaggttacagcaaaaagaccatcatataggaagcaggacctcaccagacaccaaatctgccaacgccttaatcttcgacttcccagactccagaactgagagatataaatttattaagtttataagctacccagtctttggtattttgttataacagcccaaactaaggtaacaagaagcaatcctcacagtgcttgcttaatgtcatgcacctgtcattctagtggtgctcatttgccagtcttttttttttatgaaagaaattagcagtcctgctttctcttgttttgagtgacaggtctcaggtaaggatttattttccagaaagaaagtgactaaatagattccctccagaaagattttcagatcagtagatctgccttaaactaatgtagtctttggacccagttcagaagtggccaaggccaatcctcaatgcatgaaagtaaaagttagactgtatttaagggagacaaattactagttaggaaccatcgaatgaggtcagaggcaagaccttactaacagatgggcaagttaaatgctatcttctgaaaattttagttgcttcatgatggactcatttggagcatatctggaaagttttttggacatgtctaaaacacggggttgaattttccttacaagccagggttaggacaggaggtcgacctgctgtctagatagtctcagcactaccagaagctatttgtaagctgtactactagtctggtgactcaagtaggaagtgtccaggaacctttcttctagacactgcgagaaaccaaagattagtaataagaaattgtttgatagacaagatgaacatcttaaagcatagattcaagacagaggacctttgtacctgacaagtactcaggaagacttgaaaagggcccccgcaggtgagtttcaggctctgtcttccactcatgaacctgcaaaatccaatccttgctgctgaagatttcttaagaaaaatgaacagtgtacctggccacttcagtgtctttagaatcccatcttggtgttatactttgcctattgattctagatggagaggtatcaaatgctttacaaaatctcaaggagttataaactacttttacaatctgtgttataaagtgtattccctggttattataaataggcaaaatgctattccaaatctaacaataaagacttttgccaataaaaattgttt

SEQ ID NO: 134715 - DNA, 313 bp, Homo sapiens
tggcagaggccaccttctctcagggccctcactcagcctcctccctgttcacacatccctggtgtctcttcttataaggacatcagttgtattggattagggcccacccgaatggccttatttaactttatttatttatttttattttattttattttaagacagagtctcgctctgttgccaggctggagtgcagtggcacgatctcggctcactgtaacctttgcctcccgggttcaagctattctcctgcctcagcctgggcaaccaagcgagaccccatctctacagaaataaaagtttttaaaaaatt

SEQ ID NO: 134716 - DNA, 141 bp, Homo sapiens
ccagaccctctgctccctgttcatcttcctcacctaaacattaagagaagcaaattccacgatcttgtaatcccttttggatacaaatatgtatgaagctaaatttgtggacttttcagaagtgtcagccaagtggcgaca

SEQ ID NO: 134717 - DNA, 439 bp, Homo sapiens
gaggcagccgggtgagtatgcatatagtgcagtggggatagctataatggatttggtaatgataggaagcaattttggaggtaggtggaagctacaatgattttgggaattagcaacaatcagtcttcaaattttggacccatgaagggaggaaattttggaggtagaagctctggcccctatggcggtggaggccaatactttgcaaaaccacgaaaccaaggtggctatagcggttccagcagcagcagtagctatagcagtggcagaagattttaattaggaaacaaagcttagcaggagaggagagccaaagaagtttaggcactaattcaacacagcaagcaaaataaaataagcctgctgcagtaacagagagataaaagggcagctggaaacccagcatttgggtacaagtacccaacaaagaaatcctgcc

SEQ ID NO: 134718 - DNA, 491 bp, Homo sapiens
gaatcaatgaaaacatgaataaatgaaagaaatagtgacatatgcccttatttcttctatgtttaggtaatgctacacctgagatttggaagtatctatagagtgttttgggatcatttctggagttatttctttctcaagttcaggcagcaatcattttgcataaaaatcatggctgggctgagtgtggtggctcatacttgtaatcccagcaatttgggaggccgaggtgggcggatcacctggggattgtgagaccagcctgaccaacatggagaaaacccgtctctactaaaaatacaaaattagaaattagccgggtgtggtggcacatgcctataatcccagctacttgggaggctgaggcaggtgaggcaggaaaattgcttgaacccaggaggtggaggttgcagtgaacccagatagcgccattgcactccagcctgggggacaagagcaaaactccgtctcaaaaaaaaaaaaaaaaaaaa

SEQ ID NO: 134719 - DNA, 144 bp, Homo sapiens
gcacacttatgcatgtgtatatgtaagggatctattgaaattttagatgggatgtcaacgaaaggcctcacagggaagatgcatttgaacaaaggcctgaaagaagtgaagagttagccatgctgatacctgaggaggaatgtt

SEQ ID NO: 134720 - DNA, 783 bp, Homo sapiens
tgcagcttgaatcagctttgagaaaagaaagcaacccgagtcccagctccaggactgaaattcacctctccaaacccctacccgacctccaggcttttctggctgaatgtagaaagagaaaacacccaaacagccctccagagaagaaagttgtgcaaagatttgcatatttaccctccaagtgcccaggcccacaatgggcatcttggcttttgtactgagctccacaaacgtggccatggttggtgcggaaatgattctgagtgagcaggtagaagtctcacgtcctgctgtgtccagagttggttccttccagagggttcgtggtctcgctggcttcaagaatgaagccgtggaccttcacagtgtgtgttacagctgttaaagatgttgtgtctggagtttgttccttcagatgtgtctggagtttctcccttctggtgggtttgtggtgtcgctgacttcaagaatgaagccgcagactgtcgtggtgatcgttgtagctcttaaaggtggtgtggacccaaagagtgagcagcagcaagatttttcgtcaagagggtggagtctcgctctgtcacccaggctggagtgcagttgcccaatctcagctcactacaacctctgcctcccgggttcaagcaattctcctgcctcagcctcccaagtagctaggactacaggtgcacaccaccacacccagctaattattgtgtttttgttagagacgaggttacaccatggtggccaggatggtctcaatctcctgaccttgggatctgc

SEQ ID NO: 134721 - DNA, 710 bp, Homo sapiens
tgtcataaataaataaataaataaataaagtttaaaatccataggtgtttggtatactcacaatgtcgtgcagccatcaccacgatctagttccaaaacgtttccaacaccccgacaagaaactcccatacctgtcagcagttaccatttgtcctccctcctgtacccccggcaccccgtaaccattcatctattctctgcatctattctctgcctccatgcgtctcgggaatcatggattacgtgaccttcgtgctgtggcttctctcacgtagcacagtgtttgcggggctcacccacattgactcatgcacctgtctgggccgcattcttttttatggctgaataatattccctggtatgggcataccaggttttgtgtatcctttcatcagctagtaaacattcgagctgtttccacttttttggccattgtgaataacgctgctgtgaacattcgtgtacaaatgtttgtatgaatgcagttttccattttcttaggtgcaattgccaggtcatatgtagtcactctgggctttgctttttgagtctgttgtattttatttatttatttttttatttttgtgggtgcgtatatttatggggtacatgagatgttttgatacaggcatgcaattcataataatcacattgtggagaatggggtatccatccatcacagatttattctttgtgttgccaacagtcca

SEQ ID NO: 134722 - DNA, 283 bp, Homo sapiens
cagcctgggcaacaagagcaaaactatgtctcaaaaaaaaaaaattaatcttgtgtagatagtgaccacgttttactttccttgggacagtcctggtttatacctgctatcctagcgtaattagtaatagcacccgtttcactctcaaaaatgtctcaatttggatcataaattatacgcttaccataattgtagaggattgtgagacttttagtcgctacctagcaacctagtttttcttgatagagctcttcttattctggagtctcctgtgctgcgattt

SEQ ID NO: 134723 - DNA, 484 bp, Homo sapiens
agccaggcccagggggggtccccacagagtcactccccaggcagcccctcctgcctggaccaggccgcccagtggctgataagccacaggactgcatgacacaatcccgctctgatcttctgcccagccgagcctctgcccccaccccacccctggaccctgtttccatctcctccctttctgggtgggaccaacgccccggcctggtgtcattcatggtgggctgtccagagagccagcttctctgtgaacctctcagctgttgaggtctccccaaagtccaccctagccagagggctggcagcaggagacccctgcagagggaggacagtggcctgtgccacccccacctgccgggtgggggtgggggacttagggcccatcttggcccctgctggcctcagcatccccacttggtaaaggaaaagctcggagaagagatgaggctgcgccgtggaggggaggaggctaagtgggctctgga

SEQ ID NO: 134724 - DNA, 297 bp, Homo sapiens
ttatctggggtgcagagatcgttatttctgcactatcaaatcttaaagatgtgaaatagctttcatcacagctccaaaaatagagcaccaaaaatggaactaatgagcccgtaggcattttgaaattaggaggaaaaaaaatgaaatggcttgttttgttaaaatcagaaggactattttaaaatgtttcctagagatttggggggggctcttcaggttttaaaaaaaagctttatccctttgcttatttttgtgtacagtttataaatcaataaaatttttgttattattttcgca

SEQ ID NO: 134725 - DNA, 158 bp, Homo sapiens
tttttttggacataattgggtagtagtcaaatggtgagctgtggaattagattatttggatttaaattctgtttttacctcttataagctgtaagtttgggtaaactactcaccttctccagatctcagctttcccatcagtaaaatggaaataatta

SEQ ID NO: 134726 - DNA, 263 bp, Homo sapiens
tcagagaggttaaataaagccatcatctcctcttccctctctctcaccccatacatctcatcaagcgcagagaataactggttaaacgatggatgaatgctgattcctcctttctaccctcactgccaccatcctctttcaggcccctgtatcctgagatccttgtttgcatgtctagagtcatgatgctagactctccaagttattctgcacactgaagctgttttcctggaactaaaattagacgatatcatccctcttct

SEQ ID NO: 134727 - DNA, 115 bp, Homo sapiens
ttaagtcagactgcaaacatttgtgtattcattcattcattcaatgcttttgcactaaatggcggattttgccagccatgttagttacattaagcagactattaacccaagtgaa

SEQ ID NO: 134728 - DNA, 605 bp, Homo sapiens
tgaggtggaggcaaggcccaagctgattccacgtagggcacctgggtaggggtgtgtacttatgaaactgaaataatactggatccaggagaaaaatgtagtatatttgaaaagatttggaaatggcaagtgtgctcttcagtgattagaaccggaggaaatgcacccatgtccacagcagccttatcatagcagctgaaaaatggaagcaacccaagtgcctatcaatggatgatggataaacaaaatgtggtccatccatgcaacggaactggattcagccttaacaaggaaggaaattctgacacatgcttcaacatgcttcacatgcctcaacatgcttcacatgccttgaggacgtcatgctaagtggaagaagccagtcacaaaaagacaaatactgcatgattccactcatacgaggtccccagagtcatcaaatccatacagacagaaagcagaatcgtgcgcgcccagggctggtgggaggggagagggtgacatgtttaacagggacagggtttcagttttgcaggtgacaaagctcacgagctggatgctggtggtggttgcacaatcgtgtgaatggacttaacactactcaa

SEQ ID NO: 134729 - DNA, 1029 bp, Homo sapiens
aaagtcatgattagtttcacatattacctcttaaatcatttacttttaaaatactttatctgatttttcagtcactttttcttttcaaatacattctcctgcttatagtcttcttaaaataactactgcctacatacagaagagatgatccaataattgtatcacataatttattgttaattcaattttgaggttgcccctgaactcattgtttaagtgtgactgggttttggggaagtttgtgatttttattgggtttcgcaggagccctcctagaaactatctcctagatagaattttctcattgaaccatcttcagagatagaatttttttcttcccatccttggtaaggtcatggcagtaggattgggaaagaattatacacttatttatatttgggacatctttgttgtccttttagtatcagcacacagaattaaaatacagacatttaatagatatgatttgcagattccagaattgtgttttaatatcatgcttttcacagtaagtcatattaacacctccttcttaatattacacagttgtgacacctagtctcttggctaattgctgggttctgaaattttcaatagataaattttatatatttgtacctatgagtgtattatattgcctattctgttattctgaatcactaaactaatgtatatgggatattcagcaatacttaaacagaagacgacaaaatgaaataatggccaaaatccaagcagctattatacagattcctaaacctgcatcaaatcgtactttgaaagcactcgaggcccaaaaaatgatgaaaaagaaaaaagaggcagaagatgtggctgatgaaattaagaagttcgaagcattaataaaaaaggatctccaagcaaaagaaagtgcatccaagacttctttagatacagcaggccagacaaccaccgatttgttaaatacttactcagatgatgagtacattaaaaaaatccagaagcgccttgaagaagatgcttttgcacgagagcaaagggagaaaa

SEQ ID NO: 134730 - DNA, 1084 bp, Homo sapiens
agcgtcccctcttctctaaggcctttcgcctagttccagcctggatacgcttccatagcaaagggttgcccttggctacaggaggacgcgggctggcaggcttggttcctggcgagtttctaagcccccgcctgcggtctgaggcaccggctgaaccatgtcggagatcctgtgccagtggctcaacaaggagttgaaggtgtcccggaccgtgagtcccaagtcatttgcaaaggcattttccagtggctatctacttggagaagttctacacaagtttgaacttcaggatgatttttcagaatttttggacagcagggtttcaagtgccaaacttaataatttttctcgcttggagccaacacttaaccttctgggtgtgcagtttgatcagaatgtggcccatggcatcatcacagaaaagcctggggtggcaacaaagctgttatatcaattgtacattgctcttcagaaaaagaagaaaagtggactgactggagtggagatgcaaaccatgcaacgtctgacaaatttaagacttcaaaacatgaaaagtgatacttttcaagagagacttagacacatgataccacgtcaaactgatttcaatctgatgcggattacatacaggtttcaagaaaaatataaacacgtgaaagaagatcttgcccatttgcattttgagaaacttgaaagatttcaaaaactcaaggaagagcaaagatgtttgatattgaaaagcaatacttaaacagaagacgacaaaatgaaataatggccaaaatccaagcagctattatacagattcctaaacctgcatcaaatcgtactttgaaagcactcgaggcccaaaaaatgatgaaaaagaaaaaagaggcagaagatgtggctgatgaaattaagaagttcgaagcattaataaaaaaggatctccaagcaaaagaaagtgcatccaagacttctttagatacagcaggccagacaaccaccgatttgttaaatacttactcagatgatgagtacattaaaaaaatccagaagcgccttgaagaagatgcttttgcacgagagcaaagggagaaaa

SEQ ID NO: 134731 - DNA, 534 bp, Homo sapiens
gtcccaagtcatttgcaaaggcattttccagtggctatctacttggagaagttctacacaagtttgaacttcaggatgatttttcagaatttttggacagcaggttagtgagattattcctttttgttgttgttgttgtttatttgttttgagacaaggtcttgttctgttactgagactggagtgcagtagcgtgatcatagctcacagcaacctcaaactcctgggataaagcaatcctcttgcctcggcttcccaaataggtgggactacaggtgcatgccaccacgcctggctaatttttgtatttttggtgtagacggggtttttccctgttgcccaggctggtcttgaactcctgggctcaagagatcctcctgcctcagccttccaaagtgttgagattacatgtgtgcacccccgcttctggactactctttacttttaagaaaagttcatttctttggcattttccaaagttaacttcaaagaatcatgaatcataagatcccttccaaaccttgaacacccaag

SEQ ID NO: 134732 - DNA, 950 bp, Homo sapiens
gtgtccactgtggtccccgactctgcccacaagctgttcatcgggggcttacccaactacctgaacgatgaccaggtcaaagagctgctgacatcctttgggcccctcaaggccttcaacctggtcaaggacagtgccacggggctctccaagggctacgccttctgtgagtacgtggacatcaacgtcacggatcaggccattgcggggctgaacggcatgcagctgggggataagaagctgctggtccagagggcgagtgtgggagccaagaatgccacgctgagcaccatcaatcagacgcctgtgaccctgcaagtgccgggcttgatgagctcccaggtgcagatgggcggccacccgactgaggtcctgtgcctcatgaacatggtgctgcctgaggagctgctggacgacgaggagtatgaggagatcgtggaggatgtgcgggacgagtgcagcaagtacgggcttgtcaagtccatcgagatcccccggcctgtggacggcgtcgaggtgcccggctgcggaaagatctttgtggagttcacctctgtgtttgactgccagaaagccatgcagggcctgacgggccgcaagttcgccaacagagtggttgtcacaaaaatactgtgaccccgatcttatcaccgcggacttctggtaaggcggtggggaaggtggggccggctggctgcgggctctcccccatccccgcccccttatccctctgaagacgagggcagagagtgcagcgaaacaacgaaagcgcagcacttggatgcgcatagtggggccggattgaaggtaggagcgggacgggatgcgcaagccacaaaacgccacacaagcagccgagagcgcacacgggtagaccccccaacctcacaaatcaccaaaaggtatgcaaaggcgacgccaaaaatacaccgaaaacacccccaataacg

SEQ ID NO: 134733 - DNA, 678 bp, Homo sapiens
taattctttgttctggagaggctgtcctatgcattataggatgtttgccctggggagggggaagaggatggcaaaaatcatctctgttgagaaattgagttgattttccagtacactttaggacagccctggaagtccattatttggctgaatatttaataggtgccacactctagcctttatttaaaagactggagtgctgggaggaaaacatgacaaatgaatggcttttattaattagattttagataattcaatttttcatgtctttcaattggtctttggtttgaaaataaaaattgttaagtttgtcatgtatgatgtcaaacagtgcttaaattcctaaaaagatagccataaatgtttatctgattttgaagagaatttttaatcccagtcttaagaatgcttaatgttttgatgtatactatgtttgatgtaacccgctttcaagttagactcaaaacagattcacttataagttaccactattatttttcgtcctatcaaagaagaaattcccttttgcttctctgaattgcttgttgcctagttagcacttttaaaaagctggtctaatcgaatatgaaccttcaaaagatatacttgaagggccatctgctgaccccagctcttgtccatgtgagcaacttgtaatggtggctctgatggccatgt

SEQ ID NO: 134734 - DNA, 712 bp, Homo sapiens
taatttaaaataacttttaaaagaagacaccaaaatgtaatgcttttagtggttttcagttttctgcctaatttaaagggatgggtggggagcgtcggttaaatgtaagtaagaaatatgtgttcatagatttgttttcatagtcacagagaagtaatagtgttttaaaattcagcctcaagtaattcgagcttcagtgtgggagtggggtgtcaggaacccggtgtttcagtttttgtttctagtgacttttacttagggagtttcaggttggaaacttacgcatgttatttattacagaattggtgtcgtgtaagcttgtttcgttctattagaatgtgtgatttctttgaaagactgttttgctgactctccagtttaaggggttagtattagtgaatacaaaagtgtctttaatatttattgaaaaaccaaaatctaagccaaaaagtaagtgccttttggtgtattcataactttgacaggcaacatcaggaacctgagagaatgtatctaaaaattgctgggggaggggagttcgatataaaaagagcaacaaagtagcagtgttagtcggagtctttaaggtgtttactgtgtaatcagacagataatacttatgtccaaaagatattcagatagtatgtagatgtatgcaaaactataacctagatataaaacttttcaaagtgtttttgcattcattttcatt

SEQ ID NO: 134735 - DNA, 165 bp, Homo sapiens
aacaatcttaaatgaaatttttatttttatgatagccatttacatgtataataagagccaatgattcttgggagcagtgtgacagaaacagagtgtggcgagaactcatgtaagacatactatttaaatgagctggtgttagctattcatatttgttaatgaact

SEQ ID NO: 134736 - DNA, 245 bp, Homo sapiens
aggtatctctggggccaatgtactgggtactttacatgttcattaatccttagcataatagtgtacagataaagaactatgacccagagagacaggagaatttgcccaagatgatggaaccagaatttgatcctaattctgtctctctatgaagctcatactccttctgctaccctacatcagaaaagactgacagaagaagttacagtctaataaagctaataaaaccccacaaaactcagttt

SEQ ID NO: 134737 - DNA, 568 bp, Homo sapiens
tttttttttaatgtttttgtttattatactggccatgaacactccaccacagtaactctccttcttatttgcttcctaagtcagaaattctggaatctagacaggaatctatatttaactccacttgtaaccttcagtaagttgtttaaccacaccaaacctcagctttgtcaattataaaagtgaaagaggttagttaccatgaattatatgacataatttactttgaatttattcacatctggaactgtgaacactaccttgtcactgagaaggccccccctcacttccatcctcttcacttctttccacactgctctctacaatactattcttcataggtcatttttcatcaaaaaccttcaatggctctccaccaccttggtagcaatcaaaaacttttcacaacattcccgcattttgtttaagaaagttttcacatttggccaggtgcagtggctcacaagtataatctcagcagtttgggaggctgaggcgggcagatcgatttgagctcaggagttcgagaccagcctgagcaacatggcaaaaccccgtttctacaaaa

SEQ ID NO: 134738 - DNA, 151 bp, Homo sapiens
gaggtggcacccccaagacacagcgagaaatccaggctgcaggagccagtttcttcaacaaattgcacaaggaaaaagagaggaagggaagctcctagacatcatcggacatttaaaagacaggcggtggctcaagcctgtaatcccagca

SEQ ID NO: 134739 - DNA, 418 bp, Homo sapiens
taggatgtgaggagacaaatgcataattttctgtaatattgtgcatactccttaggacttcacgagagacgttgtgctggaggaactggagagggctctgtggagaagatgaggctttagctggtcctggaggtgtcagggcttggagaagaggggagaagagaaggcataaagcttctgcagcaagaatgagttttccaggcatagggaactgaggggagaggggtcttccatgacagagggtacataacattttacagatgagttgaaaatcaaattgctcaaaagatggagagtaggttctggggggacttggaagttacgcagcatttactgttggtgtggttggcaaaagtgaaagctgtagatacttaaataagagtatggcaggttgcaagtagtattttagggcaatttg

SEQ ID NO: 134740 - DNA, 343 bp, Homo sapiens
gagccaccacatgtggcccgttctccatgattctaaaatgaacactggaatagcactggacattatatcatgagatggctgtgcatatgtggtgcctcccaacagtccgtgagtactgtgggcatgtctcatttattttttataaccatagtgtctagcacacagcagacgctcaataaatattgactgaatttggtttggccaaatctctccagctggcagcactgcctcccagtcatgatgaagtaagacaacagaatcattcactgagcatctaccaccttctgggtgacttaaatgctacttcctggatctcccaatagcaattttaagtccagagatt

SEQ ID NO: 134741 - DNA, 393 bp, Homo sapiens
actttattgggactgctgttactaaattattacatagaatattcataagccctttgatttatagttttataaaatgcatttgtaaattgggtcgtatccgagaagaagataaatattactctggcgtacttttcatatctgctattttccttaaatattatttaatattaatagtaaaaccacatcaagataactagtaagctgctgtatagcagtgctaagcctaaaagtgttactgcaacatggcaacattatcagaatctttttttactcatgaaaagcgatttatggaataaaatatattatctctgagctttgttataaaagacagtttcatattatttcagccaccatagatacatttaatatcttgattataaaatctcattttgc

SEQ ID NO: 134742 - DNA, 513 bp, Homo sapiens
aaataagaaacaaattatttttgacatgtcaccattattttccaaatatgcttttatcgttttattcaccaagtaggtgggaagagaaaaaaggagagtggggccgggtgtgagggaatgtactgttgcttcaatgttaagttgttgctgaagcatttttattgttctaaaagggctttacatttgccaatatgttaaatactaaatggaccagttataggcttatattataaatcgaccaaatttttttccccatagtaagttcagtgacttgtacatagtaatgctattctaatagcgctgcttagtaatatatgtaggggtaagtcttcagtgtttcaacatttactaaatgtcttacggaaaattaacgcttcttagtttcttcattacggacacctttttgctatacctattttcatttccatgattcaccaacaaatgttcaaaacacttttatttcctcgccggaggagtttggcaattggtttttcttctacactctgagctcat

SEQ ID NO: 134743 - DNA, 651 bp, Homo sapiens
aaaaattattgaacttacagattaatccaaattaaccaaacaaaaaaagtctaaaacaaaatgaacagaacttccagtttgtgggacaatatcaggtgttccaacaaatgtgtaaatagggtctcaaataatgaagagaaattgaaagggtcagaaaaaaaatttatacaaaaaactggctgaaaacttggcaaattattttaaaaatattggctttcagatctaagaatttcaatgaacctgtagtaggataaacacaaaaacacttcactcaggcatgttgtcgtcaatctgttgaaagattaagagagaatctttaaagtaaaaagagaaaaacaaaacctcatatgtaagagatttcctaatacaattaaggtgaacttctaatagaaataatgacaaccaaaagacactgaaataagatatgtgaagtgctggggggaaaaagatgtgacaaccaacagtactgtatctagcataactatcactcaaaaatgaaggcaaaataaggatgtttccaaataaatacatggaaataatggattcctatcgtacctgctgtacaagaaatgataaaggaagttcttcaggctgacacgaaagataccagatggtaactggaaactacaggaaggaataaaaatcagggaa

SEQ ID NO: 134744 - DNA, 417 bp, Homo sapiens
tcactgcaacctccacctcccgagttcaggcgattctcctgcctcagcctcccgagtagctgggactacaggcatccaccagaccacctggccaatttttgtatttttaatagagacagggtttcaccatgttggtcaggctggtcatgaactccttacgtcaagtgatctgcccacctcggcctcccaaagtgctgggattacaggtgtgagccaccatgcccggcccaatttactgattttcttctcataacctgctctttttgaagtctttctgcctcagtagctattccattctagtactcggtgaggccaggagtcatcctttataccccatattcaatacatcaggaagtcctgttggctgctgtacctttgaaatccgtgtataatctgtccatttctcactgtcttcac

SEQ ID NO: 134745 - DNA, 407 bp, Homo sapiens
cgccttaacctcagtgagtctttgagcgttatgtgctgcggctctcacatatccagaacaatgagagcggctgtaaagggccctccgatcaacatgtactggagtcaagagaagaaaggggcactgggaggaatttgggtggaggaggcaggaactccagggagcacagagatcatcagcagagtggtctccatccttgtttacactggcagccaaagactaggcagtatttatttacaaaggtaaaaggagatcaaacatccggtggctcggccagctgtggtggaggttttcacagaggcggacatcaaacccccaccctgtcatggctgcagctgtcctccttcccggctcctgccctcctcttggcctcccatcttctcccaggtcctaggcaggccatggca

SEQ ID NO: 134746 - DNA, 734 bp, Homo sapiens
ctgatgccctgataatttaaatattaggaaccgagccaacaccagaaattaggtctcctagttttaatctattgttctttatctgtatacctattccattataaaccagggcacactttttttttaaggaaaaaaaaggagaatatatatatatggagcgtcttgcattaagccaagctttcaggagttgttgtttgagcaatttctgctcaagtatggagtttcagttttgttacttcacatgccagcttccctttctgatctccaggccagtgtcacttccagctctcccagtttacatgttgttagaacttggaacacccaatggtcaaatatattttgaaaatataaaaaaggaccaatatgaaagaaagaaatggtgctatgttttttctttcagatctcacgcattttctacaaagatgttttgaggatgtttattttagcacattttgacagttggctaagtaccctaagacaatactactccaattgaaatatcagagaagttcataataaaagcttgccagataaagtgctttccctatattaagttgttggagggaaattagatcaaggtctgtaaacttttcttaatggatgtgatagtaaatattttaggcttttgggccagacattctctgtcacaactacttatttctgccagtatagtgaaaaagcacccataggcaatgtaaactagtaagtgtggccatgttcaagtaaaattgttt

SEQ ID NO: 134747 - DNA, 237 bp, Homo sapiens
ttaggccatcagccacctcccctccgctctcttcccttctcctgcctctccaagtgctttgatttgtagtcggaagttcctcttgtccacttgcctcttccccctcatttcccaagttcccacaggaacctgggaataggttgtgcccagaggttagaacggaaactgcagcaagataactctgaggggacaatgcccagttgacgtcatttcaactactttgcttcagctagaggt

SEQ ID NO: 134748 - DNA, 580 bp, Homo sapiens
catgtctggtttttgttggaagtctgtacctttcctccgtggtagtcccagaccaagggtgatacttggcggtgcccagggtgtcacctgtcttctcaagtggaagaggagaatgaagagcactccagtacgccaggagcatcacaccgtaattagcaggaagatgttgcaccgcagtgcctcatctcagagccagagtcctgggttagggagtaaactcttttacctaggcctgactgtattctggcattgtaggcactcctcaggtttctgtggccctctcatctcactgagggtatcccttcttcatgtgtctctcagctcttctcttagatttctgcccctggctctggccccttcagattccttctccttctctttcccttccctcctctctcctcctttcaccaacagttttgtttgcacccatagttgcccatcagtggatccatgcctgtaagccagtgtaatacaagctgctgtctgtggagcatttattgcatttattgcagtgagccgtgatcgtgccactgcactccagcctgagtgacagagcgagactctgtctcaaaaaaaaaaa

SEQ ID NO: 134749 - DNA, 248 bp, Homo sapiens
ctgaaaccatccctctccaagtgttggcgtttccctcccaggctggaatcaactccaggcttaaaattaatttctcttccgctcacaacaatggtacagcctctccccaagtacatcctgtctttgtgcagaacacactgccttgccgcgctgcagcccagagccccagagctgggatgatttacccagccagagcccacagcagtactgtgatcctctgggacctgttcactcccctagtcaagaga

SEQ ID NO: 134750 - DNA, 357 bp, Homo sapiens
tatttgctgattaatcttacagaaggttattcttctgtaatccccagacaattttaggtatctagtacatatgcaataatttttagacagtttcaggaggtttagagaccatcaaaccccagcatggagcctgggtgatgaggtgtcctgttttgcatggaagaagagctgtagctgagccttcatagtccttttattgttcttattttgcaagtaaattgcaaaataagttcccaacccaaagataacacaggctatccttcaacaaagaaaaacctcagcttttaaacttctaggccatttggcaaagaggcatgataaagggcttgaaagcccacagacacgcccagtaccact

SEQ ID NO: 134751 - DNA, 272 bp, Homo sapiens
ccatgggagccagcctgggctagcctgcaggaggatgagagacacgtggccccaacaccacctgccatgtgaatgagacgcagctcaggctgagctgccagcggacccaagaagcatgaggagtacattgctagctggtttgcaaatcctctgtgttttgcggtagtttgttaggcggcactattggtgataatagataacaggcagtaaggcttagccccctttgactgaggagagagctgcattgcagagaggttaagtggccctgaggt

SEQ ID NO: 134752 - DNA, 525 bp, Homo sapiens
aacccaggggatcccccattcaggaaaaagaagaaagacaagtaaagaagcaagaaaggagacaataaagaaggcataaggagagccaggaacaggagtatatctaaagccaagagttgaggatttcagtgtcagagtccaacagcatcaattgctgcaaagaggccagaaagaagaaacaggtcaaagcctttggattttatgacctagaaatcaccgggtgacttttttaccttaagagaagactgctgtgaaaatgttgacccatctctggccttaacattaaaagcagcattttaccaggcacttgtacttgaatttttaagtatccaagtacttatccatgtttctccccagcctcttctgtcagagctttctccagagccatgacaagagggataagaactcccaagcttattccaacatgaaacgtttcattttcatccaagcagtgcacatccaagagaacaagctccattcctgaattttaatggccaggagaaggaagagtgatattaactcagg

SEQ ID NO: 134753 - DNA, 178 bp, Homo sapiens
gattacaggtgtaagctaccatgcccactcttagaaggttttaaataggggatggtgtgaccagctgttgtggcaggagtggaagggagtggcatgcaatggagacacagtaggaagctcctgtatccacaggcaagagatcctggaggctgaatctaggatgtagtcatggaggtgg

SEQ ID NO: 134754 - DNA, 514 bp, Homo sapiens
gctagaatttccactctgcaccaccaggtcttgacctagtaattttcaccctcttttgtcctttttggcacaaaagtttggttttcttccccagatcacatcatctgatgagaggttggagcagatccacccagggaatgaaaggccaaagaggtgggcaggtcggggcagcattttccaaagaggaggacgcagaccaccagtgttcacggtcaaaggttcaaggtcaaagcctgaaccttgaatcccacagtgagaaagtgactgtctcctcgggtctcaatccgtccttctggtgacctcctggggaaagtctctgagggtgctgatttgcctctggcctcctaagccttgccaatctccctctttagcagtagactcaggtctgaaactcagagtccacagcacatcactgtatctggccagaattgaatatgcatgactttgtttgtattttctctctttttttcccccttgagacagggtctcactctgttgcccaggctggagtgca

SEQ ID NO: 134755 - DNA, 526 bp, Homo sapiens
tcatttccacaaggttcaatgtgactatgttttggaataaagttttcccaagtgagctgtgtggaattcagtccgcggccagagctaacagtctcaccaaatgaaagagaagatactgtgtctattacctcatacccataggtccaaactctcccaaagcaactacctcctgtgtcttctgggtcttacctagggaatatacccaacggggaatcaaaatagcccaaagcacataaaagagatgggcctgcacattcttcctggggtgcagcatgatgacattttggagccaacaaggcatggagagccagacaagccaagcaaacagcaacaccgcaggggggctggagataatggaccacagaaggcgcctccaacaagctgaccacatccatctgaagctgcagaggccctcgcagctctccctgctctttgaactgctaaagcaagaagtacaaaacggaccttccatgccaggtgcaagccttcacaccatcaaatagcagggcctagactgcaaattgag

SEQ ID NO: 134756 - DNA, 793 bp, Homo sapiens
gcatggccgacctggagaactcctaaggtacataaaagactattttcaaatgggagactggagctgttggtagctgaaccacctactttacaatggattcaccttctgtgaaatggagagtgagtggtacaattatctgaattatttatttaaaatgtccatttgttatacaagcacgatataaattatctggataattgcttcttttctctcttttggccatggccacttgaccaactgtggattattgtcttggcatgttagaagcccccagataatactgggggacaatttttctcctcctacaacgtcacagtagatgatttgcactgcagcttgtggtgccttgatgcttcttttggacttagagaccttctttcttggcagcctttgctgagaccacgaggtgcttgagtcaaagataacaagctccagggggcctattaataatacttgagttagactgggataagaagtatctcaaaggttagaccaactctgatgaaagccttggaaactgatgcagactaaatttcagtgactaaattaagatttggtgtgtatgcatgtgttgtcctagagtccttaacaaggtattaatctgattatagaacccttgaaagcacttgtttgctcacaaaggaatttctgtttcatttgcgtatacacattgtaaggccaggaatatttgttaataattctatgtggaatagtactttaaattttttcttttatttatttattaagtttgactgttagcacctatcttgatatccttagcattataatctta

SEQ ID NO: 134757 - DNA, 268 bp, Homo sapiens
tttggacatgagccctttattgaatatagttattacaaatatcttagttgcttgctttttactttattacagggtgtttttttttttttttagtgagcagacattcttaattttattatagacctatttatagttgttttcctttatagttagtggttttatatgtgtgtgtattatgtagttatgtttaagaaatctttgctcatgaggttttatttcatttttgtatttttttctggactcagtattagatatgttacttgattct

SEQ ID NO: 134758 - DNA, 520 bp, Homo sapiens
cttgctgttctcgtggtagtgactgacttctcatgagatttgatggtttaaaagtctgtggcacgtcccccatcgctctcattctctcttgctgccatgtgaagaaggtgcctgcttccctttcacctcccaccatgactgtaagtttcctgaggcctcctggtcatgcttcctggtaagcctgcataactgtgagtcagttaaacctcttttcttcataaattacccagtctcaggtagttctttacagcaatgtgagcatggactaatacaatgtgcatactactgtgggaagtataggatcaaaggacattctaaagataacagaagaatcatgtctaacatatgactcttttttattactataagataaaggaagctggggcacctgctcctagtgccaacggtcctctttgctcagtgctcctttgtcttgctgccagccctgaaaagtgtgatcgctcctagatccagcaggaagttcatcactgtctagattgggtgcccttggaaataatga

SEQ ID NO: 134759 - DNA, 380 bp, Homo sapiens
aagcggataggggctccagaccaagggaacagtctgtggtaaggcctggagggaagggagaccacggcctttgtgagggaatcagcagaggcctgtcaggtgggagcagtagttctcagtgccatcagactcagcaccccttagtcatcatagacattttacattgtcaccattcctctccttaaatgcaattggtgggctgtgtaacctacctacacatagcattccaaaaatactcagatgctttcactgcatggaggagacataaaagggagagaatacaagtgtatgtatcaatgttataaacgtctgggcacgcctgcccgctcaccccagaagacatgaagttgccaggtgtttgctgcagggcaaagtcactg

SEQ ID NO: 134760 - DNA, 682 bp, Homo sapiens
tgcatggtgaaatttgtcataaactttttttctgcatctaccaagataataattttctttttttctccctctgtctacttatgtggtgaatatacattgatagattttctggcatttattcaaccttctatttctaagataaaccatttagttagttctgaggggtttttgctctgattttatttagaacattttcatccatgtttataactgaaattggcccataattttcctttctggtactatccttgcctgttttttatttcaaagctaaaaggtgatactggctttataaaatgagttggagagattacccttttcctctgtcttctagaacaatttgtgtcatgtaaggagtatctttctttgaaggtttggcagaaggtaaaaccatctgttctggtaatttttatgtaagtgtgagtggctgtgcatggctttaaaaagaactacaaatccaatttatttaatgttttaagtctactcaggcatttaatttcttactgagttacagtaggcaatattatttttctagaaaattgttcttgctttttggtttcacatttatcagtacaatactcacagtagtttcttacattcatttagaatttttacaacttcactgctatctgccagtctttatttgtgacttcactcctgttttttcttgatcagtttgcca

SEQ ID NO: 134761 - DNA, 528 bp, Homo sapiens
ggaaataaattatgtttaaatgcagttatcaaaaatactaaaggcaattttgttatatagcaggagctttacgtgtgtgtgtatagttacaggtgtacttcttttgcattaaataacaggagctagggccaaggctaataaactaccataacttcaaaatagtgaagaatataattatttggagatagcggtgaaaactgcactacgatgaactgatttttattggtgacataacagcataactaccctggtttttgcctacattcatacttgatgtgaaaaaaattaagaggtttgtatcttttttctacggaagtttttgaaccccttggattctgtctatggacaccaagttaagaatacctggtataaaggaaagccttatgcatgcggtttccaacccacagaatttcagagatcctccattaagtctcaaaaattattcttatggctgtgcaatggtttcagctgattccttgatcatttattcagtccataagtcttacacaagcatgttctctttagtgc

SEQ ID NO: 134762 - DNA, 698 bp, Homo sapiens
tggattttatttttgctttataatcttatctaatatcttcatatggttttttaaattaagacaaattagaactttgtgtatctttggatattaagaatgatatctagaaaaagttgcctcttataagctgtaattttacacccttattccatatttacttttatgcagtagatatcttttgtttctgactggcagaatcctataattctttcaaggttcacctctaatggtacccgccaccctacatggaaggaatttcttccttaggtttctaatactacactttgtacacacatatattttaatacttattagctagttgtgtatgcattagactttgtgacagcctggctcattgagaaaacactgactatggagctagaacaacctggcttcaagtcctgattctgtcctttactagttttatgatcataagcatattatttaatctttttgagcctcaatcctcatcttgttattgtggccaatactacctgtcttataagattgcaatgaagtttaaagcatcatgtgtaaagaggccagccctctctggtagtgtctaataactacttctttaattaaaaagacttggattctgccactcctttgacattgtaccttcttttcctggaatgttagctggctgaatcaggaagacttgatcaagctgattactaaaaatgtcattaattttt

SEQ ID NO: 134763 - DNA, 175 bp, Homo sapiens
agtttctgttctaaaggctttcctaaaaatagatgttagatttccccaaaatacaacagatttagaaataaaatagttatactgcttttgtatgctaagagttgacaattttttcagtaaatattttagggtttgcaggccctccttctcgtttttattactcacctatgctgat

SEQ ID NO: 134764 - DNA, 157 bp, Homo sapiens
agctgtacctcggccccttttagccatggctggagctgagtgatcacgatgcagggtgccaggtttcaaggcttcacacagcagcagggccttcagcccaggcctccaggcctgtgatgggaggggctgccacgaaggtctctgaagtgccttggag

SEQ ID NO: 134765 - DNA, 445 bp, Homo sapiens
ctatcagtttggagactctggtattaaccatgctctttatttattattagtcatgtattttccccaccctttgtctttggctttgcacccccacctagcaaccacaatgacttctttttgacctggatggctcgtctttttacataacagtgtttcctgggaagcttaagaacagcagagtcacagtgagggcttagtccagggcagccttcttaacgtggggtacatggatgtccttctttgggtctgtaaatgggcaggcacatgtttgcatacaggtgtgggaaaaggattcatggcttccatcataatctcaaagggatctagcaccctggaaaggttaacaacgcaaactcccaggcattcagacacagcacagcacagcacagcacagcacagcacagcacagcacagcacagcacactgaataaacagccccagcttg

SEQ ID NO: 134766 - DNA, 312 bp, Homo sapiens
tttcaaaaaagtccattgtattcctatatatcagtgacaattagatatggaaatttaaaaaaattattaatgatagaatctcaatgtattaagtacataagcatacatcagacaaaaatacgaaaggcctatgtattgaaaactaaaaaaaaaattgctgagagaaatgaagacctaaataaatggagagttatattttgttcatagatttggaagattcaatattgtaaggtgtcagttctcaaattgacctatatagatgcagtgctatcccagacaaaatcccaacaggtgtttttgtaaaaattgaca

SEQ ID NO: 134767 - DNA, 376 bp, Homo sapiens
ctcaattacagtccgagttgggatttgaaccctgatggcctgctggccaccacggggtaacatacctggattccaatcaggccttcgtaggccaagttctccatgtggacgctcacaatccagatccatagctgaccactggttgtgtgtgtgtgtgtgtgtgtgcacaagcatgcactacccatatcctagccttccttctcacccttatttttccttcatgtcaagtctgtgcttatgaaagccacctcatccttctctagaactaagcatagtgtaaatgataaatagcatgaccccaaaatctggggcattcttccactctgtcatgctacacctcctccccacattctgtcttcaactttaggatttcctt

SEQ ID NO: 134768 - DNA, 840 bp, Homo sapiens
gaataagcaagggagctcgctggggtattttatagggtgccacaggcactacctccagatattctcacattggggattaggttgcaacataaacttgggtgcacttcaacatatagaccataccaaccagaattatggaggacaggttagtgtcttttactttaaaaggttaaaacaaatcaatatcatcaaagagcacaaacaatactcacatacacagagagaattcatgatagtggctgacaatattgcagtgttttccatgagccaggcattattcaaaaggttttacggatatgaatacatctatgtataggttaccactagaagctccacttcgtagatgagaaaacaggggtgggatgttatgtaattggtcgacagtcacacggttggtaaggaacaggttgagattcgagcccgcagtgggctgcctctagactctgtccctgacctctatgccaatagtgattcagtttcccaaatgtcaaaacagcgcacatctattctgacatatgctaacccagcagacacttctacagacatgtacagatacagcaaaaataaaagagtacattaagacatctaaatcagcatcctcagggagatttgagaatcatagccatttaaaagaagacacttctatgcaaagaacagagttcttggaatttgaagatatgagatccataatttaaaaaaaaatcaatcaaagcctgggcgcggtggctcacgcctgtaatcccagcactttgggaggccaaggtgggcagatcacttgaggtcaggagtttgagaccagcctggccaacgtggtagaaccccgtctttactaaaaacgca

SEQ ID NO: 134769 - DNA, 494 bp, Homo sapiens
ccaaaatctgggatgtgaaacttgcatcccttatacagtgttttgtgttcccattctttctcattagaagagtcgcctaagggcagattatcttgctattagttttgctttggcccagagtctttcatctgcaaaacaggtgtgttggtcacaaggtagtatctgaataaaaattttcagggggagaaatatatcttacataccaacaagtttaaaaaatccaaaggcatttataaggatggtcatttcagcacattttttaagtaaataaaatactgtaactgcttatcaactggtcaggttggttaaattacagtagtatactcggacactactataaagataatgagaaaagctgagcttcatgagcgcccccagaacgttattcacctaaaggttatcaccagatgatggcatctggcgtggggttttttgtttgtttgttttagcatttcttgatttataacgaacatgtaccattttaacaaaagcaa

SEQ ID NO: 134770 - DNA, 566 bp, Homo sapiens
tggtactcagaagactggaagctatttttctgcttatctgcacaacctctgtttttgcagcttttctccaattctctgcccataaacactagcttttttggctttcttgaaatgtaatctctacttcccaacttcagagagactgtcatgctctgtttcccttgccttccctttgctgtggcctgaaaattgtctcccagtggtaatctgagacaattgttaagctcattttcttgtttctctcaaagatcacagacctgtgttttctgttatccaattattgtccaattattcattcctgttgttctaaaattatttcgtgtattttgttcaattttctagttgtttaaaatggaaaagtaagtctgaccctattccatcattgttagaagtcacactcattattaaaaattgagttataagttacataccataaaataatcactttaacatgtacagtttaggggtttttactatattcacaagattgcatcttgtgaatacaatatctaattatactataatattatctaatgccagaatattttcattacccaaaaaagaaa

SEQ ID NO: 134771 - DNA, 430 bp, Homo sapiens
gctacttaaggaacaatcagaactcccaccttagagggactatttatgtatttattctttggagtcaggaaaacagagagtgtgaggatgacacaaagcccagatgaaagcaggctacaggccgggcgcggcggctcccgcctgcgatgccaacactttgggaggcttaaacaggcggatcacctgaagtcaggtgttagagaccagcctggtgaaaccctgtctctacgaaaaatacaaaaattagccgggcgtggtggcatgtgcctatagtccctgctactcaggaggctgaggcaggggaatcacttgaacccaggaggcagaggttgcagtgaggcaagataacaccactgcactccagcctgtgtgacagagcaagactctgtctcaagaagagagaaaaagaaagaagaaagagagacaaaga

SEQ ID NO: 134772 - DNA, 747 bp, Homo sapiens
cgactgccttccaaaatgtttcttccaagtattcttcctgacctattgggaagtgacactggtagtgttatttccatagttggctgtgacaaacaagaatgatatgtgacctaaaatgaactccaaaatataggtagagtcttctggtagccacttcttctattcataagctacagtttcgtttttacatgtagcttccagaagacgtttgattttataaatatgccactcaaacttcaactgttgaatttcaggttagttggccggtcaggtcaggtactgctttgggaccgttcttctgataaactctgacaaccggtttgactttattgtcgttatttccgattttcactgaggttgtcttcacaaggctttcagaagttgctttggctgcctctttctccctcctaagacaagtggtttccaatgccaactttcacctgatggtgatttccataccttctttgtttggttattaataggcctccaacattggaataaaatttctatttctcctagtgtttagattcatttaatttaactatttaatttacatgaaggactcgaagcccaatatgtttgagacatttgcccaagaataatttggcctagtctagcattcttttctctacttggaaccatgatttttgtactttaagtacgatagtaaaatctaaaattggcctgggtaccagaactactcattttcttcagctgaacaaggattccccaaggctcagtatcatt

SEQ ID NO: 134773 - DNA, 328 bp, Homo sapiens
ccagccactcgggaggctgaggcaggagaattgcttgaacccaggaggcagaggttgcagtgagatcgcgccattgccattgctctccagcctgggcaacaagagcgaaactccgtctaaaaaaaaaaaaaaaaagacagtagggaggagaagaggaaccatttggcacagcttagagtctggggtcacttgtaccacgcagacccctgcccccttggttgcaacacactgtgcccattcttgtccaggatgatcacccatcactgaaaagaggcataagaacgttctgaggcccctattttctgagcagagaagatttctgcccaaa

SEQ ID NO: 134774 - DNA, 1068 bp, Homo sapiens
cacctgtggacaggcgtggggatgctcctctggggcctgggcagttttgacaggtggctggctaaggctcaggctcctgtgggggtggtgaggatgacaagaaaggaatgaaggccagagacattgtggagaaaaagtcaacaggaaagggtgactccatgtgagaggaaaggagggtcgtgtctacacaatcactgtcatagatcagcctcctccttgggcgtggccttggccagggggccgcaggatggcagccttgggtgcccaccccctggagtgtgggtcctgctctgggtggtgacgctgctgggggcctcggcaccccctgggctgccctcccagcgaggatctgtgttcccagacggcaggcatgcctcatcctgggctcccagaacaagctgccactgtgggctgtgggctggggccgctgccaggcaggcggggtggggggcaggaggggatgagagggcttttgtttccttctgtttgtgtcaagatgggaatggacttcctcccaccaggcggcctcgaggtgtaaaggaaagggcagccccagtgggcgggttttgggtcacccgtttttttgggtgcatttctctgggctcccgcctcagccccgccctctcctcccagccctcctgcctcaaagctcacccttccccaccagacctgttgtggcccagccctggttaaatatttgccaaccgagaagagttttcaaggcagccttgtgaaaaaccccagctgactcctggctctgttgggcctgacctgcctctgtgatgagacccagacggcctgtgccctcagactgagtccctgcccaccatggcctccctggtgacctgtttggcgcctgaggctgggtgacctaacacttgttcggcacttgtttatcaagcacccccctgggcctggcgggagctgggtgctggggagacagcggagagcagtctcagtccggggagcgtctcagatgaggcattaactgtggttgaggggagtgccggggagcaggccaggggctgtgggagtggaggccagggaggctgtggagacctgggaggc

SEQ ID NO: 134775 - DNA, 259 bp, Homo sapiens
gctactgagtgtgaccaggatccctaggaggcctcaaagctatggggagggtaaccgtaaactgcaacattgacaagatatagcctgggctccccactcctgcctcaatggtggtgcagctctgcttgaagctctctggtctttgaggaaagggttctgcaactttaaaaaacttgaaaaacattactgatgttgtagaaaattaagtaacttagtattacacttaaaaattggttacagctgggcacggtggctcatg

SEQ ID NO: 134776 - DNA, 2063 bp, Homo sapiens
gtcaggagatcgagaccatcttggccaacatggtgaaaccccgtctctactaaaaatacaaaaattagctgggtgtggtggtgcacacctgtaatcccagctactcaggagactgaggcaggagaatcgcttgaacccaggaggcggagactctagtgagccgagatagcgccactgcactccagcctggcaacagagcgagactctctctcaaaaaaaaaataaataaagtaaaagaatgcaagaagaccaggtgcaatggctcacacctgtaatcccagcactctgggtggccaaggcaggagactcacttgagctcaggagtatgagaccagcctggacaacatagtgagaccccatatataaaaaaataaagtagccgggtatggtggtgcacaactgtggtctccactattgggaggctgaggtacatcacttgagcctagcaggtcaaggctgcagtaaggtatgatcacaccactgcactctagcttgggtgacagagcaagaccccatcttggcaggtgggggatgcaagaaaaatgcaaggaacagatagagataaatagaaaacatataagaagacaatcatattaaatgtacatggtctaaatacccccaattaaaaagcagaggttttaggccatatacatttaatgtgattgtcttcttacatgtttttatcagagaaataaaactatcgccttcaagaaacacaagttaaatacaaagatgcaaacaggttaaaataaaagaatggaataatatataccatgcttacgctagtcaagagaaagctagagtagaaatactaatatcaggcaaagcatatttcagagttaaacacaacatttttccactatttgcagtcaaaagtatcgttaacactctctttactctgctcaaagttacagagttcttttgtataaacattagaacacttatcacagcctgcctataatggagaataattccatgttgtatactatacaacactcttactaaagtccattagacagaaatatgtagcatttgagacaccttccaattataaaactctatgcaaacaaaaattaacaacgcagatctgagactattatattatcctgtgaaggagggtctgtctgtctgcacagttggtcctaggctggcttctgaggacttgaatttcaagagggttccctaactggtaatcatggtttactgtatctagactatggaaataatgtggcttatcctgctattctttttgtgagtctggaaatttcacacatgctaggcagagtacacatatgtgaccagccaagataaaaactgtgtttcttgggaagtcacataggttgttgtattttcattaagggggaaagaaggtagtctgtgtgatcctcatggaaggcacagcacataaggaagccggtacatggatttttccagactctgtcagtgtcttttgccattgagatctttctactatatatccatactatgttacagtaataaatcttagccattacaaccctaagctgatcccatgagtccttctagcaaatctccaaacatggaggcagtcttgtggatccctgacacaaatatagtgttgtgatctcttaaggtttatccttcctcttaaactataaagagctggctgggcacagtggctcacgcttgtaatgccagcactttgggaggccgaggcgggtggatcacgaggtcaaaagattgagaccatcctagccaacatggcgaaaccccgtctctactaaaactacaaaaattagctgggcgtggtggcacacatctgtagtcccagctactcgggaggctgaggcaggagagtcgcttgaaccagggaggcagaggttgcagtaagccgagatcgcaccactgcactccagcctggtgacagagggaaacttcatctcaaaaaaaagaaaaaaactataaagggctgggtgcagtggctcacgcctataatactagcaccttggcaggcccaggtgggagaattgcttgggcccaggaattgagaccaacctggacaacagagcaagaccctgtctctt

SEQ ID NO: 134777 - DNA, 597 bp, Homo sapiens
gtcaggagatcgagaccatcttggccaacatggtgaaaccccgtctctactaaaaatacaaaaattagctgggtgtggtggtgcacacctgtaatcccagctactcaggagactgaggcaggagaatcgcttgaacccaggaggcggagactctagtgagccgagatagcgccactgcactccagcctggcaacagagcgagactctctctcaaaaaaaaaataaataaagtaaaagaatgcaagaagaccaggtgcaatggctcacacctgtaatcccagcactctgggtggccaaggcaggagactcacttgagctcaggagtatgagaccagcctggacaacatagtgagaccccatatataaaaaaataaagtagccgggtatggtggtgcacaactgtggtctccactattgggaggctgaggtacatcacttgagcctagcaggtcaaggctgcagtaaggtatgatcacaccactgcactctagcttgggtgacagagcaagaccccatcttggcaggtgggggatgcaagaaaaatgcaaggaacagatagttgtaaatggcggtggaccctctagaatcagctatgac

SEQ ID NO: 134778 - DNA, 370 bp, Homo sapiens
  misc_feature (29)..(29): n is a, c, g, or t
  misc_feature (102)..(102): n is a, c, g, or t
  misc_feature (106)..(106): n is a, c, g, or t
ccaggattctatagaaattaaaccagtanttaaattaccattattttataaaatagatactagcaaatttaccttacgtaaagattcaagtcagtaacttanaggntcttacataaaagtactttccgttggttgcaggagagtcgcttgaaccagggaggcagaggttgcagtaagccgagatcgcaccactgcactccagcctggtgacagagggaaacttcatctcaaaaaaaagaaaaaaactataaagggctgggtgcagtggctcacgcctataatactagcaccttggcaggcccaggtgggagaattgcttgggcccaggaattgagaccaacctggacaacagagcaagaccctgtctctt

SEQ ID NO: 134779 - DNA, 241 bp, Homo sapiens
ccacgcgtccgaaaagcatgtattccataatttcatcttgttgtgctagaatgcaaaagtggctccttcccatgtgcagtccctgtccccccccgccagtcctccacacccaaactgtttctgattggcttttagctttttgttgtttttttttttccttctaacacttgtatttggaggctcttctgtgattttgagaagtatactcttgagtgtttaataaagtttttttccaaaagta

SEQ ID NO: 134780 - DNA, 13509 bp, Homo sapiens
ggggcatttccgggtccgggccgagcgggcgcacgcgcgggagcgggactcggcggcatggcgggctccggagccggtgtgcgttgctccctgctgcggctgcaggagaccttgtccgctgcggaccgctgcggtgctgccctggccggtcatcaactgatccgcggcctggggcaggaatgcgtcctgagcagcagccccgcggtgctggcattacagacatctttagttttttccagagatttcggtttgcttgtatttgtccggaagtcactcaacagtattgaatttcgtgaatgtagagaagaaatcctaaagtttttatgtattttcttagaaaaaatgggccagaagatcgcaccttactctgttgaaattaagaacacttgtaccagtgtttatacaaaagatagagctgctaaatgtaaaattccagccctggaccttcttattaagttacttcagacttttagaagttctagactcatggatgaatttaaaattggagaattatttagtaaattctatggagaacttgcattgaaaaaaaaaataccagatacagttttagaaaaagtatatgagctcctaggattattgggtgaagttcatcctagtgagatgataaataatgcagaaaacctgttccgcgcttttctgggtgaacttaagacccagatgacatcagcagtaagagagcccaaactacctgttctggcaggatgtctgaaggggttgtcctcacttctgtgcaacttcactaagtccatggaagaagatccccagacttcaagggagatttttaattttgtactaaaggcaattcgtcctcagattgatctgaagagatatgctgtgccctcagctggcttgcgcctatttgccctgcatgcatctcagtttagcacctgccttctggacaactacgtgtctctatttgaagtcttgttaaagtggtgtgcccacacaaatgtagaattgaaaaaagctgcactttcagccctggaatcctttctgaaacaggtttctaatatggtggcgaaaaatgcagaaatgcataaaaataaactgcagtactttatggagcagttttatggaatcatcagaaatgtggattcgaacaacaaggagttatctattgctatccgtggatatggactttttgcaggaccgtgcaaggttataaacgcaaaagatgttgacttcatgtacgttgagctcattcagcgctgcaagcagatgttcctcacccagacagacactggtgacgaccgtgtttatcagatgccaagcttcctccagtctgttgcaagcgtcttgctgtaccttgacacagttcctgaggtgtatactccagttctggagcacctcgtggtgatgcagatagacagtttcccacagtacagtccaaaaatgcagctggtgtgttgcagagccatagtgaaggtgttcctagctttggcagcaaaagggccagttctcaggaattgcattagtactgtggtgcatcagggtttaatcagaatatgttctaaaccagtggtccttccaaagggccctgagtctgaatctgaagaccaccgtgcttcaggggaagtcagaactggcaaatggaaggtgcccacatacaaagactacgtggatctcttcagacatctcctgagctctgaccagatgatggattctattttagcagatgaagcatttttctctgtgaattcctccagtgaaagtctgaatcatttactttatgatgaatttgtaaaatccgttttgaagattgttgagaaattggatcttacacttgaaatacagactgttggggaacaagagaatggagatgaggcgcctggtgtttggatgatcccaacttcagatccagcggctaacttgcatccagctaaacctaaagatttttcggctttcattaacctggtggaattttgcagagagattctccctgagaaacaagcagaattttttgaaccatgggtgtactcattttcatatgaattaattttgcaatctacaaggttgcccctcatcagtggtttctacaaattgctttctattacagtaagaaatgccaagaaaataaaatatttcgagggagttagtccaaagagtctgaaacactctcctgaagacccagaaaagtattcttgctttgctttatttgtgaaatttggcaaagaggtggcagttaaaatgaagcagtacaaagatgaacttttggcctcttgtttgacctttcttctgtccttgccacacaacatcattgaactcgatgttagagcctacgttcctgcactgcagatggctttcaaactgggcctgagctatacccccttggcagaagtaggcctgaatgctctagaagaatggtcaatttatattgacagacatgtaatgcagccttattacaaagacattctcccctgcctggatggatacctgaagacttcagccttgtcagatgagaccaagaataactgggaagtgtcagctctttctcgggctgcccagaaaggatttaataaagtggtgttaaagcatctgaagaagacaaagaacctttcatcaaacgaagcaatatccttagaagaaataagaattagagtagtacaaatgcttggatctctaggaggacaaataaacaaaaatcttctgacagtcacgtcctcagatgagatgatgaagagctatgtggcctgggacagagagaagcggctgagctttgcagtgccctttagagagatgaaacctgtcattttcctggatgtgttcctgcctcgagtcacagaattagcgctcacagccagtgacagacaaactaaagttgcagcctgtgaacttttacatagcatggttatgtttatgttgggcaaagccacgcagatgccagaagggggacagggagccccacccatgtaccagctctataagcggacgtttcctgtgctgcttcgacttgcgtgtgatgttgatcaggtgacaaggcaactgtatgagccactagttatgcagctgattcactggttcactaacaacaagaaatttgaaagtcaggatactgttgccttactagaagctatattggatggaattgtggaccctgttgacagtactttaagagatttttgtggtcggtgtattcgagaattccttaaatggtccattaagcaaataacaccacagcagcaggagaagagtccagtaaacaccaaatcgcttttcaagcgactttatagccttgcgcttcaccccaatgctttcaagaggctgggagcatcacttgcctttaataatatctacagggaattcagggaagaagagtctctggtggaacagtttgtgtttgaagccttggtgatatacatggagagtctggccttagcacatgcagatgagaagtccttaggtacaattcaacagtgttgtgatgccattgatcacctatgccgcatcattgaaaagaagcatgtttctttaaataaagcaaagaaacgacgtttgccgcgaggatttccaccttccgcatcattgtgtttattggatctggtcaagtggcttttagctcattgtgggaggccccagacagaatgtcgacacaaatccattgaactcttttataaattcgttcctttattgccaggcaacagatcccctaatttgtggctgaaagatgttctcaaggaagaaggtgtctcttttctcatcaacacctttgaggggggtggctgtggccagccctcgggcatcctggcccagcccaccctcttgtaccttcgggggccattcagcctgcaggccacgctatgctggctggacctgctcctggccgcgttggagtgctacaacacgttcattggcgagagaactgtaggagcgctccaggtcctaggtactgaagcccagtcttcacttttgaaagcagtggctttcttcttagaaagcattgccatgcatgacattatagcagcagaaaagtgctttggcactggggcagcaggtaacagaacaagcccacaagagggagaaaggtacaactacagcaaatgcaccgttgtggtccggattatggagtttaccacgactctgctaaacacctccccggaaggatggaagctcctgaagaaggacttgtgtaatacacacctgatgagagtcctggtgcagacgctgtgtgagcccgcaagcataggtttcaacatcggagacgtccaggttatggctcatcttcctgatgtttgtgtgaatctgatgaaagctctaaagatgtccccatacaaagatatcctagagacccatctgagagagaaaataacagcacagagcattgaggagctttgtgccgtcaacttgtatggccctgacgcgcaagtggacaggagcaggctggctgctgttgtgtctgcctgtaaacagcttcacagagctgggcttctgcataatatattaccgtctcagtccacagatttgcatcattctgttggcacagaacttctttccctggtttataaaggcattgcccctggagatgagagacagtgtctgccttctctagacctcagttgtaagcagctggccagcggacttctggagttagcctttgcttttggaggactgtgtgagcgccttgtgagtcttctcctgaacccagcggtgctgtccacggcgtccttgggcagctcacagggcagcgtcatccacttctcccatggggagtatttctatagcttgttctcagaaacgatcaacacggaattattgaaaaatctggatcttgctgtattggagctcatgcagtcttcagtggataataccaaaatggtgagtgccgttttgaacggcatgttagaccagagcttcagggagcgagcaaaccagaaacaccaaggactgaaacttgcgactacaattctgcaacactggaagaagtgtgattcatggtgggccaaagattcccctctcgaaactaaaatggcagtgctggccttactggcaaaaattttacagattgattcatctgtatcttttaatacaagtcatggttcattccctgaagtctttacaacatatattagtctacttgctgacacaaagctggatctacatttaaagggccaagctgtcactcttcttccattcttcaccagcctcactggaggcagtctggaggaacttagacgtgttctggagcagctcatcgttgctcacttccccatgcagtccagggaatttcctccaggaactccgcggttcaataattatgtggactgcatgaaaaagtttctagatgcattggaattatctcaaagccctatgttgttggaattgatgacagaagttctttgtcgggaacagcagcatgtcatggaagaattatttcaatccagtttcaggaggattgccagaaggggttcatgtgtcacacaagtaggccttctggaaagcgtgtatgaaatgttcaggaaggatgacccccgcctaagtttcacacgccagtcctttgtggaccgctccctcctcactctgctgtggcactgtagcctggatgctttgagagaattcttcagcacaattgtggtggatgccattgatgtgttgaagtccaggtttacaaagctaaatgaatctacctttgatactcaaatcaccaagaagatgggctactataagattctagacgtgatgtattctcgccttcccaaagatgatgttcatgctaaggaatcaaaaattaatcaagttttccatggctcgtgtattacagaaggaaatgaacttacaaagacattgattaaattgtgctacgatgcatttacagagaacatggcaggagagaatcagctgctggagaggagaagactttaccattgtgcagcatacaactgcgccatatctgtcatctgctgtgtcttcaatgagttaaaattttaccaaggttttctgtttagtgaaaaaccagaaaagaacttgcttatttttgaaaatctgatcgacctgaagcgccgctataattttcctgtagaagttgaggttcctatggaaagaaagaaaaagtacattgaaattaggaaagaagccagagaagcagcaaatggggattcagatggtccttcctatatgtcttccctgtcatatttggcagacagtaccctgagtgaggaaatgagtcaatttgatttctcaaccggagttcagagctattcatacagctcccaagaccctagacctgccactggtcgttttcggagacgggagcagcgggaccccacggtgcatgatgatgtgctggagctggagatggacgagctcaatcggcatgagtgcatggcgcccctgacggccctggtcaagcacatgcacagaagcctgggcccgcctcaaggagaagaggattcagtgccaagagatcttccttcttggatgaaattcctccatggcaaactgggaaatccaatagtaccattaaatatccgtctcttcttagccaagcttgttattaatacagaagaggtctttcgcccttacgcgaagcactggcttagccccttgctgcagctggctgcttctgaaaacaatggaggagaaggaattcactacatggtggttgagatagtggccactattctttcatggacaggcttggccactccaacaggggtccctaaagatgaagtgttagcaaatcgattgcttaatttcctaatgaaacatgtctttcatccaaaaagagctgtgtttagacacaaccttgaaattataaagacccttgtcgagtgctggaaggattgtttatccatcccttataggttaatatttgaaaagttttccggtaaagatcctaattctaaagacaactcagtagggattcaattgctaggcatcgtgatggccaatgacctgcctccctatgacccacagtgtggcatccagagtagcgaatacttccaggctttggtgaataatatgtcctttgtaagatataaagaagtgtatgccgctgcagcagaagttctaggacttatacttcgatatgttatggagagaaaaaacatactggaggagtctctgtgtgaactggttgcgaaacaattgaagcaacatcagaatactatggaggacaagtttattgtgtgcttgaacaaagtgaccaagagcttccctcctcttgcagacaggttcatgaatgctgtgttctttctgctgccaaaatttcatggagtgttgaaaacactctgtctggaggtggtactttgtcgtgtggagggaatgacagagctgtacttccagttaaagagcaaggacttcgttcaagtcatgagacatagagatgatgaaagacaaaaagtatgtttggacataatttataagatgatgccaaagttaaaaccagtagaactccgagaacttctgaaccccgttgtggaattcgtttcccatccttctacaacatgtagggaacaaatgtataatattctcatgtggattcatgataattacagagatccagaaagtgagacagataatgactcccaggaaatatttaagttggcaaaagatgtgctgattcaaggattgatcgatgagaaccctggacttcaattaattattcgaaatttctggagccatgaaactaggttaccttcaaataccttggaccggttgctggcactaaattccttatattctcctaagatagaagtgcactttttaagtttagcaacaaattttctgctcgaaatgaccagcatgagcccagattatccaaaccccatgttcgagcatcctctgtcagaatgcgaatttcaggaatataccattgattctgattggcgtttccgaagtactgttctcactccgatgtttgtggagacccaggcctcccagggcactctccagacccgtacccaggaagggtccctctcagctcgctggccagtggcagggcagataagggccacccagcagcagcatgacttcacactgacacagactgcagatggaagaagctcatttgattggctgaccgggagcagcactgacccgctggtcgaccacaccagtccctcatctgactccttgctgtttgcccacaagaggagtgaaaggttacagagagcacccttgaagtcagtggggcctgattttgggaaaaaaaggctgggccttccaggggacgaggtggataacaaagtgaaaggtgcggccggccggacggacctactacgactgcgcagacggtttatgagggaccaggagaagctcagtttgatgtatgccagaaaaggcgttgctgagcaaaaacgagagaaggaaatcaagagtgagttaaaaatgaagcaggatgcccaggtcgttctgtacagaagctaccggcacggagaccttcctgacattcagatcaagcacagcagcctcatcaccccgttacaggccgtggcccagagggacccaataattgcaaaacagctctttagcagcttgttttctggaattttgaaagagatggataaatttaagacactgtctgaaaaaaacaacatcactcaaaagttgcttcaagacttcaatcgttttcttaataccaccttctctttctttccaccctttgtctcttgtattcaggacattagctgtcagcacgcagccctgctgagcctcgacccagcggctgttagcgctggttgcctggccagcctacagcagcccgtgggcatccgcctgctagaggaggctctgctccgcctgctgcctgctgagctgcctgccaagcgagtccgtgggaaggcccgcctccctcctgatgtcctcagatgggtggagcttgctaagctgtatagatcaattggagaatacgacgtcctccgtgggatttttaccagtgagataggaacaaagcaaatcactcagagtgcattattagcagaagccagaagtgattattctgaagctgctaagcagtatgatgaggctctcaataaacaagactgggtagatggtgagcccacagaagccgagaaggatttttgggaacttgcatcccttgactgttacaaccaccttgctgagtggaaatcacttgaatactgttctacagccagtatagacagtgagaaccccccagacctaaataaaatctggagtgaaccattttatcaggaaacatatctaccttacatgatccgcagcaagctgaagctgctgctccagggagaggctgaccagtccctgctgacatttattgacaaagctatgcacggggagctccagaaggcgattctagagcttcattacagtcaagagctgagtctgctttacctcctgcaagatgatgttgacagagccaaatattacattcaaaatggcattcagagttttatgcagaattattctagtattgatgtcctcttacaccaaagtagactcaccaaattgcagtctgtacaggctttaacagaaattcaggagttcatcagctttataagcaaacaaggcaatttatcatctcaagttccccttaagagacttctgaacacctggacaaacagatatccagatgctaaaatggacccaatgaacatctgggatgacatcatcacaaatcgatgtttctttctcagcaaaatagaggagaagcttacccctcttccagaagataatagtatgaatgtggatcaagatggagaccccagtgacaggatggaagtgcaagagcaggaagaagatatcagctccctgatcaggagttgcaagttttccatgaaaatgaagatgatagacagtgcccggaagcagaacaatttctcacttgctatgaaactactgaaggagctgcataaagagtcaaaaaccagagacgattggctggtgagctgggtgcagagctactgccgcctgagccactgccggagccggtcccagggctgctctgagcaggtgctcactgtgctgaaaacagtctctttgttggatgagaacaacgtgtcaagctacttaagcaaaaatattctggctttccgtgaccagaacattctcttgggtacaacttacaggatcatagcgaatgctctcagcagtgagccagcctgccttgctgaaatcgaggaggacaaggctagaagaatcttagagctttctggatccagttcagaggattcagagaaggtgatcgcgggtctgtaccagagagcattccagcacctctctgaggctgtgcaggcggctgaggaggaggcccagcctccctcctggagctgtgggcctgcagctggggtgattgatgcttacatgacgctggcagatttctgtgaccaacagctgcgcaaggaggaagagaatgcatcagttattgattctgcagaactgcaggcgtatccagcacttgtggtggagaaaatgttgaaagctttaaaattaaattccaatgaagccagattgaagtttcctagattacttcagattatagaacggtatccagaggagactttgagcctcatgacaaaagagatctcttccgttccctgctggcagttcatcagctggatcagccacatggtggccttactggacaaagaccaagccgttgctgttcagcactctgtggaagaaatcactgataactacccgcaggctattgtttatcccttcatcataagcagcgaaagctattccttcaaggatacttctactggtcataagaataaggagtttgtggcaaggattaaaagtaagttggatcaaggaggagtgattcaagattttattaatgccttagatcagctctctaatcctgaactgctctttaaggattggagcaatgatgtaagagctgaactagcaaaaacccctgtaaataaaaaaaacattgaaaaaatgtatgaaagaatgtatgcagccttgggtgacccaaaggctccaggcctgggggcctttagaaggaagtttattcagacttttggaaaagaatttgataaacattttgggaaaggaggttctaaactactgagaatgaagctcagtgacttcaacgacattaccaacatgctacttttaaaaatgaacaaagactcaaagccccctgggaatctgaaagaatgttcaccctggatgagcgacttcaaagtggagttcctgagaaatgagctggagattcccggtcagtatgacggtaggggaaagccattgccagagtaccacgtgcgaatcgccgggtttgatgagcgggtgacagtcatggcgtctctgcgaaggcccaagcgcatcatcatccgtggccatgacgagagggaacaccctttcctggtgaagggtggcgaggacctgcggcaggaccagcgcgtggagcagctcttccaggtcatgaatgggatcctggcccaagactccgcctgcagccagagggccctgcagctgaggacctatagcgttgtgcccatgacctccaggttaggattaattgagtggcttgaaaatactgttaccttgaaggaccttcttttgaacaccatgtcccaagaggagaaggcggcttacctgagtgatcccagggcaccgccgtgtgaatataaagattggctgacaaaaatgtcaggaaaacatgatgttggagcttacatgctaatgtataagggcgctaatcgtactgaaacagtcacgtcttttagaaaacgagaaagtaaagtgcctgctgatctcttaaagcgggccttcgtgaggatgagtacaagccctgaggctttcctggcgctccgctcccacttcgccagctctcacgctctgatatgcatcagccactggatcctcgggattggagacagacatctgaacaactttatggtggccatggagactggcggcgtgatcgggatcgactttgggcatgcgtttggatccgctacacagtttctgccagtccctgagttgatgccttttcggctaactcgccagtttatcaatctgatgttaccaatgaaagaaacgggccttatgtacagcatcatggtacacgcactccgggccttccgctcagaccctggcctgctcaccaacaccatggatgtgtttgtcaaggagccctcctttgattggaaaaattttgaacagaaaatgctgaaaaaaggagggtcatggattcaagaaataaatgttgctgaaaaaaattggtacccccgacagaaaatatgttacgctaagagaaagttagcaggtgccaatccagcagtcattacttgtgatgagctactcctgggtcatgagaaggcccctgccttcagagactatgtggctgtggcacgaggaagcaaagatcacaacattcgtgcccaagaaccagagagtgggctttcagaagagactcaagtgaagtgcctgatggaccaggcaacagaccccaacatccttggcagaacctgggaaggatgggagccctggatgtgaggtctgtgggagtctgcagatagaaagcattacattgtttaaagaatctactatactttggttggcagcattccatgagctgattttcctgaaacactaaagagaaatgtcttttgtgctacagtttcgtagcatgagtttaaatcaagattatgatgagtaaatgtgtatgggttaaatcaaagataaggttatagtaacatcaaagattaggtgaggtttatagaaagatagatatccaggcttaccaaagtattaagtcaagaatataatatgtgatcagctttcaaagcatttacaagtgctgcaagttagtgaaacagctgtctccgtaaatggaggaaatgtggggaagccttggaatgcccttctggttctggcacattggaaagcacactcagaaggcttcatcaccaagattttgggagagtaaagctaagtatagttgatgtaacattgtagaagcagcataggaacaataagaacaataggtaaagctataattatggcttatatttagaaatgactgcatttgatattttaggatatttttctaggttttttcctttcattttattctcttctagttttgacattttatgatagatttgctctctagaaggaaacgtctttatttaggagggcaaaaattttggtcatagcattcacttttgctattccaatctacaactggaagatacataaaagtgctttgcattgaatttgggataacttcaaaaatcccatggttgttgttagggatagtactaagcatttcagttccaggagaataaaagaaattcctatttgaaatgaattcctcatttggaggaaaaaaagcatgcattctagcacaacaagatgaaattatggaatacaaaagtggctccttcccatgtgcagtccctgtccccccccgccagtcctccacacccaaactgtttctgattggcttttagctttttgttgtttttttttttccttctaacacttgtatttggaggctcttctgtgattttgagaagtatactcttgagtgtttaataaagtttttttccaaaagta

SEQ ID NO: 134781 - DNA, 2763 bp, Homo sapiens
gaacaggactcatgatatacaaaagaacaaagacaaggaatatttattgttagaaataagtgagaagacagtggaaaatctttaaagtactgaaaaaaaattgtcaacctaaaattctattcctagagaaaatctctttcaaaaacaaaggggtgaattgaaaattaaaaagctagtgttccattatgtcagcataaagtcttatgaattttgtacatacctttggtctcctctttgtttgttttcaaattacaaatattttgaaaatcctactgtctttttaagagacaatggcagccgggtgcagtggatcacttgaggccaggagttcaagaccagcctggccaacgtggtgaaaccccaactctactaagaatacaaaaaaattagctgggcgtggtggcccatgcctgtagtcccagctactcaggaggctggggcaggagaattgcttgaacccaggaggcagaggttgcagtgagccgatatccactactgcacaccagcctgggtgacagagcgagactccatcttaaaaaaaaaaaaagagagagacaatggcctctctaagcaacatgacctacatttaaatggagtcaagtggtcctctgtttccatttgtttaatttctactttgatattttgcttgcagcttcaatattactggctcgtgtggcctgcttcatgctcctggaataaattcaataaccaccaattgccccttatgttcccagcccaggattcaaactgtgcttcatgcagaatgggcactctaatggaaggatttggctccaggatagatacaaaactgtacctggtgtttgttggtgtaaagtggtagttaagaagagaacaatgacactacaaaatacaagccaaaaagggaaagtgttagcatttaacatcatagtttatggatattgggatacattgaccattgctttcttctttggtgtccttgatagttattgattctgcagaactgcaggcgtatccagcacttgtggtggagaaaatgttgaaagctttaaaattaaattccaatgaagccagattgaagtttcctagattacttcagattatagaacggtatccagaggagactttgagcctcatgacaaaagaggttggtgtctttattctacttggcggtaaggaactttacagaacttaaagatacgcttatttatattcaaacgcgttagtgtgtgcagtgcatgtattatagcttttcccagccagctgtgaattctgctacattctgaggacataggtaatttaaagctgcaaaaacgagttttcgcatttacccattttcctctgtgggtgttgataaaaacactgtgtctgaacaaggatccagagagatggagacggggtgtgtgggatggtaacgggatcttgtgtgggaaacttgttgcccctgcagatgaggctgtggccagtcacatttgctgtgcccagtgctcacctgtcatttagcccaaagggagtgagcaaggttcagcttgcatcccacctcccaggagcacagcatctgccagcagcacggtgtccagaggggtctgggagcatgagtgaggggtcagcgtatggacatgggaggaacccgcacccttccatgtgacctgccccttggccccaccaagggctgcactgccagctgcactcctgtcctttgggctctgtctgtgtgcaggagggttccactgacttcatttgcaaagtgtagggcctctgaaaggcttcgtagttgacatttatagacgtgtaactggaagatagggccaagctttgagttgaaaatgtaatagttcaaaaagggttacatggttcgttctctattagctttgcatggtgagtttttaaataatgttgatctctgggctgcggggacccagtttgacttttagggccctaaccactccttccacctttttctgcattctgaatagtagactttctcagtaggtattaaacaggttaaggtaaattcagaagtgcaacatgtatgtgtttttcttcaagataagtgagcaaataacttcattatgattttatttttttccaatataatatttatacatgataaaaacagcatttgaatttgtgaggacatgaagtattcactccacgttgtcaaaacacccagtagacacgtgcagtgaagccagtagcctctctcgtgagcttacatgagctgtgtggactgatccttcctcacacgccatgctgtcctcagctcacacgtgcactcaggaagcttgcccatactcaagcctcactctagcattgcagacacatcaggttttatcttcagaaagacaccttaaaagtatcagaggaaaatgtgaacacatttttttaaatggtcttggaatgaagagacaaaaaccagaatccatgaaggaaaatagtttgacttctatacagaaaaagaaaataccgtatacaaagttaaaaaaataaaaagccaggtgcagtggctcacgcctgtaatctcaccactttgggaggccaaggtgggcagatcacgaggtcagcagttcgagaccagcctggccaacacggtgaaaccctactaaagaaacaaaaattagccgggcgtggtggcgagcacctgtaaacccagctactcgggaggctgaggcaggaaaatcacttgaacccaggaggtggaggttgcagtgagccgaggtggcgccactgcactctagcctagacgacagagcaagactctgtctcaaaaaaaacaacaacaac

SEQ ID NO: 134782 - DNA, 412 bp, Homo sapiens
attcaatgcaaagcacttttatgtatcttccagttgtagattggaatagcaaaagtgaatgctattgaatttgggataacttcaaaaatcccatggttgttgttagggatagtactaagcatttcagttccaggagaataaaagaaattcctatttgaaatgaattcctcatttggaggaaaaaaagcatgcattctagcacaacaagatgaaattatggaatacaaaagtggctccttcccatgtgcagtccctgtccccccccgccagtcctccacacccaaactgtttctgattggcttttagctttttgttgtttttttttttccttctaacacttgtatttggaggctcttctgtgattttgagaagtatactcttgagtgtttaataaagtttttttccaaaagta

SEQ ID NO: 134783 - DNA, 633 bp, Homo sapiens
caccatgcctggctaatttttgtatttttagtagagacaaggtttgaccatgttggccagactggtctcgaactcctgagctcaagtgatctacctgccccatccttccaaagtgctgggattacaggcgtaagccactgcttccgccctgggtttcttaatatattatgtctccagtgtttgaacaacagttctatttaagatatcataaactcaaagagtaagctgtgtgtgagtatccactataaaatatgtgtagcattagcttactactgtagaaagtttgcatgttggctgttgctgcttgctaaagatatccacattcataagcaagtatttataatcaggaatacaacatttctgcgggcacagcagtcaggcacaagcaggtagcagaaattcgttgctggcctgggcgctctgctctttggcactgtcttcagagggcggccccacggaggaatgctcacagccactctggcttttccctctgagtttgacacgtggctagcctgtgccctgagatgacattctgatttttgaaggtgacagtcatggcgtctctgcgaaggcccaagcgcatcatcatccgtggccatgacgatcgagacatagagggatcctctagatacc

SEQ ID NO: 134784 - DNA, 723 bp, Homo sapiens
cccgctattttaaaaaacaaagagcgccgtctaatattattttatacaataatacttacgttgcgtagctactgtgttttttgtttccgcgtcctctcagtctatttatgcttttttttctacctcctcttctcttctgtcgtacttctatacttatttattgtattcatcctcccccgcagtacggtaatcatattctatattcattttttgaggtggattcggtctcgcctctcttattctttgttctcctctccccctcaagataaataggtgtgtctcgtctttcattatatagctatctaacttagcagcgcatgtctcctcccacaccacttagtgttaaagagacagcgccgctgcgcctctgatataataagaaatacatatccactaatataatagagccctcctcctttctataaaaagaagagtcgggtgtatataagtcgcggccccccgggaaagaatgatcatttgcgccgcgccccctgctccttcttttttttttttttttttttttttttttttttttttttttttttttttttttttttttttttttttttttttttttttttttttttttttttttttttttttttttttttttttttctttttgttgtttttttttttccttctaacacttgtatttggaggctcttctgtgattttgagaagtatactcttgagtgtttaataaagtttttttccaaaagta

SEQ ID NO: 134785 - DNA, 388 bp, Homo sapiens
actatctcgccatttacaactatcccgccatttacaactatctcgccatttacaactatctcgccatttacaactatctcgccatttacaactatctcgccatttacaactatctcctggaatcctttctgaaacaggtttctaatatggtggcgaaaaatgcagaaatgcataaaaataaactgcagtactttatggagcagttttatggaatcatcagaaatgtggattcgaacaactatctcgccatttacaactatctgccagggggcttctaggaagtaggtttcatctatcaaatgtctcctctgacttccttccgcaacttactgctcatctgtatatattttgtgttgtacttctgggagttcgacggttttcttggaac

SEQ ID NO: 134786 - DNA, 14169 bp, Homo sapiens
ggggcatttccgggtccgggccgagcgggcgcacgcgcgggagcgggactcggcggcatggcgggctccggagccggtgtgcgttgctccctgctgcggctgcaggagaccttgtccgctgcggaccgctgcggtgctgccctggccggtcatcaactgatccgcggcctggggcaggaatgcgtcctgagcagcagccccgcggtgctggcattacagacatctttagttttttccagagatttcggtttgcttgtatttgtccggaagtcactcaacagtattgaatttcgtgaatgtagagaagaaatcctaaagtttttatgtattttcttagaaaaaatgggccagaagatcgcaccttactctgttgaaattaagaacacttgtaccagtgtttatacaaaagatagagctgctaaatgtaaaattccagccctggaccttcttattaagttacttcagacttttagaagttctagactcatggatgaatttaaaattggagaattatttagtaaattctatggagaacttgcattgaaaaaaaaaataccagatacagttttagaaaaagtatatgagctcctaggattattgggtgaagttcatcctagtgagatgataaataatgcagaaaacctgttccgcgcttttctgggtgaacttaagacccagatgacatcagcagtaagagagcccaaactacctgttctggcaggatgtctgaaggggttgtcctcacttctgtgcaacttcactaagtccatggaagaagatccccagacttcaagggagatttttaattttgtactaaaggcaattcgtcctcagattgatctgaagagatatgctgtgccctcagctggcttgcgcctatttgccctgcatgcatctcagtttagcacctgccttctggacaactacgtgtctctatttgaagtcttgttaaagtggtgtgcccacacaaatgtagaattgaaaaaagctgcactttcagccctggaatcctttctgaaacaggtttctaatatggtggcgaaaaatgcagaaatgcataaaaataaactgcagtactttatggagcagttttatggaatcatcagaaatgtggattcgaacaacaaggagttatctattgctatccgtggatatggactttttgcaggaccgtgcaaggttataaacgcaaaagatgttgacttcatgtacgttgagctcattcagcgctgcaagcagatgttcctcacccagacagacactggtgacgaccgtgtttatcagatgccaagcttcctccagtctgttgcaagcgtcttgctgtaccttgacacagttcctgaggtgtatactccagttctggagcacctcgtggtgatgcagatagacagtttcccacagtacagtccaaaaatgcagctggtgtgttgcagagccatagtgaaggtgttcctagctttggcagcaaaagggccagttctcaggaattgcattagtactgtggtgcatcagggtttaatcagaatatgttctaaaccagtggtccttccaaagggccctgagtctgaatctgaagaccaccgtgcttcaggggaagtcagaactggcaaatggaaggtgcccacatacaaagactacgtggatctcttcagacatctcctgagctctgaccagatgatggattctattttagcagatgaagcatttttctctgtgaattcctccagtgaaagtctgaatcatttactttatgatgaatttgtaaaatccgttttgaagattgttgagaaattggatcttacacttgaaatacagactgttggggaacaagagaatggagatgaggcgcctggtgtttggatgatcccaacttcagatccagcggctaacttgcatccagctaaacctaaagatttttcggctttcattaacctggtggaattttgcagagagattctccctgagaaacaagcagaattttttgaaccatgggtgtactcattttcatatgaattaattttgcaatctacaaggttgcccctcatcagtggtttctacaaattgctttctattacagtaagaaatgccaagaaaataaaatatttcgagggagttagtccaaagagtctgaaacactctcctgaagacccagaaaagtattcttgctttgctttatttgtgaaatttggcaaagaggtggcagttaaaatgaagcagtacaaagatgaacttttggcctcttgtttgacctttcttctgtccttgccacacaacatcattgaactcgatgttagagcctacgttcctgcactgcagatggctttcaaactgggcctgagctatacccccttggcagaagtaggcctgaatgctctagaagaatggtcaatttatattgacagacatgtaatgcagccttattacaaagacattctcccctgcctggatggatacctgaagacttcagccttgtcagatgagaccaagaataactgggaagtgtcagctctttctcgggctgcccagaaaggatttaataaagtggtgttaaagcatctgaagaagacaaagaacctttcatcaaacgaagcaatatccttagaagaaataagaattagagtagtacaaatgcttggatctctaggaggacaaataaacaaaaatcttctgacagtcacgtcctcagatgagatgatgaagagctatgtggcctgggacagagagaagcggctgagctttgcagtgccctttagagagatgaaacctgtcattttcctggatgtgttcctgcctcgagtcacagaattagcgctcacagccagtgacagacaaactaaagttgcagcctgtgaacttttacatagcatggttatgtttatgttgggcaaagccacgcagatgccagaagggggacagggagccccacccatgtaccagctctataagcggacgtttcctgtgctgcttcgacttgcgtgtgatgttgatcaggtgacaaggcaactgtatgagccactagttatgcagctgattcactggttcactaacaacaagaaatttgaaagtcaggatactgttgccttactagaagctatattggatggaattgtggaccctgttgacagtactttaagagatttttgtggtcggtgtattcgagaattccttaaatggtccattaagcaaataacaccacagcagcaggagaagagtccagtaaacaccaaatcgcttttcaagcgactttatagccttgcgcttcaccccaatgctttcaagaggctgggagcatcacttgcctttaataatatctacagggaattcagggaagaagagtctctggtggaacagtttgtgtttgaagccttggtgatatacatggagagtctggccttagcacatgcagatgagaagtccttaggtacaattcaacagtgttgtgatgccattgatcacctatgccgcatcattgaaaagaagcatgtttctttaaataaagcaaagaaacgacgtttgccgcgaggatttccaccttccgcatcattgtgtttattggatctggtcaagtggcttttagctcattgtgggaggccccagacagaatgtcgacacaaatccattgaactcttttataaattcgttcctttattgccaggcaacagatcccctaatttgtggctgaaagatgttctcaaggaagaaggtgtctcttttctcatcaacacctttgaggggggtggctgtggccagccctcgggcatcctggcccagcccaccctcttgtaccttcgggggccattcagcctgcaggccacgctatgctggctggacctgctcctggccgcgttggagtgctacaacacgttcattggcgagagaactgtaggagcgctccaggtcctaggtactgaagcccagtcttcacttttgaaagcagtggctttcttcttagaaagcattgccatgcatgacattatagcagcagaaaagtgctttggcactggggcagcaggtaacagaacaagcccacaagagggagaaaggtacaactacagcaaatgcaccgttgtggtccggattatggagtttaccacgactctgctaaacacctccccggaaggatggaagctcctgaagaaggacttgtgtaatacacacctgatgagagtcctggtgcagacgctgtgtgagcccgcaagcataggtttcaacatcggagacgtccaggttatggctcatcttcctgatgtttgtgtgaatctgatgaaagctctaaagatgtccccatacaaagatatcctagagacccatctgagagagaaaataacagcacagagcattgaggagctttgtgccgtcaacttgtatggccctgacgcgcaagtggacaggagcaggctggctgctgttgtgtctgcctgtaaacagcttcacagagctgggcttctgcataatatattaccgtctcagtccacagatttgcatcattctgttggcacagaacttctttccctggtttataaaggcattgcccctggagatgagagacagtgtctgccttctctagacctcagttgtaagcagctggccagcggacttctggagttagcctttgcttttggaggactgtgtgagcgccttgtgagtcttctcctgaacccagcggtgctgtccacggcgtccttgggcagctcacagggcagcgtcatccacttctcccatggggagtatttctatagcttgttctcagaaacgatcaacacggaattattgaaaaatctggatcttgctgtattggagctcatgcagtcttcagtggataataccaaaatggtgagtgccgttttgaacggcatgttagaccagagcttcagggagcgagcaaaccagaaacaccaaggactgaaacttgcgactacaattctgcaacactggaagaagtgtgattcatggtgggccaaagattcccctctcgaaactaaaatggcagtgctggccttactggcaaaaattttacagattgattcatctgtatcttttaatacaagtcatggttcattccctgaagtctttacaacatatattagtctacttgctgacacaaagctggatctacatttaaagggccaagctgtcactcttcttccattcttcaccagcctcactggaggcagtctggaggaacttagacgtgttctggagcagctcatcgttgctcacttccccatgcagtccagggaatttcctccaggaactccgcggttcaataattatgtggactgcatgaaaaagtttctagatgcattggaattatctcaaagccctatgttgttggaattgatgacagaagttctttgtcgggaacagcagcatgtcatggaagaattatttcaatccagtttcaggaggattgccagaaggggttcatgtgtcacacaagtaggccttctggaaagcgtgtatgaaatgttcaggaaggatgacccccgcctaagtttcacacgccagtcctttgtggaccgctccctcctcactctgctgtggcactgtagcctggatgctttgagagaattcttcagcacaattgtggtggatgccattgatgtgttgaagtccaggtttacaaagctaaatgaatctacctttgatactcaaatcaccaagaagatgggctactataagattctagacgtgatgtattctcgccttcccaaagatgatgttcatgctaaggaatcaaaaattaatcaagttttccatggctcgtgtattacagaaggaaatgaacttacaaagacattgattaaattgtgctacgatgcatttacagagaacatggcaggagagaatcagctgctggagaggagaagactttaccattgtgcagcatacaactgcgccatatctgtcatctgctgtgtcttcaatgagttaaaattttaccaaggttttctgtttagtgaaaaaccagaaaagaacttgcttatttttgaaaatctgatcgacctgaagcgccgctataattttcctgtagaagttgaggttcctatggaaagaaagaaaaagtacattgaaattaggaaagaagccagagaagcagcaaatggggattcagatggtccttcctatatgtcttccctgtcatatttggcagacagtaccctgagtgaggaaatgagtcaatttgatttctcaaccggagttcagagctattcatacagctcccaagaccctagacctgccactggtcgttttcggagacgggagcagcgggaccccacggtgcatgatgatgtgctggagctggagatggacgagctcaatcggcatgagtgcatggcgcccctgacggccctggtcaagcacatgcacagaagcctgggcccgcctcaaggagaagaggattcagtgccaagagatcttccttcttggatgaaattcctccatggcaaactgggaaatccaatagtaccattaaatatccgtctcttcttagccaagcttgttattaatacagaagaggtctttcgcccttacgcgaagcactggcttagccccttgctgcagctggctgcttctgaaaacaatggaggagaaggaattcactacatggtggttgagatagtggccactattctttcatggacaggcttggccactccaacaggggtccctaaagatgaagtgttagcaaatcgattgcttaatttcctaatgaaacatgtctttcatccaaaaagagctgtgtttagacacaaccttgaaattataaagacccttgtcgagtgctggaaggattgtttatccatcccttataggttaatatttgaaaagttttccggtaaagatcctaattctaaagacaactcagtagggattcaattgctaggcatcgtgatggccaatgacctgcctccctatgacccacagtgtggcatccagagtagcgaatacttccaggctttggtgaataatatgtcctttgtaagatataaagaagtgtatgccgctgcagcagaagttctaggacttatacttcgatatgttatggagagaaaaaacatactggaggagtctctgtgtgaactggttgcgaaacaattgaagcaacatcagaatactatggaggacaagtttattgtgtgcttgaacaaagtgaccaagagcttccctcctcttgcagacaggttcatgaatgctgtgttctttctgctgccaaaatttcatggagtgttgaaaacactctgtctggaggtggtactttgtcgtgtggagggaatgacagagctgtacttccagttaaagagcaaggacttcgttcaagtcatgagacatagagatgatgaaagacaaaaagtatgtttggacataatttataagatgatgccaaagttaaaaccagtagaactccgagaacttctgaaccccgttgtggaattcgtttcccatccttctacaacatgtagggaacaaatgtataatattctcatgtggattcatgataattacagagatccagaaagtgagacagataatgactcccaggaaatatttaagttggcaaaagatgtgctgattcaaggattgatcgatgagaaccctggacttcaattaattattcgaaatttctggagccatgaaactaggttaccttcaaataccttggaccggttgctggcactaaattccttatattctcctaagatagaagtgcactttttaagtttagcaacaaattttctgctcgaaatgaccagcatgagcccagattatccaaaccccatgttcgagcatcctctgtcagaatgcgaatttcaggaatataccattgattctgattggcgtttccgaagtactgttctcactccgatgtttgtggagacccaggcctcccagggcactctccagacccgtacccaggaagggtccctctcagctcgctggccagtggcagggcagataagggccacccagcagcagcatgacttcacactgacacagactgcagatggaagaagctcatttgattggctgaccgggagcagcactgacccgctggtcgaccacaccagtccctcatctgactccttgctgtttgcccacaagaggagtgaaaggttacagagagcacccttgaagtcagtggggcctgattttgggaaaaaaaggctgggccttccaggggacgaggtggataacaaagtgaaaggtgcggccggccggacggacctactacgactgcgcagacggtttatgagggaccaggagaagctcagtttgatgtatgccagaaaaggcgttgctgagcaaaaacgagagaaggaaatcaagagtgagttaaaaatgaagcaggatgcccaggtcgttctgtacagaagctaccggcacggagaccttcctgacattcagatcaagcacagcagcctcatcaccccgttacaggccgtggcccagagggacccaataattgcaaaacagctctttagcagcttgttttctggaattttgaaagagatggataaatttaagacactgtctgaaaaaaacaacatcactcaaaagttgcttcaagacttcaatcgttttcttaataccaccttctctttctttccaccctttgtctcttgtattcaggacattagctgtcagcacgcagccctgctgagcctcgacccagcggctgttagcgctggttgcctggccagcctacagcagcccgtgggcatccgcctgctagaggaggctctgctccgcctgctgcctgctgagctgcctgccaagcgagtccgtgggaaggcccgcctccctcctgatgtcctcagatgggtggagcttgctaagctgtatagatcaattggagaatacgacgtcctccgtgggatttttaccagtgagataggaacaaagcaaatcactcagagtgcattattagcagaagccagaagtgattattctgaagctgctaagcagtatgatgaggctctcaataaacaagactgggtagatggtgagcccacagaagccgagaaggatttttgggaacttgcatcccttgactgttacaaccaccttgctgagtggaaatcacttgaatactgttctacagccagtatagacagtgagaaccccccagacctaaataaaatctggagtgaaccattttatcaggaaacatatctaccttacatgatccgcagcaagctgaagctgctgctccagggagaggctgaccagtccctgctgacatttattgacaaagctatgcacggggagctccagaaggcgattctagagcttcattacagtcaagagctgagtctgctttacctcctgcaagatgatgttgacagagccaaatattacattcaaaatggcattcagagttttatgcagaattattctagtattgatgtcctcttacaccaaagtagactcaccaaattgcagtctgtacaggctttaacagaaattcaggagttcatcagctttataagcaaacaaggcaatttatcatctcaagttccccttaagagacttctgaacacctggacaaacagatatccagatgctaaaatggacccaatgaacatctgggatgacatcatcacaaatcgatgtttctttctcagcaaaatagaggagaagcttacccctcttccagaagataatagtatgaatgtggatcaagatggagaccccagtgacaggatggaagtgcaagagcaggaagaagatatcagctccctgatcaggagttgcaagttttccatgaaaatgaagatgatagacagtgcccggaagcagaacaatttctcacttgctatgaaactactgaaggagctgcataaagagtcaaaaaccagagacgattggctggtgagctgggtgcagagctactgccgcctgagccactgccggagccggtcccagggctgctctgagcaggtgctcactgtgctgaaaacagtctctttgttggatgagaacaacgtgtcaagctacttaagcaaaaatattctggctttccgtgaccagaacattctcttgggtacaacttacaggatcatagcgaatgctctcagcagtgagccagcctgccttgctgaaatcgaggaggacaaggctagaagaatcttagagctttctggatccagttcagaggattcagagaaggtgatcgcgggtctgtaccagagagcattccagcacctctctgaggctgtgcaggcggctgaggaggaggcccagcctccctcctggagctgtgggcctgcagctggggtgattgatgcttacatgacgctggcagatttctgtgaccaacagctgcgcaaggaggaagagaatgcatcagttattgattctgcagaactgcaggcgtatccagcacttgtggtggagaaaatgttgaaagctttaaaattaaattccaatgaagccagattgaagtttcctagattacttcagattatagaacggtatccagaggagactttgagcctcatgacaaaagagatctcttccgttccctgctggcagttcatcagctggatcagccacatggtggccttactggacaaagaccaagccgttgctgttcagcactctgtggaagaaatcactgataactacccgcaggctattgtttatcccttcatcataagcagcgaaagctattccttcaaggatacttctactggtcataagaataaggagtttgtggcaaggattaaaagtaagttggatcaaggaggagtgattcaagattttattaatgccttagatcagctctctaatcctgaactgctctttaaggattggagcaatgatgtaagagctgaactagcaaaaacccctgtaaataaaaaaaacattgaaaaaatgtatgaaagaatgtatgcagccttgggtgacccaaaggctccaggcctgggggcctttagaaggaagtttattcagacttttggaaaagaatttgataaacattttgggaaaggaggttctaaactactgagaatgaagctcagtgacttcaacgacattaccaacatgctacttttaaaaatgaacaaagactcaaagccccctgggaatctgaaagaatgttcaccctggatgagcgacttcaaagtggagttcctgagaaatgagctggagattcccggtcagtatgacggtaggggaaagccattgccagagtaccacgtgcgaatcgccgggtttgatgagcgggtgacagtcatggcgtctctgcgaaggcccaagcgcatcatcatccgtggccatgacgagagggaacaccctttcctggtgaagggtggcgaggacctgcggcaggaccagcgcgtggagcagctcttccaggtcatgaatgggatcctggcccaagactccgcctgcagccagagggccctgcagctgaggacctatagcgttgtgcccatgacctccaggttaggattaattgagtggcttgaaaatactgttaccttgaaggaccttcttttgaacaccatgtcccaagaggagaaggcggcttacctgagtgatcccagggcaccgccgtgtgaatataaagattggctgacaaaaatgtcaggaaaacatgatgttggagcttacatgctaatgtataagggcgctaatcgtactgaaacagtcacgtcttttagaaaacgagaaagtaaagtgcctgctgatctcttaaagcgggccttcgtgaggatgagtacaagccctgaggctttcctggcgctccgctcccacttcgccagctctcacgctctgatatgcatcagccactggatcctcgggattggagacagacatctgaacaactttatggtggccatggagactggcggcgtgatcgggatcgactttgggcatgcgtttggatccgctacacagtttctgccagtccctgagttgatgccttttcggctaactcgccagtttatcaatctgatgttaccaatgaaagaaacgggccttatgtacagcatcatggtacacgcactccgggccttccgctcagaccctggcctgctcaccaacaccatggatgtgtttgtcaaggagccctcctttgattggaaaaattttgaacagaaaatgctgaaaaaaggagggtcatggattcaagaaataaatgttgctgaaaaaaattggtacccccgacagaaaatatgttacgctaagagaaagttagcaggtgccaatccagcagtcattacttgtgatgagctactcctgggtcatgagaaggcccctgccttcagagactatgtggctgtggcacgaggaagcaaagatcacaacattcgtgcccaagaaccagagagtgggctttcagaagagactcaagtgaagtgcctgatggaccaggcaacagaccccaacatccttggcagaacctgggaaggatgggagccctggatgtgaggtctgtgggagtctgcagatagaaagcattacattgtttaaagaatctactatactttggttggcagcattccatgagctgattttcctgaaacactaaagagaaatgtcttttgtgctacagtttcgtagcatgagtttaaatcaagattatgatgagtaaatgtgtatgggttaaatcaaagataaggttatagtaacatcaaagattaggtgaggtttatagaaagatagatatccaggcttaccaaagtattaagtcaagaatataatatgtgatcagctttcaaagcatttacaagtgctgcaagttagtgaaacagctgtctccgtaaatggaggaaatgtggggaagccttggaatgcccttctggttctggcacattggaaagcacactcagaaggcttcatcaccaagattttgggagagtaaagctaagtatagttgatgtaacattgtagaagcagcataggaacaataagaacaataggtaaagctataattatggcttatatttagaaatgactgcatttgatattttaggatatttttctaggttttttcctttcattttattctcttctagttttgacattttatgatagatttgctctctagaaggaaacgtctttatttaggagggcaaaaattttggtcatagcattcacttttgctattccaatctacaactggaagatacataaaagtgctttgcattgaatttgggataacttcaaaaatcccatggttgttgttagggatagtactaagcatttcagttccaggagaataaaagaaattcctatttgaaatgaattcctcatttggaggaaaaaaagcatgcattctagcacaacaagatgaaattatggaatacaaaagtggctccttcccatgtgcagtccctgtccccccccgccagtcctccacacccaaactgtttctgattggcttttagctttttgttgtttttttttttccttctaacacttgtatttggaggctcttctgtgattttgagaagtatactcttgagtgtttaataaagtttttttccaaaagtaaaaaaaaaaaaaaaaaaaaaaaaaaaaaaaaaaaaaaaaaaaaaaaaaaaaaaaaaaaaaaaaaaaaagagaaaaccaaaaaccacacagaaccaaaacaagaagaatagagaagaaaaaggaagtaccatcaaatataagtagaagctagactaaaccaaagacagaccagagacagacagccagtcaacaaaagcaataccaatcgcggacaactcagcttcatcattaacagagatgtccatacagaagacaaagatataaaggaagtgacgaacaacaaagcgacgcgcactcctcgacaggtagagtaaccgtaacacgacggcaggtaacaacaacattaaagaggacaataagtcggtatatatcactcgatcatatcgtagcgcggaccaactaacatcggtacgacgcatgatcaataacgaacaagctactacccaagggaatggtataaaaaaccgagtacaaatagataacagcacagaggcgtctaaagataagcgacaatcaaaacaacacgaacagctcagacagagaacgctaggagcagaaagagcaggaggggcgcggacggaagcgagcaggaggatgaggagaggagcaaagacggcagagaagcgacaagagagacgagcggcagaggaataacaggag

SEQ ID NO: 134787 - DNA, 13835 bp, Homo sapiens
ggggcatttccgggtccgggccgagcgggcgcacgcgcgggagcgggactcggcggcatggcgggctccggagccggtgtgcgttgctccctgctgcggctgcaggagaccttgtccgctgcggaccgctgcggtgctgccctggccggtcatcaactgatccgcggcctggggcaggaatgcgtcctgagcagcagccccgcggtgctggcattacagacatctttagttttttccagagatttcggtttgcttgtatttgtccggaagtcactcaacagtattgaatttcgtgaatgtagagaagaaatcctaaagtttttatgtattttcttagaaaaaatgggccagaagatcgcaccttactctgttgaaattaagaacacttgtaccagtgtttatacaaaagatagagctgctaaatgtaaaattccagccctggaccttcttattaagttacttcagacttttagaagttctagactcatggatgaatttaaaattggagaattatttagtaaattctatggagaacttgcattgaaaaaaaaaataccagatacagttttagaaaaagtatatgagctcctaggattattgggtgaagttcatcctagtgagatgataaataatgcagaaaacctgttccgcgcttttctgggtgaacttaagacccagatgacatcagcagtaagagagcccaaactacctgttctggcaggatgtctgaaggggttgtcctcacttctgtgcaacttcactaagtccatggaagaagatccccagacttcaagggagatttttaattttgtactaaaggcaattcgtcctcagattgatctgaagagatatgctgtgccctcagctggcttgcgcctatttgccctgcatgcatctcagtttagcacctgccttctggacaactacgtgtctctatttgaagtcttgttaaagtggtgtgcccacacaaatgtagaattgaaaaaagctgcactttcagccctggaatcctttctgaaacaggtttctaatatggtggcgaaaaatgcagaaatgcataaaaataaactgcagtactttatggagcagttttatggaatcatcagaaatgtggattcgaacaacaaggagttatctattgctatccgtggatatggactttttgcaggaccgtgcaaggttataaacgcaaaagatgttgacttcatgtacgttgagctcattcagcgctgcaagcagatgttcctcacccagacagacactggtgacgaccgtgtttatcagatgccaagcttcctccagtctgttgcaagcgtcttgctgtaccttgacacagttcctgaggtgtatactccagttctggagcacctcgtggtgatgcagatagacagtttcccacagtacagtccaaaaatgcagctggtgtgttgcagagccatagtgaaggtgttcctagctttggcagcaaaagggccagttctcaggaattgcattagtactgtggtgcatcagggtttaatcagaatatgttctaaaccagtggtccttccaaagggccctgagtctgaatctgaagaccaccgtgcttcaggggaagtcagaactggcaaatggaaggtgcccacatacaaagactacgtggatctcttcagacatctcctgagctctgaccagatgatggattctattttagcagatgaagcatttttctctgtgaattcctccagtgaaagtctgaatcatttactttatgatgaatttgtaaaatccgttttgaagattgttgagaaattggatcttacacttgaaatacagactgttggggaacaagagaatggagatgaggcgcctggtgtttggatgatcccaacttcagatccagcggctaacttgcatccagctaaacctaaagatttttcggctttcattaacctggtggaattttgcagagagattctccctgagaaacaagcagaattttttgaaccatgggtgtactcattttcatatgaattaattttgcaatctacaaggttgcccctcatcagtggtttctacaaattgctttctattacagtaagaaatgccaagaaaataaaatatttcgagggagttagtccaaagagtctgaaacactctcctgaagacccagaaaagtattcttgctttgctttatttgtgaaatttggcaaagaggtggcagttaaaatgaagcagtacaaagatgaacttttggcctcttgtttgacctttcttctgtccttgccacacaacatcattgaactcgatgttagagcctacgttcctgcactgcagatggctttcaaactgggcctgagctatacccccttggcagaagtaggcctgaatgctctagaagaatggtcaatttatattgacagacatgtaatgcagccttattacaaagacattctcccctgcctggatggatacctgaagacttcagccttgtcagatgagaccaagaataactgggaagtgtcagctctttctcgggctgcccagaaaggatttaataaagtggtgttaaagcatctgaagaagacaaagaacctttcatcaaacgaagcaatatccttagaagaaataagaattagagtagtacaaatgcttggatctctaggaggacaaataaacaaaaatcttctgacagtcacgtcctcagatgagatgatgaagagctatgtggcctgggacagagagaagcggctgagctttgcagtgccctttagagagatgaaacctgtcattttcctggatgtgttcctgcctcgagtcacagaattagcgctcacagccagtgacagacaaactaaagttgcagcctgtgaacttttacatagcatggttatgtttatgttgggcaaagccacgcagatgccagaagggggacagggagccccacccatgtaccagctctataagcggacgtttcctgtgctgcttcgacttgcgtgtgatgttgatcaggtgacaaggcaactgtatgagccactagttatgcagctgattcactggttcactaacaacaagaaatttgaaagtcaggatactgttgccttactagaagctatattggatggaattgtggaccctgttgacagtactttaagagatttttgtggtcggtgtattcgagaattccttaaatggtccattaagcaaataacaccacagcagcaggagaagagtccagtaaacaccaaatcgcttttcaagcgactttatagccttgcgcttcaccccaatgctttcaagaggctgggagcatcacttgcctttaataatatctacagggaattcagggaagaagagtctctggtggaacagtttgtgtttgaagccttggtgatatacatggagagtctggccttagcacatgcagatgagaagtccttaggtacaattcaacagtgttgtgatgccattgatcacctatgccgcatcattgaaaagaagcatgtttctttaaataaagcaaagaaacgacgtttgccgcgaggatttccaccttccgcatcattgtgtttattggatctggtcaagtggcttttagctcattgtgggaggccccagacagaatgtcgacacaaatccattgaactcttttataaattcgttcctttattgccaggcaacagatcccctaatttgtggctgaaagatgttctcaaggaagaaggtgtctcttttctcatcaacacctttgaggggggtggctgtggccagccctcgggcatcctggcccagcccaccctcttgtaccttcgggggccattcagcctgcaggccacgctatgctggctggacctgctcctggccgcgttggagtgctacaacacgttcattggcgagagaactgtaggagcgctccaggtcctaggtactgaagcccagtcttcacttttgaaagcagtggctttcttcttagaaagcattgccatgcatgacattatagcagcagaaaagtgctttggcactggggcagcaggtaacagaacaagcccacaagagggagaaaggtacaactacagcaaatgcaccgttgtggtccggattatggagtttaccacgactctgctaaacacctccccggaaggatggaagctcctgaagaaggacttgtgtaatacacacctgatgagagtcctggtgcagacgctgtgtgagcccgcaagcataggtttcaacatcggagacgtccaggttatggctcatcttcctgatgtttgtgtgaatctgatgaaagctctaaagatgtccccatacaaagatatcctagagacccatctgagagagaaaataacagcacagagcattgaggagctttgtgccgtcaacttgtatggccctgacgcgcaagtggacaggagcaggctggctgctgttgtgtctgcctgtaaacagcttcacagagctgggcttctgcataatatattaccgtctcagtccacagatttgcatcattctgttggcacagaacttctttccctggtttataaaggcattgcccctggagatgagagacagtgtctgccttctctagacctcagttgtaagcagctggccagcggacttctggagttagcctttgcttttggaggactgtgtgagcgccttgtgagtcttctcctgaacccagcggtgctgtccacggcgtccttgggcagctcacagggcagcgtcatccacttctcccatggggagtatttctatagcttgttctcagaaacgatcaacacggaattattgaaaaatctggatcttgctgtattggagctcatgcagtcttcagtggataataccaaaatggtgagtgccgttttgaacggcatgttagaccagagcttcagggagcgagcaaaccagaaacaccaaggactgaaacttgcgactacaattctgcaacactggaagaagtgtgattcatggtgggccaaagattcccctctcgaaactaaaatggcagtgctggccttactggcaaaaattttacagattgattcatctgtatcttttaatacaagtcatggttcattccctgaagtctttacaacatatattagtctacttgctgacacaaagctggatctacatttaaagggccaagctgtcactcttcttccattcttcaccagcctcactggaggcagtctggaggaacttagacgtgttctggagcagctcatcgttgctcacttccccatgcagtccagggaatttcctccaggaactccgcggttcaataattatgtggactgcatgaaaaagtttctagatgcattggaattatctcaaagccctatgttgttggaattgatgacagaagttctttgtcgggaacagcagcatgtcatggaagaattatttcaatccagtttcaggaggattgccagaaggggttcatgtgtcacacaagtaggccttctggaaagcgtgtatgaaatgttcaggaaggatgacccccgcctaagtttcacacgccagtcctttgtggaccgctccctcctcactctgctgtggcactgtagcctggatgctttgagagaattcttcagcacaattgtggtggatgccattgatgtgttgaagtccaggtttacaaagctaaatgaatctacctttgatactcaaatcaccaagaagatgggctactataagattctagacgtgatgtattctcgccttcccaaagatgatgttcatgctaaggaatcaaaaattaatcaagttttccatggctcgtgtattacagaaggaaatgaacttacaaagacattgattaaattgtgctacgatgcatttacagagaacatggcaggagagaatcagctgctggagaggagaagactttaccattgtgcagcatacaactgcgccatatctgtcatctgctgtgtcttcaatgagttaaaattttaccaaggttttctgtttagtgaaaaaccagaaaagaacttgcttatttttgaaaatctgatcgacctgaagcgccgctataattttcctgtagaagttgaggttcctatggaaagaaagaaaaagtacattgaaattaggaaagaagccagagaagcagcaaatggggattcagatggtccttcctatatgtcttccctgtcatatttggcagacagtaccctgagtgaggaaatgagtcaatttgatttctcaaccggagttcagagctattcatacagctcccaagaccctagacctgccactggtcgttttcggagacgggagcagcgggaccccacggtgcatgatgatgtgctggagctggagatggacgagctcaatcggcatgagtgcatggcgcccctgacggccctggtcaagcacatgcacagaagcctgggcccgcctcaaggagaagaggattcagtgccaagagatcttccttcttggatgaaattcctccatggcaaactgggaaatccaatagtaccattaaatatccgtctcttcttagccaagcttgttattaatacagaagaggtctttcgcccttacgcgaagcactggcttagccccttgctgcagctggctgcttctgaaaacaatggaggagaaggaattcactacatggtggttgagatagtggccactattctttcatggacaggcttggccactccaacaggggtccctaaagatgaagtgttagcaaatcgattgcttaatttcctaatgaaacatgtctttcatccaaaaagagctgtgtttagacacaaccttgaaattataaagacccttgtcgagtgctggaaggattgtttatccatcccttataggttaatatttgaaaagttttccggtaaagatcctaattctaaagacaactcagtagggattcaattgctaggcatcgtgatggccaatgacctgcctccctatgacccacagtgtggcatccagagtagcgaatacttccaggctttggtgaataatatgtcctttgtaagatataaagaagtgtatgccgctgcagcagaagttctaggacttatacttcgatatgttatggagagaaaaaacatactggaggagtctctgtgtgaactggttgcgaaacaattgaagcaacatcagaatactatggaggacaagtttattgtgtgcttgaacaaagtgaccaagagcttccctcctcttgcagacaggttcatgaatgctgtgttctttctgctgccaaaatttcatggagtgttgaaaacactctgtctggaggtggtactttgtcgtgtggagggaatgacagagctgtacttccagttaaagagcaaggacttcgttcaagtcatgagacatagagatgatgaaagacaaaaagtatgtttggacataatttataagatgatgccaaagttaaaaccagtagaactccgagaacttctgaaccccgttgtggaattcgtttcccatccttctacaacatgtagggaacaaatgtataatattctcatgtggattcatgataattacagagatccagaaagtgagacagataatgactcccaggaaatatttaagttggcaaaagatgtgctgattcaaggattgatcgatgagaaccctggacttcaattaattattcgaaatttctggagccatgaaactaggttaccttcaaataccttggaccggttgctggcactaaattccttatattctcctaagatagaagtgcactttttaagtttagcaacaaattttctgctcgaaatgaccagcatgagcccagattatccaaaccccatgttcgagcatcctctgtcagaatgcgaatttcaggaatataccattgattctgattggcgtttccgaagtactgttctcactccgatgtttgtggagacccaggcctcccagggcactctccagacccgtacccaggaagggtccctctcagctcgctggccagtggcagggcagataagggccacccagcagcagcatgacttcacactgacacagactgcagatggaagaagctcatttgattggctgaccgggagcagcactgacccgctggtcgaccacaccagtccctcatctgactccttgctgtttgcccacaagaggagtgaaaggttacagagagcacccttgaagtcagtggggcctgattttgggaaaaaaaggctgggccttccaggggacgaggtggataacaaagtgaaaggtgcggccggccggacggacctactacgactgcgcagacggtttatgagggaccaggagaagctcagtttgatgtatgccagaaaaggcgttgctgagcaaaaacgagagaaggaaatcaagagtgagttaaaaatgaagcaggatgcccaggtcgttctgtacagaagctaccggcacggagaccttcctgacattcagatcaagcacagcagcctcatcaccccgttacaggccgtggcccagagggacccaataattgcaaaacagctctttagcagcttgttttctggaattttgaaagagatggataaatttaagacactgtctgaaaaaaacaacatcactcaaaagttgcttcaagacttcaatcgttttcttaataccaccttctctttctttccaccctttgtctcttgtattcaggacattagctgtcagcacgcagccctgctgagcctcgacccagcggctgttagcgctggttgcctggccagcctacagcagcccgtgggcatccgcctgctagaggaggctctgctccgcctgctgcctgctgagctgcctgccaagcgagtccgtgggaaggcccgcctccctcctgatgtcctcagatgggtggagcttgctaagctgtatagatcaattggagaatacgacgtcctccgtgggatttttaccagtgagataggaacaaagcaaatcactcagagtgcattattagcagaagccagaagtgattattctgaagctgctaagcagtatgatgaggctctcaataaacaagactgggtagatggtgagcccacagaagccgagaaggatttttgggaacttgcatcccttgactgttacaaccaccttgctgagtggaaatcacttgaatactgttctacagccagtatagacagtgagaaccccccagacctaaataaaatctggagtgaaccattttatcaggaaacatatctaccttacatgatccgcagcaagctgaagctgctgctccagggagaggctgaccagtccctgctgacatttattgacaaagctatgcacggggagctccagaaggcgattctagagcttcattacagtcaagagctgagtctgctttacctcctgcaagatgatgttgacagagccaaatattacattcaaaatggcattcagagttttatgcagaattattctagtattgatgtcctcttacaccaaagtagactcaccaaattgcagtctgtacaggctttaacagaaattcaggagttcatcagctttataagcaaacaaggcaatttatcatctcaagttccccttaagagacttctgaacacctggacaaacagatatccagatgctaaaatggacccaatgaacatctgggatgacatcatcacaaatcgatgtttctttctcagcaaaatagaggagaagcttacccctcttccagaagataatagtatgaatgtggatcaagatggagaccccagtgacaggatggaagtgcaagagcaggaagaagatatcagctccctgatcaggagttgcaagttttccatgaaaatgaagatgatagacagtgcccggaagcagaacaatttctcacttgctatgaaactactgaaggagctgcataaagagtcaaaaaccagagacgattggctggtgagctgggtgcagagctactgccgcctgagccactgccggagccggtcccagggctgctctgagcaggtgctcactgtgctgaaaacagtctctttgttggatgagaacaacgtgtcaagctacttaagcaaaaatattctggctttccgtgaccagaacattctcttgggtacaacttacaggatcatagcgaatgctctcagcagtgagccagcctgccttgctgaaatcgaggaggacaaggctagaagaatcttagagctttctggatccagttcagaggattcagagaaggtgatcgcgggtctgtaccagagagcattccagcacctctctgaggctgtgcaggcggctgaggaggaggcccagcctccctcctggagctgtgggcctgcagctggggtgattgatgcttacatgacgctggcagatttctgtgaccaacagctgcgcaaggaggaagagaatgcatcagttattgattctgcagaactgcaggcgtatccagcacttgtggtggagaaaatgttgaaagctttaaaattaaattccaatgaagccagattgaagtttcctagattacttcagattatagaacggtatccagaggagactttgagcctcatgacaaaagagatctcttccgttccctgctggcagttcatcagctggatcagccacatggtggccttactggacaaagaccaagccgttgctgttcagcactctgtggaagaaatcactgataactacccgcaggctattgtttatcccttcatcataagcagcgaaagctattccttcaaggatacttctactggtcataagaataaggagtttgtggcaaggattaaaagtaagttggatcaaggaggagtgattcaagattttattaatgccttagatcagctctctaatcctgaactgctctttaaggattggagcaatgatgtaagagctgaactagcaaaaacccctgtaaataaaaaaaacattgaaaaaatgtatgaaagaatgtatgcagccttgggtgacccaaaggctccaggcctgggggcctttagaaggaagtttattcagacttttggaaaagaatttgataaacattttgggaaaggaggttctaaactactgagaatgaagctcagtgacttcaacgacattaccaacatgctacttttaaaaatgaacaaagactcaaagccccctgggaatctgaaagaatgttcaccctggatgagcgacttcaaagtggagttcctgagaaatgagctggagattcccggtcagtatgacggtaggggaaagccattgccagagtaccacgtgcgaatcgccgggtttgatgagcgggtgacagtcatggcgtctctgcgaaggcccaagcgcatcatcatccgtggccatgacgagagggaacaccctttcctggtgaagggtggcgaggacctgcggcaggaccagcgcgtggagcagctcttccaggtcatgaatgggatcctggcccaagactccgcctgcagccagagggccctgcagctgaggacctatagcgttgtgcccatgacctccaggttaggattaattgagtggcttgaaaatactgttaccttgaaggaccttcttttgaacaccatgtcccaagaggagaaggcggcttacctgagtgatcccagggcaccgccgtgtgaatataaagattggctgacaaaaatgtcaggaaaacatgatgttggagcttacatgctaatgtataagggcgctaatcgtactgaaacagtcacgtcttttagaaaacgagaaagtaaagtgcctgctgatctcttaaagcgggccttcgtgaggatgagtacaagccctgaggctttcctggcgctccgctcccacttcgccagctctcacgctctgatatgcatcagccactggatcctcgggattggagacagacatctgaacaactttatggtggccatggagactggcggcgtgatcgggatcgactttgggcatgcgtttggatccgctacacagtttctgccagtccctgagttgatgccttttcggctaactcgccagtttatcaatctgatgttaccaatgaaagaaacgggccttatgtacagcatcatggtacacgcactccgggccttccgctcagaccctggcctgctcaccaacaccatggatgtgtttgtcaaggagccctcctttgattggaaaaattttgaacagaaaatgctgaaaaaaggagggtcatggattcaagaaataaatgttgctgaaaaaaattggtacccccgacagaaaatatgttacgctaagagaaagttagcaggtgccaatccagcagtcattacttgtgatgagctactcctgggtcatgagaaggcccctgccttcagagactatgtggctgtggcacgaggaagcaaagatcacaacattcgtgcccaagaaccagagagtgggctttcagaagagactcaagtgaagtgcctgatggaccaggcaacagaccccaacatccttggcagaacctgggaaggatgggagccctggatgtgaggtctgtgggagtctgcagatagaaagcattacattgtttaaagaatctactatactttggttggcagcattccatgagctgattttcctgaaacactaaagagaaatgtcttttgtgctacagtttcgtagcatgagtttaaatcaagattatgatgagtaaatgtgtatgggttaaatcaaagataaggttatagtaacatcaaagattaggtgaggtttatagaaagatagatatccaggcttaccaaagtattaagtcaagaatataatatgtgatcagctttcaaagcatttacaagtgctgcaagttagtgaaacagctgtctccgtaaatggaggaaatgtggggaagccttggaatgcccttctggttctggcacattggaaagcacactcagaaggcttcatcaccaagattttgggagagtaaagctaagtatagttgatgtaacattgtagaagcagcataggaacaataagaacaataggtaaagctataattatggcttatatttagaaatgactgcatttgatattttaggatatttttctaggttttttcctttcattttattctcttctagttttgacattttatgatagatttgctctctagaaggaaacgtctttatttaggagggcaaaaattttggtcatagcattcacttttgctattccaatctacaactggaagatacataaaagtgctttgcattgaatttgggataacttcaaaaatcccatggttgttgttagggatagtactaagcatttcagttccaggagaataaaagaaattcctatttgaaatgaattcctcatttggaggaaaaaaagcatgcattctagcacaacaagatgaaattatggaatacaaaagtggctccttcccatgtgcagtccctgtccccccccgccagtcctccacacccaaactgtttctgattggcttttagctttttgttgtttttttttttccttctaacacttgtatttggaggctcttctgtgattttgagaagtatactcttgagtgtttaataaagtttttttccaaaagtagataacacctgtgcacaggcaatttgatgtggacattcttatcttgggacacacacacatatttgaagcatttgcccttgagggcgctcttgccacataacctttatctgccactggcttattatcggcccgaaaacaaacgtcattgcatcaatttgccttatgggaatccaaactaatacaatggccccttatttaaaccaagtgttggggacccgggggtcaccatattaatgccttgaaccaaacccctttccgccatgggtgatattgggaaagtgccctcccctttcgctttccacaaattagccctctctaggccgtgg

SEQ ID NO: 134788 - DNA, 13546 bp, Homo sapiens
ggggcatttccgggtccgggccgagcgggcgcacgcgcgggagcgggactcggcggcatggcgggctccggagccggtgtgcgttgctccctgctgcggctgcaggagaccttgtccgctgcggaccgctgcggtgctgccctggccggtcatcaactgatccgcggcctggggcaggaatgcgtcctgagcagcagccccgcggtgctggcattacagacatctttagttttttccagagatttcggtttgcttgtatttgtccggaagtcactcaacagtattgaatttcgtgaatgtagagaagaaatcctaaagtttttatgtattttcttagaaaaaatgggccagaagatcgcaccttactctgttgaaattaagaacacttgtaccagtgtttatacaaaagatagagctgctaaatgtaaaattccagccctggaccttcttattaagttacttcagacttttagaagttctagactcatggatgaatttaaaattggagaattatttagtaaattctatggagaacttgcattgaaaaaaaaaataccagatacagttttagaaaaagtatatgagctcctaggattattgggtgaagttcatcctagtgagatgataaataatgcagaaaacctgttccgcgcttttctgggtgaacttaagacccagatgacatcagcagtaagagagcccaaactacctgttctggcaggatgtctgaaggggttgtcctcacttctgtgcaacttcactaagtccatggaagaagatccccagacttcaagggagatttttaattttgtactaaaggcaattcgtcctcagattgatctgaagagatatgctgtgccctcagctggcttgcgcctatttgccctgcatgcatctcagtttagcacctgccttctggacaactacgtgtctctatttgaagtcttgttaaagtggtgtgcccacacaaatgtagaattgaaaaaagctgcactttcagccctggaatcctttctgaaacaggtttctaatatggtggcgaaaaatgcagaaatgcataaaaataaactgcagtactttatggagcagttttatggaatcatcagaaatgtggattcgaacaacaaggagttatctattgctatccgtggatatggactttttgcaggaccgtgcaaggttataaacgcaaaagatgttgacttcatgtacgttgagctcattcagcgctgcaagcagatgttcctcacccagacagacactggtgacgaccgtgtttatcagatgccaagcttcctccagtctgttgcaagcgtcttgctgtaccttgacacagttcctgaggtgtatactccagttctggagcacctcgtggtgatgcagatagacagtttcccacagtacagtccaaaaatgcagctggtgtgttgcagagccatagtgaaggtgttcctagctttggcagcaaaagggccagttctcaggaattgcattagtactgtggtgcatcagggtttaatcagaatatgttctaaaccagtggtccttccaaagggccctgagtctgaatctgaagaccaccgtgcttcaggggaagtcagaactggcaaatggaaggtgcccacatacaaagactacgtggatctcttcagacatctcctgagctctgaccagatgatggattctattttagcagatgaagcatttttctctgtgaattcctccagtgaaagtctgaatcatttactttatgatgaatttgtaaaatccgttttgaagattgttgagaaattggatcttacacttgaaatacagactgttggggaacaagagaatggagatgaggcgcctggtgtttggatgatcccaacttcagatccagcggctaacttgcatccagctaaacctaaagatttttcggctttcattaacctggtggaattttgcagagagattctccctgagaaacaagcagaattttttgaaccatgggtgtactcattttcatatgaattaattttgcaatctacaaggttgcccctcatcagtggtttctacaaattgctttctattacagtaagaaatgccaagaaaataaaatatttcgagggagttagtccaaagagtctgaaacactctcctgaagacccagaaaagtattcttgctttgctttatttgtgaaatttggcaaagaggtggcagttaaaatgaagcagtacaaagatgaacttttggcctcttgtttgacctttcttctgtccttgccacacaacatcattgaactcgatgttagagcctacgttcctgcactgcagatggctttcaaactgggcctgagctatacccccttggcagaagtaggcctgaatgctctagaagaatggtcaatttatattgacagacatgtaatgcagccttattacaaagacattctcccctgcctggatggatacctgaagacttcagccttgtcagatgagaccaagaataactgggaagtgtcagctctttctcgggctgcccagaaaggatttaataaagtggtgttaaagcatctgaagaagacaaagaacctttcatcaaacgaagcaatatccttagaagaaataagaattagagtagtacaaatgcttggatctctaggaggacaaataaacaaaaatcttctgacagtcacgtcctcagatgagatgatgaagagctatgtggcctgggacagagagaagcggctgagctttgcagtgccctttagagagatgaaacctgtcattttcctggatgtgttcctgcctcgagtcacagaattagcgctcacagccagtgacagacaaactaaagttgcagcctgtgaacttttacatagcatggttatgtttatgttgggcaaagccacgcagatgccagaagggggacagggagccccacccatgtaccagctctataagcggacgtttcctgtgctgcttcgacttgcgtgtgatgttgatcaggtgacaaggcaactgtatgagccactagttatgcagctgattcactggttcactaacaacaagaaatttgaaagtcaggatactgttgccttactagaagctatattggatggaattgtggaccctgttgacagtactttaagagatttttgtggtcggtgtattcgagaattccttaaatggtccattaagcaaataacaccacagcagcaggagaagagtccagtaaacaccaaatcgcttttcaagcgactttatagccttgcgcttcaccccaatgctttcaagaggctgggagcatcacttgcctttaataatatctacagggaattcagggaagaagagtctctggtggaacagtttgtgtttgaagccttggtgatatacatggagagtctggccttagcacatgcagatgagaagtccttaggtacaattcaacagtgttgtgatgccattgatcacctatgccgcatcattgaaaagaagcatgtttctttaaataaagcaaagaaacgacgtttgccgcgaggatttccaccttccgcatcattgtgtttattggatctggtcaagtggcttttagctcattgtgggaggccccagacagaatgtcgacacaaatccattgaactcttttataaattcgttcctttattgccaggcaacagatcccctaatttgtggctgaaagatgttctcaaggaagaaggtgtctcttttctcatcaacacctttgaggggggtggctgtggccagccctcgggcatcctggcccagcccaccctcttgtaccttcgggggccattcagcctgcaggccacgctatgctggctggacctgctcctggccgcgttggagtgctacaacacgttcattggcgagagaactgtaggagcgctccaggtcctaggtactgaagcccagtcttcacttttgaaagcagtggctttcttcttagaaagcattgccatgcatgacattatagcagcagaaaagtgctttggcactggggcagcaggtaacagaacaagcccacaagagggagaaaggtacaactacagcaaatgcaccgttgtggtccggattatggagtttaccacgactctgctaaacacctccccggaaggatggaagctcctgaagaaggacttgtgtaatacacacctgatgagagtcctggtgcagacgctgtgtgagcccgcaagcataggtttcaacatcggagacgtccaggttatggctcatcttcctgatgtttgtgtgaatctgatgaaagctctaaagatgtccccatacaaagatatcctagagacccatctgagagagaaaataacagcacagagcattgaggagctttgtgccgtcaacttgtatggccctgacgcgcaagtggacaggagcaggctggctgctgttgtgtctgcctgtaaacagcttcacagagctgggcttctgcataatatattaccgtctcagtccacagatttgcatcattctgttggcacagaacttctttccctggtttataaaggcattgcccctggagatgagagacagtgtctgccttctctagacctcagttgtaagcagctggccagcggacttctggagttagcctttgcttttggaggactgtgtgagcgccttgtgagtcttctcctgaacccagcggtgctgtccacggcgtccttgggcagctcacagggcagcgtcatccacttctcccatggggagtatttctatagcttgttctcagaaacgatcaacacggaattattgaaaaatctggatcttgctgtattggagctcatgcagtcttcagtggataataccaaaatggtgagtgccgttttgaacggcatgttagaccagagcttcagggagcgagcaaaccagaaacaccaaggactgaaacttgcgactacaattctgcaacactggaagaagtgtgattcatggtgggccaaagattcccctctcgaaactaaaatggcagtgctggccttactggcaaaaattttacagattgattcatctgtatcttttaatacaagtcatggttcattccctgaagtctttacaacatatattagtctacttgctgacacaaagctggatctacatttaaagggccaagctgtcactcttcttccattcttcaccagcctcactggaggcagtctggaggaacttagacgtgttctggagcagctcatcgttgctcacttccccatgcagtccagggaatttcctccaggaactccgcggttcaataattatgtggactgcatgaaaaagtttctagatgcattggaattatctcaaagccctatgttgttggaattgatgacagaagttctttgtcgggaacagcagcatgtcatggaagaattatttcaatccagtttcaggaggattgccagaaggggttcatgtgtcacacaagtaggccttctggaaagcgtgtatgaaatgttcaggaaggatgacccccgcctaagtttcacacgccagtcctttgtggaccgctccctcctcactctgctgtggcactgtagcctggatgctttgagagaattcttcagcacaattgtggtggatgccattgatgtgttgaagtccaggtttacaaagctaaatgaatctacctttgatactcaaatcaccaagaagatgggctactataagattctagacgtgatgtattctcgccttcccaaagatgatgttcatgctaaggaatcaaaaattaatcaagttttccatggctcgtgtattacagaaggaaatgaacttacaaagacattgattaaattgtgctacgatgcatttacagagaacatggcaggagagaatcagctgctggagaggagaagactttaccattgtgcagcatacaactgcgccatatctgtcatctgctgtgtcttcaatgagttaaaattttaccaaggttttctgtttagtgaaaaaccagaaaagaacttgcttatttttgaaaatctgatcgacctgaagcgccgctataattttcctgtagaagttgaggttcctatggaaagaaagaaaaagtacattgaaattaggaaagaagccagagaagcagcaaatggggattcagatggtccttcctatatgtcttccctgtcatatttggcagacagtaccctgagtgaggaaatgagtcaatttgatttctcaaccggagttcagagctattcatacagctcccaagaccctagacctgccactggtcgttttcggagacgggagcagcgggaccccacggtgcatgatgatgtgctggagctggagatggacgagctcaatcggcatgagtgcatggcgcccctgacggccctggtcaagcacatgcacagaagcctgggcccgcctcaaggagaagaggattcagtgccaagagatcttccttcttggatgaaattcctccatggcaaactgggaaatccaatagtaccattaaatatccgtctcttcttagccaagcttgttattaatacagaagaggtctttcgcccttacgcgaagcactggcttagccccttgctgcagctggctgcttctgaaaacaatggaggagaaggaattcactacatggtggttgagatagtggccactattctttcatggacaggcttggccactccaacaggggtccctaaagatgaagtgttagcaaatcgattgcttaatttcctaatgaaacatgtctttcatccaaaaagagctgtgtttagacacaaccttgaaattataaagacccttgtcgagtgctggaaggattgtttatccatcccttataggttaatatttgaaaagttttccggtaaagatcctaattctaaagacaactcagtagggattcaattgctaggcatcgtgatggccaatgacctgcctccctatgacccacagtgtggcatccagagtagcgaatacttccaggctttggtgaataatatgtcctttgtaagatataaagaagtgtatgccgctgcagcagaagttctaggacttatacttcgatatgttatggagagaaaaaacatactggaggagtctctgtgtgaactggttgcgaaacaattgaagcaacatcagaatactatggaggacaagtttattgtgtgcttgaacaaagtgaccaagagcttccctcctcttgcagacaggttcatgaatgctgtgttctttctgctgccaaaatttcatggagtgttgaaaacactctgtctggaggtggtactttgtcgtgtggagggaatgacagagctgtacttccagttaaagagcaaggacttcgttcaagtcatgagacatagagatgatgaaagacaaaaagtatgtttggacataatttataagatgatgccaaagttaaaaccagtagaactccgagaacttctgaaccccgttgtggaattcgtttcccatccttctacaacatgtagggaacaaatgtataatattctcatgtggattcatgataattacagagatccagaaagtgagacagataatgactcccaggaaatatttaagttggcaaaagatgtgctgattcaaggattgatcgatgagaaccctggacttcaattaattattcgaaatttctggagccatgaaactaggttaccttcaaataccttggaccggttgctggcactaaattccttatattctcctaagatagaagtgcactttttaagtttagcaacaaattttctgctcgaaatgaccagcatgagcccagattatccaaaccccatgttcgagcatcctctgtcagaatgcgaatttcaggaatataccattgattctgattggcgtttccgaagtactgttctcactccgatgtttgtggagacccaggcctcccagggcactctccagacccgtacccaggaagggtccctctcagctcgctggccagtggcagggcagataagggccacccagcagcagcatgacttcacactgacacagactgcagatggaagaagctcatttgattggctgaccgggagcagcactgacccgctggtcgaccacaccagtccctcatctgactccttgctgtttgcccacaagaggagtgaaaggttacagagagcacccttgaagtcagtggggcctgattttgggaaaaaaaggctgggccttccaggggacgaggtggataacaaagtgaaaggtgcggccggccggacggacctactacgactgcgcagacggtttatgagggaccaggagaagctcagtttgatgtatgccagaaaaggcgttgctgagcaaaaacgagagaaggaaatcaagagtgagttaaaaatgaagcaggatgcccaggtcgttctgtacagaagctaccggcacggagaccttcctgacattcagatcaagcacagcagcctcatcaccccgttacaggccgtggcccagagggacccaataattgcaaaacagctctttagcagcttgttttctggaattttgaaagagatggataaatttaagacactgtctgaaaaaaacaacatcactcaaaagttgcttcaagacttcaatcgttttcttaataccaccttctctttctttccaccctttgtctcttgtattcaggacattagctgtcagcacgcagccctgctgagcctcgacccagcggctgttagcgctggttgcctggccagcctacagcagcccgtgggcatccgcctgctagaggaggctctgctccgcctgctgcctgctgagctgcctgccaagcgagtccgtgggaaggcccgcctccctcctgatgtcctcagatgggtggagcttgctaagctgtatagatcaattggagaatacgacgtcctccgtgggatttttaccagtgagataggaacaaagcaaatcactcagagtgcattattagcagaagccagaagtgattattctgaagctgctaagcagtatgatgaggctctcaataaacaagactgggtagatggtgagcccacagaagccgagaaggatttttgggaacttgcatcccttgactgttacaaccaccttgctgagtggaaatcacttgaatactgttctacagccagtatagacagtgagaaccccccagacctaaataaaatctggagtgaaccattttatcaggaaacatatctaccttacatgatccgcagcaagctgaagctgctgctccagggagaggctgaccagtccctgctgacatttattgacaaagctatgcacggggagctccagaaggcgattctagagcttcattacagtcaagagctgagtctgctttacctcctgcaagatgatgttgacagagccaaatattacattcaaaatggcattcagagttttatgcagaattattctagtattgatgtcctcttacaccaaagtagactcaccaaattgcagtctgtacaggctttaacagaaattcaggagttcatcagctttataagcaaacaaggcaatttatcatctcaagttccccttaagagacttctgaacacctggacaaacagatatccagatgctaaaatggacccaatgaacatctgggatgacatcatcacaaatcgatgtttctttctcagcaaaatagaggagaagcttacccctcttccagaagataatagtatgaatgtggatcaagatggagaccccagtgacaggatggaagtgcaagagcaggaagaagatatcagctccctgatcaggagttgcaagttttccatgaaaatgaagatgatagacagtgcccggaagcagaacaatttctcacttgctatgaaactactgaaggagctgcataaagagtcaaaaaccagagacgattggctggtgagctgggtgcagagctactgccgcctgagccactgccggagccggtcccagggctgctctgagcaggtgctcactgtgctgaaaacagtctctttgttggatgagaacaacgtgtcaagctacttaagcaaaaatattctggctttccgtgaccagaacattctcttgggtacaacttacaggatcatagcgaatgctctcagcagtgagccagcctgccttgctgaaatcgaggaggacaaggctagaagaatcttagagctttctggatccagttcagaggattcagagaaggtgatcgcgggtctgtaccagagagcattccagcacctctctgaggctgtgcaggcggctgaggaggaggcccagcctccctcctggagctgtgggcctgcagctggggtgattgatgcttacatgacgctggcagatttctgtgaccaacagctgcgcaaggaggaagagaatgcatcagttattgattctgcagaactgcaggcgtatccagcacttgtggtggagaaaatgttgaaagctttaaaattaaattccaatgaagccagattgaagtttcctagattacttcagattatagaacggtatccagaggagactttgagcctcatgacaaaagagatctcttccgttccctgctggcagttcatcagctggatcagccacatggtggccttactggacaaagaccaagccgttgctgttcagcactctgtggaagaaatcactgataactacccgcaggctattgtttatcccttcatcataagcagcgaaagctattccttcaaggatacttctactggtcataagaataaggagtttgtggcaaggattaaaagtaagttggatcaaggaggagtgattcaagattttattaatgccttagatcagctctctaatcctgaactgctctttaaggattggagcaatgatgtaagagctgaactagcaaaaacccctgtaaataaaaaaaacattgaaaaaatgtatgaaagaatgtatgcagccttgggtgacccaaaggctccaggcctgggggcctttagaaggaagtttattcagacttttggaaaagaatttgataaacattttgggaaaggaggttctaaactactgagaatgaagctcagtgacttcaacgacattaccaacatgctacttttaaaaatgaacaaagactcaaagccccctgggaatctgaaagaatgttcaccctggatgagcgacttcaaagtggagttcctgagaaatgagctggagattcccggtcagtatgacggtaggggaaagccattgccagagtaccacgtgcgaatcgccgggtttgatgagcgggtgacagtcatggcgtctctgcgaaggcccaagcgcatcatcatccgtggccatgacgagagggaacaccctttcctggtgaagggtggcgaggacctgcggcaggaccagcgcgtggagcagctcttccaggtcatgaatgggatcctggcccaagactccgcctgcagccagagggccctgcagctgaggacctatagcgttgtgcccatgacctccaggttaggattaattgagtggcttgaaaatactgttaccttgaaggaccttcttttgaacaccatgtcccaagaggagaaggcggcttacctgagtgatcccagggcaccgccgtgtgaatataaagattggctgacaaaaatgtcaggaaaacatgatgttggagcttacatgctaatgtataagggcgctaatcgtactgaaacagtcacgtcttttagaaaacgagaaagtaaagtgcctgctgatctcttaaagcgggccttcgtgaggatgagtacaagccctgaggctttcctggcgctccgctcccacttcgccagctctcacgctctgatatgcatcagccactggatcctcgggattggagacagacatctgaacaactttatggtggccatggagactggcggcgtgatcgggatcgactttgggcatgcgtttggatccgctacacagtttctgccagtccctgagttgatgccttttcggctaactcgccagtttatcaatctgatgttaccaatgaaagaaacgggccttatgtacagcatcatggtacacgcactccgggccttccgctcagaccctggcctgctcaccaacaccatggatgtgtttgtcaaggagccctcctttgattggaaaaattttgaacagaaaatgctgaaaaaaggagggtcatggattcaagaaataaatgttgctgaaaaaaattggtacccccgacagaaaatatgttacgctaagagaaagttagcaggtgccaatccagcagtcattacttgtgatgagctactcctgggtcatgagaaggcccctgccttcagagactatgtggctgtggcacgaggaagcaaagatcacaacattcgtgcccaagaaccagagagtgggctttcagaagagactcaagtgaagtgcctgatggaccaggcaacagaccccaacatccttggcagaacctgggaaggatgggagccctggatgtgaggtctgtgggagtctgcagatagaaagcattacattgtttaaagaatctactatactttggttggcagcattccatgagctgattttcctgaaacactaaagagaaatgtcttttgtgctacagtttcgtagcatgagtttaaatcaagattatgatgagtaaatgtgtatgggttaaatcaaagataaggttatagtaacatcaaagattaggtgaggtttatagaaagatagatatccaggcttaccaaagtattaagtcaagaatataatatgtgatcagctttcaaagcatttacaagtgctgcaagttagtgaaacagctgtctccgtaaatggaggaaatgtggggaagccttggaatgcccttctggttctggcacattggaaagcacactcagaaggcttcatcaccaagattttgggagagtaaagctaagtatagttgatgtaacattgtagaagcagcataggaacaataagaacaataggtaaagctataattatggcttatatttagaaatgactgcatttgatattttaggatatttttctaggttttttcctttcattttattctcttctagttttgacattttatgatagatttgctctctagaaggaaacgtctttatttaggagggcaaaaattttggtcatagcattcacttttgctattccaatctacaactggaagatacataaaagtgctttgcattgaatttgggataacttcaaaaatcccatggttgttgttagggatagtactaagcatttcagttccaggagaataaaagaaattcctatttgaaatgaattcctcatttggaggaaaaaaagcatgcattctagcacaacaagatgaaattatggaatacaaaagtggctccttcccatgtgcagtccctgtccccccccgccagaaccacaaatatcgctatttgtggtggaagaagtggtctagacttctccttccccctaggcaccgcctgctcttttcacagactcaaggcttctcacacagcgctggcgagcacgtcccaacaggcttctatgttttttgccctcagcatgccttcagagatcacggtcagccgaggtt

SEQ ID NO: 134789 - DNA, 10947 bp, Homo sapiens
gacagcccggagcttacatcaaacgaagcaatatccttagaagaaataagaattagagtagtacaaatgcttggatctctaggaggacaaataaacaaaaatcttctgacagtcacgtcctcagatgagatgatgaagagctatgtggcctgggacagagagaagcggctgagctttgcagtgccctttagagagatgaaacctgtcattttcctggatgtgttcctgcctcgagtcacagaattagcgctcacagccagtgacagacaaactaaagttgcagcctgtgaacttttacatagcatggttatgtttatgttgggcaaagccacgcagatgccagaagggggacagggagccccacccatgtaccagctctataagcggacgtttcctgtgctgcttcgacttgcgtgtgatgttgatcaggtgacaaggcaactgtatgagccactagttatgcagctgattcactggttcactaacaacaagaaatttgaaagtcaggatactgttgccttactagaagctatattggatggaattgtggaccctgttgacagtactttaagagatttttgtggtcggtgtattcgagaattccttaaatggtccattaagcaaataacaccacagcagcaggagaagagtccagtaaacaccaaatcgcttttcaagcgactttatagccttgcgcttcaccccaatgctttcaagaggctgggagcatcacttgcctttaataatatctacagggaattcagggaagaagagtctctggtggaacagtttgtgtttgaagccttggtgatatacatggagagtctggccttagcacatgcagatgagaagtccttaggtacaattcaacagtgttgtgatgccattgatcacctatgccgcatcattgaaaagaagcatgtttctttaaataaagcaaagaaacgacgtttgccgcgaggatttccaccttccgcatcattgtgtttattggatctggtcaagtggcttttagctcattgtgggaggccccagacagaatgtcgacacaaatccattgaactcttttataaattcgttcctttattgccaggcaacagatcccctaatttgtggctgaaagatgttctcaaggaagaaggtgtctcttttctcatcaacacctttgaggggggtggctgtggccagccctcgggcatcctggcccagcccaccctcttgtaccttcgggggccattcagcctgcaggccacgctatgctggctggacctgctcctggccgcgttggagtgctacaacacgttcattggcgagagaactgtaggagcgctccaggtcctaggtactgaagcccagtcttcacttttgaaagcagtggctttcttcttagaaagcattgccatgcatgacattatagcagcagaaaagtgctttggcactggggcagcaggtaacagaacaagcccacaagagggagaaaggtacaactacagcaaatgcaccgttgtggtccggattatggagtttaccacgactctgctaaacacctccccggaaggatggaagctcctgaagaaggacttgtgtaatacacacctgatgagagtcctggtgcagacgctgtgtgagcccgcaagcataggtttcaacatcggagacgtccaggttatggctcatcttcctgatgtttgtgtgaatctgatgaaagctctaaagatgtccccatacaaagatatcctagagacccatctgagagagaaaataacagcacagagcattgaggagctttgtgccgtcaacttgtatggccctgacgcgcaagtggacaggagcaggctggctgctgttgtgtctgcctgtaaacagcttcacagagctgggcttctgcataatatattaccgtctcagtccacagatttgcatcattctgttggcacagaacttctttccctggtttataaaggcattgcccctggagatgagagacagtgtctgccttctctagacctcagttgtaagcagctggccagcggacttctggagttagcctttgcttttggaggactgtgtgagcgccttgtgagtcttctcctgaacccagcggtgctgtccacggcgtccttgggcagctcacagggcagcgtcatccacttctcccatggggagtatttctatagcttgttctcagaaacgatcaacacggaattattgaaaaatctggatcttgctgtattggagctcatgcagtcttcagtggataataccaaaatggtgagtgccgttttgaacggcatgttagaccagagcttcagggagcgagcaaaccagaaacaccaaggactgaaacttgcgactacaattctgcaacactggaagaagtgtgattcatggtgggccaaagattcccctctcgaaactaaaatggcagtgctggccttactggcaaaaattttacagattgattcatctgtatcttttaatacaagtcatggttcattccctgaagtctttacaacatatattagtctacttgctgacacaaagctggatctacatttaaagggccaagctgtcactcttcttccattcttcaccagcctcactggaggcagtctggaggaacttagacgtgttctggagcagctcatcgttgctcacttccccatgcagtccagggaatttcctccaggaactccgcggttcaataattatgtggactgcatgaaaaagtttctagatgcattggaattatctcaaagccctatgttgttggaattgatgacagaagttctttgtcgggaacagcagcatgtcatggaagaattatttcaatccagtttcaggaggattgccagaaggggttcatgtgtcacacaagtaggccttctggaaagcgtgtatgaaatgttcaggaaggatgacccccgcctaagtttcacacgccagtcctttgtggaccgctccctcctcactctgctgtggcactgtagcctggatgctttgagagaattcttcagcacaattgtggtggatgccattgatgtgttgaagtccaggtttacaaagctaaatgaatctacctttgatactcaaatcaccaagaagatgggctactataagattctagacgtgatgtattctcgccttcccaaagatgatgttcatgctaaggaatcaaaaattaatcaagttttccatggctcgtgtattacagaaggaaatgaacttacaaagacattgattaaattgtgctacgatgcatttacagagaacatggcaggagagaatcagctgctggagaggagaagactttaccattgtgcagcatacaactgcgccatatctgtcatctgctgtgtcttcaatgagttaaaattttaccaaggttttctgtttagtgaaaaaccagaaaagaacttgcttatttttgaaaatctgatcgacctgaagcgccgctataattttcctgtagaagttgaggttcctatggaaagaaagaaaaagtacattgaaattaggaaagaagccagagaagcagcaaatggggattcagatggtccttcctatatgtcttccctgtcatatttggcagacagtaccctgagtgaggaaatgagtcaatttgatttctcaaccggagttcagagctattcatacagctcccaagaccctagacctgccactggtcgttttcggagacgggagcagcgggaccccacggtgcatgatgatgtgctggagctggagatggacgagctcaatcggcatgagtgcatggcgcccctgacggccctggtcaagcacatgcacagaagcctgggcccgcctcaaggagaagaggattcagtgccaagagatcttccttcttggatgaaattcctccatggcaaactgggaaatccaatagtaccattaaatatccgtctcttcttagccaagcttgttattaatacagaagaggtctttcgcccttacgcgaagcactggcttagccccttgctgcagctggctgcttctgaaaacaatggaggagaaggaattcactacatggtggttgagatagtggccactattctttcatggacaggcttggccactccaacaggggtccctaaagatgaagtgttagcaaatcgattgcttaatttcctaatgaaacatgtctttcatccaaaaagagctgtgtttagacacaaccttgaaattataaagacccttgtcgagtgctggaaggattgtttatccatcccttataggttaatatttgaaaagttttccggtaaagatcctaattctaaagacaactcagtagggattcaattgctaggcatcgtgatggccaatgacctgcctccctatgacccacagtgtggcatccagagtagcgaatacttccaggctttggtgaataatatgtcctttgtaagatataaagaagtgtatgccgctgcagcagaagttctaggacttatacttcgatatgttatggagagaaaaaacatactggaggagtctctgtgtgaactggttgcgaaacaattgaagcaacatcagaatactatggaggacaagtttattgtgtgcttgaacaaagtgaccaagagcttccctcctcttgcagacaggttcatgaatgctgtgttctttctgctgccaaaatttcatggagtgttgaaaacactctgtctggaggtggtactttgtcgtgtggagggaatgacagagctgtacttccagttaaagagcaaggacttcgttcaagtcatgagacatagagatgatgaaagacaaaaagtatgtttggacataatttataagatgatgccaaagttaaaaccagtagaactccgagaacttctgaaccccgttgtggaattcgtttcccatccttctacaacatgtagggaacaaatgtataatattctcatgtggattcatgataattacagagatccagaaagtgagacagataatgactcccaggaaatatttaagttggcaaaagatgtgctgattcaaggattgatcgatgagaaccctggacttcaattaattattcgaaatttctggagccatgaaactaggttaccttcaaataccttggaccggttgctggcactaaattccttatattctcctaagatagaagtgcactttttaagtttagcaacaaattttctgctcgaaatgaccagcatgagcccagattatccaaaccccatgttcgagcatcctctgtcagaatgcgaatttcaggaatataccattgattctgattggcgtttccgaagtactgttctcactccgatgtttgtggagacccaggcctcccagggcactctccagacccgtacccaggaagggtccctctcagctcgctggccagtggcagggcagataagggccacccagcagcagcatgacttcacactgacacagactgcagatggaagaagctcatttgattggctgaccgggagcagcactgacccgctggtcgaccacaccagtccctcatctgactccttgctgtttgcccacaagaggagtgaaaggttacagagagcacccttgaagtcagtggggcctgattttgggaaaaaaaggctgggccttccaggggacgaggtggataacaaagtgaaaggtgcggccggccggacggacctactacgactgcgcagacggtttatgagggaccaggagaagctcagtttgatgtatgccagaaaaggcgttgctgagcaaaaacgagagaaggaaatcaagagtgagttaaaaatgaagcaggatgcccaggtcgttctgtacagaagctaccggcacggagaccttcctgacattcagatcaagcacagcagcctcatcaccccgttacaggccgtggcccagagggacccaataattgcaaaacagctctttagcagcttgttttctggaattttgaaagagatggataaatttaagacactgtctgaaaaaaacaacatcactcaaaagttgcttcaagacttcaatcgttttcttaataccaccttctctttctttccaccctttgtctcttgtattcaggacattagctgtcagcacgcagccctgctgagcctcgacccagcggctgttagcgctggttgcctggccagcctacagcagcccgtgggcatccgcctgctagaggaggctctgctccgcctgctgcctgctgagctgcctgccaagcgagtccgtgggaaggcccgcctccctcctgatgtcctcagatgggtggagcttgctaagctgtatagatcaattggagaatacgacgtcctccgtgggatttttaccagtgagataggaacaaagcaaatcactcagagtgcattattagcagaagccagaagtgattattctgaagctgctaagcagtatgatgaggctctcaataaacaagactgggtagatggtgagcccacagaagccgagaaggatttttgggaacttgcatcccttgactgttacaaccaccttgctgagtggaaatcacttgaatactgttctacagccagtatagacagtgagaaccccccagacctaaataaaatctggagtgaaccattttatcaggaaacatatctaccttacatgatccgcagcaagctgaagctgctgctccagggagaggctgaccagtccctgctgacatttattgacaaagctatgcacggggagctccagaaggcgattctagagcttcattacagtcaagagctgagtctgctttacctcctgcaagatgatgttgacagagccaaatattacattcaaaatggcattcagagttttatgcagaattattctagtattgatgtcctcttacaccaaagtagactcaccaaattgcagtctgtacaggctttaacagaaattcaggagttcatcagctttataagcaaacaaggcaatttatcatctcaagttccccttaagagacttctgaacacctggacaaacagatatccagatgctaaaatggacccaatgaacatctgggatgacatcatcacaaatcgatgtttctttctcagcaaaatagaggagaagcttacccctcttccagaagataatagtatgaatgtggatcaagatggagaccccagtgacaggatggaagtgcaagagcaggaagaagatatcagctccctgatcaggagttgcaagttttccatgaaaatgaagatgatagacagtgcccggaagcagaacaatttctcacttgctatgaaactactgaaggagctgcataaagagtcaaaaaccagagacgattggctggtgagctgggtgcagagctactgccgcctgagccactgccggagccggtcccagggctgctctgagcaggtgctcactgtgctgaaaacagtctctttgttggatgagaacaacgtgtcaagctacttaagcaaaaatattctggctttccgtgaccagaacattctcttgggtacaacttacaggatcatagcgaatgctctcagcagtgagccagcctgccttgctgaaatcgaggaggacaaggctagaagaatcttagagctttctggatccagttcagaggattcagagaaggtgatcgcgggtctgtaccagagagcattccagcacctctctgaggctgtgcaggcggctgaggaggaggcccagcctccctcctggagctgtgggcctgcagctggggtgattgatgcttacatgacgctggcagatttctgtgaccaacagctgcgcaaggaggaagagaatgcatcagttattgattctgcagaactgcaggcgtatccagcacttgtggtggagaaaatgttgaaagctttaaaattaaattccaatgaagccagattgaagtttcctagattacttcagattatagaacggtatccagaggagactttgagcctcatgacaaaagagatctcttccgttccctgctggcagttcatcagctggatcagccacatggtggccttactggacaaagaccaagccgttgctgttcagcactctgtggaagaaatcactgataactacccgcaggctattgtttatcccttcatcataagcagcgaaagctattccttcaaggatacttctactggtcataagaataaggagtttgtggcaaggattaaaagtaagttggatcaaggaggagtgattcaagattttattaatgccttagatcagctctctaatcctgaactgctctttaaggattggagcaatgatgtaagagctgaactagcaaaaacccctgtaaataaaaaaaacattgaaaaaatgtatgaaagaatgtatgcagccttgggtgacccaaaggctccaggcctgggggcctttagaaggaagtttattcagacttttggaaaagaatttgataaacattttgggaaaggaggttctaaactactgagaatgaagctcagtgacttcaacgacattaccaacatgctacttttaaaaatgaacaaagactcaaagccccctgggaatctgaaagaatgttcaccctggatgagcgacttcaaagtggagttcctgagaaatgagctggagattcccggtcagtatgacggtaggggaaagccattgccagagtaccacgtgcgaatcgccgggtttgatgagcgggtgacagtcatggcgtctctgcgaaggcccaagcgcatcatcatccgtggccatgacgagagggaacaccctttcctggtgaagggtggcgaggacctgcggcaggaccagcgcgtggagcagctcttccaggtcatgaatgggatcctggcccaagactccgcctgcagccagagggccctgcagctgaggacctatagcgttgtgcccatgacctccaggttaggattaattgagtggcttgaaaatactgttaccttgaaggaccttcttttgaacaccatgtcccaagaggagaaggcggcttacctgagtgatcccagggcaccgccgtgtgaatataaagattggctgacaaaaatgtcaggaaaacatgatgttggagcttacatgctaatgtataagggcgctaatcgtactgaaacagtcacgtcttttagaaaacgagaaagtaaagtgcctgctgatctcttaaagcgggccttcgtgaggatgagtacaagccctgaggctttcctggcgctccgctcccacttcgccagctctcacgctctgatatgcatcagccactggatcctcgggattggagacagacatctgaacaactttatggtggccatggagactggcggcgtgatcgggatcgactttgggcatgcgtttggatccgctacacagtttctgccagtccctgagttgatgccttttcggctaactcgccagtttatcaatctgatgttaccaatgaaagaaacgggccttatgtacagcatcatggtacacgcactccgggccttccgctcagaccctggcctgctcaccaacaccatggatgtgtttgtcaaggagccctcctttgattggaaaaattttgaacagaaaatgctgaaaaaaggagggtcatggattcaagaaataaatgttgctgaaaaaaattggtacccccgacagaaaatatgttacgctaagagaaagttagcaggtgccaatccagcagtcattacttgtgatgagctactcctgggtcatgagaaggcccctgccttcagagactatgtggctgtggcacgaggaagcaaagatcacaacattcgtgcccaagaaccagagagtgggctttcagaagagactcaagtgaagtgcctgatggaccaggcaacagaccccaacatccttggcagaacctgggaaggatgggagccctggatgtgaggtctgtgggagtctgcagatagaaagcattacattgtttaaagaatctactatactttggttggcagcattccatgagctgattttcctgaaacactaaagagaaatgtcttttgtgctacagtttcgtagcatgagtttaaatcaagattatgatgagtaaatgtgtatgggttaaatcaaagataaggttatagtaacatcaaagattaggtgaggtttatagaaagatagatatccaggcttaccaaagtattaagtcaagaatataatatgtgatcagctttcaaagcatttacaagtgctgcaagttagtgaaacagctgtctccgtaaatggaggaaatgtggggaagccttggaatgcccttctggttctggcacattggaaagcacactcagaaggcttcatcaccaagattttgggagagtaaagctaagtatagttgatgtaacattgtagaagcagcataggaacaataagaacaataggtaaagctataattatggcttatatttagaaatgactgcatttgatattttaggatatttttctaggttttttcctttcattttattctcttctagttttgacattttatgatagatttgctctctagaaggaaacgtctttatttaggagggcaaaaattttggtcatagcattcacttttgctattccaatctacaactggaagatacataaaagtgctttgcattgaatttgggataacttcaaaaatcccatggttgttgttagggatagtactaagcatttcagttccaggagaataaaagaaattcctatttgaaatgaattcctcatttggaggaaaaaaagcatgcattctagcacaacaagatgaaattatggaatacaaaagtggctccttcccatgtgcagtccctgtccccccccgccagtcctccacacccaaactgtttctgattggcttttagctttttgttgtttttttttttccttctaacacttgtatttggaggctcttctgtgattttgagaagtatactcttgagtgtttaataaagtttttttccaaaagta

SEQ ID NO: 134790 - DNA, 10811 bp, Homo sapiens
tcgagctcggtccagatcacctttccatccggctgagctttgcagtgccctttagagagatgaaacctgtcattttcctggatgtgttcctgcctcgagtcacagaattagcgctcacagccagtgacagacaaactaaagttgcagcctgtgaacttttacatagcatggttatgtttatgttgggcaaagccacgcagatgccagaagggggacagggagccccacccatgtaccagctctataagcggacgtttcctgtgctgcttcgacttgcgtgtgatgttgatcaggtgacaaggcaactgtatgagccactagttatgcagctgattcactggttcactaacaacaagaaatttgaaagtcaggatactgttgccttactagaagctatattggatggaattgtggaccctgttgacagtactttaagagatttttgtggtcggtgtattcgagaattccttaaatggtccattaagcaaataacaccacagcagcaggagaagagtccagtaaacaccaaatcgcttttcaagcgactttatagccttgcgcttcaccccaatgctttcaagaggctgggagcatcacttgcctttaataatatctacagggaattcagggaagaagagtctctggtggaacagtttgtgtttgaagccttggtgatatacatggagagtctggccttagcacatgcagatgagaagtccttaggtacaattcaacagtgttgtgatgccattgatcacctatgccgcatcattgaaaagaagcatgtttctttaaataaagcaaagaaacgacgtttgccgcgaggatttccaccttccgcatcattgtgtttattggatctggtcaagtggcttttagctcattgtgggaggccccagacagaatgtcgacacaaatccattgaactcttttataaattcgttcctttattgccaggcaacagatcccctaatttgtggctgaaagatgttctcaaggaagaaggtgtctcttttctcatcaacacctttgaggggggtggctgtggccagccctcgggcatcctggcccagcccaccctcttgtaccttcgggggccattcagcctgcaggccacgctatgctggctggacctgctcctggccgcgttggagtgctacaacacgttcattggcgagagaactgtaggagcgctccaggtcctaggtactgaagcccagtcttcacttttgaaagcagtggctttcttcttagaaagcattgccatgcatgacattatagcagcagaaaagtgctttggcactggggcagcaggtaacagaacaagcccacaagagggagaaaggtacaactacagcaaatgcaccgttgtggtccggattatggagtttaccacgactctgctaaacacctccccggaaggatggaagctcctgaagaaggacttgtgtaatacacacctgatgagagtcctggtgcagacgctgtgtgagcccgcaagcataggtttcaacatcggagacgtccaggttatggctcatcttcctgatgtttgtgtgaatctgatgaaagctctaaagatgtccccatacaaagatatcctagagacccatctgagagagaaaataacagcacagagcattgaggagctttgtgccgtcaacttgtatggccctgacgcgcaagtggacaggagcaggctggctgctgttgtgtctgcctgtaaacagcttcacagagctgggcttctgcataatatattaccgtctcagtccacagatttgcatcattctgttggcacagaacttctttccctggtttataaaggcattgcccctggagatgagagacagtgtctgccttctctagacctcagttgtaagcagctggccagcggacttctggagttagcctttgcttttggaggactgtgtgagcgccttgtgagtcttctcctgaacccagcggtgctgtccacggcgtccttgggcagctcacagggcagcgtcatccacttctcccatggggagtatttctatagcttgttctcagaaacgatcaacacggaattattgaaaaatctggatcttgctgtattggagctcatgcagtcttcagtggataataccaaaatggtgagtgccgttttgaacggcatgttagaccagagcttcagggagcgagcaaaccagaaacaccaaggactgaaacttgcgactacaattctgcaacactggaagaagtgtgattcatggtgggccaaagattcccctctcgaaactaaaatggcagtgctggccttactggcaaaaattttacagattgattcatctgtatcttttaatacaagtcatggttcattccctgaagtctttacaacatatattagtctacttgctgacacaaagctggatctacatttaaagggccaagctgtcactcttcttccattcttcaccagcctcactggaggcagtctggaggaacttagacgtgttctggagcagctcatcgttgctcacttccccatgcagtccagggaatttcctccaggaactccgcggttcaataattatgtggactgcatgaaaaagtttctagatgcattggaattatctcaaagccctatgttgttggaattgatgacagaagttctttgtcgggaacagcagcatgtcatggaagaattatttcaatccagtttcaggaggattgccagaaggggttcatgtgtcacacaagtaggccttctggaaagcgtgtatgaaatgttcaggaaggatgacccccgcctaagtttcacacgccagtcctttgtggaccgctccctcctcactctgctgtggcactgtagcctggatgctttgagagaattcttcagcacaattgtggtggatgccattgatgtgttgaagtccaggtttacaaagctaaatgaatctacctttgatactcaaatcaccaagaagatgggctactataagattctagacgtgatgtattctcgccttcccaaagatgatgttcatgctaaggaatcaaaaattaatcaagttttccatggctcgtgtattacagaaggaaatgaacttacaaagacattgattaaattgtgctacgatgcatttacagagaacatggcaggagagaatcagctgctggagaggagaagactttaccattgtgcagcatacaactgcgccatatctgtcatctgctgtgtcttcaatgagttaaaattttaccaaggttttctgtttagtgaaaaaccagaaaagaacttgcttatttttgaaaatctgatcgacctgaagcgccgctataattttcctgtagaagttgaggttcctatggaaagaaagaaaaagtacattgaaattaggaaagaagccagagaagcagcaaatggggattcagatggtccttcctatatgtcttccctgtcatatttggcagacagtaccctgagtgaggaaatgagtcaatttgatttctcaaccggagttcagagctattcatacagctcccaagaccctagacctgccactggtcgttttcggagacgggagcagcgggaccccacggtgcatgatgatgtgctggagctggagatggacgagctcaatcggcatgagtgcatggcgcccctgacggccctggtcaagcacatgcacagaagcctgggcccgcctcaaggagaagaggattcagtgccaagagatcttccttcttggatgaaattcctccatggcaaactgggaaatccaatagtaccattaaatatccgtctcttcttagccaagcttgttattaatacagaagaggtctttcgcccttacgcgaagcactggcttagccccttgctgcagctggctgcttctgaaaacaatggaggagaaggaattcactacatggtggttgagatagtggccactattctttcatggacaggcttggccactccaacaggggtccctaaagatgaagtgttagcaaatcgattgcttaatttcctaatgaaacatgtctttcatccaaaaagagctgtgtttagacacaaccttgaaattataaagacccttgtcgagtgctggaaggattgtttatccatcccttataggttaatatttgaaaagttttccggtaaagatcctaattctaaagacaactcagtagggattcaattgctaggcatcgtgatggccaatgacctgcctccctatgacccacagtgtggcatccagagtagcgaatacttccaggctttggtgaataatatgtcctttgtaagatataaagaagtgtatgccgctgcagcagaagttctaggacttatacttcgatatgttatggagagaaaaaacatactggaggagtctctgtgtgaactggttgcgaaacaattgaagcaacatcagaatactatggaggacaagtttattgtgtgcttgaacaaagtgaccaagagcttccctcctcttgcagacaggttcatgaatgctgtgttctttctgctgccaaaatttcatggagtgttgaaaacactctgtctggaggtggtactttgtcgtgtggagggaatgacagagctgtacttccagttaaagagcaaggacttcgttcaagtcatgagacatagagatgatgaaagacaaaaagtatgtttggacataatttataagatgatgccaaagttaaaaccagtagaactccgagaacttctgaaccccgttgtggaattcgtttcccatccttctacaacatgtagggaacaaatgtataatattctcatgtggattcatgataattacagagatccagaaagtgagacagataatgactcccaggaaatatttaagttggcaaaagatgtgctgattcaaggattgatcgatgagaaccctggacttcaattaattattcgaaatttctggagccatgaaactaggttaccttcaaataccttggaccggttgctggcactaaattccttatattctcctaagatagaagtgcactttttaagtttagcaacaaattttctgctcgaaatgaccagcatgagcccagattatccaaaccccatgttcgagcatcctctgtcagaatgcgaatttcaggaatataccattgattctgattggcgtttccgaagtactgttctcactccgatgtttgtggagacccaggcctcccagggcactctccagacccgtacccaggaagggtccctctcagctcgctggccagtggcagggcagataagggccacccagcagcagcatgacttcacactgacacagactgcagatggaagaagctcatttgattggctgaccgggagcagcactgacccgctggtcgaccacaccagtccctcatctgactccttgctgtttgcccacaagaggagtgaaaggttacagagagcacccttgaagtcagtggggcctgattttgggaaaaaaaggctgggccttccaggggacgaggtggataacaaagtgaaaggtgcggccggccggacggacctactacgactgcgcagacggtttatgagggaccaggagaagctcagtttgatgtatgccagaaaaggcgttgctgagcaaaaacgagagaaggaaatcaagagtgagttaaaaatgaagcaggatgcccaggtcgttctgtacagaagctaccggcacggagaccttcctgacattcagatcaagcacagcagcctcatcaccccgttacaggccgtggcccagagggacccaataattgcaaaacagctctttagcagcttgttttctggaattttgaaagagatggataaatttaagacactgtctgaaaaaaacaacatcactcaaaagttgcttcaagacttcaatcgttttcttaataccaccttctctttctttccaccctttgtctcttgtattcaggacattagctgtcagcacgcagccctgctgagcctcgacccagcggctgttagcgctggttgcctggccagcctacagcagcccgtgggcatccgcctgctagaggaggctctgctccgcctgctgcctgctgagctgcctgccaagcgagtccgtgggaaggcccgcctccctcctgatgtcctcagatgggtggagcttgctaagctgtatagatcaattggagaatacgacgtcctccgtgggatttttaccagtgagataggaacaaagcaaatcactcagagtgcattattagcagaagccagaagtgattattctgaagctgctaagcagtatgatgaggctctcaataaacaagactgggtagatggtgagcccacagaagccgagaaggatttttgggaacttgcatcccttgactgttacaaccaccttgctgagtggaaatcacttgaatactgttctacagccagtatagacagtgagaaccccccagacctaaataaaatctggagtgaaccattttatcaggaaacatatctaccttacatgatccgcagcaagctgaagctgctgctccagggagaggctgaccagtccctgctgacatttattgacaaagctatgcacggggagctccagaaggcgattctagagcttcattacagtcaagagctgagtctgctttacctcctgcaagatgatgttgacagagccaaatattacattcaaaatggcattcagagttttatgcagaattattctagtattgatgtcctcttacaccaaagtagactcaccaaattgcagtctgtacaggctttaacagaaattcaggagttcatcagctttataagcaaacaaggcaatttatcatctcaagttccccttaagagacttctgaacacctggacaaacagatatccagatgctaaaatggacccaatgaacatctgggatgacatcatcacaaatcgatgtttctttctcagcaaaatagaggagaagcttacccctcttccagaagataatagtatgaatgtggatcaagatggagaccccagtgacaggatggaagtgcaagagcaggaagaagatatcagctccctgatcaggagttgcaagttttccatgaaaatgaagatgatagacagtgcccggaagcagaacaatttctcacttgctatgaaactactgaaggagctgcataaagagtcaaaaaccagagacgattggctggtgagctgggtgcagagctactgccgcctgagccactgccggagccggtcccagggctgctctgagcaggtgctcactgtgctgaaaacagtctctttgttggatgagaacaacgtgtcaagctacttaagcaaaaatattctggctttccgtgaccagaacattctcttgggtacaacttacaggatcatagcgaatgctctcagcagtgagccagcctgccttgctgaaatcgaggaggacaaggctagaagaatcttagagctttctggatccagttcagaggattcagagaaggtgatcgcgggtctgtaccagagagcattccagcacctctctgaggctgtgcaggcggctgaggaggaggcccagcctccctcctggagctgtgggcctgcagctggggtgattgatgcttacatgacgctggcagatttctgtgaccaacagctgcgcaaggaggaagagaatgcatcagttattgattctgcagaactgcaggcgtatccagcacttgtggtggagaaaatgttgaaagctttaaaattaaattccaatgaagccagattgaagtttcctagattacttcagattatagaacggtatccagaggagactttgagcctcatgacaaaagagatctcttccgttccctgctggcagttcatcagctggatcagccacatggtggccttactggacaaagaccaagccgttgctgttcagcactctgtggaagaaatcactgataactacccgcaggctattgtttatcccttcatcataagcagcgaaagctattccttcaaggatacttctactggtcataagaataaggagtttgtggcaaggattaaaagtaagttggatcaaggaggagtgattcaagattttattaatgccttagatcagctctctaatcctgaactgctctttaaggattggagcaatgatgtaagagctgaactagcaaaaacccctgtaaataaaaaaaacattgaaaaaatgtatgaaagaatgtatgcagccttgggtgacccaaaggctccaggcctgggggcctttagaaggaagtttattcagacttttggaaaagaatttgataaacattttgggaaaggaggttctaaactactgagaatgaagctcagtgacttcaacgacattaccaacatgctacttttaaaaatgaacaaagactcaaagccccctgggaatctgaaagaatgttcaccctggatgagcgacttcaaagtggagttcctgagaaatgagctggagattcccggtcagtatgacggtaggggaaagccattgccagagtaccacgtgcgaatcgccgggtttgatgagcgggtgacagtcatggcgtctctgcgaaggcccaagcgcatcatcatccgtggccatgacgagagggaacaccctttcctggtgaagggtggcgaggacctgcggcaggaccagcgcgtggagcagctcttccaggtcatgaatgggatcctggcccaagactccgcctgcagccagagggccctgcagctgaggacctatagcgttgtgcccatgacctccaggttaggattaattgagtggcttgaaaatactgttaccttgaaggaccttcttttgaacaccatgtcccaagaggagaaggcggcttacctgagtgatcccagggcaccgccgtgtgaatataaagattggctgacaaaaatgtcaggaaaacatgatgttggagcttacatgctaatgtataagggcgctaatcgtactgaaacagtcacgtcttttagaaaacgagaaagtaaagtgcctgctgatctcttaaagcgggccttcgtgaggatgagtacaagccctgaggctttcctggcgctccgctcccacttcgccagctctcacgctctgatatgcatcagccactggatcctcgggattggagacagacatctgaacaactttatggtggccatggagactggcggcgtgatcgggatcgactttgggcatgcgtttggatccgctacacagtttctgccagtccctgagttgatgccttttcggctaactcgccagtttatcaatctgatgttaccaatgaaagaaacgggccttatgtacagcatcatggtacacgcactccgggccttccgctcagaccctggcctgctcaccaacaccatggatgtgtttgtcaaggagccctcctttgattggaaaaattttgaacagaaaatgctgaaaaaaggagggtcatggattcaagaaataaatgttgctgaaaaaaattggtacccccgacagaaaatatgttacgctaagagaaagttagcaggtgccaatccagcagtcattacttgtgatgagctactcctgggtcatgagaaggcccctgccttcagagactatgtggctgtggcacgaggaagcaaagatcacaacattcgtgcccaagaaccagagagtgggctttcagaagagactcaagtgaagtgcctgatggaccaggcaacagaccccaacatccttggcagaacctgggaaggatgggagccctggatgtgaggtctgtgggagtctgcagatagaaagcattacattgtttaaagaatctactatactttggttggcagcattccatgagctgattttcctgaaacactaaagagaaatgtcttttgtgctacagtttcgtagcatgagtttaaatcaagattatgatgagtaaatgtgtatgggttaaatcaaagataaggttatagtaacatcaaagattaggtgaggtttatagaaagatagatatccaggcttaccaaagtattaagtcaagaatataatatgtgatcagctttcaaagcatttacaagtgctgcaagttagtgaaacagctgtctccgtaaatggaggaaatgtggggaagccttggaatgcccttctggttctggcacattggaaagcacactcagaaggcttcatcaccaagattttgggagagtaaagctaagtatagttgatgtaacattgtagaagcagcataggaacaataagaacaataggtaaagctataattatggcttatatttagaaatgactgcatttgatattttaggatatttttctaggttttttcctttcattttattctcttctagttttgacattttatgatagatttgctctctagaaggaaacgtctttatttaggagggcaaaaattttggtcatagcattcacttttgctattccaatctacaactggaagatacataaaagtgctttgcattgaatttgggataacttcaaaaatcccatggttgttgttagggatagtactaagcatttcagttccaggagaataaaagaaattcctatttgaaatgaattcctcatttggaggaaaaaaagcatgcattctagcacaacaagatgaaattatggaatacaaaagtggctccttcccatgtgcagtccctgtccccccccgccagtcctccacacccaaactgtttctgattggcttttagctttttgttgtttttttttttccttctaacacttgtatttggaggctcttctgtgattttgagaagtatactcttgagtgtttaataaagtttttttccaaaagta

SEQ ID NO: 134791 - DNA, 13675 bp, Homo sapiens
  misc_feature (13242)..(13242): n is a, c, g, or t
  misc_feature (13248)..(13248): n is a, c, g, or t
  misc_feature (13256)..(13256): n is a, c, g, or t
  misc_feature (13277)..(13277): n is a, c, g, or t
  misc_feature (13295)..(13295): n is a, c, g, or t
  misc_feature (13298)..(13298): n is a, c, g, or t
ggggcatttccgggtccgggccgagcgggcgcacgcgcgggagcgggactcggcggcatggcgggctccggagccggtgtgcgttgctccctgctgcggctgcaggagaccttgtccgctgcggaccgctgcggtgctgccctggccggtcatcaactgatccgcggcctggggcaggaatgcgtcctgagcagcagccccgcggtgctggcattacagacatctttagttttttccagagatttcggtttgcttgtatttgtccggaagtcactcaacagtattgaatttcgtgaatgtagagaagaaatcctaaagtttttatgtattttcttagaaaaaatgggccagaagatcgcaccttactctgttgaaattaagaacacttgtaccagtgtttatacaaaagatagagctgctaaatgtaaaattccagccctggaccttcttattaagttacttcagacttttagaagttctagactcatggatgaatttaaaattggagaattatttagtaaattctatggagaacttgcattgaaaaaaaaaataccagatacagttttagaaaaagtatatgagctcctaggattattgggtgaagttcatcctagtgagatgataaataatgcagaaaacctgttccgcgcttttctgggtgaacttaagacccagatgacatcagcagtaagagagcccaaactacctgttctggcaggatgtctgaaggggttgtcctcacttctgtgcaacttcactaagtccatggaagaagatccccagacttcaagggagatttttaattttgtactaaaggcaattcgtcctcagattgatctgaagagatatgctgtgccctcagctggcttgcgcctatttgccctgcatgcatctcagtttagcacctgccttctggacaactacgtgtctctatttgaagtcttgttaaagtggtgtgcccacacaaatgtagaattgaaaaaagctgcactttcagccctggaatcctttctgaaacaggtttctaatatggtggcgaaaaatgcagaaatgcataaaaataaactgcagtactttatggagcagttttatggaatcatcagaaatgtggattcgaacaacaaggagttatctattgctatccgtggatatggactttttgcaggaccgtgcaaggttataaacgcaaaagatgttgacttcatgtacgttgagctcattcagcgctgcaagcagatgttcctcacccagacagacactggtgacgaccgtgtttatcagatgccaagcttcctccagtctgttgcaagcgtcttgctgtaccttgacacagttcctgaggtgtatactccagttctggagcacctcgtggtgatgcagatagacagtttcccacagtacagtccaaaaatgcagctggtgtgttgcagagccatagtgaaggtgttcctagctttggcagcaaaagggccagttctcaggaattgcattagtactgtggtgcatcagggtttaatcagaatatgttctaaaccagtggtccttccaaagggccctgagtctgaatctgaagaccaccgtgcttcaggggaagtcagaactggcaaatggaaggtgcccacatacaaagactacgtggatctcttcagacatctcctgagctctgaccagatgatggattctattttagcagatgaagcatttttctctgtgaattcctccagtgaaagtctgaatcatttactttatgatgaatttgtaaaatccgttttgaagattgttgagaaattggatcttacacttgaaatacagactgttggggaacaagagaatggagatgaggcgcctggtgtttggatgatcccaacttcagatccagcggctaacttgcatccagctaaacctaaagatttttcggctttcattaacctggtggaattttgcagagagattctccctgagaaacaagcagaattttttgaaccatgggtgtactcattttcatatgaattaattttgcaatctacaaggttgcccctcatcagtggtttctacaaattgctttctattacagtaagaaatgccaagaaaataaaatatttcgagggagttagtccaaagagtctgaaacactctcctgaagacccagaaaagtattcttgctttgctttatttgtgaaatttggcaaagaggtggcagttaaaatgaagcagtacaaagatgaacttttggcctcttgtttgacctttcttctgtccttgccacacaacatcattgaactcgatgttagagcctacgttcctgcactgcagatggctttcaaactgggcctgagctatacccccttggcagaagtaggcctgaatgctctagaagaatggtcaatttatattgacagacatgtaatgcagccttattacaaagacattctcccctgcctggatggatacctgaagacttcagccttgtcagatgagaccaagaataactgggaagtgtcagctctttctcgggctgcccagaaaggatttaataaagtggtgttaaagcatctgaagaagacaaagaacctttcatcaaacgaagcaatatccttagaagaaataagaattagagtagtacaaatgcttggatctctaggaggacaaataaacaaaaatcttctgacagtcacgtcctcagatgagatgatgaagagctatgtggcctgggacagagagaagcggctgagctttgcagtgccctttagagagatgaaacctgtcattttcctggatgtgttcctgcctcgagtcacagaattagcgctcacagccagtgacagacaaactaaagttgcagcctgtgaacttttacatagcatggttatgtttatgttgggcaaagccacgcagatgccagaagggggacagggagccccacccatgtaccagctctataagcggacgtttcctgtgctgcttcgacttgcgtgtgatgttgatcaggtgacaaggcaactgtatgagccactagttatgcagctgattcactggttcactaacaacaagaaatttgaaagtcaggatactgttgccttactagaagctatattggatggaattgtggaccctgttgacagtactttaagagatttttgtggtcggtgtattcgagaattccttaaatggtccattaagcaaataacaccacagcagcaggagaagagtccagtaaacaccaaatcgcttttcaagcgactttatagccttgcgcttcaccccaatgctttcaagaggctgggagcatcacttgcctttaataatatctacagggaattcagggaagaagagtctctggtggaacagtttgtgtttgaagccttggtgatatacatggagagtctggccttagcacatgcagatgagaagtccttaggtacaattcaacagtgttgtgatgccattgatcacctatgccgcatcattgaaaagaagcatgtttctttaaataaagcaaagaaacgacgtttgccgcgaggatttccaccttccgcatcattgtgtttattggatctggtcaagtggcttttagctcattgtgggaggccccagacagaatgtcgacacaaatccattgaactcttttataaattcgttcctttattgccaggcaacagatcccctaatttgtggctgaaagatgttctcaaggaagaaggtgtctcttttctcatcaacacctttgaggggggtggctgtggccagccctcgggcatcctggcccagcccaccctcttgtaccttcgggggccattcagcctgcaggccacgctatgctggctggacctgctcctggccgcgttggagtgctacaacacgttcattggcgagagaactgtaggagcgctccaggtcctaggtactgaagcccagtcttcacttttgaaagcagtggctttcttcttagaaagcattgccatgcatgacattatagcagcagaaaagtgctttggcactggggcagcaggtaacagaacaagcccacaagagggagaaaggtacaactacagcaaatgcaccgttgtggtccggattatggagtttaccacgactctgctaaacacctccccggaaggatggaagctcctgaagaaggacttgtgtaatacacacctgatgagagtcctggtgcagacgctgtgtgagcccgcaagcataggtttcaacatcggagacgtccaggttatggctcatcttcctgatgtttgtgtgaatctgatgaaagctctaaagatgtccccatacaaagatatcctagagacccatctgagagagaaaataacagcacagagcattgaggagctttgtgccgtcaacttgtatggccctgacgcgcaagtggacaggagcaggctggctgctgttgtgtctgcctgtaaacagcttcacagagctgggcttctgcataatatattaccgtctcagtccacagatttgcatcattctgttggcacagaacttctttccctggtttataaaggcattgcccctggagatgagagacagtgtctgccttctctagacctcagttgtaagcagctggccagcggacttctggagttagcctttgcttttggaggactgtgtgagcgccttgtgagtcttctcctgaacccagcggtgctgtccacggcgtccttgggcagctcacagggcagcgtcatccacttctcccatggggagtatttctatagcttgttctcagaaacgatcaacacggaattattgaaaaatctggatcttgctgtattggagctcatgcagtcttcagtggataataccaaaatggtgagtgccgttttgaacggcatgttagaccagagcttcagggagcgagcaaaccagaaacaccaaggactgaaacttgcgactacaattctgcaacactggaagaagtgtgattcatggtgggccaaagattcccctctcgaaactaaaatggcagtgctggccttactggcaaaaattttacagattgattcatctgtatcttttaatacaagtcatggttcattccctgaagtctttacaacatatattagtctacttgctgacacaaagctggatctacatttaaagggccaagctgtcactcttcttccattcttcaccagcctcactggaggcagtctggaggaacttagacgtgttctggagcagctcatcgttgctcacttccccatgcagtccagggaatttcctccaggaactccgcggttcaataattatgtggactgcatgaaaaagtttctagatgcattggaattatctcaaagccctatgttgttggaattgatgacagaagttctttgtcgggaacagcagcatgtcatggaagaattatttcaatccagtttcaggaggattgccagaaggggttcatgtgtcacacaagtaggccttctggaaagcgtgtatgaaatgttcaggaaggatgacccccgcctaagtttcacacgccagtcctttgtggaccgctccctcctcactctgctgtggcactgtagcctggatgctttgagagaattcttcagcacaattgtggtggatgccattgatgtgttgaagtccaggtttacaaagctaaatgaatctacctttgatactcaaatcaccaagaagatgggctactataagattctagacgtgatgtattctcgccttcccaaagatgatgttcatgctaaggaatcaaaaattaatcaagttttccatggctcgtgtattacagaaggaaatgaacttacaaagacattgattaaattgtgctacgatgcatttacagagaacatggcaggagagaatcagctgctggagaggagaagactttaccattgtgcagcatacaactgcgccatatctgtcatctgctgtgtcttcaatgagttaaaattttaccaaggttttctgtttagtgaaaaaccagaaaagaacttgcttatttttgaaaatctgatcgacctgaagcgccgctataattttcctgtagaagttgaggttcctatggaaagaaagaaaaagtacattgaaattaggaaagaagccagagaagcagcaaatggggattcagatggtccttcctatatgtcttccctgtcatatttggcagacagtaccctgagtgaggaaatgagtcaatttgatttctcaaccggagttcagagctattcatacagctcccaagaccctagacctgccactggtcgttttcggagacgggagcagcgggaccccacggtgcatgatgatgtgctggagctggagatggacgagctcaatcggcatgagtgcatggcgcccctgacggccctggtcaagcacatgcacagaagcctgggcccgcctcaaggagaagaggattcagtgccaagagatcttccttcttggatgaaattcctccatggcaaactgggaaatccaatagtaccattaaatatccgtctcttcttagccaagcttgttattaatacagaagaggtctttcgcccttacgcgaagcactggcttagccccttgctgcagctggctgcttctgaaaacaatggaggagaaggaattcactacatggtggttgagatagtggccactattctttcatggacaggcttggccactccaacaggggtccctaaagatgaagtgttagcaaatcgattgcttaatttcctaatgaaacatgtctttcatccaaaaagagctgtgtttagacacaaccttgaaattataaagacccttgtcgagtgctggaaggattgtttatccatcccttataggttaatatttgaaaagttttccggtaaagatcctaattctaaagacaactcagtagggattcaattgctaggcatcgtgatggccaatgacctgcctccctatgacccacagtgtggcatccagagtagcgaatacttccaggctttggtgaataatatgtcctttgtaagatataaagaagtgtatgccgctgcagcagaagttctaggacttatacttcgatatgttatggagagaaaaaacatactggaggagtctctgtgtgaactggttgcgaaacaattgaagcaacatcagaatactatggaggacaagtttattgtgtgcttgaacaaagtgaccaagagcttccctcctcttgcagacaggttcatgaatgctgtgttctttctgctgccaaaatttcatggagtgttgaaaacactctgtctggaggtggtactttgtcgtgtggagggaatgacagagctgtacttccagttaaagagcaaggacttcgttcaagtcatgagacatagagatgatgaaagacaaaaagtatgtttggacataatttataagatgatgccaaagttaaaaccagtagaactccgagaacttctgaaccccgttgtggaattcgtttcccatccttctacaacatgtagggaacaaatgtataatattctcatgtggattcatgataattacagagatccagaaagtgagacagataatgactcccaggaaatatttaagttggcaaaagatgtgctgattcaaggattgatcgatgagaaccctggacttcaattaattattcgaaatttctggagccatgaaactaggttaccttcaaataccttggaccggttgctggcactaaattccttatattctcctaagatagaagtgcactttttaagtttagcaacaaattttctgctcgaaatgaccagcatgagcccagattatccaaaccccatgttcgagcatcctctgtcagaatgcgaatttcaggaatataccattgattctgattggcgtttccgaagtactgttctcactccgatgtttgtggagacccaggcctcccagggcactctccagacccgtacccaggaagggtccctctcagctcgctggccagtggcagggcagataagggccacccagcagcagcatgacttcacactgacacagactgcagatggaagaagctcatttgattggctgaccgggagcagcactgacccgctggtcgaccacaccagtccctcatctgactccttgctgtttgcccacaagaggagtgaaaggttacagagagcacccttgaagtcagtggggcctgattttgggaaaaaaaggctgggccttccaggggacgaggtggataacaaagtgaaaggtgcggccggccggacggacctactacgactgcgcagacggtttatgagggaccaggagaagctcagtttgatgtatgccagaaaaggcgttgctgagcaaaaacgagagaaggaaatcaagagtgagttaaaaatgaagcaggatgcccaggtcgttctgtacagaagctaccggcacggagaccttcctgacattcagatcaagcacagcagcctcatcaccccgttacaggccgtggcccagagggacccaataattgcaaaacagctctttagcagcttgttttctggaattttgaaagagatggataaatttaagacactgtctgaaaaaaacaacatcactcaaaagttgcttcaagacttcaatcgttttcttaataccaccttctctttctttccaccctttgtctcttgtattcaggacattagctgtcagcacgcagccctgctgagcctcgacccagcggctgttagcgctggttgcctggccagcctacagcagcccgtgggcatccgcctgctagaggaggctctgctccgcctgctgcctgctgagctgcctgccaagcgagtccgtgggaaggcccgcctccctcctgatgtcctcagatgggtggagcttgctaagctgtatagatcaattggagaatacgacgtcctccgtgggatttttaccagtgagataggaacaaagcaaatcactcagagtgcattattagcagaagccagaagtgattattctgaagctgctaagcagtatgatgaggctctcaataaacaagactgggtagatggtgagcccacagaagccgagaaggatttttgggaacttgcatcccttgactgttacaaccaccttgctgagtggaaatcacttgaatactgttctacagccagtatagacagtgagaaccccccagacctaaataaaatctggagtgaaccattttatcaggaaacatatctaccttacatgatccgcagcaagctgaagctgctgctccagggagaggctgaccagtccctgctgacatttattgacaaagctatgcacggggagctccagaaggcgattctagagcttcattacagtcaagagctgagtctgctttacctcctgcaagatgatgttgacagagccaaatattacattcaaaatggcattcagagttttatgcagaattattctagtattgatgtcctcttacaccaaagtagactcaccaaattgcagtctgtacaggctttaacagaaattcaggagttcatcagctttataagcaaacaaggcaatttatcatctcaagttccccttaagagacttctgaacacctggacaaacagatatccagatgctaaaatggacccaatgaacatctgggatgacatcatcacaaatcgatgtttctttctcagcaaaatagaggagaagcttacccctcttccagaagataatagtatgaatgtggatcaagatggagaccccagtgacaggatggaagtgcaagagcaggaagaagatatcagctccctgatcaggagttgcaagttttccatgaaaatgaagatgatagacagtgcccggaagcagaacaatttctcacttgctatgaaactactgaaggagctgcataaagagtcaaaaaccagagacgattggctggtgagctgggtgcagagctactgccgcctgagccactgccggagccggtcccagggctgctctgagcaggtgctcactgtgctgaaaacagtctctttgttggatgagaacaacgtgtcaagctacttaagcaaaaatattctggctttccgtgaccagaacattctcttgggtacaacttacaggatcatagcgaatgctctcagcagtgagccagcctgccttgctgaaatcgaggaggacaaggctagaagaatcttagagctttctggatccagttcagaggattcagagaaggtgatcgcgggtctgtaccagagagcattccagcacctctctgaggctgtgcaggcggctgaggaggaggcccagcctccctcctggagctgtgggcctgcagctggggtgattgatgcttacatgacgctggcagatttctgtgaccaacagctgcgcaaggaggaagagaatgcatcagttattgattctgcagaactgcaggcgtatccagcacttgtggtggagaaaatgttgaaagctttaaaattaaattccaatgaagccagattgaagtttcctagattacttcagattatagaacggtatccagaggagactttgagcctcatgacaaaagagatctcttccgttccctgctggcagttcatcagctggatcagccacatggtggccttactggacaaagaccaagccgttgctgttcagcactctgtggaagaaatcactgataactacccgcaggctattgtttatcccttcatcataagcagcgaaagctattccttcaaggatacttctactggtcataagaataaggagtttgtggcaaggattaaaagtaagttggatcaaggaggagtgattcaagattttattaatgccttagatcagctctctaatcctgaactgctctttaaggattggagcaatgatgtaagagctgaactagcaaaaacccctgtaaataaaaaaaacattgaaaaaatgtatgaaagaatgtatgcagccttgggtgacccaaaggctccaggcctgggggcctttagaaggaagtttattcagacttttggaaaagaatttgataaacattttgggaaaggaggttctaaactactgagaatgaagctcagtgacttcaacgacattaccaacatgctacttttaaaaatgaacaaagactcaaagccccctgggaatctgaaagaatgttcaccctggatgagcgacttcaaagtggagttcctgagaaatgagctggagattcccggtcagtatgacggtaggggaaagccattgccagagtaccacgtgcgaatcgccgggtttgatgagcgggtgacagtcatggcgtctctgcgaaggcccaagcgcatcatcatccgtggccatgacgagagggaacaccctttcctggtgaagggtggcgaggacctgcggcaggaccagcgcgtggagcagctcttccaggtcatgaatgggatcctggcccaagactccgcctgcagccagagggccctgcagctgaggacctatagcgttgtgcccatgacctccaggttaggattaattgagtggcttgaaaatactgttaccttgaaggaccttcttttgaacaccatgtcccaagaggagaaggcggcttacctgagtgatcccagggcaccgccgtgtgaatataaagattggctgacaaaaatgtcaggaaaacatgatgttggagcttacatgctaatgtataagggcgctaatcgtactgaaacagtcacgtcttttagaaaacgagaaagtaaagtgcctgctgatctcttaaagcgggccttcgtgaggatgagtacaagccctgaggctttcctggcgctccgctcccacttcgccagctctcacgctctgatatgcatcagccactggatcctcgggattggagacagacatctgaacaactttatggtggccatggagactggcggcgtgatcgggatcgactttgggcatgcgtttggatccgctacacagtttctgccagtccctgagttgatgccttttcggctaactcgccagtttatcaatctgatgttaccaatgaaagaaacgggccttatgtacagcatcatggtacacgcactccgggccttccgctcagaccctggcctgctcaccaacaccatggatgtgtttgtcaaggagccctcctttgattggaaaaattttgaacagaaaatgctgaaaaaaggagggtcatggattcaagaaataaatgttgctgaaaaaaattggtacccccgacagaaaatatgttacgctaagagaaagttagcaggtgccaatccagcagtcattacttgtgatgagctactcctgggtcatgagaaggcccctgccttcagagactatgtggctgtggcacgaggaagcaaagatcacaacattcgtgcccaagaaccagagagtgggctttcagaagagactcaagtgaagtgcctgatggaccaggcaacagaccccaacatccttggcagaacctgggaaggatgggagccctggatgtgaggtctgtgggagtctgcagatagaaagcattacattgtttaaagaatctactatactttggttggcagcattccatgagctgattttcctgaaacactaaagagaaatgtcttttgtgctacagtttcgtagcatgagtttaaatcaagattatgatgagtaaatgtgtatgggttaaatcaaagataaggttatagtaacatcaaagattaggtgaggtttatagaaagatagatatccaggcttaccaaagtattaagtcaagaatataatatgtgatcagctttcaaagcatttacaagtgctgcaagttagtgaaacagctgtctccgtaaatggaggaaatgtggggaagccttggaatgcccttctggttctggcacattggaaagcacactcagaaggcttcatcaccaagattttgggagagtaaagctaagtatagttgatgtaacattgtagaagcagcataggaacaataagaacaataggtaaagctataattatggcttatatttagaaatgactgcatttgatattttaggatatttttctaggttttttcctttcattttattctcttctagttttgacattttatgatagatttgctctctagaaggaaacgtctttatttaggagggcaaaaattttggtcatagcattcacttttgctattccaatctacaactggaacgatatttgtggttctgtcgagggatgcacaaaaacccagcatgggccaggtgtggaggctcatgcctgtaatcccggcactttgggaggtcaaggcgggcngatcangaggtcangagatcgagaccatcctggcnaacatggtgaaaccccgnctntactaaaagatacataaaagtgctttgcattgaatttgggataacttcaaaaatcccatggttgttgttagggatagtactaagcatttcagttccaggagaataaaagaaattcctatttgaaatgaattcctcatttggaggaaaaaaagcatgcattctagcacaacaagatgaaattatggaatacaaaagtggctccttcccatgtgcagtccctgtccccccccgccagtcctccacacccaaactgtttctgattggcttttagctttttgttgtttttttttttccttctaacacttgtatttggaggctcttctgtgattttgagaagtatactcttgagtgtttaataaagtttttttccaaaagta

SEQ ID NO: 134792 - DNA, 5249 bp, Homo sapiens
ggctaataaaatattggagatacttaacccttagccaaacagtatgtgtctgtgtggtgtgtgtgagtatgtacatgtatgatagactgtgtgtgtgtgtgtgtgtgtgtgtgtgtgatcttcatattttgataggtgcttttcttgctttaaattgatccctggaatggaagcgtaaaattaaaaggtcatttcctcctttgagcaaattgaatattgttggaaaatgtgttaatagcattacacagagaaacttctggtgatatcactacccacatgggtaccttttatgtttagtaaagtatgttactccttgtgaagacatggtccaagtaccacaagctaaacagctggttgtatgtgtggtttcacaggacattagctgtcagcacgcagccctgctgagcctcgacccagcggctgttagcgctggttgcctggccagcctacagcagcccgtgggcatccgcctgctagaggaggctctgctccgcctgctgcctgctgagctgcctgccaagcgagtccgtgggaaggcccgcctccctcctgatgtcctcagatgggtggagcttgctaagctgtatagatcaattggagaatacgacgtcctccgtgggatttttaccagtgagataggaacaaagcaaatcactcagagtgcattattagcagaagccagaagtgattattctgaagctgctaagcagtatgatgaggctctcaataaacaagactgggtagatggtgagcccacagaagccgagaaggatttttgggaacttgcatcccttgactgttacaaccaccttgctgagtggaaatcacttgaatactgttctacagccagtatagacagtgagaaccccccagacctaaataaaatctggagtgaaccattttatcaggaaacatatctaccttacatgatccgcagcaagctgaagctgctgctccagggagaggctgaccagtccctgctgacatttattgacaaagctatgcacggggagctccagaaggcgattctagagcttcattacagtcaagagctgagtctgctttacctcctgcaagatgatgttgacagagccaaatattacattcaaaatggcattcagagttttatgcagaattattctagtattgatgtcctcttacaccaaagtagactcaccaaattgcagtctgtacaggctttaacagaaattcaggagttcatcagctttataagcaaacaaggcaatttatcatctcaagttccccttaagagacttctgaacacctggacaaacagatatccagatgctaaaatggacccaatgaacatctgggatgacatcatcacaaatcgatgtttctttctcagcaaaatagaggagaagcttacccctcttccagaagataatagtatgaatgtggatcaagatggagaccccagtgacaggatggaagtgcaagagcaggaagaagatatcagctccctgatcaggagttgcaagttttccatgaaaatgaagatgatagacagtgcccggaagcagaacaatttctcacttgctatgaaactactgaaggagctgcataaagagtcaaaaaccagagacgattggctggtgagctgggtgcagagctactgccgcctgagccactgccggagccggtcccagggctgctctgagcaggtgctcactgtgctgaaaacagtctctttgttggatgagaacaacgtgtcaagctacttaagcaaaaatattctggctttccgtgaccagaacattctcttgggtacaacttacaggatcatagcgaatgctctcagcagtgagccagcctgccttgctgaaatcgaggaggacaaggctagaagaatcttagagctttctggatccagttcagaggattcagagaaggtgatcgcgggtctgtaccagagagcattccagcacctctctgaggctgtgcaggcggctgaggaggaggcccagcctccctcctggagctgtgggcctgcagctggggtgattgatgcttacatgacgctggcagatttctgtgaccaacagctgcgcaaggaggaagagaatgcatcagttattgattctgcagaactgcaggcgtatccagcacttgtggtggagaaaatgttgaaagctttaaaattaaattccaatgaagccagattgaagtttcctagattacttcagattatagaacggtatccagaggagactttgagcctcatgacaaaagagatctcttccgttccctgctggcagttcatcagctggatcagccacatggtggccttactggacaaagaccaagccgttgctgttcagcactctgtggaagaaatcactgataactacccgcaggctattgtttatcccttcatcataagcagcgaaagctattccttcaaggatacttctactggtcataagaataaggagtttgtggcaaggattaaaagtaagttggatcaaggaggagtgattcaagattttattaatgccttagatcagctctctaatcctgaactgctctttaaggattggagcaatgatgtaagagctgaactagcaaaaacccctgtaaataaaaaaaacattgaaaaaatgtatgaaagaatgtatgcagccttgggtgacccaaaggctccaggcctgggggcctttagaaggaagtttattcagacttttggaaaagaatttgataaacattttgggaaaggaggttctaaactactgagaatgaagctcagtgacttcaacgacattaccaacatgctacttttaaaaatgaacaaagactcaaagccccctgggaatctgaaagaatgttcaccctggatgagcgacttcaaagtggagttcctgagaaatgagctggagattcccggtcagtatgacggtaggggaaagccattgccagagtaccacgtgcgaatcgccgggtttgatgagcgggtgacagtcatggcgtctctgcgaaggcccaagcgcatcatcatccgtggccatgacgagagggaacaccctttcctggtgaagggtggcgaggacctgcggcaggaccagcgcgtggagcagctcttccaggtcatgaatgggatcctggcccaagactccgcctgcagccagagggccctgcagctgaggacctatagcgttgtgcccatgacctccaggttaggattaattgagtggcttgaaaatactgttaccttgaaggaccttcttttgaacaccatgtcccaagaggagaaggcggcttacctgagtgatcccagggcaccgccgtgtgaatataaagattggctgacaaaaatgtcaggaaaacatgatgttggagcttacatgctaatgtataagggcgctaatcgtactgaaacagtcacgtcttttagaaaacgagaaagtaaagtgcctgctgatctcttaaagcgggccttcgtgaggatgagtacaagccctgaggctttcctggcgctccgctcccacttcgccagctctcacgctctgatatgcatcagccactggatcctcgggattggagacagacatctgaacaactttatggtggccatggagactggcggcgtgatcgggatcgactttgggcatgcgtttggatccgctacacagtttctgccagtccctgagttgatgccttttcggctaactcgccagtttatcaatctgatgttaccaatgaaagaaacgggccttatgtacagcatcatggtacacgcactccgggccttccgctcagaccctggcctgctcaccaacaccatggatgtgtttgtcaaggagccctcctttgattggaaaaattttgaacagaaaatgctgaaaaaaggagggtcatggattcaagaaataaatgttgctgaaaaaaattggtacccccgacagaaaatatgttacgctaagagaaagttagcaggtgccaatccagcagtcattacttgtgatgagctactcctgggtcatgagaaggcccctgccttcagagactatgtggctgtggcacgaggaagcaaagatcacaacattcgtgcccaagaaccagagagtgggctttcagaagagactcaagtgaagtgcctgatggaccaggcaacagaccccaacatccttggcagaacctgggaaggatgggagccctggatgtgaggtctgtgggagtctgcagatagaaagcattacattgtttaaagaatctactatactttggttggcagcattccatgagctgattttcctgaaacactaaagagaaatgtcttttgtgctacagtttcgtagcatgagtttaaatcaagattatgatgagtaaatgtgtatgggttaaatcaaagataaggttatagtaacatcaaagattaggtgaggtttatagaaagatagatatccaggcttaccaaagtattaagtcaagaatataatatgtgatcagctttcaaagcatttacaagtgctgcaagttagtgaaacagctgtctccgtaaatggaggaaatgtggggaagccttggaatgcccttctggttctggcacattggaaagcacactcagaaggcttcatcaccaagattttgggagagtaaagctaagtatagttgatgtaacattgtagaagcagcataggaacaataagaacaataggtaaagctataattatggcttatatttagaaatgactgcatttgatattttaggatatttttctaggttttttcctttcattttattctcttctagttttgacattttatgatagatttgctctctagaaggaaacgtctttatttaggagggcaaaaattttggtcatagcattcacttttgctattccaatctacaactggaagatacataaaagtgctttgcattgaatttgggataacttcaaaaatcccatggttgttgttagggatagtactaagcatttcagttccaggagaataaaagaaattcctatttgaaatgaattcctcatttggaggaaaaaaagcatgcattctagcacaacaagatgaaattatggaatacaaaagtggctccttcccatgtgcagtccctgtccccccccgccagtcctccacacccaaactgtttctgattggcttttagctttttgttgtttttttttttccttctaacacttgtatttggaggctcttctgtgattttgagaagtatactcttgagtgtttaataaagtttttttccaaaagta

SEQ ID NO: 134793 - DNA, 6154 bp, Homo sapiens
  misc_feature (14)..(14): n is a, c, g, or t
  misc_feature (18)..(18): n is a, c, g, or t
  misc_feature (40)..(40): n is a, c, g, or t
  misc_feature (57)..(57): n is a, c, g, or t
  misc_feature (65)..(65): n is a, c, g, or t
  misc_feature (70)..(70): n is a, c, g, or t
  misc_feature (78)..(78): n is a, c, g, or t
  misc_feature (94)..(94): n is a, c, g, or t
  misc_feature (102)..(102): n is a, c, g, or t
  misc_feature (104)..(104): n is a, c, g, or t
  misc_feature (120)..(120): n is a, c, g, or t
  misc_feature (136)..(136): n is a, c, g, or t
  misc_feature (166)..(166): n is a, c, g, or t
  misc_feature (170)..(170): n is a, c, g, or t
  misc_feature (190)..(190): n is a, c, g, or t
  misc_feature (192)..(192): n is a, c, g, or t
  misc_feature (195)..(195): n is a, c, g, or t
  misc_feature (208)..(208): n is a, c, g, or t
aaaggttttccccngctngaaaaaggggcaaagttaagcncaaccccaattaaatgngaaggtangctcnccttcatnaagcccccccccaggnttttaacncntttaaggttccggggnttggtattgttggtgnggaaatttgtaacgggaataccaattttcnaccnaaggaaaacaagcttatggncnatnatttacgaatttngaggctcgggaccccaccttcggtttaagtgctcccttggacttcaaattaattattcgaaatttctggagccatgaaactaggttaccttcaaataccttggaccggttgctggcactaaattccttatattctcctaagatagaagtgcactttttaagtttagcaacaaattttctgctcgaaatgaccagcatgagcccagattatccaaaccccatgttcgagcatcctctgtcagaatgcgaatttcaggaatataccattgattctgattggcgtttccgaagtactgttctcactccgatgtttgtggagacccaggcctcccagggcactctccagacccgtacccaggaagggtccctctcagctcgctggccagtggcagggcagataagggccacccagcagcagcatgacttcacactgacacagactgcagatggaagaagctcatttgattggctgaccgggagcagcactgacccgctggtcgaccacaccagtccctcatctgactccttgctgtttgcccacaagaggagtgaaaggttacagagagcacccttgaagtcagtggggcctgattttgggaaaaaaaggctgggccttccaggggacgaggtggataacaaagtgaaaggtgcggccggccggacggacctactacgactgcgcagacggtttatgagggaccaggagaagctcagtttgatgtatgccagaaaaggcgttgctgagcaaaaacgagagaaggaaatcaagagtgagttaaaaatgaagcaggatgcccaggtcgttctgtacagaagctaccggcacggagaccttcctgacattcagatcaagcacagcagcctcatcaccccgttacaggccgtggcccagagggacccaataattgcaaaacagctctttagcagcttgttttctggaattttgaaagagatggataaatttaagacactgtctgaaaaaaacaacatcactcaaaagttgcttcaagacttcaatcgttttcttaataccaccttctctttctttccaccctttgtctcttgtattcaggacattagctgtcagcacgcagccctgctgagcctcgacccagcggctgttagcgctggttgcctggccagcctacagcagcccgtgggcatccgcctgctagaggaggctctgctccgcctgctgcctgctgagctgcctgccaagcgagtccgtgggaaggcccgcctccctcctgatgtcctcagatgggtggagcttgctaagctgtatagatcaattggagaatacgacgtcctccgtgggatttttaccagtgagataggaacaaagcaaatcactcagagtgcattattagcagaagccagaagtgattattctgaagctgctaagcagtatgatgaggctctcaataaacaagactgggtagatggtgagcccacagaagccgagaaggatttttgggaacttgcatcccttgactgttacaaccaccttgctgagtggaaatcacttgaatactgttctacagccagtatagacagtgagaaccccccagacctaaataaaatctggagtgaaccattttatcaggaaacatatctaccttacatgatccgcagcaagctgaagctgctgctccagggagaggctgaccagtccctgctgacatttattgacaaagctatgcacggggagctccagaaggcgattctagagcttcattacagtcaagagctgagtctgctttacctcctgcaagatgatgttgacagagccaaatattacattcaaaatggcattcagagttttatgcagaattattctagtattgatgtcctcttacaccaaagtagactcaccaaattgcagtctgtacaggctttaacagaaattcaggagttcatcagctttataagcaaacaaggcaatttatcatctcaagttccccttaagagacttctgaacacctggacaaacagatatccagatgctaaaatggacccaatgaacatctgggatgacatcatcacaaatcgatgtttctttctcagcaaaatagaggagaagcttacccctcttccagaagataatagtatgaatgtggatcaagatggagaccccagtgacaggatggaagtgcaagagcaggaagaagatatcagctccctgatcaggagttgcaagttttccatgaaaatgaagatgatagacagtgcccggaagcagaacaatttctcacttgctatgaaactactgaaggagctgcataaagagtcaaaaaccagagacgattggctggtgagctgggtgcagagctactgccgcctgagccactgccggagccggtcccagggctgctctgagcaggtgctcactgtgctgaaaacagtctctttgttggatgagaacaacgtgtcaagctacttaagcaaaaatattctggctttccgtgaccagaacattctcttgggtacaacttacaggatcatagcgaatgctctcagcagtgagccagcctgccttgctgaaatcgaggaggacaaggctagaagaatcttagagctttctggatccagttcagaggattcagagaaggtgatcgcgggtctgtaccagagagcattccagcacctctctgaggctgtgcaggcggctgaggaggaggcccagcctccctcctggagctgtgggcctgcagctggggtgattgatgcttacatgacgctggcagatttctgtgaccaacagctgcgcaaggaggaagagaatgcatcagttattgattctgcagaactgcaggcgtatccagcacttgtggtggagaaaatgttgaaagctttaaaattaaattccaatgaagccagattgaagtttcctagattacttcagattatagaacggtatccagaggagactttgagcctcatgacaaaagagatctcttccgttccctgctggcagttcatcagctggatcagccacatggtggccttactggacaaagaccaagccgttgctgttcagcactctgtggaagaaatcactgataactacccgcaggctattgtttatcccttcatcataagcagcgaaagctattccttcaaggatacttctactggtcataagaataaggagtttgtggcaaggattaaaagtaagttggatcaaggaggagtgattcaagattttattaatgccttagatcagctctctaatcctgaactgctctttaaggattggagcaatgatgtaagagctgaactagcaaaaacccctgtaaataaaaaaaacattgaaaaaatgtatgaaagaatgtatgcagccttgggtgacccaaaggctccaggcctgggggcctttagaaggaagtttattcagacttttggaaaagaatttgataaacattttgggaaaggaggttctaaactactgagaatgaagctcagtgacttcaacgacattaccaacatgctacttttaaaaatgaacaaagactcaaagccccctgggaatctgaaagaatgttcaccctggatgagcgacttcaaagtggagttcctgagaaatgagctggagattcccggtcagtatgacggtaggggaaagccattgccagagtaccacgtgcgaatcgccgggtttgatgagcgggtgacagtcatggcgtctctgcgaaggcccaagcgcatcatcatccgtggccatgacgagagggaacaccctttcctggtgaagggtggcgaggacctgcggcaggaccagcgcgtggagcagctcttccaggtcatgaatgggatcctggcccaagactccgcctgcagccagagggccctgcagctgaggacctatagcgttgtgcccatgacctccaggttaggattaattgagtggcttgaaaatactgttaccttgaaggaccttcttttgaacaccatgtcccaagaggagaaggcggcttacctgagtgatcccagggcaccgccgtgtgaatataaagattggctgacaaaaatgtcaggaaaacatgatgttggagcttacatgctaatgtataagggcgctaatcgtactgaaacagtcacgtcttttagaaaacgagaaagtaaagtgcctgctgatctcttaaagcgggccttcgtgaggatgagtacaagccctgaggctttcctggcgctccgctcccacttcgccagctctcacgctctgatatgcatcagccactggatcctcgggattggagacagacatctgaacaactttatggtggccatggagactggcggcgtgatcgggatcgactttgggcatgcgtttggatccgctacacagtttctgccagtccctgagttgatgccttttcggctaactcgccagtttatcaatctgatgttaccaatgaaagaaacgggccttatgtacagcatcatggtacacgcactccgggccttccgctcagaccctggcctgctcaccaacaccatggatgtgtttgtcaaggagccctcctttgattggaaaaattttgaacagaaaatgctgaaaaaaggagggtcatggattcaagaaataaatgttgctgaaaaaaattggtacccccgacagaaaatatgttacgctaagagaaagttagcaggtgccaatccagcagtcattacttgtgatgagctactcctgggtcatgagaaggcccctgccttcagagactatgtggctgtggcacgaggaagcaaagatcacaacattcgtgcccaagaaccagagagtgggctttcagaagagactcaagtgaagtgcctgatggaccaggcaacagaccccaacatccttggcagaacctgggaaggatgggagccctggatgtgaggtctgtgggagtctgcagatagaaagcattacattgtttaaagaatctactatactttggttggcagcattccatgagctgattttcctgaaacactaaagagaaatgtcttttgtgctacagtttcgtagcatgagtttaaatcaagattatgatgagtaaatgtgtatgggttaaatcaaagataaggttatagtaacatcaaagattaggtgaggtttatagaaagatagatatccaggcttaccaaagtattaagtcaagaatataatatgtgatcagctttcaaagcatttacaagtgctgcaagttagtgaaacagctgtctccgtaaatggaggaaatgtggggaagccttggaatgcccttctggttctggcacattggaaagcacactcagaaggcttcatcaccaagattttgggagagtaaagctaagtatagttgatgtaacattgtagaagcagcataggaacaataagaacaataggtaaagctataattatggcttatatttagaaatgactgcatttgatattttaggatatttttctaggttttttcctttcattttattctcttctagttttgacattttatgatagatttgctctctagaaggaaacgtctttatttaggagggcaaaaattttggtcatagcattcacttttgctattccaatctacaactggaagatacataaaagtgctttgcattgaatttgggataacttcaaaaatcccatggttgttgttagggatagtactaagcatttcagttccaggagaataaaagaaattcctatttgaaatgaattcctcatttggaggaaaaaaagcatgcattctagcacaacaagatgaaattatggaatacaaaagtggctccttcccatgtgcagtccctgtccccccccgccagtcctccacacccaaactgtttctgattggcttttagctttttgttgtttttttttttccttctaacacttgtatttggaggctcttctgtgattttgagaagtatactcttgagtgtttaataaagtttttttccaaaagta

SEQ ID NO: 134794 - DNA, 12975 bp, Homo sapiens
ggggcatttccgggtccgggccgagcgggcgcacgcgcgggagcgggactcggcggcatggcgggctccggagccggtgtgcgttgctccctgctgcggctgcaggagaccttgtccgctgcggaccgctgcggtgctgccctggccggtcatcaactgatccgcggcctggggcaggaatgcgtcctgagcagcagccccgcggtgctggcattacagacatctttagttttttccagagatttcggtttgcttgtatttgtccggaagtcactcaacagtattgaatttcgtgaatgtagagaagaaatcctaaagtttttatgtattttcttagaaaaaatgggccagaagatcgcaccttactctgttgaaattaagaacacttgtaccagtgtttatacaaaagatagagctgctaaatgtaaaattccagccctggaccttcttattaagttacttcagacttttagaagttctagactcatggatgaatttaaaattggagaattatttagtaaattctatggagaacttgcattgaaaaaaaaaataccagatacagttttagaaaaagtatatgagctcctaggattattgggtgaagttcatcctagtgagatgataaataatgcagaaaacctgttccgcgcttttctgggtgaacttaagacccagatgacatcagcagtaagagagcccaaactacctgttctggcaggatgtctgaaggggttgtcctcacttctgtgcaacttcactaagtccatggaagaagatccccagacttcaagggagatttttaattttgtactaaaggcaattcgtcctcagattgatctgaagagatatgctgtgccctcagctggcttgcgcctatttgccctgcatgcatctcagtttagcacctgccttctggacaactacgtgtctctatttgaagtcttgttaaagtggtgtgcccacacaaatgtagaattgaaaaaagctgcactttcagccctggaatcctttctgaaacaggtttctaatatggtggcgaaaaatgcagaaatgcataaaaataaactgcagtactttatggagcagttttatggaatcatcagaaatgtggattcgaacaacaaggagttatctattgctatccgtggatatggactttttgcaggaccgtgcaaggttataaacgcaaaagatgttgacttcatgtacgttgagctcattcagcgctgcaagcagatgttcctcacccagacagacactggtgacgaccgtgtttatcagatgccaagcttcctccagtctgttgcaagcgtcttgctgtaccttgacacagttcctgaggtgtatactccagttctggagcacctcgtggtgatgcagatagacagtttcccacagtacagtccaaaaatgcagctggtgtgttgcagagccatagtgaaggtgttcctagctttggcagcaaaagggccagttctcaggaattgcattagtactgtggtgcatcagggtttaatcagaatatgttctaaaccagtggtccttccaaagggccctgagtctgaatctgaagaccaccgtgcttcaggggaagtcagaactggcaaatggaaggtgcccacatacaaagactacgtggatctcttcagacatctcctgagctctgaccagatgatggattctattttagcagatgaagcatttttctctgtgaattcctccagtgaaagtctgaatcatttactttatgatgaatttgtaaaatccgttttgaagattgttgagaaattggatcttacacttgaaatacagactgttggggaacaagagaatggagatgaggcgcctggtgtttggatgatcccaacttcagatccagcggctaacttgcatccagctaaacctaaagatttttcggctttcattaacctggtggaattttgcagagagattctccctgagaaacaagcagaattttttgaaccatgggtgtactcattttcatatgaattaattttgcaatctacaaggttgcccctcatcagtggtttctacaaattgctttctattacagtaagaaatgccaagaaaataaaatatttcgagggagttagtccaaagagtctgaaacactctcctgaagacccagaaaagtattcttgctttgctttatttgtgaaatttggcaaagaggtggcagttaaaatgaagcagtacaaagatgaacttttggcctcttgtttgacctttcttctgtccttgccacacaacatcattgaactcgatgttagagcctacgttcctgcactgcagatggctttcaaactgggcctgagctatacccccttggcagaagtaggcctgaatgctctagaagaatggtcaatttatattgacagacatgtaatgcagccttattacaaagacattctcccctgcctggatggatacctgaagacttcagccttgtcagatgagaccaagaataactgggaagtgtcagctctttctcgggctgcccagaaaggatttaataaagtggtgttaaagcatctgaagaagacaaagaacctttcatcaaacgaagcaatatccttagaagaaataagaattagagtagtacaaatgcttggatctctaggaggacaaataaacaaaaatcttctgacagtcacgtcctcagatgagatgatgaagagctatgtggcctgggacagagagaagcggctgagctttgcagtgccctttagagagatgaaacctgtcattttcctggatgtgttcctgcctcgagtcacagaattagcgctcacagccagtgacagacaaactaaagttgcagcctgtgaacttttacatagcatggttatgtttatgttgggcaaagccacgcagatgccagaagggggacagggagccccacccatgtaccagctctataagcggacgtttcctgtgctgcttcgacttgcgtgtgatgttgatcaggtgacaaggcaactgtatgagccactagttatgcagctgattcactggttcactaacaacaagaaatttgaaagtcaggatactgttgccttactagaagctatattggatggaattgtggaccctgttgacagtactttaagagatttttgtggtcggtgtattcgagaattccttaaatggtccattaagcaaataacaccacagcagcaggagaagagtccagtaaacaccaaatcgcttttcaagcgactttatagccttgcgcttcaccccaatgctttcaagaggctgggagcatcacttgcctttaataatatctacagggaattcagggaagaagagtctctggtggaacagtttgtgtttgaagccttggtgatatacatggagagtctggccttagcacatgcagatgagaagtccttaggtacaattcaacagtgttgtgatgccattgatcacctatgccgcatcattgaaaagaagcatgtttctttaaataaagcaaagaaacgacgtttgccgcgaggatttccaccttccgcatcattgtgtttattggatctggtcaagtggcttttagctcattgtgggaggccccagacagaatgtcgacacaaatccattgaactcttttataaattcgttcctttattgccaggcaacagatcccctaatttgtggctgaaagatgttctcaaggaagaaggtgtctcttttctcatcaacacctttgaggggggtggctgtggccagccctcgggcatcctggcccagcccaccctcttgtaccttcgggggccattcagcctgcaggccacgctatgctggctggacctgctcctggccgcgttggagtgctacaacacgttcattggcgagagaactgtaggagcgctccaggtcctaggtactgaagcccagtcttcacttttgaaagcagtggctttcttcttagaaagcattgccatgcatgacattatagcagcagaaaagtgctttggcactggggcagcaggtaacagaacaagcccacaagagggagaaaggtacaactacagcaaatgcaccgttgtggtccggattatggagtttaccacgactctgctaaacacctccccggaaggatggaagctcctgaagaaggacttgtgtaatacacacctgatgagagtcctggtgcagacgctgtgtgagcccgcaagcataggtttcaacatcggagacgtccaggttatggctcatcttcctgatgtttgtgtgaatctgatgaaagctctaaagatgtccccatacaaagatatcctagagacccatctgagagagaaaataacagcacagagcattgaggagctttgtgccgtcaacttgtatggccctgacgcgcaagtggacaggagcaggctggctgctgttgtgtctgcctgtaaacagcttcacagagctgggcttctgcataatatattaccgtctcagtccacagatttgcatcattctgttggcacagaacttctttccctggtttataaaggcattgcccctggagatgagagacagtgtctgccttctctagacctcagttgtaagcagctggccagcggacttctggagttagcctttgcttttggaggactgtgtgagcgccttgtgagtcttctcctgaacccagcggtgctgtccacggcgtccttgggcagctcacagggcagcgtcatccacttctcccatggggagtatttctatagcttgttctcagaaacgatcaacacggaattattgaaaaatctggatcttgctgtattggagctcatgcagtcttcagtggataataccaaaatggtgagtgccgttttgaacggcatgttagaccagagcttcagggagcgagcaaaccagaaacaccaaggactgaaacttgcgactacaattctgcaacactggaagaagtgtgattcatggtgggccaaagattcccctctcgaaactaaaatggcagtgctggccttactggcaaaaattttacagattgattcatctgtatcttttaatacaagtcatggttcattccctgaagtctttacaacatatattagtctacttgctgacacaaagctggatctacatttaaagggccaagctgtcactcttcttccattcttcaccagcctcactggaggcagtctggaggaacttagacgtgttctggagcagctcatcgttgctcacttccccatgcagtccagggaatttcctccaggaactccgcggttcaataattatgtggactgcatgaaaaagtttctagatgcattggaattatctcaaagccctatgttgttggaattgatgacagaagttctttgtcgggaacagcagcatgtcatggaagaattatttcaatccagtttcaggaggattgccagaaggggttcatgtgtcacacaagtaggccttctggaaagcgtgtatgaaatgttcaggaaggatgacccccgcctaagtttcacacgccagtcctttgtggaccgctccctcctcactctgctgtggcactgtagcctggatgctttgagagaattcttcagcacaattgtggtggatgccattgatgtgttgaagtccaggtttacaaagctaaatgaatctacctttgatactcaaatcaccaagaagatgggctactataagattctagacgtgatgtattctcgccttcccaaagatgatgttcatgctaaggaatcaaaaattaatcaagttttccatggctcgtgtattacagaaggaaatgaacttacaaagacattgattaaattgtgctacgatgcatttacagagaacatggcaggagagaatcagctgctggagaggagaagactttaccattgtgcagcatacaactgcgccatatctgtcatctgctgtgtcttcaatgagttaaaattttaccaaggttttctgtttagtgaaaaaccagaaaagaacttgcttatttttgaaaatctgatcgacctgaagcgccgctataattttcctgtagaagttgaggttcctatggaaagaaagaaaaagtacattgaaattaggaaagaagccagagaagcagcaaatggggattcagatggtccttcctatatgtcttccctgtcatatttggcagacagtaccctgagtgaggaaatgagtcaatttgatttctcaaccggagttcagagctattcatacagctcccaagaccctagacctgccactggtcgttttcggagacgggagcagcgggaccccacggtgcatgatgatgtgctggagctggagatggacgagctcaatcggcatgagtgcatggcgcccctgacggccctggtcaagcacatgcacagaagcctgggcccgcctcaaggagaagaggattcagtgccaagagatcttccttcttggatgaaattcctccatggcaaactgggaaatccaatagtaccattaaatatccgtctcttcttagccaagcttgttattaatacagaagaggtctttcgcccttacgcgaagcactggcttagccccttgctgcagctggctgcttctgaaaacaatggaggagaaggaattcactacatggtggttgagatagtggccactattctttcatggacaggcttggccactccaacaggggtccctaaagatgaagtgttagcaaatcgattgcttaatttcctaatgaaacatgtctttcatccaaaaagagctgtgtttagacacaaccttgaaattataaagacccttgtcgagtgctggaaggattgtttatccatcccttataggttaatatttgaaaagttttccggtaaagatcctaattctaaagacaactcagtagggattcaattgctaggcatcgtgatggccaatgacctgcctccctatgacccacagtgtggcatccagagtagcgaatacttccaggctttggtgaataatatgtcctttgtaagatataaagaagtgtatgccgctgcagcagaagttctaggacttatacttcgatatgttatggagagaaaaaacatactggaggagtctctgtgtgaactggttgcgaaacaattgaagcaacatcagaatactatggaggacaagtttattgtgtgcttgaacaaagtgaccaagagcttccctcctcttgcagacaggttcatgaatgctgtgttctttctgctgccaaaatttcatggagtgttgaaaacactctgtctggaggtggtactttgtcgtgtggagggaatgacagagctgtacttccagttaaagagcaaggacttcgttcaagtcatgagacatagagatgatgaaagacaaaaagtatgtttggacataatttataagatgatgccaaagttaaaaccagtagaactccgagaacttctgaaccccgttgtggaattcgtttcccatccttctacaacatgtagggaacaaatgtataatattctcatgtggattcatgataattacagagatccagaaagtgagacagataatgactcccaggaaatatttaagttggcaaaagatgtgctgattcaaggattgatcgatgagaaccctggacttcaattaattattcgaaatttctggagccatgaaactaggttaccttcaaataccttggaccggttgctggcactaaattccttatattctcctaagatagaagtgcactttttaagtttagcaacaaattttctgctcgaaatgaccagcatgagcccagattatccaaaccccatgttcgagcatcctctgtcagaatgcgaatttcaggaatataccattgattctgattggcgtttccgaagtactgttctcactccgatgtttgtggagacccaggcctcccagggcactctccagacccgtacccaggaagggtccctctcagctcgctggccagtggcagggcagataagggccacccagcagcagcatgacttcacactgacacagactgcagatggaagaagctcatttgattggctgaccgggagcagcactgacccgctggtcgaccacaccagtccctcatctgactccttgctgtttgcccacaagaggagtgaaaggttacagagagcacccttgaagtcagtggggcctgattttgggaaaaaaaggctgggccttccaggggacgaggtggataacaaagtgaaaggtgcggccggccggacggacctactacgactgcgcagacggtttatgagggaccaggagaagctcagtttgatgtatgccagaaaaggcgttgctgagcaaaaacgagagaaggaaatcaagagtgagttaaaaatgaagcaggatgcccaggtcgttctgtacagaagctaccggcacggagaccttcctgacattcagatcaagcacagcagcctcatcaccccgttacaggccgtggcccagagggacccaataattgcaaaacagctctttagcagcttgttttctggaattttgaaagagatggataaatttaagacactgtctgaaaaaaacaacatcactcaaaagttgcttcaagacttcaatcgttttcttaataccaccttctctttctttccaccctttgtctcttgtattcaggacattagctgtcagcacgcagccctgctgagcctcgacccagcggctgttagcgctggttgcctggccagcctacagcagcccgtgggcatccgcctgctagaggaggctctgctccgcctgctgcctgctgagctgcctgccaagcgagtccgtgggaaggcccgcctccctcctgatgtcctcagatgggtggagcttgctaagctgtatagatcaattggagaatacgacgtcctccgtgggatttttaccagtgagataggaacaaagcaaatcactcagagtgcattattagcagaagccagaagtgattattctgaagctgctaagcagtatgatgaggctctcaataaacaagactgggtagatggtgagcccacagaagccgagaaggatttttgggaacttgcatcccttgactgttacaaccaccttgctgagtggaaatcacttgaatactgttctacagccagtatagacagtgagaaccccccagacctaaataaaatctggagtgaaccattttatcaggaaacatatctaccttacatgatccgcagcaagctgaagctgctgctccagggagaggctgaccagtccctgctgacatttattgacaaagctatgcacggggagctccagaaggcgattctagagcttcattacagtcaagagctgagtctgctttacctcctgcaagatgatgttgacagagccaaatattacattcaaaatggcattcagagttttatgcagaattattctagtattgatgtcctcttacaccaaagtagactcaccaaattgcagtctgtacaggctttaacagaaattcaggagttcatcagctttataagcaaacaaggcaatttatcatctcaagttccccttaagagacttctgaacacctggacaaacagatatccagatgctaaaatggacccaatgaacatctgggatgacatcatcacaaatcgatgtttctttctcagcaaaatagaggagaagcttacccctcttccagaagataatagtatgaatgtggatcaagatggagaccccagtgacaggatggaagtgcaagagcaggaagaagatatcagctccctgatcaggagttgcaagttttccatgaaaatgaagatgatagacagtgcccggaagcagaacaatttctcacttgctatgaaactactgaaggagctgcataaagagtcaaaaaccagagacgattggctggtgagctgggtgcagagctactgccgcctgagccactgccggagccggtcccagggctgctctgagcaggtgctcactgtgctgaaaacagtctctttgttggatgagaacaacgtgtcaagctacttaagcaaaaatattctggctttccgtgaccagaacattctcttgggtacaacttacaggatcatagcgaatgctctcagcagtgagccagcctgccttgctgaaatcgaggaggacaaggctagaagaatcttagagctttctggatccagttcagaggattcagagaaggtgatcgcgggtctgtaccagagagcattccagcacctctctgaggctgtgcaggcggctgaggaggaggcccagcctccctcctggagctgtgggcctgcagctggggtgattgatgcttacatgacgctggcagatttctgtgaccaacagctgcgcaaggaggaagagaatgcatcagttattgattctgcagaactgcaggcgtatccagcacttgtggtggagaaaatgttgaaagctttaaaattaaattccaatgaagccagattgaagtttcctagattacttcagattatagaacggtatccagaggagactttgagcctcatgacaaaagagatctcttccgttccctgctggcagttcatcagctggatcagccacatggtggccttactggacaaagaccaagccgttgctgttcagcactctgtggaagaaatcactgataactacccgcaggctattgtttatcccttcatcataagcagcgaaagctattccttcaaggatacttctactggtcataagaataaggagtttgtggcaaggattaaaagtaagttggatcaaggaggagtgattcaagattttattaatgccttagatcagctctctaatcctgaactgctctttaaggattggagcaatgatgtaagagctgaactagcaaaaacccctgtaaataaaaaaaacattgaaaaaatgtatgaaagaatgtatgcagccttgggtgacccaaaggctccaggcctgggggcctttagaaggaagtttattcagacttttggaaaagaatttgataaacattttgggaaaggaggttctaaactactgagaatgaagctcagtgacttcaacgacattaccaacatgctacttttaaaaatgaacaaagactcaaagccccctgggaatctgaaagaatgttcaccctggatgagcgacttcaaagtggagttcctgagaaatgagctggagattcccggtcagtatgacggtaggggaaagccattgccagagtaccacgtgcgaatcgccgggtttgatgagcgggtgacagtcatggcgtctctgcgaaggcccaagcgcatcatcatccgtggccatgacgagagggaacaccctttcctggtgaagggtggcgaggacctgcggcaggaccagcgcgtggagcagctcttccaggtcatgaatgggatcctggcccaagactccgcctgcagccagagggccctgcagctgaggacctatagcgttgtgcccatgacctccaggttaggattaattgagtggcttgaaaatactgttaccttgaaggaccttcttttgaacaccatgtcccaagaggagaaggcggcttacctgagtgatcccagggcaccgccgtgtgaatataaagattggctgacaaaaatgtcaggaaaacatgatgttggagcttacatgctaatgtataagggcgctaatcgtactgaaacagtcacgtcttttagaaaacgagaaagtaaagtgcctgctgatctcttaaagcgggccttcgtgaggatgagtacaagccctgaggctttcctggcgctccgctcccacttcgccagctctcacgctctgatatgcatcagccactggatcctcgggattggagacagacatctgaacaactttatggtggccatggagactggcggcgtgatcgggatcgactttgggcatgcgtttggatccgctacacagtttctgccagtccctgagttgatgccttttcggctaactcgccagtttatcaatctgatgttaccaatgaaagaaacgggccttatgtacagcatcatggtacacgcactccgggccttccgctcagaccctggcctgctcaccaacaccatggatgtgtttgtcaaggagccctcctttgattggaaaaattttgaacagaaaatgctgaaaaaaggagggtcatggattcaagaaataaatgttgctgaaaaaaattggtacccccgacagaaaatatgttacgctaagagaaagttagcaggtgccaatccagcagtcattacttgtgatgagctactcctgggtcatgagaaggcccctgccttcagagactatgtggctgtggcacgaggaagcaaagatcacaacattcgtgcccaagaaccagagagtgggctttcagaagagactcaagtgaagtgcctgatggaccaggcaacagaccccaacatccttggcagaacctgggaaggatgggagccctggatgtgaggtctgtgggagtctgcagatagaaagcattacattgtttaaagaatctactatactttggttggcagcattccatgagctgattttcctgaaacactaaagagaaatgtcttttgtgctacagtttcgtagcatgagtttaaatcaagattatgatgagtaaatgtgtatgggttaaatcaaagataaggttatagtaacatcaaagattaggtgaggtttatagaaagatagatatccaggcttaccaaagtattaagtcaagaatataatatgtgatcagctttcaaagcatttacaagtgctgcaagttagtgaaacagctgtctccgtaaatggaggaaatgtggggaagccttggaatgcccttctggttctggcacattggaaagcacactcagaaggcttcatcaccaagattttgggagagtaaagctaagtatagttgatgtaacattgtagaagcagcataggaacaataagaacaataggtaaagctatatggcggtatctcgggaactcagaacacaa

SEQ ID NO: 134795 - DNA, 4120 bp, Homo sapiens
gaacaggactcatgatatacaaaagaacaaagacaaggaatatttattgttagaaataagtgagaagacagtggaaaatctttaaagtactgaaaaaaaattgtcaacctaaaattctattcctagagaaaatctctttcaaaaacaaaggggtgaattgaaaattaaaaagctagtgttccattatgtcagcataaagtcttatgaattttgtacatacctttggtctcctctttgtttgttttcaaattacaaatattttgaaaatcctactgtctttttaagagacaatggcagccgggtgcagtggatcacttgaggccaggagttcaagaccagcctggccaacgtggtgaaaccccaactctactaagaatacaaaaaaattagctgggcgtggtggcccatgcctgtagtcccagctactcaggaggctggggcaggagaattgcttgaacccaggaggcagaggttgcagtgagccgatatccactactgcacaccagcctgggtgacagagcgagactccatcttaaaaaaaaaaaaagagagagacaatggcctctctaagcaacatgacctacatttaaatggagtcaagtggtcctctgtttccatttgtttaatttctactttgatattttgcttgcagcttcaatattactggctcgtgtggcctgcttcatgctcctggaataaattcaataaccaccaattgccccttatgttcccagcccaggattcaaactgtgcttcatgcagaatgggcactctaatggaaggatttggctccaggatagatacaaaactgtacctggtgtttgttggtgtaaagtggtagttaagaagagaacaatgacactacaaaatacaagccaaaaagggaaagtgttagcatttaacatcatagtttatggatattgggatacattgaccattgctttcttctttggtgtccttgatagttattgattctgcagaactgcaggcgtatccagcacttgtggtggagaaaatgttgaaagctttaaaattaaattccaatgaagccagattgaagtttcctagattacttcagattatagaacggtatccagaggagactttgagcctcatgacaaaagagatctcttccgttccctgctggcagttcatcagctggatcagccacatggtggccttactggacaaagaccaagccgttgctgttcagcactctgtggaagaaatcactgataactacccgcaggctattgtttatcccttcatcataagcagcgaaagctattccttcaaggatacttctactggtcataagaataaggagtttgtggcaaggattaaaagtaagttggatcaaggaggagtgattcaagattttattaatgccttagatcagctctctaatcctgaactgctctttaaggattggagcaatgatgtaagagctgaactagcaaaaacccctgtaaataaaaaaaacattgaaaaaatgtatgaaagaatgtatgcagccttgggtgacccaaaggctccaggcctgggggcctttagaaggaagtttattcagacttttggaaaagaatttgataaacattttgggaaaggaggttctaaactactgagaatgaagctcagtgacttcaacgacattaccaacatgctacttttaaaaatgaacaaagactcaaagccccctgggaatctgaaagaatgttcaccctggatgagcgacttcaaagtggagttcctgagaaatgagctggagattcccggtcagtatgacggtaggggaaagccattgccagagtaccacgtgcgaatcgccgggtttgatgagcgggtgacagtcatggcgtctctgcgaaggcccaagcgcatcatcatccgtggccatgacgagagggaacaccctttcctggtgaagggtggcgaggacctgcggcaggaccagcgcgtggagcagctcttccaggtcatgaatgggatcctggcccaagactccgcctgcagccagagggccctgcagctgaggacctatagcgttgtgcccatgacctccaggttaggattaattgagtggcttgaaaatactgttaccttgaaggaccttcttttgaacaccatgtcccaagaggagaaggcggcttacctgagtgatcccagggcaccgccgtgtgaatataaagattggctgacaaaaatgtcaggaaaacatgatgttggagcttacatgctaatgtataagggcgctaatcgtactgaaacagtcacgtcttttagaaaacgagaaagtaaagtgcctgctgatctcttaaagcgggccttcgtgaggatgagtacaagccctgaggctttcctggcgctccgctcccacttcgccagctctcacgctctgatatgcatcagccactggatcctcgggattggagacagacatctgaacaactttatggtggccatggagactggcggcgtgatcgggatcgactttgggcatgcgtttggatccgctacacagtttctgccagtccctgagttgatgccttttcggctaactcgccagtttatcaatctgatgttaccaatgaaagaaacgggccttatgtacagcatcatggtacacgcactccgggccttccgctcagaccctggcctgctcaccaacaccatggatgtgtttgtcaaggagccctcctttgattggaaaaattttgaacagaaaatgctgaaaaaaggagggtcatggattcaagaaataaatgttgctgaaaaaaattggtacccccgacagaaaatatgttacgctaagagaaagttagcaggtgccaatccagcagtcattacttgtgatgagctactcctgggtcatgagaaggcccctgccttcagagactatgtggctgtggcacgaggaagcaaagatcacaacattcgtgcccaagaaccagagagtgggctttcagaagagactcaagtgaagtgcctgatggaccaggcaacagaccccaacatccttggcagaacctgggaaggatgggagccctggatgtgaggtctgtgggagtctgcagatagaaagcattacattgtttaaagaatctactatactttggttggcagcattccatgagctgattttcctgaaacactaaagagaaatgtcttttgtgctacagtttcgtagcatgagtttaaatcaagattatgatgagtaaatgtgtatgggttaaatcaaagataaggttatagtaacatcaaagattaggtgaggtttatagaaagatagatatccaggcttaccaaagtattaagtcaagaatataatatgtgatcagctttcaaagcatttacaagtgctgcaagttagtgaaacagctgtctccgtaaatggaggaaatgtggggaagccttggaatgcccttctggttctggcacattggaaagcacactcagaaggcttcatcaccaagattttgggagagtaaagctaagtatagttgatgtaacattgtagaagcagcataggaacaataagaacaataggtaaagctataattatggcttatatttagaaatgactgcatttgatattttaggatatttttctaggttttttcctttcattttattctcttctagttttgacattttatgatagatttgctctctagaaggaaacgtctttatttaggagggcaaaaattttggtcatagcattcacttttgctattccaatctacaactggaagatacataaaagtgctttgcattgaatttgggataacttcaaaaatcccatggttgttgttagggatagtactaagcatttcagttccaggagaataaaagaaattcctatttgaaatgaattcctcatttggaggaaaaaaagcatgcattctagcacaacaagatgaaattatggaatacaaaagtggctccttcccatgtgcagtccctgtccccccccgccagtcctccacacccaaactgtttctgattggcttttagctttttgttgtttttttttttccttctaacacttgtatttggaggctcttctgtgattttgagaagtatactcttgagtgtttaataaagtttttttccaaaagta

SEQ ID NO: 134796 - DNA, 3269 bp, Homo sapiens
gaagtagaagatttttctatacatctgtctaagaacaaccagcagcagctgtctcgtgtgattccattcttgcaacaaaagactgttctcctgcacagaaagtgcctgggagagtccagtggttgccgcagcagaagagagctaggggatggaagacttgttttgtacttgcgtttttatacttctgagttttctttattttggacatatgttacttttataacagatgatgtgagatgttttactcagcattaagtttcagctctctgttttagatctcttccgttccctgctggcagttcatcagctggatcagccacatggtggccttactggacaaagaccaagccgttgctgttcagcactctgtggaagaaatcactgataactacccgcaggctattgtttatcccttcatcataagcagcgaaagctattccttcaaggatacttctactggtcataagaataaggagtttgtggcaaggattaaaagtaagttggatcaaggaggagtgattcaagattttattaatgccttagatcagctctctaatcctgaactgctctttaaggattggagcaatgatgtaagagctgaactagcaaaaacccctgtaaataaaaaaaacattgaaaaaatgtatgaaagaatgtatgcagccttgggtgacccaaaggctccaggcctgggggcctttagaaggaagtttattcagacttttggaaaagaatttgataaacattttgggaaaggaggttctaaactactgagaatgaagctcagtgacttcaacgacattaccaacatgctacttttaaaaatgaacaaagactcaaagccccctgggaatctgaaagaatgttcaccctggatgagcgacttcaaagtggagttcctgagaaatgagctggagattcccggtcagtatgacggtaggggaaagccattgccagagtaccacgtgcgaatcgccgggtttgatgagcgggtgacagtcatggcgtctctgcgaaggcccaagcgcatcatcatccgtggccatgacgagagggaacaccctttcctggtgaagggtggcgaggacctgcggcaggaccagcgcgtggagcagctcttccaggtcatgaatgggatcctggcccaagactccgcctgcagccagagggccctgcagctgaggacctatagcgttgtgcccatgacctccaggttaggattaattgagtggcttgaaaatactgttaccttgaaggaccttcttttgaacaccatgtcccaagaggagaaggcggcttacctgagtgatcccagggcaccgccgtgtgaatataaagattggctgacaaaaatgtcaggaaaacatgatgttggagcttacatgctaatgtataagggcgctaatcgtactgaaacagtcacgtcttttagaaaacgagaaagtaaagtgcctgctgatctcttaaagcgggccttcgtgaggatgagtacaagccctgaggctttcctggcgctccgctcccacttcgccagctctcacgctctgatatgcatcagccactggatcctcgggattggagacagacatctgaacaactttatggtggccatggagactggcggcgtgatcgggatcgactttgggcatgcgtttggatccgctacacagtttctgccagtccctgagttgatgccttttcggctaactcgccagtttatcaatctgatgttaccaatgaaagaaacgggccttatgtacagcatcatggtacacgcactccgggccttccgctcagaccctggcctgctcaccaacaccatggatgtgtttgtcaaggagccctcctttgattggaaaaattttgaacagaaaatgctgaaaaaaggagggtcatggattcaagaaataaatgttgctgaaaaaaattggtacccccgacagaaaatatgttacgctaagagaaagttagcaggtgccaatccagcagtcattacttgtgatgagctactcctgggtcatgagaaggcccctgccttcagagactatgtggctgtggcacgaggaagcaaagatcacaacattcgtgcccaagaaccagagagtgggctttcagaagagactcaagtgaagtgcctgatggaccaggcaacagaccccaacatccttggcagaacctgggaaggatgggagccctggatgtgaggtctgtgggagtctgcagatagaaagcattacattgtttaaagaatctactatactttggttggcagcattccatgagctgattttcctgaaacactaaagagaaatgtcttttgtgctacagtttcgtagcatgagtttaaatcaagattatgatgagtaaatgtgtatgggttaaatcaaagataaggttatagtaacatcaaagattaggtgaggtttatagaaagatagatatccaggcttaccaaagtattaagtcaagaatataatatgtgatcagctttcaaagcatttacaagtgctgcaagttagtgaaacagctgtctccgtaaatggaggaaatgtggggaagccttggaatgcccttctggttctggcacattggaaagcacactcagaaggcttcatcaccaagattttgggagagtaaagctaagtatagttgatgtaacattgtagaagcagcataggaacaataagaacaataggtaaagctataattatggcttatatttagaaatgactgcatttgatattttaggatatttttctaggttttttcctttcattttattctcttctagttttgacattttatgatagatttgctctctagaaggaaacgtctttatttaggagggcaaaaattttggtcatagcattcacttttgctattccaatctacaactggaagatacataaaagtgctttgcattgaatttgggataacttcaaaaatcccatggttgttgttagggatagtactaagcatttcagttccaggagaataaaagaaattcctatttgaaatgaattcctcatttggaggaaaaaaagcatgcattctagcacaacaagatgaaattatggaatacaaaagtggctccttcccatgtgcagtccctgtccccccccgccagtcctccacacccaaactgtttctgattggcttttagctttttgttgtttttttttttccttctaacacttgtatttggaggctcttctgtgattttgagaagtatactcttgagtgtttaataaagtttttttccaaaagta

SEQ ID NO: 134797 - DNA, 11972 bp, Homo sapiens
ggggcatttccgggtccgggccgagcgggcgcacgcgcgggagcgggactcggcggcatggcgggctccggagccggtgtgcgttgctccctgctgcggctgcaggagaccttgtccgctgcggaccgctgcggtgctgccctggccggtcatcaactgatccgcggcctggggcaggaatgcgtcctgagcagcagccccgcggtgctggcattacagacatctttagttttttccagagatttcggtttgcttgtatttgtccggaagtcactcaacagtattgaatttcgtgaatgtagagaagaaatcctaaagtttttatgtattttcttagaaaaaatgggccagaagatcgcaccttactctgttgaaattaagaacacttgtaccagtgtttatacaaaagatagagctgctaaatgtaaaattccagccctggaccttcttattaagttacttcagacttttagaagttctagactcatggatgaatttaaaattggagaattatttagtaaattctatggagaacttgcattgaaaaaaaaaataccagatacagttttagaaaaagtatatgagctcctaggattattgggtgaagttcatcctagtgagatgataaataatgcagaaaacctgttccgcgcttttctgggtgaacttaagacccagatgacatcagcagtaagagagcccaaactacctgttctggcaggatgtctgaaggggttgtcctcacttctgtgcaacttcactaagtccatggaagaagatccccagacttcaagggagatttttaattttgtactaaaggcaattcgtcctcagattgatctgaagagatatgctgtgccctcagctggcttgcgcctatttgccctgcatgcatctcagtttagcacctgccttctggacaactacgtgtctctatttgaagtcttgttaaagtggtgtgcccacacaaatgtagaattgaaaaaagctgcactttcagccctggaatcctttctgaaacaggtttctaatatggtggcgaaaaatgcagaaatgcataaaaataaactgcagtactttatggagcagttttatggaatcatcagaaatgtggattcgaacaacaaggagttatctattgctatccgtggatatggactttttgcaggaccgtgcaaggttataaacgcaaaagatgttgacttcatgtacgttgagctcattcagcgctgcaagcagatgttcctcacccagacagacactggtgacgaccgtgtttatcagatgccaagcttcctccagtctgttgcaagcgtcttgctgtaccttgacacagttcctgaggtgtatactccagttctggagcacctcgtggtgatgcagatagacagtttcccacagtacagtccaaaaatgcagctggtgtgttgcagagccatagtgaaggtgttcctagctttggcagcaaaagggccagttctcaggaattgcattagtactgtggtgcatcagggtttaatcagaatatgttctaaaccagtggtccttccaaagggccctgagtctgaatctgaagaccaccgtgcttcaggggaagtcagaactggcaaatggaaggtgcccacatacaaagactacgtggatctcttcagacatctcctgagctctgaccagatgatggattctattttagcagatgaagcatttttctctgtgaattcctccagtgaaagtctgaatcatttactttatgatgaatttgtaaaatccgttttgaagattgttgagaaattggatcttacacttgaaatacagactgttggggaacaagagaatggagatgaggcgcctggtgtttggatgatcccaacttcagatccagcggctaacttgcatccagctaaacctaaagatttttcggctttcattaacctggtggaattttgcagagagattctccctgagaaacaagcagaattttttgaaccatgggtgtactcattttcatatgaattaattttgcaatctacaaggttgcccctcatcagtggtttctacaaattgctttctattacagtaagaaatgccaagaaaataaaatatttcgagggagttagtccaaagagtctgaaacactctcctgaagacccagaaaagtattcttgctttgctttatttgtgaaatttggcaaagaggtggcagttaaaatgaagcagtacaaagatgaacttttggcctcttgtttgacctttcttctgtccttgccacacaacatcattgaactcgatgttagagcctacgttcctgcactgcagatggctttcaaactgggcctgagctatacccccttggcagaagtaggcctgaatgctctagaagaatggtcaatttatattgacagacatgtaatgcagccttattacaaagacattctcccctgcctggatggatacctgaagacttcagccttgtcagatgagaccaagaataactgggaagtgtcagctctttctcgggctgcccagaaaggatttaataaagtggtgttaaagcatctgaagaagacaaagaacctttcatcaaacgaagcaatatccttagaagaaataagaattagagtagtacaaatgcttggatctctaggaggacaaataaacaaaaatcttctgacagtcacgtcctcagatgagatgatgaagagctatgtggcctgggacagagagaagcggctgagctttgcagtgccctttagagagatgaaacctgtcattttcctggatgtgttcctgcctcgagtcacagaattagcgctcacagccagtgacagacaaactaaagttgcagcctgtgaacttttacatagcatggttatgtttatgttgggcaaagccacgcagatgccagaagggggacagggagccccacccatgtaccagctctataagcggacgtttcctgtgctgcttcgacttgcgtgtgatgttgatcaggtgacaaggcaactgtatgagccactagttatgcagctgattcactggttcactaacaacaagaaatttgaaagtcaggatactgttgccttactagaagctatattggatggaattgtggaccctgttgacagtactttaagagatttttgtggtcggtgtattcgagaattccttaaatggtccattaagcaaataacaccacagcagcaggagaagagtccagtaaacaccaaatcgcttttcaagcgactttatagccttgcgcttcaccccaatgctttcaagaggctgggagcatcacttgcctttaataatatctacagggaattcagggaagaagagtctctggtggaacagtttgtgtttgaagccttggtgatatacatggagagtctggccttagcacatgcagatgagaagtccttaggtacaattcaacagtgttgtgatgccattgatcacctatgccgcatcattgaaaagaagcatgtttctttaaataaagcaaagaaacgacgtttgccgcgaggatttccaccttccgcatcattgtgtttattggatctggtcaagtggcttttagctcattgtgggaggccccagacagaatgtcgacacaaatccattgaactcttttataaattcgttcctttattgccaggcaacagatcccctaatttgtggctgaaagatgttctcaaggaagaaggtgtctcttttctcatcaacacctttgaggggggtggctgtggccagccctcgggcatcctggcccagcccaccctcttgtaccttcgggggccattcagcctgcaggccacgctatgctggctggacctgctcctggccgcgttggagtgctacaacacgttcattggcgagagaactgtaggagcgctccaggtcctaggtactgaagcccagtcttcacttttgaaagcagtggctttcttcttagaaagcattgccatgcatgacattatagcagcagaaaagtgctttggcactggggcagcaggtaacagaacaagcccacaagagggagaaaggtacaactacagcaaatgcaccgttgtggtccggattatggagtttaccacgactctgctaaacacctccccggaaggatggaagctcctgaagaaggacttgtgtaatacacacctgatgagagtcctggtgcagacgctgtgtgagcccgcaagcataggtttcaacatcggagacgtccaggttatggctcatcttcctgatgtttgtgtgaatctgatgaaagctctaaagatgtccccatacaaagatatcctagagacccatctgagagagaaaataacagcacagagcattgaggagctttgtgccgtcaacttgtatggccctgacgcgcaagtggacaggagcaggctggctgctgttgtgtctgcctgtaaacagcttcacagagctgggcttctgcataatatattaccgtctcagtccacagatttgcatcattctgttggcacagaacttctttccctggtttataaaggcattgcccctggagatgagagacagtgtctgccttctctagacctcagttgtaagcagctggccagcggacttctggagttagcctttgcttttggaggactgtgtgagcgccttgtgagtcttctcctgaacccagcggtgctgtccacggcgtccttgggcagctcacagggcagcgtcatccacttctcccatggggagtatttctatagcttgttctcagaaacgatcaacacggaattattgaaaaatctggatcttgctgtattggagctcatgcagtcttcagtggataataccaaaatggtgagtgccgttttgaacggcatgttagaccagagcttcagggagcgagcaaaccagaaacaccaaggactgaaacttgcgactacaattctgcaacactggaagaagtgtgattcatggtgggccaaagattcccctctcgaaactaaaatggcagtgctggccttactggcaaaaattttacagattgattcatctgtatcttttaatacaagtcatggttcattccctgaagtctttacaacatatattagtctacttgctgacacaaagctggatctacatttaaagggccaagctgtcactcttcttccattcttcaccagcctcactggaggcagtctggaggaacttagacgtgttctggagcagctcatcgttgctcacttccccatgcagtccagggaatttcctccaggaactccgcggttcaataattatgtggactgcatgaaaaagtttctagatgcattggaattatctcaaagccctatgttgttggaattgatgacagaagttctttgtcgggaacagcagcatgtcatggaagaattatttcaatccagtttcaggaggattgccagaaggggttcatgtgtcacacaagtaggccttctggaaagcgtgtatgaaatgttcaggaaggatgacccccgcctaagtttcacacgccagtcctttgtggaccgctccctcctcactctgctgtggcactgtagcctggatgctttgagagaattcttcagcacaattgtggtggatgccattgatgtgttgaagtccaggtttacaaagctaaatgaatctacctttgatactcaaatcaccaagaagatgggctactataagattctagacgtgatgtattctcgccttcccaaagatgatgttcatgctaaggaatcaaaaattaatcaagttttccatggctcgtgtattacagaaggaaatgaacttacaaagacattgattaaattgtgctacgatgcatttacagagaacatggcaggagagaatcagctgctggagaggagaagactttaccattgtgcagcatacaactgcgccatatctgtcatctgctgtgtcttcaatgagttaaaattttaccaaggttttctgtttagtgaaaaaccagaaaagaacttgcttatttttgaaaatctgatcgacctgaagcgccgctataattttcctgtagaagttgaggttcctatggaaagaaagaaaaagtacattgaaattaggaaagaagccagagaagcagcaaatggggattcagatggtccttcctatatgtcttccctgtcatatttggcagacagtaccctgagtgaggaaatgagtcaatttgatttctcaaccggagttcagagctattcatacagctcccaagaccctagacctgccactggtcgttttcggagacgggagcagcgggaccccacggtgcatgatgatgtgctggagctggagatggacgagctcaatcggcatgagtgcatggcgcccctgacggccctggtcaagcacatgcacagaagcctgggcccgcctcaaggagaagaggattcagtgccaagagatcttccttcttggatgaaattcctccatggcaaactgggaaatccaatagtaccattaaatatccgtctcttcttagccaagcttgttattaatacagaagaggtctttcgcccttacgcgaagcactggcttagccccttgctgcagctggctgcttctgaaaacaatggaggagaaggaattcactacatggtggttgagatagtggccactattctttcatggacaggcttggccactccaacaggggtccctaaagatgaagtgttagcaaatcgattgcttaatttcctaatgaaacatgtctttcatccaaaaagagctgtgtttagacacaaccttgaaattataaagacccttgtcgagtgctggaaggattgtttatccatcccttataggttaatatttgaaaagttttccggtaaagatcctaattctaaagacaactcagtagggattcaattgctaggcatcgtgatggccaatgacctgcctccctatgacccacagtgtggcatccagagtagcgaatacttccaggctttggtgaataatatgtcctttgtaagatataaagaagtgtatgccgctgcagcagaagttctaggacttatacttcgatatgttatggagagaaaaaacatactggaggagtctctgtgtgaactggttgcgaaacaattgaagcaacatcagaatactatggaggacaagtttattgtgtgcttgaacaaagtgaccaagagcttccctcctcttgcagacaggttcatgaatgctgtgttctttctgctgccaaaatttcatggagtgttgaaaacactctgtctggaggtggtactttgtcgtgtggagggaatgacagagctgtacttccagttaaagagcaaggacttcgttcaagtcatgagacatagagatgatgaaagacaaaaagtatgtttggacataatttataagatgatgccaaagttaaaaccagtagaactccgagaacttctgaaccccgttgtggaattcgtttcccatccttctacaacatgtagggaacaaatgtataatattctcatgtggattcatgataattacagagatccagaaagtgagacagataatgactcccaggaaatatttaagttggcaaaagatgtgctgattcaaggattgatcgatgagaaccctggacttcaattaattattcgaaatttctggagccatgaaactaggttaccttcaaataccttggaccggttgctggcactaaattccttatattctcctaagatagaagtgcactttttaagtttagcaacaaattttctgctcgaaatgaccagcatgagcccagattatccaaaccccatgttcgagcatcctctgtcagaatgcgaatttcaggaatataccattgattctgattggcgtttccgaagtactgttctcactccgatgtttgtggagacccaggcctcccagggcactctccagacccgtacccaggaagggtccctctcagctcgctggccagtggcagggcagataagggccacccagcagcagcatgacttcacactgacacagactgcagatggaagaagctcatttgattggctgaccgggagcagcactgacccgctggtcgaccacaccagtccctcatctgactccttgctgtttgcccacaagaggagtgaaaggttacagagagcacccttgaagtcagtggggcctgattttgggaaaaaaaggctgggccttccaggggacgaggtggataacaaagtgaaaggtgcggccggccggacggacctactacgactgcgcagacggtttatgagggaccaggagaagctcagtttgatgtatgccagaaaaggcgttgctgagcaaaaacgagagaaggaaatcaagagtgagttaaaaatgaagcaggatgcccaggtcgttctgtacagaagctaccggcacggagaccttcctgacattcagatcaagcacagcagcctcatcaccccgttacaggccgtggcccagagggacccaataattgcaaaacagctctttagcagcttgttttctggaattttgaaagagatggataaatttaagacactgtctgaaaaaaacaacatcactcaaaagttgcttcaagacttcaatcgttttcttaataccaccttctctttctttccaccctttgtctcttgtattcaggacattagctgtcagcacgcagccctgctgagcctcgacccagcggctgttagcgctggttgcctggccagcctacagcagcccgtgggcatccgcctgctagaggaggctctgctccgcctgctgcctgctgagctgcctgccaagcgagtccgtgggaaggcccgcctccctcctgatgtcctcagatgggtggagcttgctaagctgtatagatcaattggagaatacgacgtcctccgtgggatttttaccagtgagataggaacaaagcaaatcactcagagtgcattattagcagaagccagaagtgattattctgaagctgctaagcagtatgatgaggctctcaataaacaagactgggtagatggtgagcccacagaagccgagaaggatttttgggaacttgcatcccttgactgttacaaccaccttgctgagtggaaatcacttgaatactgttctacagccagtatagacagtgagaaccccccagacctaaataaaatctggagtgaaccattttatcaggaaacatatctaccttacatgatccgcagcaagctgaagctgctgctccagggagaggctgaccagtccctgctgacatttattgacaaagctatgcacggggagctccagaaggcgattctagagcttcattacagtcaagagctgagtctgctttacctcctgcaagatgatgttgacagagccaaatattacattcaaaatggcattcagagttttatgcagaattattctagtattgatgtcctcttacaccaaagtagactcaccaaattgcagtctgtacaggctttaacagaaattcaggagttcatcagctttataagcaaacaaggcaatttatcatctcaagttccccttaagagacttctgaacacctggacaaacagatatccagatgctaaaatggacccaatgaacatctgggatgacatcatcacaaatcgatgtttctttctcagcaaaatagaggagaagcttacccctcttccagaagataatagtatgaatgtggatcaagatggagaccccagtgacaggatggaagtgcaagagcaggaagaagatatcagctccctgatcaggagttgcaagttttccatgaaaatgaagatgatagacagtgcccggaagcagaacaatttctcacttgctatgaaactactgaaggagctgcataaagagtcaaaaaccagagacgattggctggtgagctgggtgcagagctactgccgcctgagccactgccggagccggtcccagggctgctctgagcaggtgctcactgtgctgaaaacagtctctttgttggatgagaacaacgtgtcaagctacttaagcaaaaatattctggctttccgtgtgaatataaagattggctgacaaaaatgtcaggaaaacatgatgttggagcttacatgctaatgtataagggcgctaatcgtactgaaacagtcacgtcttttagaaaacgagaaagtaaagtgcctgctgatctcttaaagcgggccttcgtgaggatgagtacaagccctgaggctttcctggcgctccgctcccacttcgccagctctcacgctctgatatgcatcagccactggatcctcgggattggagacagacatctgaacaactttatggtggccatggagactggcggcgtgatcgggatcgactttgggcatgcgtttggatccgctacacagtttctgccagtccctgagttgatgccttttcggctaactcgccagtttatcaatctgatgttaccaatgaaagaaacgggccttatgtacagcatcatggtacacgcactccgggccttccgctcagaccctggcctgctcaccaacaccatggatgtgtttgtcaaggagccctcctttgattggaaaaattttgaacagaaaatgctgaaaaaaggagggtcatggattcaagaaataaatgttgctgaaaaaaattggtacccccgacagaaaatatgttacgctaagagaaagttagcaggtgccaatccagcagtcattacttgtgatgagctactcctgggtcatgagaaggcccctgccttcagagactatgtggctgtggcacgaggaagcaaagatcacaacattcgtgcccaagaaccagagagtgggctttcagaagagactcaagtgaagtgcctgatggaccaggcaacagaccccaacatccttggcagaacctgggaaggatgggagccctggatgtgaggtctgtgggagtctgcagatagaaagcattacattgtttaaagaatctactatactttggttggcagcattccatgagctgattttcctgaaacactaaagagaaatgtcttttgtgctacagtttcgtagcatgagtttaaatcaagattatgatgagtaaatgtgtatgggttaaatcaaagataaggttatagtaacatcaaagattaggtgaggtttatagaaagatagatatccaggcttaccaaagtattaagtcaagaatataatatgtgatcagctttcaaagcatttacaagtgctgcaagttagtgaaacagctgtctccgtaaatggaggaaatgtggggaagccttggaatgcccttctggttctggcacattggaaagcacactcagaaggcttcatcaccaagattttgggagagtaaagctaagtatagttgatgtaacattgtagaagcagcataggaacaataagaacaataggtaaagctataattatggcttatatttagaaatgactgcatttgatattttaggatatttttctaggttttttcctttcattttattctcttctagttttgacattttatgatagatttgctctctagaaggaaacgtctttatttaggagggcaaaaattttggtcatagcattcacttttgctattccaatctacaactggaagatacataaaagtgctttgcattgaatttgggataacttcaaaaatcccatggttgttgttagggatagtactaagcatttcagttccaggagaataaaagaaattcctatttgaaatgaattcctcatttggaggaaaaaaagcatgcattctagcacaacaagatgaaattatggaatacaaaagtggctccttcccatgtgcagtccctgtccccccccgccagtcctccacacccaaactgtttctgattggcttttagctttttgttgtttttttttttccttctaacacttgtatttggaggctcttctgtgattttgagaagtatactcttgagtgtttaataaagtttttttccaaaagta

SEQ ID NO: 134798 - DNA, 2673 bp, Homo sapiens
gttctagatcgcgatctagaactagtcaaaaaaaacattgaaaaaatgtatgaaagaatgtatgcagccttgggtgacccaaaggctccaggcctgggggcctttagaaggaagtttattcagacttttggaaaagaatttgataaacattttgggaaaggaggttctaaactactgagaatgaagctcagtgacttcaacgacattaccaacatgctacttttaaaaatgaacaaagactcaaagccccctgggaatctgaaagaatgttcaccctggatgagcgacttcaaagtggagttcctgagaaatgagctggagattcccggtcagtatgacggtaggggaaagccattgccagagtaccacgtgcgaatcgccgggtttgatgagcgggtgacagtcatggcgtctctgcgaaggcccaagcgcatcatcatccgtggccatgacgagagggaacaccctttcctggtgaagggtggcgaggacctgcggcaggaccagcgcgtggagcagctcttccaggtcatgaatgggatcctggcccaagactccgcctgcagccagagggccctgcagctgaggacctatagcgttgtgcccatgacctccaggttaggattaattgagtggcttgaaaatactgttaccttgaaggaccttcttttgaacaccatgtcccaagaggagaaggcggcttacctgagtgatcccagggcaccgccgtgtgaatataaagattggctgacaaaaatgtcaggaaaacatgatgttggagcttacatgctaatgtataagggcgctaatcgtactgaaacagtcacgtcttttagaaaacgagaaagtaaagtgcctgctgatctcttaaagcgggccttcgtgaggatgagtacaagccctgaggctttcctggcgctccgctcccacttcgccagctctcacgctctgatatgcatcagccactggatcctcgggattggagacagacatctgaacaactttatggtggccatggagactggcggcgtgatcgggatcgactttgggcatgcgtttggatccgctacacagtttctgccagtccctgagttgatgccttttcggctaactcgccagtttatcaatctgatgttaccaatgaaagaaacgggccttatgtacagcatcatggtacacgcactccgggccttccgctcagaccctggcctgctcaccaacaccatggatgtgtttgtcaaggagccctcctttgattggaaaaattttgaacagaaaatgctgaaaaaaggagggtcatggattcaagaaataaatgttgctgaaaaaaattggtacccccgacagaaaatatgttacgctaagagaaagttagcaggtgccaatccagcagtcattacttgtgatgagctactcctgggtcatgagaaggcccctgccttcagagactatgtggctgtggcacgaggaagcaaagatcacaacattcgtgcccaagaaccagagagtgggctttcagaagagactcaagtgaagtgcctgatggaccaggcaacagaccccaacatccttggcagaacctgggaaggatgggagccctggatgtgaggtctgtgggagtctgcagatagaaagcattacattgtttaaagaatctactatactttggttggcagcattccatgagctgattttcctgaaacactaaagagaaatgtcttttgtgctacagtttcgtagcatgagtttaaatcaagattatgatgagtaaatgtgtatgggttaaatcaaagataaggttatagtaacatcaaagattaggtgaggtttatagaaagatagatatccaggcttaccaaagtattaagtcaagaatataatatgtgatcagctttcaaagcatttacaagtgctgcaagttagtgaaacagctgtctccgtaaatggaggaaatgtggggaagccttggaatgcccttctggttctggcacattggaaagcacactcagaaggcttcatcaccaagattttgggagagtaaagctaagtatagttgatgtaacattgtagaagcagcataggaacaataagaacaataggtaaagctataattatggcttatatttagaaatgactgcatttgatattttaggatatttttctaggttttttcctttcattttattctcttctagttttgacattttatgatagatttgctctctagaaggaaacgtctttatttaggagggcaaaaattttggtcatagcattcacttttgctattccaatctacaactggaagatacataaaagtgctttgcattgaatttgggataacttcaaaaatcccatggttgttgttagggatagtactaagcatttcagttccaggagaataaaagaaattcctatttgaaatgaattcctcatttggaggaaaaaaagcatgcattctagcacaacaagatgaaattatggaatacaaaagtggctccttcccatgtgcagtccctgtccccccccgccagtcctccacacccaaactgtttctgattggcttttagctttttgttgtttttttttttccttctaacacttgtatttggaggctcttctgtgattttgagaagtatactcttgagtgtttaataaagtttttttccaaaagta

SEQ ID NO: 134799 - DNA, 2395 bp, Homo sapiens
atctgagtatcccaattcatagaggccacggaggaatgctcacagccactctggcttttccctctgagtttgacacgtggctagcctgtgccctgagatgacattctgatttttgaaggtgacagtcatggcgtctctgcgaaggcccaagcgcatcatcatccgtggccatgacgagagggaacaccctttcctggtgaagggtggcgaggacctgcggcaggaccagcgcgtggagcagctcttccaggtcatgaatgggatcctggcccaagactccgcctgcagccagagggccctgcagctgaggacctatagcgttgtgcccatgacctccaggttaggattaattgagtggcttgaaaatactgttaccttgaaggaccttcttttgaacaccatgtcccaagaggagaaggcggcttacctgagtgatcccagggcaccgccgtgtgaatataaagattggctgacaaaaatgtcaggaaaacatgatgttggagcttacatgctaatgtataagggcgctaatcgtactgaaacagtcacgtcttttagaaaacgagaaagtaaagtgcctgctgatctcttaaagcgggccttcgtgaggatgagtacaagccctgaggctttcctggcgctccgctcccacttcgccagctctcacgctctgatatgcatcagccactggatcctcgggattggagacagacatctgaacaactttatggtggccatggagactggcggcgtgatcgggatcgactttgggcatgcgtttggatccgctacacagtttctgccagtccctgagttgatgccttttcggctaactcgccagtttatcaatctgatgttaccaatgaaagaaacgggccttatgtacagcatcatggtacacgcactccgggccttccgctcagaccctggcctgctcaccaacaccatggatgtgtttgtcaaggagccctcctttgattggaaaaattttgaacagaaaatgctgaaaaaaggagggtcatggattcaagaaataaatgttgctgaaaaaaattggtacccccgacagaaaatatgttacgctaagagaaagttagcaggtgccaatccagcagtcattacttgtgatgagctactcctgggtcatgagaaggcccctgccttcagagactatgtggctgtggcacgaggaagcaaagatcacaacattcgtgcccaagaaccagagagtgggctttcagaagagactcaagtgaagtgcctgatggaccaggcaacagaccccaacatccttggcagaacctgggaaggatgggagccctggatgtgaggtctgtgggagtctgcagatagaaagcattacattgtttaaagaatctactatactttggttggcagcattccatgagctgattttcctgaaacactaaagagaaatgtcttttgtgctacagtttcgtagcatgagtttaaatcaagattatgatgagtaaatgtgtatgggttaaatcaaagataaggttatagtaacatcaaagattaggtgaggtttatagaaagatagatatccaggcttaccaaagtattaagtcaagaatataatatgtgatcagctttcaaagcatttacaagtgctgcaagttagtgaaacagctgtctccgtaaatggaggaaatgtggggaagccttggaatgcccttctggttctggcacattggaaagcacactcagaaggcttcatcaccaagattttgggagagtaaagctaagtatagttgatgtaacattgtagaagcagcataggaacaataagaacaataggtaaagctataattatggcttatatttagaaatgactgcatttgatattttaggatatttttctaggttttttcctttcattttattctcttctagttttgacattttatgatagatttgctctctagaaggaaacgtctttatttaggagggcaaaaattttggtcatagcattcacttttgctattccaatctacaactggaagatacataaaagtgctttgcattgaatttgggataacttcaaaaatcccatggttgttgttagggatagtactaagcatttcagttccaggagaataaaagaaattcctatttgaaatgaattcctcatttggaggaaaaaaagcatgcattctagcacaacaagatgaaattatggaatacaaaagtggctccttcccatgtgcagtccctgtccccccccgccagtcctccacacccaaactgtttctgattggcttttagctttttgttgtttttttttttccttctaacacttgtatttggaggctcttctgtgattttgagaagtatactcttgagtgtttaataaagtttttttccaaaagta

SEQ ID NO: 134800 - DNA, 1861 bp, Homo sapiens
cccttctgccctcacccttagtgggatcacagcagccgcacagctgtgtctcttttgtaggcgggccttcgtgaggatgagtacaagccctgaggctttcctggcgctccgctcccacttcgccagctctcacgctctgatatgcatcagccactggatcctcgggattggagacagacatctgaacaactttatggtggccatggagactggcggcgtgatcgggatcgactttgggcatgcgtttggatccgctacacagtttctgccagtccctgagttgatgccttttcggctaactcgccagtttatcaatctgatgttaccaatgaaagaaacgggccttatgtacagcatcatggtacacgcactccgggccttccgctcagaccctggcctgctcaccaacaccatggatgtgtttgtcaaggagccctcctttgattggaaaaattttgaacagaaaatgctgaaaaaaggagggtcatggattcaagaaataaatgttgctgaaaaaaattggtacccccgacagaaaatatgttacgctaagagaaagttagcaggtgccaatccagcagtcattacttgtgatgagctactcctgggtcatgagaaggcccctgccttcagagactatgtggctgtggcacgaggaagcaaagatcacaacattcgtgcccaagaaccagagagtgggctttcagaagagactcaagtgaagtgcctgatggaccaggcaacagaccccaacatccttggcagaacctgggaaggatgggagccctggatgtgaggtctgtgggagtctgcagatagaaagcattacattgtttaaagaatctactatactttggttggcagcattccatgagctgattttcctgaaacactaaagagaaatgtcttttgtgctacagtttcgtagcatgagtttaaatcaagattatgatgagtaaatgtgtatgggttaaatcaaagataaggttatagtaacatcaaagattaggtgaggtttatagaaagatagatatccaggcttaccaaagtattaagtcaagaatataatatgtgatcagctttcaaagcatttacaagtgctgcaagttagtgaaacagctgtctccgtaaatggaggaaatgtggggaagccttggaatgcccttctggttctggcacattggaaagcacactcagaaggcttcatcaccaagattttgggagagtaaagctaagtatagttgatgtaacattgtagaagcagcataggaacaataagaacaataggtaaagctataattatggcttatatttagaaatgactgcatttgatattttaggatatttttctaggttttttcctttcattttattctcttctagttttgacattttatgatagatttgctctctagaaggaaacgtctttatttaggagggcaaaaattttggtcatagcattcacttttgctattccaatctacaactggaagatacataaaagtgctttgcattgaatttgggataacttcaaaaatcccatggttgttgttagggatagtactaagcatttcagttccaggagaataaaagaaattcctatttgaaatgaattcctcatttggaggaaaaaaagcatgcattctagcacaacaagatgaaattatggaatacaaaagtggctccttcccatgtgcagtccctgtccccccccgccagtcctccacacccaaactgtttctgattggcttttagctttttgttgtttttttttttccttctaacacttgtatttggaggctcttctgtgattttgagaagtatactcttgagtgtttaataaagtttttttccaaaagta

SEQ ID NO: 134801 - DNA, 796 bp, Homo sapiens
  misc_feature (8)..(8): n is a, c, g, or t
ctcgtgcnaattcggcagagaagcatttacaagtgctgcaagttagtgaaacagctgtctccgtaaatggaggaaatgtggggaagccttggaatgcccttctggttctggcacattggaaagcacactcagaaggcttcatcaccaagattttgggagagtaaagctaagtatagttgatgtaacattgtagaagcagcataggaacaataagaacaataggtaaagctataattatggcttatatttagaaatgactgcatttgatattttaggatatttttctaggttttttcctttcattttattctcttctagttttgacattttatgatagatttgctctctagaaggaaacgtctttatttaggagggcaaaaattttggtcatagcattcacttttgctattccaatctacaactggaagatacataaaagtgctttgcattgaatttgggataacttcaaaaatcccatggttgttgttagggatagtactaagcatttcagttccaggagaataaaagaaattcctatttgaaatgaattcctcatttggaggaaaaaaagcatgcattctagcacaacaagatgaaattatggaatacaaaagtggctccttcccatgtgcagtccctgtccccccccgccagtcctccacacccaaactgtttctgattggcttttagctttttgttgtttttttttttccttctaacacttgtatttggaggctcttctgtgattttgagaagtatactcttgagtgtttaataaagtttttttccaaaagta

SEQ ID NO: 134802 - DNA, 718 bp, Homo sapiens
cgtcgctcggcaccccgatatttgtggttctggcacattggaaagcacactcagaaggcttcatcaccaagattttgggagagtaaagctaagtatagttgatgtaacattgtagaagcagcataggaacaataagaacaataggtaaagctataattatggcttatatttagaaatgactgcatttgatattttaggatatttttctaggttttttcctttcattttattctcttctagttttgacattttatgatagatttgctctctagaaggaaacgtctttatttaggagggcaaaaattttggtcatagcattcacttttgctattccaatctacaactggaagatacataaaagtgctttgcattgaatttgggataacttcaaaaatcccatggttgttgttagggatagtactaagcatttcagttccaggagaataaaagaaattcctatttgaaatgaattcctcatttggaggaaaaaaagcatgcattctagcacaacaagatgaaattatggaatacaaaagtggctccttcccatgtgcagtccctgtccccccccgccagtcctccacacccaaactgtttctgattggcttttagctttttgttgtttttttttttccttctaacacttgtatttggaggctcttctgtgattttgagaagtatactcttgagtgtttaataaagtttttttccaaaagta

SEQ ID NO: 134803 - DNA, 707 bp, Homo sapiens
ccggatcgtcggggtaccgggactcgggtctacacgcagccggatgtcatacaccagagaattttgggagagtaaagctaagtatagttgatgtaacattgtagaagcagcataggaacaataagaacaataggtaaagctataattatggcttatatttagaaatgactgcatttgatattttaggatatttttctaggttttttcctttcattttattctcttctagttttgacattttatgatagatttgctctctagaaggaaacgtctttatttaggagggcaaaaattttggtcatagcattcacttttgctattccaatctacaactggaagatacataaaagtgctttgcattgaatttgggataacttcaaaaatcccatggttgttgttagggatagtactaagcatttcagttccaggagaataaaagaaattcctatttgaaatgaattcctcatttggaggaaaaaaagcatgcattctagcacaacaagatgaaattatggaatacaaaagtggctccttcccatgtgcagtccctgtccccccccgccagtcctccacacccaaactgtttctgattggcttttagctttttgttgtttttttttttccttctaacacttgtatttggaggctcttctgtgattttgagaagtatactcttgagtgtttaataaagtttttttccaaaagta

SEQ ID NO: 134804 - DNA, 10698 bp, Homo sapiens
ggggcatttccgggtccgggccgagcgggcgcacgcgcgggagcgggactcggcggcatggcgggctccggagccggtgtgcgttgctccctgctgcggctgcaggagaccttgtccgctgcggaccgctgcggtgctgccctggccggtcatcaactgatccgcggcctggggcaggaatgcgtcctgagcagcagccccgcggtgctggcattacagacatctttagttttttccagagatttcggtttgcttgtatttgtccggaagtcactcaacagtattgaatttcgtgaatgtagagaagaaatcctaaagtttttatgtattttcttagaaaaaatgggccagaagatcgcaccttactctgttgaaattaagaacacttgtaccagtgtttatacaaaagatagagctgctaaatgtaaaattccagccctggaccttcttattaagttacttcagacttttagaagttctagactcatggatgaatttaaaattggagaattatttagtaaattctatggagaacttgcattgaaaaaaaaaataccagatacagttttagaaaaagtatatgagctcctaggattattgggtgaagttcatcctagtgagatgataaataatgcagaaaacctgttccgcgcttttctgggtgaacttaagacccagatgacatcagcagtaagagagcccaaactacctgttctggcaggatgtctgaaggggttgtcctcacttctgtgcaacttcactaagtccatggaagaagatccccagacttcaagggagatttttaattttgtactaaaggcaattcgtcctcagattgatctgaagagatatgctgtgccctcagctggcttgcgcctatttgccctgcatgcatctcagtttagcacctgccttctggacaactacgtgtctctatttgaagtcttgttaaagtggtgtgcccacacaaatgtagaattgaaaaaagctgcactttcagccctggaatcctttctgaaacaggtttctaatatggtggcgaaaaatgcagaaatgcataaaaataaactgcagtactttatggagcagttttatggaatcatcagaaatgtggattcgaacaacaaggagttatctattgctatccgtggatatggactttttgcaggaccgtgcaaggttataaacgcaaaagatgttgacttcatgtacgttgagctcattcagcgctgcaagcagatgttcctcacccagacagacactggtgacgaccgtgtttatcagatgccaagcttcctccagtctgttgcaagcgtcttgctgtaccttgacacagttcctgaggtgtatactccagttctggagcacctcgtggtgatgcagatagacagtttcccacagtacagtccaaaaatgcagctggtgtgttgcagagccatagtgaaggtgttcctagctttggcagcaaaagggccagttctcaggaattgcattagtactgtggtgcatcagggtttaatcagaatatgttctaaaccagtggtccttccaaagggccctgagtctgaatctgaagaccaccgtgcttcaggggaagtcagaactggcaaatggaaggtgcccacatacaaagactacgtggatctcttcagacatctcctgagctctgaccagatgatggattctattttagcagatgaagcatttttctctgtgaattcctccagtgaaagtctgaatcatttactttatgatgaatttgtaaaatccgttttgaagattgttgagaaattggatcttacacttgaaatacagactgttggggaacaagagaatggagatgaggcgcctggtgtttggatgatcccaacttcagatccagcggctaacttgcatccagctaaacctaaagatttttcggctttcattaacctggtggaattttgcagagagattctccctgagaaacaagcagaattttttgaaccatgggtgtactcattttcatatgaattaattttgcaatctacaaggttgcccctcatcagtggtttctacaaattgctttctattacagtaagaaatgccaagaaaataaaatatttcgagggagttagtccaaagagtctgaaacactctcctgaagacccagaaaagtattcttgctttgctttatttgtgaaatttggcaaagaggtggcagttaaaatgaagcagtacaaagatgaacttttggcctcttgtttgacctttcttctgtccttgccacacaacatcattgaactcgatgttagagcctacgttcctgcactgcagatggctttcaaactgggcctgagctatacccccttggcagaagtaggcctgaatgctctagaagaatggtcaatttatattgacagacatgtaatgcagccttattacaaagacattctcccctgcctggatggatacctgaagacttcagccttgtcagatgagaccaagaataactgggaagtgtcagctctttctcgggctgcccagaaaggatttaataaagtggtgttaaagcatctgaagaagacaaagaacctttcatcaaacgaagcaatatccttagaagaaataagaattagagtagtacaaatgcttggatctctaggaggacaaataaacaaaaatcttctgacagtcacgtcctcagatgagatgatgaagagctatgtggcctgggacagagagaagcggctgagctttgcagtgccctttagagagatgaaacctgtcattttcctggatgtgttcctgcctcgagtcacagaattagcgctcacagccagtgacagacaaactaaagttgcagcctgtgaacttttacatagcatggttatgtttatgttgggcaaagccacgcagatgccagaagggggacagggagccccacccatgtaccagctctataagcggacgtttcctgtgctgcttcgacttgcgtgtgatgttgatcaggtgacaaggcaactgtatgagccactagttatgcagctgattcactggttcactaacaacaagaaatttgaaagtcaggatactgttgccttactagaagctatattggatggaattgtggaccctgttgacagtactttaagagatttttgtggtcggtgtattcgagaattccttaaatggtccattaagcaaataacaccacagcagcaggagaagagtccagtaaacaccaaatcgcttttcaagcgactttatagccttgcgcttcaccccaatgctttcaagaggctgggagcatcacttgcctttaataatatctacagggaattcagggaagaagagtctctggtggaacagtttgtgtttgaagccttggtgatatacatggagagtctggccttagcacatgcagatgagaagtccttaggtacaattcaacagtgttgtgatgccattgatcacctatgccgcatcattgaaaagaagcatgtttctttaaataaagcaaagaaacgacgtttgccgcgaggatttccaccttccgcatcattgtgtttattggatctggtcaagtggcttttagctcattgtgggaggccccagacagaatgtcgacacaaatccattgaactcttttataaattcgttcctttattgccaggcaacagatcccctaatttgtggctgaaagatgttctcaaggaagaaggtgtctcttttctcatcaacacctttgaggggggtggctgtggccagccctcgggcatcctggcccagcccaccctcttgtaccttcgggggccattcagcctgcaggccacgctatgctggctggacctgctcctggccgcgttggagtgctacaacacgttcattggcgagagaactgtaggagcgctccaggtcctaggtactgaagcccagtcttcacttttgaaagcagtggctttcttcttagaaagcattgccatgcatgacattatagcagcagaaaagtgctttggcactggggcagcaggtaacagaacaagcccacaagagggagaaaggtacaactacagcaaatgcaccgttgtggtccggattatggagtttaccacgactctgctaaacacctccccggaaggatggaagctcctgaagaaggacttgtgtaatacacacctgatgagagtcctggtgcagacgctgtgtgagcccgcaagcataggtttcaacatcggagacgtccaggttatggctcatcttcctgatgtttgtgtgaatctgatgaaagctctaaagatgtccccatacaaagatatcctagagacccatctgagagagaaaataacagcacagagcattgaggagctttgtgccgtcaacttgtatggccctgacgcgcaagtggacaggagcaggctggctgctgttgtgtctgcctgtaaacagcttcacagagctgggcttctgcataatatattaccgtctcagtccacagatttgcatcattctgttggcacagaacttctttccctggtttataaaggcattgcccctggagatgagagacagtgtctgccttctctagacctcagttgtaagcagctggccagcggacttctggagttagcctttgcttttggaggactgtgtgagcgccttgtgagtcttctcctgaacccagcggtgctgtccacggcgtccttgggcagctcacagggcagcgtcatccacttctcccatggggagtatttctatagcttgttctcagaaacgatcaacacggaattattgaaaaatctggatcttgctgtattggagctcatgcagtcttcagtggataataccaaaatggtgagtgccgttttgaacggcatgttagaccagagcttcagggagcgagcaaaccagaaacaccaaggactgaaacttgcgactacaattctgcaacactggaagaagtgtgattcatggtgggccaaagattcccctctcgaaactaaaatggcagtgctggccttactggcaaaaattttacagattgattcatctgtatcttttaatacaagtcatggttcattccctgaagtctttacaacatatattagtctacttgctgacacaaagctggatctacatttaaagggccaagctgtcactcttcttccattcttcaccagcctcactggaggcagtctggaggaacttagacgtgttctggagcagctcatcgttgctcacttccccatgcagtccagggaatttcctccaggaactccgcggttcaataattatgtggactgcatgaaaaagtttctagatgcattggaattatctcaaagccctatgttgttggaattgatgacagaagttctttgtcgggaacagcagcatgtcatggaagaattatttcaatccagtttcaggaggattgccagaaggggttcatgtgtcacacaagtaggccttctggaaagcgtgtatgaaatgttcaggaaggatgacccccgcctaagtttcacacgccagtcctttgtggaccgctccctcctcactctgctgtggcactgtagcctggatgctttgagagaattcttcagcacaattgtggtggatgccattgatgtgttgaagtccaggtttacaaagctaaatgaatctacctttgatactcaaatcaccaagaagatgggctactataagattctagacgtgatgtattctcgccttcccaaagatgatgttcatgctaaggaatcaaaaattaatcaagttttccatggctcgtgtattacagaaggaaatgaacttacaaagacattgattaaattgtgctacgatgcatttacagagaacatggcaggagagaatcagctgctggagaggagaagactttaccattgtgcagcatacaactgcgccatatctgtcatctgctgtgtcttcaatgagttaaaattttaccaaggttttctgtttagtgaaaaaccagaaaagaacttgcttatttttgaaaatctgatcgacctgaagcgccgctataattttcctgtagaagttgaggttcctatggaaagaaagaaaaagtacattgaaattaggaaagaagccagagaagcagcaaatggggattcagatggtccttcctatatgtcttccctgtcatatttggcagacagtaccctgagtgaggaaatgagtcaatttgatttctcaaccggagttcagagctattcatacagctcccaagaccctagacctgccactggtcgttttcggagacgggagcagcgggaccccacggtgcatgatgatgtgctggagctggagatggacgagctcaatcggcatgagtgcatggcgcccctgacggccctggtcaagcacatgcacagaagcctgggcccgcctcaaggagaagaggattcagtgccaagagatcttccttcttggatgaaattcctccatggcaaactgggaaatccaatagtaccattaaatatccgtctcttcttagccaagcttgttattaatacagaagaggtctttcgcccttacgcgaagcactggcttagccccttgctgcagctggctgcttctgaaaacaatggaggagaaggaattcactacatggtggttgagatagtggccactattctttcatggacaggcttggccactccaacaggggtccctaaagatgaagtgttagcaaatcgattgcttaatttcctaatgaaacatgtctttcatccaaaaagagctgtgtttagacacaaccttgaaattataaagacccttgtcgagtgctggaaggattgtttatccatcccttataggttaatatttgaaaagttttccggtaaagatcctaattctaaagacaactcagtagggattcaattgctaggcatcgtgatggccaatgacctgcctccctatgacccacagtgtggcatccagagtagcgaatacttccaggctttggtgaataatatgtcctttgtaagatataaagaagtgtatgccgctgcagcagaagttctaggacttatacttcgatatgttatggagagaaaaaacatactggaggagtctctgtgtgaactggttgcgaaacaattgaagcaacatcagaatactatggaggacaagtttattgtgtgcttgaacaaagtgaccaagagcttccctcctcttgcagacaggttcatgaatgctgtgttctttctgctgccaaaatttcatggagtgttgaaaacactctgtctggaggtggtactttgtcgtgtggagggaatgacagagctgtacttccagttaaagagcaaggacttcgttcaagtcatgagacatagagatgatgaaagacaaaaagtatgtttggacataatttataagatgatgccaaagttaaaaccagtagaactccgagaacttctgaaccccgttgtggaattcgtttcccatccttctacaacatgtagggaacaaatgtataatattctcatgtggattcatgataattacagagatccagaaagtgagacagataatgactcccaggaaatatttaagttggcaaaagatgtgctgattcaaggattgatcgatgagaaccctggacttcaattaattattcgaaatttctggagccatgaaactaggttaccttcaaataccttggaccggttgctggcactaaattccttatattctcctaagatagaagtgcactttttaagtttagcaacaaattttctgctcgaaatgaccagcatgagcccagattatccaaaccccatgttcgagcatcctctgtcagaatgcgaatttcaggaatataccattgattctgattggcgtttccgaagtactgttctcactccgatgtttgtggagacccaggcctcccagggcactctccagacccgtacccaggaagggtccctctcagctcgctggccagtggcagggcagataagggccacccagcagcagcatgacttcacactgacacagactgcagatggaagaagctcatttgattggctgaccgggagcagcactgacccgctggtcgaccacaccagtccctcatctgactccttgctgtttgcccacaagaggagtgaaaggttacagagagcacccttgaagtcagtggggcctgattttgggaaaaaaaggctgggccttccaggggacgaggtggataacaaagtgaaaggtgcggccggccggacggacctactacgactgcgcagacggtttatgagggaccaggagaagctcagtttgatgtatgccagaaaaggcgttgctgagcaaaaacgagagaaggaaatcaagagtgagttaaaaatgaagcaggatgcccaggtcgttctgtacagaagctaccggcacggagaccttcctgacattcagatcaagcacagcagcctcatcaccccgttacaggccgtggcccagagggacccaataattgcaaaacagctctttagcagcttgttttctggaattttgaaagagatggataaatttaagacactgtctgaaaaaaacaacatcactcaaaagttgcttcaagacttcaatcgttttcttaataccaccttctctttctttccaccctttgtctcttgtattcaggacattagctgtcagcacgcagccctgctgagcctcgacccagcggctgttagcgctggttgcctggccagcctacagcagcccgtgggcatccgcctgctagaggaggctctgctccgcctgctgcctgctgagctgcctgccaagcgagtccgtgggaaggcccgcctccctcctgatgtcctcagatgggtggagcttgctaagctgtatagatcaattggagaatacgacgtcctccgtgggatttttaccagtgagataggaacaaagcaaatcactcagagtgcattattagcagaagccagaagtgattattctgaagctgctaagcagtatgatgaggctctcaataaacaagactgggtagatggtgagcccacagaagccgagaaggatttttgggaacttgcatcccttgactgttacaaccaccttgctgagtggaaatcacttgaatactgttctacagccagtatagacagtgagaaccccccagacctaaataaaatctggagtgaaccattttatcaggaaacatatctaccttacatgatccgcagcaagctgaagctgctgctccagggagaggctgaccagtccctgctgacatttattgacaaagctatgcacggggagctccagaaggcgattctagagcttcattacagtcaagagctgagtctgctttacctcctgcaagatgatgttgacagagccaaatattacattcaaaatggcattcagagttttatgcagaattattctagtattgatgtcctcttacaccaaagtagactcaccaaattgcagtctgtacaggctttaacagaaattcaggagttcatcagctttataagcaaacaaggcaatttatcatctcaagttccccttaagagacttctgaacacctggacaaacagatatccagatgctaaaatggacccaatgaacatctgggatgacatcatcacaaatcgatgtttctttctcagcaaaatagaggagaagcttacccctcttccagaagataatagtatgaatgtggatcaagatggagaccccagtgacaggatggaagtgcaagagcaggaagaagatatcagctccctgatcaggagttgcaagttttccatgaaaatgaagatgatagacagtgcccggaagcagaacaatttctcacttgctatgaaactactgaaggagctgcataaagagtcaaaaaccagagacgattggctggtgagctgggtgcagagctactgccgcctgagccactgccggagccggtcccagggctgctctgagcaggtgctcactgtgctgaaaacagtctctttgttggatgagaacaacgtgtcaagctacttaagcaaaaatattctggctttccgtgaccagaacattctcttgggtacaacttacaggatcatagcgaatgctctcagcagtgagccagcctgccttgctgaaatcgaggaggacaaggctagaagaatcttagagctttctggatccagttcagaggattcagagaaggtgatcgcgggtctgtaccagagagcattccagcacctctctgaggctgtgcaggcggctgaggaggaggcccagcctccctcctggagctgtgggcctgcagctggggtgattgatgcttacatgacgctggcagatttctgtgaccaacagctgcgcaaggaggaagagaatgcatcagttattgattctgcagaactgcaggcgtatccagcacttgtggtggagaaaatgttgaaagctttaaaattaaattccaatgaagccagattgaagtttcctagattacttcagattatagaacggtatccagaggagactttgagcctcatgacaaaagagatctcttccgttccctgctggcagttcatcagctggatcagccacatggtggccttactggacaaagaccaagccgttgctgttcagcactctgtggaagaaatcactgataactacccgcagggaacggaagagatctcttttgtcatgaggctcaaagtctcctctggataccgtctataa

SEQ ID NO: 134805 - DNA, 12965 bp, Homo sapiens
ggggcatttccgggtccgggccgagcgggcgcacgcgcgggagcgggactcggcggcatggcgggctccggagccggtgtgcgttgctccctgctgcggctgcaggagaccttgtccgctgcggaccgctgcggtgctgccctggccggtcatcaactgatccgcggcctggggcaggaatgcgtcctgagcagcagccccgcggtgctggcattacagacatctttagttttttccagagatttcggtttgcttgtatttgtccggaagtcactcaacagtattgaatttcgtgaatgtagagaagaaatcctaaagtttttatgtattttcttagaaaaaatgggccagaagatcgcaccttactctgttgaaattaagaacacttgtaccagtgtttatacaaaagatagagctgctaaatgtaaaattccagccctggaccttcttattaagttacttcagacttttagaagttctagactcatggatgaatttaaaattggagaattatttagtaaattctatggagaacttgcattgaaaaaaaaaataccagatacagttttagaaaaagtatatgagctcctaggattattgggtgaagttcatcctagtgagatgataaataatgcagaaaacctgttccgcgcttttctgggtgaacttaagacccagatgacatcagcagtaagagagcccaaactacctgttctggcaggatgtctgaaggggttgtcctcacttctgtgcaacttcactaagtccatggaagaagatccccagacttcaagggagatttttaattttgtactaaaggcaattcgtcctcagattgatctgaagagatatgctgtgccctcagctggcttgcgcctatttgccctgcatgcatctcagtttagcacctgccttctggacaactacgtgtctctatttgaagtcttgttaaagtggtgtgcccacacaaatgtagaattgaaaaaagctgcactttcagccctggaatcctttctgaaacaggtttctaatatggtggcgaaaaatgcagaaatgcataaaaataaactgcagtactttatggagcagttttatggaatcatcagaaatgtggattcgaacaacaaggagttatctattgctatccgtggatatggactttttgcaggaccgtgcaaggttataaacgcaaaagatgttgacttcatgtacgttgagctcattcagcgctgcaagcagatgttcctcacccagacagacactggtgacgaccgtgtttatcagatgccaagcttcctccagtctgttgcaagcgtcttgctgtaccttgacacagttcctgaggtgtatactccagttctggagcacctcgtggtgatgcagatagacagtttcccacagtacagtccaaaaatgcagctggtgtgttgcagagccatagtgaaggtgttcctagctttggcagcaaaagggccagttctcaggaattgcattagtactgtggtgcatcagggtttaatcagaatatgttctaaaccagtggtccttccaaagggccctgagtctgaatctgaagaccaccgtgcttcaggggaagtcagaactggcaaatggaaggtgcccacatacaaagactacgtggatctcttcagacatctcctgagctctgaccagatgatggattctattttagcagatgaagcatttttctctgtgaattcctccagtgaaagtctgaatcatttactttatgatgaatttgtaaaatccgttttgaagattgttgagaaattggatcttacacttgaaatacagactgttggggaacaagagaatggagatgaggcgcctggtgtttggatgatcccaacttcagatccagcggctaacttgcatccagctaaacctaaagatttttcggctttcattaacctggtggaattttgcagagagattctccctgagaaacaagcagaattttttgaaccatgggtgtactcattttcatatgaattaattttgcaatctacaaggttgcccctcatcagtggtttctacaaattgctttctattacagtaagaaatgccaagaaaataaaatatttcgagggagttagtccaaagagtctgaaacactctcctgaagacccagaaaagtattcttgctttgctttatttgtgaaatttggcaaagaggtggcagttaaaatgaagcagtacaaagatgaacttttggcctcttgtttgacctttcttctgtccttgccacacaacatcattgaactcgatgttagagcctacgttcctgcactgcagatggctttcaaactgggcctgagctatacccccttggcagaagtaggcctgaatgctctagaagaatggtcaatttatattgacagacatgtaatgcagccttattacaaagacattctcccctgcctggatggatacctgaagacttcagccttgtcagatgagaccaagaataactgggaagtgtcagctctttctcgggctgcccagaaaggatttaataaagtggtgttaaagcatctgaagaagacaaagaacctttcatcaaacgaagcaatatccttagaagaaataagaattagagtagtacaaatgcttggatctctaggaggacaaataaacaaaaatcttctgacagtcacgtcctcagatgagatgatgaagagctatgtggcctgggacagagagaagcggctgagctttgcagtgccctttagagagatgaaacctgtcattttcctggatgtgttcctgcctcgagtcacagaattagcgctcacagccagtgacagacaaactaaagttgcagcctgtgaacttttacatagcatggttatgtttatgttgggcaaagccacgcagatgccagaagggggacagggagccccacccatgtaccagctctataagcggacgtttcctgtgctgcttcgacttgcgtgtgatgttgatcaggtgacaaggcaactgtatgagccactagttatgcagctgattcactggttcactaacaacaagaaatttgaaagtcaggatactgttgccttactagaagctatattggatggaattgtggaccctgttgacagtactttaagagatttttgtggtcggtgtattcgagaattccttaaatggtccattaagcaaataacaccacagcagcaggagaagagtccagtaaacaccaaatcgcttttcaagcgactttatagccttgcgcttcaccccaatgctttcaagaggctgggagcatcacttgcctttaataatatctacagggaattcagggaagaagagtctctggtggaacagtttgtgtttgaagccttggtgatatacatggagagtctggccttagcacatgcagatgagaagtccttaggtacaattcaacagtgttgtgatgccattgatcacctatgccgcatcattgaaaagaagcatgtttctttaaataaagcaaagaaacgacgtttgccgcgaggatttccaccttccgcatcattgtgtttattggatctggtcaagtggcttttagctcattgtgggaggccccagacagaatgtcgacacaaatccattgaactcttttataaattcgttcctttattgccaggcaacagatcccctaatttgtggctgaaagatgttctcaaggaagaaggtgtctcttttctcatcaacacctttgaggggggtggctgtggccagccctcgggcatcctggcccagcccaccctcttgtaccttcgggggccattcagcctgcaggccacgctatgctggctggacctgctcctggccgcgttggagtgctacaacacgttcattggcgagagaactgtaggagcgctccaggtcctaggtactgaagcccagtcttcacttttgaaagcagtggctttcttcttagaaagcattgccatgcatgacattatagcagcagaaaagtgctttggcactggggcagcaggtaacagaacaagcccacaagagggagaaaggtacaactacagcaaatgcaccgttgtggtccggattatggagtttaccacgactctgctaaacacctccccggaaggatggaagctcctgaagaaggacttgtgtaatacacacctgatgagagtcctggtgcagacgctgtgtgagcccgcaagcataggtttcaacatcggagacgtccaggttatggctcatcttcctgatgtttgtgtgaatctgatgaaagctctaaagatgtccccatacaaagatatcctagagacccatctgagagagaaaataacagcacagagcattgaggagctttgtgccgtcaacttgtatggccctgacgcgcaagtggacaggagcaggctggctgctgttgtgtctgcctgtaaacagcttcacagagctgggcttctgcataatatattaccgtctcagtccacagatttgcatcattctgttggcacagaacttctttccctggtttataaaggcattgcccctggagatgagagacagtgtctgccttctctagacctcagttgtaagcagctggccagcggacttctggagttagcctttgcttttggaggactgtgtgagcgccttgtgagtcttctcctgaacccagcggtgctgtccacggcgtccttgggcagctcacagggcagcgtcatccacttctcccatggggagtatttctatagcttgttctcagaaacgatcaacacggaattattgaaaaatctggatcttgctgtattggagctcatgcagtcttcagtggataataccaaaatggtgagtgccgttttgaacggcatgttagaccagagcttcagggagcgagcaaaccagaaacaccaaggactgaaacttgcgactacaattctgcaacactggaagaagtgtgattcatggtgggccaaagattcccctctcgaaactaaaatggcagtgctggccttactggcaaaaattttacagattgattcatctgtatcttttaatacaagtcatggttcattccctgaagtctttacaacatatattagtctacttgctgacacaaagctggatctacatttaaagggccaagctgtcactcttcttccattcttcaccagcctcactggaggcagtctggaggaacttagacgtgttctggagcagctcatcgttgctcacttccccatgcagtccagggaatttcctccaggaactccgcggttcaataattatgtggactgcatgaaaaagtttctagatgcattggaattatctcaaagccctatgttgttggaattgatgacagaagttctttgtcgggaacagcagcatgtcatggaagaattatttcaatccagtttcaggaggattgccagaaggggttcatgtgtcacacaagtaggccttctggaaagcgtgtatgaaatgttcaggaaggatgacccccgcctaagtttcacacgccagtcctttgtggaccgctccctcctcactctgctgtggcactgtagcctggatgctttgagagaattcttcagcacaattgtggtggatgccattgatgtgttgaagtccaggtttacaaagctaaatgaatctacctttgatactcaaatcaccaagaagatgggctactataagattctagacgtgatgtattctcgccttcccaaagatgatgttcatgctaaggaatcaaaaattaatcaagttttccatggctcgtgtattacagaaggaaatgaacttacaaagacattgattaaattgtgctacgatgcatttacagagaacatggcaggagagaatcagctgctggagaggagaagactttaccattgtgcagcatacaactgcgccatatctgtcatctgctgtgtcttcaatgagttaaaattttaccaaggttttctgtttagtgaaaaaccagaaaagaacttgcttatttttgaaaatctgatcgacctgaagcgccgctataattttcctgtagaagttgaggttcctatggaaagaaagaaaaagtacattgaaattaggaaagaagccagagaagcagcaaatggggattcagatggtccttcctatatgtcttccctgtcatatttggcagacagtaccctgagtgaggaaatgagtcaatttgatttctcaaccggagttcagagctattcatacagctcccaagaccctagacctgccactggtcgttttcggagacgggagcagcgggaccccacggtgcatgatgatgtgctggagctggagatggacgagctcaatcggcatgagtgcatggcgcccctgacggccctggtcaagcacatgcacagaagcctgggcccgcctcaaggagaagaggattcagtgccaagagatcttccttcttggatgaaattcctccatggcaaactgggaaatccaatagtaccattaaatatccgtctcttcttagccaagcttgttattaatacagaagaggtctttcgcccttacgcgaagcactggcttagccccttgctgcagctggctgcttctgaaaacaatggaggagaaggaattcactacatggtggttgagatagtggccactattctttcatggacaggcttggccactccaacaggggtccctaaagatgaagtgttagcaaatcgattgcttaatttcctaatgaaacatgtctttcatccaaaaagagctgtgtttagacacaaccttgaaattataaagacccttgtcgagtgctggaaggattgtttatccatcccttataggttaatatttgaaaagttttccggtaaagatcctaattctaaagacaactcagtagggattcaattgctaggcatcgtgatggccaatgacctgcctccctatgacccacagtgtggcatccagagtagcgaatacttccaggctttggtgaataatatgtcctttgtaagatataaagaagtgtatgccgctgcagcagaagttctaggacttatacttcgatatgttatggagagaaaaaacatactggaggagtctctgtgtgaactggttgcgaaacaattgaagcaacatcagaatactatggaggacaagtttattgtgtgcttgaacaaagtgaccaagagcttccctcctcttgcagacaggttcatgaatgctgtgttctttctgctgccaaaatttcatggagtgttgaaaacactctgtctggaggtggtactttgtcgtgtggagggaatgacagagctgtacttccagttaaagagcaaggacttcgttcaagtcatgagacatagagatgatgaaagacaaaaagtatgtttggacataatttataagatgatgccaaagttaaaaccagtagaactccgagaacttctgaaccccgttgtggaattcgtttcccatccttctacaacatgtagggaacaaatgtataatattctcatgtggattcatgataattacagagatccagaaagtgagacagataatgactcccaggaaatatttaagttggcaaaagatgtgctgattcaaggattgatcgatgagaaccctggacttcaattaattattcgaaatttctggagccatgaaactaggttaccttcaaataccttggaccggttgctggcactaaattccttatattctcctaagatagaagtgcactttttaagtttagcaacaaattttctgctcgaaatgaccagcatgagcccagattatccaaaccccatgttcgagcatcctctgtcagaatgcgaatttcaggaatataccattgattctgattggcgtttccgaagtactgttctcactccgatgtttgtggagacccaggcctcccagggcactctccagacccgtacccaggaagggtccctctcagctcgctggccagtggcagggcagataagggccacccagcagcagcatgacttcacactgacacagactgcagatggaagaagctcatttgattggctgaccgggagcagcactgacccgctggtcgaccacaccagtccctcatctgactccttgctgtttgcccacaagaggagtgaaaggttacagagagcacccttgaagtcagtggggcctgattttgggaaaaaaaggctgggccttccaggggacgaggtggataacaaagtgaaaggtgcggccggccggacggacctactacgactgcgcagacggtttatgagggaccaggagaagctcagtttgatgtatgccagaaaaggcgttgctgagcaaaaacgagagaaggaaatcaagagtgagttaaaaatgaagcaggatgcccaggtcgttctgtacagaagctaccggcacggagaccttcctgacattcagatcaagcacagcagcctcatcaccccgttacaggccgtggcccagagggacccaataattgcaaaacagctctttagcagcttgttttctggaattttgaaagagatggataaatttaagacactgtctgaaaaaaacaacatcactcaaaagttgcttcaagacttcaatcgttttcttaataccaccttctctttctttccaccctttgtctcttgtattcaggacattagctgtcagcacgcagccctgctgagcctcgacccagcggctgttagcgctggttgcctggccagcctacagcagcccgtgggcatccgcctgctagaggaggctctgctccgcctgctgcctgctgagctgcctgccaagcgagtccgtgggaaggcccgcctccctcctgatgtcctcagatgggtggagcttgctaagctgtatagatcaattggagaatacgacgtcctccgtgggatttttaccagtgagataggaacaaagcaaatcactcagagtgcattattagcagaagccagaagtgattattctgaagctgctaagcagtatgatgaggctctcaataaacaagactgggtagatggtgagcccacagaagccgagaaggatttttgggaacttgcatcccttgactgttacaaccaccttgctgagtggaaatcacttgaatactgttctacagccagtatagacagtgagaaccccccagacctaaataaaatctggagtgaaccattttatcaggaaacatatctaccttacatgatccgcagcaagctgaagctgctgctccagggagaggctgaccagtccctgctgacatttattgacaaagctatgcacggggagctccagaaggcgattctagagcttcattacagtcaagagctgagtctgctttacctcctgcaagatgatgttgacagagccaaatattacattcaaaatggcattcagagttttatgcagaattattctagtattgatgtcctcttacaccaaagtagactcaccaaattgcagtctgtacaggctttaacagaaattcaggagttcatcagctttataagcaaacaaggcaatttatcatctcaagttccccttaagagacttctgaacacctggacaaacagatatccagatgctaaaatggacccaatgaacatctgggatgacatcatcacaaatcgatgtttctttctcagcaaaatagaggagaagcttacccctcttccagaagataatagtatgaatgtggatcaagatggagaccccagtgacaggatggaagtgcaagagcaggaagaagatatcagctccctgatcaggagttgcaagttttccatgaaaatgaagatgatagacagtgcccggaagcagaacaatttctcacttgctatgaaactactgaaggagctgcataaagagtcaaaaaccagagacgattggctggtgagctgggtgcagagctactgccgcctgagccactgccggagccggtcccagggctgctctgagcaggtgctcactgtgctgaaaacagtctctttgttggatgagaacaacgtgtcaagctacttaagcaaaaatattctggctttccgtgaccagaacattctcttgggtacaacttacaggatcatagcgaatgctctcagcagtgagccagcctgccttgctgaaatcgaggaggacaaggctagaagaatcttagagctttctggatccagttcagaggattcagagaaggtgatcgcgggtctgtaccagagagcattccagcacctctctgaggctgtgcaggcggctgaggaggaggcccagcctccctcctggagctgtgggcctgcagctggggtgattgatgcttacatgacgctggcagatttctgtgaccaacagctgcgcaaggaggaagagaatgcatcaggtgaattgaaaattaaaaagctagtgttccattatgtcagcataaagtcttatgaattttgtacatacctttggtctcctctttgtttgttttcaaattacaaatattttgaaaatcctactgtctttttaagagacaatggcagccgggtgcagtggatcacttgaggccaggagttcaagaccagcctggccaacgtggtgaaaccccaactctactaagaatacaaaaaaattagctgggcgtggtggcccatgcctgtagtcccagctactcaggaggctggggcaggagaattgcttgaacccaggaggcagaggttgcagtgagccgatatccactactgcacaccagcctgggtgacagagcgagactccatcttaaaaaaaaaaaaagagagagacaatggcctctctaagcaacatgacctacatttaaatggagtcaagtggtcctctgtttccatttgtttaatttctactttgatattttgcttgcagcttcaatattactggctcgtgtggcctgcttcatgctcctggaataaattcaataaccaccaattgccccttatgttcccagcccaggattcaaactgtgcttcatgcagaatgggcactctaatggaaggatttggctccaggatagatacaaaactgtacctggtgtttgttggtgtaaagtggtagttaagaagagaacaatgacactacaaaatacaagccaaaaagggaaagtgttagcatttaacatcatagtttatggatattgggatacattgaccattgctttcttctttggtgtccttgatagttattgattctgcagaactgcaggcgtatccagcacttgtggtggagaaaatgttgaaagctttaaaattaaattccaatgaagccagattgaagtttcctagattacttcagattatagaacggtatccagaggagactttgagcctcatgacaaaagaggttggtgtctttattctacttggcggtaaggaactttacagaacttaaagatacgcttatttatattcaaacgcgttagtgtgtgcagtgcatgtattatagcttttcccagccagctgtgaattctgctacattctgaggacataggtaatttaaagctgcaaaaacgagttttcgcatttacccattttcctctgtgggtgttgataaaaacactgtgtctgaacaaggatccagagagatggagacggggtgtgtgggatggtaacgggatcttgtgtgggaaacttgttgcccctgcagatgaggctgtggccagtcacatttgctgtgcccagtgctcacctgtcatttagcccaaagggagtgagcaaggttcagcttgcatcccacctcccaggagcacagcatctgccagcagcacggtgtccagaggggtctgggagcatgagtgaggggtcagcgtatggacatgggaggaacccgcacccttccatgtgacctgccccttggccccaccaagggctgcactgccagctgcactcctgtcctttgggctctgtctgtgtgcaggagggttccactgacttcatttgcaaagtgtagggcctctgaaaggcttcgtagttgacatttatagacgtgtaactggaagatagggccaagctttgagttgaaaatgtaatagttcaaaaagggttacatggttcgttctctattagctttgcatggtgagtttttaaataatgttgatctctgggctgcggggacccagtttgacttttagggccctaaccactccttccacctttttctgcattctgaatagtagactttctcagtaggtattaaacaggttaaggtaaattcagaagtgcaacatgtatgtgtttttcttcaagataagtgagcaaataacttcattatgattttatttttttccaatataatatttatacatgataaaaacagcatttgaatttgtgaggacatgaagtattcactccacgttgtcaaaacacccagtagacacgtgcagtgaagccagtagcctctctcgtgagcttacatgagctgtgtggactgatccttcctcacacgccatgctgtcctcagctcacacgtgcactcaggaagcttgcccatactcaagcctcactctagcattgcagacacatcaggttttatcttcagaaagacaccttaaaagtatcagaggaaaatgtgaacacatttttttaaatggtcttggaatgaagagacaaaaaccagaatccatgaaggaaaatagtttgacttctatacagaaaaagaaaataccgtatacaaagttaaaaaaataaaaagccaggtgcagtggctcacgcctgtaatctcaccactttgggaggccaaggtgggcagatcacgaggtcagcagttcgagaccagcctggccaacacggtgaaaccctactaaagaaacaaaaattagccgggcgtggtggcgagcacctgtaaacccagctactcgggaggctgaggcaggaaaatcacttgaacccaggaggtggaggttgcagtgagccgaggtggcgccactgcactctagcctagacgacagagcaagactctgtctcaaaaaaaacaacaacaac

SEQ ID NO: 134806 - DNA, 8872 bp, Homo sapiens
  misc_feature (8709)..(8709): n is a, c, g, or t
  misc_feature (8742)..(8742): n is a, c, g, or t
ggggcatttccgggtccgggccgagcgggcgcacgcgcgggagcgggactcggcggcatggcgggctccggagccggtgtgcgttgctccctgctgcggctgcaggagaccttgtccgctgcggaccgctgcggtgctgccctggccggtcatcaactgatccgcggcctggggcaggaatgcgtcctgagcagcagccccgcggtgctggcattacagacatctttagttttttccagagatttcggtttgcttgtatttgtccggaagtcactcaacagtattgaatttcgtgaatgtagagaagaaatcctaaagtttttatgtattttcttagaaaaaatgggccagaagatcgcaccttactctgttgaaattaagaacacttgtaccagtgtttatacaaaagatagagctgctaaatgtaaaattccagccctggaccttcttattaagttacttcagacttttagaagttctagactcatggatgaatttaaaattggagaattatttagtaaattctatggagaacttgcattgaaaaaaaaaataccagatacagttttagaaaaagtatatgagctcctaggattattgggtgaagttcatcctagtgagatgataaataatgcagaaaacctgttccgcgcttttctgggtgaacttaagacccagatgacatcagcagtaagagagcccaaactacctgttctggcaggatgtctgaaggggttgtcctcacttctgtgcaacttcactaagtccatggaagaagatccccagacttcaagggagatttttaattttgtactaaaggcaattcgtcctcagattgatctgaagagatatgctgtgccctcagctggcttgcgcctatttgccctgcatgcatctcagtttagcacctgccttctggacaactacgtgtctctatttgaagtcttgttaaagtggtgtgcccacacaaatgtagaattgaaaaaagctgcactttcagccctggaatcctttctgaaacaggtttctaatatggtggcgaaaaatgcagaaatgcataaaaataaactgcagtactttatggagcagttttatggaatcatcagaaatgtggattcgaacaacaaggagttatctattgctatccgtggatatggactttttgcaggaccgtgcaaggttataaacgcaaaagatgttgacttcatgtacgttgagctcattcagcgctgcaagcagatgttcctcacccagacagacactggtgacgaccgtgtttatcagatgccaagcttcctccagtctgttgcaagcgtcttgctgtaccttgacacagttcctgaggtgtatactccagttctggagcacctcgtggtgatgcagatagacagtttcccacagtacagtccaaaaatgcagctggtgtgttgcagagccatagtgaaggtgttcctagctttggcagcaaaagggccagttctcaggaattgcattagtactgtggtgcatcagggtttaatcagaatatgttctaaaccagtggtccttccaaagggccctgagtctgaatctgaagaccaccgtgcttcaggggaagtcagaactggcaaatggaaggtgcccacatacaaagactacgtggatctcttcagacatctcctgagctctgaccagatgatggattctattttagcagatgaagcatttttctctgtgaattcctccagtgaaagtctgaatcatttactttatgatgaatttgtaaaatccgttttgaagattgttgagaaattggatcttacacttgaaatacagactgttggggaacaagagaatggagatgaggcgcctggtgtttggatgatcccaacttcagatccagcggctaacttgcatccagctaaacctaaagatttttcggctttcattaacctggtggaattttgcagagagattctccctgagaaacaagcagaattttttgaaccatgggtgtactcattttcatatgaattaattttgcaatctacaaggttgcccctcatcagtggtttctacaaattgctttctattacagtaagaaatgccaagaaaataaaatatttcgagggagttagtccaaagagtctgaaacactctcctgaagacccagaaaagtattcttgctttgctttatttgtgaaatttggcaaagaggtggcagttaaaatgaagcagtacaaagatgaacttttggcctcttgtttgacctttcttctgtccttgccacacaacatcattgaactcgatgttagagcctacgttcctgcactgcagatggctttcaaactgggcctgagctatacccccttggcagaagtaggcctgaatgctctagaagaatggtcaatttatattgacagacatgtaatgcagccttattacaaagacattctcccctgcctggatggatacctgaagacttcagccttgtcagatgagaccaagaataactgggaagtgtcagctctttctcgggctgcccagaaaggatttaataaagtggtgttaaagcatctgaagaagacaaagaacctttcatcaaacgaagcaatatccttagaagaaataagaattagagtagtacaaatgcttggatctctaggaggacaaataaacaaaaatcttctgacagtcacgtcctcagatgagatgatgaagagctatgtggcctgggacagagagaagcggctgagctttgcagtgccctttagagagatgaaacctgtcattttcctggatgtgttcctgcctcgagtcacagaattagcgctcacagccagtgacagacaaactaaagttgcagcctgtgaacttttacatagcatggttatgtttatgttgggcaaagccacgcagatgccagaagggggacagggagccccacccatgtaccagctctataagcggacgtttcctgtgctgcttcgacttgcgtgtgatgttgatcaggtgacaaggcaactgtatgagccactagttatgcagctgattcactggttcactaacaacaagaaatttgaaagtcaggatactgttgccttactagaagctatattggatggaattgtggaccctgttgacagtactttaagagatttttgtggtcggtgtattcgagaattccttaaatggtccattaagcaaataacaccacagcagcaggagaagagtccagtaaacaccaaatcgcttttcaagcgactttatagccttgcgcttcaccccaatgctttcaagaggctgggagcatcacttgcctttaataatatctacagggaattcagggaagaagagtctctggtggaacagtttgtgtttgaagccttggtgatatacatggagagtctggccttagcacatgcagatgagaagtccttaggtacaattcaacagtgttgtgatgccattgatcacctatgccgcatcattgaaaagaagcatgtttctttaaataaagcaaagaaacgacgtttgccgcgaggatttccaccttccgcatcattgtgtttattggatctggtcaagtggcttttagctcattgtgggaggccccagacagaatgtcgacacaaatccattgaactcttttataaattcgttcctttattgccaggcaacagatcccctaatttgtggctgaaagatgttctcaaggaagaaggtgtctcttttctcatcaacacctttgaggggggtggctgtggccagccctcgggcatcctggcccagcccaccctcttgtaccttcgggggccattcagcctgcaggccacgctatgctggctggacctgctcctggccgcgttggagtgctacaacacgttcattggcgagagaactgtaggagcgctccaggtcctaggtactgaagcccagtcttcacttttgaaagcagtggctttcttcttagaaagcattgccatgcatgacattatagcagcagaaaagtgctttggcactggggcagcaggtaacagaacaagcccacaagagggagaaaggtacaactacagcaaatgcaccgttgtggtccggattatggagtttaccacgactctgctaaacacctccccggaaggatggaagctcctgaagaaggacttgtgtaatacacacctgatgagagtcctggtgcagacgctgtgtgagcccgcaagcataggtttcaacatcggagacgtccaggttatggctcatcttcctgatgtttgtgtgaatctgatgaaagctctaaagatgtccccatacaaagatatcctagagacccatctgagagagaaaataacagcacagagcattgaggagctttgtgccgtcaacttgtatggccctgacgcgcaagtggacaggagcaggctggctgctgttgtgtctgcctgtaaacagcttcacagagctgggcttctgcataatatattaccgtctcagtccacagatttgcatcattctgttggcacagaacttctttccctggtttataaaggcattgcccctggagatgagagacagtgtctgccttctctagacctcagttgtaagcagctggccagcggacttctggagttagcctttgcttttggaggactgtgtgagcgccttgtgagtcttctcctgaacccagcggtgctgtccacggcgtccttgggcagctcacagggcagcgtcatccacttctcccatggggagtatttctatagcttgttctcagaaacgatcaacacggaattattgaaaaatctggatcttgctgtattggagctcatgcagtcttcagtggataataccaaaatggtgagtgccgttttgaacggcatgttagaccagagcttcagggagcgagcaaaccagaaacaccaaggactgaaacttgcgactacaattctgcaacactggaagaagtgtgattcatggtgggccaaagattcccctctcgaaactaaaatggcagtgctggccttactggcaaaaattttacagattgattcatctgtatcttttaatacaagtcatggttcattccctgaagtctttacaacatatattagtctacttgctgacacaaagctggatctacatttaaagggccaagctgtcactcttcttccattcttcaccagcctcactggaggcagtctggaggaacttagacgtgttctggagcagctcatcgttgctcacttccccatgcagtccagggaatttcctccaggaactccgcggttcaataattatgtggactgcatgaaaaagtttctagatgcattggaattatctcaaagccctatgttgttggaattgatgacagaagttctttgtcgggaacagcagcatgtcatggaagaattatttcaatccagtttcaggaggattgccagaaggggttcatgtgtcacacaagtaggccttctggaaagcgtgtatgaaatgttcaggaaggatgacccccgcctaagtttcacacgccagtcctttgtggaccgctccctcctcactctgctgtggcactgtagcctggatgctttgagagaattcttcagcacaattgtggtggatgccattgatgtgttgaagtccaggtttacaaagctaaatgaatctacctttgatactcaaatcaccaagaagatgggctactataagattctagacgtgatgtattctcgccttcccaaagatgatgttcatgctaaggaatcaaaaattaatcaagttttccatggctcgtgtattacagaaggaaatgaacttacaaagacattgattaaattgtgctacgatgcatttacagagaacatggcaggagagaatcagctgctggagaggagaagactttaccattgtgcagcatacaactgcgccatatctgtcatctgctgtgtcttcaatgagttaaaattttaccaaggttttctgtttagtgaaaaaccagaaaagaacttgcttatttttgaaaatctgatcgacctgaagcgccgctataattttcctgtagaagttgaggttcctatggaaagaaagaaaaagtacattgaaattaggaaagaagccagagaagcagcaaatggggattcagatggtccttcctatatgtcttccctgtcatatttggcagacagtaccctgagtgaggaaatgagtcaatttgatttctcaaccggagttcagagctattcatacagctcccaagaccctagacctgccactggtcgttttcggagacgggagcagcgggaccccacggtgcatgatgatgtgctggagctggagatggacgagctcaatcggcatgagtgcatggcgcccctgacggccctggtcaagcacatgcacagaagcctgggcccgcctcaaggagaagaggattcagtgccaagagatcttccttcttggatgaaattcctccatggcaaactgggaaatccaatagtaccattaaatatccgtctcttcttagccaagcttgttattaatacagaagaggtctttcgcccttacgcgaagcactggcttagccccttgctgcagctggctgcttctgaaaacaatggaggagaaggaattcactacatggtggttgagatagtggccactattctttcatggacaggcttggccactccaacaggggtccctaaagatgaagtgttagcaaatcgattgcttaatttcctaatgaaacatgtctttcatccaaaaagagctgtgtttagacacaaccttgaaattataaagacccttgtcgagtgctggaaggattgtttatccatcccttataggttaatatttgaaaagttttccggtaaagatcctaattctaaagacaactcagtagggattcaattgctaggcatcgtgatggccaatgacctgcctccctatgacccacagtgtggcatccagagtagcgaatacttccaggctttggtgaataatatgtcctttgtaagatataaagaagtgtatgccgctgcagcagaagttctaggacttatacttcgatatgttatggagagaaaaaacatactggaggagtctctgtgtgaactggttgcgaaacaattgaagcaacatcagaatactatggaggacaagtttattgtgtgcttgaacaaagtgaccaagagcttccctcctcttgcagacaggttcatgaatgctgtgttctttctgctgccaaaatttcatggagtgttgaaaacactctgtctggaggtggtactttgtcgtgtggagggaatgacagagctgtacttccagttaaagagcaaggacttcgttcaagtcatgagacatagagatgatgaaagacaaaaagtatgtttggacataatttataagatgatgccaaagttaaaaccagtagaactccgagaacttctgaaccccgttgtggaattcgtttcccatccttctacaacatgtagggaacaaatgtataatattctcatgtggattcatgataattacagagatccagaaagtgagacagataatgactcccaggaaatatttaagttggcaaaagatgtgctgattcaaggattgatcgatgagaaccctggacttcaattaattattcgaaatttctggagccatgaaactaggttaccttcaaataccttggaccggttgctggcactaaattccttatattctcctaagatagaagtgcactttttaagtttagcaacaaattttctgctcgaaatgaccagcatgagcccagattatccaaaccccatgttcgagcatcctctgtcagaatgcgaatttcaggaatataccattgattctgattggcgtttccgaagtactgttctcactccgatgtttgtggagacccaggcctcccagggcactctccagacccgtacccaggaagggtccctctcagctcgctggccagtggcagggcagataagggccacccagcagcagcatgacttcacactgacacagactgcagatggaagaagctcatttgattggctgaccgggagcagcactgacccgctggtcgaccacaccagtccctcatctgactccttgctgtttgcccacaagaggagtgaaaggttacagagagcacccttgaagtcagtggggcctgattttgggaaaaaaaggctgggccttccaggggacgaggtggataacaaagtgaaaggtgcggccggccggacggacctactacgactgcgcagacggtttatgagggaccaggagaagctcagtttgatgtatgccagaaaaggcgttgctgagcaaaaacgagagaaggaaatcaagagtgagttaaaaatgaagcaggatgcccaggtcgttctgtacagaagctaccggcacggagaccttcctgacattcagatcaagcacagcagcctcatcaccccgttacaggccgtggcccagagggacccaataattgcaaaacagctctttagcagcttgttttctggaattttgaaagagatggataaatttaagacactgtctgaaaaaaacaacatcactcaaaagttgcttcaagacttcaatcgttttcttaataccaccttctctttctttccaccctttgtctcttgtattcaggacacgaagcaaatgatgagtagcttcatgctgtccatctctgccgtggtgatgtcctatctgcagaatcctcangcccatgacgcccccatggtgataccagcctangaagggtcacattttggaccctgtctatccactaggcctgggctttggctgctaaacctgctgccttcagctgccatcctggacttccctgaaatgaggccgtctcggtgcccccagctggatagaggga

SEQ ID NO: 134807 - DNA, 3417 bp, Homo sapiens
ggggcatttccgggtccgggccgagcgggcgcacgcgcgggagcgggactcggcggcatggcgggctccggagccggtgtgcgttgctccctgctgcggctgcaggagaccttgtccgctgcggaccgctgcggtgctgccctggccggtcatcaactgatccgcggcctggggcaggaatgcgtcctgagcagcagccccgcggtgctggcattacagacatctttagttttttccagagatttcggtttgcttgtatttgtccggaagtcactcaacagtattgaatttcgtgaatgtagagaagaaatcctaaagtttttatgtattttcttagaaaaaatgggccagaagatcgcaccttactctgttgaaattaagaacacttgtaccagtgtttatacaaaagatagagctgctaaatgtaaaattccagccctggaccttcttattaagttacttcagacttttagaagttctagactcatggatgaatttaaaattggagaattatttagtaaattctatggagaacttgcattgaaaaaaaaaataccagatacagttttagaaaaagtatatgagctcctaggattattgggtgaagttcatcctagtgagatgataaataatgcagaaaacctgttccgcgcttttctgggtgaacttaagacccagatgacatcagcagtaagagagcccaaactacctgttctggcaggatgtctgaaggggttgtcctcacttctgtgcaacttcactaagtccatggaagaagatccccagacttcaagggagatttttaattttgtactaaaggcaattcgtcctcagattgatctgaagagatatgctgtgccctcagctggcttgcgcctatttgccctgcatgcatctcagtttagcacctgccttctggacaactacgtgtctctatttgaagtcttgttaaagtggtgtgcccacacaaatgtagaattgaaaaaagctgcactttcagccctggaatcctttctgaaacaggtttctaatatggtggcgaaaaatgcagaaatgcataaaaataaactgcagtactttatggagcagttttatggaatcatcagaaatgtggattcgaacaacaaggagttatctattgctatccgtggatatggactttttgcaggaccgtgcaaggttataaacgcaaaagatgttgacttcatgtacgttgagctcattcagcgctgcaagcagatgttcctcacccagacagacactggtgacgaccgtgtttatcagatgccaagcttcctccagtctgttgcaagcgtcttgctgtaccttgacacagttcctgaggtgtatactccagttctggagcacctcgtggtgatgcagatagacagtttcccacagtacagtccaaaaatgcagctggtgtgttgcagagccatagtgaaggtgttcctagctttggcagcaaaagggccagttctcaggaattgcattagtactgtggtgcatcagggtttaatcagaatatgttctaaaccagtggtccttccaaagggccctgagtctgaatctgaagaccaccgtgcttcaggggaagtcagaactggcaaatggaaggtgcccacatacaaagactacgtggatctcttcagacatctcctgagctctgaccagatgatggattctattttagcagatgaagcatttttctctgtgaattcctccagtgaaagtctgaatcatttactttatgatgaatttgtaaaatccgttttgaagattgttgagaaattggatcttacacttgaaatacagactgttggggaacaagagaatggagatgaggcgcctggtgtttggatgatcccaacttcagatccagcggctaacttgcatccagctaaacctaaagatttttcggctttcattaacctggtggaattttgcagagagattctccctgagaaacaagcagaattttttgaaccatgggtgtactcattttcatatgaattaattttgcaatctacaaggttgcccctcatcagtggtttctacaaattgctttctattacagtaagaaatgccaagaaaataaaatatttcgagggagttagtccaaagagtctgaaacactctcctgaagacccagaaaagtattcttgctttgctttatttgtgaaatttggcaaagaggtggcagttaaaatgaagcagtacaaagatgaacttttggcctcttgtttgacctttcttctgtccttgccacacaacatcattgaactcgatgttagagcctacgttcctgcactgcagatggctttcaaactgggcctgagctatacccccttggcagaagtaggcctgaatgctctagaagaatggtcaatttatattgacagacatgtaatgcagccttattacaaagacattctcccctgcctggatggatacctgaagacttcagccttgtcagatgagaccaagaataactgggaagtgtcagctctttctcgggctgcccagaaaggatttaataaagtggtgttaaagcatctgaagaagacaaagaacctttcatcaaacgaagcaatatccttagaagaaataagaattagagtagtacaaatgcttggatctctaggaggacaaataaacaaaaatcttctgacagtcacgtcctcagatgagatgatgaagagctatgtggcctgggacagagagaagcggctgagctttgcagtgccctttagagagatgaaacctgtcattttcctggatgtgttcctgcctcgagtcacagaattagcgctcacagccagtgacagacaaactaaagttgcagcctgtgaacttttacatagcatggttatgtttatgttgggcaaagccacgcagatgccagaagggggacagggagccccacccatgtaccagctctataagcggacgtttcctgtgctgcttcgacttgcgtgtgatgttgatcaggtgacaaggcaactgtatgagccactagttatgcagctgattcactggttcactaacaacaagaaatttgaaagtcaggatactgttgccttactagaagctatattggatggaattgtggaccctgttgacagtactttaagagatttttgtggtcggtgtattcgagaattccttaaatggtccattaagcaaataacaccacagcagcaggagaagagtccagtaaacaccaaatcgcttttcaagcgactttatagccttgcgctgtccccccccgccagtcctccacacccaaactgtttctgattggcttttagctttttgttgtttttttttttccttctaacacttgtatttggaggctcttctgtgattttgagaagtatactcttgagtgtttaataaagtttttttccaaaagta

SEQ ID NO: 134808 - DNA, 352 bp, Homo sapiens
gattccattgctattaaatatttccaaaaaaataaatattatgtatttgcaggtttctaatatggtggcgaaaaatgcagaaatgcataaaaataaactgcagtactttatggagcagttttatggaatcatcagaaatgtggattcgaacaacaaggagttatctattgctatccgtggatatggactttttgcaggagtatgtctcattaacttactctattttgtcttggtttcacgtgattgtttaaaggaatctaattcattgcattttgaatagtgtctaatacttgtaacaatacagtagacccttgaataacatgggcgtgaactgcacaggctcacttacatg

SEQ ID NO: 134809 - DNA, 379 bp, Homo sapiens
gtagagacggggtttcaccatgttggccaggctgatctgaactcctgacctcaggtgagccgccacgcccgtcccagattccactttaaatgcacatctgaataatttctggcttatgtatgattaaagttataaaacctaagggcaacttcatagtttcttaaattttatatttttagcaaaattaaagtaacactttatgtctcttgttaatataatgtgtggcaacttgatttactatcatttcattagaataaatacttttaaaatactggagtgttcattgatttggcctttttgatttgttttgtaggctgtatagatcaattggagaatacgacgtcctccgtgggatttttaccagtgagataggaacaaa

SEQ ID NO: 134810 - DNA, 521 bp, Homo sapiens
acattgaagtccacaggctctggcctggtatgtgggttttgtaatacctgcaaagtctcttccatctcaggtccattaggagaggctgtgctttgggtggccgtggtgttggtggtacagtttctagttaggtatggcattgctctgagtgtgtgcatgtgtttgtgcgtgcacgcaccatgctatcctgcagtcttaaataggggttttgtgttcatttttgaatatgcagtgtgaatcatttatctaattttattattcttagggatgaaaacatattaaatctatagtaaaattaccttttcagttaaaaattaggccaacacatttataatacaaatttaataataatcagctatatatgccttctttggaaatatgtctctgtacttgagaacaggtacaattcaacagtgttgtgatgccattgatcacctatgccgcatcattgaaaagaagcatgtttctttaaataaagcaaagaaacgacgtttgccgcggtaggtgatcttgcttccttt

SEQ ID NO: 134811 - DNA, 316 bp, Homo sapiens
cagtgtatcttgataatttaacgagatcagagctcacctaatttactgttttgtcacatggccagcattgaggagctttgtgccgtcaacttgtatggccctgacgcgcaagtggacaggagcaggctggctgctgttgtgtctgcctgtaaacagcttcacagagctgggcttctgcataatatattaccgtctcaggtaactataacttattgtttttacatttattttagctttagtatgataattagtgtatttatttatattatttcttaaaagtcctttatgtattgagcatgctgaaatgggaattata

SEQ ID NO: 134812 - DNA, 461 bp, Homo sapiens
tttgtgctcggtactttgagagttctggcttacatattctgctccttgccttttttcttgtttagtttctgccagtccctgagttgatgccttttcggctaactcgccagtttatcaatctgatgttaccaatgaaagaaacgggccttatgtacagcatcatggtacacgcactccgggccttccgctcagaccctggcctgctcaccaacaccatggatgtgtttgtcaaggagccctcctttgattggaaagtaggttttgtttcatgtgcacttttcacttttgtgacagtgtccccgtgatcaagctggtatctctcgtgtatgatggaagtgcattgagtcatgttgatgaaaatatttacattattttgtacagcatttctcaaagttagtatttaggattgtctgcttgaaaaccagttaagaggctgggcccagtggctcacacctataatc

SEQ ID NO: 134813 - DNA, 524 bp, Homo sapiens
tccaaatgctccccttgtcaatgcctgctaagtctttccaaatagaattgagaggtataatagatgtgtttgcaacagtttgtattttccaagctctgatagtattggtgatttatagcatttttgcttcagatcctaatttgtctttgttttgaattttttacagagggacccaataattgcaaaacagctctttagcagcttgttttctggaattttgaaagagatggataaatttaagacactgtctgaaaaaaacaacatcactcaaaagttgcttcaagacttcaatcgttttcttaataccaccttctctttctttccaccctttgtctcttgtattcaggtaaagtctgcacacacttcatcaaatatacattgtttgctgtggcttcacatggcctttccatcatcactatgtttcccgtgttgagactcttgataacctggtgtttaacagagtaagatgtactatttgggttaccacttcccaaatgagtagatgtaatttattttttcccccc

SEQ ID NO: 134814 - DNA, 336 bp, Homo sapiens
gtctcaaactccttggctcaagtaatcctactatcttggactcccaaagtgctgggattacaggcatgagccaccatgcccaaccaaaactatacatcttaaaagcagagaagaaacatataccattgagcactccattcattacacttataagcttagagccttttccaaagtccaaactaaacatcagtctttatagtaaattcttactaatttcagacttttggaaaagaatttgataaacattttgggaaaggaggttctaaactactgagaatgaagctcagtgacttcaacgacattaccaacatgctacttttaaaaatgaacaaagac

SEQ ID NO: 134815 - DNA, 577 bp, Homo sapiens
cattttgggaaaggaggttctaaactactgagaatgaagctcagtgacttcaacgacattaccaacatgctacttttaaaaatgaacaaagactcaaagccccctgggaatctgaaagaatgttcaccctggatgagcgacttcaaagtggagttcctgagaaatgagctggagattcccggtgagttaacctccaggggtgacaaaactgtactgtcaggagcacagcactgtaataagaactcgtggtttctggaatagtgatactgggatattgacagttatttctttttttaaagaattttaaaattcaccgaatttttcatcattaggaaaatccataattatgaatgagcacacattactaaatgtttaatgagattatagttcttatatttctgattctgacaaaagttcagattttcatttggtaataatggtaaacagcaatcatagatttcctctgaatgtattcatgctatgctcctgaataacttttcttcagaaatatacaggtatagaggcagattacttcctgggatgtgtacacagttccatttaaagtgacaagttttta

SEQ ID NO: 134816 - DNA, 13416 bp, Homo sapiens
ggggcatttccgggtccgggccgagcgggcgcacgcgcgggagcgggactcggcggcatggcgggctccggagccggtgtgcgttgctccctgctgcggctgcaggagaccttgtccgctgcggaccgctgcggtgctgccctggccggtcatcaactgatccgcggcctggggcaggaatgcgtcctgagcagcagccccgcggtgctggcattacagacatctttagttttttccagagatttcggtttgcttgtatttgtccggaagtcactcaacagtattgaatttcgtgaatgtagagaagaaatcctaaagtttttatgtattttcttagaaaaaatgggccagaagatcgcaccttactctgttgaaattaagaacacttgtaccagtgtttatacaaaagatagagctgctaaatgtaaaattccagccctggaccttcttattaagttacttcagacttttagaagttctagactcatggatgaatttaaaattggagaattatttagtaaattctatggagaacttgcattgaaaaaaaaaataccagatacagttttagaaaaagtatatgagctcctaggattattgggtgaagttcatcctagtgagatgataaataatgcagaaaacctgttccgcgcttttctgggtgaacttaagacccagatgacatcagcagtaagagagcccaaactacctgttctggcaggatgtctgaaggggttgtcctcacttctgtgcaacttcactaagtccatggaagaagatccccagacttcaagggagatttttaattttgtactaaaggcaattcgtcctcagattgatctgaagagatatgctgtgccctcagctggcttgcgcctatttgccctgcatgcatctcagtttagcacctgccttctggacaactacgtgtctctatttgaagtcttgttaaagtggtgtgcccacacaaatgtagaattgaaaaaagctgcactttcagccctggaatcctttctgaaacaggtttctaatatggtggcgaaaaatgcagaaatgcataaaaataaactgcagtactttatggagcagttttatggaatcatcagaaatgtggattcgaacaacaaggagttatctattgctatccgtggatatggactttttgcaggaccgtgcaaggttataaacgcaaaagatgttgacttcatgtacgttgagctcattcagcgctgcaagcagatgttcctcacccagacagacactggtgacgaccgtgtttatcagatgccaagcttcctccagtctgttgcaagcgtcttgctgtaccttgacacagttcctgaggtgtatactccagttctggagcacctcgtggtgatgcagatagacagtttcccacagtacagtccaaaaatgcagctggtgtgttgcagagccatagtgaaggtgttcctagctttggcagcaaaagggccagttctcaggaattgcattagtactgtggtgcatcagggtttaatcagaatatgttctaaaccagtggtccttccaaagggccctgagtctgaatctgaagaccaccgtgcttcaggggaagtcagaactggcaaatggaaggtgcccacatacaaagactacgtggatctcttcagacatctcctgagctctgaccagatgatggattctattttagcagatgaagcatttttctctgtgaattcctccagtgaaagtctgaatcatttactttatgatgaatttgtaaaatccgttttgaagattgttgagaaattggatcttacacttgaaatacagactgttggggaacaagagaatggagatgaggcgcctggtgtttggatgatcccaacttcagatccagcggctaacttgcatccagctaaacctaaagatttttcggctttcattaacctggtggaattttgcagagagattctccctgagaaacaagcagaattttttgaaccatgggtgtactcattttcatatgaattaattttgcaatctacaaggttgcccctcatcagtggtttctacaaattgctttctattacagtaagaaatgccaagaaaataaaatatttcgagggagttagtccaaagagtctgaaacactctcctgaagacccagaaaagtattcttgctttgctttatttgtgaaatttggcaaagaggtggcagttaaaatgaagcagtacaaagatgaacttttggcctcttgtttgacctttcttctgtccttgccacacaacatcattgaactcgatgttagagcctacgttcctgcactgcagatggctttcaaactgggcctgagctatacccccttggcagaagtaggcctgaatgctctagaagaatggtcaatttatattgacagacatgtaatgcagccttattacaaagacattctcccctgcctggatggatacctgaagacttcagccttgtcagatgagaccaagaataactgggaagtgtcagctctttctcgggctgcccagaaaggatttaataaagtggtgttaaagcatctgaagaagacaaagaacctttcatcaaacgaagcaatatccttagaagaaataagaattagagtagtacaaatgcttggatctctaggaggacaaataaacaaaaatcttctgacagtcacgtcctcagatgagatgatgaagagctatgtggcctgggacagagagaagcggctgagctttgcagtgccctttagagagatgaaacctgtcattttcctggatgtgttcctgcctcgagtcacagaattagcgctcacagccagtgacagacaaactaaagttgcagcctgtgaacttttacatagcatggttatgtttatgttgggcaaagccacgcagatgccagaagggggacagggagccccacccatgtaccagctctataagcggacgtttcctgtgctgcttcgacttgcgtgtgatgttgatcaggtgacaaggcaactgtatgagccactagttatgcagctgattcactggttcactaacaacaagaaatttgaaagtcaggatactgttgccttactagaagctatattggatggaattgtggaccctgttgacagtactttaagagatttttgtggtcggtgtattcgagaattccttaaatggtccattaagcaaataacaccacagcagcaggagaagagtccagtaaacaccaaatcgcttttcaagcgactttatagccttgcgcttcaccccaatgctttcaagaggctgggagcatcacttgcctttaataatatctacagggaattcagggaagaagagtctctggtggaacagtttgtgtttgaagccttggtgatatacatggagagtctggccttagcacatgcagatgagaagtccttaggtacaattcaacagtgttgtgatgccattgatcacctatgccgcatcattgaaaagaagcatgtttctttaaataaagcaaagaaacgacgtttgccgcgaggatttccaccttccgcatcattgtgtttattggatctggtcaagtggcttttagctcattgtgggaggccccagacagaatgtcgacacaaatccattgaactcttttataaattcgttcctttattgccaggcaacagatcccctaatttgtggctgaaagatgttctcaaggaagaaggtgtctcttttctcatcaacacctttgaggggggtggctgtggccagccctcgggcatcctggcccagcccaccctcttgtaccttcgggggccattcagcctgcaggccacgctatgctggctggacctgctcctggccgcgttggagtgctacaacacgttcattggcgagagaactgtaggagcgctccaggtcctaggtactgaagcccagtcttcacttttgaaagcagtggctttcttcttagaaagcattgccatgcatgacattatagcagcagaaaagtgctttggcactggggcagcaggtaacagaacaagcccacaagagggagaaaggtacaactacagcaaatgcaccgttgtggtccggattatggagtttaccacgactctgctaaacacctccccggaaggatggaagctcctgaagaaggacttgtgtaatacacacctgatgagagtcctggtgcagacgctgtgtgagcccgcaagcataggtttcaacatcggagacgtccaggttatggctcatcttcctgatgtttgtgtgaatctgatgaaagctctaaagatgtccccatacaaagatatcctagagacccatctgagagagaaaataacagcacagagcattgaggagctttgtgccgtcaacttgtatggccctgacgcgcaagtggacaggagcaggctggctgctgttgtgtctgcctgtaaacagcttcacagagctgggcttctgcataatatattaccgtctcagtccacagatttgcatcattctgttggcacagaacttctttccctggtttataaaggcattgcccctggagatgagagacagtgtctgccttctctagacctcagttgtaagcagctggccagcggacttctggagttagcctttgcttttggaggactgtgtgagcgccttgtgagtcttctcctgaacccagcggtgctgtccacggcgtccttgggcagctcacagggcagcgtcatccacttctcccatggggagtatttctatagcttgttctcagaaacgatcaacacggaattattgaaaaatctggatcttgctgtattggagctcatgcagtcttcagtggataataccaaaatggtgagtgccgttttgaacggcatgttagaccagagcttcagggagcgagcaaaccagaaacaccaaggactgaaacttgcgactacaattctgcaacactggaagaagtgtgattcatggtgggccaaagattcccctctcgaaactaaaatggcagtgctggccttactggcaaaaattttacagattgattcatctgtatcttttaatacaagtcatggttcattccctgaagtctttacaacatatattagtctacttgctgacacaaagctggatctacatttaaagggccaagctgtcactcttcttccattcttcaccagcctcactggaggcagtctggaggaacttagacgtgttctggagcagctcatcgttgctcacttccccatgcagtccagggaatttcctccaggaactccgcggttcaataattatgtggactgcatgaaaaagtttctagatgcattggaattatctcaaagccctatgttgttggaattgatgacagaagttctttgtcgggaacagcagcatgtcatggaagaattatttcaatccagtttcaggaggattgccagaaggggttcatgtgtcacacaagtaggccttctggaaagcgtgtatgaaatgttcaggaaggatgacccccgcctaagtttcacacgccagtcctttgtggaccgctccctcctcactctgctgtggcactgtagcctggatgctttgagagaattcttcagcacaattgtggtggatgccattgatgtgttgaagtccaggtttacaaagctaaatgaatctacctttgatactcaaatcaccaagaagatgggctactataagattctagacgtgatgtattctcgccttcccaaagatgatgttcatgctaaggaatcaaaaattaatcaagttttccatggctcgtgtattacagaaggaaatgaacttacaaagacattgattaaattgtgctacgatgcatttacagagaacatggcaggagagaatcagctgctggagaggagaagactttaccattgtgcagcatacaactgcgccatatctgtcatctgctgtgtcttcaatgagttaaaattttaccaaggttttctgtttagtgaaaaaccagaaaagaacttgcttatttttgaaaatctgatcgacctgaagcgccgctataattttcctgtagaagttgaggttcctatggaaagaaagaaaaagtacattgaaattaggaaagaagccagagaagcagcaaatggggattcagatggtccttcctatatgtcttccctgtcatatttggcagacagtaccctgagtgaggaaatgagtcaatttgatttctcaaccggagttcagagctattcatacagctcccaagaccctagacctgccactggtcgttttcggagacgggagcagcgggaccccacggtgcatgatgatgtgctggagctggagatggacgagctcaatcggcatgagtgcatggcgcccctgacggccctggtcaagcacatgcacagaagcctgggcccgcctcaaggagaagaggattcagtgccaagagatcttccttcttggatgaaattcctccatggcaaactgggaaatccaatagtaccattaaatatccgtctcttcttagccaagcttgttattaatacagaagaggtctttcgcccttacgcgaagcactggcttagccccttgctgcagctggctgcttctgaaaacaatggaggagaaggaattcactacatggtggttgagatagtggccactattctttcatggacaggcttggccactccaacaggggtccctaaagatgaagtgttagcaaatcgattgcttaatttcctaatgaaacatgtctttcatccaaaaagagctgtgtttagacacaaccttgaaattataaagacccttgtcgagtgctggaaggattgtttatccatcccttataggttaatatttgaaaagttttccggtaaagatcctaattctaaagacaactcagtagggattcaattgctaggcatcgtgatggccaatgacctgcctccctatgacccacagtgtggcatccagagtagcgaatacttccaggctttggtgaataatatgtcctttgtaagatataaagaagtgtatgccgctgcagcagaagttctaggacttatacttcgatatgttatggagagaaaaaacatactggaggagtctctgtgtgaactggttgcgaaacaattgaagcaacatcagaatactatggaggacaagtttattgtgtgcttgaacaaagtgaccaagagcttccctcctcttgcagacaggttcatgaatgctgtgttctttctgctgccaaaatttcatggagtgttgaaaacactctgtctggaggtggtactttgtcgtgtggagggaatgacagagctgtacttccagttaaagagcaaggacttcgttcaagtcatgagacatagagatgatgaaagacaaaaagtatgtttggacataatttataagatgatgccaaagttaaaaccagtagaactccgagaacttctgaaccccgttgtggaattcgtttcccatccttctacaacatgtagggaacaaatgtataatattctcatgtggattcatgataattacagagatccagaaagtgagacagataatgactcccaggaaatatttaagttggcaaaagatgtgctgattcaaggattgatcgatgagaaccctggacttcaattaattattcgaaatttctggagccatgaaactaggttaccttcaaataccttggaccggttgctggcactaaattccttatattctcctaagatagaagtgcactttttaagtttagcaacaaattttctgctcgaaatgaccagcatgagcccagattatccaaaccccatgttcgagcatcctctgtcagaatgcgaatttcaggaatataccattgattctgattggcgtttccgaagtactgttctcactccgatgtttgtggagacccaggcctcccagggcactctccagacccgtacccaggaagggtccctctcagctcgctggccagtggcagggcagataagggccacccagcagcagcatgacttcacactgacacagactgcagatggaagaagctcatttgattggctgaccgggagcagcactgacccgctggtcgaccacaccagtccctcatctgactccttgctgtttgcccacaagaggagtgaaaggttacagagagcacccttgaagtcagtggggcctgattttgggaaaaaaaggctgggccttccaggggacgaggtggataacaaagtgaaaggtgcggccggccggacggacctactacgactgcgcagacggtttatgagggaccaggagaagctcagtttgatgtatgccagaaaaggcgttgctgagcaaaaacgagagaaggaaatcaagagtgagttaaaaatgaagcaggatgcccaggtcgttctgtacagaagctaccggcacggagaccttcctgacattcagatcaagcacagcagcctcatcaccccgttacaggccgtggcccagagggacccaataattgcaaaacagctctttagcagcttgttttctggaattttgaaagagatggataaatttaagacactgtctgaaaaaaacaacatcactcaaaagttgcttcaagacttcaatcgttttcttaataccaccttctctttctttccaccctttgtctcttgtattcaggacattagctgtcagcacgcagccctgctgagcctcgacccagcggctgttagcgctggttgcctggccagcctacagcagcccgtgggcatccgcctgctagaggaggctctgctccgcctgctgcctgctgagctgcctgccaagcgagtccgtgggaaggcccgcctccctcctgatgtcctcagatgggtggagcttgctaagctgtatagatcaattggagaatacgacgtcctccgtgggatttttaccagtgagataggaacaaagcaaatcactcagagtgcattattagcagaagccagaagtgattattctgaagctgctaagcagtatgatgaggctctcaataaacaagactgggtagatggtgagcccacagaagccgagaaggatttttgggaacttgcatcccttgactgttacaaccaccttgctgagtggaaatcacttgaatactgttctacagccagtatagacagtgagaaccccccagacctaaataaaatctggagtgaaccattttatcaggaaacatatctaccttacatgatccgcagcaagctgaagctgctgctccagggagaggctgaccagtccctgctgacatttattgacaaagctatgcacggggagctccagaaggcgattctagagcttcattacagtcaagagctgagtctgctttacctcctgcaagatgatgttgacagagccaaatattacattcaaaatggcattcagagttttatgcagaattattctagtattgatgtcctcttacaccaaagtagactcaccaaattgcagtctgtacaggctttaacagaaattcaggagttcatcagctttataagcaaacaaggcaatttatcatctcaagttccccttaagagacttctgaacacctggacaaacagatatccagatgctaaaatggacccaatgaacatctgggatgacatcatcacaaatcgatgtttctttctcagcaaaatagaggagaagcttacccctcttccagaagataatagtatgaatgtggatcaagatggagaccccagtgacaggatggaagtgcaagagcaggaagaagatatcagctccctgatcaggagttgcaagttttccatgaaaatgaagatgatagacagtgcccggaagcagaacaatttctcacttgctatgaaactactgaaggagctgcataaagagtcaaaaaccagagacgattggctggtgagctgggtgcagagctactgccgcctgagccactgccggagccggtcccagggctgctctgagcaggtgctcactgtgctgaaaacagtctctttgttggatgagaacaacgtgtcaagctacttaagcaaaaatattctggctttccgtgaccagaacattctcttgggtacaacttacaggatcatagcgaatgctctcagcagtgagccagcctgccttgctgaaatcgaggaggacaaggctagaagaatcttagagctttctggatccagttcagaggattcagagaaggtgatcgcgggtctgtaccagagagcattccagcacctctctgaggctgtgcaggcggctgaggaggaggcccagcctccctcctggagctgtgggcctgcagctggggtgattgatgcttacatgacgctggcagatttctgtgaccaacagctgcgcaaggaggaagagaatgcatcagttattgattctgcagaactgcaggcgtatccagcacttgtggtggagaaaatgttgaaagctttaaaattaaattccaatgaagccagattgaagtttcctagattacttcagattatagaacggtatccagaggagactttgagcctcatgacaaaagagatctcttccgttccctgctggcagttcatcagctggatcagccacatggtggccttactggacaaagaccaagccgttgctgttcagcactctgtggaagaaatcactgataactacccgcaggctattgtttatcccttcatcataagcagcgaaagctattccttcaaggatacttctactggtcataagaataaggagtttgtggcaaggattaaaagtaagttggatcaaggaggagtgattcaagattttattaatgccttagatcagctctctaatcctgaactgctctttaaggattggagcaatgatgtaagagctgaactagcaaaaacccctgtaaataaaaaaaacattgaaaaaatgtatgaaagaatgtatgcagccttgggtgacccaaaggctccaggcctgggggcctttagaaggaagtttattcagacttttggaaaagaatttgataaacattttgggaaaggaggttctaaactactgagaatgaagctcagtgacttcaacgacattaccaacatgctacttttaaaaatgaacaaagactcaaagccccctgggaatctgaaagaatgttcaccctggatgagcgacttcaaagtggagttcctgagaaatgagctggagattcccggtcagtatgacggtaggggaaagccattgccagagtaccacgtgcgaatcgccgggtttgatgagcgggtgacagtcatggcgtctctgcgaaggcccaagcgcatcatcatccgtggccatgacgagagggaacaccctttcctggtgaagggtggcgaggacctgcggcaggaccagcgcgtggagcagctcttccaggtcatgaatgggatcctggcccaagactccgcctgcagccagagggccctgcagctgaggacctatagcgttgtgcccatgacctccagtgatcccagggcaccgccgtgtgaatataaagattggctgacaaaaatgtcaggaaaacatgatgttggagcttacatgctaatgtataagggcgctaatcgtactgaaacagtcacgtcttttagaaaacgagaaagtaaagtgcctgctgatctcttaaagcgggccttcgtgaggatgagtacaagccctgaggctttcctggcgctccgctcccacttcgccagctctcacgctctgatatgcatcagccactggatcctcgggattggagacagacatctgaacaactttatggtggccatggagactggcggcgtgatcgggatcgactttgggcatgcgtttggatccgctacacagtttctgccagtccctgagttgatgccttttcggctaactcgccagtttatcaatctgatgttaccaatgaaagaaacgggccttatgtacagcatcatggtacacgcactccgggccttccgctcagaccctggcctgctcaccaacaccatggatgtgtttgtcaaggagccctcctttgattggaaaaattttgaacagaaaatgctgaaaaaaggagggtcatggattcaagaaataaatgttgctgaaaaaaattggtacccccgacagaaaatatgttacgctaagagaaagttagcaggtgccaatccagcagtcattacttgtgatgagctactcctgggtcatgagaaggcccctgccttcagagactatgtggctgtggcacgaggaagcaaagatcacaacattcgtgcccaagaaccagagagtgggctttcagaagagactcaagtgaagtgcctgatggaccaggcaacagaccccaacatccttggcagaacctgggaaggatgggagccctggatgtgaggtctgtgggagtctgcagatagaaagcattacattgtttaaagaatctactatactttggttggcagcattccatgagctgattttcctgaaacactaaagagaaatgtcttttgtgctacagtttcgtagcatgagtttaaatcaagattatgatgagtaaatgtgtatgggttaaatcaaagataaggttatagtaacatcaaagattaggtgaggtttatagaaagatagatatccaggcttaccaaagtattaagtcaagaatataatatgtgatcagctttcaaagcatttacaagtgctgcaagttagtgaaacagctgtctccgtaaatggaggaaatgtggggaagccttggaatgcccttctggttctggcacattggaaagcacactcagaaggcttcatcaccaagattttgggagagtaaagctaagtatagttgatgtaacattgtagaagcagcataggaacaataagaacaataggtaaagctataattatggcttatatttagaaatgactgcatttgatattttaggatatttttctaggttttttcctttcattttattctcttctagttttgacattttatgatagatttgctctctagaaggaaacgtctttatttaggagggcaaaaattttggtcatagcattcacttttgctattccaatctacaactggaagatacataaaagtgctttgcattgaatttgggataacttcaaaaatcccatggttgttgttagggatagtactaagcatttcagttccaggagaataaaagaaattcctatttgaaatgaattcctcatttggaggaaaaaaagcatgcattctagcacaacaagatgaaattatggaatacaaaagtggctccttcccatgtgcagtccctgtccccccccgccagtcctccacacccaaactgtttctgattggcttttagctttttgttgtttttttttttccttctaacacttgtatttggaggctcttctgtgattttgagaagtatactcttgagtgtttaataaagtttttttccaaaagta

SEQ ID NO: 134817 - DNA, 13673 bp, Homo sapiens
ggggcatttccgggtccgggccgagcgggcgcacgcgcgggagcgggactcggcggcatggcgggctccggagccggtgtgcgttgctccctgctgcggctgcaggagaccttgtccgctgcggaccgctgcggtgctgccctggccggtcatcaactgatccgcggcctggggcaggaatgcgtcctgagcagcagccccgcggtgctggcattacagacatctttagttttttccagagatttcggtttgcttgtatttgtccggaagtcactcaacagtattgaatttcgtgaatgtagagaagaaatcctaaagtttttatgtattttcttagaaaaaatgggccagaagatcgcaccttactctgttgaaattaagaacacttgtaccagtgtttatacaaaagatagagctgctaaatgtaaaattccagccctggaccttcttattaagttacttcagacttttagaagttctagactcatggatgaatttaaaattggagaattatttagtaaattctatggagaacttgcattgaaaaaaaaaataccagatacagttttagaaaaagtatatgagctcctaggattattgggtgaagttcatcctagtgagatgataaataatgcagaaaacctgttccgcgcttttctgggtgaacttaagacccagatgacatcagcagtaagagagcccaaactacctgttctggcaggatgtctgaaggggttgtcctcacttctgtgcaacttcactaagtccatggaagaagatccccagacttcaagggagatttttaattttgtactaaaggcaattcgtcctcagattgatctgaagagatatgctgtgccctcagctggcttgcgcctatttgccctgcatgcatctcagtttagcacctgccttctggacaactacgtgtctctatttgaagtcttgttaaagtggtgtgcccacacaaatgtagaattgaaaaaagctgcactttcagccctggaatcctttctgaaacaggtttctaatatggtggcgaaaaatgcagaaatgcataaaaataaactgcagtactttatggagcagttttatggaatcatcagaaatgtggattcgaacaacaaggagttatctattgctatccgtggatatggactttttgcaggaccgtgcaaggttataaacgcaaaagatgttgacttcatgtacgttgagctcattcagcgctgcaagcagatgttcctcacccagacagacactggtgacgaccgtgtttatcagatgccaagcttcctccagtctgttgcaagcgtcttgctgtaccttgacacagttcctgaggtgtatactccagttctggagcacctcgtggtgatgcagatagacagtttcccacagtacagtccaaaaatgcagctggtgtgttgcagagccatagtgaaggtgttcctagctttggcagcaaaagggccagttctcaggaattgcattagtactgtggtgcatcagggtttaatcagaatatgttctaaaccagtggtccttccaaagggccctgagtctgaatctgaagaccaccgtgcttcaggggaagtcagaactggcaaatggaaggtgcccacatacaaagactacgtggatctcttcagacatctcctgagctctgaccagatgatggattctattttagcagatgaagcatttttctctgtgaattcctccagtgaaagtctgaatcatttactttatgatgaatttgtaaaatccgttttgaagattgttgagaaattggatcttacacttgaaatacagactgttggggaacaagagaatggagatgaggcgcctggtgtttggatgatcccaacttcagatccagcggctaacttgcatccagctaaacctaaagatttttcggctttcattaacctggtggaattttgcagagagattctccctgagaaacaagcagaattttttgaaccatgggtgtactcattttcatatgaattaattttgcaatctacaaggttgcccctcatcagtggtttctacaaattgctttctattacagtaagaaatgccaagaaaataaaatatttcgagggagttagtccaaagagtctgaaacactctcctgaagacccagaaaagtattcttgctttgctttatttgtgaaatttggcaaagaggtggcagttaaaatgaagcagtacaaagatgaacttttggcctcttgtttgacctttcttctgtccttgccacacaacatcattgaactcgatgttagagcctacgttcctgcactgcagatggctttcaaactgggcctgagctatacccccttggcagaagtaggcctgaatgctctagaagaatggtcaatttatattgacagacatgtaatgcagccttattacaaagacattctcccctgcctggatggatacctgaagacttcagccttgtcagatgagaccaagaataactgggaagtgtcagctctttctcgggctgcccagaaaggatttaataaagtggtgttaaagcatctgaagaagacaaagaacctttcatcaaacgaagcaatatccttagaagaaataagaattagagtagtacaaatgcttggatctctaggaggacaaataaacaaaaatcttctgacagtcacgtcctcagatgagatgatgaagagctatgtggcctgggacagagagaagcggctgagctttgcagtgccctttagagagatgaaacctgtcattttcctggatgtgttcctgcctcgagtcacagaattagcgctcacagccagtgacagacaaactaaagttgcagcctgtgaacttttacatagcatggttatgtttatgttgggcaaagccacgcagatgccagaagggggacagggagccccacccatgtaccagctctataagcggacgtttcctgtgctgcttcgacttgcgtgtgatgttgatcaggtgacaaggcaactgtatgagccactagttatgcagctgattcactggttcactaacaacaagaaatttgaaagtcaggatactgttgccttactagaagctatattggatggaattgtggaccctgttgacagtactttaagagatttttgtggtcggtgtattcgagaattccttaaatggtccattaagcaaataacaccacagcagcaggagaagagtccagtaaacaccaaatcgcttttcaagcgactttatagccttgcgcttcaccccaatgctttcaagaggctgggagcatcacttgcctttaataatatctacagggaattcagggaagaagagtctctggtggaacagtttgtgtttgaagccttggtgatatacatggagagtctggccttagcacatgcagatgagaagtccttaggtacaattcaacagtgttgtgatgccattgatcacctatgccgcatcattgaaaagaagcatgtttctttaaataaagcaaagaaacgacgtttgccgcgaggatttccaccttccgcatcattgtgtttattggatctggtcaagtggcttttagctcattgtgggaggccccagacagaatgtcgacacaaatccattgaactcttttataaattcgttcctttattgccaggcaacagatcccctaatttgtggctgaaagatgttctcaaggaagaaggtgtctcttttctcatcaacacctttgaggggggtggctgtggccagccctcgggcatcctggcccagcccaccctcttgtaccttcgggggccattcagcctgcaggccacgctatgctggctggacctgctcctggccgcgttggagtgctacaacacgttcattggcgagagaactgtaggagcgctccaggtcctaggtactgaagcccagtcttcacttttgaaagcagtggctttcttcttagaaagcattgccatgcatgacattatagcagcagaaaagtgctttggcactggggcagcaggtaacagaacaagcccacaagagggagaaaggtacaactacagcaaatgcaccgttgtggtccggattatggagtttaccacgactctgctaaacacctccccggaaggatggaagctcctgaagaaggacttgtgtaatacacacctgatgagagtcctggtgcagacgctgtgtgagcccgcaagcataggtttcaacatcggagacgtccaggttatggctcatcttcctgatgtttgtgtgaatctgatgaaagctctaaagatgtccccatacaaagatatcctagagacccatctgagagagaaaataacagcacagagcattgaggagctttgtgccgtcaacttgtatggccctgacgcgcaagtggacaggagcaggctggctgctgttgtgtctgcctgtaaacagcttcacagagctgggcttctgcataatatattaccgtctcagtccacagatttgcatcattctgttggcacagaacttctttccctggtttataaaggcattgcccctggagatgagagacagtgtctgccttctctagacctcagttgtaagcagctggccagcggacttctggagttagcctttgcttttggaggactgtgtgagcgccttgtgagtcttctcctgaacccagcggtgctgtccacggcgtccttgggcagctcacagggcagcgtcatccacttctcccatggggagtatttctatagcttgttctcagaaacgatcaacacggaattattgaaaaatctggatcttgctgtattggagctcatgcagtcttcagtggataataccaaaatggtgagtgccgttttgaacggcatgttagaccagagcttcagggagcgagcaaaccagaaacaccaaggactgaaacttgcgactacaattctgcaacactggaagaagtgtgattcatggtgggccaaagattcccctctcgaaactaaaatggcagtgctggccttactggcaaaaattttacagattgattcatctgtatcttttaatacaagtcatggttcattccctgaagtctttacaacatatattagtctacttgctgacacaaagctggatctacatttaaagggccaagctgtcactcttcttccattcttcaccagcctcactggaggcagtctggaggaacttagacgtgttctggagcagctcatcgttgctcacttccccatgcagtccagggaatttcctccaggaactccgcggttcaataattatgtggactgcatgaaaaagtttctagatgcattggaattatctcaaagccctatgttgttggaattgatgacagaagttctttgtcgggaacagcagcatgtcatggaagaattatttcaatccagtttcaggaggattgccagaaggggttcatgtgtcacacaagtaggccttctggaaagcgtgtatgaaatgttcaggaaggatgacccccgcctaagtttcacacgccagtcctttgtggaccgctccctcctcactctgctgtggcactgtagcctggatgctttgagagaattcttcagcacaattgtggtggatgccattgatgtgttgaagtccaggtttacaaagctaaatgaatctacctttgatactcaaatcaccaagaagatgggctactataagattctagacgtgatgtattctcgccttcccaaagatgatgttcatgctaaggaatcaaaaattaatcaagttttccatggctcgtgtattacagaaggaaatgaacttacaaagacattgattaaattgtgctacgatgcatttacagagaacatggcaggagagaatcagctgctggagaggagaagactttaccattgtgcagcatacaactgcgccatatctgtcatctgctgtgtcttcaatgagttaaaattttaccaaggttttctgtttagtgaaaaaccagaaaagaacttgcttatttttgaaaatctgatcgacctgaagcgccgctataattttcctgtagaagttgaggttcctatggaaagaaagaaaaagtacattgaaattaggaaagaagccagagaagcagcaaatggggattcagatggtccttcctatatgtcttccctgtcatatttggcagacagtaccctgagtgaggaaatgagtcaatttgatttctcaaccggagttcagagctattcatacagctcccaagaccctagacctgccactggtcgttttcggagacgggagcagcgggaccccacggtgcatgatgatgtgctggagctggagatggacgagctcaatcggcatgagtgcatggcgcccctgacggccctggtcaagcacatgcacagaagcctgggcccgcctcaaggagaagaggattcagtgccaagagatcttccttcttggatgaaattcctccatggcaaactgggaaatccaatagtaccattaaatatccgtctcttcttagccaagcttgttattaatacagaagaggtctttcgcccttacgcgaagcactggcttagccccttgctgcagctggctgcttctgaaaacaatggaggagaaggaattcactacatggtggttgagatagtggccactattctttcatggacaggcttggccactccaacaggggtccctaaagatgaagtgttagcaaatcgattgcttaatttcctaatgaaacatgtctttcatccaaaaagagctgtgtttagacacaaccttgaaattataaagacccttgtcgagtgctggaaggattgtttatccatcccttataggttaatatttgaaaagttttccggtaaagatcctaattctaaagacaactcagtagggattcaattgctaggcatcgtgatggccaatgacctgcctccctatgacccacagtgtggcatccagagtagcgaatacttccaggctttggtgaataatatgtcctttgtaagatataaagaagtgtatgccgctgcagcagaagttctaggacttatacttcgatatgttatggagagaaaaaacatactggaggagtctctgtgtgaactggttgcgaaacaattgaagcaacatcagaatactatggaggacaagtttattgtgtgcttgaacaaagtgaccaagagcttccctcctcttgcagacaggttcatgaatgctgtgttctttctgctgccaaaatttcatggagtgttgaaaacactctgtctggaggtggtactttgtcgtgtggagggaatgacagagctgtacttccagttaaagagcaaggacttcgttcaagtcatgagacatagagatgatgaaagacaaaaagtatgtttggacataatttataagatgatgccaaagttaaaaccagtagaactccgagaacttctgaaccccgttgtggaattcgtttcccatccttctacaacatgtagggaacaaatgtataatattctcatgtggattcatgataattacagagatccagaaagtgagacagataatgactcccaggaaatatttaagttggcaaaagatgtgctgattcaaggattgatcgatgagaaccctggacttcaattaattattcgaaatttctggagccatgaaactaggttaccttcaaataccttggaccggttgctggcactaaattccttatattctcctaagatagaagtgcactttttaagtttagcaacaaattttctgctcgaaatgaccagcatgagcccagattatccaaaccccatgttcgagcatcctctgtcagaatgcgaatttcaggaatataccattgattctgattggcgtttccgaagtactgttctcactccgatgtttgtggagacccaggcctcccagggcactctccagacccgtacccaggaagggtccctctcagctcgctggccagtggcagggcagataagggccacccagcagcagcatgacttcacactgacacagactgcagatggaagaagctcatttgattggctgaccgggagcagcactgacccgctggtcgaccacaccagtccctcatctgactccttgctgtttgcccacaagaggagtgaaaggttacagagagcacccttgaagtcagtggggcctgattttgggaaaaaaaggctgggccttccaggggacgaggtggataacaaagtgaaaggtgcggccggccggacggacctactacgactgcgcagacggtttatgagggaccaggagaagctcagtttgatgtatgccagaaaaggcgttgctgagcaaaaacgagagaaggaaatcaagagtgagttaaaaatgaagcaggatgcccaggtcgttctgtacagaagctaccggcacggagaccttcctgacattcagatcaagcacagcagcctcatcaccccgttacaggccgtggcccagagggacccaataattgcaaaacagctctttagcagcttgttttctggaattttgaaagagatggataaatttaagacactgtctgaaaaaaacaacatcactcaaaagttgcttcaagacttcaatcgttttcttaataccaccttctctttctttccaccctttgtctcttgtattcaggacattagctgtcagcacgcagccctgctgagcctcgacccagcggctgttagcgctggttgcctggccagcctacagcagcccgtgggcatccgcctgctagaggaggctctgctccgcctgctgcctgctgagctgcctgccaagcgagtccgtgggaaggcccgcctccctcctgatgtcctcagatgggtggagcttgctaagctgtatagatcaattggagaatacgacgtcctccgtgggatttttaccagtgagataggaacaaagcaaatcactcagagtgcattattagcagaagccagaagtgattattctgaagctgctaagcagtatgatgaggctctcaataaacaagactgggtagatggtgagcccacagaagccgagaaggatttttgggaacttgcatcccttgactgttacaaccaccttgctgagtggaaatcacttgaatactgttctacagccagtatagacagtgagaaccccccagacctaaataaaatctggagtgaaccattttatcaggaaacatatctaccttacatgatccgcagcaagctgaagctgctgctccagggagaggctgaccagtccctgctgacatttattgacaaagctatgcacggggagctccagaaggcgattctagagcttcattacagtcaagagctgagtctgctttacctcctgcaagatgatgttgacagagccaaatattacattcaaaatggcattcagagttttatgcagaattattctagtattgatgtcctcttacaccaaagtagactcaccaaattgcagtctgtacaggctttaacagaaattcaggagttcatcagctttataagcaaacaaggcaatttatcatctcaagttccccttaagagacttctgaacacctggacaaacagatatccagatgctaaaatggacccaatgaacatctgggatgacatcatcacaaatcgatgtttctttctcagcaaaatagaggagaagcttacccctcttccagaagataatagtatgaatgtggatcaagatggagaccccagtgacaggatggaagtgcaagagcaggaagaagatatcagctccctgatcaggagttgcaagttttccatgaaaatgaagatgatagacagtgcccggaagcagaacaatttctcacttgctatgaaactactgaaggagctgcataaagagtcaaaaaccagagacgattggctggtgagctgggtgcagagctactgccgcctgagccactgccggagccggtcccagggctgctctgagcaggtgctcactgtgctgaaaacagtctctttgttggatgagaacaacgtgtcaagctacttaagcaaaaatattctggctttccgtgaccagaacattctcttgggtacaacttacaggatcatagcgaatgctctcagcagtgagccagcctgccttgctgaaatcgaggaggacaaggctagaagaatcttagagctttctggatccagttcagaggattcagagaaggtgatcgcgggtctgtaccagagagcattccagcacctctctgaggctgtgcaggcggctgaggaggaggcccagcctccctcctggagctgtgggcctgcagctggggtgattgatgcttacatgacgctggcagatttctgtgaccaacagctgcgcaaggaggaagagaatgcatcagttattgattctgcagaactgcaggcgtatccagcacttgtggtggagaaaatgttgaaagctttaaaattaaattccaatgaagccagattgaagtttcctagattacttcagattatagaacggtatccagaggagactttgagcctcatgacaaaagagatctcttccgttccctgctggcagttcatcagctggatcagccacatggtggccttactggacaaagaccaagccgttgctgttcagcactctgtggaagaaatcactgataactacccgcaggctattgtttatcccttcatcataagcagcgaaagctattccttcaaggatacttctactggtcataagaataaggagtttgtggcaaggattaaaagtaagttggatcaaggaggagtgattcaagattttattaatgccttagatcagctctctaatcctgaactgctctttaaggattggagcaatgatgtaagagctgaactagcaaaaacccctgtaaataaaaaaaacattgaaaaaatgtatgaaagaatgtatgcagccttgggtgacccaaaggctccaggcctgggggcctttagaaggaagtttattcagacttttggaaaagaatttgataaacattttgggaaaggaggttctaaactactgagaatgaagctcagtgacttcaacgacattaccaacatgctacttttaaaaatgaacaaagactcaaagccccctgggaatctgaaagaatgttcaccctggatgagcgacttcaaagtggagttcctgagaaatgagctggagattcccggtcagtatgacggtaggggaaagccattgccagagtaccacgtgcgaatcgccgggtttgatgagcgggtgacagtcatggcgtctctgcgaaggcccaagcgcatcatcatccgtggccatgacgagagggaacaccctttcctggtgaagggtggcgaggacctgcggcaggaccagcgcgtggagcagctcttccaggtcatgaatgggatcctggcccaagactccgcctgcagccagagggccctgcagctgaggacctatagcgttgtgcccatgacctccaggttaggattaattgagtggcttgaaaatactgttaccttgaaggaccttcttttgaacaccatgtcccaagaggagaaggcggcttacctgagtgatcccagggcaccgccgtgtgaatataaagattggctgacaaaaatgtcaggaaaacatgatgttggagcttacatgctaatgtataagggcgctaatcgtactgaaacagtcacgtcttttagaaaacgagaaagtaaagtgcctgctgatctcttaaagcgggccttcgtgaggatgagtacaagccctgaggctttcctggcgctccgctcccacttcgccagctctcacgctctgatatgcatcagccactggatcctcgggattggagacagacatctgaacaactttatggtggccatggagactggcggcgtgatcgggatcgactttgggcatgcgtttggatccgctacacagtttctgccagtccctgagttgatgccttttcggctaactcgccagtttatcaatctgatgttaccaatgaaagaaacgggccttatgtacagcatcatggtacacgcactccgggccttccgctcagaccctggcctgctcaccaacaccatggatgtgtttgtcaaggagccctcctttgattggaaaaattttgaacagaaaatgctgaaaaaaggagggtcatggattcaagaaataaatgttgctgaaaaaaattggtacccccgacagaaaatatgttacgctaagagaaagttagcaggtgccaatccagcagtcattacttgtgatgagctactcctgggtcatgagaaggcccctgccttcagagactatgtggctgtggcacgaggaagcaaagatcacaacattcgtgcccaagaaccagagagtgggctttcagaagagactcaagtgaagtgcctgatggaccaggcaacagaccccaacatccttggcagaacctgggaaggatgggagccctggatgtgaggtctgtgggagtctgcagatagaaagcattacattgtttaaagaatctactatactttggttggcagcattccatgagctgattttcctgaaacactaaagagaaatgtcttttgtgctacagtttcgtagcatgagtttaaatcaagattatgatgagtaaatgtgtatgggttaaatcaaagataaggttatagtaacatcaaagattaggtgaggtttatagaaagatagatatccaggcttaccaaagtattaagtcaagaatataatatgtgatcagctttcaaagcatttacaagtgctgcaagttagtgaaacagctgtctccgtaaatggaggaaatgtggggaagccttggaatgcccttctggttctggcacattggaaagcacactcagaaggcttcatcaccaagattttgggagagtaaagctaagtatagttgatgtaacattgtagaagcagcataggaacaataagaacaataggtaaagctataattatggcttatatttagaaatgactgcatttgatattttaggatatttttctaggttttttcctttcattttattctcttctagttttgacattttatgatagatttgctctctagaaggaaacgtctttatttaggagggcaaaaattttggtcatagcattcacttttgctattccaatctacaactggaagatacataaaagtgctttgcattgaatttgggataacttcaaaaatcccatggttgttgttagggatagtactaagcatttcagttccaggagaataaaagaaattcctatttgaaatgaattcctcatttggaggaaaaaaagcatgcattctagcacaacaagatgaaattatggaatacaaaagtggctccttcccatgtgcagtccctgtccccccccgccagtcctccacacccaaactgtttctgattggcttttagctttttgttgtttttttttttccttctaacacttgtatttggaggctcttctgtgattttgagaagtatactcttgagtgtttaataaagtttttttccaaaagtagcagcagggccagaggaaaggcacaggtggcgatttgcccccacacccaactccgagggcccacgctggggaaagcgggaagcgctcgctccctttcccccattagtgctctctctgcctggatccccccagaagctatgaaagggaataaagtgattgaaagt

SEQ ID NO: 134818 - DNA, 12739 bp, Homo sapiens
cagacttatgtgtatccttggtctcttagtcccttctctaggaaaaatgtatcacatagccttatttaagacacttttctgaacctgatagagactaagcaaaatggaagcaaagggtctttatgattaaaagcaattgcgtgtaactataacagtacattagtagcatctaaacagttctagtttttccatgtttgtatagattccattgctattaaatatttccaaaaaaataaatattatgtatttgcaggtttctaatatggtggcgaaaaatgcagaaatgcataaaaataaactgcagtactttatggagcagttttatggaatcatcagaaatgtggattcgaacaacaaggagttatctattgctatccgtggatatggactttttgcaggaccgtgcaaggttataaacgcaaaagatgttgacttcatgtacgttgagctcattcagcgctgcaagcagatgttcctcacccagacagacactggtgacgaccgtgtttatcagatgccaagcttcctccagtctgttgcaagcgtcttgctgtaccttgacacagttcctgaggtgtatactccagttctggagcacctcgtggtgatgcagatagacagtttcccacagtacagtccaaaaatgcagctggtgtgttgcagagccatagtgaaggtgttcctagctttggcagcaaaagggccagttctcaggaattgcattagtactgtggtgcatcagggtttaatcagaatatgttctaaaccagtggtccttccaaagggccctgagtctgaatctgaagaccaccgtgcttcaggggaagtcagaactggcaaatggaaggtgcccacatacaaagactacgtggatctcttcagacatctcctgagctctgaccagatgatggattctattttagcagatgaagcatttttctctgtgaattcctccagtgaaagtctgaatcatttactttatgatgaatttgtaaaatccgttttgaagattgttgagaaattggatcttacacttgaaatacagactgttggggaacaagagaatggagatgaggcgcctggtgtttggatgatcccaacttcagatccagcggctaacttgcatccagctaaacctaaagatttttcggctttcattaacctggtggaattttgcagagagattctccctgagaaacaagcagaattttttgaaccatgggtgtactcattttcatatgaattaattttgcaatctacaaggttgcccctcatcagtggtttctacaaattgctttctattacagtaagaaatgccaagaaaataaaatatttcgagggagttagtccaaagagtctgaaacactctcctgaagacccagaaaagtattcttgctttgctttatttgtgaaatttggcaaagaggtggcagttaaaatgaagcagtacaaagatgaacttttggcctcttgtttgacctttcttctgtccttgccacacaacatcattgaactcgatgttagagcctacgttcctgcactgcagatggctttcaaactgggcctgagctatacccccttggcagaagtaggcctgaatgctctagaagaatggtcaatttatattgacagacatgtaatgcagccttattacaaagacattctcccctgcctggatggatacctgaagacttcagccttgtcagatgagaccaagaataactgggaagtgtcagctctttctcgggctgcccagaaaggatttaataaagtggtgttaaagcatctgaagaagacaaagaacctttcatcaaacgaagcaatatccttagaagaaataagaattagagtagtacaaatgcttggatctctaggaggacaaataaacaaaaatcttctgacagtcacgtcctcagatgagatgatgaagagctatgtggcctgggacagagagaagcggctgagctttgcagtgccctttagagagatgaaacctgtcattttcctggatgtgttcctgcctcgagtcacagaattagcgctcacagccagtgacagacaaactaaagttgcagcctgtgaacttttacatagcatggttatgtttatgttgggcaaagccacgcagatgccagaagggggacagggagccccacccatgtaccagctctataagcggacgtttcctgtgctgcttcgacttgcgtgtgatgttgatcaggtgacaaggcaactgtatgagccactagttatgcagctgattcactggttcactaacaacaagaaatttgaaagtcaggatactgttgccttactagaagctatattggatggaattgtggaccctgttgacagtactttaagagatttttgtggtcggtgtattcgagaattccttaaatggtccattaagcaaataacaccacagcagcaggagaagagtccagtaaacaccaaatcgcttttcaagcgactttatagccttgcgcttcaccccaatgctttcaagaggctgggagcatcacttgcctttaataatatctacagggaattcagggaagaagagtctctggtggaacagtttgtgtttgaagccttggtgatatacatggagagtctggccttagcacatgcagatgagaagtccttaggtacaattcaacagtgttgtgatgccattgatcacctatgccgcatcattgaaaagaagcatgtttctttaaataaagcaaagaaacgacgtttgccgcgaggatttccaccttccgcatcattgtgtttattggatctggtcaagtggcttttagctcattgtgggaggccccagacagaatgtcgacacaaatccattgaactcttttataaattcgttcctttattgccaggcaacagatcccctaatttgtggctgaaagatgttctcaaggaagaaggtgtctcttttctcatcaacacctttgaggggggtggctgtggccagccctcgggcatcctggcccagcccaccctcttgtaccttcgggggccattcagcctgcaggccacgctatgctggctggacctgctcctggccgcgttggagtgctacaacacgttcattggcgagagaactgtaggagcgctccaggtcctaggtactgaagcccagtcttcacttttgaaagcagtggctttcttcttagaaagcattgccatgcatgacattatagcagcagaaaagtgctttggcactggggcagcaggtaacagaacaagcccacaagagggagaaaggtacaactacagcaaatgcaccgttgtggtccggattatggagtttaccacgactctgctaaacacctccccggaaggatggaagctcctgaagaaggacttgtgtaatacacacctgatgagagtcctggtgcagacgctgtgtgagcccgcaagcataggtttcaacatcggagacgtccaggttatggctcatcttcctgatgtttgtgtgaatctgatgaaagctctaaagatgtccccatacaaagatatcctagagacccatctgagagagaaaataacagcacagagcattgaggagctttgtgccgtcaacttgtatggccctgacgcgcaagtggacaggagcaggctggctgctgttgtgtctgcctgtaaacagcttcacagagctgggcttctgcataatatattaccgtctcagtccacagatttgcatcattctgttggcacagaacttctttccctggtttataaaggcattgcccctggagatgagagacagtgtctgccttctctagacctcagttgtaagcagctggccagcggacttctggagttagcctttgcttttggaggactgtgtgagcgccttgtgagtcttctcctgaacccagcggtgctgtccacggcgtccttgggcagctcacagggcagcgtcatccacttctcccatggggagtatttctatagcttgttctcagaaacgatcaacacggaattattgaaaaatctggatcttgctgtattggagctcatgcagtcttcagtggataataccaaaatggtgagtgccgttttgaacggcatgttagaccagagcttcagggagcgagcaaaccagaaacaccaaggactgaaacttgcgactacaattctgcaacactggaagaagtgtgattcatggtgggccaaagattcccctctcgaaactaaaatggcagtgctggccttactggcaaaaattttacagattgattcatctgtatcttttaatacaagtcatggttcattccctgaagtctttacaacatatattagtctacttgctgacacaaagctggatctacatttaaagggccaagctgtcactcttcttccattcttcaccagcctcactggaggcagtctggaggaacttagacgtgttctggagcagctcatcgttgctcacttccccatgcagtccagggaatttcctccaggaactccgcggttcaataattatgtggactgcatgaaaaagtttctagatgcattggaattatctcaaagccctatgttgttggaattgatgacagaagttctttgtcgggaacagcagcatgtcatggaagaattatttcaatccagtttcaggaggattgccagaaggggttcatgtgtcacacaagtaggccttctggaaagcgtgtatgaaatgttcaggaaggatgacccccgcctaagtttcacacgccagtcctttgtggaccgctccctcctcactctgctgtggcactgtagcctggatgctttgagagaattcttcagcacaattgtggtggatgccattgatgtgttgaagtccaggtttacaaagctaaatgaatctacctttgatactcaaatcaccaagaagatgggctactataagattctagacgtgatgtattctcgccttcccaaagatgatgttcatgctaaggaatcaaaaattaatcaagttttccatggctcgtgtattacagaaggaaatgaacttacaaagacattgattaaattgtgctacgatgcatttacagagaacatggcaggagagaatcagctgctggagaggagaagactttaccattgtgcagcatacaactgcgccatatctgtcatctgctgtgtcttcaatgagttaaaattttaccaaggttttctgtttagtgaaaaaccagaaaagaacttgcttatttttgaaaatctgatcgacctgaagcgccgctataattttcctgtagaagttgaggttcctatggaaagaaagaaaaagtacattgaaattaggaaagaagccagagaagcagcaaatggggattcagatggtccttcctatatgtcttccctgtcatatttggcagacagtaccctgagtgaggaaatgagtcaatttgatttctcaaccggagttcagagctattcatacagctcccaagaccctagacctgccactggtcgttttcggagacgggagcagcgggaccccacggtgcatgatgatgtgctggagctggagatggacgagctcaatcggcatgagtgcatggcgcccctgacggccctggtcaagcacatgcacagaagcctgggcccgcctcaaggagaagaggattcagtgccaagagatcttccttcttggatgaaattcctccatggcaaactgggaaatccaatagtaccattaaatatccgtctcttcttagccaagcttgttattaatacagaagaggtctttcgcccttacgcgaagcactggcttagccccttgctgcagctggctgcttctgaaaacaatggaggagaaggaattcactacatggtggttgagatagtggccactattctttcatggacaggcttggccactccaacaggggtccctaaagatgaagtgttagcaaatcgattgcttaatttcctaatgaaacatgtctttcatccaaaaagagctgtgtttagacacaaccttgaaattataaagacccttgtcgagtgctggaaggattgtttatccatcccttataggttaatatttgaaaagttttccggtaaagatcctaattctaaagacaactcagtagggattcaattgctaggcatcgtgatggccaatgacctgcctccctatgacccacagtgtggcatccagagtagcgaatacttccaggctttggtgaataatatgtcctttgtaagatataaagaagtgtatgccgctgcagcagaagttctaggacttatacttcgatatgttatggagagaaaaaacatactggaggagtctctgtgtgaactggttgcgaaacaattgaagcaacatcagaatactatggaggacaagtttattgtgtgcttgaacaaagtgaccaagagcttccctcctcttgcagacaggttcatgaatgctgtgttctttctgctgccaaaatttcatggagtgttgaaaacactctgtctggaggtggtactttgtcgtgtggagggaatgacagagctgtacttccagttaaagagcaaggacttcgttcaagtcatgagacatagagatgatgaaagacaaaaagtatgtttggacataatttataagatgatgccaaagttaaaaccagtagaactccgagaacttctgaaccccgttgtggaattcgtttcccatccttctacaacatgtagggaacaaatgtataatattctcatgtggattcatgataattacagagatccagaaagtgagacagataatgactcccaggaaatatttaagttggcaaaagatgtgctgattcaaggattgatcgatgagaaccctggacttcaattaattattcgaaatttctggagccatgaaactaggttaccttcaaataccttggaccggttgctggcactaaattccttatattctcctaagatagaagtgcactttttaagtttagcaacaaattttctgctcgaaatgaccagcatgagcccagattatccaaaccccatgttcgagcatcctctgtcagaatgcgaatttcaggaatataccattgattctgattggcgtttccgaagtactgttctcactccgatgtttgtggagacccaggcctcccagggcactctccagacccgtacccaggaagggtccctctcagctcgctggccagtggcagggcagataagggccacccagcagcagcatgacttcacactgacacagactgcagatggaagaagctcatttgattggctgaccgggagcagcactgacccgctggtcgaccacaccagtccctcatctgactccttgctgtttgcccacaagaggagtgaaaggttacagagagcacccttgaagtcagtggggcctgattttgggaaaaaaaggctgggccttccaggggacgaggtggataacaaagtgaaaggtgcggccggccggacggacctactacgactgcgcagacggtttatgagggaccaggagaagctcagtttgatgtatgccagaaaaggcgttgctgagcaaaaacgagagaaggaaatcaagagtgagttaaaaatgaagcaggatgcccaggtcgttctgtacagaagctaccggcacggagaccttcctgacattcagatcaagcacagcagcctcatcaccccgttacaggccgtggcccagagggacccaataattgcaaaacagctctttagcagcttgttttctggaattttgaaagagatggataaatttaagacactgtctgaaaaaaacaacatcactcaaaagttgcttcaagacttcaatcgttttcttaataccaccttctctttctttccaccctttgtctcttgtattcaggacattagctgtcagcacgcagccctgctgagcctcgacccagcggctgttagcgctggttgcctggccagcctacagcagcccgtgggcatccgcctgctagaggaggctctgctccgcctgctgcctgctgagctgcctgccaagcgagtccgtgggaaggcccgcctccctcctgatgtcctcagatgggtggagcttgctaagctgtatagatcaattggagaatacgacgtcctccgtgggatttttaccagtgagataggaacaaagcaaatcactcagagtgcattattagcagaagccagaagtgattattctgaagctgctaagcagtatgatgaggctctcaataaacaagactgggtagatggtgagcccacagaagccgagaaggatttttgggaacttgcatcccttgactgttacaaccaccttgctgagtggaaatcacttgaatactgttctacagccagtatagacagtgagaaccccccagacctaaataaaatctggagtgaaccattttatcaggaaacatatctaccttacatgatccgcagcaagctgaagctgctgctccagggagaggctgaccagtccctgctgacatttattgacaaagctatgcacggggagctccagaaggcgattctagagcttcattacagtcaagagctgagtctgctttacctcctgcaagatgatgttgacagagccaaatattacattcaaaatggcattcagagttttatgcagaattattctagtattgatgtcctcttacaccaaagtagactcaccaaattgcagtctgtacaggctttaacagaaattcaggagttcatcagctttataagcaaacaaggcaatttatcatctcaagttccccttaagagacttctgaacacctggacaaacagatatccagatgctaaaatggacccaatgaacatctgggatgacatcatcacaaatcgatgtttctttctcagcaaaatagaggagaagcttacccctcttccagaagataatagtatgaatgtggatcaagatggagaccccagtgacaggatggaagtgcaagagcaggaagaagatatcagctccctgatcaggagttgcaagttttccatgaaaatgaagatgatagacagtgcccggaagcagaacaatttctcacttgctatgaaactactgaaggagctgcataaagagtcaaaaaccagagacgattggctggtgagctgggtgcagagctactgccgcctgagccactgccggagccggtcccagggctgctctgagcaggtgctcactgtgctgaaaacagtctctttgttggatgagaacaacgtgtcaagctacttaagcaaaaatattctggctttccgtgaccagaacattctcttgggtacaacttacaggatcatagcgaatgctctcagcagtgagccagcctgccttgctgaaatcgaggaggacaaggctagaagaatcttagagctttctggatccagttcagaggattcagagaaggtgatcgcgggtctgtaccagagagcattccagcacctctctgaggctgtgcaggcggctgaggaggaggcccagcctccctcctggagctgtgggcctgcagctggggtgattgatgcttacatgacgctggcagatttctgtgaccaacagctgcgcaaggaggaagagaatgcatcagttattgattctgcagaactgcaggcgtatccagcacttgtggtggagaaaatgttgaaagctttaaaattaaattccaatgaagccagattgaagtttcctagattacttcagattatagaacggtatccagaggagactttgagcctcatgacaaaagagatctcttccgttccctgctggcagttcatcagctggatcagccacatggtggccttactggacaaagaccaagccgttgctgttcagcactctgtggaagaaatcactgataactacccgcaggctattgtttatcccttcatcataagcagcgaaagctattccttcaaggatacttctactggtcataagaataaggagtttgtggcaaggattaaaagtaagttggatcaaggaggagtgattcaagattttattaatgccttagatcagctctctaatcctgaactgctctttaaggattggagcaatgatgtaagagctgaactagcaaaaacccctgtaaataaaaaaaacattgaaaaaatgtatgaaagaatgtatgcagccttgggtgacccaaaggctccaggcctgggggcctttagaaggaagtttattcagacttttggaaaagaatttgataaacattttgggaaaggaggttctaaactactgagaatgaagctcagtgacttcaacgacattaccaacatgctacttttaaaaatgaacaaagactcaaagccccctgggaatctgaaagaatgttcaccctggatgagcgacttcaaagtggagttcctgagaaatgagctggagattcccggtcagtatgacggtaggggaaagccattgccagagtaccacgtgcgaatcgccgggtttgatgagcgggtgacagtcatggcgtctctgcgaaggcccaagcgcatcatcatccgtggccatgacgagagggaacaccctttcctggtgaagggtggcgaggacctgcggcaggaccagcgcgtggagcagctcttccaggtcatgaatgggatcctggcccaagactccgcctgcagccagagggccctgcagctgaggacctatagcgttgtgcccatgacctccaggttaggattaattgagtggcttgaaaatactgttaccttgaaggaccttcttttgaacaccatgtcccaagaggagaaggcggcttacctgagtgatcccagggcaccgccgtgtgaatataaagattggctgacaaaaatgtcaggaaaacatgatgttggagcttacatgctaatgtataagggcgctaatcgtactgaaacagtcacgtcttttagaaaacgagaaagtaaagtgcctgctgatctcttaaagcgggccttcgtgaggatgagtacaagccctgaggctttcctggcgctccgctcccacttcgccagctctcacgctctgatatgcatcagccactggatcctcgggattggagacagacatctgaacaactttatggtggccatggagactggcggcgtgatcgggatcgactttgggcatgcgtttggatccgctacacagtttctgccagtccctgagttgatgccttttcggctaactcgccagtttatcaatctgatgttaccaatgaaagaaacgggccttatgtacagcatcatggtacacgcactccgggccttccgctcagaccctggcctgctcaccaacaccatggatgtgtttgtcaaggagccctcctttgattggaaaaattttgaacagaaaatgctgaaaaaaggagggtcatggattcaagaaataaatgttgctgaaaaaaattggtacccccgacagaaaatatgttacgctaagagaaagttagcaggtgccaatccagcagtcattacttgtgatgagctactcctgggtcatgagaaggcccctgccttcagagactatgtggctgtggcacgaggaagcaaagatcacaacattcgtgcccaagaaccagagagtgggctttcagaagagactcaagtgaagtgcctgatggaccaggcaacagaccccaacatccttggcagaacctgggaaggatgggagccctggatgtgaggtctgtgggagtctgcagatagaaagcattacattgtttaaagaatctactatactttggttggcagcattccatgagctgattttcctgaaacactaaagagaaatgtcttttgtgctacagtttcgtagcatgagtttaaatcaagattatgatgagtaaatgtgtatgggttaaatcaaagataaggttatagtaacatcaaagattaggtgaggtttatagaaagatagatatccaggcttaccaaagtattaagtcaagaatataatatgtgatcagctttcaaagcatttacaagtgctgcaagttagtgaaacagctgtctccgtaaatggaggaaatgtggggaagccttggaatgcccttctggttctggcacattggaaagcacactcagaaggcttcatcaccaagattttgggagagtaaagctaagtatagttgatgtaacattgtagaagcagcataggaacaataagaacaataggtaaagctataattatggcttatatttagaaatgactgcatttgatattttaggatatttttctaggttttttcctttcattttattctcttctagttttgacattttatgatagatttgctctctagaaggaaacgtctttatttaggagggcaaaaattttggtcatagcattcacttttgctattccaatctacaactggaagatacataaaagtgctttgcattgaatttgggataacttcaaaaatcccatggttgttgttagggatagtactaagcatttcagttccaggagaataaaagaaattcctatttgaaatgaattcctcatttggaggaaaaaaagcatgcattctagcacaacaagatgaaattatggaatacaaaagtggctccttcccatgtgcagtccctgtccccccccgccagtcctccacacccaaactgtttctgattggcttttagctttttgttgtttttttttttccttctaacacttgtatttggaggctcttctgtgattttgagaagtatactcttgagtgtttaataaagtttttttccaaaagta

SEQ ID NO: 134819 - DNA, 11006 bp, Homo sapiens
ggtctgagcaatgcagaaagtttcttacaatttctttggattgaaacaagaaatagctccctcgctcctcttcataaatttctcagagaaaatctaagttaccaggaagtagccaaagaccaggagattgtggaatcaaaaagaaaaaaataaacaaaaatcttctgacagtcacgtcctcagatgagatgatgaagagctatgtggcctgggacagagagaagcggctgagctttgcagtgccctttagagagatgaaacctgtcattttcctggatgtgttcctgcctcgagtcacagaattagcgctcacagccagtgacagacaaactaaagttgcagcctgtgaacttttacatagcatggttatgtttatgttgggcaaagccacgcagatgccagaagggggacagggagccccacccatgtaccagctctataagcggacgtttcctgtgctgcttcgacttgcgtgtgatgttgatcaggtgacaaggcaactgtatgagccactagttatgcagctgattcactggttcactaacaacaagaaatttgaaagtcaggatactgttgccttactagaagctatattggatggaattgtggaccctgttgacagtactttaagagatttttgtggtcggtgtattcgagaattccttaaatggtccattaagcaaataacaccacagcagcaggagaagagtccagtaaacaccaaatcgcttttcaagcgactttatagccttgcgcttcaccccaatgctttcaagaggctgggagcatcacttgcctttaataatatctacagggaattcagggaagaagagtctctggtggaacagtttgtgtttgaagccttggtgatatacatggagagtctggccttagcacatgcagatgagaagtccttaggtacaattcaacagtgttgtgatgccattgatcacctatgccgcatcattgaaaagaagcatgtttctttaaataaagcaaagaaacgacgtttgccgcgaggatttccaccttccgcatcattgtgtttattggatctggtcaagtggcttttagctcattgtgggaggccccagacagaatgtcgacacaaatccattgaactcttttataaattcgttcctttattgccaggcaacagatcccctaatttgtggctgaaagatgttctcaaggaagaaggtgtctcttttctcatcaacacctttgaggggggtggctgtggccagccctcgggcatcctggcccagcccaccctcttgtaccttcgggggccattcagcctgcaggccacgctatgctggctggacctgctcctggccgcgttggagtgctacaacacgttcattggcgagagaactgtaggagcgctccaggtcctaggtactgaagcccagtcttcacttttgaaagcagtggctttcttcttagaaagcattgccatgcatgacattatagcagcagaaaagtgctttggcactggggcagcaggtaacagaacaagcccacaagagggagaaaggtacaactacagcaaatgcaccgttgtggtccggattatggagtttaccacgactctgctaaacacctccccggaaggatggaagctcctgaagaaggacttgtgtaatacacacctgatgagagtcctggtgcagacgctgtgtgagcccgcaagcataggtttcaacatcggagacgtccaggttatggctcatcttcctgatgtttgtgtgaatctgatgaaagctctaaagatgtccccatacaaagatatcctagagacccatctgagagagaaaataacagcacagagcattgaggagctttgtgccgtcaacttgtatggccctgacgcgcaagtggacaggagcaggctggctgctgttgtgtctgcctgtaaacagcttcacagagctgggcttctgcataatatattaccgtctcagtccacagatttgcatcattctgttggcacagaacttctttccctggtttataaaggcattgcccctggagatgagagacagtgtctgccttctctagacctcagttgtaagcagctggccagcggacttctggagttagcctttgcttttggaggactgtgtgagcgccttgtgagtcttctcctgaacccagcggtgctgtccacggcgtccttgggcagctcacagggcagcgtcatccacttctcccatggggagtatttctatagcttgttctcagaaacgatcaacacggaattattgaaaaatctggatcttgctgtattggagctcatgcagtcttcagtggataataccaaaatggtgagtgccgttttgaacggcatgttagaccagagcttcagggagcgagcaaaccagaaacaccaaggactgaaacttgcgactacaattctgcaacactggaagaagtgtgattcatggtgggccaaagattcccctctcgaaactaaaatggcagtgctggccttactggcaaaaattttacagattgattcatctgtatcttttaatacaagtcatggttcattccctgaagtctttacaacatatattagtctacttgctgacacaaagctggatctacatttaaagggccaagctgtcactcttcttccattcttcaccagcctcactggaggcagtctggaggaacttagacgtgttctggagcagctcatcgttgctcacttccccatgcagtccagggaatttcctccaggaactccgcggttcaataattatgtggactgcatgaaaaagtttctagatgcattggaattatctcaaagccctatgttgttggaattgatgacagaagttctttgtcgggaacagcagcatgtcatggaagaattatttcaatccagtttcaggaggattgccagaaggggttcatgtgtcacacaagtaggccttctggaaagcgtgtatgaaatgttcaggaaggatgacccccgcctaagtttcacacgccagtcctttgtggaccgctccctcctcactctgctgtggcactgtagcctggatgctttgagagaattcttcagcacaattgtggtggatgccattgatgtgttgaagtccaggtttacaaagctaaatgaatctacctttgatactcaaatcaccaagaagatgggctactataagattctagacgtgatgtattctcgccttcccaaagatgatgttcatgctaaggaatcaaaaattaatcaagttttccatggctcgtgtattacagaaggaaatgaacttacaaagacattgattaaattgtgctacgatgcatttacagagaacatggcaggagagaatcagctgctggagaggagaagactttaccattgtgcagcatacaactgcgccatatctgtcatctgctgtgtcttcaatgagttaaaattttaccaaggttttctgtttagtgaaaaaccagaaaagaacttgcttatttttgaaaatctgatcgacctgaagcgccgctataattttcctgtagaagttgaggttcctatggaaagaaagaaaaagtacattgaaattaggaaagaagccagagaagcagcaaatggggattcagatggtccttcctatatgtcttccctgtcatatttggcagacagtaccctgagtgaggaaatgagtcaatttgatttctcaaccggagttcagagctattcatacagctcccaagaccctagacctgccactggtcgttttcggagacgggagcagcgggaccccacggtgcatgatgatgtgctggagctggagatggacgagctcaatcggcatgagtgcatggcgcccctgacggccctggtcaagcacatgcacagaagcctgggcccgcctcaaggagaagaggattcagtgccaagagatcttccttcttggatgaaattcctccatggcaaactgggaaatccaatagtaccattaaatatccgtctcttcttagccaagcttgttattaatacagaagaggtctttcgcccttacgcgaagcactggcttagccccttgctgcagctggctgcttctgaaaacaatggaggagaaggaattcactacatggtggttgagatagtggccactattctttcatggacaggcttggccactccaacaggggtccctaaagatgaagtgttagcaaatcgattgcttaatttcctaatgaaacatgtctttcatccaaaaagagctgtgtttagacacaaccttgaaattataaagacccttgtcgagtgctggaaggattgtttatccatcccttataggttaatatttgaaaagttttccggtaaagatcctaattctaaagacaactcagtagggattcaattgctaggcatcgtgatggccaatgacctgcctccctatgacccacagtgtggcatccagagtagcgaatacttccaggctttggtgaataatatgtcctttgtaagatataaagaagtgtatgccgctgcagcagaagttctaggacttatacttcgatatgttatggagagaaaaaacatactggaggagtctctgtgtgaactggttgcgaaacaattgaagcaacatcagaatactatggaggacaagtttattgtgtgcttgaacaaagtgaccaagagcttccctcctcttgcagacaggttcatgaatgctgtgttctttctgctgccaaaatttcatggagtgttgaaaacactctgtctggaggtggtactttgtcgtgtggagggaatgacagagctgtacttccagttaaagagcaaggacttcgttcaagtcatgagacatagagatgatgaaagacaaaaagtatgtttggacataatttataagatgatgccaaagttaaaaccagtagaactccgagaacttctgaaccccgttgtggaattcgtttcccatccttctacaacatgtagggaacaaatgtataatattctcatgtggattcatgataattacagagatccagaaagtgagacagataatgactcccaggaaatatttaagttggcaaaagatgtgctgattcaaggattgatcgatgagaaccctggacttcaattaattattcgaaatttctggagccatgaaactaggttaccttcaaataccttggaccggttgctggcactaaattccttatattctcctaagatagaagtgcactttttaagtttagcaacaaattttctgctcgaaatgaccagcatgagcccagattatccaaaccccatgttcgagcatcctctgtcagaatgcgaatttcaggaatataccattgattctgattggcgtttccgaagtactgttctcactccgatgtttgtggagacccaggcctcccagggcactctccagacccgtacccaggaagggtccctctcagctcgctggccagtggcagggcagataagggccacccagcagcagcatgacttcacactgacacagactgcagatggaagaagctcatttgattggctgaccgggagcagcactgacccgctggtcgaccacaccagtccctcatctgactccttgctgtttgcccacaagaggagtgaaaggttacagagagcacccttgaagtcagtggggcctgattttgggaaaaaaaggctgggccttccaggggacgaggtggataacaaagtgaaaggtgcggccggccggacggacctactacgactgcgcagacggtttatgagggaccaggagaagctcagtttgatgtatgccagaaaaggcgttgctgagcaaaaacgagagaaggaaatcaagagtgagttaaaaatgaagcaggatgcccaggtcgttctgtacagaagctaccggcacggagaccttcctgacattcagatcaagcacagcagcctcatcaccccgttacaggccgtggcccagagggacccaataattgcaaaacagctctttagcagcttgttttctggaattttgaaagagatggataaatttaagacactgtctgaaaaaaacaacatcactcaaaagttgcttcaagacttcaatcgttttcttaataccaccttctctttctttccaccctttgtctcttgtattcaggacattagctgtcagcacgcagccctgctgagcctcgacccagcggctgttagcgctggttgcctggccagcctacagcagcccgtgggcatccgcctgctagaggaggctctgctccgcctgctgcctgctgagctgcctgccaagcgagtccgtgggaaggcccgcctccctcctgatgtcctcagatgggtggagcttgctaagctgtatagatcaattggagaatacgacgtcctccgtgggatttttaccagtgagataggaacaaagcaaatcactcagagtgcattattagcagaagccagaagtgattattctgaagctgctaagcagtatgatgaggctctcaataaacaagactgggtagatggtgagcccacagaagccgagaaggatttttgggaacttgcatcccttgactgttacaaccaccttgctgagtggaaatcacttgaatactgttctacagccagtatagacagtgagaaccccccagacctaaataaaatctggagtgaaccattttatcaggaaacatatctaccttacatgatccgcagcaagctgaagctgctgctccagggagaggctgaccagtccctgctgacatttattgacaaagctatgcacggggagctccagaaggcgattctagagcttcattacagtcaagagctgagtctgctttacctcctgcaagatgatgttgacagagccaaatattacattcaaaatggcattcagagttttatgcagaattattctagtattgatgtcctcttacaccaaagtagactcaccaaattgcagtctgtacaggctttaacagaaattcaggagttcatcagctttataagcaaacaaggcaatttatcatctcaagttccccttaagagacttctgaacacctggacaaacagatatccagatgctaaaatggacccaatgaacatctgggatgacatcatcacaaatcgatgtttctttctcagcaaaatagaggagaagcttacccctcttccagaagataatagtatgaatgtggatcaagatggagaccccagtgacaggatggaagtgcaagagcaggaagaagatatcagctccctgatcaggagttgcaagttttccatgaaaatgaagatgatagacagtgcccggaagcagaacaatttctcacttgctatgaaactactgaaggagctgcataaagagtcaaaaaccagagacgattggctggtgagctgggtgcagagctactgccgcctgagccactgccggagccggtcccagggctgctctgagcaggtgctcactgtgctgaaaacagtctctttgttggatgagaacaacgtgtcaagctacttaagcaaaaatattctggctttccgtgaccagaacattctcttgggtacaacttacaggatcatagcgaatgctctcagcagtgagccagcctgccttgctgaaatcgaggaggacaaggctagaagaatcttagagctttctggatccagttcagaggattcagagaaggtgatcgcgggtctgtaccagagagcattccagcacctctctgaggctgtgcaggcggctgaggaggaggcccagcctccctcctggagctgtgggcctgcagctggggtgattgatgcttacatgacgctggcagatttctgtgaccaacagctgcgcaaggaggaagagaatgcatcagttattgattctgcagaactgcaggcgtatccagcacttgtggtggagaaaatgttgaaagctttaaaattaaattccaatgaagccagattgaagtttcctagattacttcagattatagaacggtatccagaggagactttgagcctcatgacaaaagagatctcttccgttccctgctggcagttcatcagctggatcagccacatggtggccttactggacaaagaccaagccgttgctgttcagcactctgtggaagaaatcactgataactacccgcaggctattgtttatcccttcatcataagcagcgaaagctattccttcaaggatacttctactggtcataagaataaggagtttgtggcaaggattaaaagtaagttggatcaaggaggagtgattcaagattttattaatgccttagatcagctctctaatcctgaactgctctttaaggattggagcaatgatgtaagagctgaactagcaaaaacccctgtaaataaaaaaaacattgaaaaaatgtatgaaagaatgtatgcagccttgggtgacccaaaggctccaggcctgggggcctttagaaggaagtttattcagacttttggaaaagaatttgataaacattttgggaaaggaggttctaaactactgagaatgaagctcagtgacttcaacgacattaccaacatgctacttttaaaaatgaacaaagactcaaagccccctgggaatctgaaagaatgttcaccctggatgagcgacttcaaagtggagttcctgagaaatgagctggagattcccggtcagtatgacggtaggggaaagccattgccagagtaccacgtgcgaatcgccgggtttgatgagcgggtgacagtcatggcgtctctgcgaaggcccaagcgcatcatcatccgtggccatgacgagagggaacaccctttcctggtgaagggtggcgaggacctgcggcaggaccagcgcgtggagcagctcttccaggtcatgaatgggatcctggcccaagactccgcctgcagccagagggccctgcagctgaggacctatagcgttgtgcccatgacctccaggttaggattaattgagtggcttgaaaatactgttaccttgaaggaccttcttttgaacaccatgtcccaagaggagaaggcggcttacctgagtgatcccagggcaccgccgtgtgaatataaagattggctgacaaaaatgtcaggaaaacatgatgttggagcttacatgctaatgtataagggcgctaatcgtactgaaacagtcacgtcttttagaaaacgagaaagtaaagtgcctgctgatctcttaaagcgggccttcgtgaggatgagtacaagccctgaggctttcctggcgctccgctcccacttcgccagctctcacgctctgatatgcatcagccactggatcctcgggattggagacagacatctgaacaactttatggtggccatggagactggcggcgtgatcgggatcgactttgggcatgcgtttggatccgctacacagtttctgccagtccctgagttgatgccttttcggctaactcgccagtttatcaatctgatgttaccaatgaaagaaacgggccttatgtacagcatcatggtacacgcactccgggccttccgctcagaccctggcctgctcaccaacaccatggatgtgtttgtcaaggagccctcctttgattggaaaaattttgaacagaaaatgctgaaaaaaggagggtcatggattcaagaaataaatgttgctgaaaaaaattggtacccccgacagaaaatatgttacgctaagagaaagttagcaggtgccaatccagcagtcattacttgtgatgagctactcctgggtcatgagaaggcccctgccttcagagactatgtggctgtggcacgaggaagcaaagatcacaacattcgtgcccaagaaccagagagtgggctttcagaagagactcaagtgaagtgcctgatggaccaggcaacagaccccaacatccttggcagaacctgggaaggatgggagccctggatgtgaggtctgtgggagtctgcagatagaaagcattacattgtttaaagaatctactatactttggttggcagcattccatgagctgattttcctgaaacactaaagagaaatgtcttttgtgctacagtttcgtagcatgagtttaaatcaagattatgatgagtaaatgtgtatgggttaaatcaaagataaggttatagtaacatcaaagattaggtgaggtttatagaaagatagatatccaggcttaccaaagtattaagtcaagaatataatatgtgatcagctttcaaagcatttacaagtgctgcaagttagtgaaacagctgtctccgtaaatggaggaaatgtggggaagccttggaatgcccttctggttctggcacattggaaagcacactcagaaggcttcatcaccaagattttgggagagtaaagctaagtatagttgatgtaacattgtagaagcagcataggaacaataagaacaataggtaaagctataattatggcttatatttagaaatgactgcatttgatattttaggatatttttctaggttttttcctttcattttattctcttctagttttgacattttatgatagatttgctctctagaaggaaacgtctttatttaggagggcaaaaattttggtcatagcattcacttttgctattccaatctacaactggaagatacataaaagtgctttgcattgaatttgggataacttcaaaaatcccatggttgttgttagggatagtactaagcatttcagttccaggagaataaaagaaattcctatttgaaatgaattcctcatttggaggaaaaaaagcatgcattctagcacaacaagatgaaattatggaatacaaaagtggctccttcccatgtgcagtccctgtccccccccgccagtcctccacacccaaactgtttctgattggcttttagctttttgttgtttttttttttccttctaacacttgtatttggaggctcttctgtgattttgagaagtatactcttgagtgtttaataaagtttttttccaaaagta

SEQ ID NO: 134820 - DNA, 13466 bp, Homo sapiens
  misc_feature (13242)..(13242): n is a, c, g, or t
  misc_feature (13248)..(13248): n is a, c, g, or t
  misc_feature (13256)..(13256): n is a, c, g, or t
  misc_feature (13277)..(13277): n is a, c, g, or t
  misc_feature (13295)..(13295): n is a, c, g, or t
  misc_feature (13298)..(13298): n is a, c, g, or t
ggggcatttccgggtccgggccgagcgggcgcacgcgcgggagcgggactcggcggcatggcgggctccggagccggtgtgcgttgctccctgctgcggctgcaggagaccttgtccgctgcggaccgctgcggtgctgccctggccggtcatcaactgatccgcggcctggggcaggaatgcgtcctgagcagcagccccgcggtgctggcattacagacatctttagttttttccagagatttcggtttgcttgtatttgtccggaagtcactcaacagtattgaatttcgtgaatgtagagaagaaatcctaaagtttttatgtattttcttagaaaaaatgggccagaagatcgcaccttactctgttgaaattaagaacacttgtaccagtgtttatacaaaagatagagctgctaaatgtaaaattccagccctggaccttcttattaagttacttcagacttttagaagttctagactcatggatgaatttaaaattggagaattatttagtaaattctatggagaacttgcattgaaaaaaaaaataccagatacagttttagaaaaagtatatgagctcctaggattattgggtgaagttcatcctagtgagatgataaataatgcagaaaacctgttccgcgcttttctgggtgaacttaagacccagatgacatcagcagtaagagagcccaaactacctgttctggcaggatgtctgaaggggttgtcctcacttctgtgcaacttcactaagtccatggaagaagatccccagacttcaagggagatttttaattttgtactaaaggcaattcgtcctcagattgatctgaagagatatgctgtgccctcagctggcttgcgcctatttgccctgcatgcatctcagtttagcacctgccttctggacaactacgtgtctctatttgaagtcttgttaaagtggtgtgcccacacaaatgtagaattgaaaaaagctgcactttcagccctggaatcctttctgaaacaggtttctaatatggtggcgaaaaatgcagaaatgcataaaaataaactgcagtactttatggagcagttttatggaatcatcagaaatgtggattcgaacaacaaggagttatctattgctatccgtggatatggactttttgcaggaccgtgcaaggttataaacgcaaaagatgttgacttcatgtacgttgagctcattcagcgctgcaagcagatgttcctcacccagacagacactggtgacgaccgtgtttatcagatgccaagcttcctccagtctgttgcaagcgtcttgctgtaccttgacacagttcctgaggtgtatactccagttctggagcacctcgtggtgatgcagatagacagtttcccacagtacagtccaaaaatgcagctggtgtgttgcagagccatagtgaaggtgttcctagctttggcagcaaaagggccagttctcaggaattgcattagtactgtggtgcatcagggtttaatcagaatatgttctaaaccagtggtccttccaaagggccctgagtctgaatctgaagaccaccgtgcttcaggggaagtcagaactggcaaatggaaggtgcccacatacaaagactacgtggatctcttcagacatctcctgagctctgaccagatgatggattctattttagcagatgaagcatttttctctgtgaattcctccagtgaaagtctgaatcatttactttatgatgaatttgtaaaatccgttttgaagattgttgagaaattggatcttacacttgaaatacagactgttggggaacaagagaatggagatgaggcgcctggtgtttggatgatcccaacttcagatccagcggctaacttgcatccagctaaacctaaagatttttcggctttcattaacctggtggaattttgcagagagattctccctgagaaacaagcagaattttttgaaccatgggtgtactcattttcatatgaattaattttgcaatctacaaggttgcccctcatcagtggtttctacaaattgctttctattacagtaagaaatgccaagaaaataaaatatttcgagggagttagtccaaagagtctgaaacactctcctgaagacccagaaaagtattcttgctttgctttatttgtgaaatttggcaaagaggtggcagttaaaatgaagcagtacaaagatgaacttttggcctcttgtttgacctttcttctgtccttgccacacaacatcattgaactcgatgttagagcctacgttcctgcactgcagatggctttcaaactgggcctgagctatacccccttggcagaagtaggcctgaatgctctagaagaatggtcaatttatattgacagacatgtaatgcagccttattacaaagacattctcccctgcctggatggatacctgaagacttcagccttgtcagatgagaccaagaataactgggaagtgtcagctctttctcgggctgcccagaaaggatttaataaagtggtgttaaagcatctgaagaagacaaagaacctttcatcaaacgaagcaatatccttagaagaaataagaattagagtagtacaaatgcttggatctctaggaggacaaataaacaaaaatcttctgacagtcacgtcctcagatgagatgatgaagagctatgtggcctgggacagagagaagcggctgagctttgcagtgccctttagagagatgaaacctgtcattttcctggatgtgttcctgcctcgagtcacagaattagcgctcacagccagtgacagacaaactaaagttgcagcctgtgaacttttacatagcatggttatgtttatgttgggcaaagccacgcagatgccagaagggggacagggagccccacccatgtaccagctctataagcggacgtttcctgtgctgcttcgacttgcgtgtgatgttgatcaggtgacaaggcaactgtatgagccactagttatgcagctgattcactggttcactaacaacaagaaatttgaaagtcaggatactgttgccttactagaagctatattggatggaattgtggaccctgttgacagtactttaagagatttttgtggtcggtgtattcgagaattccttaaatggtccattaagcaaataacaccacagcagcaggagaagagtccagtaaacaccaaatcgcttttcaagcgactttatagccttgcgcttcaccccaatgctttcaagaggctgggagcatcacttgcctttaataatatctacagggaattcagggaagaagagtctctggtggaacagtttgtgtttgaagccttggtgatatacatggagagtctggccttagcacatgcagatgagaagtccttaggtacaattcaacagtgttgtgatgccattgatcacctatgccgcatcattgaaaagaagcatgtttctttaaataaagcaaagaaacgacgtttgccgcgaggatttccaccttccgcatcattgtgtttattggatctggtcaagtggcttttagctcattgtgggaggccccagacagaatgtcgacacaaatccattgaactcttttataaattcgttcctttattgccaggcaacagatcccctaatttgtggctgaaagatgttctcaaggaagaaggtgtctcttttctcatcaacacctttgaggggggtggctgtggccagccctcgggcatcctggcccagcccaccctcttgtaccttcgggggccattcagcctgcaggccacgctatgctggctggacctgctcctggccgcgttggagtgctacaacacgttcattggcgagagaactgtaggagcgctccaggtcctaggtactgaagcccagtcttcacttttgaaagcagtggctttcttcttagaaagcattgccatgcatgacattatagcagcagaaaagtgctttggcactggggcagcaggtaacagaacaagcccacaagagggagaaaggtacaactacagcaaatgcaccgttgtggtccggattatggagtttaccacgactctgctaaacacctccccggaaggatggaagctcctgaagaaggacttgtgtaatacacacctgatgagagtcctggtgcagacgctgtgtgagcccgcaagcataggtttcaacatcggagacgtccaggttatggctcatcttcctgatgtttgtgtgaatctgatgaaagctctaaagatgtccccatacaaagatatcctagagacccatctgagagagaaaataacagcacagagcattgaggagctttgtgccgtcaacttgtatggccctgacgcgcaagtggacaggagcaggctggctgctgttgtgtctgcctgtaaacagcttcacagagctgggcttctgcataatatattaccgtctcagtccacagatttgcatcattctgttggcacagaacttctttccctggtttataaaggcattgcccctggagatgagagacagtgtctgccttctctagacctcagttgtaagcagctggccagcggacttctggagttagcctttgcttttggaggactgtgtgagcgccttgtgagtcttctcctgaacccagcggtgctgtccacggcgtccttgggcagctcacagggcagcgtcatccacttctcccatggggagtatttctatagcttgttctcagaaacgatcaacacggaattattgaaaaatctggatcttgctgtattggagctcatgcagtcttcagtggataataccaaaatggtgagtgccgttttgaacggcatgttagaccagagcttcagggagcgagcaaaccagaaacaccaaggactgaaacttgcgactacaattctgcaacactggaagaagtgtgattcatggtgggccaaagattcccctctcgaaactaaaatggcagtgctggccttactggcaaaaattttacagattgattcatctgtatcttttaatacaagtcatggttcattccctgaagtctttacaacatatattagtctacttgctgacacaaagctggatctacatttaaagggccaagctgtcactcttcttccattcttcaccagcctcactggaggcagtctggaggaacttagacgtgttctggagcagctcatcgttgctcacttccccatgcagtccagggaatttcctccaggaactccgcggttcaataattatgtggactgcatgaaaaagtttctagatgcattggaattatctcaaagccctatgttgttggaattgatgacagaagttctttgtcgggaacagcagcatgtcatggaagaattatttcaatccagtttcaggaggattgccagaaggggttcatgtgtcacacaagtaggccttctggaaagcgtgtatgaaatgttcaggaaggatgacccccgcctaagtttcacacgccagtcctttgtggaccgctccctcctcactctgctgtggcactgtagcctggatgctttgagagaattcttcagcacaattgtggtggatgccattgatgtgttgaagtccaggtttacaaagctaaatgaatctacctttgatactcaaatcaccaagaagatgggctactataagattctagacgtgatgtattctcgccttcccaaagatgatgttcatgctaaggaatcaaaaattaatcaagttttccatggctcgtgtattacagaaggaaatgaacttacaaagacattgattaaattgtgctacgatgcatttacagagaacatggcaggagagaatcagctgctggagaggagaagactttaccattgtgcagcatacaactgcgccatatctgtcatctgctgtgtcttcaatgagttaaaattttaccaaggttttctgtttagtgaaaaaccagaaaagaacttgcttatttttgaaaatctgatcgacctgaagcgccgctataattttcctgtagaagttgaggttcctatggaaagaaagaaaaagtacattgaaattaggaaagaagccagagaagcagcaaatggggattcagatggtccttcctatatgtcttccctgtcatatttggcagacagtaccctgagtgaggaaatgagtcaatttgatttctcaaccggagttcagagctattcatacagctcccaagaccctagacctgccactggtcgttttcggagacgggagcagcgggaccccacggtgcatgatgatgtgctggagctggagatggacgagctcaatcggcatgagtgcatggcgcccctgacggccctggtcaagcacatgcacagaagcctgggcccgcctcaaggagaagaggattcagtgccaagagatcttccttcttggatgaaattcctccatggcaaactgggaaatccaatagtaccattaaatatccgtctcttcttagccaagcttgttattaatacagaagaggtctttcgcccttacgcgaagcactggcttagccccttgctgcagctggctgcttctgaaaacaatggaggagaaggaattcactacatggtggttgagatagtggccactattctttcatggacaggcttggccactccaacaggggtccctaaagatgaagtgttagcaaatcgattgcttaatttcctaatgaaacatgtctttcatccaaaaagagctgtgtttagacacaaccttgaaattataaagacccttgtcgagtgctggaaggattgtttatccatcccttataggttaatatttgaaaagttttccggtaaagatcctaattctaaagacaactcagtagggattcaattgctaggcatcgtgatggccaatgacctgcctccctatgacccacagtgtggcatccagagtagcgaatacttccaggctttggtgaataatatgtcctttgtaagatataaagaagtgtatgccgctgcagcagaagttctaggacttatacttcgatatgttatggagagaaaaaacatactggaggagtctctgtgtgaactggttgcgaaacaattgaagcaacatcagaatactatggaggacaagtttattgtgtgcttgaacaaagtgaccaagagcttccctcctcttgcagacaggttcatgaatgctgtgttctttctgctgccaaaatttcatggagtgttgaaaacactctgtctggaggtggtactttgtcgtgtggagggaatgacagagctgtacttccagttaaagagcaaggacttcgttcaagtcatgagacatagagatgatgaaagacaaaaagtatgtttggacataatttataagatgatgccaaagttaaaaccagtagaactccgagaacttctgaaccccgttgtggaattcgtttcccatccttctacaacatgtagggaacaaatgtataatattctcatgtggattcatgataattacagagatccagaaagtgagacagataatgactcccaggaaatatttaagttggcaaaagatgtgctgattcaaggattgatcgatgagaaccctggacttcaattaattattcgaaatttctggagccatgaaactaggttaccttcaaataccttggaccggttgctggcactaaattccttatattctcctaagatagaagtgcactttttaagtttagcaacaaattttctgctcgaaatgaccagcatgagcccagattatccaaaccccatgttcgagcatcctctgtcagaatgcgaatttcaggaatataccattgattctgattggcgtttccgaagtactgttctcactccgatgtttgtggagacccaggcctcccagggcactctccagacccgtacccaggaagggtccctctcagctcgctggccagtggcagggcagataagggccacccagcagcagcatgacttcacactgacacagactgcagatggaagaagctcatttgattggctgaccgggagcagcactgacccgctggtcgaccacaccagtccctcatctgactccttgctgtttgcccacaagaggagtgaaaggttacagagagcacccttgaagtcagtggggcctgattttgggaaaaaaaggctgggccttccaggggacgaggtggataacaaagtgaaaggtgcggccggccggacggacctactacgactgcgcagacggtttatgagggaccaggagaagctcagtttgatgtatgccagaaaaggcgttgctgagcaaaaacgagagaaggaaatcaagagtgagttaaaaatgaagcaggatgcccaggtcgttctgtacagaagctaccggcacggagaccttcctgacattcagatcaagcacagcagcctcatcaccccgttacaggccgtggcccagagggacccaataattgcaaaacagctctttagcagcttgttttctggaattttgaaagagatggataaatttaagacactgtctgaaaaaaacaacatcactcaaaagttgcttcaagacttcaatcgttttcttaataccaccttctctttctttccaccctttgtctcttgtattcaggacattagctgtcagcacgcagccctgctgagcctcgacccagcggctgttagcgctggttgcctggccagcctacagcagcccgtgggcatccgcctgctagaggaggctctgctccgcctgctgcctgctgagctgcctgccaagcgagtccgtgggaaggcccgcctccctcctgatgtcctcagatgggtggagcttgctaagctgtatagatcaattggagaatacgacgtcctccgtgggatttttaccagtgagataggaacaaagcaaatcactcagagtgcattattagcagaagccagaagtgattattctgaagctgctaagcagtatgatgaggctctcaataaacaagactgggtagatggtgagcccacagaagccgagaaggatttttgggaacttgcatcccttgactgttacaaccaccttgctgagtggaaatcacttgaatactgttctacagccagtatagacagtgagaaccccccagacctaaataaaatctggagtgaaccattttatcaggaaacatatctaccttacatgatccgcagcaagctgaagctgctgctccagggagaggctgaccagtccctgctgacatttattgacaaagctatgcacggggagctccagaaggcgattctagagcttcattacagtcaagagctgagtctgctttacctcctgcaagatgatgttgacagagccaaatattacattcaaaatggcattcagagttttatgcagaattattctagtattgatgtcctcttacaccaaagtagactcaccaaattgcagtctgtacaggctttaacagaaattcaggagttcatcagctttataagcaaacaaggcaatttatcatctcaagttccccttaagagacttctgaacacctggacaaacagatatccagatgctaaaatggacccaatgaacatctgggatgacatcatcacaaatcgatgtttctttctcagcaaaatagaggagaagcttacccctcttccagaagataatagtatgaatgtggatcaagatggagaccccagtgacaggatggaagtgcaagagcaggaagaagatatcagctccctgatcaggagttgcaagttttccatgaaaatgaagatgatagacagtgcccggaagcagaacaatttctcacttgctatgaaactactgaaggagctgcataaagagtcaaaaaccagagacgattggctggtgagctgggtgcagagctactgccgcctgagccactgccggagccggtcccagggctgctctgagcaggtgctcactgtgctgaaaacagtctctttgttggatgagaacaacgtgtcaagctacttaagcaaaaatattctggctttccgtgaccagaacattctcttgggtacaacttacaggatcatagcgaatgctctcagcagtgagccagcctgccttgctgaaatcgaggaggacaaggctagaagaatcttagagctttctggatccagttcagaggattcagagaaggtgatcgcgggtctgtaccagagagcattccagcacctctctgaggctgtgcaggcggctgaggaggaggcccagcctccctcctggagctgtgggcctgcagctggggtgattgatgcttacatgacgctggcagatttctgtgaccaacagctgcgcaaggaggaagagaatgcatcagttattgattctgcagaactgcaggcgtatccagcacttgtggtggagaaaatgttgaaagctttaaaattaaattccaatgaagccagattgaagtttcctagattacttcagattatagaacggtatccagaggagactttgagcctcatgacaaaagagatctcttccgttccctgctggcagttcatcagctggatcagccacatggtggccttactggacaaagaccaagccgttgctgttcagcactctgtggaagaaatcactgataactacccgcaggctattgtttatcccttcatcataagcagcgaaagctattccttcaaggatacttctactggtcataagaataaggagtttgtggcaaggattaaaagtaagttggatcaaggaggagtgattcaagattttattaatgccttagatcagctctctaatcctgaactgctctttaaggattggagcaatgatgtaagagctgaactagcaaaaacccctgtaaataaaaaaaacattgaaaaaatgtatgaaagaatgtatgcagccttgggtgacccaaaggctccaggcctgggggcctttagaaggaagtttattcagacttttggaaaagaatttgataaacattttgggaaaggaggttctaaactactgagaatgaagctcagtgacttcaacgacattaccaacatgctacttttaaaaatgaacaaagactcaaagccccctgggaatctgaaagaatgttcaccctggatgagcgacttcaaagtggagttcctgagaaatgagctggagattcccggtcagtatgacggtaggggaaagccattgccagagtaccacgtgcgaatcgccgggtttgatgagcgggtgacagtcatggcgtctctgcgaaggcccaagcgcatcatcatccgtggccatgacgagagggaacaccctttcctggtgaagggtggcgaggacctgcggcaggaccagcgcgtggagcagctcttccaggtcatgaatgggatcctggcccaagactccgcctgcagccagagggccctgcagctgaggacctatagcgttgtgcccatgacctccaggttaggattaattgagtggcttgaaaatactgttaccttgaaggaccttcttttgaacaccatgtcccaagaggagaaggcggcttacctgagtgatcccagggcaccgccgtgtgaatataaagattggctgacaaaaatgtcaggaaaacatgatgttggagcttacatgctaatgtataagggcgctaatcgtactgaaacagtcacgtcttttagaaaacgagaaagtaaagtgcctgctgatctcttaaagcgggccttcgtgaggatgagtacaagccctgaggctttcctggcgctccgctcccacttcgccagctctcacgctctgatatgcatcagccactggatcctcgggattggagacagacatctgaacaactttatggtggccatggagactggcggcgtgatcgggatcgactttgggcatgcgtttggatccgctacacagtttctgccagtccctgagttgatgccttttcggctaactcgccagtttatcaatctgatgttaccaatgaaagaaacgggccttatgtacagcatcatggtacacgcactccgggccttccgctcagaccctggcctgctcaccaacaccatggatgtgtttgtcaaggagccctcctttgattggaaaaattttgaacagaaaatgctgaaaaaaggagggtcatggattcaagaaataaatgttgctgaaaaaaattggtacccccgacagaaaatatgttacgctaagagaaagttagcaggtgccaatccagcagtcattacttgtgatgagctactcctgggtcatgagaaggcccctgccttcagagactatgtggctgtggcacgaggaagcaaagatcacaacattcgtgcccaagaaccagagagtgggctttcagaagagactcaagtgaagtgcctgatggaccaggcaacagaccccaacatccttggcagaacctgggaaggatgggagccctggatgtgaggtctgtgggagtctgcagatagaaagcattacattgtttaaagaatctactatactttggttggcagcattccatgagctgattttcctgaaacactaaagagaaatgtcttttgtgctacagtttcgtagcatgagtttaaatcaagattatgatgagtaaatgtgtatgggttaaatcaaagataaggttatagtaacatcaaagattaggtgaggtttatagaaagatagatatccaggcttaccaaagtattaagtcaagaatataatatgtgatcagctttcaaagcatttacaagtgctgcaagttagtgaaacagctgtctccgtaaatggaggaaatgtggggaagccttggaatgcccttctggttctggcacattggaaagcacactcagaaggcttcatcaccaagattttgggagagtaaagctaagtatagttgatgtaacattgtagaagcagcataggaacaataagaacaataggtaaagctataattatggcttatatttagaaatgactgcatttgatattttaggatatttttctaggttttttcctttcattttattctcttctagttttgacattttatgatagatttgctctctagaaggaaacgtctttatttaggagggcaaaaattttggtcatagcattcacttttgctattccaatctacaactggaacgatatttgtggttctgtcgagggatgcacaaaaacccagcatgggccaggtgtggaggctcatgcctgtaatcccggcactttgggaggtcaaggcgggcngatcangaggtcangagatcgagaccatcctggcnaacatggtgaaaccccgnctntactaaaaatacaaaaaattagccaagtgtggtggcgggcctctgtaataccagctacttgggaggctgaggcaagggaatcacttgaacccgggatgtggaggttgcagtgagccaaggttgcaccattgcactccagcctgggcaacaagagcaaaactacatctc

SEQ ID NO: 134821 - DNA, 13455 bp, Homo sapiens
ggggcatttccgggtccgggccgagcgggcgcacgcgcgggagcgggactcggcggcatggcgggctccggagccggtgtgcgttgctccctgctgcggctgcaggagaccttgtccgctgcggaccgctgcggtgctgccctggccggtcatcaactgatccgcggcctggggcaggaatgcgtcctgagcagcagccccgcggtgctggcattacagacatctttagttttttccagagatttcggtttgcttgtatttgtccggaagtcactcaacagtattgaatttcgtgaatgtagagaagaaatcctaaagtttttatgtattttcttagaaaaaatgggccagaagatcgcaccttactctgttgaaattaagaacacttgtaccagtgtttatacaaaagatagagctgctaaatgtaaaattccagccctggaccttcttattaagttacttcagacttttagaagttctagactcatggatgaatttaaaattggagaattatttagtaaattctatggagaacttgcattgaaaaaaaaaataccagatacagttttagaaaaagtatatgagctcctaggattattgggtgaagttcatcctagtgagatgataaataatgcagaaaacctgttccgcgcttttctgggtgaacttaagacccagatgacatcagcagtaagagagcccaaactacctgttctggcaggatgtctgaaggggttgtcctcacttctgtgcaacttcactaagtccatggaagaagatccccagacttcaagggagatttttaattttgtactaaaggcaattcgtcctcagattgatctgaagagatatgctgtgccctcagctggcttgcgcctatttgccctgcatgcatctcagtttagcacctgccttctggacaactacgtgtctctatttgaagtcttgttaaagtggtgtgcccacacaaatgtagaattgaaaaaagctgcactttcagccctggaatcctttctgaaacaggtttctaatatggtggcgaaaaatgcagaaatgcataaaaataaactgcagtactttatggagcagttttatggaatcatcagaaatgtggattcgaacaacaaggagttatctattgctatccgtggatatggactttttgcaggaccgtgcaaggttataaacgcaaaagatgttgacttcatgtacgttgagctcattcagcgctgcaagcagatgttcctcacccagacagacactggtgacgaccgtgtttatcagatgccaagcttcctccagtctgttgcaagcgtcttgctgtaccttgacacagttcctgaggtgtatactccagttctggagcacctcgtggtgatgcagatagacagtttcccacagtacagtccaaaaatgcagctggtgtgttgcagagccatagtgaaggtgttcctagctttggcagcaaaagggccagttctcaggaattgcattagtactgtggtgcatcagggtttaatcagaatatgttctaaaccagtggtccttccaaagggccctgagtctgaatctgaagaccaccgtgcttcaggggaagtcagaactggcaaatggaaggtgcccacatacaaagactacgtggatctcttcagacatctcctgagctctgaccagatgatggattctattttagcagatgaagcatttttctctgtgaattcctccagtgaaagtctgaatcatttactttatgatgaatttgtaaaatccgttttgaagattgttgagaaattggatcttacacttgaaatacagactgttggggaacaagagaatggagatgaggcgcctggtgtttggatgatcccaacttcagatccagcggctaacttgcatccagctaaacctaaagatttttcggctttcattaacctggtggaattttgcagagagattctccctgagaaacaagcagaattttttgaaccatgggtgtactcattttcatatgaattaattttgcaatctacaaggttgcccctcatcagtggtttctacaaattgctttctattacagtaagaaatgccaagaaaataaaatatttcgagggagttagtccaaagagtctgaaacactctcctgaagacccagaaaagtattcttgctttgctttatttgtgaaatttggcaaagaggtggcagttaaaatgaagcagtacaaagatgaacttttggcctcttgtttgacctttcttctgtccttgccacacaacatcattgaactcgatgttagagcctacgttcctgcactgcagatggctttcaaactgggcctgagctatacccccttggcagaagtaggcctgaatgctctagaagaatggtcaatttatattgacagacatgtaatgcagccttattacaaagacattctcccctgcctggatggatacctgaagacttcagccttgtcagatgagaccaagaataactgggaagtgtcagctctttctcgggctgcccagaaaggatttaataaagtggtgttaaagcatctgaagaagacaaagaacctttcatcaaacgaagcaatatccttagaagaaataagaattagagtagtacaaatgcttggatctctaggaggacaaataaacaaaaatcttctgacagtcacgtcctcagatgagatgatgaagagctatgtggcctgggacagagagaagcggctgagctttgcagtgccctttagagagatgaaacctgtcattttcctggatgtgttcctgcctcgagtcacagaattagcgctcacagccagtgacagacaaactaaagttgcagcctgtgaacttttacatagcatggttatgtttatgttgggcaaagccacgcagatgccagaagggggacagggagccccacccatgtaccagctctataagcggacgtttcctgtgctgcttcgacttgcgtgtgatgttgatcaggtgacaaggcaactgtatgagccactagttatgcagctgattcactggttcactaacaacaagaaatttgaaagtcaggatactgttgccttactagaagctatattggatggaattgtggaccctgttgacagtactttaagagatttttgtggtcggtgtattcgagaattccttaaatggtccattaagcaaataacaccacagcagcaggagaagagtccagtaaacaccaaatcgcttttcaagcgactttatagccttgcgcttcaccccaatgctttcaagaggctgggagcatcacttgcctttaataatatctacagggaattcagggaagaagagtctctggtggaacagtttgtgtttgaagccttggtgatatacatggagagtctggccttagcacatgcagatgagaagtccttaggtacaattcaacagtgttgtgatgccattgatcacctatgccgcatcattgaaaagaagcatgtttctttaaataaagcaaagaaacgacgtttgccgcgaggatttccaccttccgcatcattgtgtttattggatctggtcaagtggcttttagctcattgtgggaggccccagacagaatgtcgacacaaatccattgaactcttttataaattcgttcctttattgccaggcaacagatcccctaatttgtggctgaaagatgttctcaaggaagaaggtgtctcttttctcatcaacacctttgaggggggtggctgtggccagccctcgggcatcctggcccagcccaccctcttgtaccttcgggggccattcagcctgcaggccacgctatgctggctggacctgctcctggccgcgttggagtgctacaacacgttcattggcgagagaactgtaggagcgctccaggtcctaggtactgaagcccagtcttcacttttgaaagcagtggctttcttcttagaaagcattgccatgcatgacattatagcagcagaaaagtgctttggcactggggcagcaggtaacagaacaagcccacaagagggagaaaggtacaactacagcaaatgcaccgttgtggtccggattatggagtttaccacgactctgctaaacacctccccggaaggatggaagctcctgaagaaggacttgtgtaatacacacctgatgagagtcctggtgcagacgctgtgtgagcccgcaagcataggtttcaacatcggagacgtccaggttatggctcatcttcctgatgtttgtgtgaatctgatgaaagctctaaagatgtccccatacaaagatatcctagagacccatctgagagagaaaataacagcacagagcattgaggagctttgtgccgtcaacttgtatggccctgacgcgcaagtggacaggagcaggctggctgctgttgtgtctgcctgtaaacagcttcacagagctgggcttctgcataatatattaccgtctcagtccacagatttgcatcattctgttggcacagaacttctttccctggtttataaaggcattgcccctggagatgagagacagtgtctgccttctctagacctcagttgtaagcagctggccagcggacttctggagttagcctttgcttttggaggactgtgtgagcgccttgtgagtcttctcctgaacccagcggtgctgtccacggcgtccttgggcagctcacagggcagcgtcatccacttctcccatggggagtatttctatagcttgttctcagaaacgatcaacacggaattattgaaaaatctggatcttgctgtattggagctcatgcagtcttcagtggataataccaaaatggtgagtgccgttttgaacggcatgttagaccagagcttcagggagcgagcaaaccagaaacaccaaggactgaaacttgcgactacaattctgcaacactggaagaagtgtgattcatggtgggccaaagattcccctctcgaaactaaaatggcagtgctggccttactggcaaaaattttacagattgattcatctgtatcttttaatacaagtcatggttcattccctgaagtctttacaacatatattagtctacttgctgacacaaagctggatctacatttaaagggccaagctgtcactcttcttccattcttcaccagcctcactggaggcagtctggaggaacttagacgtgttctggagcagctcatcgttgctcacttccccatgcagtccagggaatttcctccaggaactccgcggttcaataattatgtggactgcatgaaaaagtttctagatgcattggaattatctcaaagccctatgttgttggaattgatgacagaagttctttgtcgggaacagcagcatgtcatggaagaattatttcaatccagtttcaggaggattgccagaaggggttcatgtgtcacacaagtaggccttctggaaagcgtgtatgaaatgttcaggaaggatgacccccgcctaagtttcacacgccagtcctttgtggaccgctccctcctcactctgctgtggcactgtagcctggatgctttgagagaattcttcagcacaattgtggtggatgccattgatgtgttgaagtccaggtttacaaagctaaatgaatctacctttgatactcaaatcaccaagaagatgggctactataagattctagacgtgatgtattctcgccttcccaaagatgatgttcatgctaaggaatcaaaaattaatcaagttttccatggctcgtgtattacagaaggaaatgaacttacaaagacattgattaaattgtgctacgatgcatttacagagaacatggcaggagagaatcagctgctggagaggagaagactttaccattgtgcagcatacaactgcgccatatctgtcatctgctgtgtcttcaatgagttaaaattttaccaaggttttctgtttagtgaaaaaccagaaaagaacttgcttatttttgaaaatctgatcgacctgaagcgccgctataattttcctgtagaagttgaggttcctatggaaagaaagaaaaagtacattgaaattaggaaagaagccagagaagcagcaaatggggattcagatggtccttcctatatgtcttccctgtcatatttggcagacagtaccctgagtgaggaaatgagtcaatttgatttctcaaccggagttcagagctattcatacagctcccaagaccctagacctgccactggtcgttttcggagacgggagcagcgggaccccacggtgcatgatgatgtgctggagctggagatggacgagctcaatcggcatgagtgcatggcgcccctgacggccctggtcaagcacatgcacagaagcctgggcccgcctcaaggagaagaggattcagtgccaagagatcttccttcttggatgaaattcctccatggcaaactgggaaatccaatagtaccattaaatatccgtctcttcttagccaagcttgttattaatacagaagaggtctttcgcccttacgcgaagcactggcttagccccttgctgcagctggctgcttctgaaaacaatggaggagaaggaattcactacatggtggttgagatagtggccactattctttcatggacaggcttggccactccaacaggggtccctaaagatgaagtgttagcaaatcgattgcttaatttcctaatgaaacatgtctttcatccaaaaagagctgtgtttagacacaaccttgaaattataaagacccttgtcgagtgctggaaggattgtttatccatcccttataggttaatatttgaaaagttttccggtaaagatcctaattctaaagacaactcagtagggattcaattgctaggcatcgtgatggccaatgacctgcctccctatgacccacagtgtggcatccagagtagcgaatacttccaggctttggtgaataatatgtcctttgtaagatataaagaagtgtatgccgctgcagcagaagttctaggacttatacttcgatatgttatggagagaaaaaacatactggaggagtctctgtgtgaactggttgcgaaacaattgaagcaacatcagaatactatggaggacaagtttattgtgtgcttgaacaaagtgaccaagagcttccctcctcttgcagacaggttcatgaatgctgtgttctttctgctgccaaaatttcatggagtgttgaaaacactctgtctggaggtggtactttgtcgtgtggagggaatgacagagctgtacttccagttaaagagcaaggacttcgttcaagtcatgagacatagagatgatgaaagacaaaaagtatgtttggacataatttataagatgatgccaaagttaaaaccagtagaactccgagaacttctgaaccccgttgtggaattcgtttcccatccttctacaacatgtagggaacaaatgtataatattctcatgtggattcatgataattacagagatccagaaagtgagacagataatgactcccaggaaatatttaagttggcaaaagatgtgctgattcaaggattgatcgatgagaaccctggacttcaattaattattcgaaatttctggagccatgaaactaggttaccttcaaataccttggaccggttgctggcactaaattccttatattctcctaagatagaagtgcactttttaagtttagcaacaaattttctgctcgaaatgaccagcatgagcccagattatccaaaccccatgttcgagcatcctctgtcagaatgcgaatttcaggaatataccattgattctgattggcgtttccgaagtactgttctcactccgatgtttgtggagacccaggcctcccagggcactctccagacccgtacccaggaagggtccctctcagctcgctggccagtggcagggcagataagggccacccagcagcagcatgacttcacactgacacagactgcagatggaagaagctcatttgattggctgaccgggagcagcactgacccgctggtcgaccacaccagtccctcatctgactccttgctgtttgcccacaagaggagtgaaaggttacagagagcacccttgaagtcagtggggcctgattttgggaaaaaaaggctgggccttccaggggacgaggtggataacaaagtgaaaggtgcggccggccggacggacctactacgactgcgcagacggtttatgagggaccaggagaagctcagtttgatgtatgccagaaaaggcgttgctgagcaaaaacgagagaaggaaatcaagagtgagttaaaaatgaagcaggatgcccaggtcgttctgtacagaagctaccggcacggagaccttcctgacattcagatcaagcacagcagcctcatcaccccgttacaggccgtggcccagagggacccaataattgcaaaacagctctttagcagcttgttttctggaattttgaaagagatggataaatttaagacactgtctgaaaaaaacaacatcactcaaaagttgcttcaagacttcaatcgttttcttaataccaccttctctttctttccaccctttgtctcttgtattcaggacattagctgtcagcacgcagccctgctgagcctcgacccagcggctgttagcgctggttgcctggccagcctacagcagcccgtgggcatccgcctgctagaggaggctctgctccgcctgctgcctgctgagctgcctgccaagcgagtccgtgggaaggcccgcctccctcctgatgtcctcagatgggtggagcttgctaagctgtatagatcaattggagaatacgacgtcctccgtgggatttttaccagtgagataggaacaaagcaaatcactcagagtgcattattagcagaagccagaagtgattattctgaagctgctaagcagtatgatgaggctctcaataaacaagactgggtagatggtgagcccacagaagccgagaaggatttttgggaacttgcatcccttgactgttacaaccaccttgctgagtggaaatcacttgaatactgttctacagccagtatagacagtgagaaccccccagacctaaataaaatctggagtgaaccattttatcaggaaacatatctaccttacatgatccgcagcaagctgaagctgctgctccagggagaggctgaccagtccctgctgacatttattgacaaagctatgcacggggagctccagaaggcgattctagagcttcattacagtcaagagctgagtctgctttacctcctgcaagatgatgttgacagagccaaatattacattcaaaatggcattcagagttttatgcagaattattctagtattgatgtcctcttacaccaaagtagactcaccaaattgcagtctgtacaggctttaacagaaattcaggagttcatcagctttataagcaaacaaggcaatttatcatctcaagttccccttaagagacttctgaacacctggacaaacagatatccagatgctaaaatggacccaatgaacatctgggatgacatcatcacaaatcgatgtttctttctcagcaaaatagaggagaagcttacccctcttccagaagataatagtatgaatgtggatcaagatggagaccccagtgacaggatggaagtgcaagagcaggaagaagatatcagctccctgatcaggagttgcaagttttccatgaaaatgaagatgatagacagtgcccggaagcagaacaatttctcacttgctatgaaactactgaaggagctgcataaagagtcaaaaaccagagacgattggctggtgagctgggtgcagagctactgccgcctgagccactgccggagccggtcccagggctgctctgagcaggtgctcactgtgctgaaaacagtctctttgttggatgagaacaacgtgtcaagctacttaagcaaaaatattctggctttccgtgaccagaacattctcttgggtacaacttacaggatcatagcgaatgctctcagcagtgagccagcctgccttgctgaaatcgaggaggacaaggctagaagaatcttagagctttctggatccagttcagaggattcagagaaggtgatcgcgggtctgtaccagagagcattccagcacctctctgaggctgtgcaggcggctgaggaggaggcccagcctccctcctggagctgtgggcctgcagctggggtgattgatgcttacatgacgctggcagatttctgtgaccaacagctgcgcaaggaggaagagaatgcatcagttattgattctgcagaactgcaggcgtatccagcacttgtggtggagaaaatgttgaaagctttaaaattaaattccaatgaagccagattgaagtttcctagattacttcagattatagaacggtatccagaggagactttgagcctcatgacaaaagagatctcttccgttccctgctggcagttcatcagctggatcagccacatggtggccttactggacaaagaccaagccgttgctgttcagcactctgtggaagaaatcactgataactacccgcaggctattgtttatcccttcatcataagcagcgaaagctattccttcaaggatacttctactggtcataagaataaggagtttgtggcaaggattaaaagtaagttggatcaaggaggagtgattcaagattttattaatgccttagatcagctctctaatcctgaactgctctttaaggattggagcaatgatgtaagagctgaactagcaaaaacccctgtaaataaaaaaaacattgaaaaaatgtatgaaagaatgtatgcagccttgggtgacccaaaggctccaggcctgggggcctttagaaggaagtttattcagacttttggaaaagaatttgataaacattttgggaaaggaggttctaaactactgagaatgaagctcagtgacttcaacgacattaccaacatgctacttttaaaaatgaacaaagactcaaagccccctgggaatctgaaagaatgttcaccctggatgagcgacttcaaagtggagttcctgagaaatgagctggagattcccggtcagtatgacggtaggggaaagccattgccagagtaccacgtgcgaatcgccgggtttgatgagcgggtgacagtcatggcgtctctgcgaaggcccaagcgcatcatcatccgtggccatgacgagagggaacaccctttcctggtgaagggtggcgaggacctgcggcaggaccagcgcgtggagcagctcttccaggtcatgaatgggatcctggcccaagactccgcctgcagccagagggccctgcagctgaggacctatagcgttgtgcccatgacctccaggttaggattaattgagtggcttgaaaatactgttaccttgaaggaccttcttttgaacaccatgtcccaagaggagaaggcggcttacctgagtgatcccagggcaccgccgtgtgaatataaagattggctgacaaaaatgtcaggaaaacatgatgttggagcttacatgctaatgtataagggcgctaatcgtactgaaacagtcacgtcttttagaaaacgagaaagtaaagtgcctgctgatctcttaaagcgggccttcgtgaggatgagtacaagccctgaggctttcctggcgctccgctcccacttcgccagctctcacgctctgatatgcatcagccactggatcctcgggattggagacagacatctgaacaactttatggtggccatggagactggcggcgtgatcgggatcgactttgggcatgcgtttggatccgctacacagtttctgccagtccctgagttgatgccttttcggctaactcgccagtttatcaatctgatgttaccaatgaaagaaacgggccttatgtacagcatcatggtacacgcactccgggccttccgctcagaccctggcctgctcaccaacaccatggatgtgtttgtcaaggagccctcctttgattggaaaaattttgaacagaaaatgctgaaaaaaggagggtcatggattcaagaaataaatgttgctgaaaaaaattggtacccccgacagaatgatgagctactcctgggtcatgagaaggcccctgccttcagagactatgtggctgtggcacgaggaagcaaagatcacaacattcgtgcccaagaaccagagagtgggctttcagaagagactcaagtgaagtgcctgatggaccaggcaacagaccccaacatccttggcagaacctgggaaggatgggagccctggatgtgaggtctgtgggagtctgcagatagaaagcattacattgtttaaagaatctactatactttggttggcagcattccatgagctgattttcctgaaacactaaagagaaatgtcttttgtgctacagtttcgtagcatgagtttaaatcaagattatgatgagtaaatgtgtatgggttaaatcaaagataaggttatagtaacatcaaagattaggtgaggtttatagaaagatagatatccaggcttaccaaagtattaagtcaagaatataatatgtgatcagctttcaaagcatttacaagtgctgcaagttagtgaaacagctgtctccgtaaatggaggaaatgtggggaagccttggaatgcccttctggttctggcacattggaaagcacactcagaaggcttcatcaccaagattttgggagagtaaagctaagtatagttgatgtaacattgtagaagcagcataggaacaataagaacaataggtaaagctataattatggcttatatttagaaatgactgcatttgatattttaggatatttttctaggttttttcctttcattttattctcttctagttttgacattttatgatagatttgctctctagaaggaaacgtctttatttaggagggcaaaaattttggtcatagcattcacttttgctattccaatctacaactggaagatacataaaagtgctttgcattgaatttgggataacttcaaaaatcccatggttgttgttagggatagtactaagcatttcagttccaggagaataaaagaaattcctatttgaaatgaattcctcatttggaggaaaaaaagcatgcattctagcacaacaagatgaaattatggaatacaaaagtggctccttcccatgtgcagtccctgtccccccccgccagtcctccacacccaaactgtttctgattggcttttagctttttgttgtttttttttttccttctaacacttgtatttggaggctcttctgtgattttgagaagtatactcttgagtgtttaataaagtttttttccaaaagta

SEQ ID NO: 134822 - DNA, 2941 bp, Homo sapiens
gatacttctactggtcataagaagggataaacaatagtctgtggaagaaatcactgataactacccgcaggctattgtttatcccttcatcataagcagcgaaagctattccttcaaggatacttctactggtcataagaataaggagtttgtggcaaggattaaaagtaagttggatcaaggaggagtgattcaagattttattaatgccttagatcagctctctaatcctgaactgctctttaaggattggagcaatgatgtaagagctgaactagcaaaaacccctgtaaataaaaaaaacattgaaaaaatgtatgaaagaatgtatgcagccttgggtgacccaaaggctccaggcctgggggcctttagaaggaagtttattcagacttttggaaaagaatttgataaacattttgggaaaggaggttctaaactactgagaatgaagctcagtgacttcaacgacattaccaacatgctacttttaaaaatgaacaaagactcaaagccccctgggaatctgaaagaatgttcaccctggatgagcgacttcaaagtggagttcctgagaaatgagctggagattcccggtcagtatgacggtaggggaaagccattgccagagtaccacgtgcgaatcgccgggtttgatgagcgggtgacagtcatggcgtctctgcgaaggcccaagcgcatcatcatccgtggccatgacgagagggaacaccctttcctggtgaagggtggcgaggacctgcggcaggaccagcgcgtggagcagctcttccaggtcatgaatgggatcctggcccaagactccgcctgcagccagagggccctgcagctgaggacctatagcgttgtgcccatgacctccaggttaggattaattgagtggcttgaaaatactgttaccttgaaggaccttcttttgaacaccatgtcccaagaggagaaggcggcttacctgagtgatcccagggcaccgccgtgtgaatataaagattggctgacaaaaatgtcaggaaaacatgatgttggagcttacatgctaatgtataagggcgctaatcgtactgaaacagtcacgtcttttagaaaacgagaaagtaaagtgcctgctgatctcttaaagcgggccttcgtgaggatgagtacaagccctgaggctttcctggcgctccgctcccacttcgccagctctcacgctctgatatgcatcagccactggatcctcgggattggagacagacatctgaacaactttatggtggccatggagactggcggcgtgatcgggatcgactttgggcatgcgtttggatccgctacacagtttctgccagtccctgagttgatgccttttcggctaactcgccagtttatcaatctgatgttaccaatgaaagaaacgggccttatgtacagcatcatggtacacgcactccgggccttccgctcagaccctggcctgctcaccaacaccatggatgtgtttgtcaaggagccctcctttgattggaaaaattttgaacagaaaatgctgaaaaaaggagggtcatggattcaagaaataaatgttgctgaaaaaaattggtacccccgacagaaaatatgttacgctaagagaaagttagcaggtgccaatccagcagtcattacttgtgatgagctactcctgggtcatgagaaggcccctgccttcagagactatgtggctgtggcacgaggaagcaaagatcacaacattcgtgcccaagaaccagagagtgggctttcagaagagactcaagtgaagtgcctgatggaccaggcaacagaccccaacatccttggcagaacctgggaaggatgggagccctggatgtgaggtctgtgggagtctgcagatagaaagcattacattgtttaaagaatctactatactttggttggcagcattccatgagctgattttcctgaaacactaaagagaaatgtcttttgtgctacagtttcgtagcatgagtttaaatcaagattatgatgagtaaatgtgtatgggttaaatcaaagataaggttatagtaacatcaaagattaggtgaggtttatagaaagatagatatccaggcttaccaaagtattaagtcaagaatataatatgtgatcagctttcaaagcatttacaagtgctgcaagttagtgaaacagctgtctccgtaaatggaggaaatgtggggaagccttggaatgcccttctggttctggcacattggaaagcacactcagaaggcttcatcaccaagattttgggagagtaaagctaagtatagttgatgtaacattgtagaagcagcataggaacaataagaacaataggtaaagctataattatggcttatatttagaaatgactgcatttgatattttaggatatttttctaggttttttcctttcattttattctcttctagttttgacattttatgatagatttgctctctagaaggaaacgtctttatttaggagggcaaaaattttggtcatagcattcacttttgctattccaatctacaactggaagatacataaaagtgctttgcattgaatttgggataacttcaaaaatcccatggttgttgttagggatagtactaagcatttcagttccaggagaataaaagaaattcctatttgaaatgaattcctcatttggaggaaaaaaagcatgcattctagcacaacaagatgaaattatggaatacaaaagtggctccttcccatgtgcagtccctgtccccccccgccagtcctccacacccaaactgtttctgattggcttttagctttttgttgtttttttttttccttctaacacttgtatttggaggctcttctgtgattttgagaagtatactcttgagtgtttaataaagtttttttccaaaagta

SEQ ID NO: 134823 - DNA, 2776 bp, Homo sapiens
acgcgtccgcccacgcgtccgagtgattcaagattttattaatgccttagatcagctctctaatcctgaactgctctttaaggattggagcaatgatgtaagagctgaactagcaaaaacccctgtaaataaaaaaaacattgaaaaaatgtatgaaagaatgtatgcagccttgggtgacccaaaggctccaggcctgggggcctttagaaggaagtttattcagacttttggaaaagaatttgataaacattttgggaaaggaggttctaaactactgagaatgaagctcagtgacttcaacgacattaccaacatgctacttttaaaaatgaacaaagactcaaagccccctgggaatctgaaagaatgttcaccctggatgagcgacttcaaagtggagttcctgagaaatgagctggagattcccggtcagtatgacggtaggggaaagccattgccagagtaccacgtgcgaatcgccgggtttgatgagcgggtgacagtcatggcgtctctgcgaaggcccaagcgcatcatcatccgtggccatgacgagagggaacaccctttcctggtgaagggtggcgaggacctgcggcaggaccagcgcgtggagcagctcttccaggtcatgaatgggatcctggcccaagactccgcctgcagccagagggccctgcagctgaggacctatagcgttgtgcccatgacctccaggttaggattaattgagtggcttgaaaatactgttaccttgaaggaccttcttttgaacaccatgtcccaagaggagaaggcggcttacctgagtgatcccagggcaccgccgtgtgaatataaagattggctgacaaaaatgtcaggaaaacatgatgttggagcttacatgctaatgtataagggcgctaatcgtactgaaacagtcacgtcttttagaaaacgagaaagtaaagtgcctgctgatctcttaaagcgggccttcgtgaggatgagtacaagccctgaggctttcctggcgctccgctcccacttcgccagctctcacgctctgatatgcatcagccactggatcctcgggattggagacagacatctgaacaactttatggtggccatggagactggcggcgtgatcgggatcgactttgggcatgcgtttggatccgctacacagtttctgccagtccctgagttgatgccttttcggctaactcgccagtttatcaatctgatgttaccaatgaaagaaacgggccttatgtacagcatcatggtacacgcactccgggccttccgctcagaccctggcctgctcaccaacaccatggatgtgtttgtcaaggagccctcctttgattggaaaaattttgaacagaaaatgctgaaaaaaggagggtcatggattcaagaaataaatgttgctgaaaaaaattggtacccccgacagaaaatatgttacgctaagagaaagttagcaggtgccaatccagcagtcattacttgtgatgagctactcctgggtcatgagaaggcccctgccttcagagactatgtggctgtggcacgaggaagcaaagatcacaacattcgtgcccaagaaccagagagtgggctttcagaagagactcaagtgaagtgcctgatggaccaggcaacagaccccaacatccttggcagaacctgggaaggatgggagccctggatgtgaggtctgtgggagtctgcagatagaaagcattacattgtttaaagaatctactatactttggttggcagcattccatgagctgattttcctgaaacactaaagagaaatgtcttttgtgctacagtttcgtagcatgagtttaaatcaagattatgatgagtaaatgtgtatgggttaaatcaaagataaggttatagtaacatcaaagattaggtgaggtttatagaaagatagatatccaggcttaccaaagtattaagtcaagaatataatatgtgatcagctttcaaagcatttacaagtgctgcaagttagtgaaacagctgtctccgtaaatggaggaaatgtggggaagccttggaatgcccttctggttctggcacattggaaagcacactcagaaggcttcatcaccaagattttgggagagtaaagctaagtatagttgatgtaacattgtagaagcagcataggaacaataagaacaataggtaaagctataattatggcttatatttagaaatgactgcatttgatattttaggatatttttctaggttttttcctttcattttattctcttctagttttgacattttatgatagatttgctctctagaaggaaacgtctttatttaggagggcaaaaattttggtcatagcattcacttttgctattccaatctacaactggaagatacataaaagtgctttgcattgaatttgggataacttcaaaaatcccatggttgttgttagggatagtactaagcatttcagttccaggagaataaaagaaattcctatttgaaatgaattcctcatttggaggaaaaaaagcatgcattctagcacaacaagatgaaattatggaatacaaaagtggctccttcccatgtgcagtccctgtccccccccgccagtcctccacacccaaactgtttctgattggcttttagctttttgttgtttttttttttccttctaacacttgtatttggaggctcttctgtgattttgagaagtatactcttgagtgtttaataaagtttttttccaaaagta

SEQ ID NO: 134824 - DNA, 2822 bp, Homo sapiens
caccatgcctggctaatttttgtatttttagtagagacaaggtttgaccatgttggccagactggtctcgaactcctgagctcaagtgatctacctgccccatccttccaaagtgctgggattacaggcgtaagccactgcttccgccctgggtttcttaatatattatgtctccagtgtttgaacaacagttctatttaagatatcataaactcaaagagtaagctgtgtgtgagtatccactataaaatatgtgtagcattagcttactactgtagaaagtttgcatgttggctgttgctgcttgctaaagatatccacattcataagcaagtatttataatcaggaatacaacatttctgcgggcacagcagtcaggcacaagcaggtagcagaaattcgttgctggcctgggcgctctgctctttggcactgtcttcagagggcggccccacggaggaatgctcacagccactctggcttttccctctgagtttgacacgtggctagcctgtgccctgagatgacattctgatttttgaaggtgacagtcatggcgtctctgcgaaggcccaagcgcatcatcatccgtggccatgacgagagggaacaccctttcctggtgaagggtggcgaggacctgcggcaggaccagcgcgtggagcagctcttccaggtcatgaatgggatcctggcccaagactccgcctgcagccagagggccctgcagctgaggacctatagcgttgtgcccatgacctccaggttaggattaattgagtggcttgaaaatactgttaccttgaaggaccttcttttgaacaccatgtcccaagaggagaaggcggcttacctgagtgatcccagggcaccgccgtgtgaatataaagattggctgacaaaaatgtcaggaaaacatgatgttggagcttacatgctaatgtataagggcgctaatcgtactgaaacagtcacgtcttttagaaaacgagaaagtaaagtgcctgctgatctcttaaagcgggccttcgtgaggatgagtacaagccctgaggctttcctggcgctccgctcccacttcgccagctctcacgctctgatatgcatcagccactggatcctcgggattggagacagacatctgaacaactttatggtggccatggagactggcggcgtgatcgggatcgactttgggcatgcgtttggatccgctacacagtttctgccagtccctgagttgatgccttttcggctaactcgccagtttatcaatctgatgttaccaatgaaagaaacgggccttatgtacagcatcatggtacacgcactccgggccttccgctcagaccctggcctgctcaccaacaccatggatgtgtttgtcaaggagccctcctttgattggaaaaattttgaacagaaaatgctgaaaaaaggagggtcatggattcaagaaataaatgttgctgaaaaaaattggtacccccgacagaaaatatgttacgctaagagaaagttagcaggtgccaatccagcagtcattacttgtgatgagctactcctgggtcatgagaaggcccctgccttcagagactatgtggctgtggcacgaggaagcaaagatcacaacattcgtgcccaagaaccagagagtgggctttcagaagagactcaagtgaagtgcctgatggaccaggcaacagaccccaacatccttggcagaacctgggaaggatgggagccctggatgtgaggtctgtgggagtctgcagatagaaagcattacattgtttaaagaatctactatactttggttggcagcattccatgagctgattttcctgaaacactaaagagaaatgtcttttgtgctacagtttcgtagcatgagtttaaatcaagattatgatgagtaaatgtgtatgggttaaatcaaagataaggttatagtaacatcaaagattaggtgaggtttatagaaagatagatatccaggcttaccaaagtattaagtcaagaatataatatgtgatcagctttcaaagcatttacaagtgctgcaagttagtgaaacagctgtctccgtaaatggaggaaatgtggggaagccttggaatgcccttctggttctggcacattggaaagcacactcagaaggcttcatcaccaagattttgggagagtaaagctaagtatagttgatgtaacattgtagaagcagcataggaacaataagaacaataggtaaagctataattatggcttatatttagaaatgactgcatttgatattttaggatatttttctaggttttttcctttcattttattctcttctagttttgacattttatgatagatttgctctctagaaggaaacgtctttatttaggagggcaaaaattttggtcatagcattcacttttgctattccaatctacaactggaagatacataaaagtgctttgcattgaatttgggataacttcaaaaatcccatggttgttgttagggatagtactaagcatttcagttccaggagaataaaagaaattcctatttgaaatgaattcctcatttggaggaaaaaaagcatgcattctagcacaacaagatgaaattatggaatacaaaagtggctccttcccatgtgcagtccctgtccccccccgccagtcctccacacccaaactgtttctgattggcttttagctttttgttgtttttttttttccttctaacacttgtatttggaggctcttctgtgattttgagaagtatactcttgagtgtttaataaagtttttttccaaaagta

SEQ ID NO: 134825 - DNA, 1480 bp, Homo sapiens
agttctagaggatccctatatatccccaacaccatggatgtgttgtcaggagccctcctttgattgccaaaattttgaacagaaaatgctgaaaaaaggagggtcatggattcaagaaataaatgttgctgaaaaaaattggtacccccgacagaaaatatgttacgctaagagaaagttagcaggtgccaatccagcagtcattacttgtgatgagctactcctgggtcatgagaaggcccctgccttcagagactatgtggctgtggcacgaggaagcaaagatcacaacattcgtgcccaagaaccagagagtgggctttcagaagagactcaagtgaagtgcctgatggaccaggcaacagaccccaacatccttggcagaacctgggaaggatgggagccctggatgtgaggtctgtgggagtctgcagatagaaagcattacattgtttaaagaatctactatactttggttggcagcattccatgagctgattttcctgaaacactaaagagaaatgtcttttgtgctacagtttcgtagcatgagtttaaatcaagattatgatgagtaaatgtgtatgggttaaatcaaagataaggttatagtaacatcaaagattaggtgaggtttatagaaagatagatatccaggcttaccaaagtattaagtcaagaatataatatgtgatcagctttcaaagcatttacaagtgctgcaagttagtgaaacagctgtctccgtaaatggaggaaatgtggggaagccttggaatgcccttctggttctggcacattggaaagcacactcagaaggcttcatcaccaagattttgggagagtaaagctaagtatagttgatgtaacattgtagaagcagcataggaacaataagaacaataggtaaagctataattatggcttatatttagaaatgactgcatttgatattttaggatatttttctaggttttttcctttcattttattctcttctagttttgacattttatgatagatttgctctctagaaggaaacgtctttatttaggagggcaaaaattttggtcatagcattcacttttgctattccaatctacaactggaagatacataaaagtgctttgcattgaatttgggataacttcaaaaatcccatggttgttgttagggatagtactaagcatttcagttccaggagaataaaagaaattcctatttgaaatgaattcctcatttggaggaaaaaaagcatgcattctagcacaacaagatgaaattatggaatacaaaagtggctccttcccatgtgcagtccctgtccccccccgccagtcctccacacccaaactgtttctgattggcttttagctttttgttgtttttttttttccttctaacacttgtatttggaggctcttctgtgattttgagaagtatactcttgagtgtttaataaagtttttttccaaaagta

SEQ ID NO: 134826 - DNA, 12152 bp, Homo sapiens
ggggcatttccgggtccgggccgagcgggcgcacgcgcgggagcgggactcggcggcatggcgggctccggagccggtgtgcgttgctccctgctgcggctgcaggagaccttgtccgctgcggaccgctgcggtgctgccctggccggtcatcaactgatccgcggcctggggcaggaatgcgtcctgagcagcagccccgcggtgctggcattacagacatctttagttttttccagagatttcggtttgcttgtatttgtccggaagtcactcaacagtattgaatttcgtgaatgtagagaagaaatcctaaagtttttatgtattttcttagaaaaaatgggccagaagatcgcaccttactctgttgaaattaagaacacttgtaccagtgtttatacaaaagatagagctgctaaatgtaaaattccagccctggaccttcttattaagttacttcagacttttagaagttctagactcatggatgaatttaaaattggagaattatttagtaaattctatggagaacttgcattgaaaaaaaaaataccagatacagttttagaaaaagtatatgagctcctaggattattgggtgaagttcatcctagtgagatgataaataatgcagaaaacctgttccgcgcttttctgggtgaacttaagacccagatgacatcagcagtaagagagcccaaactacctgttctggcaggatgtctgaaggggttgtcctcacttctgtgcaacttcactaagtccatggaagaagatccccagacttcaagggagatttttaattttgtactaaaggcaattcgtcctcagattgatctgaagagatatgctgtgccctcagctggcttgcgcctatttgccctgcatgcatctcagtttagcacctgccttctggacaactacgtgtctctatttgaagtcttgttaaagtggtgtgcccacacaaatgtagaattgaaaaaagctgcactttcagccctggaatcctttctgaaacaggtttctaatatggtggcgaaaaatgcagaaatgcataaaaataaactgcagtactttatggagcagttttatggaatcatcagaaatgtggattcgaacaacaaggagttatctattgctatccgtggatatggactttttgcaggaccgtgcaaggttataaacgcaaaagatgttgacttcatgtacgttgagctcattcagcgctgcaagcagatgttcctcacccagacagacactggtgacgaccgtgtttatcagatgccaagcttcctccagtctgttgcaagcgtcttgctgtaccttgacacagttcctgaggtgtatactccagttctggagcacctcgtggtgatgcagatagacagtttcccacagtacagtccaaaaatgcagctggtgtgttgcagagccatagtgaaggtgttcctagctttggcagcaaaagggccagttctcaggaattgcattagtactgtggtgcatcagggtttaatcagaatatgttctaaaccagtggtccttccaaagggccctgagtctgaatctgaagaccaccgtgcttcaggggaagtcagaactggcaaatggaaggtgcccacatacaaagactacgtggatctcttcagacatctcctgagctctgaccagatgatggattctattttagcagatgaagcatttttctctgtgaattcctccagtgaaagtctgaatcatttactttatgatgaatttgtaaaatccgttttgaagattgttgagaaattggatcttacacttgaaatacagactgttggggaacaagagaatggagatgaggcgcctggtgtttggatgatcccaacttcagatccagcggctaacttgcatccagctaaacctaaagatttttcggctttcattaacctggtggaattttgcagagagattctccctgagaaacaagcagaattttttgaaccatgggtgtactcattttcatatgaattaattttgcaatctacaaggttgcccctcatcagtggtttctacaaattgctttctattacagtaagaaatgccaagaaaataaaatatttcgagggagttagtccaaagagtctgaaacactctcctgaagacccagaaaagtattcttgctttgctttatttgtgaaatttggcaaagaggtggcagttaaaatgaagcagtacaaagatgaacttttggcctcttgtttgacctttcttctgtccttgccacacaacatcattgaactcgatgttagagcctacgttcctgcactgcagatggctttcaaactgggcctgagctatacccccttggcagaagtaggcctgaatgctctagaagaatggtcaatttatattgacagacatgtaatgcagccttattacaaagacattctcccctgcctggatggatacctgaagacttcagccttgtcagatgagaccaagaataactgggaagtgtcagctctttctcgggctgcccagaaaggatttaataaagtggtgttaaagcatctgaagaagacaaagaacctttcatcaaacgaagcaatatccttagaagaaataagaattagagtagtacaaatgcttggatctctaggaggacaaataaacaaaaatcttctgacagtcacgtcctcagatgagatgatgaagagctatgtggcctgggacagagagaagcggctgagctttgcagtgccctttagagagatgaaacctgtcattttcctggatgtgttcctgcctcgagtcacagaattagcgctcacagccagtgacagacaaactaaagttgcagcctgtgaacttttacatagcatggttatgtttatgttgggcaaagccacgcagatgccagaagggggacagggagccccacccatgtaccagctctataagcggacgtttcctgtgctgcttcgacttgcgtgtgatgttgatcaggtgacaaggcaactgtatgagccactagttatgcagctgattcactggttcactaacaacaagaaatttgaaagtcaggatactgttgccttactagaagctatattggatggaattgtggaccctgttgacagtactttaagagatttttgtggtcggtgtattcgagaattccttaaatggtccattaagcaaataacaccacagcagcaggagaagagtccagtaaacaccaaatcgcttttcaagcgactttatagccttgcgcttcaccccaatgctttcaagaggctgggagcatcacttgcctttaataatatctacagggaattcagggaagaagagtctctggtggaacagtttgtgtttgaagccttggtgatatacatggagagtctggccttagcacatgcagatgagaagtccttaggtacaattcaacagtgttgtgatgccattgatcacctatgccgcatcattgaaaagaagcatgtttctttaaataaagcaaagaaacgacgtttgccgcgaggatttccaccttccgcatcattgtgtttattggatctggtcaagtggcttttagctcattgtgggaggccccagacagaatgtcgacacaaatccattgaactcttttataaattcgttcctttattgccaggcaacagatcccctaatttgtggctgaaagatgttctcaaggaagaaggtgtctcttttctcatcaacacctttgaggggggtggctgtggccagccctcgggcatcctggcccagcccaccctcttgtaccttcgggggccattcagcctgcaggccacgctatgctggctggacctgctcctggccgcgttggagtgctacaacacgttcattggcgagagaactgtaggagcgctccaggtcctaggtactgaagcccagtcttcacttttgaaagcagtggctttcttcttagaaagcattgccatgcatgacattatagcagcagaaaagtgctttggcactggggcagcaggtaacagaacaagcccacaagagggagaaaggtacaactacagcaaatgcaccgttgtggtccggattatggagtttaccacgactctgctaaacacctccccggaaggatggaagctcctgaagaaggacttgtgtaatacacacctgatgagagtcctggtgcagacgctgtgtgagcccgcaagcataggtttcaacatcggagacgtccaggttatggctcatcttcctgatgtttgtgtgaatctgatgaaagctctaaagatgtccccatacaaagatatcctagagacccatctgagagagaaaataacagcacagagcattgaggagctttgtgccgtcaacttgtatggccctgacgcgcaagtggacaggagcaggctggctgctgttgtgtctgcctgtaaacagcttcacagagctgggcttctgcataatatattaccgtctcagtccacagatttgcatcattctgttggcacagaacttctttccctggtttataaaggcattgcccctggagatgagagacagtgtctgccttctctagacctcagttgtaagcagctggccagcggacttctggagttagcctttgcttttggaggactgtgtgagcgccttgtgagtcttctcctgaacccagcggtgctgtccacggcgtccttgggcagctcacagggcagcgtcatccacttctcccatggggagtatttctatagcttgttctcagaaacgatcaacacggaattattgaaaaatctggatcttgctgtattggagctcatgcagtcttcagtggataataccaaaatggtgagtgccgttttgaacggcatgttagaccagagcttcagggagcgagcaaaccagaaacaccaaggactgaaacttgcgactacaattctgcaacactggaagaagtgtgattcatggtgggccaaagattcccctctcgaaactaaaatggcagtgctggccttactggcaaaaattttacagattgattcatctgtatcttttaatacaagtcatggttcattccctgaagtctttacaacatatattagtctacttgctgacacaaagctggatctacatttaaagggccaagctgtcactcttcttccattcttcaccagcctcactggaggcagtctggaggaacttagacgtgttctggagcagctcatcgttgctcacttccccatgcagtccagggaatttcctccaggaactccgcggttcaataattatgtggactgcatgaaaaagtttctagatgcattggaattatctcaaagccctatgttgttggaattgatgacagaagttctttgtcgggaacagcagcatgtcatggaagaattatttcaatccagtttcaggaggattgccagaaggggttcatgtgtcacacaagtaggccttctggaaagcgtgtatgaaatgttcaggaaggatgacccccgcctaagtttcacacgccagtcctttgtggaccgctccctcctcactctgctgtggcactgtagcctggatgctttgagagaattcttcagcacaattgtggtggatgccattgatgtgttgaagtccaggtttacaaagctaaatgaatctacctttgatactcaaatcaccaagaagatgggctactataagattctagacgtgatgtattctcgccttcccaaagatgatgttcatgctaaggaatcaaaaattaatcaagttttccatggctcgtgtattacagaaggaaatgaacttacaaagacattgattaaattgtgctacgatgcatttacagagaacatggcaggagagaatcagctgctggagaggagaagactttaccattgtgcagcatacaactgcgccatatctgtcatctgctgtgtcttcaatgagttaaaattttaccaaggttttctgtttagtgaaaaaccagaaaagaacttgcttatttttgaaaatctgatcgacctgaagcgccgctataattttcctgtagaagttgaggttcctatggaaagaaagaaaaagtacattgaaattaggaaagaagccagagaagcagcaaatggggattcagatggtccttcctatatgtcttccctgtcatatttggcagacagtaccctgagtgaggaaatgagtcaatttgatttctcaaccggagttcagagctattcatacagctcccaagaccctagacctgccactggtcgttttcggagacgggagcagcgggaccccacggtgcatgatgatgtgctggagctggagatggacgagctcaatcggcatgagtgcatggcgcccctgacggccctggtcaagcacatgcacagaagcctgggcccgcctcaaggagaagaggattcagtgccaagagatcttccttcttggatgaaattcctccatggcaaactgggaaatccaatagtaccattaaatatccgtctcttcttagccaagcttgttattaatacagaagaggtctttcgcccttacgcgaagcactggcttagccccttgctgcagctggctgcttctgaaaacaatggaggagaaggaattcactacatggtggttgagatagtggccactattctttcatggacaggcttggccactccaacaggggtccctaaagatgaagtgttagcaaatcgattgcttaatttcctaatgaaacatgtctttcatccaaaaagagctgtgtttagacacaaccttgaaattataaagacccttgtcgagtgctggaaggattgtttatccatcccttataggttaatatttgaaaagttttccggtaaagatcctaattctaaagacaactcagtagggattcaattgctaggcatcgtgatggccaatgacctgcctccctatgacccacagtgtggcatccagagtagcgaatacttccaggctttggtgaataatatgtcctttgtaagatataaagaagtgtatgccgctgcagcagaagttctaggacttatacttcgatatgttatggagagaaaaaacatactggaggagtctctgtgtgaactggttgcgaaacaattgaagcaacatcagaatactatggaggacaagtttattgtgtgcttgaacaaagtgaccaagagcttccctcctcttgcagacaggttcatgaatgctgtgttctttctgctgccaaaatttcatggagtgttgaaaacactctgtctggaggtggtactttgtcgtgtggagggaatgacagagctgtacttccagttaaagagcaaggacttcgttcaagtcatgagacatagagatgatgaaagacaaaaagtatgtttggacataatttataagatgatgccaaagttaaaaccagtagaactccgagaacttctgaaccccgttgtggaattcgtttcccatccttctacaacatgtagggaacaaatgtataatattctcatgtggattcatgataattacagagatccagaaagtgagacagataatgactcccaggaaatatttaagttggcaaaagatgtgctgattcaaggattgatcgatgagaaccctggacttcaattaattattcgaaatttctggagccatgaaactaggttaccttcaaataccttggaccggttgctggcactaaattccttatattctcctaagatagaagtgcactttttaagtttagcaacaaattttctgctcgaaatgaccagcatgagcccagattatccaaaccccatgttcgagcatcctctgtcagaatgcgaatttcaggaatataccattgattctgattggcgtttccgaagtactgttctcactccgatgtttgtggagacccaggcctcccagggcactctccagacccgtacccaggaagggtccctctcagctcgctggccagtggcagggcagataagggccacccagcagcagcatgacttcacactgacacagactgcagatggaagaagctcatttgattggctgaccgggagcagcactgacccgctggtcgaccacaccagtccctcatctgactccttgctgtttgcccacaagaggagtgaaaggttacagagagcacccttgaagtcagtggggcctgattttgggaaaaaaaggctgggccttccaggggacgaggtggataacaaagtgaaaggtgcggccggccggacggacctactacgactgcgcagacggtttatgagggaccaggagaagctcagtttgatgtatgccagaaaaggcgttgctgagcaaaaacgagagaaggaaatcaagagtgagttaaaaatgaagcaggatgcccaggtcgttctgtacagaagctaccggcacggagaccttcctgacattcagatcaagcacagcagcctcatcaccccgttacaggccgtggcccagagggacccaataattgcaaaacagctctttagcagcttgttttctggaattttgaaagagatggataaatttaagacactgtctgaaaaaaacaacatcactcaaaagttgcttcaagacttcaatcgttttcttaataccaccttctctttctttccaccctttgtctcttgtattcaggacattagctgtcagcacgcagccctgctgagcctcgacccagcggctgttagcgctggttgcctggccagcctacagcagcccgtgggcatccgcctgctagaggaggctctgctccgcctgctgcctgctgagctgcctgccaagcgagtccgtgggaaggcccgcctccctcctgatgtcctcagatgggtggagcttgctaagctgtatagatcaattggagaatacgacgtcctccgtgggatttttaccagtgagataggaacaaagcaaatcactcagagtgcattattagcagaagccagaagtgattattctgaagctgctaagcagtatgatgaggctctcaataaacaagactgggtagatggtgagcccacagaagccgagaaggatttttgggaacttgcatcccttgactgttacaaccaccttgctgagtggaaatcacttgaatactgttctacagccagtatagacagtgagaaccccccagacctaaataaaatctggagtgaaccattttatcaggaaacatatctaccttacatgatccgcagcaagctgaagctgctgctccagggagaggctgaccagtccctgctgacatttattgacaaagctatgcacggggagctccagaaggcgattctagagcttcattacagtcaagagctgagtctgctttacctcctgcaagatgatgttgacagagccaaatattacattcaaaatggcattcagagttttatgcagaattattctagtattgatgtcctcttacaccaaagtagactcaccaaattgcagtctgtacaggctttaacagaaattcaggagttcatcagctttataagcaaacaaggcaatttatcatctcaagttccccttaagagacttctgaacacctggacaaacagatatccagatgctaaaatggacccaatgaacatctgggatgacatcatcacaaatcgatgtttctttctcagcaaaatagaggagaagcttacccctcttccagaagataatagtatgaatgtggatcaagatggagaccccagtgacaggatggaagtgcaagagcaggaagaagatatcagctccctgatcaggagttgcaagttttccatgaaaatgaagatgatagacagtgcccggaagcagaacaatttctcacttgctatgaaactactgaaggagctgcataaagagtcaaaaaccagagacgattggctggtgagctgggtgcagagctactgccgcctgagccactgccggagccggtcccagggctgctctgagcaggtgctcactgtgctgaaaacagtctctttgttggatgagaacaacgtgtcaagctacttaagcaaaaatattctggctttccgtgaccagaacattctcttgggtacaacttacaggatcatagcgaatgctctcagcagtgagccagcctgccttgctgaaatcgaggaggacaaggctagaagaatcttagagctttctggatccagttcagaggattcagagaaggtgatcgcgggtctgtaccagagagcattccagcacctctctgaggctgtgcaggcggctgaggaggaggcccagcctccctcctggagctgtgggcctgcagctggggtgattgatgcttacatgacgctggcagatttctgtgaccaacagctgcgcaaggaggaagagaatgcatcagttattgattctgcagaactgcaggcgtatccagcacttgtggtggagaaaatgttgaaagctttaaaattaaattccaatgaagccagattgaagtttcctagattacttcagattatagaacggtatccagaggagactttgagcctcatgacaaaagaggttggtgtctttattctacttggcggtaaggaactttacagaacttaaagatacgcttatttatattcaaacgcgttagtgtgtgcagtgcatgtattatagcttttcccagccagctgtgaattctgctacattctgaggacataggtaatttaaagctgcaaaaacgagttttcgcatttacccattttcctctgtgggtgttgataaaaacactgtgtctgaacaaggatccagagagatggagacggggtgtgtgggatggtaacgggatcttgtgtgggaaacttgttgcccctgcagatgaggctgtggccagtcacatttgctgtgcccagtgctcacctgtcatttagcccaaagggagtgagcaaggttcagcttgcatcccacctcccaggagcacagcatctgccagcagcacggtgtccagaggggtctgggagcatgagtgaggggtcagcgtatggacatgggaggaacccgcacccttccatgtgacctgccccttggccccaccaagggctgcactgccagctgcactcctgtcctttgggctctgtctgtgtgcaggagggttccactgacttcatttgcaaagtgtagggcctctgaaaggcttcgtagttgacatttatagacgtgtaactggaagatagggccaagctttgagttgaaaatgtaatagttcaaaaagggttacatggttcgttctctattagctttgcatggtgagtttttaaataatgttgatctctgggctgcggggacccagtttgacttttagggccctaaccactccttccacctttttctgcattctgaatagtagactttctcagtaggtattaaacaggttaaggtaaattcagaagtgcaacatgtatgtgtttttcttcaagataagtgagcaaataacttcattatgattttatttttttccaatataatatttatacatgataaaaacagcatttgaatttgtgaggacatgaagtattcactccacgttgtcaaaacacccagtagacacgtgcagtgaagccagtagcctctctcgtgagcttacatgagctgtgtggactgatccttcctcacacgccatgctgtcctcagctcacacgtgcactcaggaagcttgcccatactcaagcctcactctagcattgcagacacatcaggttttatcttcagaaagacaccttaaaagtatcagaggaaaatgtgaacacatttttttaaatggtcttggaatgaagagacaaaaaccagaatccatgaaggaaaatagtttgacttctatacagaaaaagaaaataccgtatacaaagttaaaaaaataaaaagccaggtgcagtggctcacgcctgtaatctcaccactttgggaggccaaggtgggcagatcacgaggtcagcagttcgagaccagcctggccaacacggtgaaaccctactaaagaaacaaaaattagccgggcgtggtggcgagcacctgtaaacccagctactcgggaggctgaggcaggaaaatcacttgaacccaggaggtggaggttgcagtgagccgaggtggcgccactgcactctagcctagacgacagagcaagactctgtctcaaaaaaaacaacaacaac

SEQ ID NO: 134827 - DNA, 10120 bp, Homo sapiens
ggggcatttccgggtccgggccgagcgggcgcacgcgcgggagcgggactcggcggcatggcgggctccggagccggtgtgcgttgctccctgctgcggctgcaggagaccttgtccgctgcggaccgctgcggtgctgccctggccggtcatcaactgatccgcggcctggggcaggaatgcgtcctgagcagcagccccgcggtgctggcattacagacatctttagttttttccagagatttcggtttgcttgtatttgtccggaagtcactcaacagtattgaatttcgtgaatgtagagaagaaatcctaaagtttttatgtattttcttagaaaaaatgggccagaagatcgcaccttactctgttgaaattaagaacacttgtaccagtgtttatacaaaagatagagctgctaaatgtaaaattccagccctggaccttcttattaagttacttcagacttttagaagttctagactcatggatgaatttaaaattggagaattatttagtaaattctatggagaacttgcattgaaaaaaaaaataccagatacagttttagaaaaagtatatgagctcctaggattattgggtgaagttcatcctagtgagatgataaataatgcagaaaacctgttccgcgcttttctgggtgaacttaagacccagatgacatcagcagtaagagagcccaaactacctgttctggcaggatgtctgaaggggttgtcctcacttctgtgcaacttcactaagtccatggaagaagatccccagacttcaagggagatttttaattttgtactaaaggcaattcgtcctcagattgatctgaagagatatgctgtgccctcagctggcttgcgcctatttgccctgcatgcatctcagtttagcacctgccttctggacaactacgtgtctctatttgaagtcttgttaaagtggtgtgcccacacaaatgtagaattgaaaaaagctgcactttcagccctggaatcctttctgaaacaggtttctaatatggtggcgaaaaatgcagaaatgcataaaaataaactgcagtactttatggagcagttttatggaatcatcagaaatgtggattcgaacaacaaggagttatctattgctatccgtggatatggactttttgcaggaccgtgcaaggttataaacgcaaaagatgttgacttcatgtacgttgagctcattcagcgctgcaagcagatgttcctcacccagacagacactggtgacgaccgtgtttatcagatgccaagcttcctccagtctgttgcaagcgtcttgctgtaccttgacacagttcctgaggtgtatactccagttctggagcacctcgtggtgatgcagatagacagtttcccacagtacagtccaaaaatgcagctggtgtgttgcagagccatagtgaaggtgttcctagctttggcagcaaaagggccagttctcaggaattgcattagtactgtggtgcatcagggtttaatcagaatatgttctaaaccagtggtccttccaaagggccctgagtctgaatctgaagaccaccgtgcttcaggggaagtcagaactggcaaatggaaggtgcccacatacaaagactacgtggatctcttcagacatctcctgagctctgaccagatgatggattctattttagcagatgaagcatttttctctgtgaattcctccagtgaaagtctgaatcatttactttatgatgaatttgtaaaatccgttttgaagattgttgagaaattggatcttacacttgaaatacagactgttggggaacaagagaatggagatgaggcgcctggtgtttggatgatcccaacttcagatccagcggctaacttgcatccagctaaacctaaagatttttcggctttcattaacctggtggaattttgcagagagattctccctgagaaacaagcagaattttttgaaccatgggtgtactcattttcatatgaattaattttgcaatctacaaggttgcccctcatcagtggtttctacaaattgctttctattacagtaagaaatgccaagaaaataaaatatttcgagggagttagtccaaagagtctgaaacactctcctgaagacccagaaaagtattcttgctttgctttatttgtgaaatttggcaaagaggtggcagttaaaatgaagcagtacaaagatgaacttttggcctcttgtttgacctttcttctgtccttgccacacaacatcattgaactcgatgttagagcctacgttcctgcactgcagatggctttcaaactgggcctgagctatacccccttggcagaagtaggcctgaatgctctagaagaatggtcaatttatattgacagacatgtaatgcagccttattacaaagacattctcccctgcctggatggatacctgaagacttcagccttgtcagatgagaccaagaataactgggaagtgtcagctctttctcgggctgcccagaaaggatttaataaagtggtgttaaagcatctgaagaagacaaagaacctttcatcaaacgaagcaatatccttagaagaaataagaattagagtagtacaaatgcttggatctctaggaggacaaataaacaaaaatcttctgacagtcacgtcctcagatgagatgatgaagagctatgtggcctgggacagagagaagcggctgagctttgcagtgccctttagagagatgaaacctgtcattttcctggatgtgttcctgcctcgagtcacagaattagcgctcacagccagtgacagacaaactaaagttgcagcctgtgaacttttacatagcatggttatgtttatgttgggcaaagccacgcagatgccagaagggggacagggagccccacccatgtaccagctctataagcggacgtttcctgtgctgcttcgacttgcgtgtgatgttgatcaggtgacaaggcaactgtatgagccactagttatgcagctgattcactggttcactaacaacaagaaatttgaaagtcaggatactgttgccttactagaagctatattggatggaattgtggaccctgttgacagtactttaagagatttttgtggtcggtgtattcgagaattccttaaatggtccattaagcaaataacaccacagcagcaggagaagagtccagtaaacaccaaatcgcttttcaagcgactttatagccttgcgcttcaccccaatgctttcaagaggctgggagcatcacttgcctttaataatatctacagggaattcagggaagaagagtctctggtggaacagtttgtgtttgaagccttggtgatatacatggagagtctggccttagcacatgcagatgagaagtccttaggtacaattcaacagtgttgtgatgccattgatcacctatgccgcatcattgaaaagaagcatgtttctttaaataaagcaaagaaacgacgtttgccgcgaggatttccaccttccgcatcattgtgtttattggatctggtcaagtggcttttagctcattgtgggaggccccagacagaatgtcgacacaaatccattgaactcttttataaattcgttcctttattgccaggcaacagatcccctaatttgtggctgaaagatgttctcaaggaagaaggtgtctcttttctcatcaacacctttgaggggggtggctgtggccagccctcgggcatcctggcccagcccaccctcttgtaccttcgggggccattcagcctgcaggccacgctatgctggctggacctgctcctggccgcgttggagtgctacaacacgttcattggcgagagaactgtaggagcgctccaggtcctaggtactgaagcccagtcttcacttttgaaagcagtggctttcttcttagaaagcattgccatgcatgacattatagcagcagaaaagtgctttggcactggggcagcaggtaacagaacaagcccacaagagggagaaaggtacaactacagcaaatgcaccgttgtggtccggattatggagtttaccacgactctgctaaacacctccccggaaggatggaagctcctgaagaaggacttgtgtaatacacacctgatgagagtcctggtgcagacgctgtgtgagcccgcaagcataggtttcaacatcggagacgtccaggttatggctcatcttcctgatgtttgtgtgaatctgatgaaagctctaaagatgtccccatacaaagatatcctagagacccatctgagagagaaaataacagcacagagcattgaggagctttgtgccgtcaacttgtatggccctgacgcgcaagtggacaggagcaggctggctgctgttgtgtctgcctgtaaacagcttcacagagctgggcttctgcataatatattaccgtctcagtccacagatttgcatcattctgttggcacagaacttctttccctggtttataaaggcattgcccctggagatgagagacagtgtctgccttctctagacctcagttgtaagcagctggccagcggacttctggagttagcctttgcttttggaggactgtgtgagcgccttgtgagtcttctcctgaacccagcggtgctgtccacggcgtccttgggcagctcacagggcagcgtcatccacttctcccatggggagtatttctatagcttgttctcagaaacgatcaacacggaattattgaaaaatctggatcttgctgtattggagctcatgcagtcttcagtggataataccaaaatggtgagtgccgttttgaacggcatgttagaccagagcttcagggagcgagcaaaccagaaacaccaaggactgaaacttgcgactacaattctgcaacactggaagaagtgtgattcatggtgggccaaagattcccctctcgaaactaaaatggcagtgctggccttactggcaaaaattttacagattgattcatctgtatcttttaatacaagtcatggttcattccctgaagtctttacaacatatattagtctacttgctgacacaaagctggatctacatttaaagggccaagctgtcactcttcttccattcttcaccagcctcactggaggcagtctggaggaacttagacgtgttctggagcagctcatcgttgctcacttccccatgcagtccagggaatttcctccaggaactccgcggttcaataattatgtggactgcatgaaaaagtttctagatgcattggaattatctcaaagccctatgttgttggaattgatgacagaagttctttgtcgggaacagcagcatgtcatggaagaattatttcaatccagtttcaggaggattgccagaaggggttcatgtgtcacacaagtaggccttctggaaagcgtgtatgaaatgttcaggaaggatgacccccgcctaagtttcacacgccagtcctttgtggaccgctccctcctcactctgctgtggcactgtagcctggatgctttgagagaattcttcagcacaattgtggtggatgccattgatgtgttgaagtccaggtttacaaagctaaatgaatctacctttgatactcaaatcaccaagaagatgggctactataagattctagacgtgatgtattctcgccttcccaaagatgatgttcatgctaaggaatcaaaaattaatcaagttttccatggctcgtgtattacagaaggaaatgaacttacaaagacattgattaaattgtgctacgatgcatttacagagaacatggcaggagagaatcagctgctggagaggagaagactttaccattgtgcagcatacaactgcgccatatctgtcatctgctgtgtcttcaatgagttaaaattttaccaaggttttctgtttagtgaaaaaccagaaaagaacttgcttatttttgaaaatctgatcgacctgaagcgccgctataattttcctgtagaagttgaggttcctatggaaagaaagaaaaagtacattgaaattaggaaagaagccagagaagcagcaaatggggattcagatggtccttcctatatgtcttccctgtcatatttggcagacagtaccctgagtgaggaaatgagtcaatttgatttctcaaccggagttcagagctattcatacagctcccaagaccctagacctgccactggtcgttttcggagacgggagcagcgggaccccacggtgcatgatgatgtgctggagctggagatggacgagctcaatcggcatgagtgcatggcgcccctgacggccctggtcaagcacatgcacagaagcctgggcccgcctcaaggagaagaggattcagtgccaagagatcttccttcttggatgaaattcctccatggcaaactgggaaatccaatagtaccattaaatatccgtctcttcttagccaagcttgttattaatacagaagaggtctttcgcccttacgcgaagcactggcttagccccttgctgcagctggctgcttctgaaaacaatggaggagaaggaattcactacatggtggttgagatagtggccactattctttcatggacaggcttggccactccaacaggggtccctaaagatgaagtgttagcaaatcgattgcttaatttcctaatgaaacatgtctttcatccaaaaagagctgtgtttagacacaaccttgaaattataaagacccttgtcgagtgctggaaggattgtttatccatcccttataggttaatatttgaaaagttttccggtaaagatcctaattctaaagacaactcagtagggattcaattgctaggcatcgtgatggccaatgacctgcctccctatgacccacagtgtggcatccagagtagcgaatacttccaggctttggtgaataatatgtcctttgtaagatataaagaagtgtatgccgctgcagcagaagttctaggacttatacttcgatatgttatggagagaaaaaacatactggaggagtctctgtgtgaactggttgcgaaacaattgaagcaacatcagaatactatggaggacaagtttattgtgtgcttgaacaaagtgaccaagagcttccctcctcttgcagacaggttcatgaatgctgtgttctttctgctgccaaaatttcatggagtgttgaaaacactctgtctggaggtggtactttgtcgtgtggagggaatgacagagctgtacttccagttaaagagcaaggacttcgttcaagtcatgagacatagagatgatgaaagacaaaaagtatgtttggacataatttataagatgatgccaaagttaaaaccagtagaactccgagaacttctgaaccccgttgtggaattcgtttcccatccttctacaacatgtagggaacaaatgtataatattctcatgtggattcatgataattacagagatccagaaagtgagacagataatgactcccaggaaatatttaagttggcaaaagatgtgctgattcaaggattgatcgatgagaaccctggacttcaattaattattcgaaatttctggagccatgaaactaggttaccttcaaataccttggaccggttgctggcactaaattccttatattctcctaagatagaagtgcactttttaagtttagcaacaaattttctgctcgaaatgaccagcatgagcccagattatccaaaccccatgttcgagcatcctctgtcagaatgcgaatttcaggaatataccattgattctgattggcgtttccgaagtactgttctcactccgatgtttgtggagacccaggcctcccagggcactctccagacccgtacccaggaagggtccctctcagctcgctggccagtggcagggcagataagggccacccagcagcagcatgacttcacactgacacagactgcagatggaagaagctcatttgattggctgaccgggagcagcactgacccgctggtcgaccacaccagtccctcatctgactccttgctgtttgcccacaagaggagtgaaaggttacagagagcacccttgaagtcagtggggcctgattttgggaaaaaaaggctgggccttccaggggacgaggtggataacaaagtgaaaggtgcggccggccggacggacctactacgactgcgcagacggtttatgagggaccaggagaagctcagtttgatgtatgccagaaaaggcgttgctgagcaaaaacgagagaaggaaatcaagagtgagttaaaaatgaagcaggatgcccaggtcgttctgtacagaagctaccggcacggagaccttcctgacattcagatcaagcacagcagcctcatcaccccgttacaggccgtggcccagagggacccaataattgcaaaacagctctttagcagcttgttttctggaattttgaaagagatggataaatttaagacactgtctgaaaaaaacaacatcactcaaaagttgcttcaagacttcaatcgttttcttaataccaccttctctttctttccaccctttgtctcttgtattcaggacattagctgtcagcacgcagccctgctgagcctcgacccagcggctgttagcgctggttgcctggccagcctacagcagcccgtgggcatccgcctgctagaggaggctctgctccgcctgctgcctgctgagctgcctgccaagcgagtccgtgggaaggcccgcctccctcctgatgtcctcagatgggtggagcttgctaagctgtatagatcaattggagaatacgacgtcctccgtgggatttttaccagtgagataggaacaaagcaaatcactcagagtgcattattagcagaagccagaagtgattattctgaagctgctaagcagtatgatgaggctctcaataaacaagactgggtagatggtgagcccacagaagccgagaaggatttttgggaacttgcatcccttgactgttacaaccaccttgctgagtggaaatcacttgaatactgttctacagccagtatagacagtgagaaccccccagacctaaataaaatctggagtgaaccattttatcaggaaacatatctaccttacatgatccgcagcaagctgaagctgctgctccagggagaggctgaccagtccctgctgacatttattgacaaagctatgcacggggagctccagaaggcgattctagagcttcattacagtcaagagctgagtctgctttacctcctgcaagatgatgttgacagagccaaatattacattcaaaatggcattcagagttttatgcagaattattctagtattgatgtcctcttacaccaaagtagactcaccaaattgcagtctgtacaggctttaacagaaattcaggagttcatcagctttataagcaaacaaggcaatttatcatctcaagttccccttaagagacttctgaacacctggacaaacagatatccagatgctaaaatggacccaatgaacatctgggatgacatcatcacaaatcgatgtttctttctcagcaaaatagaggagaagcttacccctcttccagaagataatagtatgaatgtggatcaagatggagaccccagtgacaggatggaagtgcaagagcaggaagaagatatcagctccctgatcaggagttgcaagttttccatgaaaatgaagatgatagacagtgcccggaagcagaacaatttctcacttgctatgaaactactgaaggagctgcataaagagtcaaaaaccagagacgattggctggtgagctgggtgcagagctactgccgcctgagccactgccggagccggtcccagggctgctctgagcaggtgctcactgtgctgaaaacagtctctttgttggatgagaacaacgtgtcaagctacttaagcaaaaatattctggctttccgtgaccagaacattctcttgggtacaacttacaggatcatagcgaggtgccgatgaatagcgaagtgccgtatgaatagcggggatctctaaa

SEQ ID NO: 134828 - DNA, 4615 bp, Homo sapiens
ggggcatttccgggtccgggccgagcgggcgcacgcgcgggagcgggactcggcggcatggcgggctccggagccggtgtgcgttgctccctgctgcggctgcaggagaccttgtccgctgcggaccgctgcggtgctgccctggccggtcatcaactgatccgcggcctggggcaggaatgcgtcctgagcagcagccccgcggtgctggcattacagacatctttagttttttccagagatttcggtttgcttgtatttgtccggaagtcactcaacagtattgaatttcgtgaatgtagagaagaaatcctaaagtttttatgtattttcttagaaaaaatgggccagaagatcgcaccttactctgttgaaattaagaacacttgtaccagtgtttatacaaaagatagagctgctaaatgtaaaattccagccctggaccttcttattaagttacttcagacttttagaagttctagactcatggatgaatttaaaattggagaattatttagtaaattctatggagaacttgcattgaaaaaaaaaataccagatacagttttagaaaaagtatatgagctcctaggattattgggtgaagttcatcctagtgagatgataaataatgcagaaaacctgttccgcgcttttctgggtgaacttaagacccagatgacatcagcagtaagagagcccaaactacctgttctggcaggatgtctgaaggggttgtcctcacttctgtgcaacttcactaagtccatggaagaagatccccagacttcaagggagatttttaattttgtactaaaggcaattcgtcctcagattgatctgaagagatatgctgtgccctcagctggcttgcgcctatttgccctgcatgcatctcagtttagcacctgccttctggacaactacgtgtctctatttgaagtcttgttaaagtggtgtgcccacacaaatgtagaattgaaaaaagctgcactttcagccctggaatcctttctgaaacaggtttctaatatggtggcgaaaaatgcagaaatgcataaaaataaactgcagtactttatggagcagttttatggaatcatcagaaatgtggattcgaacaacaaggagttatctattgctatccgtggatatggactttttgcaggaccgtgcaaggttataaacgcaaaagatgttgacttcatgtacgttgagctcattcagcgctgcaagcagatgttcctcacccagacagacactggtgacgaccgtgtttatcagatgccaagcttcctccagtctgttgcaagcgtcttgctgtaccttgacacagttcctgaggtgtatactccagttctggagcacctcgtggtgatgcagatagacagtttcccacagtacagtccaaaaatgcagctggtgtgttgcagagccatagtgaaggtgttcctagctttggcagcaaaagggccagttctcaggaattgcattagtactgtggtgcatcagggtttaatcagaatatgttctaaaccagtggtccttccaaagggccctgagtctgaatctgaagaccaccgtgcttcaggggaagtcagaactggcaaatggaaggtgcccacatacaaagactacgtggatctcttcagacatctcctgagctctgaccagatgatggattctattttagcagatgaagcatttttctctgtgaattcctccagtgaaagtctgaatcatttactttatgatgaatttgtaaaatccgttttgaagattgttgagaaattggatcttacacttgaaatacagactgttggggaacaagagaatggagatgaggcgcctggtgtttggatgatcccaacttcagatccagcggctaacttgcatccagctaaacctaaagatttttcggctttcattaacctggtggaattttgcagagagattctccctgagaaacaagcagaattttttgaaccatgggtgtactcattttcatatgaattaattttgcaatctacaaggttgcccctcatcagtggtttctacaaattgctttctattacagtaagaaatgccaagaaaataaaatatttcgagggagttagtccaaagagtctgaaacactctcctgaagacccagaaaagtattcttgctttgctttatttgtgaaatttggcaaagaggtggcagttaaaatgaagcagtacaaagatgaacttttggcctcttgtttgacctttcttctgtccttgccacacaacatcattgaactcgatgttagagcctacgttcctgcactgcagatggctttcaaactgggcctgagctatacccccttggcagaagtaggcctgaatgctctagaagaatggtcaatttatattgacagacatgtaatgcagccttattacaaagacattctcccctgcctggatggatacctgaagacttcagccttgtcagatgagaccaagaataactgggaagtgtcagctctttctcgggctgcccagaaaggatttaataaagtggtgttaaagcatctgaagaagacaaagaacctttcatcaaacgaagcaatatccttagaagaaataagaattagagtagtacaaatgcttggatctctaggaggacaaataaacaaaaatcttctgacagtcacgtcctcagatgagatgatgaagagctatgtggcctgggacagagagaagcggctgagctttgcagtgccctttagagagatgaaacctgtcattttcctggatgtgttcctgcctcgagtcacagaattagcgctcacagccagtgacagacaaactaaagttgcagcctgtgaacttttacatagcatggttatgtttatgttgggcaaagccacgcagatgccagaagggggacagggagccccacccatgtaccagctctataagcggacgtttcctgtgctgcttcgacttgcgtgtgatgttgatcaggtgacaaggcaactgtatgagccactagttatgcagctgattcactggttcactaacaacaagaaatttgaaagtcaggatactgttgccttactagaagctatattggatggaattgtggaccctgttgacagtactttaagagatttttgtggtcggtgtattcgagaattccttaaatggtccattaagcaaataacaccacagcagcaggagaagagtccagtaaacaccaaatcgcttttcaagcgactttatagccttgcgcttcaccccaatgctttcaagaggctgggagcatcacttgcctttaataatatctacagggaattcagggaagaagagtctctggtggaacagtttgtgtttgaagccttggtgatatacatggagagtctggccttagcacatgcagatgagaagtccttaggtacaattcaacagtgttgtgatgccattgatcacctatgccgcatcattgaaaagaagcatgtttctttaaataaagcaaagaaacgacgtttgccgcgaggatttccaccttccgcatcattgtgtttattggatctggtcaagtggcttttagctcattgtgggaggccccagacagaatgtcgacacaaatccattgaactcttttataaattcgttcctttattgccaggcaacagatcccctaatttgtggctgaaagatgttctcaaggaagaaggtgtctcttttctcatcaacacctttgaggggggtggctgtggccagccctcgggcatcctggcccagcccaccctcttgtaccttcgggggccattcagcctgcaggccacgctatgctggctggacctgctcctggccgcgttggagtgctacaacacgttcattggcgagagaactgtaggagcgctccaggtcctaggtactgaagcccagtcttcacttttgaaagcagtggctttcttcttagaaagcattgccatgcatgacattatagcagcagaaaagtgctttggcactggggcagcaggtaacagaacaagcccacaagagggagaaaggtacaactacagcaaatgcaccgttgtggtccggattatggagtttaccacgactctgctaaacacctccccggaaggatggaagctcctgaagaaggacttgtgtaatacacacctgatgagagtcctggtgcagacgctgtgtgagcccgcaagcataggtttcaacatcggagacgtccaggttatggctcatcttcctgatgtttgtgtgaatctgatgaaagctctaaagatgtccccatacaaagatatcctagagacccatctgagagagaaaataacagcacagaggtgggtacttgggtcacaatcggggacatgttgtcctggaatttcaggccctagtatgttgccgtgctcctgcagctgctcctgcttcctcagggaaggcttatatcagtgggatgtttgctgccagtgacctcaatagttgtttagaaaacacatttaactagtgccttccctgtaccaaacttaagcaaacttcagacatggttagcgccatgtttgatctccatgctagcttagtgcgtgtggatcctgttagatgttgcctctgtttgcttcat

SEQ ID NO: 134829 - DNA, 2837 bp, Homo sapiens
ggggcatttccgggtccgggccgagcgggcgcacgcgcgggagcgggactcggcggcatggcgggctccggagccggtgtgcgttgctccctgctgcggctgcaggagaccttgtccgctgcggaccgctgcggtgctgccctggccggtcatcaactgatccgcggcctggggcaggaatgcgtcctgagcagcagccccgcggtgctggcattacagacatctttagttttttccagagatttcggtttgcttgtatttgtccggaagtcactcaacagtattgaatttcgtgaatgtagagaagaaatcctaaagtttttatgtattttcttagaaaaaatgggccagaagatcgcaccttactctgttgaaattaagaacacttgtaccagtgtttatacaaaagatagagctgctaaatgtaaaattccagccctggaccttcttattaagttacttcagacttttagaagttctagactcatggatgaatttaaaattggagaattatttagtaaattctatggagaacttgcattgaaaaaaaaaataccagatacagttttagaaaaagtatatgagctcctaggattattgggtgaagttcatcctagtgagatgataaataatgcagaaaacctgttccgcgcttttctgggtgaacttaagacccagatgacatcagcagtaagagagcccaaactacctgttctggcaggatgtctgaaggggttgtcctcacttctgtgcaacttcactaagtccatggaagaagatccccagacttcaagggagatttttaattttgtactaaaggcaattcgtcctcagattgatctgaagagatatgctgtgccctcagctggcttgcgcctatttgccctgcatgcatctcagtttagcacctgccttctggacaactacgtgtctctatttgaagtcttgttaaagtggtgtgcccacacaaatgtagaattgaaaaaagctgcactttcagccctggaatcctttctgaaacaggtttctaatatggtggcgaaaaatgcagaaatgcataaaaataaactgcagtactttatggagcagttttatggaatcatcagaaatgtggattcgaacaacaaggagttatctattgctatccgtggatatggactttttgcaggaccgtgcaaggttataaacgcaaaagatgttgacttcatgtacgttgagctcattcagcgctgcaagcagatgttcctcacccagacagacactggtgacgaccgtgtttatcagatgccaagcttcctccagtctgttgcaagcgtcttgctgtaccttgacacagttcctgaggtgtatactccagttctggagcacctcgtggtgatgcagatagacagtttcccacagtacagtccaaaaatgcagctggtgtgttgcagagccatagtgaaggtgttcctagctttggcagcaaaagggccagttctcaggaattgcattagtactgtggtgcatcagggtttaatcagaatatgttctaaaccagtggtccttccaaagggccctgagtctgaatctgaagaccaccgtgcttcaggggaagtcagaactggcaaatggaaggtgcccacatacaaagactacgtggatctcttcagacatctcctgagctctgaccagatgatggattctattttagcagatgaagcatttttctctgtgaattcctccagtgaaagtctgaatcatttactttatgatgaatttgtaaaatccgttttgaagattgttgagaaattggatcttacacttgaaatacagactgttggggaacaagagaatggagatgaggcgcctggtgtttggatgatcccaacttcagatccagcggctaacttgcatccagctaaacctaaagatttttcggctttcattaacctggtggaattttgcagagagattctccctgagaaacaagcagaattttttgaaccatgggtgtactcattttcatatgaattaattttgcaatctacaaggttgcccctcatcagtggtttctacaaattgctttctattacagtaagaaatgccaagaaaataaaatatttcgagggagttagtccaaagagtctgaaacactctcctgaagacccagaaaagtattcttgctttgctttatttgtgaaatttggcaaagaggtggcagttaaaatgaagcagtacaaagatgaacttttggcctcttgtttgacctttcttctgtccttgccacacaacatcattgaactcgatgttagagcctacgttcctgcactgcagatggctttcaaactgggcctgagctatacccccttggcagaagtaggcctgaatgctctagaagaatggtcaatttatattgacagacatgtaatgcagccttattacaaagacattctcccctgcctggatggatacctgaagacttcagccttgtcaggtaatgtttagaagaattgtgatgtgtattgtaattaaaatggaaatggagtaactataataggtaggactgtatttttgtaacttctgaaatttaagcccagtgtgttcaaaatatgtttgattgctatttttgtaatttccctaatttatctgactctaattgtgataaagaaatatagttgaggtattaaaaaatttttcatttactcacttatagcttactaagatttataaaatcttcaaagacaagtactgtcttcaataccttgaaatttttatgactcctaatacactgctttgcaaaaaaaacttgttgaataaatcagtcaggaattaaacacttcagaaaattcaacagt

SEQ ID NO: 134830 - DNA, 516 bp, Homo sapiens
caacaatcagatcaagatagagaacatttccaggaccttgaaagcttccctcctgtactctcttagtcattgcttaacgaaagttaccacttttctgatacccatcactatagattagttgtgtttattcctgaaattcatataagtggaatcaaatcattcttttatgtctaatttcctgtgttgaacattacatctgtgaaatccatgttttttgagttagtagtagtaattctttttcattgctctgtattatttcattatacgagtgtctatttgcgtcttctgttgacagacatttgggctgtttccagtgtttagttcttagaaacaaagctaccataaacaattttgtgcatgtgttttggtggccataaaaattcattttttggcaaagcgcttcatttaaatatataataaaacatatctccatatatatacacacatatacacacataattcttttttttaattatactttaagttctggggtacatatgcacaacgtgcaggttt

SEQ ID NO: 134831 - DNA, 1026 bp, Homo sapiens
tccgcggaaattcggttcgtgagcgtgcgcggaggtcgccgcggggaggcgggtgaggggagggggccggagggtcgggggtgccggggggtgcgggaaggctgcgggggtggctgttggggacgttcgtggcgggggaggctgttggggacgttcgtggcgggggaggctgttggtcccctccccgccccaccgcgtcccagggaaccccggcagggcacccagtgaggggggccgcgtccgcccattcctcactgctgtccccgcctgtgcccgaaacccccgttcacgttcaccgagaaaacagacataaacccagccaggcacatccactagaatggctgtgatttcagaaaagcggacgtaagtgctgccgaggagatggaggcgttggaccccctcgcgcattgtcggggcgggtgcagccgcggtgcaaaaggaccttcctcagaaagttgagcacgaagttcccacaggcccggaagttcccctcccgggcgctccccagagagctgaagactgggcgcgtgccggcggcaaatgttcacagcaaagggcggcccagtgcgcagctggaacatcagccccaggcggtcgctgcgacagggacgagcctgggaaacgtgaaaatgtccagaacagggaatccacagataaagaaaagacatcgtggttgccagagctcgcgggagggggcaacagggaccgactgcttaacgtgtatggttccccttcagggtgaggacgtgttctgggacgaggtcgaggtcagggttgcaggacaagatgaaagcgctaaatgccactgaattgtttgctttaacgtcattaattttgttatgtgaatttcatctcaatagaataaataggtcaagctggctgcagggcccaccccaccgcggcctggagcagggtcttctggggtgtaccacctctgccctcacccaggctccaccacgaccagcttcgtccaccccccaggagaccatgaaggcccacgtctgaaatcctcactaagcccaccct

SEQ ID NO: 134832 - DNA, 256 bp, Homo sapiens
gccacgggacgtggagcagatggtgaggatagtggggaggtagcagcagaggatgacccgaggcaaaagtgcaagtgaagaaaagtcgccttgccgggcagaggtacgggaccaaggcgcctcctctgggctgaggagttagagggaagaaaatggcgccctgtcatgagggcgcgaggtccgagttgaggggagaagactgagggacacagaagtggccgaagtgagggcgctgaggtcagcctgagctgagagg

SEQ ID NO: 134833 - DNA, 289 bp, Homo sapiens
gtgggactcactgggaaaccgctctctgtggtgccagggaaggacgtctgtgggaggtgcctaccaaggaagtctctggaaatcagcctgcaggggtggagtgccgggaaactcccgccccctccccccctccccgaagtgaaccgcccacagggagatgcccctatgggagcttcgcaccagaacccgtctgcgccagtgtccctgcagcgccctctactggcgaagctggacatggcgtccgctggcaaaggggaaactcttctttcctcccaagccgagcaatgct

SEQ ID NO: 134834 - DNA, 577 bp, Homo sapiens
tctcccactacaaacctcagtgtagatatctggtcttactgcagcaggcaagcgggccccagtttggttctctaacagtagcaactctgtaaatcggaattttcctgcacccccagagtttattcttgttatttgttgtcactggtttgtgttgtcatttctgaattattttaagtctatattttttaattgtgtgtggccaccaaggtctctgcttggttagtttaatggtcagctcataattgtgcagagacttccttaaatgcctgcaatcattaagttctcctgtctggccaggcatggtggctcatgccataatcccagcactttgaggggctgacgtgggtagatgacttgaggtcaggagttcgagaccagcctggccaacgtggccaaaacccatctgtactaaaaatacaaaaattagctggcatgatggtgtgcgctggtagcttcagctattcgagaggctgaggcaggagacttacttgaacccaggaggtagaggttgcagtgagccaagattgtgtcacttcacttcagcctgggtgacagagaagggctctgtctaaaaaaa

SEQ ID NO: 134835 - DNA, 192 bp, Homo sapiens
tttcatacagagaatgaactcctcaccgtcctctctgcagagcttcccaagtggtatgctgtggattatgggtttgcagagatactgatctcagtggtcggggggcagctgggagaggtgatgcaggcggagctccagactggttgactctagctgcttctggtcagagctacgcccccaaaccggttacca

SEQ ID NO: 134836 - DNA, 312 bp, Homo sapiens
acttctacccacaaccaccttcacattcctaattgcttttttatcaaatcctagacatcatgtcatttgaaaatacactgcagttatgtttgaagctccttcatctgtagtaaagcaactaaataaaagctgtttctatactgaaaactgcagtggtccctcacaattagaatacttaagtatctacttaacataaactaaaatgaaagacctttcgtattctactaatacacagcaagaaataaaaatgcctacataagtcaatttcaccaatctctgttttaaaataagtcagatgatacctaagtgctt

SEQ ID NO: 134837 - DNA, 291 bp, Homo sapiens
ggtgttggaatccagggaagtcattaactggctgtacaaggccaagtcagaacccatattcactctccatgtacatgagataaactgcctagaagaccaaatgtgtaaggaaggagaaacaatgattctctgtagtagggtgtggctatatgtcctgcctacctggcattttccccaacacttcacattcaagtcttccatgaaatttatagtttgccatatgttcatattattccatcttaggtctgctcctcctgctgctgctttctctggcggggaatgcccttccac

SEQ ID NO: 134838 - DNA, 123 bp, Homo sapiens
gatagagaccatgtggcccacaaagcggaaaatacgtactatctgaccgttttcagaaaaagtttgcccactcttggcaaaatcatttgacaagcctatctaaactaagatcacttctgtggc

SEQ ID NO: 134839 - DNA, 523 bp, Homo sapiens
tgttatctgcataagacacctaacctgtaatgaccaattaagactcaaattagctagcgccaacagcgggtatcaaaatgccatcaaaattttctaagcttgcacctacaaatgttccctaaggcaagcataaaggcatctaacatttaccctaaattatgccagtgagtagcaaaaatgtgctcagttagacgcaacatgtcacaacatggtctgactgttggaagaacttagtgcagggagagctatacccagaggaaagaagtaaaattaggcagagtgttgatggctgagttccagtgtcacatttatatacagctcaatgactctagaattgtccttacaccaaaaaaaagttattcatagattcaaaaaatcaactgctcactactttcatttaaaaatgccttgtgtgaacaaggcgttccaactgaaaactggcagaattcatagaggttcttaaagaacatcaattagattcttagtcaaccaatttggctgtaaaatcaaaactgaaagtgca

SEQ ID NO: 134840 - DNA, 468 bp, Homo sapiens
  misc_feature (25)..(25): n is a, c, g, or t
ctagttttagaagtttcaatagcanaaagaagtgttattagaaagcaattttttcaaaatgaacactcaggtacttcacttaccgttttagttgccagagctgctctgtctcactctaaaagcattttcttgcaaaggggttggttttgatcaacccaaaaatctggcagctgtgaaaatcaaagttaatgctatagaacagcgttgtccaatgggacattctgtgatgatgggaatgttctgtgtctgtatatggcagccactacacatagatggctattgagcactcgaaagagtggtaataatgacaaaatgtgtcaaacagagcccagtgattcctaatattttatgcaactggaatgaacaaaaaacagatctacaactgaatggctccaaattatttactgaaagtttaccctctgtcattttaggtggtttaatattttctgttgaaactcataaaacagt

SEQ ID NO: 134841 - DNA, 352 bp, Homo sapiens
ccagccgggcttatatggacagagagctctgatctctccctgggatgcagctcccagaaggaggggaggctgccatctctgtggttcagtcaactgagctgttccagcttgcctactctagagagtctgggcagtccagatgaggaagggtcctccccaacagagcacacctgctctacagccagactgcttctttaagcgggtccctaattctgttcctcctgactgggtgagacctttcaataagggtctccagaaacctctgaaacgagcatttgggccagcagcaggtcagtacccaccctgggatggagtgtccagaggaaggagcaggctgccatctttgctgctt

SEQ ID NO: 134842 - DNA, 632 bp, Homo sapiens
gctcacccttcttggggcaggcatgcctggacagagagcacctcacagacattgtccaccgctgggacagagggtgcagcagtgctcagaggagctggactgtgctgatgagttaccgagtttttgttgagctcctaatgtgcaccagccctgcacaggatgctatgggggatgtggaaagaagagcaagtgcatttaatgaaccagcttcaggccttgttgtaatagaagacaagagacagaatcagggatgtagctctagaacattccatgacttcagtccccactaaagaccccaaagagtactctgcaaatatctgtggaaggacaaaatgttctccatagcccttgaagattctctgataagagataaaggagaattcaagaatagacagtggagacctaagccaacccatcagctccagagactcctcactgccaggggaaacaacatctgccaagtctcatggtaggaatctcacttgattaaacaaaaaaaagcccaggcactggtgactaatttgactagcaattctcaacccattgaaggaattttagagatgagcaagttgagacccagataagaaaactcagtaatcaaaggggcacacctctccctgtcctccttagtc

SEQ ID NO: 134843 - DNA, 297 bp, Homo sapiens
taggtggtagctagctgcttcttgaaggtctgctgacaagaagtggcccactaggcaacttgtgctccacttccgggcactgtgggtgggtaaggcaggctggggtgccacggatgccttaggatcctgcccgagccaggagggcatcttcattgcgtgagccccccactcccacaaatgttggactttttggtccatgtgattcttgtgttttcttttgctttttgaattaactaggtaacaattcattatactaattgtatggtactttgtattaaattctctctgttaaaacca

SEQ ID NO: 134844 - DNA, 423 bp, Homo sapiens
gttgagaaaatgtagcagcctgagatttaagaaacaagtgatccctgagacagagcccttgaccctaaaggggaaaaatattcagttacactcatgagatataaacatagtacttttgttgtaactgctgagaactgaagagctaaaagtcaacattattttcctttttgagactcaaagtgtgtccaccaggagcactcttcccaatggaggcaaaatctgccaaagttgtttttgttgctgtctaaccttagaccatttcatctgccccaactaaaagtcctagccacagctctctcaagcgattctccaccctcagcctctgagtagctgggactgcaggcacatgtaccacacccagctattttttttaaatttttaaattatgttttttagagtcaagggtctcaccttgtttctccg

SEQ ID NO: 134845 - DNA, 325 bp, Homo sapiens
tgtggctctggattccgtgttggtgcatgctgaggtgggcattggttctgatgtgtggctctggattctgtgttgacatgtgttgaggtgggcattggttccagtgtatggctctggattccatgttgatgcatgctgagttgggcatgggttccattgtgtggctctggattctgtgttgatgtgtgctgaggtgggcattggttccagtgtgtggctctggattccatgttgacacgtgctgaggtaggcgtaggtcccactgcatggctctgggttccatgtttgtgtgtgctgaggtatgcctaggtcacccgagctagtt

SEQ ID NO: 134846 - DNA, 369 bp, Homo sapiens
accatattagatgcacagcgacaaaagattaaacaaagcctgacagggccagaagcatccacatgtaattcaattacttggtttagcaaaacagtcaacatcctataatggaagtcagcattatccagggtagtgagttgaattgtatccctacaaagttcatgtctacctacaacctctgaacatgatcttagtgaaatagggtgtttgcagatgtaattaggataatgactgaaatgagcgtatcctggattagggcagaccctaaatccaatgagagttttcttacaagaaatagacaaggacacactaggacacagagaagacagtgtgaagacggaggctgagattggagtgatgtgcttgcaa

SEQ ID NO: 134847 - DNA, 315 bp, Homo sapiens
ggaaaatcatgactgcatttaaaataaatatatcttgcttggcgctgtggctcatgcctataatctcagcatttgggaagccaaggtgggaaaacagcttgagcccaggagttcaaaaccaacctagacaagatggcaagacctccatctctacaaaaaatttaaacagctgggcgctgtggcgcatgcctgtagtcccagctacttgggagaccgagacaagacgggaaaatggcttgaacccaggaatgtgaggtggtagtgagctgtgatcacaccactgcactctagcttgggcagcaaagcaagacctca

SEQ ID NO: 134848 - DNA, 657 bp, Homo sapiens
gtccattacgttatggtaaaattctgcaaggatgtagaaaggtaatattgattgaagaagtaaaaatgcaaaacatataactgaaaatgctcattcatacatataattgaaaaaaacttaagtaaaattctacatttttattaacttaaaaaaatcatatttcaaacagtagagtctgtgagctatgaaaatttacaattcacttggcattcccagcgccttgcgctccctgtgactgcgctgtgcaggcgtcttggtttgtgcagggtggttctcatccttgccagcatccccttcccctttctccccttacacacctcactcccttctttgccgagttgtgggggctgttttaggcctggcttttgtttttggaagggcaggtttagcagacaaccctgcctatctcctgtgtggctcctctatcacctttgctgtgtcacctttttagccgatttcctgggcatggtggcttggcaggcagctttgccaatccaaggtatgctctctgctcctggaaagatttctgagtcccacagccatccgagggctacggagctcccagtttccaacctggctgagaaggtggcctcagcttgggcagaacaggtggagactttgggaccatgaagagacatgcagagccaggaaagagga

SEQ ID NO: 134849 - DNA, 273 bp, Homo sapiens
gagatggatcttgaaaggacaatggtttcctctgaggactgtcatctgaaaaggatggcaggtggtgtcctggggttctagacaattattacatgggtgtatattttataattattgattaaactgtagatttatgttttagacacatttcctctattattccacaattaaaatactaaataaaaatacacaacacaatacacaattaaaatactaaatttcacaattaaaattctacccacaaccatgtaaaaaattaggtaaacaaaaatc

SEQ ID NO: 134850 - DNA, 420 bp, Homo sapiens
atcatattttagtactttttatcatctccttcattgcttccttcccacccttacttaaactgtgtggtgcatacttctgtatagcatttgcatattgtatgggaataatttgcagcttaaaaaaactttgccttttttatgagaacacaagctctttgaagtcatggtacagggtttttcctatttgcagcaaagggcctagggcagtgcctgtaatctagcagaattcagcgaatgtttgtggaataaatgaggggttctatctgggtgtattgcctccattagattacaaatagcatatgctgggtgaggtggctcatgcctgtaatcccagcactttgggagcccaaagtggaaggattgcttgagcccaggagttcaagaccagcctggggaacataggaagaccccatatctaca

SEQ ID NO: 134851 - DNA, 518 bp, Homo sapiens
gacgtccccggtgcatcccagaaccggtcggaatgtccgaaggcggttgttgctcccttgtttttccttgctgcttgtccgttcgctaaatacgctgggcgccgttccccaactgtccttccgagagccccttgcccacttctgtactgttacagtgacgccgctctgggcgcaccgagccgcgctgtgtttcgctgctcttcctacctattctcagtttgtaaagaaataatctcacataacactccttaatgtactcctccgtaagataaattgcagataatatacgtctgctaattctctttatctccacgtcttctcacgccatgtactaagtagaaatggtttcatttaggtgaaaataatgcagactagcacatagcacaacaagggcttgtaactattaaggactttatgtaacagtctgtaattctgtgtatctgtctggtctttccggacttggcactttagtctccgagaataagccatttcctgtttaggtagggtaggaccaacca

SEQ ID NO: 134852 - DNA, 439 bp, Homo sapiens
attagatacagggagctagaagaagatacagaccaagcaatggaactgggaaagaacgttcttgaaagctgagctggaagcctttcctctgcatgtgttatttctgccatatgattcatctacactgagacaggccttgctgtataagtcagagtcacactggtaccctcaagaaggctgacatgaggatatgttgctgggagctacctaggcaatgacaggggacaggctggaatgacagggaagccacgttcctcagcagcagattacaggaaacctgcccacagcctgagcagtgcccgcaactgctctgtgccatcacaatttcccaagtagttattgtggctatgattggaaaggggtcaccgtcacatgtttaagataaatgtaatttctttggctagagtttatgttctggaatgctgcaatctgagtcaag

SEQ ID NO: 134853 - DNA, 415 bp, Homo sapiens
aatttaaatgagtttccagagatatatttatatgaaaaagaaaagggggaaaaattaggacaaaaaagtagagtcaggaatgaggctaatataaacaaaaagcaattgtaagtattgccatactatttaaatctatttggttcctgagtttaggttaagaaaaactaggaatttggatagtgagacatttaacagaaattttaaccagatctctttagcatataaatttggacaacaaaaaatctgatactaagtaatgccactaagtgatcactataggtgagtattttattagtattgagataaatacaatacacagttgacccttgaacaacacaggtttgaactgcttgagtctacatatatgtggattttcttctacttctgagacccataagatagcagcacatttaag

SEQ ID NO: 134854 - DNA, 304 bp, Homo sapiens
ataagatctgccacctgtggcttcccaaagtgctgggattacaggcatgagccactgcccctgtccgagagctaattttcttaggacacgcagcaacttctactggatgatcgcaccttagaatgataattatgtcaccttgcatttccagaacatttggtatttttttcagagagttttcacagtgattatctcagttgttcatcaaaggatttttcattatgaactgcatttgcgtattttatttacctataatcctttccccgctgctgaaacaatagcattctgggcacacattatggag

SEQ ID NO: 134855 - DNA, 275 bp, Homo sapiens
gtcaccctgtggctccatttttgcttgtgggggccttccacgagagacacaggcacactgcttcaaagcatgggcatttgcagcctgcccgggacagccctgggatcttctggaatggaagaggcctccttgggaggctcccattattttctgagatctcgccgcttctcccttctgcctgcctcaacgtcccccggagtccctgcgtcccgcctacaccaccctgcagcctcgttttctctattgggcaccttcggcaagagacacaggaacct

SEQ ID NO: 134856 - DNA, 171 bp, Homo sapiens
atggggcagctgaaagaaagggctgtgtcagggtgtctttctcccttttctccctcatttttctagatgcttttttgccttgtagttctttctctttttctttgctttctctttcctttttctgtctgtctcctatacctccccatctctcccttgcccctgccccatctt

SEQ ID NO: 134857 - DNA, 425 bp, Homo sapiens
ggcacagtttctgcgctcatccttacttcagctctcagactgtaaacaagggttcttttcgaggtacagttaatgttgtgtttctttcgcatttctgtgggtgatttcacagtttaaaatggcccccaggtgtggtctctagtgctgtctagggatcctgagggcaagaggccatgagccatgacgtgcctcatgcagaaaatatggttagagaaaccatgtgcaggcatgagacacggtgctgccggccagggctgccccactgatgagtgaagaacacgtattatgtaggtgtctttacacagaaacacacatcacacgatgccaggtgctggtcattgatgaaattgttgtgaccagaatcttgcaggaatctaactgtgagggttaattttctgtgtcaagttggctgagccacggcaccc

SEQ ID NO: 134858 - DNA, 376 bp, Homo sapiens
cagcacaccaacatggcacatgtatacatatgtaacaaacctgcacattgtgcatatgtaccctagaacttaaagtataataataaaaaaaagaaaattgttaaaatagattgaaaaatgttttgaggctatctaaaagttggctttgtttcaactgagagggaaaaaaaatagtgatttaacagttcctggaatgaaacatgtaaggatttctgaaacctctcaaggtgactgaaaaatttggagggaatatggctgaaagaaaaagtaatgcaacatctttggcctaataaaacttccttttcagctctaatgtaagtttacaagagacttgtaccttaaataacaaattctatgaacaaatctttattaaaaa

SEQ ID NO: 134859 - DNA, 174 bp, Homo sapiens
cactattctactcgctattctacagactccaaatcatttactgctggcatttttctctgttaagtgattgttctcctgaaaaatgccagattgacagccttttaaacctaagtcttgtcccctttcagtcctgggagtgcgagctgcattgactgaagcaatgcattcctccac

SEQ ID NO: 134860 - DNA, 556 bp, Homo sapiens
tttcacttccacttcccccatcctgaacactccacaagatgatgctactctctgaggcaacagcaaccattttgtctttgtctccatgtggccctccaggttgattgttcattggaggatccactgtaatctatctgaaagatggatctgatgatgtcggtcgctgcttaaagtcgttaagattgtcatctttcctttgagaatcaggtattaacctttttaaagtcttatctctttcttattcctctcaagtacttgagagtatttagcatgctatcatctctgaacagattatgggttttcacacagatctgtgctcctattctggaaataaaatttgcctggactaccatgctcaaggcatagaacttcgaacatttaaaataaatggagaaatgcaaaaccacggtttaaaaaactcacttattttccaaagtaacttaaactcttgaaaatatgctcaaatatgcatctagcaaaaaaatttaccactacatttattcaatatttgtataaccaaaagcagaaacagtacgaattctacaaggaaaaaaaa

SEQ ID NO: 134861 - DNA, 560 bp, Homo sapiens
gttgggagacctttctgtaagcgaggtcgttgattaagtatgtatattagttgggcttaggtttgactgtaaacaacaaatacatagaataataatggcttatttgtttttcttatttttgatggagtctcgctctgtcgcccaggcaggagtgcagtggcgtgatctcggcttactacaacctctgcctcctgagttcaagcgattctcctgcctcagcctcctgagtagctgggattacaggcacctgccaccacacccagctaatttttgtattttttgtagaaatggggttttgtcgtgttgccaggctggtcttgatttgtgagctcaaaatgattctcctgcctcagcttcccaaagtactggggttacaggcatgagccaccgcacatggccctgaaatctatgtctttaaaaaagtcccattgtggggccaagcatggtggctcacgcttgtaatcctagcactttgggaggccgaggcgggtggatcacgaggtcaggagttcgaaaccagcctggccaacacggcaaaaccctgtctctactaaaaatac

SEQ ID NO: 134862 - DNA, 393 bp, Homo sapiens
taatttataaattaaatgttaatgaggctaacagtagttaataataacatagaacaattataacaatataccagcattactactcttgcacttttacattgttaagtaaaataggagttacttgaacacaagcgctgtgatactgcaacaatctgataacccagacagtactgagtgactaactggtgggcgatatatacagcctggatgtgctggacaaagggatgattcaagggtgagatagagtggatggcacgagatttcatcatgctgctcctagttttagaagtttcaatagcacataaccaataaaccccaggcagcaatgaacagaaagcacattcttgtgtggcattttgcttatggcacaatcggggtgggtacatggaaggc

SEQ ID NO: 134863 - DNA, 667 bp, Homo sapiens
tgtacactgaagcaagacatcaagactttgaaagctgggttgataatctcacaacttagaagggcccctccagactctttaattgtaaacccataggagatcttaaagctaaccagaaagatttctcctaaaaagcagatggatatctttatgtagatagcttttttaataagatcaaaaatcaagacacatttgctatcatgatactcttagttaagtttgtttatggctctacaaacaatagaaatttaaaaagcatcttttgtgtgcactcattgggtatacttatatgtagagaattttgcagccaacgtgtgaaaaaacataacatcttttataggtaaaaaatgaaaggcaggccaggcacggtggctaatgcctgtaatcccaacactttgggaggctgaggtgggcagatcatgaggtcaggagtttgagaccagcctgaccaacatagtgaaaccccatctctactaaaaatacaaaaattagtcagcgtggtggtgcactcctgtaatcccagctactcgtgggagactggggcacgagaatcgcttaaacccgggaggtggaagttgcagtgagctgaaatcgcgccactaccctccaggctgggctacagagcgagacttcgtctcaaaaaaatagaagaaaaaaaaaaaaaaac

SEQ ID NO: 134864 - DNA, 729 bp, Homo sapiens
gtgtttattatgaaaaatttcaaacatataggtaagtatagaaaatatcagacaaacccatccaacccattacccgtgataaaatgttaacattttatcatgtttgtttcagatcttttctttaatgaaacaaatcatgaaagctgcatttaaagccccttcctttcccttcctcatcattttcccatcctttctccttcagaagcaagaaatatcttaaagttggtgtgtatctttcccagtgtacatttctatgctttgactacatatacatgtgtctctaaataatatatgataatggtttgtgtgataaaaatttatatgtgatgccttacagctttttaaaaaatgttctggtgttttctttatatttaagttctttctagattttttgtgattataaacagagctgttgataaatatctttgtacatgtctccttgtatatgcaagcatttctcaagtgaatacatgtaaaattgcagttacgggggggtcacaggatatacccaggtttaacttgatgagtatttaacttggcactttggtttggagatgacaaacagtaagactgggaagtcagaacttttggatttaaatccttctcactgttgaccatctaaattatattgggcaaaaacttaaaagtctgttttctcatctgtaaaatggggctaattctagaacctaccttgtagtgaatggtgaggattaaaggagggcatagcac

SEQ ID NO: 134865 - DNA, 355 bp, Homo sapiens
ttaagttctctaagctactaagctatttcatgagtttgctataagggttaaataagaagatatatttaaatcattagctaatatatactcaataaaatgatttgtgattaatatagtgtgtgttcagtgtttgttaaacaaatgagtttatagtaagttttggaagaatgaaacagtgcacaatgaaatcgttcaatgttcttgcttaatgatgtatgatgtgaaccagaaaatgactcagtgttaagagaatagcctcttgagtcagacttctagggatcaaatccatcccttactacctgtgtgagcttaaccaagtattgaacctttctagtcctgagttttctcatctact

SEQ ID NO: 134866 - DNA, 310 bp, Homo sapiens
cgagactctgtctcaaaaaacaaacaaacaaaaaaactatatagtggggatatgtaatcaaaatagtttggaaactactatgctacagctctagtcctgagggatgttatgggaagtaaagagcctgttatagagtaagtttaagaagcacagtattctctcatcccctcatacagattcctagggcacattaacagtcctctgctttgagaaatcctgcagtaaacttgtttaaccgagcatttccctcacctatttgaacatacagcctttttaaattaacatctattaatcccctgaggcactagct

SEQ ID NO: 134867 - DNA, 710 bp, Homo sapiens
gatcaaacaaaatgttatcccaagaatttgtctgttccgctgattcttgatggtggaagtcagcttcactttttcatcaaagggaatggggtgaaatagcagtcatgtattgtctgaaaggcatttgaattttcctatccaaaacgctgagtgcatttccactacccatttctgcttctgcctgtcttattattcaaggtgagggtaaaattgggagacttgttttttcttctctatcttaatacaaacacagcagaacttattcatccttgtcactgtcatccccttccttgttttttccttggggagactaaatgcttatctgaatgctgcggctatgcttagactcagaaaggttttgcagtaccccctcttttgcagttgctttcagcgtattcttttgaaaatcctccctactaacaaatctttgtcctttgaagggtgaatttgatatttggaaattaccaaaagcctctttggagccgagtctgacatacaagtctggatgatcaggctgaggccaaagtagggtgtgaccctgtgtcctgcaggcctctagagtctacctgggagagcatgcccacgacaaaggacaccaaagcaggcacctttgccgtcaataacttggattttttttctcatttgttagataggaataaagatactggttgtgagaattaaggagacgaacgttccggtctatttgttga

SEQ ID NO: 134868 - DNA, 370 bp, Homo sapiens
cccaggccacacattctgcagtgactgtgagggctgaatgaatgcttccaggccatcaggaacaagcatagaaacacaaatcaattttaaaatacactcaaaaatgtcaaaataatccaacttttttgtcttgatcagatatatctactagcacatattacttcattttttcagccaatatttattaataacctactgtgtgcttgacagtgttctagtggcagagacacagcagtgcataatgccttgccctctgaagcagatgttgcagcaggaggagacattccaggacatgacaattaaagtggaggaatgtcaagcagaactggggaataagggatgtgaagggggtgagacttgctattttata

SEQ ID NO: 134869 - DNA, 290 bp, Homo sapiens
caccggctgagcaggctggcggcagccaggcaggctgggaatgacatttgccatgctgtgcccccggctctggcactgggcggctcctgaggcccaggaggagcgtgactctccccagcaccgtctcagcacaggtgagcagagaaaccagaccctccccctcagcctgttggagggcagaagtgaacacccctgtcccccaaatccctgtcatgcttttttgagccccaggaggggacacggcattgtcctggagccacagcattggtctgactctgactcgcattcga

SEQ ID NO: 134870 - DNA, 468 bp, Homo sapiens
agcgctattcttagtgattgcaaaacaaaggggaataaaacatagttcctgagaagctcaaagtctatcaattacagaaataaaaataccaatcatgactcagctaatgttcattgagtgctatgtgctagatactgaactacatactttgcatgcattatcttgtgtaatgatcttgacagtacattacttgacagtaatataccattattactcccattttacagatgaagaagctaaagtttatggacaaagctaaagtcagatcatttgaaaatggcagagtcagggttttgaggggggtttttgtttttgagacagggtcttgctgtgtcaccaaggctagagtccagtgacacgatctcagctcactgcaacctccacattccaggttcaagcaattctcctgcctcagcctcccaagtagctgtgactacaggtgtgtgccaccatgcctgactaattttt

SEQ ID NO: 134871 - DNA, 499 bp, Homo sapiens
ctccaagctgatccacgttgctgcaaatgacaggatttcaatcttatttatggctgaataatatcccattatatacacagcaatttttattaaggggtcatttctaaacaaggttgtaaccaagcgcttggggtgaggatgtagattggcttcagaacagtgcttgagacctaatgtgattccctccaattcttgaaagagttcttccaacaagtttgaggtttgaacacgagattgtcccatggggctacaggtgtcaaggcaggccttttaatgcagtagccaaaaatagtatatccagggctttcctcacttgcatcctcccattcatttcttcctcctgtaggtgaaaagcttgagcatacagatgggaagaaatgaatgggaggatatcagtgagtaaaggcgcggatatactattctcggaaacaggatgggtatgggtgaggagatacaaggtgtcagctaatgacaggtagtgtttaaagttcgcgctggt

SEQ ID NO: 134872 - DNA, 110 bp, Homo sapiens
ggggaacctgaccttctccagcagtggggaacctgaccttctccagcaggggggaacctgaccttctccaggaaggaggaacctcaccctctccaggacgggggaacctg

SEQ ID NO: 134873 - DNA, 552 bp, Homo sapiens
agacaggagttggtcttgactgggctcactctcagtatgtggcaagcgctcatgctttatgagtttttaagattaggaagatgattagggactgaatacagagagatcagggatcttccccaggaacatataatttaatatggatcaatttgaaattcgacattatgtgctggtcttgaatgtataaatttggattatgtttttcacctttctattgtttagaatgatgaaaagttacatttacggatgaatggtaaatatgatcatagtgaagatgatcattcaccagcagaagttgttgagaattataaactctgagaaccaagaaatacttacaagatttttacaacctaaaatgttcaaatatgagcacttattaagtcagacatattcattatatggagctattctgtagcctataaaatatttactaaattattgatgacaaggaaaatgtttatgatatagtactctgatctaatggtgaatctggagcttcaataaattctttaattttatacaaatcttattttataaggttttacagaaaaa

SEQ ID NO: 134874 - DNA, 180 bp, Homo sapiens
agaatccagcatactggaagaacaacgaaaaagatgaaataatcttttagctgggaaaaatatgttgttttgaatattttgagtatattttaacttcaacgataagcttaattccaatttcaggatattatttaaggaaaagcttagaagtgtactccacaaagaattaagaaacacaag

SEQ ID NO: 134875 - DNA, 342 bp, Homo sapiens
gactacaggcacatgctaccatgcccagctaacttttgtgttttttgtagagatggaggtcttaccatgttgtccaggctggtctcgaactcctgggctcaacccatccacccaccttgacgtcccaaagtgctgggattacaggtgtaagccactatgcccaggggcaggctttttgttttagtgctttgaatatgccctctcattttttttctggcctataagatttctgctgaaaagtctgccattgctcttttcttactgattttagaattctttcactttgactttcgacaatctgattataatatgctgtggtgaagtcctttgtgcagtgtattt

SEQ ID NO: 134876 - DNA, 427 bp, Homo sapiens
acggggtttcaccatgttggtcaggctggccttgaactctgaactcaagtgatctgcccacctcggcctcccaaagtgctgggattacaagcatgagctaccgttcccagccagagacaatacatttttgttgtttaagccacccagtttgaggtactgaactacagcaggcttaggaaactaacacaacctttaatcgcttatgattgacattttgatctttctgagatgtcagcaaaagtttgtgtagtcccatacttggacttttatctatgttagttttgggcaggcacttctgaattttagcctcttttgcaacctggatgggctgagaattttccaaattatcaagtcctgattccttttttttttttttttttttgagacagagtcttgctttgttgtccaagctagagtgcagtggtgc

SEQ ID NO: 134877 - DNA, 617 bp, Homo sapiens
acatacatgcatttttaatacttaaaatcgcatacacactccctggttgccggtcccttttccctctattattgtggacatgtttccatatcatttcatatagatcaaccttattctttctcatggctacataattccatagtatgcatttgtaatatctttaaccagattggtagacacttacttatattgttgccttttacatacatccgtgtatccttgtggggagtatactggtagggtaaatttctggaagtgaaattgctggatcaaagaatcaacacattttaaattgataggttcaaactatcctccagaaaagattatggcaatttatgtttccaaaaacagtgtgaaatatcttcttagagattattagtcttaaatatttgctagcccaagagttaattttgattaactcttgattttatattttcttagttatgacaggtttaacatttattttctatatggaaagcaatattattttgataagcaaatcaattttttaaactgtttgtttgtttgtttttttggagacagagtaagcttgcactccagcctggtgattgagcgagtctccagtctcaaaaaacgacccacaacacacaccacca

SEQ ID NO: 134878 - DNA, 225 bp, Homo sapiens
ttccgcttccaccccgaacacttcctggatgcccagggccactttgtgaagctggaggccttcctgcctttctcagcaggccgccgtgcatgcctcggggagcccctggcccgcatagagctcttcctcttcttcacctccctgctgcagcacttcagcttctcggtgcccaccggacagccccggcccagccactctcgtgtcgtcggctttctggtgacgcca

SEQ ID NO: 134879 - DNA, 928 bp, Homo sapiens
aacgttacttaatttcattgtgtgttttgatactttttaaaaacaactgggttggggcgagtaagtatttgtccaaaaaaattatgtatatagttttgcattatcagaggaatgaaagcttgtttttcaaagtctccacaaactggtgacttacagccttgttttgaccacgtaaagtacaccctctccttaataactttctcattctgatggatatcctccttatcaccacccttgttccaccagttgatgacttgcctttcactgctcttcattgtaaatcactgatttagaatatttctttttcctcctgtatactgagtcatcaatatttattagtccttgttgtaagagcgtatatttgtttgaaacagcagtttgaaagtgtttaaatatgtaaagtgtttattttatctgatgcactgatgttaagatccctgaaaaacagaacgtcttagcggatttttcttctcagtaatttttataaaatcagattattttagttgacaaagatgatgagtacattaaaatataccagtaacattaagcaataggtttgctctgtgtgtcagcacagggttatttaagttgtatgtcataccaggtgcattcacatacctaagaaatagtaccaccagcagtgtgtgatgtgaaagctcacaaagggcttaataaataacagtgcctatgtagtactatatatatagacctaaagattggccacgttaactctgtggcaaaacccattttatttcattttacaaagattttttgaggtctgcatgaaaagttgttctccatagcaatagcagttggtcattgttctcctctcattgtttagacatagcttttaaaattgaatatatttcttaaataatttatagatgtattcaacctcataaaactaatttttaaaattagcaccaaa

SEQ ID NO: 134880 - DNA, 240 bp, Homo sapiens
atctgcacacaagccaaggagagcggcccgggacaccttccccacagccctcagaaggagccaattactgcttgggagtctgaatgtagaatgaaagaaagagagagtagatgcgggagaggcctgaagctgcaccacggcgagagacacacagtcacgactaaatccgagggacagagaagagcgggagggtgccgttgtgacagaacttggagtatcggggttgtgatgtcgtgtcga

SEQ ID NO: 134881 - DNA, 120 bp, Homo sapiens
atgaccaaatttaggaggaaaggaattagacagaaggcaagatgactcaaaatctcttaaaggaataagcagaagtgcctgaagcaaagctaatgatcaaagaataggactagaaaggga

SEQ ID NO: 134882 - DNA, 362 bp, Homo sapiens
cagctggaaatcacccatttaggttacataggtctgaaaggttcatatctcataaatgaataacttcagattttaaaaaattacaaaaacaaatctggctatttcagaacaaggtcccctttaccatttataaatcttatcagtctttcttctcactctccaaaactgaattttcaagctaaagctagaattgtccccttcataaagcaaatacttgttaagtatagctgggggcgggggttgtttttgtttgtttgtttgtttgagacagggtctggccctgttgccaaggctggaggctggaggctggagtgcaatggtggagtcatagcacgctgcagcttcaacctcttgggcacaag

SEQ ID NO: 134883 - DNA, 203 bp, Homo sapiens
atccaatcaggataaaattacgcagtcatgtaagaaataatatctattaggctaatttaatcaccgaatactttacagatgaattagaatttagaatccaattatttcttacattcggactgtcagagctggtatctctaagcaggaggaggggggaaaagggcagtaggaaaaggaagattagggcaaaaaggaagatcagg

SEQ ID NO: 134884 - DNA, 326 bp, Homo sapiens
tattttagacagagctcaaggagccaggtatcttaccatatgtgctagtgaataaaatgaaaagaatacttctcttcatggaacatggagtgagcctgaggagtgagaagattaagcgaataattttacaatttccttcaagtagtttgagatggcgggtctagctcttattgcccaggctggagtagctcttattgcccaggtggagtagctcttattgcccaggctggagtagctcttattgcccaggctggagtagctcttattgcccaggctggagtagctcttattgcccaggtggagtagctcttattgcccaggctgga

SEQ ID NO: 134885 - DNA, 432 bp, Homo sapiens
ctcctgacctcaagtgatctgcccgcctcagccttccaaagtactgggattacaagtgtgtgccaccatgcctggccccaaggcttaactcttgattggaaaatatgatagagttgccagataaaatatatttaggatattttcacattaaaatgttatttattatttttctgaaattcaaattttactcgtcctcttgtatttttatattctatttgtttgctaaatctggaaacctaaaaagtggactcttttttctttaaccacacaaactaggactgtgaccaaagagagatactgaaaccagaacgttcttctgcaattgatattcacaactaactgactaaacattctggtcgaggatgagcagtgatttggtatctagtacagatgtgtatggtgtgatgccaaccagcccctggccagtctctg

SEQ ID NO: 134886 - DNA, 210 bp, Homo sapiens
aaaaactgttcatctgtgaacttttccagatgtgcaattttaaagctaatgtcacttgttttccaaattagaagctgttagcaaaatatgtcactatatcattctgctgcctagtttatgaattggaagacactgaaaagatactataaggttaccatgtccggtaaaaaattcagacgacattgaaagagagaagattccacttgacag

SEQ ID NO: 134887 - DNA, 921 bp, Homo sapiens
gggttttaggaccactcgaaaaacgagagtgtgctgcaagcatgaggcttctccctctcccatctcagccttggctgccatagctaaggaggagggtgttattttgcttttgtggacattcaccctgggaaataaggtatccgcccccaaatcggtgaacggcgccctgaaccccgcctctgttgcgtttgttgcgaccgtcccagtcgacttgctacttgtcggcagatcgcccattctctgaagagaccttggcaactgtggactattctgtgaccgcgcagtacgacgcaggactactccacagagaacacgttctaacaccgaagccgtgcggcgccactgatgtaccgacaccatcatcccatcaccagggcaggcaccatggcagaaatcccacaggctccccagacgaagggactcgccgcagcgcgtagagcaagccgggccttattgacacatacgatgagaccaatccacaggccatgcccgcgacaaagcaacgatacacatgcccgctcttgcaaccactacccacgatcctgcaccacggacctcacacgcaacaccatgccaaccactcctaaaccacctctcgccaccgcaccctcaacaccgacaccgccctcaccccacgccgacccagcaccacccccgccgacatgccggggcaacagagacccgacgacacctcccgcaccgctggacagcagtacaccgccccacgtgtgcccccaaccgacaccgccccccccattcgctggcgacgacccactgagtgccatcactcggcactacgaccagacaccgtgtgcaccacggcttgccacgcctgaaccaacacagcattggcaactcatacatcacactggcagaccccattcacgccgccttgccgcaccacacgcccccgctctctct

SEQ ID NO: 134888 - DNA, 222 bp, Homo sapiens
ctgaaaacattcagaaaatgtttgggggcctgagggaagatgagcaccatggttactgaagatgcacatacctggagaaggcacattcttgtgaccggttgccccaggtcacaggcatccaggcctaaggctgcccctccaaccaggaagtacctgtggagtgccagagtggagcctggatggctgtggaggagaagcccaggtgcacacattgcccagatg

SEQ ID NO: 134889 - DNA, 776 bp, Homo sapiens
gcaaaaatggaaaaagatgtaccatgcaaacactgtattagttcgttttcatgctactatgaagaaatacccaagactggataagttataaaggaaagaggtataattgactcacagttcagcatggctggggaggcctcaggaaacttataatcatggcggaagaggaagcaaatacgtccttcttcacatggcagcaggagagagaagtgccaagcgaagggggggaaggcccctcacaaaaccgtaagatctcatgagaactcatttgctatcatgagaacaccatggggaactgccgccatgatctaatcacctgccacgaggtccctcccccaacacatgggaattacaatttgaattacaattcaagatgagatttgggtgggaacacagagccaaaccatatcaaacaccaatcataagatattcagtgtgtctatagtaatctcaaagtaattatcttgataaggaataatatcaacattaaagaggtcttttaataaggatgaaaggattccacctaataacagattttcaaactacatgcattaaaactgacagaactaagggataaataaacaaatccaaaattatagatggaaattttaacatgccactatgagtaattgatgagacaagtagacaaatgcatgtaaatctaacaattaattccagagtacacactcttttcaataggacaggaaattcaccaaaatagtctatgttctgggctataaaacaagtctcaataaatttcaaaagactgaaatcat

SEQ ID NO: 134890 - DNA, 564 bp, Homo sapiens
tactggggaagtgtcttccccttgtttctcactctgcctcctcctctgtgttattatgggcttgaggggcaggggtagctattgctcatgacttttactacaagataaccagacttcctaagccctccatattgggaccaatttctgctgaatgccaggtgatgagaggtttcagcccctggcgtgggtggatgacgtcagaccagggcagcagaggactctcattccacaagctccctcaggactgagcacttgctccgggtctcctgaagccccatgtccatctccttgtctgccctgccagtctagcagacttgggctgagaaccagacctttgcccttggcccagcctcgccttccccactgggtctctagatttctagattccccatagggtatgccagcaaggagaggatatgagggcccaagaaaactcaggaaagtttctatcaccaagggcagaacacgaacatcttgaggctaaaggagctgcatggttgctaccaacaaaggagaccgacggtgtgcagttgattcccatgtttttactgcacttcaccccca

SEQ ID NO: 134891 - DNA, 164 bp, Homo sapiens
tctttgattaataatcttcacctttcaataatttctcaaacttaaagattctcatttgcttgcaagctgtgtaatattcataaatgaaattgtagaattctttcaatacccaatgctttttttttcaactctaatgatgactagctttgacatctttgtttttg

SEQ ID NO: 134892 - DNA, 255 bp, Homo sapiens
caggtaaaaggaacagcttgaacaaaggtacgtagtgaaacggcaagtggtcttgagtggtggggacacagtcatccttgaggaagtaccaggaaaaagaatgataaagagaggccagtttgtgaaaaacacccaaaaccaaggctaggagtctggtcttgaaccaggaatgaaatccttagacctgtgctgtccagttggtagccaccaggtacatgtcagccactcagcactggaaatgtggctagtctaaat

SEQ ID NO: 134893 - DNA, 436 bp, Homo sapiens
ccacactggcttctcttcctcctcctcccactgaagccaggcctccgcctggaactagacaccctcacctccttcctcttcagggacctcactccatcaatcacccctgtatcctgcatccccagcttctctgttgaataattcttcttagcatgtcccattctctcctatctttaacacatccctcttctccctcagccactcctgtcttccccctgcagtcccaggcttcttccaggagtcatcacacacttctctactcctcagttgactttccctccttacctgctcctgccttgcccatgaaaggctgaaaacctccatgtcaccagcactaatcctcggtctccagcttccttgaggctcagtggcatctgaccaagctgtccccaccatgcctggatggtcttcccttggcttccagggtggcacatga

SEQ ID NO: 134894 - DNA, 481 bp, Homo sapiens
aaatgtgttgccagtctcagaggaaactgtaaaataagtggagttttcgttgtcctggctttcttttctgcttctttttattgatttttaaattagcctaccccaatatcttccagggaatttttaaaaagttatctttctctctttcttgaggttcctcatatactctcactcacacgcacattttcacgagagcgaagtctacctttaactgaaatgaatgactgctgaatggtcaggaactccaagtccacatggaattcttgctcttcggtcccagactctcccttctgtgtcccccttaggcaggtgagcattctgtagtttgtagccacagctccacctggtttgggttttcttcctgtcattgccttattccagttaatcattacctagactagttgctaagctgaaaattcatgttgtggaatttcatattggataacatagttacttttcttgttttttaaacaatgctttc

SEQ ID NO: 134895 - DNA, 215 bp, Homo sapiens
accaagtcgtatactcttagttttagtgtcttcttatgaaataagggagcaataataccaaccccacagggatattttggagaccaggtgaaataaggtagtagaaatcatgtgtccactagaatgctaagcatacggtaagtcttctgcacatgttttctggtggtatgttgtgtataaaagaggattacaggattatacttggtgtgttataa

SEQ ID NO: 134896 - DNA, 197 bp, Homo sapiens
tgagactgacttgccctgaggtttgtgtgagcgaaatcgggtcttatgcaacagtgagtgcgtgcatctccgcttcgagctgttacatcagaaagctaaacacagagagcccttgcaactggagaactagcaggaggccctcgctctggttctttgtcagcgggtgggacggggtaggatgtggcttacaggcagct

SEQ ID NO: 134897 - DNA, 403 bp, Homo sapiens
tctagaggatcccggcgtctccttagtctaacaaaggtgatttttagcaacactatttagactagcaaatagtgggaacagcctacttaccaacaattggggaatggttaggcaagtcatggtacatttgactcactgcaattttatatagacattaaaaatgaaaaatacaaagaaaatgtactgatacaaaatactcatataaaagtgtttataaaatatgtggaaaatatagttctgagttgttcatacgattgattacaaacgtgttatatacaattgattacaaattactgtgaactcagatgaataaacgtagagatgcagataactgtggagccagtgtgatgagggttttatgcatttttctctaaagtttgtctgtttacattaagccagaggg

SEQ ID NO: 134898 - DNA, 262 bp, Homo sapiens
tctagaggatcccggcgtctccttagtctaacaaaggtgatttttagcaacactatttagactagcaaatagtgggaacagcctacttaccaacaattggggaatggttaggcaagtcatggtacatttgactcactgcaattttatatagacattaaaaatgaaaaatacaaagaacacatgcttcaaaaggcaaaaagcagaactaaaaatggtctaacaaagatcacatgcttctgagggaacaagacaaagggaaaca

SEQ ID NO: 134899 - DNA, 729 bp, Homo sapiens
gagaaggtgaggccgagactgagaaaggtaagagcataagcctcaaagacttctgggaaaggggcacaccagaaccaattgaggcagagagccctgcggtaaggtgatgctggaatggtcaagggtcaagagcccactggggctggagcagcgtgccagaggagagccagtgggcagcagagtcagagaggacaggtgccagactacgaaggctagggacctgccagaactcaggctaactgtgatgttgagcacaggagtggcaggttctgacttggccttctcgaagggatcctctggccactgtgttagaaaggaagggtgggttggggacaccagtgaggagtgactgcagctgtccaggtgagaagcactggctccatgagatgagaagtccaaacaaaaaatgaagcagcctgaccatctcagaaactctgacacccctgcgtgactcatgtatctcatctacacaagttccctgatttgaagatacacgtttctcctactttcacaatttctataattgtgacatgtcttcgaattgctgccaaaactgaaaattgctgtttcaggatctggcagtggattacctacgtgtgtttattttgcagaaatacactgagttgtacttttacgatctgtgcacatagctgtatgtgttgtatttccacacacatgtaaggacaccggggcctaggaaggcagccagttgccaggcagcggactccg

SEQ ID NO: 134900 - DNA, 375 bp, Homo sapiens
ttgacccggccactctagtcatgtgcatatccacataaagtatagaattggctgttaatttctacagaaaagcctgatgtaatatgctatatcaatcatatttctaagaaaatccctcacttcctccaatttgatagccttaacctcattcctttaattttcagtttttcacttctagtcttctgagagttagcctaatgaataattttcatcttattctagttactccttgattttccaatgccatgattaaatcagctcaacttcattcccagagtcagactgttccgagcacatgccttttttgtttgtttgatcgttctgagatcgagtctccctctgtcgcccagactggaggatcgcttgagcacaatc

SEQ ID NO: 134901 - DNA, 781 bp, Homo sapiens
accattacagattgtgttgatgctggattgaaagtaaaattaaatgttcagaaaacctaaagtaacatagtgccatacaaggacatgtctaaacaacaaactagcaaaaccatattgatggcatgtattagtatctgaatatccctatcatgtgagtagaaatagtctaaacttatagactcaaggaaattttaaatttaaaatagtccctttttgaaggcatagtataaaacctactttggcagcccctaaggcgaagataagtggaaaggaaaaatcaaaccataccacactgggaggagattattattatcgaacacaagaaaagaaagagatatatcctctctatgtgcttggaattgttccactgaatctttcaatttgttaatacatttaaatcaagaattttcatatttttttctggagaattataataaatattttaatagttcaaatgtttcaggctttcaaatataaatcagatagttagaaataaaaggaaaatagacaaggaaaaagtcttcctccatggtggtttactaaaacatcagtgataaaattgcagtgttattacagatagcaacagtctttaagagataaaattatgctgagataaattgtagcacttttgctgataagaatcatgcaacagagaggaagattaaagatgcaggagaatatctaaaggaatatccttaagtaagtaagtgaagatcaaagagaaggaatttgtcttatgaacagtgagggttcattgatactagaaagaagtaagagttgt

SEQ ID NO: 134902 - DNA, 755 bp, Homo sapiens
acagactcaggtgggcgggaacttcaaggtcaaatccccgagccctcggagggggactcaggaaatcagttgctcagtggggggcagagtttggagccttggggcaggagccgtgtccagcagaggggctgctgcccgccatggctggccttgccattggctttggccccggccccggggaagtgcaaggcgcaggagagacaccacaaggcccttgggtgtccttcctgcaccttccttcggtggcaggcgggtgacgcatctatgtcactgcatccacgtaagatgctctgttagaaaaaaaacaagaaggaggccgggcgtggtggctcacgcctgtaatcccagcactgtgggaggccgaggctggcggatcacaaggtcaggagattgagaccatctggctaacacggagaaaccccgtctctactaaaaatacaaaccaaaaaaaaattagcagggcatggtggcgggtgcctgcagtcccagctactcaggaggctgaggcaggagaatggtgtgaacccgggaggcggagcttgtagtgagccgagatcgtgccactgcactccagcctggatgacagagcaagactccgtctcaaaaaaaaaattatgaatccaaattagatatgaaaataaatatttgaagtgataaaaaaacacacaaagctcacacatgaaaaagctgataggtgcactaaacgtcatcaaatggaagcaaaaaacaagatttgattagttactccctggcac

SEQ ID NO: 134903 - DNA, 724 bp, Homo sapiens
gatattttcatatggcagaatttttcaagattattcttgttttgtttcagtacctagtatgagccgggtacttcagtaagtaagtagttcagcatgagttcaggaagtagctcagtaagtaaggggtaaagcaaagttcagattatgaagaccttaagctggttctggcctgagggtctttgtacacattatctggaacactctgtcagacatattactgacttccttcagattttacatcaaatgtcatctgagttctcttaactcctcctaaaataatccgaccctttcgtgcattttcccggttaccctgccatagcgatcccatttgttttataacagttgttttgaaatttcctttatcatttgggctgtttcccatgggatccttacctccacacttcccacctactgctgcccccttgtcaaaaaagactacaagttgagtaaggatcaggaccttgtattattcagcagtatatcctggagcctacctggctaataatagaaagcactcaataaaatattgaattaccaaacatgttaataccctttgacttggcagtgccaattgtgagcatttctcctggggaaataaaatggacaaactgcaatgccaacaacatggaattagctgtaaatttttaaatatccataaaagtgaatactataacataattatatagatgaatatttattagccaagatacacttttgttctgct

SEQ ID NO: 134904 - DNA, 264 bp, Homo sapiens
ggtcaattgatcctgatgctcacgggctcagactgggcttcagagtcctctcaacgccgcactccaggtagcccagccacttgcttagaggtggagcctggatcagatccacttgctctccccgccttctgggactgatgctcagaccaggcctcagcccgcgcagtcctctctgctctggggcagtggagagtgggggctgctgtggctaagccagagcggcctggaagccttctctccagggcctcacacggtgccatccat

SEQ ID NO: 134905 - DNA, 133 bp, Homo sapiens
gaggggcgttgtgtgagtatcatcttcatgagggctggtgggggaacatcagctttaaggtgcctgggatctaaggcatggaacccagcagtgcagaggaacgtaggggatgtagcctcgggagcagagatgt

SEQ ID NO: 134906 - DNA, 275 bp, Homo sapiens
cgaaattacaagtgccctagttagagccagtgtgccacagcctgggggagctcatcctgagcagaggaagctgtacctgcagcccagtctcaggccagcttcagatatggttcagaagctgttagaagatcacagcctgagaacctctgttctctttaatcctgaaaaatgaaaatctgagcagttcaggctttggccaggtttcctctgttatccaggaagatgccacatctgacggcccataggagtatggagttatgtcgatggtagaattg

SEQ ID NO: 134907 - DNA, 474 bp, Homo sapiens
gggtttcaccatgttggtaaggatggtcttgatctcctgaccttgtgatctgaccaccttggcctcccaaaatgctggaattacaggtgtgagccaccacgcccggcctgggagctttatttttaagtaaacacttatgtacctactatgtgctagtcactgttatggcattttaataacattaaccccttcagttctcagaacagcccccctgaagttggtggtattattattattgttgttattattattttgcaagtaaggaaatttggtcagggaaaggtttggtgcagtggggccaggattccaatgcaggcaactgtagtgtacggtgccgcatctcttagtctcctgagaatagctgctatttcagtgtttctctgaagataaatgaggcaatctgtgtggacactacataatacctatgcaatacaggttagctagtgctttctctttatttctttctaaaaaaaa

SEQ ID NO: 134908 - DNA, 703 bp, Homo sapiens
agtgtatgtgagaacacaattgcattgggagaacatcgtttttgtctcaaaaggaagattataaactttaattagatgtttggggatctttaaagtgctttaagtcaccaaagttatgtatcaactttaaaaaatcaaccaagggaatactcacattgtcacttaagtcctcaagtcaaactttttcaccttgaatctgtaatttaagaagattcaaagttagacatattggatgttatttctgttctgtttgatacaacaggaaaaggaaaatgaatttatgttgattgattttcaaagagattagttctatggatatgctctaagaaaaacatggaatttttaaaaacacattattgtcaataataaaaacattgttaactaataaacaaggcattttctaatctcctccataaggtgacagctgcttttgtagccaaggcagtgaaattaaacctggaatataatgctactctacacattggggggcggggaaagaagcataaactggatcaaatgatgttttacacttcagacaatatggaataaaaataattgaagtcattttttttctaactattgcaacttacagaaatctgtgcccttaaaaagcagaatgcactgtagattttgaatcaccatttaccaaacagttgattttgccattataataaacccttttaaggagctttaattctaggtt

SEQ ID NO: 134909 - DNA, 717 bp, Homo sapiens
ggtgttaaaattggtgtttcacacgtatctatcatgtggaaggttttatagtggaaattatagtacacattccttgatactgaaaaataaaaactgaaaatattttgtgttatactatttaatagttttggacacattttaataaaattctaaacaaaggatagttacaattgtggaactcttcaaattctgaaaatcttatctgattaagaattagatatgaaatcatgtcatctcctgcttcaatcctttggcttactgtgcctacaggataaagtctgaatgccttcatggaacgtacatggccatcagggatttggttccttcctgcctctccagactcatttctcaacacactctgccttgaacttttttctttctgtggcactgaactggagtttttgtatagctatcacattctttcttaccttggtagctgtttttctatctcaagtcctttctgccttttttgtaagttcgtttctctgctggactcttaatacaattttaattctgaaactccattctaatccaagctaggatagtttcccctttctcctgttttccttgtagcttgtgtaaacctattttgttgccttaatcacattattatagtatttccctgtttgtcacttttttgagtcccttggcagcagataaaagcaccagtagtttcctaatttgtaaagagcatctcaaagaaatatggagagagag

SEQ ID NO: 134910 - DNA, 192 bp, Homo sapiens
tctttgaaatatcatgcacattttacacctgcaatccatcacaatttagaccagccacatttcaaatgctcagcagccacatgtgcttagtgactactctgtcaacaggcagatctaccctctatgttctaataacttgtctctaattctcagtccctctctcaattatatggtctctctgctccccagcag

SEQ ID NO: 134911 - DNA, 218 bp, Homo sapiens
tgcaagagatgggaacaggtaccagcactttgcgtccattcccagggctatgtgggaccatttccaacacaggggtcatcacctcaattgagtccctggtagaaagagtgctatgccagactcagcttcccttctggcatggttaccacctgctccctccaacacagcctcaccttgctaagaaaatgcagcccagggagagaggaagaacacataaa

SEQ ID NO: 134912 - DNA, 378 bp, Homo sapiens
ctggcagaagagctactccagccttgtgtcataagagctactcaagcctgggccataatgatgctactccagcctgggtcatatggagctcaaaagaaaccaaaatgtaagctacatatgtaatttaaatttttccggtagccattttaagggattttttttttttgtaacagggtcttactctgtcactgaagctagagtgcagtggcatgatcacagatcactgcagccttgacctcccaggctcaagcgatcctcccacctcggcctcccaagtagcaaggactacagatgtgcaccaccatgcccagctaatttttattttattttttgtagagatgaggtctcttgctctgttgtccaggctggtctcaaacg

SEQ ID NO: 134913 - DNA, 395 bp, Homo sapiens
agtccgttcgactgagcctcccacagtgctgggattacaggcgtgagccaccgtgcccagccccattaccaagttgtaagcattgctaggcacctgctgtccaaggcagattcagggacgcagtgtctgtggtctctgggatgggaataccacattccagtgccctctgaacactccttagaagagtgaaagattggaaatgacccaaggagccaacaggcagaccagggttagtcaaagttaccgcttcgtgaccacccccttgacgccctttaatttcattactgctctttgaagtaagtactgttatcaccccgtcttaacagctgaagaaactgaggcttagagaaacgaagtcacttgcccaggggcatacagctcagtcgaacggactg

SEQ ID NO: 134914 - DNA, 269 bp, Homo sapiens
ctggagagaaatgcaggtgagtaacatgaggctgtcacacgatggtcccttggagttacacttagccgccagggtcaggagagaaaaccaagtggtgcagtggcttccattttccctggtgtgtctggggccagcagcacacacactgccctcagctttagaccctttgaatgagggggccttttggggattcagccattagttcagcaaatactgttggcatgctctacccaagaaggtgctcagacagggcgaggtcagctggcagg

SEQ ID NO: 134915 - DNA, 332 bp, Homo sapiens
ttgtatctagtcttggatttttttcaccatagtatccccagctttggttatggtgagttgctttcttcattgaaattcttttgcacctttttcaaaaatcaaatagccatattttttgtgactgtatttctggattctccattatattctcttgatttgtgtgcctgtttcttcatcagtaccacactgtcttgattattaatagctttatagtaaatcttaaaatcaggcagtgtgattcttccaacctcattcttttccaaaattgttttagctagtctggttccttgacccttccatgtaaattgtagcatcagctcatctgtatccac

SEQ ID NO: 134916 - DNA, 415 bp, Homo sapiens
tgggccctggaaaatatatacttatcttatatgtgcttcaaaagggcacacccagaagcagctctgaaaatggagatggtcatggttgcacaacagtgtgaatgtacctcgtgccactaaactctaaaaatgactaacatagcaaacattgttatatacatttttcccacaataaaaattaaattaacaaaaataagagatacgcccctacactctgctacatatgttaagtgttttgttcacagaaaaggtctggagggatataggccatagatcagataagacattctgtatggcttttattttcttctttgtgtctgtctacttgtgtctacttgtattttctaattttctcatagtgcacatgtgttgtttttagattttttttttttttttgagacagggtcttactctg

SEQ ID NO: 134917 - DNA, 497 bp, Homo sapiens
acacagatttaccagaaaaggcagcttcagttgaacacagcggtttctttaaatcacacagcagtttccttcccaagagaagcagggaccgtgtaccaagattccgcccgttaccctgagtgcagcaccggcctctcctgaagccgtctttgatttgaggtcccagaaatgtgaccgataataggaatcaggagcgtatgagagttcacaaggggaaaaaaaaaaggtgatttataaattattatttgtttcacataaaaagtggtagtacggcagctttattcattctgcggtgaggccacttagagacagtgggaactcggaggggccacggaagaggcgggaatgagcagcagttgcgaccctgcttgcagtgcaaaggcacgtggggcggcagcagtgacggaggaacgagagacaccagaacggaatcttgttcagagaaatccagacagcaactcctccgacatcagccctgagtccttcctgaactcaga

SEQ ID NO: 134918 - DNA, 297 bp, Homo sapiens
ggttgtaggactgaggtccccatttccttgctgactgttgtaccctcaacgcctggaggcctttttctggtcctggcaagtggtcacctccaccttcaaagccagtgtggcacattgaatttttctcatgcttcagaactgtcttgacttcttctgcaactagctggagaaagctcctggcgtctgagggctcctgtgatgggatcaggcctgaataacctccccatcttcaggtcagctgtgtcatattaacgtgatgcagtcacagaggtgacagctcatcatattcacagcttt

SEQ ID NO: 134919 - DNA, 102 bp, Homo sapiens
ctcatctctccagttcatcccttgcttctaccagtctgtccttgctatggtaaaacgggcatttgagaaaggcaattacacggttacccctcccctgctcag

SEQ ID NO: 134920 - DNA, 515 bp, Homo sapiens
gtcactttaccagggtatctcacaaccaacctacaattcagcatgcagacttagcccactctttgatggcaccattttaaaaggtggcttccattgacttcagaggagaaattacacatgccttttctactcagagtcagttggcagaacacatcacattgagccaactaattgcaaaagtgcttggaagagtaacttctttttactcaataaagagagatttgaccatgagtgtgcacagaaatagtttgcatagcacttgcctgtattcatattatatttccttagtctaaacattctctcatgacaagtattctatactttcttctttctcctcaactatctgacaaatacttcttaattcttactttcaactatgtttttctttctacagaacataggatcaacttaaaaactccacaaaagcccacagtcacatctccatttatgtgtgcttgtataaataattaccttcatatttgttgccataattgaaacttttattcttgtatata

SEQ ID NO: 134921 - DNA, 748 bp, Homo sapiens
ggctatgtgatgtgcttctaataacaatgtctgatggattatcttggattctaaccaatcagattagctctttctcctcccttggtggtatctagaagagcatgagcattcttcctcttacaatggcaattatagacttggggacttaaggagtctaaaaggacctcccaagatgaatctattcttattatttatcagattgatatatatctgactttgataagaagctgaagacatgttgtttaaagaatggacaatccattctttcctttgcttatgtttggttttttaagttctaagtctgcaggcatggtgatatacagatatgatgatgattatatggttaaaacaaaacctaaaacaaaatcccctatatcctcacctgtattcagatgtggagcatgatcttacttccaagttgaaggaaaaaaaaaaatcacaaaagagtatgggattgagaaagaattttgtttctagctgctctctccagcctgtttatattatgatgtctattgtgaggctgccaatgttgtcaccaagagtcacgttctattagttaaattataaggtgcagaatgagaaagcttttgaaaactatgatcaatgttgaattccttataaacaaccaacttttggcctcccctttattacttccaagtgagagtgcattaaaaatatgttaatatctagctgcaaactcaggagtaattgcccagccagacttttgagattaattataagtccagag

SEQ ID NO: 134922 - DNA, 665 bp, Homo sapiens
tattcttagcctgaaaataactgcatggctgcaaataacctggttgtagctgctatgaacagatgttggatgagagctggaaagagccaatggactattcattttttcttttaagtctatactaaaactgagaacagcatccattttggaatagttgttataccatacttgagttttataatcttgctttttttgtgtaggaacttgaggtgtttttaacaatttttttaatcaacaattttttttttcaggtctgggttcaaattttaattgatgaatgttaattcttatgaatgatgctaatgtttttcataaatattttgccttctgtacagttcagaattggaagacatccatcctgatggagtctgttatggtagaggtaggaagttacagtgagtgagccagagaattgcatcaggtgacatcgcttatatttggaaaaatactcattttatacttatcccagtgagtgcaatgttatttttcagtgtttgggaagaacttatttgaagttaatcttaaaacttaaatttttcatattgtttattggtgacacattctaggttttatcaagcacattgcttaaatttatgatatgtaattttgcttttaggtacatcaaaagtgtaaaaattgaataaaagagtcattccccaaataaa

SEQ ID NO: 134923 - DNA, 933 bp, Homo sapiens
tgcaggtcatctggaattctttccgggtctcaggctcgtgaggtgctcattgtgtatgtgtcatgggagctggagaatggctgtaggtgcaaatggacttggaaaagaacaatgtcaaagtcgtaagtccagcctggggcatggcaggtttatgtatgtgtgagtggcgggaggggctgtagatttgaactccctgaaagaagatatgtgtaattcttaccaaagagtaaatgcatatgtttatgaaagaaagttcattgctatcatctggctctccaaggcacctgtgaccccaaaagattaagaacatctctcataagatattatcatccgttctacaaacctttcataaaaatgacctcaaacttgagctcctttttaattcagacaaactaggccataagccctgttgaggaaagaaccgtatctgtatggagagtcactgttacatcccaaggacacagcctggtacctgacacacagctggcattgagtacgtacaatgtgtgcctgatataaggcagctctgttctcccaataaggagggctgctaaaaaaaaattaaaaagcttattttcatatgtaaactttgtaggataatgttgaatagattattttagcgatacattttcaatcacatgctaataacaatacattaacttaaatactgctttcccccaactctcccagtttaggaaacattgtaactgttcactcccatctctgacatcagtgtccttcttgtcaccagaaccctttctgcatcagctcttcatgttctgtgggcatcatagtccctgtggtctaaagagagttagctgtttcaaattgatccaaaaggagaattgcttgaacccgggaggcaaaggttgcagtgagccgagatcacaccagtgcattccagcctgggggacagagaaagtctccgtctca

SEQ ID NO: 134924 - DNA, 400 bp, Homo sapiens
tactttcacagggaggaaacactttgttaatcccagagtagtttaggagatttcaaagtttactttaaaaatctttaatatctataccctgatggatactgggaagatgtcacaaagtttgtgagaaccattttatgaagagttaggaggtatctaatataaacatctttttataaaaatctatcagacaaatagacttttagctgtgcacttgaaatacacacttttctcaaatgactattctggtttgattactatgcttatcttaccaacatgggacatttggaagaaaggagaggaagtatcataatttagaaaggcagttacaggagtggctgaatgaactcaagactagaggctgcagatcccaagttcaaatattgcctgtgatgtgaagtaa

SEQ ID NO: 134925 - DNA, 708 bp, Homo sapiens
atatgtagtagtagtagatcagcttctcactttttttctgaatttgttcttgatagatcttatccagtctaaggttattaaaaaccctaatggaccttccatttattcatcattccttattatgtattgactccatatcagacactgtgctaggcacatggggatacaaaactaaggaatgtccttgcagaacttacaatctaatttgttggctttctaacagtcttaccagattcttcttcccttcttgcctatttctttccacatcactgtcttctccctttcctctcatctgcgctatctttttccatgatgctgacttcagtcctggttaaagacctaacaggacaaccccaggcctgactttcctgaccatagcccttgagggagtgatgaagcctgggaaatagtacagggagagacacagcaagggaaaaaatgaaacccattgggagttctgtctccccataaggaaagagagtctgtcctttatggagataggcagtcctgttgggaacatttaggtcacctactatgcttggaaaatactcagggtgtcatgtgctttcccttcacttatgtcttacataaagaagaaacgatatacatggatccaaagctttctcaagcaagatacgtactgtcagtagaaagagtaaagctgaaggcaaatatccctaaattgtcataaccaaagatggaaaaatt

SEQ ID NO: 134926 - DNA, 394 bp, Homo sapiens
tgtttatcgatgccaccactctcttgattcctaattttattcagaggtccaagagagtggtggttatgatttcagtcttttgttctgccagacactgattatgacagttcacccgaatctggaaagcaagaatgcactcttctgctggtctctggcctttagccttttcctttgtcctccatgaatatatgaggccaacaggagggatctaggctcagtatgataggctcaataatggcttactgagatgtcaggttctaatccctggaagctgtaaatgtcaccttctaaggaaaatggctctttgcggatgtggattaagcaaataattatacatgggaagatcatcttggattacctgcatgggccctaaatgcaatcacatgtgccttat

SEQ ID NO: 134927 - DNA, 364 bp, Homo sapiens
cttacacgcttagggtggtaattggggtgggggtgagtagagctcttcctttgtatttagcttaataggtgtgattaattttacgtatttttgcttgtctgtttgcttcacattttgataggacagataacatctcccagctatttgtgtaaggtgcagggcattagtatactttaagattgagagttttaattttaaaaacagtaataataaatgcaggtagactagctgtgcttttgatgcaatgatactgactctttgaagccaagagttttgcgataatggattcaatgtggaacagagcaagccgaaagttagctttctcaggcaagagaaactgcagataaattaaccaagaactttc

SEQ ID NO: 134928 - DNA, 453 bp, Homo sapiens
aaaaaaaatctctttacttgatccatttcacaaaagaatttccaagtgttgctcttgaggtacagatgagttaagaatgctgatatatggctgggcgtggtggctcacacctacaatcccagcactttggaaggccgaagaaggcagatcacgaggtaaagagatcaagacaatcctggccaacacggtgaaaccctgtctctactaaaaacacaaaaattagctgggcatggtggcgtgcacccgtagtcccacctactcagaaggatgaggcaggagaatagcttgaacctgggaggcagaggttgcaagattcttctgtctcagcttcccgagtagctgggattacaggcatgcactgccacgcccagctaattttgtatttttagtagagatagggtttctccatgctggtcaggctggtctcaaacttccaacctcaggtgatccacc

SEQ ID NO: 134929 - DNA, 426 bp, Homo sapiens
ccagggcctttatatcacaacctgttgccaagagagtcaaaagaaatccctgagtaattacctctgaaaagttacaggtacctttgcaaataaaccacctctgaatttggccatttttgaatttcaggttctggtgaactggtgctttttatgtcatttgtatttggaatgcttatcaataacctcacacaatggcaaaaacacttgaaatctttcttaagagttaacaatcacagtagaaccccaattcagaaggaaacttggagggccggaatattatttctccaagtactaaccaggcccaactctgcttagcttctgagatcagaggagatcggttgcattcagagtggtatggacacagaccagaatattatttctaaagcaaaaaatatgtgctttatactggaactttttcaaatgttg

SEQ ID NO: 134930 - DNA, 386 bp, Homo sapiens
tgagaatctatctctagtgatatgcctttctcactggtctttcagtatgattacccctaaaccaccaaaactgctgcctgagctggtggcaagactttaacctttcgggcattcaacacttgttagaagaaaagcttgatgtaatgcaaatcgtataaactctaaaaccaggcagacttgaaattccaccctaacccattaattttgagaatttacacaatagctaatctttattttctcatctatatgaaaatccacatcaaaaggctgttatgaggtctaaatgaacatataaacaggagggcaccattcacagctcccaaccgagagtaggcattctactcactggttgctcagttatgtgaaaataaagtatggagattctg

SEQ ID NO: 134931 - DNA, 339 bp, Homo sapiens
aagagtcatcaccactccctggtctcaagtacccagggacacaaacactgcggaaggccgcagggtcctctgcctaggaaaaccagagacctttgttcacttgtttatctgctgaccttccctccgctattgtcctgtgaccctgccaaatccccctctgcgagaaacacccaagaatgatcaataaaaaaataaataaataaataaataaataaataaaaaagttcaaggaaagactaaacctttatctcattctacctctcctcaccaaccttcaaaaataaagctcccagctgggcgcagtggctcacaccttgtaaccccagcactttggaaggc

SEQ ID NO: 134932 - DNA, 829 bp, Homo sapiens
gtccccaagggctttggaactgcgggattgggacacgtgacttccctggtcattcaccttgaagtggacacgggctggggtgagagaggggaaactgccccatcttctcatcttagaaccatgcagcgttaatgctggaagggaccttggagtcgattccaaccccgtgaactgggccagggaaggaagtgccttgcccaaggtcatgagagggcatttcatcatgttgcccaggctgatctcaaactcctgggcttgtgtccgaaactggtgagtgcttggtctcactgacttcaagaaggaagccgcggaccctcgcagtgagtgttacagctcttaaggtggtgcatctggagtttgttccttctgatgttcagatgtgttcgcagtttcttccttctggtgggttcgtggtctcgctggctgaggagtgaagctgcagaccttcgcggtgagtgttatagctcttaaggcagcgcggccggagttgttcattcctcccggtgggctcgtggtcttagtggcttcaggagtgaagctgcagaccttcgtggtgagtgttacagctcataaaagcagtgtggacccaaaaagcgagcagtagcaagatttatcgcaaacagcaaaagaacaaagctgccatattgtggatggggacctgtgcccgttgccactgctggctcgggcagcctgcttttattctcttatctggccccacccacatcctgctgattggtagagccgagtggtctgttttgacagggcgctgattggtgcgtttacaatccctgagctagacacaaaggttctccacgtccccactagatta

SEQ ID NO: 134933 - DNA, 187 bp, Homo sapiens
tgttaaacatttactagtacaccattgcatccaggcattccaaggtgtactcagtttcacctcttacccagccttgaacctgaccactatttcctattgcagttgctgccaccttagttcagactcacagttccccacttgtgttactgcagcagcctctagactggactccctgcccttgacctta

SEQ ID NO: 134934 - DNA, 300 bp, Homo sapiens
aaagcatttcctagtaaagtgaaaagaatgtacacagtcttagcctccagctgggtagcaaatttcagaatacttcctgaacaaaggctagtaagcatgaggtgtgtcatgtttgatcattaggtagttcagctggaaaaaagataacatgcaccaagacagcaagggctgtcagatattccgtgcagtgcttgcagaaatggggttcttttatttgccttctcagattctcacctgaacttccttcagttatccacagaatgacctcagggacgcccagctggattttatctcatctct

SEQ ID NO: 134935 - DNA, 622 bp, Homo sapiens
ggggaagggtctgctttcaggatcactcatgggttgctggtgggatttagctccctgcaggtgcttggattgagggcctcagttcttaagggggctgttggctgaggctgtcctcagaggtttcttgacatatgggtctctccagagggcagctaacaatagggcagctggcttcataagaagaaatgatggaagagagccagagagagtgtaggcgagacaggtcacagtgctttgtaacctaatcttggaagtgatatcccatcacatttgctaaattctattctttttttttttttttgacgcagtctcagtttacggaaaccttggcctccggggtccaggggattctcaaggcctcaagcctccgggagtaacgcgggaattacggggcaacccggccaaccaaggcccgagttaagttacaggaataagacgagtgagagcacggagaattcgcgcgacaaattgcgcgagggcaggacactgtgacagctgaagcgcagacgaatgggtgcacacaggacatgcacacagccccgtgggaaaaggcgctgggacccattagcgcagtgaagccaaagtgacacacaacctgggaacacaatccaacaataaatcg

SEQ ID NO: 134936 - DNA, 831 bp, Homo sapiens
cgcaggttgcgtggccagcgctgactcagatgcatgccgcccagcgcttggtccctgatttggccatggcctgcagtgtgggctggctggcagccaggcaggagggagggccccctgtgtgcctggcctcacacaccagcagccggatgttggccaacacatgtcttagctcctcctttggccaggagaggaagttcactgggaccgagtcggaggggtgaacccagatgactgtgctgggccctgggccatccccagttggatgtgtgtgccctgaccccctgcagtcccaatgcccaggtggcctcccctactcagacgcccatgctggccgcccccaacctccctgcccaccaactcccaggcttattcaccaaccactccaccagctctgaccctgacttctggggttcccatctcagtcctcagcctgtgctgctgccccctgaagagcatccttccaggcccccgtcggctggccggggcttagctctaaggttactccagaggccgtcctgaccagtctgatgccgcccctccctgatcactgtcttggccccattacaatttatgctctggtgccttgggatggagtcactgtccatgttgccagagacagtgcggccaggtggactctcccctggagctggagtctgagtccagcccaagtccagggcaggcactccgagaatgagtgttctgcctgctgggtctcctgagggccaaggggctctgctggagctgggggcatggcttggcacccgcatccctgtctgtgcttctcctacttaaggatcctttgtctgacctggctctcctaccagatgccat

SEQ ID NO: 134937 - DNA, 168 bp, Homo sapiens
tacacatcaaagtatgtgctcagcgaggaaagcaagtcacctaccagggccaagttcccacggcagcctagcagtgaggggacccaggtgtggagtggagacttgatgggctgcttggaagtgagtgacagttcagatgcccctgagaccacccagaaatcaagcgca

SEQ ID NO: 134938 - DNA, 457 bp, Homo sapiens
aatagtcaaatgtcaaaggtgacatttggaaataaggcatagatatacaacttggtttctgtaacttatattgttctttagtcttgatttaaagtgcaggaacaaagatgtttaaataaaaaccactgatgacgtattattgtggtgaagggtatactgctcattaagctgatacatgtatacttggtggttctcctttagaggcaccaaataaacataatgtaccctaaagaaaaatgtgagcagttaaaattttaagtgaggtgaatcttgttttttccctaataaaattaaaacaaaaaacaaaccgagacaggtttcaccattgttgcccatgctggtttcaaattcctggactcaagcaatccacctgcctcaggtgatccacccaaagtgctgcgattacagacgtgagccactgcacccagtctacttcatcttaacatctagccacctc

SEQ ID NO: 134939 - DNA, 844 bp, Homo sapiens
gctcccctcagaggaggaagagaccggaaggtcgttttagggggcacttcctgggacatgggccaagcctcctaaggagtgagggctccaaccagcaggtacagacctctcagaagtcagggataaggcggccattctgaacctggatctccaccaccccttgtcccatctcatcaagacagttctgaggggctattctggcacatgtctggacgttagaggctggaggacaatgtgggctttgatgggattcagataaggtctgttccagggaggcaggaggttgatgctcagcatctgggatggtgtccttgtggacagtgagttgcctctttgggtacaagtccattttcactacagaagagactagagcaggggtgtccaatcttttgactttcctgggctacattggaagaattgtcttggtccacacattaaatacactaacactagtgatagttgatgagcttaaaaaaaaaaagcaaaaaataatcttataatgttttaagaaagtttacaaatttgtgttgagctgtgcactgacaagcttgggctggagagtctgaacggctccccgatcccctctctgattctctttggcagcaaggccttgaaggggctgagtctcagtgtcttgggggaattctggaaagcctgtttgggaacctgagaagacctcttgcctggagcttgaatgcttgatttgctgtcctggccacatgcatgcttggcagccagagagcggggtttgcattcacaccagcacaacagtgagccaggggttgaagtgaccaggacaagtgtctgggtggcagtgtgcctcagtttttaacaaaaaagttta

SEQ ID NO: 134940 - DNA, 360 bp, Homo sapiens
agcagaggggagagtttttaactaatgtacaaaagtttacatggcatatatttaagaaatatagtacatcatgagagtaatataggatattactacataaaacattattcttaggtaggttggtgccacattgcagagaacatttaatgttttggactttattttagggaaaaattagagtgaaaagttattgcaatagtctagtctaagcaagagataaagagaaccagatagaaaagagctatattacccaaaactttacaagtgaaatttttaagctccaatcacaatgcagattaaataatgggcactgaataaatatttgtggatgatctcagcattgccaggtcagcttaaaaa

SEQ ID NO: 134941 - DNA, 694 bp, Homo sapiens
aagcttcctgccacccagtggtacagcaagcactctccagcaagatttaatctcagccttgtgaggagccctttcccaaatttatttctttctgtgttttttatcccttagtagctaatctcatgttagccattaataactctctatgttaaacccttccttttgtatctgcggctacattgatcaattgtctcacaccgctcacccaccccctctccctggtcatgcagaggcctcaccagtcattttattgctattcccaggcctctgtgtgcccagatctcttcactgccctgtcagttgtgtcctgtccccttctcgacctcctggccttgtcctcaatgatgtttctatgaggctttggaaagcctcatcccaagagtcctggcaactgatacattagtctcaccaacactagcccctactcctgatctcattttaaaattttattttcttattttattattattatttttagggacatcaccctgcttctgactgacccaatttttaaagtttctctttattctccttaaagaatggctctcccatttgtttccctcatctttcttttcactgacttagaattcaggtccagacaaaaattccacttccttgaagagccttcccagtagccatgaaccacactctggggcagagtttgtggctcccaagcactttgttcacacctgct

SEQ ID NO: 134942 - DNA, 455 bp, Homo sapiens
aacccaaatgtggcttgacatttgcactacctgtctgaccctatggtcatttgagtttgtgtgacccctaccataaggacatggcatggcccaaaagctggtgcttcccaaaggatactgcagcccctttttaaatttttattttattttgagacagggtctcactctgtcacccaggctggagtacagtggcacgatctttgctcactgcaacctctgcctcccagcactttgggaggccgaggcaggtagatcacctgaggtcaagtttgagaccagcctggccaacgtggtgaaaccccatctctactaaaaaaaaaaaaaaaaaaaaaaatcagccaggtgtggtggcacactctagctactcaggaggctgaggcaggaaaattgcttgaacctgggaggtggaggtttcagtggactgagattgtgccactgcactccagcctgggcga

SEQ ID NO: 134943 - DNA, 123 bp, Homo sapiens
tggaatgcaaaaaaaaagtaagccaaaagcatagtctattttaagtaatggcttagtattttccatttaatcatccaaggtgagaatcatagctcaaaaaaaagcagggattacccaatttca

SEQ ID NO: 134944 - DNA, 299 bp, Homo sapiens
acctacgtaccacagagctctgggagtatgagcccaggggtgcccagctgccgacaggggtatctttgtgaatttttgggtgtcagcaactaattcagactttaaaaaagaagagggaggagaaagaggaagaaaaggaagaaactggtatggtataaacaaaacaaatctgaaagctcaatgtggcccagtgccctaccagattataaactggtttggatgaacccactctcaggtcttttagtggaaggcaggtttttggtaagtttttgagctggaatttgggaccagatgaactc

SEQ ID NO: 134945 - DNA, 901 bp, Homo sapiens
  misc_feature (719)..(719): n is a, c, g, or t
ggggatatcgtcgaccagcgtcgccacgcgtcgccatgcagaattacgcacagagacatgccagaacatacaaggacatgctgcctgaacatacacacgcacacccatgcgcagatgtgctgcctggacacacacacacacacggatatgctgtctggacgcacacacgtgcagatatggtatccggacacacacgtgcacagatatgctgcctggacacacagataatgctgccttgacacacacatgcacggatattgcctggacacacacacacacacgtgtgcacagatatgctgtctggacacgcacacacatgcagatatgctgcctggacacacacttccagacacacgtgcacaggcgcagatatgctgcctggacacacgcagatatgctgtctagtcacacacacacgcagacatgctgtccggacacacacacgcatgcacagatatgctgtccggacacacacacgcacgcagatatgctgcctggacacacacacagataatgctgcctcaacactcacacacgtgcagatattgcctggacacacacatgtgcacagatatgctgtctggacatgcacacacgtgcagatatgctgtccggatacacacgcacgcacacatgcagatatgctgcctgggcacacacttccggacacacatgcacacacaggtgcagatatgctgcctggacacaccacagagatnatgctgcctaacactcacacacgtgcttccctgcagcacacatccagaagcaaagctaaaaggccccacctaatcaacaccactgacacaccttcagaaaaaaaaaaatccccccatccagtgaaagtaatttcaaaattaggaaaaagcaactgttacactagatgccgtctaggagcgta

SEQ ID NO: 134946 - DNA, 168 bp, Homo sapiens
  misc_feature (17)..(17): n is a, c, g, or t
  misc_feature (20)..(21): n is a, c, g, or t
  misc_feature (23)..(23): n is a, c, g, or t
  misc_feature (25)..(26): n is a, c, g, or t
aaaaaaaaaaaaaaaanaannanannacaccaccccccaccccactgtcgtggtggccccagatctctgtaattttatgtagagtttgagctgaagccccgtatatttaatttattttgttaaacatgaaagtgcatcctttcaaaaaaagtcgacgcggccgcgaat

SEQ ID NO: 134947 - DNA, 3391 bp, Homo sapiens
gccgccccgccccgagaccgggcccgggggcgcggggcggcgggatgcggcgcccggggcggcgatgaccgcggagcgcacgccgcgggcccggccctgaccccgccgcccgcccgctgagccccccgccgaggtccggacaggccgagatgacgccgagccccctgttgctgctcctgctgccgccgctgctgctgggggccttcccaccggccgccgccgcccgaggccccccaaagatggcggacaaggtggtcccacggcaggtggcccggctgggccgcactgtgcggctgcagtgcccagtggagggggacccgccgccgctgaccatgtggaccaaggatggccgcaccatccacagcggctggagccgcttccgcgtgctgccgcaggggctgaaggtgaagcaggtggagcgggaggatgccggcgtgtacgtgtgcaaggccaccaacggcttcggcagcctgagcgtcaactacaccctcgtcgtgctggatgacattagcccagggaaggagagcctggggcccgacagctcctctgggggtcaagaggaccccgccagccagcagtgggcacgaccgcgcttcacacagccctccaagatgaggcgccgggtgatcgcacggcccgtgggtagctccgtgcggctcaagtgcgtggccagcgggcaccctcggcccgacatcacgtggatgaaggacgaccaggccttgacgcgcccagaggccgctgagcccaggaagaagaagtggacactgagcctgaagaacctgcggccggaggacagcggcaaatacacctgccgcgtgtcgaaccgcgcgggcgccatcaacgccacctacaaggtggatgtgatccagcggacccgttccaagcccgtgctcacaggcacgcaccccgtgaacacgacggtggacttcggggggaccacgtccttccagtgcaaggtgcgcagcgacgtgaagccggtgatccagtggctgaagcgcgtggagtacggcgccgagggccgccacaactccaccatcgatgtgggcggccagaagtttgtggtgctgcccacgggtgacgtgtggtcgcggcccgacggctcctacctcaataagctgctcatcacccgtgcccgccaggacgatgcgggcatgtacatctgccttggcgccaacaccatgggctacagcttccgcagcgccttcctcaccgtgctgccagacccaaaaccgccagggccacctgtggcctcctcgtcctcggccactagcctgccgtggcccgtggtcatcggcatcccagccggcgctgtcttcatcctgggcaccctgctcctgtggctttgccaggcccagaagaagccgtgcacccccgcgcctgcccctcccctgcctgggcaccgcccgccggggacggcccgcgaccgcagcggagacaaggaccttccctcgttggccgccctcagcgctggccctggtgtggggctgtgtgaggagcatgggtctccggcagccccccagcacttactgggcccaggcccagttgctggccctaagttgtaccccaaactctacacagacatccacacacacacacacacacactctcacacacactcacacgtggagggcaaggtccaccagcacatccactatcagtgctagacggcaccgtatctgcagtgggcacgggggggccggccagacaggcagactgggaggatggaggacggagctgcagacgaaggcaggggacccatggcgaggaggaatggccagcaccccaggcagtctgtgtgtgaggcatagcccctggacacacacacacagacacacacactgcctggatgcatgtatgcacacacatgcgcgcacacgtgctccctgaaggcacacgtacgcacacacgcacatgcacagatatgccgcctgggcacacagataagctgcccaaatgcacgcacacgcacagagacatgccagaacatacaaggacatgctgcctgaacatacacacgcacacccatgcgcagatgtgctgcctggacacacacacacacacggatatgctgtctggacgcacacacgtgcagatatggtatccggacacacacgtgcacagatatgctgcctggacacacagataatgctgccttgacacacacatgcacggatattgcctggacacacacacacacacgtgtgcacagatatgctgtctggacacgcacacacatgcagatatgctgcctggacacacacttccagacacacgtgcacaggcgcagatatgctgcctggacacacgcagatatgctgtctagtcacacacacacgcagacatgctgtccggacacacacacgcatgcacagatatgctgtccggacacacacacgcacgcagatatgctgcctggacacacacacagataatgctgcctcaacactcacacacgtgcagatattgcctggacacacacatgtgcacagatatgctgtctggacatgcacacacgtgcagatatgctgtccggatacacacgcacgcacacatgcagatatgctgcctgggcacacacttccggacacacatgcacacacaggtgcagatatgctgcctggacacacgcagactgacgtgcttttgggagggtgtgccgtgaagcctgcagtacgtgtgccgtgaggctcatagttgatgagggactttccctgctccaccgtcactcccccaactctgcccgcctctgtccccgcctcagtccccgcctccatccccgcctctgtcccctggccttggcggctatttttgccacctgccttgggtgcccaggagtcccctactgctgtgggctggggttgggggcacagcagccccaagcctgagaggctggagcccatggctagtggctcatccccactgcattctccccctgacacagagaaggggccttggtatttatatttaagaaatgaagataatattaataatgatggaaggaagactgggttgcagggactgtggtctctcctggggcccgggacccgcctggtctttcagccatgctgatgaccacaccccgtccaggccagacaccaccccccaccccactgtcgtggtggccccagatctctgtaattttatgtagagtttgagctgaagccccgtatatttaatttattttgttaaacatgaaagtgcatcctttcaaaaagacacaaacacacaaaaaaaagggggggcaaaaatccggggggcaagatgcgcaccctttctgacagggccaagagggtaaagcacaggcgcgttaacgcgggaaagcgcgggttgggaccctctgggggtgggcaccacataccgagaaagttgtcgccgcgggtgacaacaaaac

SEQ ID NO: 134948 - DNA, 3201 bp, Homo sapiens
caaggctgtaccggtcagggattatgggatcgcgccgagccccccaaagatggcggacaaggtggtcccacggcaggtggcccggctgggccgcactgtgcggctgcagtgcccagtggagggggacccgccgccgctgaccatgtggaccaaggatggccgcaccatccacagcggctggagccgcttccgcgtgctgccgcaggggctgaaggtgaagcaggtggagcgggaggatgccggcgtgtacgtgtgcaaggccaccaacggcttcggcagcctgagcgtcaactacaccctcgtcgtgctggatgacattagcccagggaaggagagcctggggcccgacagctcctctgggggtcaagaggaccccgccagccagcagtgggcacgaccgcgcttcacacagccctccaagatgaggcgccgggtgatcgcacggcccgtgggtagctccgtgcggctcaagtgcgtggccagcgggcaccctcggcccgacatcacgtggatgaaggacgaccaggccttgacgcgcccagaggccgctgagcccaggaagaagaagtggacactgagcctgaagaacctgcggccggaggacagcggcaaatacacctgccgcgtgtcgaaccgcgcgggcgccatcaacgccacctacaaggtggatgtgatccagcggacccgttccaagcccgtgctcacaggcacgcaccccgtgaacacgacggtggacttcggggggaccacgtccttccagtgcaaggtgcgcagcgacgtgaagccggtgatccagtggctgaagcgcgtggagtacggcgccgagggccgccacaactccaccatcgatgtgggcggccagaagtttgtggtgctgcccacgggtgacgtgtggtcgcggcccgacggctcctacctcaataagctgctcatcacccgtgcccgccaggacgatgcgggcatgtacatctgccttggcgccaacaccatgggctacagcttccgcagcgccttcctcaccgtgctgccagacccaaaaccgccagggccacctgtggcctcctcgtcctcggccactagcctgccgtggcccgtggtcatcggcatcccagccggcgctgtcttcatcctgggcaccctgctcctgtggctttgccaggcccagaagaagccgtgcacccccgcgcctgcccctcccctgcctgggcaccgcccgccggggacggcccgcgaccgcagcggagacaaggaccttccctcgttggccgccctcagcgctggccctggtgtggggctgtgtgaggagcatgggtctccggcagccccccagcacttactgggcccaggcccagttgctggccctaagttgtaccccaaactctacacagacatccacacacacacacacacacactctcacacacactcacacgtggagggcaaggtccaccagcacatccactatcagtgctagacggcaccgtatctgcagtgggcacgggggggccggccagacaggcagactgggaggatggaggacggagctgcagacgaaggcaggggacccatggcgaggaggaatggccagcaccccaggcagtctgtgtgtgaggcatagcccctggacacacacacacagacacacacactgcctggatgcatgtatgcacacacatgcgcgcacacgtgctccctgaaggcacacgtacgcacacacgcacatgcacagatatgccgcctgggcacacagataagctgcccaaatgcacgcacacgcacagagacatgccagaacatacaaggacatgctgcctgaacatacacacgcacacccatgcgcagatgtgctgcctggacacacacacacacacggatatgctgtctggacgcacacacgtgcagatatggtatccggacacacacgtgcacagatatgctgcctggacacacagataatgctgccttgacacacacatgcacggatattgcctggacacacacacacacacgtgtgcacagatatgctgtctggacacgcacacacatgcagatatgctgcctggacacacacttccagacacacgtgcacaggcgcagatatgctgcctggacacacgcagatatgctgtctagtcacacacacacgcagacatgctgtccggacacacacacgcatgcacagatatgctgtccggacacacacacgcacgcagatatgctgcctggacacacacacagataatgctgcctcaacactcacacacgtgcagatattgcctggacacacacatgtgcacagatatgctgtctggacatgcacacacgtgcagatatgctgtccggatacacacgcacgcacacatgcagatatgctgcctgggcacacacttccggacacacatgcacacacaggtgcagatatgctgcctggacacacgcagactgacgtgcttttgggagggtgtgccgtgaagcctgcagtacgtgtgccgtgaggctcatagttgatgagggactttccctgctccaccgtcactcccccaactctgcccgcctctgtccccgcctcagtccccgcctccatccccgcctctgtcccctggccttggcggctatttttgccacctgccttgggtgcccaggagtcccctactgctgtgggctggggttgggggcacagcagccccaagcctgagaggctggagcccatggctagtggctcatccccactgcattctccccctgacacagagaaggggccttggtatttatatttaagaaatgaagataatattaataatgatggaaggaagactgggttgcagggactgtggtctctcctggggcccgggacccgcctggtctttcagccatgctgatgaccacaccccgtccaggccagacaccaccccccaccccactgtcgtggtggccccagatctctgtaattttatgtagagtttgagctgaagccccgtatatttaatttattttgttaaacatgaaagtgcatcctttcaaaaagacacaaacacacaaaaaaaagggggggcaaaaatccggggggcaagatgcgcaccctttctgacagggccaagagggtaaagcacaggcgcgttaacgcgggaaagcgcgggttgggaccctctgggggtgggcaccacataccgagaaagttgtcgccgcgggtgacaacaaaac

SEQ ID NO: 134949 - DNA, 3314 bp, Homo sapiens
gccgccccgccccgagaccgggcccgggggcgcggggcggcgggatgcggcgcccggggcggcgatgaccgcggagcgcacgccgcgggcccggccctgaccccgccgcccgcccgctgagccccccgccgaggtccggacaggccgagatgacgccgagccccctgttgctgctcctgctgccgccgctgctgctgggggccttcccaccggccgccgccgcccgaggccccccaaagatggcggacaaggtggtcccacggcaggtggcccggctgggccgcactgtgcggctgcagtgcccagtggagggggacccgccgccgctgaccatgtggaccaaggatggccgcaccatccacagcggctggagccgcttccgcgtgctgccgcaggggctgaaggtgaagcaggtggagcgggaggatgccggcgtgtacgtgtgcaaggccaccaacggcttcggcagcctgagcgtcaaaggaccccgccagccagcagtgggcacgaccgcgcttcacacagccctccaagatgaggcgccgggtgatcgcacggcccgtgggtagctccgtgcggctcaagtgcgtggccagcgggcaccctcggcccgacatcacgtggatgaaggacgaccaggccttgacgcgcccagaggccgctgagcccaggaagaagaagtggacactgagcctgaagaacctgcggccggaggacagcggcaaatacacctgccgcgtgtcgaaccgcgcgggcgccatcaacgccacctacaaggtggatgtgatccagcggacccgttccaagcccgtgctcacaggcacgcaccccgtgaacacgacggtggacttcggggggaccacgtccttccagtgcaaggtgcgcagcgacgtgaagccggtgatccagtggctgaagcgcgtggagtacggcgccgagggccgccacaactccaccatcgatgtgggcggccagaagtttgtggtgctgcccacgggtgacgtgtggtcgcggcccgacggctcctacctcaataagctgctcatcacccgtgcccgccaggacgatgcgggcatgtacatctgccttggcgccaacaccatgggctacagcttccgcagcgccttcctcaccgtgctgccagacccaaaaccgccagggccacctgtggcctcctcgtcctcggccactagcctgccgtggcccgtggtcatcggcatcccagccggcgctgtcttcatcctgggcaccctgctcctgtggctttgccaggcccagaagaagccgtgcacccccgcgcctgcccctcccctgcctgggcaccgcccgccggggacggcccgcgaccgcagcggagacaaggaccttccctcgttggccgccctcagcgctggccctggtgtggggctgtgtgaggagcatgggtctccggcagccccccagcacttactgggcccaggcccagttgctggccctaagttgtaccccaaactctacacagacatccacacacacacacacacacactctcacacacactcacacgtggagggcaaggtccaccagcacatccactatcagtgctagacggcaccgtatctgcagtgggcacgggggggccggccagacaggcagactgggaggatggaggacggagctgcagacgaaggcaggggacccatggcgaggaggaatggccagcaccccaggcagtctgtgtgtgaggcatagcccctggacacacacacacagacacacacactgcctggatgcatgtatgcacacacatgcgcgcacacgtgctccctgaaggcacacgtacgcacacacgcacatgcacagatatgccgcctgggcacacagataagctgcccaaatgcacgcacacgcacagagacatgccagaacatacaaggacatgctgcctgaacatacacacgcacacccatgcgcagatgtgctgcctggacacacacacacacacggatatgctgtctggacgcacacacgtgcagatatggtatccggacacacacgtgcacagatatgctgcctggacacacagataatgctgccttgacacacacatgcacggatattgcctggacacacacacacacacgtgtgcacagatatgctgtctggacacgcacacacatgcagatatgctgcctggacacacacttccagacacacgtgcacaggcgcagatatgctgcctggacacacgcagatatgctgtctagtcacacacacacgcagacatgctgtccggacacacacacgcatgcacagatatgctgtccggacacacacacgcacgcagatatgctgcctggacacacacacagataatgctgcctcaacactcacacacgtgcagatattgcctggacacacacatgtgcacagatatgctgtctggacatgcacacacgtgcagatatgctgtccggatacacacgcacgcacacatgcagatatgctgcctgggcacacacttccggacacacatgcacacacaggtgcagatatgctgcctggacacacgcagactgacgtgcttttgggagggtgtgccgtgaagcctgcagtacgtgtgccgtgaggctcatagttgatgagggactttccctgctccaccgtcactcccccaactctgcccgcctctgtccccgcctcagtccccgcctccatccccgcctctgtcccctggccttggcggctatttttgccacctgccttgggtgcccaggagtcccctactgctgtgggctggggttgggggcacagcagccccaagcctgagaggctggagcccatggctagtggctcatccccactgcattctccccctgacacagagaaggggccttggtatttatatttaagaaatgaagataatattaataatgatggaaggaagactgggttgcagggactgtggtctctcctggggcccgggacccgcctggtctttcagccatgctgatgaccacaccccgtccaggccagacaccaccccccaccccactgtcgtggtggccccagatctctgtaattttatgtagagtttgagctgaagccccgtatatttaatttattttgttaaacatgaaagtgcatcctttcaaaaagacacaaacacacaaaaaaaagggggggcaaaaatccggggggcaagatgcgcaccctttctgacagggccaagagggtaaagcacaggcgcgttaacgcgggaaagcgcgggttgggaccctctgggggtgggcaccacataccgagaaagttgtcgccgcgggtgacaacaaaac

SEQ ID NO: 134950 - DNA, 3631 bp, Homo sapiens
gccgccccgccccgagaccgggcccgggggcgcggggcggcgggatgcggcgcccggggcggcgatgaccgcggagcgcacgccgcgggcccggccctgaccccgccgcccgcccgctgagccccccgccgaggtccggacaggccgagatgacgccgagccccctgttgctgctcctgctgccgccgctgctgctgggggccttcccaccggccgccgccgcccgaggccccccaaagatggcggacaaggtggtcccacggcaggtggcccggctgggccgcactgtgcggctgcagtgcccagtggagggggacccgccgccgctgaccatgtggaccaaggatggccgcaccatccacagcggctggagccgcttccgcgtgctgccgcaggggctgaaggtgaagcaggtggagcgggaggatgccggcgtgtacgtgtgcaaggccaccaacggcttcggcagcctgagcgtcaactacaccctcgtcgtgctggatgacattagcccagggaaggagagcctggggcccgacagctcctctgggggtcaagaggaccccgccagccagcagtgggcacgaccgcgcttcacacagccctccaagatgaggcgccgggtgatcgcacggcccgtgggtagctccgtgcggctcaagtgcgtggccagcgggcaccctcggcccgacatcacgtggatgaaggacgaccaggccttgacgcgcccagaggccgctgagcccaggaagaagaagtggacactgagcctgaagaacctgcggccggaggacagcggcaaatacacctgccgcgtgtcgaaccgcgcgggcgccatcaacgccacctacaaggtggatgtgatccagcggacccgttccaagcccgtgctcacaggcacgcaccccgtgaacacgacggtggacttcggggggaccacgtccttccagtgcaaggtgcgcagcgacgtgaagccggtgatccagtggctgaagcgcgtggagtacggcgccgagggccgccacaactccaccatcgatgtgggcggccagaagtttgtggtgctgcccacgggtgacgtgtggtcgcggcccgacggctcctacctcaataagctgctcatcacccgtgcccgccaggacgatgcgggcatgtacatctgccttggcgccaacaccatgggctacagcttccgcagcgccttcctcaccgtgctgccaggtgcgcggctgccacgccacgccacaccatgctggtgcccggacccgccccctgggcccggcgtcccacccaccgggtggggccccacccttccctcccgggccgtgctggccaggtcatctgccgagggagggcagcccaggggcaccgtctccacagcccctgggatgggtctggggtgctctcctggtctttgtgtcggcgttcccctccctacctcctttcctctcgctcttgcagacccaaaaccgccagggccacctgtggcctcctcgtcctcggccactagcctgccgtggcccgtggtcatcggcatcccagccggcgctgtcttcatcctgggcaccctgctcctgtggctttgccaggcccagaagaagccgtgcacccccgcgcctgcccctcccctgcctgggcaccgcccgccggggacggcccgcgaccgcagcggagacaaggaccttccctcgttggccgccctcagcgctggccctggtgtggggctgtgtgaggagcatgggtctccggcagccccccagcacttactgggcccaggcccagttgctggccctaagttgtaccccaaactctacacagacatccacacacacacacacacacactctcacacacactcacacgtggagggcaaggtccaccagcacatccactatcagtgctagacggcaccgtatctgcagtgggcacgggggggccggccagacaggcagactgggaggatggaggacggagctgcagacgaaggcaggggacccatggcgaggaggaatggccagcaccccaggcagtctgtgtgtgaggcatagcccctggacacacacacacagacacacacactgcctggatgcatgtatgcacacacatgcgcgcacacgtgctccctgaaggcacacgtacgcacacacgcacatgcacagatatgccgcctgggcacacagataagctgcccaaatgcacgcacacgcacagagacatgccagaacatacaaggacatgctgcctgaacatacacacgcacacccatgcgcagatgtgctgcctggacacacacacacacacggatatgctgtctggacgcacacacgtgcagatatggtatccggacacacacgtgcacagatatgctgcctggacacacagataatgctgccttgacacacacatgcacggatattgcctggacacacacacacacacgtgtgcacagatatgctgtctggacacgcacacacatgcagatatgctgcctggacacacacttccagacacacgtgcacaggcgcagatatgctgcctggacacacgcagatatgctgtctagtcacacacacacgcagacatgctgtccggacacacacacgcatgcacagatatgctgtccggacacacacacgcacgcagatatgctgcctggacacacacacagataatgctgcctcaacactcacacacgtgcagatattgcctggacacacacatgtgcacagatatgctgtctggacatgcacacacgtgcagatatgctgtccggatacacacgcacgcacacatgcagatatgctgcctgggcacacacttccggacacacatgcacacacaggtgcagatatgctgcctggacacacgcagactgacgtgcttttgggagggtgtgccgtgaagcctgcagtacgtgtgccgtgaggctcatagttgatgagggactttccctgctccaccgtcactcccccaactctgcccgcctctgtccccgcctcagtccccgcctccatccccgcctctgtcccctggccttggcggctatttttgccacctgccttgggtgcccaggagtcccctactgctgtgggctggggttgggggcacagcagccccaagcctgagaggctggagcccatggctagtggctcatccccactgcattctccccctgacacagagaaggggccttggtatttatatttaagaaatgaagataatattaataatgatggaaggaagactgggttgcagggactgtggtctctcctggggcccgggacccgcctggtctttcagccatgctgatgaccacaccccgtccaggccagacaccaccccccaccccactgtcgtggtggccccagatctctgtaattttatgtagagtttgagctgaagccccgtatatttaatttattttgttaaacatgaaagtgcatcctttcaaaaagacacaaacacacaaaaaaaagggggggcaaaaatccggggggcaagatgcgcaccctttctgacagggccaagagggtaaagcacaggcgcgttaacgcgggaaagcgcgggttgggaccctctgggggtgggcaccacataccgagaaagttgtcgccgcgggtgacaacaaaac

SEQ ID NO: 134951 - DNA, 3575 bp, Homo sapiens
gccgccccgccccgagaccgggcccgggggcgcggggcggcgggatgcggcgcccggggcggcgatgaccgcggagcgcacgccgcgggcccggccctgaccccgccgcccgcccgctgagccccccgccgaggtccggacaggccgagatgacgccgagccccctgttgctgctcctgctgccgccgctgctgctgggggccttcccaccggccgccgccgcccgaggccccccaaagatggcggacaaggtggtcccacggcaggtggcccggctgggccgcactgtgcggctgcagtgcccagtggagggggacccgccgccgctgaccatgtggaccaaggatggccgcaccatccacagcggctggagccgcttccgcgtgctgccgcaggggctgaaggtgaagcaggtggagcgggaggatgccggcgtgtacgtgtgcaaggccaccaacggcttcggcagcctgagcgtcaactacaccctcgtcgtgctggatgacattagcccagggaaggagagcctggggcccgacagctcctctgggggtcaagaggaccccgccagccagcagtgggcacgaccgcgcttcacacagccctccaagatgaggcgccgggtgatcgcacggcccgtgggtagctccgtgcggctcaagtgcgtggccagcgggcaccctcggcccgacatcacgtggatgaaggacgaccaggccttgacgcgcccagaggccgctgagcccaggaagaagaagtggacactgagcctgaagaacctgcggccggaggacagcggcaaatacacctgccgcgtgtcgaaccgcgcgggcgccatcaacgccacctacaaggtggatgtgatccagcggacccgttccaagcccgtgctcacaggcacgcaccccgtgaacacgacggtggacttcggggggaccacgtccttccagtgcaaggtgcgcagcgacgtgaagccggtgatccagtggctgaagcgcgtggagtacggcgccgagggccgccacaactccaccatcgatgtgggcggccagaagtttgtggtgctgcccacgggtgacgtgtggtcgcggcccgacggctcctacctcaataagctgctcatcacccgtgcccgccaggacgatgcgggcatgtacatctgccttggcgccaacaccatgggctacagcttccgcagcgccttcctcaccgtgctgccagacccaaaaccgccagggccacctgtggcctcctcgtcctcggccactatcggcatcccagccggcgctgtcttcatcctgggcaccctgctcctgtggctttgccaggcccagaagaagccgtgcacccccgcgcctgcccctcccctgcctgggcaccgcccgccggggacggcccgcgaccgcagcggagacaaggaccttccctcgttggccgccctcagcgctggccctggtgtggggctgtgtgaggagcatgggtctccggcagccccccagcacttactgggcccaggcccagttgctggccctaagttgtaccccaaactctacacagacatccacacacacacacacacacactctcacacacactcacacgtggagggcaaggtccaccagcacatccactatcagtgctagacggcaccgtatctgcagtgggcacgggggggccggccagacaggcagactgggaggatggaggacggagctgcagacgaaggcaggggacccatggcgaggaggaatggccagcaccccaggcagtctgtgtgtgaggcatagcccctggacacacacacacagacacacacactgcctggatgcatgtatgcacacacatgcgcgcacacgtgctccctgaaggcacacgtacgcacacacgcacatgcacagatatgccgcctgggcacacagataagctgcccaaatgcacgcacacgcacagagacatgccagaacatacaaggacatgctgcctgaacatacacacgcacacccatgcgcagatgtgctgcctggacacacacacacacacggatatgctgtctggacgcacacacgtgcagatatggtatccggacacacacgtgcacagatatgctgcctggacacacagataatgctgccttgacacacacatgcacggatattgcctggacacacacacacacacgtgtgcacagatatgctgtctggacacgcacacacatgcagatatgctgcctggacacacacttccagacacacgtgcacaggcgcagatatgctgcctggacacacgcagatatgctgtctagtcacacacacacgcagacatgctgtccggacacacacacgcatgcacagatatgctgtccggacacacacacggcagatatgctgcctggacacacacacagataatgctgcctcaacactcacacacgtgcagatattgcctggacacacacatgtgcacagatatgctgtctggacatgcacacacgtgcagatatgctgtccggatacacacgcacgcacacatgcagatatgctgcctgggcacacacttccggacacacatgcacacacaggtcacgcagatatgctgcctggacacacacacagataatgctgcctcaacactcacacacgtgcagatattgcctggacacacacatgtgcacagatatgctgtctggacatgcacacacgtgcagatatgctgtccggatacacacgcacgcacacatgcagatatgctgcctgggcacacacttccggacacacatgcacacacaggtgcagatatgctgcctggacacacgcagactgacgtgcttttgggagggtgtgccgtgaagcctgcagtacgtgtgccgtgaggctcatagttgatgagggactttccctgctccaccgtcactcccccaactctgcccgcctctgtccccgcctcagtccccgcctccatccccgcctctgtcccctggccttggcggctatttttgccacctgccttgggtgcccaggagtcccctactgctgtgggctggggttgggggcacagcagccccaagcctgagaggctggagcccatggctagtggctcatccccactgcattctccccctgacacagagaaggggccttggtatttatatttaagaaatgaagataatattaataatgatggaaggaagactgggttgcagggactgtggtctctcctggggcccgggacccgcctggtctttcagccatgctgatgaccacaccccgtccaggccagacaccaccccccaccccactgtcgtggtggccccagatctctgtaattttatgtagagtttgagctgaagccccgtatatttaatttattttgttaaacatgaaagtgcatcctttcaaaaagacacaaacacacaaaaaaaagggggggcaaaaatccggggggcaagatgcgcaccctttctgacagggccaagagggtaaagcacaggcgcgttaacgcgggaaagcgcgggttgggaccctctgggggtgggcaccacataccgagaaagttgtcgccgcgggtgacaacaaaac

SEQ ID NO: 134952 - DNA, 1660 bp, Homo sapiens
gacccacgcgtcgcggacgcgtgggtcgacccacgcgtccgggccagcaccccaggcagtctgtgtgtgaggcatagcccctggacacacacacacagacacacacactgcctggatgcatgtatgcacacacatgcgcgcacacgtgctccctgaaggcacacgtacgcacacacgcacatgcacagatatgccgcctgggcacacagataagctgcccaaatgcacgcacacgcacagagacatgccagaacatacaaggacatgctgcctgaacatacacacgcacacccatgcgcagatgtgctgcctggacacacacacacacacggatatgctgtctggacgcacacacgtgcagatatggtatccggacacacacgtgcacagatatgctgcctggacacacagataatgctgccttgacacacacatgcacggatattgcctggacacacacacacacacgtgtgcacagatatgctgtctggacacgcacacacatgcagatatgctgcctggacacacacttccagacacacgtgcacaggcgcagatatgctgcctggacacacgcagatatgctgtctagtcacacacacacgcagacatgctgtccggacacacacacgcatgcacagatatgctgtccggacacacacacgcacgcagatatgctgcctggacacacacacagataatgctgcctcaacactcacacacgtgcagatattgcctggacacacacatgtgcacagatatgctgtctggacatgcacacacgtgcagatatgctgtccggatacacacgcacgcacacatgcagatatgctgcctgggcacacacttccggacacacatgcacacacaggtgcagatatgctgcctggacacacgcagactgacgtgcttttgggagggtgtgccgtgaagcctgcagtacgtgtgccgtgaggctcatagttgatgagggactttccctgctccaccgtcactcccccaactctgcccgcctctgtccccgcctcagtccccgcctccatccccgcctctgtcccctggccttggcggctatttttgccacctgccttgggtgcccaggagtcccctactgctgtgggctggggttgggggcacagcagccccaagcctgagaggctggagcccatggctagtggctcatccccactgcattctccccctgacacagagaaggggccttggtatttatatttaagaaatgaagataatattaataatgatggaaggaagactgggttgcagggactgtggtctctcctggggcccgggacccgcctggtctttcagccatgctgatgaccacaccccgtccaggccagacaccaccccccaccccactgtcgtggtggccccagatctctgtaattttatgtagagtttgagctgaagccccgtatatttaatttattttgttaaacatgaaagtgcatcctttcaaaaagacacaaacacacaaaaaaaagggggggcaaaaatccggggggcaagatgcgcaccctttctgacagggccaagagggtaaagcacaggcgcgttaacgcgggaaagcgcgggttgggaccctctgggggtgggcaccacataccgagaaagttgtcgccgcgggtgacaacaaaac

SEQ ID NO: 134953 - DNA, 2503 bp, Homo sapiens
gccgccccgccccgagaccgggcccgggggcgcggggcggcgggatgcggcgcccggggcggcgatgaccgcggagcgcacgccgcgggcccggccctgaccccgccgcccgcccgctgagccccccgccgaggtccggacaggccgagatgacgccgagccccctgttgctgctcctgctgccgccgctgctgctgggggccttcccaccggccgccgccgcccgaggccccccaaagatggcggacaaggtggtcccacggcaggtggcccggctgggccgcactgtgcggctgcagtgcccagtggagggggacccgccgccgctgaccatgtggaccaaggatggccgcaccatccacagcggctggagccgcttccgcgtgctgccgcaggggctgaaggtgaagcaggtggagcgggaggatgccggcgtgtacgtgtgcaaggccaccaacggcttcggcagcctgagcgtcaactacaccctcgtcgtgctggatgacattagcccagggaaggagagcctggggcccgacagctcctctgggggtcaagaggaccccgccagccagcagtgggcacgaccgcgcttcacacagccctccaagatgaggcgccgggtgatcgcacggcccgtgggtagctccgtgcggctcaagtgcgtggccagcgggcaccctcggcccgacatcacgtggatgaaggacgaccaggccttgacgcgcccagaggccgctgagcccaggaagaagaagtggacactgagcctgaagaacctgcggccggaggacagcggcaaatacacctgccgcgtgtcgaaccgcgcgggcgccatcaacgccacctacaaggtggatgtgatccagcggacccgttccaagcccgtgctcacaggcacgcaccccgtgaacacgacggtggacttcggggggaccacgtccttccagtgcaaggtgcgcagcgacgtgaagccggtgatccagtggctgaagcgcgtggagtacggcgccgagggccgccacaactccaccatcgatgtgggcggccagaagtttgtggtgctgcccacgggtgacgtgtggtcgcggcccgacggctcctacctcaataagctgctcatcacccgtgcccgccaggacgatgcgggcatgtacatctgccttggcgccaacaccatgggctacagcttccgcagcgccttcctcaccgtgctgccagacccaaaaccgccagggccacctgtggcctcctcgtcctcggccactagcctgccgtggcccgtggtcatcggcatcccagccggcgctgtcttcatcctgggcaccctgctcctgtggctttgccaggcccagaagaagccgtgcacccccgcgcctgcccctcccctgcctgggcaccgcccgccggggacggcccgcgaccgcagcggagacaaggaccttccctcgttggccgccctcagcgctggccctggtgtggggctgtgtgaggagcatgggtctccggcagccccccagcacttactgggcccaggcccagttgctggccctaagttgtaccccaaactctacacagacatccacacacacacacacacacactctcacacacactcacacgtggagggcaaggtccaccagcacatccactatcagtgctagacggcaccgtatctgcagtgggcacgggggggccggccagacaggcagactgggaggatggaggacggagctgcagacgaaggcaggggacccatggcgaggaggaatggccagcaccccaggcagtctgtgtgtgaggcatagcccctggacacacacacacagacacacacactgcctggatgcatgtatgcacacacatgcgcgcacacgtgctccctgaaggcacacgtacgcacacacgcacatgcacagatatgccgcctgggcacacagataagctgcccaaatgcacgcacacgcacagagacatgccagaacatacaaggacatgctgcctgaacatacacacgcacacccatgcgcagatgtgctgcctggacacacacacacacacggatatgctgtctggacgcacacacgtgcagatatggtatccggacacacacgtgcacagatatgctgcctggacacacagataatgctgccttgacacacacatgcacggatattgcctggacacacacacacacacgtgtgcacagatatgctgtctggacacgcacacacatgcagatatgctgcctggacacacacttccagacacacgtgcacaggcgcagatatgctgcctggacacacgcagatatgctgtctagtcacacacacacgcagacatgctgtccggacacacacacgcatgcacagatatgctgtccggacacacacacgcacgcagatatgctgcctggacacacacacgcacacccatgcgcagatgtgctgccgtggacacacacacacacacagagtagccgaccctggggatccgtctagag

SEQ ID NO: 134954 - DNA, 1020 bp, Homo sapiens
gccgccccgccccgagaccgggcccgggggcgcggggcggcgggatgcggcgcccggggcggcgatgaccgcggagcgcacgccgcgggcccggccctgaccccgccgcccgcccgctgagccccccgccgaggtccggacaggccgagatgacgccgagccccctgttgctgctcctgctgccgccgctgctgctgggggccttcccaccggccgccgccgcccgaggccccccaaagatggcggacaaggtggtcccacggcaggtggcccggctgggccgcactgtgcggctgcagtgcccagtggagggggacccgccgccgctgaccatgtggaccaaggatggccgcaccatccacagcggctggagccgcttccgcgtgctgccgcaggggctgaaggtgaagcaggtggagcgggaggatgccggcgtgtacgtgtgcaaggccaccaacggcttcggcagcctgagcgtcaactacaccctcgtcgtgctggatgacattagcccagggaaggagagcctggggcccgacagctcctctgggggtcaagaggaccccgccagccagcagtgggcacgaccgcgcttcacacagccctccaagatgaggcgccgggtgatcgcacggcccgtgggtagctccgtgcggctcaagtgcgtggccagcgggcaccctcggcccgacatcacgtggatgaaggacgaccaggccttgacgcgcccagaggccgctgagcccaggaagaagaagtggacactgagcctgaagaacctgcggccggaggacagcggcaaatacacctgccgcgtgtcgaaccgcgcgggcgccatcaacgccacctacaaggtggatgtgatccagcggacccgttccaagcccgtgctcacaggcacgcaccccgtgaacacgacggtgggtgctgggaagaggctgttaccccagaccacagctgtatcctggggcactggtggagttttgtctgacccccaatgggggatcctactagagcgac

SEQ ID NO: 134955 - DNA, 3330 bp, Homo sapiens
gccgccccgccccgagaccgggcccgggggcgcggggcggcgggatgcggcgcccggggcggcgatgaccgcggagcgcacgccgcgggcccggccctgaccccgccgcccgcccgctgagccccccgccgaggtccggacaggccgagatgacgccgagccccctgttgctgctcctgctgccgccgctgctgctgggggccttcccaccggccgccgccgcccgaggccccccaaagatggcggacaaggtggtcccacggcaggtggcccggctgggccgcactgtgcggctgcagtgcccagtggagggggacccgccgccgctgaccatgtggaccaaggatggccgcaccatccacagcggctggagccgcttccgcgtgctgccgcaggggctgaaggtgaagcaggtggagcgggaggatgccggcgtgtacgtgtgcaaggccaccaacggcttcggcagcctgagcgtcaactacaccctcgtcgtgctggatgacattagcccagggaaggagagcctggggcccgacagctcctctgggggtcaagaggaccccgccagccagcagtgggcacgaccgcgcttcacacagccctccaagatgaggcgccgggtgatcgcacggcccgtgggtagctccgtgcggctcaagtgcgtggccagcgggcaccctcggcccgacatcacgtggatgaaggacgaccaggccttgacgcgcccagaggccgctgagcccaggaagaagaagtggacactgagcctgaagaacctgcggccggaggacagcggcaaatacacctgccgcgtgtcgaaccgcgcgggcgccatcaacgccacctacaaggtggatgtgatccagcggacccgttccaagcccgtgctcacaggcacgcaccccgtgaacacgacggtggacttcggggggaccacgtccttccagtgcaaggtgcgcagcgacgtgaagccggtgatccagtggctgaagcgcgtggagtacggcgccgagggccgccacaactccaccatcgatgtgggcggccagaagtttgtggtgctgcccacgggtgacgtgtggtcgcggcccgacggctcctacctcaataagctgctcatcacccgtgcccgccaggacgatgcgggcatgtacatctgccttggcgccaacaccatgggctacagcttccgcagcgccttcctcaccgtgctgccagacccaaaaccgccagggccacctgtggcctcctcgtcctcggccactagcctgccgtggcccgtggtcatcggcatcccagccggcgctgtcttcatcctgggcaccctgctcctgtggctttgccaggcccagaagaagccgtgcacccccgcgcctgcccctcccctgcctgggcaccgcccgccggggacggcccgcgaccgcagcggagacaaggaccttccctcgttggccgccctcagcgctggccctggtgtggggctgtgtgaggagcatgggtctccggcagccccccagcacttactgggcccaggcccagttgctggccctaagttgtaccccaaactctacacagacatccacacacacacacacacacactctcacacacactcacacgtggagggcaaggtccaccagcacatccactatcagtgctagacggcaccgtatctgcagtgggcacgggggggccggccagacaggcagactgggaggatggaggacggagctgcagacgaaggcaggggacccatggcgaggaggaatggccagcaccccaggcagtctgtgtgtgaggcatagcccctggacacacacacacagacacacacactgcctggatgcatgtatgcacacacatgcgcgcacacgtgctccctgaaggcacacgtacgcacacacgcacatgcacagatatgccgcctgggcacacagataagctgcccaaatgcacgcacacgcacagagacatgccagaacatacaaggacatgctgcctgaacatacacacgcacacccatgcgcagatgtgctgcctggacacacacacacacacggatatgctgtctggacgcacacacgtgcagatatggtatccggacacacacgtgcacagatatgctgcctggacacacagataatgctgccttgacacacacatgcacggatattgcctggacacacacacacacacgtgtgcacagatatgctgtctggacacgcacacacatgcagatatgctgcctggacacacacttccagacacacgtgcacaggcgcagatatgctgcctggacacacgcagatatgctgtctagtcacacacacaccacgcagatatgctgcctggacacacacacagataatgctgcctcaacactcacacacgtgcagatattgcctggacacacacatgtgcacagatatgctgtctggacatgcacacacgtgcagatatgctgtccggatacacacgcacgcacacatgcagatatgctgcctgggcacacacttccggacacacatgcacacacaggtgcagatatgctgcctggacacacgcagactgacgtgcttttgggagggtgtgccgtgaagcctgcagtacgtgtgccgtgaggctcatagttgatgagggactttccctgctccaccgtcactcccccaactctgcccgcctctgtccccgcctcagtccccgcctccatccccgcctctgtcccctggccttggcggctatttttgccacctgccttgggtgcccaggagtcccctactgctgtgggctggggttgggggcacagcagccccaagcctgagaggctggagcccatggctagtggctcatccccactgcattctccccctgacacagagaaggggccttggtatttatatttaagaaatgaagataatattaataatgatggaaggaagactgggttgcagggactgtggtctctcctggggcccgggacccgcctggtctttcagccatgctgatgaccacaccccgtccaggccagacaccaccccccaccccactgtcgtggtggccccagatctctgtaattttatgtagagtttgagctgaagccccgtatatttaatttattttgttaaacatgaaagtgcatcctttcaaaaagacacaaacacacaaaaaaaagggggggcaaaaatccggggggcaagatgcgcaccctttctgacagggccaagagggtaaagcacaggcgcgttaacgcgggaaagcgcgggttgggaccctctgggggtgggcaccacataccgagaaagttgtcgccgcgggtgacaacaaaac

SEQ ID NO: 134956 - DNA, 2819 bp, Homo sapiens
  misc_feature (2637)..(2637): n is a, c, g, or t
gccgccccgccccgagaccgggcccgggggcgcggggcggcgggatgcggcgcccggggcggcgatgaccgcggagcgcacgccgcgggcccggccctgaccccgccgcccgcccgctgagccccccgccgaggtccggacaggccgagatgacgccgagccccctgttgctgctcctgctgccgccgctgctgctgggggccttcccaccggccgccgccgcccgaggccccccaaagatggcggacaaggtggtcccacggcaggtggcccggctgggccgcactgtgcggctgcagtgcccagtggagggggacccgccgccgctgaccatgtggaccaaggatggccgcaccatccacagcggctggagccgcttccgcgtgctgccgcaggggctgaaggtgaagcaggtggagcgggaggatgccggcgtgtacgtgtgcaaggccaccaacggcttcggcagcctgagcgtcaactacaccctcgtcgtgctggatgacattagcccagggaaggagagcctggggcccgacagctcctctgggggtcaagaggaccccgccagccagcagtgggcacgaccgcgcttcacacagccctccaagatgaggcgccgggtgatcgcacggcccgtgggtagctccgtgcggctcaagtgcgtggccagcgggcaccctcggcccgacatcacgtggatgaaggacgaccaggccttgacgcgcccagaggccgctgagcccaggaagaagaagtggacactgagcctgaagaacctgcggccggaggacagcggcaaatacacctgccgcgtgtcgaaccgcgcgggcgccatcaacgccacctacaaggtggatgtgatccagcggacccgttccaagcccgtgctcacaggcacgcaccccgtgaacacgacggtggacttcggggggaccacgtccttccagtgcaaggtgcgcagcgacgtgaagccggtgatccagtggctgaagcgcgtggagtacggcgccgagggccgccacaactccaccatcgatgtgggcggccagaagtttgtggtgctgcccacgggtgacgtgtggtcgcggcccgacggctcctacctcaataagctgctcatcacccgtgcccgccaggacgatgcgggcatgtacatctgccttggcgccaacaccatgggctacagcttccgcagcgccttcctcaccgtgctgccagacccaaaaccgccagggccacctgtggcctcctcgtcctcggccactagcctgccgtggcccgtggtcatcggcatcccagccggcgctgtcttcatcctgggcaccctgctcctgtggctttgccaggcccagaagaagccgtgcacccccgcgcctgcccctcccctgcctgggcaccgcccgccggggacggcccgcgaccgcagcggagacaaggaccttccctcgttggccgccctcagcgctggccctggtgtggggctgtgtgaggagcatgggtctccggcagccccccagcacttactgggcccaggcccagttgctggccctaagttgtaccccaaactctacacagacatccacacacacacacacacacactctcacacacactcacacgtggagggcaaggtccaccagcacatccactatcagtgctagacggcaccgtatctgcagtgggcacgggggggccggccagacaggcagactgggaggatggaggacggagctgcagacgaaggcaggggacccatggcgaggaggaatggccagcaccccaggcagtctgtgtgtgaggcatagcccctggacacacacacacagacacacacactgcctggatgcatgtatgcacacacatgcgcgcacacgtgctccctgaaggcacacgtacgcacacacgcacatgcacagatatgccgcctgggcacacagataagctgcccaaatgcacgcacacgcacagagacatgccagaacatacaaggacatgctgcctgaacatacacacgcacacccatgcgcagatgtgctgcctggacacacacacacacacggatatgctgtctggacgcacacacgtgcagatatggtatccggacacacacgtgcacagatatgctgcctggacacacagataatgctgccttgacacacacatgcacggatattgcctggacacacacacacacacgtgtgcacagatatgctgtctggacacgcacacacatgcagatatgctgcctggacacacacttccagacacacgtgcacaggcgcagatatgctgcctggacacacgcagatatgctgtctagtcacacacacacgcagacatgctgtccggacacacacacgcatgcacagatatgctgtccggacacacacacgcacgcagatatgctgcctggacacacacacagataatgctgcctcaacactcacacacgtgcagatattgcctggacacacacatgtgcacagatatgctgtctggacatgcacacacgtgcagatatgctgtccggatacacacgcacgcacacatgcagatatgctgcctgggcacacacttccggacacacatgcacacacaggtgcagatatgctgcctggacacaccacagagatnatgctgcctaacactcacacacgtgcttccctgcagcacacatccagaagcaaagctaaaaggccccacctaatcaacaccactgacacaccttcagaaaaaaaaaaatccccccatccagtgaaagtaatttcaaaattaggaaaaagcaactgttacactagatgccgtctaggagcgta

SEQ ID NO: 134957 - DNA, 2102 bp, Homo sapiens
gccgccccgccccgagaccgggcccgggggcgcggggcggcgggatgcggcgcccggggcggcgatgaccgcggagcgcacgccgcgggcccggccctgaccccgccgcccgcccgctgagccccccgccgaggtccggacaggccgagatgacgccgagccccctgttgctgctcctgctgccgccgctgctgctgggggccttcccaccggccgccgccgcccgaggccccccaaagatggcggacaaggtggtcccacggcaggtggcccggctgggccgcactgtgcggctgcagtgcccagtggagggggacccgccgccgctgaccatgtggaccaaggatggccgcaccatccacagcggctggagccgcttccgcgtgctgccgcaggggctgaaggtgaagcaggtggagcgggaggatgccggcgtgtacgtgtgcaaggccaccaacggcttcggcagcctgagcgtcaactacaccctcgtcgtgctggatgacattagcccagggaaggagagcctggggcccgacagctcctctgggggtcaagaggaccccgccagccagcagtgggcacgaccgcgcttcacacagccctccaagatgaggcgccgggtgatcgcacggcccgtgggtagctccgtgcggctcaagtgcgtggccagcgggcaccctcggcccgacatcacgtggatgaaggacgaccaggccttgacgcgcccagaggccgctgagcccaggaagaagaagtggacactgagcctgaagaacctgcggccggaggacagcggcaaatacacctgccgcgtgtcgaaccgcgcgggcgccatcaacgccacctacaaggtggatgtgatccagcggacccgttccaagcccgtgctcacaggcacgcaccccgtgaacacgacggtggacttcggggggaccacgtccttccagtgcaaggtgcgcagcgacgtgaagccggtgatccagtggctgaagcgcgtggagtacggcgccgagggccgccacaactccaccatcgatgtgggcggccagaagtttgtggtgctgcccacgggtgacgtgtggtcgcggcccgacggctcctacctcaataagctgctcatcacccgtgcccgccaggacgatgcgggcatgtacatctgccttggcgccaacaccatgggctacagcttccgcagcgccttcctcaccgtgctgccagacccaaaaccgccagggccacctgtggcctcctcgtcctcggccactagcctgccgtggcccgtggtcatcggcatcccagccggcgctgtcttcatcctgggcaccctgctcctgtggctttgccaggcccagaagaagccgtgcacccccgcgcctgcccctcccctgcctgggcaccgcccgccggggacggcccgcgaccgcagcggagacaaggaccttccctcgttggccgccctcagcgctggccctggtgtggggctgtgtgaggagcatgggtctccggcagccccccagcacttactgggcccaggcccagttgctggccctaagttgtaccccaaactctacacagacatccacacacacacacacacacactctcacacacactcacacgtggagggcaaggtccaccagcacatccactatcagtgctagacggcaccgtatctgcagtgggcacgggggggccggccagacaggcagactgggaggatggaggacggagctgcagacgaaggcaggggacccatggcgaggaggaatggccagcaccccaggcagtctgtgtgtgaggcatagcccctggacacacacacacagacacacacactgcctggatgcatgtatgcacacacatgcgcgcacacgtgctccctgaaggcacacgtacgcacacacgcacatgcacagatatgccgcctgggcacacagataagctgcccaaatgcacgcacacgcacagagacatgccagaacatacaaggacatgctgcctgaacatacacacgcacacccatgcgcagatgtgctgcctcctcacatgcagtaccgacacccatgcgcagattgctgcctgacacaccacggggtccg

SEQ ID NO: 134958 - DNA, 404 bp, Homo sapiens
gctcacccttaggggggcaatgagaacaaatggaggtgaaattggtgctacacccagaggggcaggaagaatttgggcagtaagcagtggcagagagaaaagggcattctggaagtcacaggccaagtccaggcaacataaaacctgaagagcagagaaagaagaggcagggaggaaaactggagccagacatggggccgtgtttgccaggccagggagcttggctttgatctcgtggttaacaggaagtcactcacatgacagtaagtggccagcagaggctgtggttactaagggctactgtaggaagctgggttgctggaggcccacctgggatgggaaacaggcagctggaccccctcagccagctgctcgccccagggagaggttagaaccgttcaggt

SEQ ID NO: 134959 - DNA, 170 bp, Homo sapiens
gagactgtgtcacaagttaatcaggaaaggtttccaaaccttctactggctgggaaaggagtggctctttttaagtctagaaacacttgtgcccggactttctgtttggaccattgtgtccttttgagagaaggtagccctgattgttagtaaatttcagttaattgaag

SEQ ID NO: 134960 - DNA, 651 bp, Homo sapiens
tatcaacatgggtttttcttttacttcacttttccttatttatatctttttataagtgtaagctcatatacgaagaggcttcatctccaagcagagagaccatcagctctggattgtcagttttccactcaggctatctgtctatccatcatcttacacaaactgttggaaccgtgttctatgggatcactagtactgatgactcagttgttcctcagcacacttactgctgtttctaaaactacagagtttatccacaatttcctatgcatacacctttctaattttaagagggagatacaattcataaatttaaaaagatgtatcaactgaagaatgataaatttcataaatttggaaaggagagctttacttttcataaaggttgcagcctgcagcgtagccattctgagaggccaggaagtgtaacctccatccagaagccagaaacacactttttgagggtcagaagaatatgacagggatttatgttgaatagactggccaaatacacatattcaataaactataggaagagtcatgaatatttataagtagagaaatgtgggcatgtgcagttgagtttcatgtctctctatgggacccatgttccaaaaatgggttagcataattcgaggatacagttttcag

SEQ ID NO: 134961 - DNA, 303 bp, Homo sapiens
ggagttcaagactagtctaggcaacatatcaacatcccatctctacaaaaaaattaaaataaaaaaatcagtcaggcatagtggtgcacgcatatagttccagctactcgtccaggagtttgaaaccagcctgagcgacatggcaagacaccatctcttccagaaaactaaaaaaaaaaaaaaaaatcagcagggccgggtgcagtggctcacatctgtaatcccagcactttgggaggccaaggtgggcagatcacaaggtcaagagatgaagaccatcctggcaaacatggtgaaacccca

SEQ ID NO: 134962 - DNA, 127 bp, Homo sapiens
ctcttattaaagaagcatgaatgtatcactagctgttaccagaacaaacagctgtagaatgtaatgacccatcctatttctaaatttacttctatcagtggataatttgtgtataggaaaaggtgtg

SEQ ID NO: 134963 - DNA, 420 bp, Homo sapiens
atccagatgtacaactaaagaagagcattgccagtgaagctatggcagtgcatattatcatgtagaagatgagttggtaaagtttattcatctaagctcaaatggcatctggtctacagaaagaattaggaatgctaaatttcttttctgaactactttataaattttgacttttgactatgcacaactttatataatgagggtaaaatttgatttgctgtaataaaatattttctggctgagtgtggtggctcatgcctgtaatcccagaccttgagaggctaaggtgggaggattgctgggtccagtggtttgagaccagtctgggcaacatagcaagaccctgtctctacaaaaaatacaagggattggccaggtgtggtggcatgtgctctggtcccagctattcaggaggcttag

SEQ ID NO: 134964 - DNA, 477 bp, Homo sapiens
tccaccaggacccaacccacaggctacttattgctggaaacctacgttgttccttggattgaagtaatctctccctcctctggtgcgcccacagcacttgcaccaacagtgggtactcaacagactagcgtgcctgccgaagaaggggtcctctgacaatcaggggacaatggggaattatgctctccagactttctacacacacaagtcacacaggaaggaaggtaaagagaaactagagaaaataatttttgaagaaaaacatttcaggaagtattgaaagtacacggtaactcagcctggggcaggggtggagggcagcagcactgtttgctgcagctatgctccttcctcagtgccctgcacacccgggacttgctcggtgagcatctctcgtgtcagtgacagctagtgtgagtactcttatgttcagctgcccctgactacctcttgactttggggacaagttacttaatc

SEQ ID NO: 134965 - DNA, 2395 bp, Homo sapiens
gtgcaggcgagcttcttggcctaagggcaggaagagatggcagcgggggagacgcagctctacgccaaggtctccaacaagctcaagagccgcagcagcccctcgctcctggagcccctcctggccatgggcttcccggtgcacaccgcgctgaaagcgttggcagccacggggaggaagacggcggaggaggccttggcctggctgcatgatcattgcaatgacccttccctagacgaccccatcccccaggagtatgcccttttcctctgtccaacggggcccctgctggaaaaacttcaagagttctggagagagagcaagcgccagtgtgcaaagaacagagctcatgaggtcttcccacacgtgacactctgtgacttcttcacgtgtgaagaccagaaggtggaatgcctgtacgaggcgctgaagagagctggagacaggctcctgggctccttccccacggccgtgcctctggctctccactcctccatcagctacctcggcttcttcgtcagtggcagccccgcagacgtcatccgggaattcgccatgaccttcgccacggaagcatctctcttagcagactgctccgtgaagccttgcaccaaacagctgcatctgaccttggcccacaagttctacccccaccaccagaggacgctggagcagctggccagagccatccccctgggccacagctgccagtggaccgcagcactctactcccgagacatgcgctttgtgcactaccagaccctgagagccctattccagtacaaaccccagaacgtggatgagctgacgctaagtcctggtgactacatctttgtggaccccacgcagcaggacgaagccagcgagggctgggtgattgggatctcacagcggacgggctgccggggcttcctgccggaaaactacacggatcgagccagtgagtctgacacgtgggtgaagcacaggatgtacaccttcagtctagccacagacctgaactccagaaaggatggtgaagccagcagcagatgcagcggggaatttcttccacaaacggcaaggagtcttagcagcttacaggccttgcaggctaccgttgcaaggaagagcgtgctggtggttcgccacggggagagagtggatcagatcttcgggaaggcatggctgcagcaatgctccactcctgatgggaaatactacaggccagacctgaatttcccctgcagtctgccaagacggagtcgtgggatcaaagactttgaaaacgatcccccattatcatcgtgtggcattttccagtccagaattgcaggggacgcgctactggacagtggtatcagaatcagctctgtgtttgcctccccagccctccgctgtgtgcagacggccaaactcatcctggaagaactcaaactggagaaaaaaatcaagatacgagtggaacctggaatctttgaatggacaaaatgggaagctggcaaaaccaccccaaccctcatgagcctggaagagctgaaagaggcaaatttcaacattgacactgattacaggcccgcgtttcccctgtccgccctcatgccggccgagagctaccaggagtacatggacaggtgcacggcgagcatggtgcaaatcgtcaacacctgtccacaggacacgggtgtcatcctaattgtgagtcacggctccactctggactcctgcacgcggccactgctcgggctgccgccccgggaatgtggggattttgcccaactcgtgagaaagatcccttccctgggcatgtgcttctgtgaagaaaataaagaggaaggaaaatgggagttggtgaacccaccggtgaagaccctgacccacggggcgaacgcagcatttaactggaggaactggatctcaggcaactgagagccacggtgatgttgtcataacctcagagtggagaggcagaaaccatgtgcagaggctgggagatgctgctgtttccagaggcgtcttagtctcacccaatgtgatttgtagaagcacgagacgcacttttatatcccggaatatttccctccggctttcgcctttgtaactcccatctgtggacccatcgtccaccagcccagctgcggggagcacagggcaggtggctgggtgaggatgccgccctgcagcatgtacaccgagtgtctgcagctggggacacaactgcccgggactctaacttccaggaattaaagactcaccacacacgaaggatctaaccacttcattttccatggtctaatcattaaattcccaatcgttttttctttttctgggtccatcactctttagccatatccacatgggctaaaacaggtgtaatagtcaataaaatggtcccagaaaaccatcgaccaggtca

SEQ ID NO: 134966 - DNA, 498 bp, Homo sapiens
cagaagcccaagggtcaagacctcattgagaagaaggttcagaggagctggactggagtttagtcaaggagagagtctttgtcattctccacccatgtctgactctgccatcacagagccctcctggtgttgagtaagaatgtgtgctggagattgactgtcagtgctttgccagttttcagcacaaaactggagcctgcctgttgaccatgagcctgccttgaggcagagccatcctggaagaacgttctccttccccagctaactgcagctgagccttcctaatccctacgaaagtgccagggcagcagcctctccttctcatccttccaggcccgcgtttcccctgtccgccctcatgccggccgagagctaccaggagtacatggacaggtgcacggcgagcatggtgcaaatcgtcaacacctgtccacaggacagtaagtgcctcaccatcctcagtatgaacagcccctggggcttggggaattatctctg

SEQ ID NO: 134967 - DNA, 2509 bp, Homo sapiens
gtgcaggcgagcttcttggcctaagggcaggaagagatggcagcgggggagacgcagctctacgccaaggtctccaacaagctcaagagccgcagcagcccctcgctcctggagcccctcctggccatgggcttcccggtgcacaccgcgctgaaagcgttggcagccacggggaggaagacggcggaggaggccttggcctggctgcatgatcattgcaatgacccttccctagacgaccccatcccccaggagtatgcccttttcctctgtccaacggggcccctgctggaaaaacttcaagagttctggagagagagcaagcgccagtgtgcaaagaacagagctcatgaggtcttcccacacgtgacactctgtgacttcttcacgtgtgaagaccagaaggtggaatgcctgtacgaggcgctgaagagagctggagacaggctcctgggctccttccccacggccgtgcctctggctctccactcctccatcagctacctcggcttcttcgtcagtggcagccccgcagacgtcatccgggaattcgccatgaccttcgccacggaagcatctctcttagcaggcacttccgtttcccgcttctggattttcagccaggtgcctggacatggccctaacctgaggctgagcaatttaactagagcctccttcgtgagccactacatccttcaaaaatactgctccgtgaagccttgcaccaaacagctgcatctgaccttggcccacaagttctacccccaccaccagaggacgctggagcagctggccagagccatccccctgggccacagctgccagtggaccgcagcactctactcccgagacatgcgctttgtgcactaccagaccctgagagccctattccagtacaaaccccagaacgtggatgagctgacgctaagtcctggtgactacatctttgtggaccccacgcagcaggacgaagccagcgagggctgggtgattgggatctcacagcggacgggctgccggggcttcctgccggaaaactacacggatcgagccagtgagtctgacacgtgggtgaagcacaggatgtacaccttcagtctagccacagacctgaactccagaaaggatggtgaagccagcagcagatgcagcggggaatttcttccacaaacggcaaggagtcttagcagcttacaggccttgcaggctaccgttgcaaggaagagcgtgctggtggttcgccacggggagagagtggatcagatcttcgggaaggcatggctgcagcaatgctccactcctgatgggaaatactacaggccagacctgaatttcccctgcagtctgccaagacggagtcgtgggatcaaagactttgaaaacgatcccccattatcatcgtgtggcattttccagtccagaattgcaggggacgcgctactggacagtggtatcagaatcagctctgtgtttgcctccccagccctccgctgtgtgcagacggccaaactcatcctggaagaactcaaactggagaaaaaaatcaagatacgagtggaacctggaatctttgaatggacaaaatgggaagctggcaaaaccaccccaaccctcatgagcctggaagagctgaaagaggcaaatttcaacattgacactgattacaggcccgcgtttcccctgtccgccctcatgccggccgagagctaccaggagtacatggacaggtgcacggcgagcatggtgcaaatcgtcaacacctgtccacaggacacgggtgtcatcctaattgtgagtcacggctccactctggactcctgcacgcggccactgctcgggctgccgccccgggaatgtggggattttgcccaactcgtgagaaagatcccttccctgggcatgtgcttctgtgaagaaaataaagaggaaggaaaatgggagttggtgaacccaccggtgaagaccctgacccacggggcgaacgcagcatttaactggaggaactggatctcaggcaactgagagccacggtgatgttgtcataacctcagagtggagaggcagaaaccatgtgcagaggctgggagatgctgctgtttccagaggcgtcttagtctcacccaatgtgatttgtagaagcacgagacgcacttttatatcccggaatatttccctccggctttcgcctttgtaactcccatctgtggacccatcgtccaccagcccagctgcggggagcacagggcaggtggctgggtgaggatgccgccctgcagcatgtacaccgagtgtctgcagctggggacacaactgcccgggactctaacttccaggaattaaagactcaccacacacgaaggatctaaccacttcattttccatggtctaatcattaaattcccaatcgttttttctttttctgggtccatcactctttagccatatccacatgggctaaaacaggtgtaatagtcaataaaatggtcccagaaaaccatcgaccaggtca

SEQ ID NO: 134968 - DNA, 997 bp, Homo sapiens
gtgcaggcgagcttcttggcctaagggcaggaagagatggcagcgggggagacgcagctctacgccaaggtctccaacaagctcaagagccgcagcagcccctcgctcctggagcccctcctggccatgggcttcccggtgcacaccgcgctgaaagcgttggcagccacggggaggaagacggcggaggaggccttggcctggctgcatgatcattgcaatgacccttccctagacgaccccatcccccaggagtatgcccttttcctctgtccaacggggcccctgctggaaaaacttcaagagttctggagagagagcaagcgccagtgtgcaaagaacagagctcatgaggtcttcccacacgtgacactctgtgacttcttcacgtgtgaagaccagaaggtggaatgcctgtacgaggcgctgaagagagctggagacaggctcctgggctccttccccacggccgtgcctctggctctccactcctccatcagctacctcggcttcttcgtcagtggcagccccgcagacgtcatccgggaattcgccatgaccttcgccacggaagcatctctcttagcagactgctccgtgaagccttgcaccaaacagctgcatctgaccttggcccacaagttctacccccaccaccagaggacgctggagcagctggccagagccatccccctgggccacagctgccagtggaccgcagcactctactcccgagacatgcgctttgtgcactaccagaccctgagagccctattccagtacaaaccccagaacgtggatgagctgacgctaagtcctggtgactacatctttgtggaccccacgcagcaggacgaagccagcgagggctgggtgattgggatctcacagcggacgggctgccggggcttcctgccggaaaactacacggatcgagccagtgagtctgacacgtgggtgaagcacaggtgagtgctgcctctggctgcagccccgt

SEQ ID NO: 134969 - DNA, 864 bp, Homo sapiens
ttccctgctgactcaagatttactttactattacctgcacactgacatgattcaggtcttgaccaacactgcatttttgtctgtctgtttcctctggcctgccaccttagccttatctggacctcagcagcagagaccatgccctcatgaaggcactggggagccgttcacagtcagcactggccactcctcatctcagcccaatgaagttttacatttccatgtagatgaggcactcgggatatagaaaagttgtgcagcttgactcaaagcagacagtaattgggtagcctaattgaagtttaactgcaagttccaactttgtaggctgcagaaaaaaaggaaaaaaaaaaacaacaacaacaaagtttaactgcaagtttcatgagacagcgatctgcctaaccattcactcctcctagaagcaaaagctaccgtgatcattgaggcacagccggtcttcatatatcctcaaaggagggggattagcttccacatcccttctctattcctggaggtgccagtagtgggagagtcatggcagaagttaccagaggcaagtggggcagaggcaagtagggtatatgtttggatcagtggatcagtgtcctttattgtgcagaaaaagctaaaattacagattcttctgaagggatacatagcagccgtttcaccaatgtccctcagtccatttgtccaggtccagaagtattcatgaggagctatgcgttagaagagagcacttgggctgggcatggtggctcacacctgtaatccagcattttgggaggccaaggtgggaggattgcttgagcccaggagtttgagaccagcctgggcaacacaatgcccccatctcttaca

SEQ ID NO: 134970 - DNA, 146 bp, Homo sapiens
tttgtagccccagcttgtctgccaatacttagcctgatgttcagtaatttgttctgattctgaatagtgctatttccacagacacaagacttagtttaaaactccagagaatatcctaaatgagtttcaagctgtacacgaaaact

SEQ ID NO: 134971 - DNA, 487 bp, Homo sapiens
gccgcctggggacactggcccctctgtcaggatcaatccctctaacactgtttggaacattccagaaacttcaacatttgacccactgggcatgcattgatgccagagaggtgagttcaacccagatgtctggatgggagccacgttttaagcccttgcattacacagcaaggccacaggtcctgcggcagcagtgggttcaagaaaagcaccttccatgggcctcagacaccagccagttcatagacaccaacagagtgtgggcacgccgtcctccaccccaatcagcagtggccagtgccctcgcccaggatagaggacacaaccacaagcttccagaggctgccctgcacaagtccagctccccaggctgtgaccgtaatgccacccttaaaggggctgctaaatggaaaatgttcctgagcacagctcgcatgcactgccgcttctgcaccaattcgctcatttagtcttcaaacagctcttg

SEQ ID NO: 134972 - DNA, 151 bp, Homo sapiens
agatattgtgatatttaaaattacagatctgatcattttattccattaccaaaaagcctttgctgcttcctgattgctcttatgatgaagcccaaattccttaatgtgttctatgagcccctgcatgacttcatgcctacctctccagtct

SEQ ID NO: 134973 - DNA, 611 bp, Homo sapiens
gatcttttgttgacacgtggtaagaaaaatctcctcttcagtataaaaaggcccatttgtttggttctcaaccagatcggtcttgagtcagcggcatttgaaactggagccccagtcataactgtgggctgcccttacccgacacacacataggaggaaaatttggatttttcacagatatcctctattctgccatgggagcctaggaaagcaggggaagttgcccttggcattgaccagacaatgaactcatcatcctgcttcacccagaaatagaaatgaagtgttaaacgtagctcactagtgtctgcctcagcattacagactgaagttaagttgcctaagaaagtacagagtgggaatgcttacttaatccatgataatgtagcctaccaccccgataatcccaccaccccactgtcatctgaaagcacttattaagcacctagtgtgtacacagcccttctttcctggagtgttccaaaaagagctctcaagtttgggctgcatgaacacaacgtgaatgtacttcatgccactgaactgtacactaaaaatggttaaaatggtaaattttatgttatgtgtattttaccattttcttaaatacc

SEQ ID NO: 134974 - DNA, 302 bp, Homo sapiens
tggcaggacaaagaccagggccagggtcagagccaggtctgtgctgggcctagggaagactagggtgagggccaaggtaaggccagggcagggtcaaaggcagagtagggccagggcagggtgatgacacatccggagcacagcagggcagggtgatggcaagaccaggggcagaccactgccagctcagggccagggaaaggccagtgcagagccaggaaagggtctgggtctgggtcagggccaggaacaaggcagagcagggccagggccatggcagagtcagggcaggtccttgacag

SEQ ID NO: 134975 - DNA, 759 bp, Homo sapiens
cttcccaggtacagcaattcttttgcatcagcctcccaagtagctgggattacaggtgcctgccaccatgcctggcgaatgttttttatttttagtggagatggggtttcaccaagttagccaggctggtcttgaactcctgacctcaagtgatccacctgccttggcctcccaaagtgctgggtttacaggtgtgagccatcacacctggccagttcatgttacgattaacatacaaagcactgttggcaaactgtggtgcccacaccagcaggctcagtagcagcaagtagcctcttagaatgcaaattcttgggttccactccaaatctcctgaatcagaaacgctggggatggggccctgaagtctgaattttcacaagccctcaggggattctcacatgtgcccaactttgagagccatctcggtaagggaacctcagaggcacgtgcactcttgaactaaactgggaagaagaaaaggggaggtcacatggtcatcaaaaagatggggcttttcgagtctgataggtctggattcatagccactgggacacttagacgtccttggtcttggtcctcaggtttggcttgtgtggggcctggtctgactcatggatggctgtgtgtccagatctggctggaggccttcttctctgtggacacttccccaaggggccaaagtggcccaccacacatgctggtaccccctggccaactgctgcaggcaatggtgtggattccatcaccagcactcca

SEQ ID NO: 134976 - DNA, 429 bp, Homo sapiens
ctgatggctttggtaactaaatggctgagtttcaaaacccgttaagaaataggagataaagccagtagtccaaagtgagcagtgagtttacattaatatgttctgtgtaaatccagctcccctaaagactacgcatttagtaaaagaataattagaacccttctaccttcaacagaaggacgtaagaaagctcctacatcatagcctgggcaaaagtctcttccaggaattcaagactactgatttaccttcaaatgaatctggggactaaatctatattagctatataatctagaaacccctagacaaaaaaataacccccaagttagtttctggtccatcaagcctgagtacctggaaaaagccaacacaaatgtctttgaagacatatccttaaaccaagttattgagaattcccagacaaaaaga

SEQ ID NO: 134977 - DNA, 786 bp, Homo sapiens
ctgatgccacaggatcgtatacttaaaatgatttggatggcaaatgttatgttatatatgtcttaccccaatacaaaagtacatctataaatatatagtattattttgggtgtgctcctctctgtatagaggttatcccgtggtgtgtgtctgtaacttgattttttccaattctgccctcagtttcctgctctttccgggcctcaggaggcttgacatccctttgaccacagcactgaaaggtgttctctttgctgagaactcagtgtcttctgcctggcagaggcttcggccctctgtttttgtttctatcccttatgcattctccccggcaggtgcccctcccagctttaagtgtatgtatactctggatttttccgtcttcagaacagtgctcaaaaatacctggggtgtccttctaacagaaagtgcagagacgtctgctgcaggattgcccacccccattttgtaacatctgctatttgagaactgctgaagctgccctgatctatgagggctgacctggaagaacagatgactgtgagtgtaccccaggacgttggcctggatggtgacagaccatgtgctctagtcaccgtgctggccagacccccacaggaatccaaaccatcccagagaaaataagggacttttgcaaggctgccccaggaagcacggaagacgtggaactgaatcccaggcctctggcccatcacccacgtggtgtccccaaggaagggagagttgtctcggaatgctcagggggactcattaaagcaacacttt

SEQ ID NO: 134978 - DNA, 199 bp, Homo sapiens
aggataaaaaaacacatagacagaaatacccagccatcccagctgagtccagttctcagctgaccagctgagaatgcagtcttatgagtgagtctaggtgagataagcagaataaacatgcagtcaatccacagaattgagaaataacgaactgttgttctttttaggctatgaagtagcagagaactgatacagaggg

SEQ ID NO: 134979 - DNA, 723 bp, Homo sapiens
attctaaatgttgaaaatatatttagtcttttatgatgtaaaatgatatttatgaagcacattcctgaaaggtgctgctaaaatgccttgacaggttgcttgtttatggattttcattttgcagagttcataaatctcagtcattttcagaggaatcacaagctactaatgagaaaacttacaactttagggtcttgtgaaaaaataattgaagagtaatagggaacaggtttatagacctgaggcaaaaactttttcagggagttctacgattttgaggactgtctctattctgtttatgtccataatattttcactacatttcatgaattgtttatattctgccttggaacctaaagggaccaggagtttggccagttacagaaggtaaaacaattgaatatacttacgatttatccgcttgtggaccgaggttcttttccattccagtttcatccctactggggtattcctaacactgttccccgttctgcccctttcccctcaacagatatcttggcattatacttcctagagaatatggaggtactcttgagattttttagttacttcctcccccttaaaagattatttaaaaatatctttctcaaacttttccttccattctcaggggaagaaagagctttctttctaaggttaactttcttgctgtgctttttattatcccttgaccagttagcctcccttgttctgactcctcta

SEQ ID NO: 134980 - DNA, 511 bp, Homo sapiens
tattattacatgacggtgttttctttagcttctgggaactcctcagagcttacagataaaatggttaccgtgagctccaatgagagaccaatgttgctttgccttaaatccacgcttggctagtagttgagttgggttgatcaagctgagctcttgcagactctggaaaggaggaggtgagagcagccatggctgacacctccatgttgggtcccctgagagccatggccatcttgggtttgacgcttgcacgtcagcctaaaggatgcatgatcctggcagctgctcgtgagttcagagagagggagaacaaagttgctatggttgaaaaacaaaaccacatttttttctataaggtatcagaaggtggatctggacttcaagttccagaagcatcagagatagactagaagattctaggctgttggggaggaaaaagatgtattttcctggcaggagttccttctaggatttagggtataaactactctatcgtcatatgctcttatca

SEQ ID NO: 134981 - DNA, 412 bp, Homo sapiens
cgttttgtcacaggagggtgacctaagggcaagaggcacaaggaatgaagtctctcccaagggccgaatatctgttgcatagtagcctggttcctctagaagtgccagtcccttaccagacaccattctgttatgtcagagtgtttacaggactatgtgccatccctttggtgaaaaatatgaattgacatagttcacaaaaatagacaactgactctattcttctggcttcatgtaagttaagttatagtatctcatattgagcttaccgagtttgaatatagcaacaaattgattttgtttaatgacatgctgttacgattatggaatacctagccaaaggctttccagtgcattcagaacatctcattgatcccatgattgctaaaacctgctcattaatatatggacc

SEQ ID NO: 134982 - DNA, 121 bp, Homo sapiens
ccaaggccagaatgctgcctcttgccagaggtggggacgggagggacactgaggactgagatgtctggggacaatgctggcttcacgaaagagagatgaggccaggtgcggtgactcacgc

SEQ ID NO: 134983 - DNA, 456 bp, Homo sapiens
gcttttgccttttgcagcctgtccaggcccagaatgtccttaactcggcgtctccaggacgagctcatcctcccagtgcgtctacaggcccgtctcctgcctcacaacaacctcctttggtccaactcctgctgagctgcttggcagcctctgtaggccacagagttcttaaagtaaagctttccaggcccaccttcggcctcccggcagcctcagcaatcaaactattccctcactgcggccaccgaaagccaagtttctccctgcctcacagcatcctccgaaaactgagcatttgcctcacggtggcctccccaggccacgaatctgcctgcctcccaggcagctgctgcctcacaatggtctctttaggcccagctcttgctaaaagacagactctccaggcacagctcttgcctcctggcaggctctgcaggcccaaattctccaaaagtt

SEQ ID NO: 134984 - DNA, 448 bp, Homo sapiens
ggaagctagttttctctaccttgtattagaggagcttttgaacgcccacataccttagaacttatcaagattctatcttgcatgtttttatgtcatgtcatttgggtatatcttgtttccccaaatagaatgagttccttttagggcaggaactgcaacttacatttcctgtactccccatctagtcctcaaatatctttatcttgctttatcctccaggaatgaactacttattatttcccatgcacaccgtgctgtttcttgcaccagtagctttgctcttgtcactctttctgattggaatgctcttcccaattttctgcccttggttaactcttactcacccctcaagattcaactcagaaattatttttagcaggaagccctccctgagccccaggctgatgctcctcctctgtgggtgtaagctctcatccctgctctgcaa

SEQ ID NO: 134985 - DNA, 219 bp, Homo sapiens
tcacacatgcgaatgcacactcacacatgaatgtatcctcacatgcacaaatggatgctcacacacgcgaatgcatgctcacacacaaaagcacacccaaactcaaatgcacacacacgtgaatgcatgctcacacacgtgaatgtatgctcacacacatgctcaaacacacaaatgcatgctctcacatgtgaatgtatgctcacacatgaatgtatg

SEQ ID NO: 134986 - DNA, 590 bp, Homo sapiens
atatcattagacacagggctaaccaaataaggtaccaccatacactcactgagagtcaaaaccacaataaggtaccactacacacccactcagaatggctaaaatttaaaaatctaaaaataacaccacctgttggtagcgacatagtagtccaaatggagttctcaaacattgctagcaggagtaaaaaatggcacaaccacctgcaaaactcataatttctcacaaagttcaagttaaacatacacttcccaaacaactcagccaactcattccttaaaatttattcaagagaaatgaaagcttttgtccattcaaagactggttcatgtatgttcacagcagctttatatgaaatacttaaaaactggaaacaactgaaatgtccattaacaggtaaatggatgagcacattgttttatgtccttacaatggaatgctattcagcaataaaaaagcaataaactatgatatacatacaatactcacctaggaattgttgtcaacaatctttgatccagaagtaaatccagacttagactaaggttgacataagagaaagctaagccaaaagtcaagaactagctccc

SEQ ID NO: 134987 - DNA, 1029 bp, Homo sapiens
attttattaagaactttaatataaaagatttttagcatcaggcaatcatagcagttagaagctaacaacgttagaagttaactctgttagaggctaactgctgtaagaaaaaaattgttagatgagctcatgaaaaatttgagatcctctcaagccttctcaaaagagaataaaactggcaagacgcagtaagagttaaacttttgggttaaaaaattaaaatatcttataatttcattgagtaaatcaatactttaagacaatttaattttttaacccaaaaggtgggctcttgtggttgtcagtaaactgcctgcattgactactaaaaaaaaaaaaaaaaaaaaaaaaaaaaaaaaaaaaaaaaaaaaaaaaaaaacacaaggaaggaagacaaaacaaaaaaaaaccaaacaaaacacacacaaaaaaaaagcaacaacacacaaacagcaaaaaaaaagaaaaaaaagagaacaagaacgagaagaagggagcccaacaaaaataatgctgagaaaaagaaatactaagaagagaaaaataggaaaaaaaagaagagaaattgagaggtggaaacacacacgtgatgtgactaacacagaacaagaaaagcaagagaacaatgaaaagcaaaaagaaaaaaagagaagaagaagaaagataaaaagaaaacataaccggaccactcaacaagaagaaaggaaaaacaaacacacgatattcacgtaacacgacgatagacaagaacaagacaaaaaagaaagaaaaaagaaagaaaaaaaacaaagagacagagcaaccggagaaaagaagccaggcaagggggaggaaacaagaagcaagagaggcagaaaaccgagagaagagagaggcagcccgaagcagacatacagcagcaaacaagacaagcagcataacagaatcaaacacagagaagagatagaacaccaacgaagagataaaagaaaggggagagggacaaaaaaggacagagaaaagacagaaggcagacacagaggaaacaaa

SEQ ID NO: 134988 - DNA, 390 bp, Homo sapiens
tgcctctgctataacagtgtccttggagtcctgaccatgggcatgaaatatatgagacccgaaaatatggaactgactgtaagctctctcctctggggaagggtgagtcataacccccttttggattcctgatgtctgttaaattcagtgggcattcactgaatggctgccacctccatgacatgaggcaagaatggcatgtaatacacctgtatatttgggagttctggctgatcacttctaaagggtcagggctcacaccaaaaccagtgcttactgggtgaccattttctattcattcatgcaacaaatgtctacctgggcaccttaccttagtcggttcaggctgttataacaaaaacaccacagactaagtggcttaaacaacag

SEQ ID NO: 134989 - DNA, 397 bp, Homo sapiens
tatgaaagtctcaacagtataagaggaaatgtagtatgatattttgattcatacagattacatttattgagtacctactatgtgccagagctgacagtttgaatgcaatggtgagcaacataaagatgatccatggcctcatggttcatatagtctagttagaaaggaaatcagttaaacaagaaattgcaatataatgtggtgagtgctatggtaaaggaaaggtactctgctacggcgcacccaaactgaaacttagagccttaaggtatgtttcctagaaggaagagtattgcaggcagtgtaggcttcactccatagcatgtgtgaagatccagagaagtgagaggcaattaaaatcggcaagcaaaagcatgcaatagtgagacagatgcat

SEQ ID NO: 134990 - DNA, 638 bp, Homo sapiens
gcctattatactccactataacatccaattaaatctgcccatagagtaacattttgtgctactggggttaagacttcaacatattttttggggggaacagttcagcccataacaaacaaaaagaaaattaatttaattatattgtatttagaacaggggttggcaaactatagcccataagccaaatccagcttgcagccatttttataaataaagttgcatgggaatatacctatgcccacttatttacatattgtgtatggctgcttttgcactttaataacggagttaactaattgcaagagagaacttaaagcccacgaaatctaaaatatttattatctggccctttacagaaaatgtttgctagcctattttagaaggtgttaagtgttgtagaaaaaaaaaaaatcagtaaaggggtataagaaacacagggtggttagggaagatctctatgaggaggtgaatttgagcaaaggctacaaggaattactctctatatattaacttatgaagatgtccactatgtagtgttaagtgaaaaaggttataaaacatttctcacttacatgatcccatctttgtaaaatagaaaagtgtgtatatttatacaatgtaaagttatataatacatg

SEQ ID NO: 134991 - DNA, 736 bp, Homo sapiens
ggtctgtctttacccatttgttcatttgaaattccccgtctttacttcccccataaccaggaaacagatctacacccatgtttaacttataaagagatataagtgagtttacataggtggagatcttgtacctggattcacattgtaggttttattacccagctttcccctctatcccaaagccatgattgccatagtggaatttaaagtctttggactaacactgaatcaagaactaactctacaaatgtattctctgcaggaggataagaattccaaatggcttctaattgttgcccatggcttgaaataaagttccatatagctaaagccccagcacaaaaacacttgaagacagccattaggtagaatttcttttcttttttagaggtcttatattggaaatgtaacagttgcaaagatatctaatgtttcaccttaaaatgtgagttataaattcacatttcacattgcctccttcctccttgagcaaacagactaggcaattagtaccaaatagtaactagttatatttcttaacaccgattattgtaagtaatttattaagaaaaaatctaggaagatcaaattatagcttttccagtaaatctggggctttttattcctgatctctctcaacaaggcagtttggcttctgaagattggtcctagctatacttaacaggaaacagatgacgagaagaagccaggaaaaaatacttggaatatagaacaa

SEQ ID NO: 134992 - DNA, 497 bp, Homo sapiens
tccaacaaacaacttctctttgttgtttgggttatgcttaagagccagcgttctgaaaatcctggcttcaggtttccaaactagcaggttgtgctcagagcctaatccttgctggatggtagcacatttcatcacacaaaaaccacagctcctcttggtccttggcctgatgctctgcagcttctttggccaactcaactaaaagtgcagtggggaagccccattcatggtaatttccagagaaccatttgcctcacttggggaaacgggtatagcacaatccctgatagtttctggacaaaaaggttccatgttttcccctatgcttttggcatgtcttggatgattccctttggtatgagtcatctccttaagaaatcataagatatacagcatttaactaaagtttgtaacaccagattctctccagaaggtgttttccttgatttggctttttaattcttcttgatttgaaaaatctttataccaaaaaaaaa

SEQ ID NO: 134993 - DNA, 201 bp, Homo sapiens
gtcacatttgcaaataaaactcatttatgtgatcctggtctccattgtagtgaatattatattaaaccccctcctgactttgaaaaatgctacttagttaagcaaataggacttagaatcccctctcaatttctacttagttaaggtcataagtcatttcactttctttggagtttgctgagccaacttaaagttgaagta

SEQ ID NO: 134994 - DNA, 149 bp, Homo sapiens
tacatgaggacaataggaatagtgtagttgcactagaagtggagagatcttgaatgcaagacatttctaagttagaattattaggatttgaacaatttttctgttggttttttttttttttggtatgcggaagaaggtatgaggataaa

SEQ ID NO: 134995 - DNA, 166 bp, Homo sapiens
gcgataatggggtgaactgacagagcagtgtggaaaaggcatatgggtgtgtgacctggtccctcagagactgccaagagttatttctgtaggtgggattgtggggaagaaggctggtgaggctgcagctactttggagctgagaagcgctctcccctgctctccc

SEQ ID NO: 134996 - DNA, 172 bp, Homo sapiens
gcaatgtgacagcaaaatacagagaaaacaatttgagatttgtgtctagtgtattgtgtaaccattcccttgagtagattttgttgtaaattgccattgattttagataagaaaaggaaagttttcctcatattaaaaacttggaaatgcatcattggttttgatttttttt

SEQ ID NO: 134997 - DNA, 566 bp, Homo sapiens
agttggcttaaagtacttcatgatttatgaggggtgattgctgacaaagtactgggaggagccgttttgagtcaacacgaccatttgcatctgccttcacttgctctcctctcttattaaattgagctatcctatgtgtgggtttttatagtaatactagaacactgtgagtcatacagagcagttgtgccgtcttcactacattctcaccttgctgtgagctggctacatgccaaaaaatatacattttagtaggttgctgatttttagattctttgaaggctaatgttcatagctcttactagcaatagtctgggtattagaacaaaaggagctgtctatttcagtatatttctttctgaccactccccagccccttaccacaatttcttctccagctataaaatctcctgtataactgcagatgatataaaacaaaaagaaaagtagagggaaaagtaagggcactatttatgaaatgttttaattgacactaaatattacatgtagcttaacttttcactatatatgatcagcccttaatgggtattagtgaaagccctaca

SEQ ID NO: 134998 - DNA, 116 bp, Homo sapiens
aaaaatgcatagtgttaaaaaaattaaatttagcctgaggctgtctccgtaatttgagtccctacctaaggaactgcagcctaacctaacttagtctattaaacacaccgaaagcc

SEQ ID NO: 134999 - DNA, 561 bp, Homo sapiens
tctcctcatacttcattgagaatagagaaataagtctttcatcttctcaacacgaaatcttttaagtcttcctatatctgtacctatcttcctttaacaaaaatgtaaagactgcttcctcaattataaaaggagaagtactctccttttaatcattgactaatcattaagcattggttatgtatactcaggaacttattcatatattctttctcaagtttatttcttctgtcatccccttgtgtctagtcttcccctcctctcctggatcatttctatcagcatacaaacatgatcaatttaagaaaacttttgattccgcagcctcatccagttactgcctcatttcattgttctcattttcaaattattcaagagttactgataaatgccaaatctattcccatatctccatttactcgtaagtccaattcaatcaagctccagccccatcatcatacccaaatcatttatgtcaagatcacagccactgtcactggtccttctctcatttgaactttcaacactagtaaggaattgactaatttctcctttcggaaa

SEQ ID NO: 135000 - DNA, 169 bp, Homo sapiens
cttgtatggctgtttgtccccatgtctgagcacacagactccctgggggcctgcaccaacaagctcagtggcggctgaggcctctcatatcaaggcttttgatgcctgcacatcctctgggggagggcttcagcgcagcctctgaggagctccactaggccagggactg

SEQ ID NO: 135001 - DNA, 708 bp, Homo sapiens
gactaacaaactgttaaactaagtactttgacaaatacacactcataatgactaaaagtcaaaaaaataccaaagatagttgaatttaatcattattgcccatgtctgatattctattgatgggctagtaatgtttggatgaataataaagacacacataattcacaaattattacatatgtattctataaaatttatttttcttgccttcttttcagcaaaatcatgaattgtggtcttataatccagaacacaattatattctatgtcattataaatttataattatatagctgtagtctgtttaaaataatgctctaaaagattaaaaagtatttgaattctaatgtagaaaattttgaatatatttaatagaaatataaattaaagtgagtgtaaacaattaaaaacatttttgtacatttttatgctttccaaaaggttatttttcttctaaaatattcagaattattgaagccagagaaattagtcaagaaaaagatataaaaggcatccagattggataggaagaagtaaaatgatctctatttgcagatgacatgggtcttacatgtagaaaagtctgaagattccatcaaaaaactgttagaactaataaacaaattcagcaaagttgaaggattcaaaaccaacatacaaaaaagcagttgcatttatatatactaacagcgaatatctgaaaaggaa

SEQ ID NO: 135002 - DNA, 356 bp, Homo sapiens
gctgggcgtggccactggcccttccccaggcttacagacccaggagctgcagctcagggccagaaagagcaaagcaaataggacagagccctcagaagggtgcagggagagggagaccccatcaacccaaccaaacaagtgtgggaaggaggccggccagtgcacctcagggacactctgctttatctcagatacctcacagcacctaagctatcattcatccacacacaaagtgaagattttcaaagttaggctttacccgtgaggtctggaggtccatttatcttcacagagaaaccgttttaatccgcaagaacctgctaaagatacatgtttctaaattaaagatgtgaatg

SEQ ID NO: 135003 - DNA, 267 bp, Homo sapiens
gggtgcagtccttcccattggagttggaattgggtcactaccaggagtaaattggcagttggagagcaggatgtttaagttggttattaggaaggggtataattactggtaatgacaagatttcgggatgaatatcagagtctgtgactgaggtgggatagaggacaagtttattgggggagagaaggtcaaggaaccaaatgagcaggatattgaaaacgattatctcagtgtggcccttggaacagcagcaccatcagcaccact

SEQ ID NO: 135004 - DNA, 1038 bp, Homo sapiens
ctttctgcaaaatgtgattcaactgagcacctaatctgtgttgggcttatatgtgcaacctgcttgtttccttatgaaaatagcttttacatacctcatataggctgcaggtcttggaatcctgagtcatagaatgtcagatcttagagttggaagggatttttaggctattggtactatcctcattttacagaaagaaccatcttaggcctgaagcaggtatgtgatttggtcaaggtcatagagcctaataagtgataagaataggtactctcacctagccgtgctctctttcaggccatacttttcacatgtgaggtactcagatgctctatgatgataccgctagccatacgtttctgtaaaaataatgtttacttgggccagacatggtggctcatgcctgtaatctcagcactttgggaggctgaggtgggtagatcatgaggtcaggagttcaagaccagcctggccaatatggtgaaaccctgtctctactaaaaatacaaaaaaattagctgggtgtggtggtgcgtgcctgtagtcccagctactagggagcctgaggcaggagaatcgcttgacccaggaggcagaggttgcagtgagctgagatcgcgccactgcactccagcctgggtgagagagtgaaactccatctcaaaaaagagaaaaaaaaaaaaaaagataatgtttacttaaacataggtctgggactcttgtgaacacattaacagttaacagtgaggcagctaagggattgcttatatagctaggggatagcctgaatgctgatacacctcaccatagcgaagtatttaacccctgaaatgggaaccacatcataaattgtgaaagtattgattgcctttgcacatgaattcctcaccactttctgtggtgaattaggattcctactcaaaggaaacagtaaaaacgtcttcatagaggattctccaactttggaaatttcttaaaaagaaaactgattaggccgggcgtggtggcttatgcctgtgatcccagcactttgggagg

SEQ ID NO: 135005 - DNA, 224 bp, Homo sapiens
ttcactcacacattcacacacactcatacagcccagcaagcagcggagcaagggtgaggactcagctcctgcctctagagctctccctaggctgctactctgaggacacagagctagggagaacctacaggtgactgccttccttgcagacaagccctcatctcacatggctcctttagcttttattctctctgcccagagcacaccctctgtccagcactgtt

SEQ ID NO: 135006 - DNA, 318 bp, Homo sapiens
gagaggaagaaacaacaggtgccaaagatgaatagactgttgttatccatttattgattggaaaccaatcctagatttctcttcttcctgttttaccaagtggcctctgcccgagtgtaatttttactttttagtgccgtctgcacctgtggcctttggacctaatgtttatgacagatgggccaggccgtgtttgcaccatttagtgggtactttccttctgtagtgctccatgccaccgtcgctgtggcacgggcccagtgggcatgtgtgtggggagaagcccacgtctgcagccattgttcagctgctgtcctc

SEQ ID NO: 135007 - DNA, 703 bp, Homo sapiens
gggcatggggcttggttcatttgaccttcatacactcacataaccacttctgttagtaccacccttaattaaacattatttttcatttgtcatcagatttggggagttttcagccattatttcttcaaatattctttctgtgccttcctctcctttcattgtggaactcctattatgcatatattggcataattaatggtgtcctaccagtttcttagactactcattttccttcatttctttttctttctgctcctcagattgggtaatctcaagtgacctatcttcaagtttgctgattccttctgctgttgagcccttctagtgaaattttcttttaagttattatacttctcaactccagaatttctgtttggctccctttaaaaagtcattttgatctatttgttgatcttctctgtttggtaagacatcattctcatgatttcctttagttctttgtgcacgattccctttagctctttgagtgtatttaacatggttgattaaaaatctttgattagtacatccaatgtgtgggtttcctcaggcagtttttactagttgccttttttcctgtgtatgggcaatacttcatccctttgcataccatgtagttttgttgaaaactgtaatttttaatattataatgtggcaactctggaaatgagatttcccccactccccagggtttgttgctgct

SEQ ID NO: 135008 - DNA, 261 bp, Homo sapiens
ctctcttgctttgaccgactcccctttactcagaaaactgctcattcttcacttctccaggatcacttccctgaccccaagactagattgggtcccttgcttattcatggttgtagcacgctgaacttctctttactaatacttgtcaacgctgaaattctccatttacttgagcaattatgtcactaatgtccactcctccactccatggtaaagttcaggcgagcagggctccgaatgtgctctcattgcctctccagc

SEQ ID NO: 135009 - DNA, 436 bp, Homo sapiens
aggggtcgtaacagttcagagaagacacagcaagactttatatctattgtgtcatccaggagcagagagagcagggatggggtatgtcatgagctgggtgtgatgagccccagagccattcaacagatgttgggtggggttactacagtagaacatgccctttccaatcccctagattcaggccacagaatttttggcagagaggagataaaaggagggatttctatgcaaggtcattttgaagtctatccatagtgctggcagcgtgaaccactattctatacacacaaagccatctagataacttactcatccattcatccatccacccatccatccatcctctgcttatctattagtttattctacaaatattggttgggcatatgctatgtcgcaggcaccctactacacactggagatacgattgcaggat

SEQ ID NO: 135010 - DNA, 556 bp, Homo sapiens
aaggaaaaacaaaaaaaagactcagttttcttcaagtgtgaggcaccttgtctgaggtgttcatgatccgaagggctctttatttaatgatgtcgacatcgaggtaacaaaacaggtcatagttatagagggagtttctccatgtaagagagagaggggatttggaatacactccaagcatctgtgctctccagagttggtgttcagttgctttctttcatgtgtgctctgtgcagtcatagaagacctctctctcctttgagcctgaaatgctgagtccttccaaattggagatggtcagccagtggttcctgggccagatctgatccatagatgtgtttcacctggctaacagtagtccatgtttaacttcttaaaattagttgccaacagcacaaattgcaatatcttattaaaaaaaaaaaacgttttctaacctcccttgaaaagccagaaaatctggcaataatggcctcttttttcccatatggcaaaaatcaacaacctgagtaataaatgtctccttaagactggacattcgctctcaatttattca

SEQ ID NO: 135011 - DNA, 247 bp, Homo sapiens
aaattgttcatgtattcattgagcagagatttactgagctgggcctatgccgggtgctgaggctgctgctatgaataataataataataataataataataataataataataacattggggatggtcatgataggtagcactgtactgagtgtaacaaatggattttcttatttagttcttacaggaattctcagagttcagagttaagtacagatttcatccccattttattatttgtatttatt

SEQ ID NO: 135012 - DNA, 926 bp, Homo sapiens
ttgctggtcatacaaaatcaaataagggaatatacagtctcaggcagagaaacagacaaacacataaaaacacatgcctacaacatggtggatgtcatgacagaggtatttagtcacaggcatgctaggatatgaaaaggaaaaggttatctcagttagactcgtcattctgagaagagtttccagaggaggtcttacagaaagacaatgtgatgtatagctagaagaaagcaagaagaggagaaaaggtatggaggagtggaactgcctgatgtgttcagaggtcccctggtagtatggtccctatgtgtgtgtgcctgctcacatgtatacaggttgtggagaagagagaaaactggccaagtcacaaggaagccttcagtgtgacacttaggagcttgaccattactctagaaattgtgggggccattgaacagcattgtccctgtttctttcaatgaaaccactgttctcccagtcatgtagacttgaaaccatagtgtcttctttatttattttttctctgatgttacccaaactgtttaataactacccttttaattcatcctttagggtgactctagacattccctattcttcctagtcttatgattttgcccaattttagtctcatcttctccatgctgaaaccacagctgtgtttccctgaatgttctccttccctccttctctcctgtcctccaccctgttctccccctccttgagaagttaacctacttaaaccactttagcatcagaaacttttagcagctttctgttactcacagtatttccccccaatacaataaataagtatgcatttggattggaatgcttcctttggctatccaagtccatgatctagcactaaccaattacctgacccaccgtctgatacagccaaactggtttctgctgatcctcca

SEQ ID NO: 135013 - DNA, 219 bp, Homo sapiens
ttcctaggtccattgccaccttctgaaaccttaggccccctcctcctcctcccagactgcctattttgctgccttttttgtgaagcttgttgtcttgatttcctccccaattgaatgggatttctctgtttcctttgattccccccttaacaggtgtgctctctcttggaactttttgtgagttagtctctcgcccccaaatctcattggactgtaagc

SEQ ID NO: 135014 - DNA, 685 bp, Homo sapiens
ctgtgagtatgcatcataatttttacctatgacacttacgtacatagtacctggcatagtaagtgtatagtgagtactcagagtaagctttgttattgcttgtattgttattaatcttaatattaaatatgatgacagggccgggcacggtggctcacacctctaatcccagcactttgggagacccaggcaggtggatcacctgaggtcaggagttctaaaccagcctgctaaacatggtgaaaccctgtgtctactaaaaatacaaaaattagctgggcatggtggtgggcgcctgtaatccaagctatttgagaggctgaggcatgagaatcacttgaacctgggaggcagagtttgcagtgagccaagatcccaacactgcactccagcctgggcaacaaagggagactctgtctccaaaaaccaaaaaatctgaactccaggaaggcaaagtgatctaaatttcaacagaaatcttctttcacttttatgaaccccttttgctttgttaaaggatggattctaataaaattctaataaaataaataaataatggacctggtattttttaaaagagcaaggcatcatatcatatctcagatattgccaagtaagacagccactttcatgcctatgtgtatgatagactcatacatataattatgtataactataatatttt

SEQ ID NO: 135015 - DNA, 277 bp, Homo sapiens
ttgtgatcagcccgcctcaccctcccaaagtgctgggattacaggcatgagccatcacgcctggcctagcaagtttatttttattatttttatattttactctactctcaaaaaatattcccttctacctcttctctcgtctaagctactaccgctatctttggaacaccttatctttgcttctgttgttctctctacagcttattttccgcataaagccagaatgatgtttttaaaaatatagatgataccactccccctgcttaaatttctcatt

SEQ ID NO: 135016 - DNA, 390 bp, Homo sapiens
aggacaacccaaggtaaggtgggggacttggcctttatacacttgcattgagatttgatgaaatctggctgccttgaggagaggaagtcccttcggctgactctgaaaagggctgagaggcaggacatagtggctcacacctgtagtcccagcactttgggaggccaaggtgggaggattgcttgagcccaggagtttgaggccagcctgggcaatatggcaaaaccctgtttctacataaaatacaaaagaaatagccggccattgtagtcccagctactcgggagactgaggcaggagaatggcgtgaacctgggaggcggagcttgcagtgcgccgagatcgcgccactgcactccagcctgggagacagaccgagactccgtctca

SEQ ID NO: 135017 - DNA, 425 bp, Homo sapiens
actgaagtgatacccatacagcttctgctcctatacaaccttaggctgcagggttccacccacttaatcaacactcacatctcagcttagtcattctttcccagagcaggaccccagggaatgctatctggtaccagagggttctagatttaggaacaaggggtgagggaagcagccctctctcttaaacccaaaggccctagtgttgagtcctggctttatctgccttccagaaatcttcccttgttgtctttttcctgacagcagactttggttacagccaccgtatccactccactatggactgaactgtgttcccccaaaactcatatattgaggccctaatacccaatgtgactctctttgaaggtatagcctttaaggaggtaattgtggttaaatgagatcataaggagaggactcta

SEQ ID NO: 135018 - DNA, 773 bp, Homo sapiens
gtgcactagcaactgaagttaggaaggctcgggtggacgctgccaaccagcaatccaatctgcctgatggccaaccctttgactgctgggagcctggagctttctgaatcagacaacttccagacttcacatgtgctgccaagcacaaggtatattctggaaaagaagaggaggaggaagaagatgaagaagatgaagatgaagaagaagatgatgatgatgaataagttggttctagcgcagtttttttttcttgtctataaagcatttaacccccctgtacacaactcactccttttaaagaaaaaaattgaaatgtaaggctgtgtaagatttgtttttaaactgtacagtgtcttttttggtatagttaacacactaccgaatgtgtctttagatagccctgtcctggtggtattttcaatagccactaaccttgcctggtacagtatgggggttgtaaattggcatggaaatttaaagcaggttcttgtaggtgcacagcacaaattagttatatatggggatggtagttttttcatcttcagttgtctctgatgcagcttatacgaaatactggtcgtcctggttaactgaataccactctgctaatttgcaaacacaaccgagacatcacagcagacgagaacacacttttgtggggcccatttggccccccgcggagaaagcctttaagaaaaccatgcgcttgtgagcccgggggcccaagagggaacatgaacctgggcgcagaaggggtacccacaggaatc

SEQ ID NO: 135019 - DNA, 532 bp, Homo sapiens
tgagtgctgcgtcccaacatcacctttcctaatccctgctgtgccttctcctggagggctggcaccagagagcattgcctggaaagcagagtaatctgtgctcttgagattttagagaataaggatggatattccttgttgggcgtgacttttagtcttcagagtaagaaagcactgacacagtatattgatcaggtttgttcagtggagtgtagtaaaggtcatttggtgaattccgtattttcaaatatttaggtttctaatatgatgcgaatggtgttacgtggatctgtgttgtactgacgctgacattttgactgtcgtttctaagtaacgtactactacatttggataaaaagcaccgtggcttaaccattgaagataatgttacaaacttagatagtggttgagctagcaagtaactagtgagaggaactttagctctatatgcaggagatcagagcacagggagctgcaccctggctgaccttccttgtggctacccacgccttgcaactgaagagcggtaatt

SEQ ID NO: 135020 - DNA, 428 bp, Homo sapiens
taaggagaaaggttgtcactaattttggtgctttttgagctcaaggtctttggaaagtgctccagtgggcagcccacttcatccctgcaataccttctgcaaaggtgtgacaaactttacaccctgccattaactcaattcttagggtttctcttctcaacctggacttcccaattttggctctcataatcactgctttcgctacatctcctgggaatcatagaacttaattggccagtctggcttctttgtaaacactaccctctgtaagtaagttaaaggagctagtccttgaggatcactgactactggaaaagagacgttcacttggttttctgtattcaaaagaatgttgaaagttgtcttttaagaggggaaaaacattttacccttttggcactcaaaaataataacataggattttaaca

SEQ ID NO: 135021 - DNA, 758 bp, Homo sapiens
cagagctctatgttaagctaaaggagaaacaccagggatttcaccctcttcagagtgctgtgaagtgggaaataagatcatcaactgaacataaggatgggtgaggcttaaggagagagaagcgctgaagtgggaaagtgaaggcactacggaaatgcaatttctgattagcgttaaggggccacctggggttcaacaacaagcagacttaagaacaaaagtgaagtggtggcaaagtgctggaccagatgttagaagtctccaatttgctctcgacaacaacaatccacaagtaaccctgagaaaagtcatctctgtttccccactggtaaataatgaacatctcccaaggttaattttcactggccctaaggggaggtggtggaggaccactgagtcaaaagtgatccaaaagctcataccaggagaagatttttcaattcagaacttgcaactgatgaccggtgtaaaagtttggtgaggcaaaaggatctaattatccagacgtatccacagagagaggaaccagatgaaatgcggaaagcacggttcaccttcaagagaaagaagtaggactctggggttttaagccgaggcatgaaatgtaccgattaatagcgtcattttgtaaccacaggtctcaggagttttgggaaggttagtatgagcttgtcagcattgcttattaataacagtgagattgctgctttgcacctgatctcagtcagacctcagaggctcagccactggggctggtt

SEQ ID NO: 135022 - DNA, 603 bp, Homo sapiens
gttcattaaggactctctcagaatcagcaggaatttggccctgataatttgttgatgtcagaaaaccaagaataaaattcctttagcctattccttcagttgtcaggaatttcttactaaattagctttctgcccacaatagcatgaatttattatctcatttgttatgaagccaattgatgattctgtactgaattattaaaaagtagaatatctgctgatcataagatttatttggagtttaatgggcagttagatgagaacactcatggaaagtggttattatttcaagcatcgttgccacagtcctacacttgaacctcagaggccacagaatatagaatgtttttgttctctaagttttgatatatggagaaatgggatagggtttactgagaatgctaaatacatactgaaaacaatagaatagtaatagtataccattaaaacagctggaacctccacagttacggatgaaggaggaacaaattgttagctctttcaaaactctacattagtttcttatatccaaagttcctggagttgcctgtcagctttgccttctgtctctgaggcaagctcaattatacctgtgtctggtcc

SEQ ID NO: 135023 - DNA, 392 bp, Homo sapiens
ctcatctctgttaaacatctgtgttgatcataggagaaagtgtagcaagaagagctatacttgtttaagtactgaatgtttctctttgaaacagaggcccaggtcattaagaaagaaaccattataagtttcttgaagactgatgtttattgcctcttcttaagtaattataggcatatagtgtttaaaaaaatatattggtacttaccttatacagagtcttaaaagttcaaatcttaataaagatgtttccccatcccagggttcttagttttcctctttttttttttggttattagtgtacttcagtagattatctttttgaaattgtttttgtttttatctaacttaaacatggatttacttactttgctctaatgagagtattatgg

SEQ ID NO: 135024 - DNA, 320 bp, Homo sapiens
tgggctgacagaggcatccatcacccgcctgggattccccccatccctccttttaccttcccccctctccctctccctctcttggcctataaacttgccggggtagtgggggttaatcagagaggaattatgagccaacatccccagcaggaggtgcatttaatgaaatcatgtgtgatttattttctgggggaggttggggcgagaagaatctgggacccacacctcctggcttccagtgagtggctgccttgtgcaaaaaaggagaatagtagacaaacaggaacccaggcccctgctcccatgccacagcccctgcc

SEQ ID NO: 135025 - DNA, 175 bp, Homo sapiens
tagagagactctagacatacggtcagaagtgcttagagacagcaaacgtatagacacgtagacatgaatgagaaaagtgattctaatgaacaggatgaaagtgtcccagaggaaatgccatatgcttgcaaaaataacttcatgttaaaggcactaccggagataattcacaaca

SEQ ID NO: 135026 - DNA, 104 bp, Homo sapiens
ggctctcaaggctcattcaaccctcatagcatcttggaggtgggaaagtgaggcaaaagaggttaagaaacttcccgaggccccttgagcagtgtctggttccc

SEQ ID NO: 135027 - DNA, 461 bp, Homo sapiens
gagatcgctgcactccaccctgggtgacaagatcaaaactccatctcaaaaaaaaaaaaaaaaaccaaaatgggtggtggtctttgacaagcaaaattatgccagctttacattttttttgtttgttttgtggttttagttttttaaaaataaatagtgaatattaattctgtatccacacccagtctccctcaacttcaccagctaggtcagttgctggtggagatgagctactcccccaacagggctggacacagttgggagaagagggggcagcccctgggtgtggtgcggccgttgccagccccaaccctgtcacttgtgcttttatcttggtcccctcccatcgcttccgttgttccccacaaccgtgtgtggctctgtgctggtcctgggtctcaggaaagcctcccttcagagagagaatgtgtgttcctactgcccctcccatttccctctat

SEQ ID NO: 135028 - DNA, 364 bp, Homo sapiens
tcagacaaagtaggtcattttagtgcacgtttatgagactcatcattaatttatctaaaatcaatttatacataaatagttctataagtttgttgtatagtgtgttcaactcatagttatttttacttatcctgagtttataccattgctccatatacatcttaattatttttactggaggattacttatttgggaaatctactctttgtttctgtgagtgtatttcagaagccagcaaaatttttgtaaagaaccagatagtaaacatttttggctttgtgggcaagaggcaaattcagaatattatgccagatacttctataaaaagagaggaaacaaatttccaaaatataggtctgctaa

SEQ ID NO: 135029 - DNA, 724 bp, Homo sapiens
cagggaacatcccccaacacgctcccagccccagggatctacagatcctcaaggttccactctggatcatttcagaaagatactgaacttgtcagtgggtcaaggggctcctggggggacacatactgggctactgccagatgggaaatggccccagcgagcctggggcagggaagacttctgcaaggcagtgtctcctcaacacagcctggggaagccttgtgttccctcagccataaacctccatttgctcaaagtttatgcaccatagggttgaggggggcagcagtgtgggaaggaaacacaccaaatatgctccaggagccctgggccactgtgtgacttctgagggcctctgaggacttctgacttctgtgtgacttctgagggcctcagtttactcggctgtaaactgggcattgtcaagagtccatctttctcagggtggttgtgagggccgtaggcagcgacccaacactccctgccatccaggtgggctgcggggccctggttctcaaccctaatggggcctggggctggtctaacgcgcaggggagctaaagaacttccccttgcggctgtggggaaacacctggtgttcctgggcccagggcgagcctgtgtgcattccaggaaaccacacccaggggagagggtgccaggcaccctggggcccccgcccacctgccctccaaaaggcccccaggcactgctgagggggctc

SEQ ID NO: 135030 - DNA, 340 bp, Homo sapiens
cccttcaggtctccatcccggattcattcactccacaaagccaccctgggggtctgcatgtaccacccgcagcacaacacgccagtccctctggagggagctctggagggctccaagctctgggcaaatgacccacacctgcatttaaactgggcctccctgctcccgtttaaccaccattcatcccaagtctcaagaaggcaacagaaaatgccctgtttggagctttgacagaaaaactcctctctcaagaaggtctgagttgatggttcgctttcttcgaaaacaagaacgatgctttaagttgggagcagccttcgtgtttggatgtggacaccta

SEQ ID NO: 135031 - DNA, 144 bp, Homo sapiens
gggtattatttcctggtcaagacattaggagctagtgtgccacttgcattctttccctttccctgccacagtgactttgggggccttgtgtttcagatggtggggtctccattgggctgatccaggaaggactgagtggagtag

SEQ ID NO: 135032 - DNA, 696 bp, Homo sapiens
gagagatctgattgagttgatcatagtggtttcctggcatcaatatttttctaagagttccctgaggtgatgggaatgttcagccaggggtgagaatgactgctatggaatgcttcataggaaatgttagctcagcctgtctgacttatcacacatgtgactaggcaagcttcacagatggtgaaattttattctaggactgtgggagcctcgataagtcccaggggcttgtgctcactctaaaaaggaggaatcaaccctagggaatgagtagtctggagacctaattgtatttaaaataatcagctgtgagatggtttgaacacttcaggaataaaaaaaaaaaaaaaaaaaaaccgtgtgtgtgcgggcgcgccctgggcccctggaaaaagctttttaagacccatgcgtgtgtggggcgcgcgggggccccaagtgggttaggtggaccgcgggcacaagaggcgtgttctcccagagggagaactcgggggccacggtaacaagagtggctgggagattttctcacgccccaaatataaacaacgcgccgggggggggaaaccgccagaggcgttttcttggaacaaaatctccacgaatgggcagtttccgggaggaggctaattcacgaggggactttattcacacgggggagtcaaaagcgagaggtagaatatcaaattaaccccg

SEQ ID NO: 135033 - DNA, 199 bp, Homo sapiens
tgccctcaggcctctaagtagaggggcccaaaacccatagacttagcagagttctcttggccatggtagcaggaagtaaacattgtctgggaaacggtggccctcctgccccagggagccaactgttaccaatggtgctgccctcaggggggataatgataccagctggcaggccatgcagcaggtccccaggggcctc

SEQ ID NO: 135034 - DNA, 750 bp, Homo sapiens
aaggcagtggtatcatcgcagagggcccattacggccgcaattcctttctggtaccataaataaatggcaataagaactgtaaaactgaaccagcatgcacccatacaaataagagattattttttgaggatagctactgagcacagaagacagaaaagcaattccttcatgagaagcacaagttatattacacattcttacacaagcaaaatggttttatctgtcatagtttgtacacatacacacatgcacatatacacatacatatgtgcgcacgcatgtgcacacagacaccaagttaaaagtcctgctgattcttaatgaccaaatccaactgttcgtcgtggggagtggcagataacacttcctacagttggatgcaattcttttgactttttgacttgtctgtaatgaactgcctttaatgggtgaatcatgtttttagttttataagaaacaagaagattagaagcaagtaaacaggaactctatgatcagtagtagactattatagtatattcaatagtcatatgtttttctccagttatacaatttacttgaatgatgcacaattaatcaattattattattataggagatggggtctctctatgttgcctaggctagaataaagtgtctattcattggtgcaaacatagctcactgtagccttgaactcctgggctcaagcagtcctcctacctcatcttcctgagtagctgggactacagttttgtatggttatatct

SEQ ID NO: 135035 - DNA, 313 bp, Homo sapiens
catctctactaaaaatacaaaattagccgggcatggtggtgcatgcctgtaatcccagctacacgggaggctgaggcaagcgaatcacttgaacccgggaggcggaggttgcagtgagccgagattgcgccattgcactctagcctgggcaacaagagcgaaactcagtctccaaaaaaaaaaaaaaaaagaaccaaagcagagagataagattctcatgatattcaggtagatagaaagacaaaacattatttttaataaatgaaagcagacccagagttactattataaatgtatatacatagaacatgga

SEQ ID NO: 135036 - DNA, 528 bp, Homo sapiens
tgggggtggagctggtctcaggttttctctagaatgacttggttgaatcctctcctttttgttagggataggaagtgattctttttcgttatcttcactttaattaagaaatcttgaacatatcctgaaaagtacctaccatggtaggacacatgcccaggtactcatgaaacagagccaaatgaatgttcactaaataatccatcattgccttcttcccggcctcccctgtggttaatttggggtcgcatgattagtgtgggccagtggatggtgagcaggaataatgtaggtgccattgaaatttagggcttcagtttttaccacaccagagccgagtccagctcaatgcctgtaatctagctgtcatcaatgtcaactttttccatatatgtttggaattgctctctctcaaagaaatacactatgatagcttctctcctccatcctctcacacccaccctcaccacccacctggaagtaacctctaccctgaaattggtgtgggtcatcccccttttatattaa

SEQ ID NO: 135037 - DNA, 241 bp, Homo sapiens
gactgcatcaacgccgcacctgacgatcaacgccgcactgactgcatccaacgccgcgcggacgctacgccgcgacgagtaggagggccgcggcggcgggcgtagaagcctagggcgcgagcccgggtggagcagccgtcggtgcagatcttggtggtagtagcaaatattcaaatgagaactttgaaggccgaagtggagaagggttccatgtgaacagcagttgaacatgggtcagtcg

SEQ ID NO: 135038 - DNA, 169 bp, Homo sapiens
cagccttcgggtcttgtccaagctctcccagggcaacacgtaccagagtggaaaacgccatgtctacccgccctagcaaattccgctgaaatgtcttcccagacttttacttacgagacaggcctccccttcccaagggccccctgctgatcctgtagggccattccct

SEQ ID NO: 135039 - DNA, 753 bp, Homo sapiens
atagaatgagaagagaatttattaccaacctatgggaatatcagaaattaaagcgtagacagacaaggagactacaaaggagattaagaaggaacagccagagaaagaggtcagaaaacagtaaaagtggaagagccaaagccattaggagtgagtttcaaagatagaatggtcagcagtgtcaagtgcattcagaaccttaaggaacaaagtaataacatgagcatgatgtgaccctgcagagaggaaagcagggaatactctgatctcattcttttccctctggcaaacccaagtagaggccatctagcaagggagtttattgacgtaggcaactgttggacgttgaaatgctgtcttacgttcatacccacaattatttcaccatggaaaagccagcaatacgcagagtataattagcttgtggcatgtatgtggtacattacgactgagaaatttgtgttcaccatgaccacaaagccatgccatagagaaaagatttgttggtttcgctccactgttgacaggaaaacgtggattagggttagtcttcatggatccagtcgtgtatgcaataaagaaaggcatttactacacaaagttcagaggacttcgaaaccattctacacacagtttattcacatcctgattatgatttagttgttgaaggaaataattaaaatcataagtataatcagactgtagccatcaagtgtgtgtgtttgtgtatatatatgtatatgtgtatgtata

SEQ ID NO: 135040 - DNA, 488 bp, Homo sapiens
tgtttatttctgtgttccctaccagatggtaacttccaagtgagtaggaatggtgcctgtcttatttgccaccgccctcaccccatgttttgcacagtgcatacaacaactgcaagtgttcaataagagctgctgaacaaatgaatgaaagattctttctacggtgagtgacctggagcaaaagggggcaggctctggagggccccattagtaacgatagtggcaagggagagctagctgagcatttttagcagaggagacacacagacttttattacaaaaattctccttcttcggatatgtggaaattgactttggggtagcagaaggggcagactggaggcagggagacctattagaagggttctataaacactgatatccttgctactaaaagtgtggtctgtggaccagcagcttggtcatcacctgggaaactgctagaagtacagaatgtcagacctgtcatctcagaatctgcattttaa

SEQ ID NO: 135041 - DNA, 771 bp, Homo sapiens
agtaagtactcaaaaaatgttagctataatgatttatattattaagtagtcctcatgactgtgtgattaccatctttttaagtgttttctagtcaattcctagtaactggagctgtagttcttagtagctggagttatcaacatatctgccttctgtgctagtaaatttttatacatctaaagttttaaaacctctgcataaacattccccctggaaaactagaatcaatggtattttattattcctacattgacattttaatagccaagaatggcttttaaaagaattaggaagacacatggcatctgtcagtcttgatatcatagttcctgttatgtttctgtttccatgtgaaccctgttttttcaaaagtttgtaagtcttttgctccatggtgagattcagcaacaagtttctattccaaagaacaatatttgtcctacttaaacctactctgatttccattttctttgctcaatggtttgtgcttctagaacttgagttctgtttgatgtttttgcaaatacaatttttcatatttggtaattttgaaaaacttaaaagctccaagtctagcacgttgtcctttgatttttaggtagtgagctgcttaatttggttttaatttaagataagggtttagaaaatattaggaattcactagaaatatatctctgttctacaaactaggatcctaggctgtattgggtgtttcttccttatagagaaaagagctgattctactttccttgaaaatttaaagtataggg

SEQ ID NO: 135042 - DNA, 274 bp, Homo sapiens
tattcaaaaagggtagttgttacacgtactttgaagccagtaatcacatatttgtgtttgttactgatgtcttaatgtcccaaagttgctctaagtagttacaagaacacagaataaaaatcatgagcttggggaaacatattttctaaccagtagaacatcaatatgccacaaatattttctctactgacaaactgtaatgaggtaaaaatgccttcctgcagtaaaatcttaccttgaggttagatgccatctatctgtagctaaggcatcc

SEQ ID NO: 135043 - DNA, 142 bp, Homo sapiens
tctataataatactttcctggagggattctgaagaatatctccttgaggattttaaagaagatgggaagagaagaaaaagtaacacaagaaagaagagggaacaaagatggaagacaataaaacacatcaaagagaagaaaa

SEQ ID NO: 135044 - DNA, 777 bp, Homo sapiens
gtggtgaaacaaaatggggttggagatatttaaagcaggtgtgtccaatcttttggcttctctgggccacactgaaataagaagaattgtgttgggccacacataaaatatactaatactaatgatacctgaagagctaaaaataaaatctcgtaatgtttaaagaaagtttatgatgttgtgttgggttgcattcaaagctgtcctgggccacatgcattggacaagcttgctttaaaacatcacaaccagagagttgtcactatttgaactgtccggaggttcctcggaagacaccactcacaaggttgtctttatttgacctgactcagagctcttccaatgcagaaagtattttcttcagggagagcatttgtctaaaacaattataggaagtgtttaactttgtggctgcccgaggcagtggttaagagttggggcaaacaatagactaatcaaaaagcttaaaaggaaatactgggagattagatattcatagggcctttgaaaagctccagcacattcctgaaaacctaaggaccatgtacctctctagggctatgctcctacttaaaacccatgtatgtcctaagctcccacttgtggctgaccttcaggctctgtggaagcaagaagtaaaggataaataaggcattgattgcctggctgagtgctgaaggtgtatcccaatatgcaaacagaatccctcagcgaaatcagagagacttactggttccagtcatttaaggaaaatgttgtccactcattagctgacca

SEQ ID NO: 135045 - DNA, 432 bp, Homo sapiens
tagcacttgaggcgacgccctcagcacgaactgggaccctagtgccttgggatccggagtatagtgcttgattctattgagaagaaacgaggctaatgtggactgggagacacacgggacctaatcagcctcaagttagcccttttgaagtaggttgctgcacctgcactttccccctactcgtccactagttcaagatttacaagacgttgacaatgagggctgaccagtcctggttccactcctgcagctggggggcttctcggtggacccacactttttttttgagacagggtcttgctctgttgcccaggctggagtgtagtggtgtgatcacagctcactgcagccttgacctcctgggttcaagtgatccttcctcccaagtagctgcaactatgggcatacaccaccatacctggataatttttc

SEQ ID NO: 135046 - DNA, 338 bp, Homo sapiens
gtcaaagcctgaactgaagaatccatctccttctgttccaggacagaacgttagcaaatttaggtatagactggagcagcccaaggtcctgggctagaaggaccaggatggggaagaagtggcctctgccattctggaccaagctgggtgccttggggagttctttcttgacctctccgtactaggaggataccaccctaccaactaggctggagccctgtttcagtctgtagacttgaattgggaggaaagggagtcacctgacccacctctgcaggaccctaggaagctggagaaagggagaagtgtgttgtaggcaatccaccagattctaatcc

SEQ ID NO: 135047 - DNA, 752 bp, Homo sapiens
gcttttgaacatctagactcaggtgtgggtgtgacagtgtcatgggagatcctaataggaagtacaatgatgtttcttttaatgtttgtttgtttatttgtttatttatttattgctgtttcttaaggagcagggctaacccacagaaagtgtgcccagagtcggccagcacaatgattttattcagatttatggaaatttttctctaaaaatgaatgggaatatatgatgggatagaatacaacattcgcatggctttttaagatactatgttagattttaaaaagaaatttcagacttgttcagggcagctttgaagtatgtgttcatgctggggaaaattgagaaacccagcatattgcactagtcttccttcttaatcctcgctttcactcctacctcacaatccatctaaaaaagtgattctgataaattgccttttggttttcttaaaatgtagtgtattttgttctggacccacagacttcttctgtggtcattttctaaatgtgtactaagtagcgtttctaagatcttcattctgttgatgccatgtcagtcttcctgctcaacttaataccctgtggaaaagataagaatgtctgctgtgtgatatttaccatctgaaggacagggagagagatttctcagtgatctcattcatacatgacgccagccacagaacaagggtctgacttgagccttttctgtcccagcaccttgggaatgggccacaggctacacgactgtta

SEQ ID NO: 135048 - DNA, 551 bp, Homo sapiens
cattttctcagtagttctctctctagtctgcttgctagatgtttaacttaaaaaattctacactatgtagcacttgtcaatttaaaagactcaaaagactgctggggcattaaaaacccagctttgtttctgtctgcaggtttaataaacaatgaataccttcatattccagaaaccaattaaaaatcattgtttttttttttttaacagagccatacctttcaaggtcttttctgagaaaaatcattaccagtcactttcttatttaccagtgacaaattgtagggaggagtcatcttaagagacctctgtgtcctttccttatacaggctggagggatgttaccctgtaggtttttggctagctgctagttttatgtgttcaacagggcatttagcctagccttgctagatggccttactgaagtgcagtgcttcgtttaattgtgtgaccttaggtgatctatttcatctaaatttggtctatttgtgaggcagagataacatctgaatggcttatctcacaggatggttttgaagattaaatgagat

SEQ ID NO: 135049 - DNA, 282 bp, Homo sapiens
acccacctagctttccgtcacctgccctcttacctaaccatgacctgagacattttctcctctaactccatggctcctgagaggagtctttagactcgtagtttgctttgcattttccacttgttagaaaaatgctttgtggtgcccatcctcgtgtgcataactttgctttcttttactttagttccttagattcccaaaagtggtcaaagggttgggattttttcctagctcttgatattgccagattaatttccaaaggggccgtaccaatatataacc

SEQ ID NO: 135050 - DNA, 1008 bp, Homo sapiens
cggtacccctctatccttaatctctctacccttaatctctctatccttaatctctctatccttaatccctagtaaagctccccacccactggatacctggaattccacccaggtaagacttgctattccggaatgagaatgcttttccttctctctcgtctgctttcaaactgcaattgaccctaaaagctctatatatgtaaccataatctttagtgtgaatgtgtttataaatacacgttttttccctcactgtggttgtcattaggttaataccagtagctgagggggcctccagaatgagggagagtggagtgggtgaaagattcctgatgggagtagggagacctggattcagatcttgatcatgtggtttgaagccagtgtttgggcatcttggatcttccatatgctcctctgggaatgtggggaaatgatatctgtcttacagttattatgtagatttaaggagatagtatgcagaaaagcatcatacaacaaattagtttccttcctataaatgtatctcagagaacttagccacatgcaggaccatcaaaaatctataaacattacaataaggcaaagcttgagctaaaatgtggaggaattagtgaattttcctgtgcacatgataattcacatgagatagcaagatgttttcaaatatagctgccatacaatgattgttttttgttttttgtttcttctgtgcagtgacaaatgagatcctctattgggctttatgtctaaagcttgcatttcaagcaatttcctcactcgaggtcaggagttcaagaccagcctggccaacatggtgaaaccccatctctactaaaaatacaaaattatccagtcatggtggcaggcacctgtaatcccagctacttgggaggctgaggcaggagaatggcttgagcccgggaggcacaggttgcaatgggctgagatcatgccactgcacttcagcctggacaacagagcgaccctccatctcaaaaaaaaaaa

SEQ ID NO: 135051 - DNA, 154 bp, Homo sapiens
ggtatctgttggaaacatatttgctaaatggcatactaaaaataaaaaagaatttataaaatgaaagaaacttagatacaaaaacttaacataagacttggttttttttcaggatcatacaaaatacatgttgaacataatctgttagttatct

SEQ ID NO: 135052 - DNA, 198 bp, Homo sapiens
gggtgcgggtttatacttcactgctcttcaggacatggaattaaaccagataataactttaaaacagataatgaaagaaatctaagaacttaaaatatataaatttccagaaacaggtgaagaagacaacaagcttgttaaaaagaagaaggaccatttacctcttgcttaggtaggtagtaatactatatcattgaa

SEQ ID NO: 135053 - DNA, 461 bp, Homo sapiens
cagaacgaggattcgatcacttagaaatcctgctgagagctgggtatacgatgattaagatgacctttggccgcgcccgagctgcggttatttgtatcagacattgtgctgggtactttacataaattcatttattcctcactacaaactttgaggtaatttttgcaacccctattttataaatgaggaaattaggttgtaaaagttgcagtaatttacacaaaaaaggtcccccagttaggaagtggcagaaaggtatgtgaacctaggtttacttatcctgaaattcctgccccagcatgacaacgctgagaggcagtatcttaataaccagcgcacctgggtagttctgccacaccatcatttcctctgtccttagggagtttgcaatttaaaagggtaaataagacaggtgtagaaatatgaagcatttacacaggatgccaatgttgcagtatgaa

SEQ ID NO: 135054 - DNA, 752 bp, Homo sapiens
gggctcatgtgatcctcccacctcagtctcctgagtgccaccaattgtgtgccaccaagcctaattttaaaatttttttgaagagaccaggtttcactatgttgctaagggtgatcttgaacttctgggctcaagcaatcttcctgccttagcctcctcaaatgttggcccatagttttaagtagtaaatccttttctgtacttctgaagtttttatcatcgtatgtaaaatttagtgatgtcacatcaatttgcttaaagtatagattattttcataattctaggaaaccagatattaaacaataaacttattctaggagtttagttattttatatgtatatatatatatgacaaagccccatctctatatatttataaaacataaaggccatgggtggggaatggatggcaggcaccatgtctggcagcaaaggtggcaagaagaaggccctgaaacagcccaagaagcaggccaaggagaaggacgaggaagataaggctttcaagcagaaataaaaagaggagcagaagaaactcgaggagctaaacatgaaggccgtggggaagtggcccctggccacaggtggaattaagaaattggccaaaaagtgagctgttgcttgtgcctgaggaaatggtaaccctttatttcatccatattgaaacatctgtattaactgccataacaccttttgccacctatagctggaattaagtgttgtcttggagctgttgtacatttaagaataa

SEQ ID NO: 135055 - DNA, 464 bp, Homo sapiens
aatccaactcttaactatatcatgaggaggtttcttttcccatcagttctcacattttcctgtcaatctgctgtataataattttactaaatctgcagatcaacactgccacccttttcaaagcttaagggagaaacaacactcaatctggacatattccatagccctgctgtttctggtaatgcctccaaatgggtgaacacaaatattggagaaaaggactgtgcccaaccaagtgcctggcagtgtgagtgccatggtcaatactgtaaaactgctcattgggatttctttcccagtgaccacgtaaacagctggatgcaatatcattaggctgcaggcaaaacggggtgggaaggagggatggagacaatgcctccccactgctatgcacaccttatggatttatcaagccaattttctgacccatgagaagaacctggcttatgtcaatatgtgcctta

SEQ ID NO: 135056 - DNA, 175 bp, Homo sapiens
caaacagggcacaagaaggactcctagaccaggagtcaggggcctgggtttttcagaagcagctactgcataacaggggacactgggtaaatcttcccccctctgaggactctggctgctgtctgtacaggctgaaactgatgctctctgacctcccttttctgagactgtcctg

SEQ ID NO: 135057 - DNA, 338 bp, Homo sapiens
catttaaatatcctgttactcggtcatcgtgtattttcttagtgtatgcagtgtgcagggtccttgccaggcactggggatagagtggtgcactggtggtccctgactctggtaaacttgcagtaagtctgtgacatttttgaattctcagtattcaatactcaggatccagatggtaattaagccagcagagtgcagaatgaggataaaagagttggaacaggactgtgatttacttgtactatattggatctagccttctatcaaaaactgaggttagtatgcatactggaaatgaaattttctaaggagttagagattttaggatcctaaggact

SEQ ID NO: 135058 - DNA, 307 bp, Homo sapiens
attacatccttctagaactggaatccttaggggtgtgaatgtgtctataccagaaatcttatgaatgggtctctcacagaattttaaataagaattcttagttcagataaattgggtctaagaagaaagcacctatcatgacatatttggtgtcagcgtgagttcttagggcatagtaaactttggcttgagttggtcttcttcacagagagtgaagagaagatgcagaagcctgttaaatattttagagccaggaccctggagagtttattaaaagcatactcccaaacctttcgttctctgaact

SEQ ID NO: 135059 - DNA, 894 bp, Homo sapiens
cactctaagtcacctcaccagcataaatttaggtgtaatcaaaaggaacttcttatgactaacaaaacactctcctaacactcaggaaactccatgagttcaaggaactctgtgccaggaacagagacaaagaccaaacataaaatttactacacctcagccaggatgttaagttcctctccaggtgggcctttccacaggactatacagacgtcctctgggtacagtggaacagctggcttcctccagaaagaacaacacaagtatcaaggcagaagtttgtaattcttctcatgacccagcctcagaaagcacaaatcatcaccatccactgtattctattgctgacacagagtcaaccagctataattcaatgtggaaggggactacactagcatgtaaacaccaggagccttggatcattggaggccattttggagttaaagtggctggagtggagtcttggatacatcgcactcgagtcaaaccctggatactgccaaaggaacccaaaaatccaggcgacagtgctagctattcctgtgaatctctagaggatctgcgcctgctcttcaagcaacaaccttgaggaaagtaactagaatcgtagatcctcgtggccctcccttgttgtatttttctttttactgttctcttaccccctttcactctcactgcacctcctccatgctgctgtactaccagtagctccccttaccaagagctcctatggagaatgcagcttcccggaaatattgacgccccatcgtataggggtttttctaaaggaaaccccactttcaccacctacacccatatgcccctgcactttaggccatacatttcaatccctgtatctttaacctccttgttaagtttgtctcttccagaatc

SEQ ID NO: 135060 - DNA, 414 bp, Homo sapiens
cagtgtctgagcccaccaccccttatctctccatctcccatgcgctgcatgtcacacagcccgttatcacaccattgtagagttgtggctggtttcttgtgaccatgtttcctggttcccatcctggtacattgacatgcctgtatctgcatctgcttgctctcctccttaaattgtaaatttcctaaaagcaggaatgaaattttattccccagctcactgcacctccatagaaccacactcaagtcaagcagtactgttggaaaacatcaccattccttaggtttaaacgttgaaggggaaagtcgtgattacaaagtggaacttggcttaaggctaaaagtaggaccatataatttattgtcacatcttgacacttttgagagtgaagggggtgctattcataaccaccag

SEQ ID NO: 135061 - DNA, 343 bp, Homo sapiens
aaagagagagaacgcccctattacatagcacatgcaccacctggagtctgcagtgtactagacccgtttatccatccaccaacccatcttatccttctgatgcatttcatagtaaaatgcaaacaccagtatgcttccttatcagggtttttaactaaagtagtgcacattcgaacgctacagaaatacataaaaggatttttctccaagtcctcctttcctctaccactgtgaaagtgtgtgcatccttccagactttgatctgtgcctacacatgcatttgaatatgtatggtagctagtgctttcaagcagggggatcacacccatgtgttcatccacta

SEQ ID NO: 135062 - DNA, 195 bp, Homo sapiens
cacaaaggccctatcccacaggcactagcatcatttacatttcaaagaggctataaggcaagggccaggcttccactgcccggccaggatctgaacctccctccaggccctctgtcctacaaagtacctttcaaatgccccctcctccaagaagtcttctctgactcctccctgcggccagaagtggcaaccctg

SEQ ID NO: 135063 - DNA, 394 bp, Homo sapiens
atggtagataataaactagattaggacttcatttctgctggacttccctagcacttaaaaaattcaacatatccaagataatagtcagttctctttttaacttccttaattctataaataaaggcattatcatttagtcatacaggatcaaaacacacattctctctctctcttttcttttttcttttttctttttgctccctatttctcctggatctcacccacacaaaacctctgctttctttctttttttggagacagggtcttgctctgttgcccaggctggagtgccatgatcgtagctcactgcagccttgacctcctgggatcaggcagtcctccccccttagcctcctgggtagctgggactacgggcatgtgccaccacacttgg

SEQ ID NO: 135064 - DNA, 423 bp, Homo sapiens
agtcttatatttctggaaggttttatttgttcctttttattcttatttctctaatcttgtcttcatgctttattttattaagttgatctttagtctctgatatcctttcttctgcttgattgattggctgttgatacttgtgcatgattcacaaagttctcatgctgcgtttttcagctccatcaagtcatttatgttcttctccaaactggttattctagttagcaattcctctaaccattttttaaggttcttagcttccttgctttgcgttagaacaggctcctttagctcagaggagtttgttattacccacttgctttccattatcttatttaagcaatgcaacaacattttgagataagaatttatattagtgtatgggacatatagatcaagtgcttagcacacatgcccatatac

SEQ ID NO: 135065 - DNA, 496 bp, Homo sapiens
accctgtaatagctgtgtggagtacatattctacaactcagtaatcccacctctacatatatgccctagagaaactcttgatcttttgctctaagacagtgctactattcaaagtacaagtccagaaggcaataaagagtttctgccagttaaatcaacactatgcttctttcattgagaaagccttgctgtgattttttaaagtcatttgaaacagtgtgattagtgaggaaattaacttgtatttgggcgcaaactccttatctcaaagaatgttcatagcatcattgaaaatgtccatcagtgaaagaatgtatatgtaaattgtttatatttatataatggaatgttgtacacaatgaaaatgtaaaaacaggccaggcgcagtggctgacacctataatcccaacactttgggaggctgaggtgggtggatcacctgagttcaagaccagcctgaccaacatggtgaaaccttgtctctactggaaaaaaa

SEQ ID NO: 135066 - DNA, 541 bp, Homo sapiens
gcagtgaatgcgttgggaacaatatggaaaactgggagctgccttggaatctacagggccgggacccactcgagccatccacactttccccagcctcctccaaaacagcacactttccggctgaagaaaagaagaatggtattcatgcagttcccattttacagatgaaaacaagaggactttttctgtgaagtcaagaaagtggttacaatggtactttcagcctgtccgaattatgtattgcccctcccctttttattaataacattgaagtgtgatgggacaaccactgaagccgtctgttgaaacctgctgggactttttagccattctcttcaacataaagaatgggtgtttttggagggggtgagaggaatggggaaatgttgtcaaagagtacaatgttttagttgagacaggaggaatatattttgttgagatctacagcacagcatggtgactgtagttaacaatgaagtattgtgtatttcaaaattgctaagacaataaatttcaaatgttctcaccacaaaaaagatag

SEQ ID NO: 135067 - DNA, 629 bp, Homo sapiens
acccacgcgtgcgcggacgcgtgggtcgacccacgcgtgggggacagttcatctcccacgggtctacagcttgaaacttggcattcattataatgtttcgtggctgctgataacctacagttcacaatcttcggcctggtattcattgtccaccaaaatctggcccacataggaatttactggacagctagactaatgcaatcaatttccgcaagctcttttccagtctccatgcatttactctatgcttgaccccttcggcccttcttcctcctccttgactaactgaagcctatctttcccttaacggccagctcagctcctctattagccttccccattttctgaatttctgtagccattggtttagtaagagcttaggacttagagtcagttcattttgagttcaaatgtcagttctgtcatttacaagtcgtatgacctttggcatcccgttttacatgtttgaacttaagtgttctcatctgtaaaatggagataatcatagcacctacctcacaggatgacttaagatcaagaggatgaatataaagcatttagcacaagcctggctagtagaaaaatacttaataaatcatagctaatttcgttgtcacttggccacaatg

SEQ ID NO: 135068 - DNA, 468 bp, Homo sapiens
tgagacagagtttcattcttttgcccaggctggagtgaaatgatgcgatctcagctcactgcaacctctgccccccaggttcaagtgattctcctgcctcaggcttccgagtagctgggattatagccattatttttctttaagaagacactttattctacaggcttctgctacatggaactctcatggatgtttctcctagctcttgagccactcttcttctatcagatttcaaaatgttagagttaggctttatcctgggccctctactcactttagatgaggtaattactcctatagtattgaaaaatacttatatgaaaataagtcccaagtgtatatttccagccaagattaattatctcagttccaggactacccaaatgccaacataccatctccattggattgtctcacaggtgttgcaaatacgtttaaacttctgttggtacccatttcccttgctgc

SEQ ID NO: 135069 - DNA, 227 bp, Homo sapiens
aagacccctgtctctatttttttaaatatattggatacattaaaaacattttaatgtaatagatcatactcttgccttcagaaaaaaaagtattatctgtattaacaaggagagagagtaatttgattcaatccaatcttcttacagatgaagagattaaaaccttgtaagacattacaaggtttatcaagctcatatagctttggtatggcaaaattgaagtaggg

SEQ ID NO: 135070 - DNA, 358 bp, Homo sapiens
agcttcttttccttccctacccctggttatcattgtcctgtgccccttatcaaaccctctttagagtaaatgtatgcttttgatgctctatggccgtggaaaggttttcctaattccaaaatgtctatgattttcaggacatttctgagcatctttctaaatgctcagaagcatttagaaacaagaccttgtttcctctatattagactgttttaaaaaattttgttatcaatcatattttggattggtggtatttagtccaaattccaaatattcgagcccattgtcagaccatgtgtctcatttttctattcttttttttttttttttgagatggagtcttgagtctctgttgccc

SEQ ID NO: 135071 - DNA, 468 bp, Homo sapiens
ggagggagttgctgtcgcacgactgctgtggaccttcccagaggaaggcagcacgtcacagaccctggggagtgcgtgatcccgaggtgtcctccagagctgcagagcgggcgtccacaggagggacagtggaactgcggcggggaggggacccggaataggctctgatgctgccagtcacacactgagcctcctaggcctggagcccctggcacccagctcagctcccaccctgggccctgggtgctgctggctttatttggcttagggggtccttggcccaatgatggcagtgggcaaggcctcgcttggctccactctgcccggggctggacatgcgtgcctgcggggcagctggctccaagggtctgaggggcctcacgcccagccccaggagggcctgcccatctcagccctcgccacgtcctggtgctcattggtacggcggggtttcctgggctgcacccg

SEQ ID NO: 135072 - DNA, 682 bp, Homo sapiens
catttttcccccatcatttcatacctactctagttacaagtcatttcttccttgaagcaaactatctcttcacaatttgtgaatattcattgccttctgatagttctgttctagaggcacacagttatttgaaactttttgctatttaactccttacaaaagggtttcagttggctttgaaagcataaccacacataagacatctttgtacctacccagcgtcttgctatgagttgtttagtgaatgtttatcttaggtaaacaatgtttccgatgaggattaatttaaatgaccacaatcatgatagaaaaggctgatttattttgccaaatagaacacctacacataacattactcacgtaaaaatatataaaactttgctttaaagattagtccctggctgggtgcggtggctcacatctgtaatcccagcactttgggaggccgaggcgggcagatcacctgaggtcaggggtttgagaccagcctggccaacatgggtgaaacctcgtctctactaaaaatacaaaaaattagccagacattgtggtgggcacctgtaatcccagctattcgggaggctgaggcaggagaatcgcttgaactcaggaggtagaggttgcagtgagccgagatcgcgccacagcactccagcctgggcaacagagtgagactccatct

SEQ ID NO: 135073 - DNA, 448 bp, Homo sapiens
cagaaacgctccccttcccaagttgccttctttttttaggctgttaaaacataatttgcctgacagcccacctggccattcacacgtggttacccaggatgctgtgcacagcaggccactctaggtatctgaggtcccggctcacccgaggggtgctcgacgttccttcttgtatagactccacctgccagcactgagagcccctggaaggactgagctgcaggccgccctcaatgagggtccttctagcataggaacagacgcatcttacagaggccctgccctgtgcatgaagctttggcccaaggccacacttctccaaaggcctgctcagctgctctctgctccagtcctacggagtctcgggctatttgaggggtaggaaccctgttctttccaaaatcagcagaaggagaggtgggaagcaacagctcagcctctagcatct

SEQ ID NO: 135074 - DNA, 129 bp, Homo sapiens
tttttttggtcttctcttttttaaatcttggttagcctaggaaatggtttttcaatgttgtttatttttttttgaaaaaaactttttatttaatgaaacctatgcattattctcttaatctctattttt

SEQ ID NO: 135075 - DNA, 403 bp, Homo sapiens
actgcaccgcatgctaggcctgggctgacgaaccacagccagtcatttcttcattccttcattcactcagaaccagtggattcagcccctgctctgtaccagtgtctgggccgggcattagagggatggcagtgagtgagagacatggctctcgccctggtgtaacttccagtccagcagagaagacagacttacagagtcattacaatgacactcaatgacagatggagtttcactcttgtcgcccaggctggagtgcaatggcaggatctcggtcactgcaaactctgccttccaggttcaagtgattctcctgcctcagcctcccgagtagctgggactacagatatgcaccactacacttggtaatttgtatttttagtagagtcaggggtttgccatt

SEQ ID NO: 135076 - DNA, 121 bp, Homo sapiens
ctccctcagtgccaaccccaatgctggtacttgcttgactgccatttacatagtcaaatgatttacttgaggaagcactggctgtccggattagacttaagctattgatttttggcaccac

SEQ ID NO: 135077 - DNA, 194 bp, Homo sapiens
agtaaatagtggtaaggtgggaaatggacaaagctatgtagctagaatcagaagtctttgaaatcaaaacatcaagattcaaactatttaggggcagtggggctgacgtggtgaccgtgggcctgatcagataaaacctttacaaagaaacagtagctctcagactcacctcctgagacagagttgttctgagg

SEQ ID NO: 135078 - DNA, 407 bp, Homo sapiens
aaaaagtttaaaaattagcggggcatagtggagtgcacatgcatggttcagagataagctatagatttaggctgttaaaatacagaatataggggttcctttctgtggccctctcctttctagagtcccccatcactctccggcgtcatcccgcattatcctggccttctttccgggttcttctagttcctctggccagaaagatgtcagtctttctactgaagttgtagctggtcctgtgccttggtgatggcgaccacagccaggttggggcaaagctgcaaaagtggggatctcaatctacatggatcacttactcccagttggattctcttctaaaatgcatctgtatttcagtctccagagtcctcaggtagttgttttttgtgtgtgttttatccacagag

SEQ ID NO: 135079 - DNA, 563 bp, Homo sapiens
tgcggcagggcgttgggcggaaggggttcgcacgccaagaaccgccatgcctggggatcaccgccgcatccgcggccctgaagaatcgcagccgccgcagctgtacgcggccgacgaggaggaggcgcccggcacccgcgacccaacgcggctacggcccgtgtacgcgcgcgccgggctgctgagccaggccaagggctcggcctacctggaggcgggaggcaccaaggtgctgtgtgccgtgtcgggcccgcgacaggccgagggcggcgagcgcggcggcggcccggccggagcaggcggcgaggccccggccgcgctgcgcggtcgcctgctctgcgacttccgccgcgcacccttcgcgggccgccggcgccgcgctcccccgggcggctgcgaggagcgtgagctggcgctggcgctgcaggaggcgctggagccggctgtgcgcctgggccgctacccgcgcgcgcagctcgaggtgggcgccgccgcccagccctgaaccagaagcctgagcaactacggacgcaagccgaggaccgtgctgccgccgtccacga

SEQ ID NO: 135080 - DNA, 720 bp, Homo sapiens
tgcggcagggcgttgggcggaaggggttcgcacgccaagaaccgccatgcctggggatcaccgccgcatccgcggccctgaagaatcgcagccgccgcagctgtacgcggccgacgaggaggaggcgcccggcacccgcgacccaacgcggctacggcccgtgtacgcgcgcgccgggctgctgagccaggccaagggctcggcctacctggaggcgggaggcaccaaggtgctgtgtgccgtgtcgggcccgcgacaggccgagggcggcgagcgcggcggcggcccggccggagcaggcggcgaggccccggccgcgctgcgcggtcgcctgctctgcgacttccgccgcgcacccttcgcgggccgccggcgccgcgctcccccgggcggctgcgaggagcgtgagctggcgctggcgctgcaggaggcgctggagccggctgtgcgcctgggccgctacccgcgcgcgcagctcgaggtgtcggcgctgctgctggaggacggtggctcggccctggccgccgcgctcaccgccgccgcgctcgccctggccgacgcgggcgtggagatgtacgacctggtggtgggctgcggcctcagcctcgcgccggggcccgcgcccacctggctcctggaccccacgcggctcgaggaagagcgcgccgccgccggcctcaccgtggcgctcatgcctgtgctgaatcaggtggccgggct

SEQ ID NO: 135081 - DNA, 690 bp, Homo sapiens
gacagttctggattccaatcttgatcaaattactaattttgtacatatgtagcatttaaaacgattttttttgttaaacattttcggttgcattttcatatttcataaatcttattgcctgtgggccttcttaccctttgaagcaatgaatttcagagcttggggagaagcacaacaccctcctacaagaacagacctattgttcgttttgactctaaaattagatatttgtttgaatctataagttaagggcttaaagctgagcaaaataatatattaattaggatttgcatttggttgtatgtaatggaaacctggctactacatcttaatagcatttgtttttctctggaaaacaaacagagcaccacgtagctctggactacaaagacaaaggcaggtagtccagagctactgtggtggcaactcgatgctattgggaccctgtggtggtcaattttgtgtgtcacgctggctaggcaagagtgcccagttattcaatcaaacactaatccaggttgctgtgaaggtaatttgtagatatgattgaattcactttaaggaaggaaattatcctagataagctgggtgggattgttttaaaccatctaaaggtcttaagagcagaactgatgctttgctgaagaagcctcattccacctatggactacagttttatcctgtgcccct

SEQ ID NO: 135082 - DNA, 262 bp, Homo sapiens
tgttggaattacaggcgtgagccaccacacctggccccaaatgctttttaaaaaatgtattttcctttaaaatataaggagaggttatctgttctagtcacttgtaaagtgtacccaggcagtctgtgttttaaaagtaactgaagcagctgtagggagaagggtctcctcagactgtggcaagacctggatctgagaaattgaaactgtcccctcacatgcaacatgtgaactgaagagtcagaagacagccctgagattc

SEQ ID NO: 135083 - DNA, 392 bp, Homo sapiens
aaacaagcactacctaggcaagtaatgctgcaggcaagcatttgaacagtcgtggcctcataaagggcagacacacccctggcagccagccaggctcattaacagcaacccagagacttgccgaggtccttctaagaatctgatttcatgagtcacgctccatgggcacaccccaaatttctgtttgttttggaaaactcagttaccctttacaaagaataactcctataaatgataatgagaataattaaagctacatgtgcaaaaacaattaacttattactgatgctatcagcggatgttgtcaactaataaatctgtcaagttggcaagtgaagaaaggtggcatgctttcaaacataaatataaaatgtttaaggaagaaaaactgg

SEQ ID NO: 135084 - DNA, 227 bp, Homo sapiens
actcacccctgatgaagagtaactcacattaaatgccttccacaatatatttactcagggcctggaagactgaatggtttcccaagaacatttagagtggtgatttgaaggactaccagacaacccatttaatacagatcttaggaggagggaactctctgaggagcctctaccagtttacttccagagctgccttctttcttagaagcagattgttaaacttcctt

SEQ ID NO: 135085 - DNA, 153 bp, Homo sapiens
gagagatgaactgcccatgtggagatgataaacatcacatggcattttaagtgaatacagcacttgagctcacagcaacagcaacaggaggtagctctgaaattatggtagtagtgcagtatgtactatagttaatcttatccagttgtaatt

SEQ ID NO: 135086 - DNA, 540 bp, Homo sapiens
aaacatcagaaccatcccctacttctttctctccctcataagctctgtgcctctacctttatactcaatcactactcagtttttctgaccttgatcattctgatttctcatacctttcgctcttctctcagtttccttgaaggatttacctcctgctaaatacgaggcttcatctgtagcctgtgttcatcttggatgtagctcttctcttacagaacttactacttctttgctttcggctctcagctctcatccctacagaggtgactccatcacctatatatatatgtagcttccacatttccaagacagagatgtccatcctccagctttaaatacaccatgggcatctttatggcatgttccagagtcactcaaattcaagcacatctttaagaaacaacttttgcttctctatttctcttgtagactctgcccctaataagctgcccccttcctccccccccctgatataaactctgggacctgcatctccaatgggactctaaggacctcaaacctgatttcacttctccaaac

SEQ ID NO: 135087 - DNA, 717 bp, Homo sapiens
gccttgatactaagcaattaaatgtcaatgattaatatggtgacttacatttgctcaaatacaaaatagactataaccttgagttaaatgtgctgtccatggctcatctgatgagcataggtcactaattatgtttgtaaatttactgtggttatagagttaacattggaacaggtcataactaatgttaatatcagcataaataacaaaaagtaagataatatagcccataataagaccaaattcatgggaatacattgttctagatgtatgaagttgaggtttatggactattcaagatattaaaactagaaaaatggaaaaaagaaccatactgggttgaaaactcttgaagtgtattagaatttcaaggtcttaaagtaatatatttaataaaatacacaaccttttcttaaaggaatcaggtcatcattttcagtacccactttgtacctctgccctaggtgattgtccagacatgtaatggccacagagtattttcctttctgactatttggaaaggccatgtgtccttgtagagctaaccagggattttgaatcagaaagggcttggtgaaaattcttgcccacaactaccaaatataagaccatggttttgtttaatctttctgagtctcagttaattcatgtgtaagatagggaacagtaataactaatctgaaggcttttgtgaagaataaaaactataatgtatgt

SEQ ID NO: 135088 - DNA, 271 bp, Homo sapiens
tgatgctgttctcagcaagcagcagataaatattggacctgatcagtttgtaaataagttgaagaactgacattctcaaatctgtccattttagacacagctgggataccgaggattgaatctgaaatgccaacctagggctcttccctgtgaggcctcactggattataagattatggggtttttctatccaaagttgttcgagtctcataggtcttctagactaaaaatagcttccctcttctcaatttatttcaatactttcaactgt

SEQ ID NO: 135089 - DNA, 808 bp, Homo sapiens
gttcctgattctgtaggtgacagagagaagtggttttctcatttttttgtgtgtgaaattattcgcatatgaggaaaagatagctcaaaaatagaagctctttcattatctctccacaatgtagtgtggccccaagtgactattttgtggagacacggtaatttggggtggctaaatcattaccccgaggtgtgtcagatgctgccaagacctccttcattcatgtggccaagactgtgggcttcctggctggggaggcagaggccctgctcttctgctgctaaccttggggtcagcgagccctgatccacacttcctctgggcaacatcaatggggctgctgaacatattgagccagacttgtttccaagagatagaaggaactagagcattggggaaagtcccaagtaactctagccctcagccacctgctgtggctgaagatgaagtctctgcagcttcaagaatccaactggctggtgcacattgttctcattggctagatcattcctccatgtagcacttcactaaactcattaacaaatatttacaaatgacattgctttttggggtcatgtatatttcagtcttcagaatccatcaggcactcaaatcccttggcagttctagttctctcccctagacatgcctctgccccctactactcagttccttttatttctaccattcgtttttattttctatttcatttctttacttttttagagacaaggtctctgtcacccaggttggagtgcagtgagctgagatcgcgccactgcactccagcctggtcgactttgtctca

SEQ ID NO: 135090 - DNA, 294 bp, Homo sapiens
gcctgggcgacaagagcaaaactctgtctcaaaaaaaaacccgaaaatgctgggtttaactgccaattaatgtcaacattctgaatataaattcagtaatgcaacaatggcctcgggagccgttgaggcatgtaagactatttttgtctttctgctaaatggcctcagctattgtgcttttcgaacctaaatctcctttgtgtgtgtgcatgtgtggatgggtgcatgcgtgcatgtgtgtgtgtattttgtatttcttcctttgccaacttagctctattgatgcagcccatt

SEQ ID NO: 135091 - DNA, 375 bp, Homo sapiens
ggacaaaaagcgaagccctggatcaggaagcacaatgcggctggtatttagccgcttctcaatagtgcctcattcaatccccggggcctcattgatgcccgccgcgtgctggagagcctctgagggtcagtcggcgacgggcaccgtctggaggggtctcgccgctaacccggggtggctctgtctttcgggagcaagaggggcccagctattctcggtctcccctggggcagaggcagggaggtgggcagatgggcaaggtcaggcgtcagagaggctggaggaagcagtgagggtctgggcaggccccttgcaccatcgggctcccaggagtcgaatccaattcagtaaacactcagcggagtagcttagcgg

SEQ ID NO: 135092 - DNA, 323 bp, Homo sapiens
ggggaattttatatgaaaacgaattatttcaaacccaaactatttatttatttatttatttgtttatgacagacagggtcttgctctgtagcccaggctggggtgccctgatcatggctcactgcagccacaacctcccaggctcaagcagtctgcccacctcagtctcccaagtagcacgcactaccacacccagccaggggcagtttttaaaacaggtttgggctatccaaattgttcttccagagttcttccaaaatgctaggattacaggcttgagccaccgcactcggcccaaacttttgttttaaccgtagattaaa

SEQ ID NO: 135093 - DNA, 253 bp, Homo sapiens
caagtgatccacccaccttggcttcccaaagtgctgggattacaggtgtgaaccaccccacccagccaggggcagtttttaaaacaggtttgggctatccaaattgttcttccagagttcttataaatgctaagagaatatacagaattactgttaattagatgttagaatttattatagctagtatgtgttttggggggtaacttaattttcatataatttcaaacttgcagaaaagttgtaagagtagtac

SEQ ID NO: 135094 - DNA, 600 bp, Homo sapiens
cagcaacttaacacaacatccatttttgtgggtcagaaattgagcatggctttgctgggtcatctgcttaagggtcttcacaaatttgtaatcaaggtgttgactggggcctcagaaatgccaaggttcaactggggcagaatttgccaccaacctcattcagtagtcagcagggttcagttcttcaagggttgttgggctgagggccttagctccttgttggctaatggccagaggccactctcaattcttacccagtagtcctcttcatcaggacaagcaagtatgaagagccagagaggaaatctcagtaagataaaagtcagtgtcttttgtaacctaatcatagaagtaatattctgtcacttttactgtgtttgtttcattaaaaaccaatcatggaaacaactgaattgtccattgatggatgaatgaataaagaggctgtggtatacatatacaatggaatattatcagtctttaaaaagaagcagtaggctgaggcaggagaatcgcttgaacctgggaggcagaggttgcggtgagccaagatcatgccattgcactctagcctgggcaacaagaatgaaactccatctc

SEQ ID NO: 135095 - DNA, 181 bp, Homo sapiens
taactaagattagaataaatttggattatccaccttggattggctggttaattcttcactgaaattttccaggtctttgttataattctaattttgttaatcactccaattttaggttgaatttttccctttctcctcatcatttttctccagcaaacactcagggaaaaattcaaggatg

SEQ ID NO: 135096 - DNA, 341 bp, Homo sapiens
cccaggattggtccttggtgccttctttggttcatttggttaggtcatggatggtgtggatgccagtagatattgaagagttaggtatttattgtagtcttcactgtctgggcttatctgtacccatccttcttgggctttccagatattttaaaggacttgggtattatgatctaaactgtatctacgttgtggttcttgcagcctcatagaggtaccaccttgatggtcttggacaagatctgggagaattctctggattatcaggcagagactcttgttctcttcccttactttctcccaaacagactgtgtgtgtgtgtgtgtgtgtgtgtgtgtgt

SEQ ID NO: 135097 - DNA, 454 bp, Homo sapiens
ataaaacaaaggaagtcataaaaacgcagaataagggatgtgatttggttatggtgaataatcatttccaaagcaaatgttgtcccatctgaatcacatagcccatcctattggccatcaaattcttctcaaccttctttccctcttctgcactctaacaaagagactacggtggagtttatagaagcttctacaacgtggttttgttgtatatagatgtgtatgtatgtctatgaatatgtctcccccctatctagttttagaaaccggtattcctaagttatggctttattttcttcactattgatgttcttggaagagtaaaattgctagttcattctcattagtcactgttttttcatttctctttcaattctctgaagctcttctgaatgtcaaaaacatgagggctccattttagtatccctagttgttgattgcctgtgtctcgtga

SEQ ID NO: 135098 - DNA, 320 bp, Homo sapiens
tgtgagattggcaagagaagccaagatatccaagctatttcccacctaataagtacctgggagctcaagcttcctctgtggctctgatggcactctacctgggagaagatatagcaaggagaacctgacagatcatccatatggtgccatctgtggtaagagattagtcactgcatacttctcattagaaaaaatataaagaaagccagggaatcccatgataagtcccagccaggcaaagcagaagaccttctgctcttcccatctgattcaccattacctacaaatacaagatcaaagataaggaacgtaagatctga

SEQ ID NO: 135099 - DNA, 366 bp, Homo sapiens
  misc_feature (29)..(30): n is a, c, g, or t
  misc_feature (32)..(32): n is a, c, g, or t
aggatcccagttcgacggagactctccanncnatctctcccaatctccccatcaagcagcctgtcaattattcacttctatccttctcgctgtgggaggggattgctggagaggacttttcagctggagctaaaaggtttacagctccagggctcatttagggatcagctttgtgacagcaaggaggttttgggcactgtggtggtctgtacatccctagaaggtgcccagaaaacacttactgagaatgcatacatttgcacagcatggggtaatatgctaggcagtttccaaaggtaaccaccctcagttccttccctctctgtgcttatagcctctcattgacatacagagagtctccgtcga

SEQ ID NO: 135100 - DNA, 257 bp, Homo sapiens
acaccagttggttgaatgaatgaatgatgaatgctttgggcaatttctctcttctgaagaaagggctcttatttgtcactcagagaaggcagagcagattagattaggatgacttcattttagaaatgggaaaatgaaaaaacagataggaaggatctcctgaaataagatagttttgttttgtttttttgatatggagttttgctcttgttgcccaggctggagtgcaatggcacgatctcagctcactgcaacct

SEQ ID NO: 135101 - DNA, 341 bp, Homo sapiens
ccatcagtgtcatctgatagttcacctctctccccctctttcctgcctagaaactctacttggctttcagattatctccctctacatttttatcctagcccacgggctgtaccttctcagcatcctttgctggagagtacagtatagatagtggtcaaaagcacaggctcctgttggagtggggctaccttgaattctaacacggctacttgtagctatgtgacccttggaaggttatttcatctccaagtgcttcagtctccccatctataaaatgaagataaccctgagggctgcaagggttaaatgattaatatacacaaactgcttaagagtttctg

SEQ ID NO: 135102 - DNA, 203 bp, Homo sapiens
tgaccttttattgaggtttcaaggacgcttttgacaattctgtgctctttttacggtggaatttagaagcctatgcatttgtgtgtgtgtgtgtgtgtgtgtgtgtgtgtgtgtgtgtaatactggaacaggcctaatgttacaagttaaaggtagatatttggtctagtttgtacttgaaagggaacatcattcaggaaata

SEQ ID NO: 135103 - DNA, 424 bp, Homo sapiens
tcagttatcagtggtgtgagaaaaacacaacggtggattcagaaggagaaaccaagtcatctgcatttggcctcagtgtgtggactgtcctgaaatttgagtacagatgtgttcatgtcctgggattagataaaaagagaggaaacacacagtgaattcttatggtctgtcatttcagttggccatcttctgcccctctgttctggaagcttctccactaaaatagagcacccaacttggttttctacttgctttctggcccatcttgagttggaggaatcatgtgtttcagaactcttgctggtggtgggtgggagatcaacaaatgatttcattaagctgtgtgttcttaataaactttgggaagatttgtcgcagagaaactcagatagggaccttgtgatctcagcagtcatgggtttat

SEQ ID NO: 135104 - DNA, 212 bp, Homo sapiens
actttgtatatactagatatttaataacccttggttaagtgaaagaatgagtaaataaaattttaaaacaaatagtctacatagttgcttggaaatacttatttaatggtctgtacctcttagctaaatcagcccattttaatggaaatacaggcaagagggaataagaagtagatgaacagcatgttccaaagtgggtaggatatgatttg

SEQ ID NO: 135105 - DNA, 426 bp, Homo sapiens
aaccagagagaacagaagaggtattatatagtgaaccgttaataaaaactctgtaaatgaatacagtatcacctaacagttcaaggctttatagaagtataattggttttaatacttgaaccctaatgtgaaggaatgtgagaacattagtagaggacagaaatacggactttgaaaggaaagcaaaaacagtacaaggaaatcagacagaaacagtacatgatgcagaaagaggtgaagaatgagtcaaagagatgcagaggggtaatggaagtgataaaaccatagaaattaaagcagaagattgagtctataatatggcagagaaaaatcgaaatgttctctgttggattaacttggcctagctggggttttgtggttattttcaagagtcaatatgtcatcaccaactcttgaaatcacttc

SEQ ID NO: 135106 - DNA, 1460 bp, Homo sapiens
agtagctgggactacagacgaccgccaccacgcctggctaatttttctatgtttagtagagacggggtttcaccgtgttagccaggatggtctcgatctcctgacctcgtgatccgcccgcctcagcctcccaaagtgctgggattacaggcgtcagccactgcgcccggccaaaaatgccatccaatctttaccgtgtctgggcctttgaaaggtgcatttcacctctcttagaggataacaggagccttccgaggcagcctcggaccgggagctcccatagcctcgcctgtctggatgcctgacaaatcagcaggcaaggggccttgctccagatcagctgagcctagtttggtttgagtttggggaccctggaaagtatcacaaaagcaaggttgtaggaggggggtgggggagggaaccaagagtgatcaacaagtatcgaccataaacatatcttagaatcctatattgaattgactggatgactcaaaataatgtcagaattattttaaaatgttacttttgtgtttgttcacatatctggctcctccccaatgtcatcccaaggaaagctgagagtccttttgtttttttatttttcctaaaacaaaggcctaaaggccctaatacacttaatacctaatggggccacaaagaccatgatgcatagtaaatatttgatgataataaaatgtatttttgtctcaataaatgtatggtcctttgccacacctctcattacttgaagagttttaaagagtccattagtttagccatctgcatggttatggaaactgccaagcccaagagttggaaagtctttatgattttatattttactgagaaaaaaaattattctttatagaaacagttaaaagggatctctcttctagcaaatgagatgtcaaataaaaatattcagcccagtatgaatttctaaaaagtgaggcttattttgggctcctattgcaattgaaggagactgaagtgtaaaaatttggtgcccacatataatttatctgtttttgcaccattctaatttcttaaatttatacgttattctagaatctagatgcagtagcaccatataaattcgcgattatacccttaacagtgggtgcactgggtccataaagtcagatccacccaaaacctccaaatatcagtttatttggaaataatgtttttgcagctttaatcaagttaacctgaggtcatataagattaatccagtgtctgctgtacttctgaaaaggggggaatttggacacagacacccagaaagaacactgtgtgaccactgagacagatcctgcttatgctgactcaagccaaggaatggcaaggttgctgaccaccaccagaagctaggagagaggaacggaacaggctccctttgaacccctaagaagaagctagccctgccaacatcttcatttcagacttctggcctccag

SEQ ID NO: 135107 - DNA, 777 bp, Homo sapiens
caccccgagcctggctccttccatgcaaagcctggcgaggaaggcgaggaagcctggcagggatggttttttcaccacctcgaagaccagcacgcgattccgcctctagtttgactgtttttgttgtttaaatctgagtctagcaatcagcatcgacatagaatctgccagcagcaaaactgtgaccaggcagagaaacgggtgggggacagttcccaggcctcctctccagcccgctgtgcagcgagttcagttgcttcacgccctaagccagcgagtacccatcaacaaggctgtcagtgactgcagtgacttccaggcgccttatcctctctaagcgtcctgataaccctgagagatgttattacggccattccctttttgtcatggaggtggggggtgcggtgtcttctgagctgatactccactccgttgtgagtatctgtgggatatgaccattccctttttgtcatggaggttgggactggggggcctttctgagctgatattctgttgtgaatatctgtgggataatttcacgtcgtcgcctcccctggctctaaggagcttggacgtgtctggaggttcatggaagccacctgcaggagtgcctggcttggctttgcctttttgtcttcttcctgctcttctcactcaccttcacatgcccccacgtctgccctaccgcatccaccccatatcccttaaacaggtatttgggaaattgtgtggggcagaaggaaaatccaggagccttgttttccacatgtttccatc

SEQ ID NO: 135108 - DNA, 170 bp, Homo sapiens
ggacaatttgaaaatcttctttaggcacattcactaagtaatgtgtccgtcagcaagtgtggctctgtgtctgtggtgagcccctttctctgtcgggaccttgtcccagtgcctggagagcaccttctcaaactgtagacctcactggcactgggactgatctgagtgcc

SEQ ID NO: 135109 - DNA, 438 bp, Homo sapiens
ggcatggcaggggccaggggccagtgagggcaggggagggactggggaggagagcagaggaagacaggtgcagccagatgggagggtcctgaatgccacttctgattctgcctccctcccaccacttaccaacctgcaaaatcctccatgatcttttctttccttttttttttgagacaggatctcactctgttgcccaggctggtgtacagtggcgccatttcggctcactgcaacctccgcctcccaggttcgagtgactctcccacctcagcctcctgagtagctgggactacaggttcgcaccaccacgcctggctaatttttggatttttttggtagagacggggtttcaccatgttggccaggtgtgcaatatatttttccttttttatgcccatatttaccaatcttttcttttctttgagtcatggttag

SEQ ID NO: 135110 - DNA, 512 bp, Homo sapiens
ctttataaacattgtacagttaggctacatttttttaaaaaataaagtaactgcactacaactttacgacaatgtcactaggcaataggaatttttgagccccatgatattcttatgggacctctgtcatatacgctatcactcacaaaaacaatgtcatgtgatgcatgacagtacatatgtatctcaactgaaaatcctaaatgtcagtagtgttctctgactcactatttactagtaagtttcctcagaactgtctttgcctgagagtttcacaaccaagcgtctctctgcacagttgattctagggacaagaagtgctaagaatccatgttggcttcaagtgcaaaatggaaaacaccttagtgtcccaccaaccatgttagccaccttcctggagggcaagctcccacgccctttccccatcgctgtgaagagctcacgtcatctgtggcatttccataactctccgatgccagccatcagtctctcagcacgtgttgaaaattagc

SEQ ID NO: 135111 - DNA, 256 bp, Homo sapiens
gagaatccgagtggaaacttttaaaaccttaaacagactctcctacagcaaatagattctctatgtgcagcatgaggaatcactgcatagttctgctccaccaataatatgattggtacagcaccaaaccatggcaaagttagatgttaaagaacataatgttgcaataatgatgttatattggatcttatgcatgaacaaacaacggagatttttactcaaacagaaacaaaccatgagggggcatcctcaaaat

SEQ ID NO: 135112 - DNA, 338 bp, Homo sapiens
tccatgatatggcgactcctcctgtatttgtaatacccattcctgaggctggcacatggctgacacttagtaagtactcacctgactcataactagaattagcaaaaacaatacctgatgtttatgccagtggttgtcaaagtagtggcagggggggccgggcgcggtggctcacgaggtcaggagatcgagaccaccctggctaacacggtgaaaccccatctccactaaaaatacaaaaaattagccgggcatggtggcaggcgcctgtagtcccagctactcgggcggctgaggcaggagaatggcgtgaacccgggaggcggacgttgcagtga

SEQ ID NO: 135113 - DNA, 398 bp, Homo sapiens
taaaatggaccagggagacagcagcagggaggtaagaagcgtgaaggttcaactctgagaagcacttatggggcagacagaagaacttatgaaagagatcaatgaggaccatctaacatgaaatgtcacagaataaaaccagatgtcacagaagtcaaggtaagatgatcctgaagaagagagtgtgtaacaataaaagacacagcaaaagacaacgtggagatgaaggggcccgttggagatccatggtaacctttactagataagcttcagcaatctgctaaaattgggacctgaatggaaaaggcagacaccacatgtagcccactcttctgagaagcaggaaaagtagggaaagagggaaacgaggcagaatacatggccaagggaggactttc

SEQ ID NO: 135114 - DNA, 393 bp, Homo sapiens
gtctggaccctgccatttctcacccgtttggccttgggcactacttaaaggtctccgtgcctcaggttttccatctgtaaaatggggataaccctagtgtctcctgtacagggctgttgggaggatgaaatgggatgatacgtgtgaagcacttgaaatattgcttaccacactgtacatgggccaacaggtgtgtgtaatgagcaccatttttgtctgtgaagtgtggataacgcttcctgcatctgcatttgagagagggtgtgaccagcagctggcaggacctgtcaggtggtatgcctgggctgtcattaggattgggtgtggctcccaggtcttctgtttctagctgtgggcttggattaaggttcgctggctctgtctgcctcaatt

SEQ ID NO: 135115 - DNA, 871 bp, Homo sapiens
gctggagtcagctggagttgcccaggccctgtgagcaagtggcaggcgtgcccagctgcattggggagagggctgttctcaaggccaaggtcatttttggagggagaactggacgcctgatcaaatctggtaagttctgtaccaaactgtcctgtgcagctcagagcaggaccagggtccagtggaggcctgtgcccactctgtctcgcttgacatctgcaggggcacgactgggaaacctagcaggcaaagcctcccaggtgccctccgcatcacacccgctccctctcacttcccgagggggccgggaagaacctccttcctcctctcagaagggcttagacagaggcagcagctcacaggggcatctactctgcctgcttgccccgggcccacctcagctctggctcctccaggcccacaatggactcagcagccaaggatgagatgcagccggcgttgtcccctggacctgagtggccagagcaggagcgggcagagcagctggcccggggtgcagcgctcaagtgggcctcaggcatcttctaccggccggagcagctggccaggctaggccagtaccgcagccgcgaggtgcagcgtacctgctccctggaatcgcgcctcaaggcaggaaatgatggggagcctggagttggggcctgaggctgatgtgtcccagctggagccccttctgaccttggagaacattgagcagctggaggcaacatttgtggccaacatccaggcaagtgtgtctcagtggctgcagaatgcactggatggggaggtagctgagtggggccgggagcatgggcccaacacagacccgtctggctcctattactcaccaatgccagccattgtgctg

SEQ ID NO: 135116 - DNA, 815 bp, Homo sapiens
gctggagtcagctggagttgcccaggccctgtgagcaagtggcaggcgtgcccagctgcattggggagagggctgttctcaaggccaaggtcatttttggagggagaactggacgcctgatcaaatctggcccacaatggactcagcagccaaggatgagatgcagccggcgttgtcccctggacctgagtggccagagcaggagcgggcagagcagctggcccggggtgcagcgctcaagtgggcctcaggcatcttctaccggccggagcagctggccaggctaggccagtaccgcagccgcgaggtgcagcgtacctgctccctggaatcgcgcctcaagtcagtgatgcagtcatacctggaaggcgtgcagactggtgtgtggcagctggcccaggccattgaggtggtgcagggaacccgggaggccctgagccaggcccgtgggttgctccagggcatgtcccaggccttacagactctagagcccctacgggagcgggttgcccagcacaagcaactgcaggccctgtctcacctgctgcctcggctgcgggcagtgccggctgcagtgtcccacacacagactctgattgatggccaacagttcttggaggcatatgtgagccttcgggagctggagcagctgcgagaggatacgtgggcacccctggggggcctggagttgccagtcttccaggggctggaccttctgttcgaggcactgggccaggctgtggaagcagctgcaggggccgcagggaagctggcacgggaggacccagccctgttggtggctgctgtgcgtgtgg

SEQ ID NO: 135117 - DNA, 411 bp, Homo sapiens
tctaacagtgccaggtcggaacatcctggtgttggaactgcagcattctgaggagctgcaaattgtattggatttctgaaaggaaaagggggtaccaaaaaacagagaatttgttgattaagtagtgtttaagagcagaaatgtctgatgttcagtttaaagatgcctgcactgctgtgatgtaacctctgcttgcctgatactgaactctaaccatgtgtatcacatcctagacaggggagggaatggaggataattgacaagaacagcttttgatgttaaaactaggagccaaatgcaggcagggaatactgtgggaagagagcaactagagttgaaaggatggaattttccataagcaatacaaagatttttgatacctgactcctacttaaaattaattcgactaga

SEQ ID NO: 135118 - DNA, 574 bp, Homo sapiens
tttttttttggtttgttttttgagacacagtcttgctctgttgcccaggttggagtatagtggtgcaatcatagctcaatgcaagctcaaactcctgggctcaagggataagggatcctcccatctcagcctcctcggtagctgggactacaggcatgcgccatcatgcctggctactttttaaaaattttagtagagatgagatcttgctatgttacccagactggtctcaaactcctgggctcaagggatcctcctgccttggcctttcaaactgctgggattataggtgtgagccactgcatctggcccaaaaatatttcttaaactaaaaaatacatgggtgaatgaatgaattaatgttaaatccatctttaatgaatataatgaagaaacagtctgtgtacagtacagtctgtgtacagtaagttgaatgggttactattatcctcattagacaaatgaaatagatgagtcccagaaaggttaggagccaaaattaaagctactatacatagcttaaacaggtttgctactctttttcaattcactattgaaaggaacagacaattct

SEQ ID NO: 135119 - DNA, 788 bp, Homo sapiens
agctgtgtggctttgggtaaatgcccatctctgagtgtctgttcactcctgtatcaaagggagacaaatggtaacactcacctctcggggagtcctgaggatgaaaaaagatcgtccgtgtgaaaacagactatgtaagttatggctatgtaacttataggaccaaatgcaaaatgaaatcatggggcccattcgaaagttataaaagagttttgagaaggtgacagtagagtatgagacagtatgaaagcaagcataggcccttctgagcacagggcctgtgtgagtgcacaggctgcctgcttatgaagctgctctggatcagtcaggtaccaagcacagtgcctgacacagaggaggtgcccaagaaatgttcattcttttctttccttcaatggagccaaacaacaattctgacagtttagtaacactagatgctcccctctgtcaggagcagcacactttcactcggagctttgctggtaacctagctgcctcctgaagggtccagcagaactgagctgcccagttactgggggtttgcttccctccatgatgcccaaattgtgacaccaagataaggacaggacctctgggttaacagagctcctcctcacctccatctctggttcatccagatgatgtagttttcccagcaggactagcccttcaattcctgcctgacttgggttatgaactggcaaccctggtttgacaccccttccaagtagttattttttaattgtgacatagctaccaacatttaataagcaaaggaattcagataa

SEQ ID NO: 135120 - DNA, 105 bp, Homo sapiens
agaagagctaacaggggaaactgaaaagaaactgacaagggtgggtggggtactagaagagactggtatctctgaatccaacagaaggagtggcctcccccttct

SEQ ID NO: 135121 - DNA, 335 bp, Homo sapiens
acaggcaccagcagtgaggggcagggtgatgctgacgagctgtgccttcagctcactctgatgggcattgggagggtcggtcttagctgtcagcttggtcaggcgatgagcccaggtatccagtcgaacatgaatccaggtgttgctccgaaggtatttgtgggtgtgattaaagtccataatcagctgtgggtgtgattaaagtccacaatcagctgcctttaaaggaaattgtcctagatcacccgggtgggcttgatccggccagttgaaaggcctaagagtggaatcaatcctgggggcagcagctgcagcccatctgaacttcctgccag

SEQ ID NO: 135122 - DNA, 346 bp, Homo sapiens
ctgggaccctctagttgcaggaaaacaagctcagggctcccactgattctacgttatggtgagttgtagaatttttttcattatatattacaatgcagtaatgatagaaataaggtgcacaataaatgtaatgcatttgaatcatcatgaaaccatccccctgcctcccttcagtgggaaaattgtcttccacgaaaccggtccctgatgccaagaaggttagggaccactgcagtaaaggaccccttctttgactggcttcattcagtcagcatgatgatttttagggtcattcaagttgttacatatatccatagctttttctttttcattgctgagtaatgtt

SEQ ID NO: 135123 - DNA, 1360 bp, Homo sapiens
cggaaatgcacaagcctcttgatgcataaaaacagctgggctcccttggagacagagcgccatgggaaaccgggtctgctgcggaggaagctggtgagtaggctggaagggcaaaggggaacatctatctctgttggtggatgtagaggccccgaaaatcagaggacctggagatagttgtctgccagcctcccactgccaccttcctctgcctggtacctccttgttccaacaccagagcagcacctcctttcaggaggccttagaagacagagccaagtggctgggcgcggtggctcacgcctctactcccagcactttgggaggccgaggccggcggatcacgaggagctgcccatcaactttccagaagaaaaagaaaagaggaagccaaacaagacggacactgaagccgcagccacaacagctgcagcagaatctcccaaagggccatgaaacaacaggacatacgtatgaacgggtgttacagcagcaagggtctcaagagaggagtccaggcctcatgtcggaagacagcaacttacattatgctgacattcaagtgtgcagccgtccccatgcccgggaagtgaaacacgtgcatttagaaaacgctacagagtatgcgacccttcgcttcccccaggccacacctcgctatgacagcaagaacgggaccctggtgtgagcgcttgggaggaaggcccagtccatcgttaaccactacacctgtgggggagaacctactgctttggggaattgggtggcaacccagggatgttgtccacgttttaagcttaaagaactccaaagcccctggaattgtgggcgtcccattttctcccctggcctcttacttgccactgttaggttggagttaatagttggtttagctatgggtggatagctaaacttagctatccacatgaggttaggtggagtgtgcagggaggtaggtcttcgaccccaccattgttgctcctgctcttgcaaagtgcagaaagagcaggtaaaaagttagcccataagcacgtgggctgatcttgttggactttaattaatggtatcctttttcacacaccttaaactccaaagctgaaggggaggtgctccggaaaagcattctgagcttttacattcagacactagggctggcttgggccatttcctcagtggctgagtcaggttccagaccttaacagacaaatgggggaagggggctgaggcgtggaggaaacgctttcaggacctcaagtcagtgataaccgacagcacagtgaggcctggaaacttccctcggagggactgttggctctcgcaggtgcggggccgctaggatcaataaacggcctgagaaaca

SEQ ID NO: 135124 - DNA, 1105 bp, Homo sapiens
cggaaatgcacaagcctcttgatgcataaaaacagctgggctcccttggagacagagcgccatgggaaaccgggtctgctgcggaggaagctggagctgcccatcaactttccagaagaaaaagaaaagaggaagccaaacaagacggacactgaagccgcagccacaacagctgcagcagaatctcccaaagggccatgaaacaacaggacatacgtatgaacgggtgttacagcagcaagggtctcaagagaggagtccaggcctcatgtcggaagacagcaacttacattatgctgacattcaagtgtgcagccgtccccatgcccgggaagtgaaacacgtgcatttagaaaacgctacagagtatgcgacccttcgcttcccccaggccacacctcgctatgacagcaagaacgggaccctggtgtgagcgcttgggaggaaggcccagtccatcgttaaccactacacctgtgggggagaacctactgctttggggaattgggtggcaacccagggatgttgtccacgttttaagcttaaagaactccaaagcccctggaattgtgggcgtcccattttctcccctggcctcttacttgccactgttaggttggagttaatagttggtttagctatgggtggatagctaaacttagctatccacatgaggttaggtggagtgtgcagggaggtaggtcttcgaccccaccattgttgctcctgctcttgcaaagtgcagaaagagcaggtaaaaagttagcccataagcacgtgggctgatcttgttggactttaattaatggtatcctttttcacacaccttaaactccaaagctgaaggggaggtgctccggaaaagcattctgagcttttacattcagacactagggctggcttgggccatttcctcagtggctgagtcaggttccagaccttaacagacaaatgggggaagggggctgaggcgtggaggaaacgctttcaggacctcaagtcagtgataaccgacagcacagtgaggcctggaaacttccctcggagggactgttggctctcgcaggtgcggggccgctaggatcaataaacggcctgagaaaca

SEQ ID NO: 135125 - DNA, 216 bp, Homo sapiens
ggcagcaaaccaaacaaaaccagagtaatctggggaaaggtaactcgggccccatgggaacagtagcatggttcatgccaaattcctaaacaatcttcctgctaaaggtattagacacagaatctgagtgatgctatacccctcaaggatttaaactaatgaaaagtcaataaataaaagtggatttgttaaaaaggaaaaaaaaaaaaaaagaaa

SEQ ID NO: 135126 - DNA, 1030 bp, Homo sapiens
cactctgttgccaggctggagtgcaatggcgcgatcttggctcactacaacctccatctcccaggttcaagcaattctcctgcctcagcctcccgagtagttgggactataggtgggcaccataacacctggctaatttctgtatttttggtagagacagggtttcaccatgttggccaggctggtctgaaactcctgacctcaagtgatctacccgcttcagcctcccaaagtgctgggattacaggcttcagccaccgcacctggccagtaccacagtcttttaaattaccataatgagaatgtgcttattaccatggggatgggaccaagccattcataaggaatccactgccattacccaaacacctcccactaggccctatctccaacattaagggtcacatgttaacatgagacttggaggggcaacatatccaaaacatatcagaattgtatttcccagttccttccagaggcatgggcttctcacacctagagagcatggaagcagtaaaagaaaagctattccatgtccctcactcttcagtggtaggagcttttgcctacaaggcccttccagcatcaaaggcagaggcagtgtaggaagcaaagcatggcccaagtccctcttggggcttttattattctggcctctttttagaggaaaaaaaaatgattttttgtgctgcagacaccatgtccaattaggtttgtatactcattttaaacatcaaaatttaggccaggctctgtggcttacacctgtaatcccagctctttgggagactgaggtgggtggatcacgaggttaggagatcaagaccatcctggctaacacagtgtaactctgtctctactaaaaatacaaaaaacaattagctaggcatggtggcatgtgcctgtactcccagctaatcaggaggctaaggctgaagaattggttgaacctgggaggcagaggttgcagtgagctgagatcccgccactgcactcgagcctaggtgacagagtgagactccatctcaaa

SEQ ID NO: 135127 - DNA, 320 bp, Homo sapiens
ggtggtaccctagtttgagaagtttcaatagcatcctgacccccataggctggtaaaagctgaagaaagagaatcccacagcgttgtctgtgaccggtgggtcctcctctccctcccaccttttcttttccaacaggaaagggaggcggcgagggagatggtaggaggaagagggaagaaagaatgggggaggtgaatcctaatatgccttgctgtacttgcgataaatgccatttttttttctttgtgaagaaaaggagtggtagcttctcttgtgcaatcacagagcagcagatgcgcttctttctgcccccaaactg

SEQ ID NO: 135128 - DNA, 305 bp, Homo sapiens
taactcagactgagtttgtgcagggtaattataaatatacacaccaaatgagtttaaaataagatgactaacatattcttaactatactgattaagaatactcaaacatgttttaataacttaatccatattaactacaaaagttattgagaagtttccctccccaagtgggagacacattttcagttaattttgaaacagaaatagcagtgttactctaacatacaaatattctcaacgtcctatttgaagtacagtaacacaagcaaacatgggtggcattcccttgatgagatgaaataaat

SEQ ID NO: 135129 - DNA, 534 bp, Homo sapiens
atgtatgttatgggaaaacaaaaagtaggatttaaggttgtaaatatgtacttataataacagaagactagataaccaaatgttcaacaccaggaggtactccttaaccaatctatggtacaaaagactaccgtgagctaactgaaagcatgaagcagatggccacttgctactacagaaagactgccaagataggtcaacaactgagaagactgaggtgtgcaacagcatggatcatgattacaaggtaacaaaaagaaagagagaagggtggaagaagaagagactcttttttttttgaaaagaagtctcactctttttgcctaggctagagtgcaatggcacaatctcagctcactgcaacctccgcctcccaggttcaagtgattctcctgcctcagcctcccaagtagctgggattacaggtgtgcactaccatgcccggctaattttttatatttttaatagagatggggtttcaccatgttggtcaggctggtctcgaactcctgacctcaggtgatccgcccacct

SEQ ID NO: 135130 - DNA, 567 bp, Homo sapiens
ctcaaataaaaagaattatcctaattttcaggataagttctagtttcatatgtagtgcctgaattgaatgtattatcccagaagtgatctaatcagagctaagtacagcagggctatttatttttgtaacttggatattgtttccattactgcatccattcgcttttttgctgtcaaagcgtgtttcagagcatggtaatttagcatagaaatatgcagaattaagactgccctaattgcaggaaactatctaactatctaaaccgtatgtttgttcaggcaaagcactgtacctcacgcctgtaatcccagcactttgggaagctgaggcgggcggatcacttgaggtctggagttggagaccagcctggccaacatggtgaaaccacgtctctacgaaaaattcaaacattagctgggtgtggtggtgcacgcttgtagtctcagccactcggaaggctcaggcgggagaatcgcttgaacctgggaggtggaggtagcagtgagccgagatcacgccactgcactccagcctgggcaacagagggagactctgtctcaaaaaaa

SEQ ID NO: 135131 - DNA, 388 bp, Homo sapiens
ctaaaggtcgccttctggaagtggaggctgcctgctgggaaaacttgaagggagtttgaggacctggcccctctgtgtgcctccaagactctggggcagctctcgcccctttccttcctctccagtggggcagaaggcagctaagcccaagtcctggggccagaggcctgactccaagccatgggtttatgaaaagcaaatagatatcctgccctggctgaaagacgcacctcccttcacattggacgagagccctggcatttcattagtgccctctttgaagcctgccctttgcaaaactgaaaaagaagagaagggaggaaggaatggaagctgattcaaaaagcttcctgtattgtatctggaatttctgatgtccctctgtgtg

SEQ ID NO: 135132 - DNA, 434 bp, Homo sapiens
gctgcagtgagctgtgattgcaccactgcactccagcctgggcaacagagcaagaccctgtctcaaaaaaatcccaaaaagatatggagaccaatggaatagaatagtgagcccaaaaataaaccctcgcatatatggtcaaatgatatttgacaggaatgcaaaaatcattcagtgaggagagggacagtcttttcaacaaatgatgctggataaactggatatccacatgccaaagaatcaagttagacccttacctaacaccatatacaaaaactaactcaaagtagatcaaggacttctgaatataagacctaaactcttagaagaaagcacagggcaaaaacttcatgacaaaggatttggcagtggtttcttggccatgacacctaaggcacaggaaacaaaagaaaaaatagataaattggacttta

SEQ ID NO: 135133 - DNA, 192 bp, Homo sapiens
acatacatagggttcagagcagggcttcgagtcagagctctgagtgtctggcagtaactcccacaggaagctctaatgattcccagggatgctaaaggagcagccacacctaaaactcaccacactgctatgaaaggggctggacgcattggctcatgcctgtaatcccagaactttgggaggccaacctgg

SEQ ID NO: 135134 - DNA, 284 bp, Homo sapiens
ttgccttctgccatgactgtaaattttctaaggcctattcagccacgcagaactatgagtcagttaaacctcttttgtttataaattacccagcctctggtagtagctttatagtactgtgaaaacagacaaataaaacatttttaaatggcctcatgtattatgagtccttatatacatggaggcaagacatgtacataggaaaggatgatgggaaattttttcaaatttagtatgaggtataagtcagccaagtgaccttgaattaagagagggtaagaact

SEQ ID NO: 135135 - DNA, 743 bp, Homo sapiens
tatcggcgcatgccaccacgcccagctaatttttgtatttttagtagagacggggtttcaccatgttggccaggatggtctcgatttcttgacttcgtgatccgcccgcctcggcttcccaaagtgctgggattacaggcatgagccactgcacccggccgatgtcttttaaaagtgtgatgcatttaaatgagtcttataaattcagatggttgagaaaaaggagcaggaatattcaaaatggtcacattaggttgaaccaaaagaaaggtttatcttctcttctcatttggacctgcaaaaacagcattttcctacggctcaacctacactttccctagctgttcccacctctgcaaatttgattagtgtgtcttctgtgagttcatcctgatctccaagaagtatattttactaggcaaagagtaatccaggagtgcgccaaagtctatcttccaagttcatcaatttagcaaaaatatattgaacacctaggtatcaggcattttgcaaggcactagggaagcagtagtgaaaaggttagtttcactgctcttatggtgcttagagtatagtgggtggggaagccaacattaattacatagtaacacaaataaacatacatttaccagagccattatggaatcctaacctctttcatggtacacctttaatgtagtttctctaatggatttcattttgggaactatatctccatgactttaacagatgttagccataaa

SEQ ID NO: 135136 - DNA, 800 bp, Homo sapiens
catcccatctctatgttatgccacaatgcttctctatagcacacaacttggctctgaaattttgaaagtcaaaatactaatctactatgtgtctctgataaattgcctgaaccttacctgactttgaagtgctgcactcctaagactttttcttggaatgagttaaaagttttattccaagaatcctctactgagctagaaagcagagctgtgcatctctgtttcagtaaaaggaggtcaatatagggaactgtggtttctgagaatgcaagatctgcactaataaaaggattagccacagtgctacccaagagaaccagctaccaggagaaaagagggtctgtaaactgcaagatgatgacttcacttgatttccactgaggaaagctggcggctcagacttaaatttctccttcctagatggtaaacatctatggaaggttctatgaattataatgagttagtaaaacataatgcactgaatattagactatgtcagcagatcctgtaaccaaaacttactgaaaatataactatagtgggaggcaatggaaaagagactaaaggcttgaatggagaaaaaaagaaattaagtgtgtcttgtaagcctggcgtctgatcatgtcttagaggaagtaaggtataagctggccagagactcctttgtgacacaaaaggtgaagttacagacattccactaaatttaatttttattatgacataagacaactggtaatatgcaacatgattgaaaaaaacttctcattcaattcgattgggccttgacataagaatagaca

SEQ ID NO: 135137 - DNA, 742 bp, Homo sapiens
gtttcactgtgtcacccaggctggagtgcagtggcacgatctcaactcaatgcaacctctgtctcctgggttcaagcaaatctcctgcctcagcctcttgagtagcctgagtagctgggactaaagagtcttgctctgttgcccaggctggagtgcagcaacatgatcatcatggctcactgaaacatctgtctcccaggttcaagcaattctcgtgcctcagcctcccaagaagctgggattacaggcatgtgccaccacacctggctaatttttgtaatttttagtagagacagggttttgctatgttggccaggctggtctcgaactcctgtgctcaagtgatccagctgcctcggcctcccgaagtgctgggattacaggcgtaacacaaaatctctactagcttgttcatgtaataacaattgctgctggatgcccctaacattacagaaattgtgtcaatggcttgctgtgctttctctctgagtataacatcatcactaattttgtggctgttattagcctttttagctatagagtgacctgcacctgttttttgctaagagggttgcaactttgaataatatttcttatagttttttcttttctctgtctttagggttaaaataatgctttcttcctagaaggcagtatttgcccttgttatgaaaacaattcaccggtgtttggagattgttggaaaagttttgatgacctcatgccactagttggtagaatt

SEQ ID NO: 135138 - DNA, 123 bp, Homo sapiens
tgatcaagaaaacctgtgttgttccaaacctaagcaagaccttgcatttgaaagtgcagatagttatttccggaatgtttaaactctgcctttcaattatccaaatatgttctctttcaattc

SEQ ID NO: 135139 - DNA, 294 bp, Homo sapiens
tatgatatttaagtatgtcccttctatgctgatttgccgagcgttttaattataaacagatgctgaatttgtcaaattttttttaatctattgagatgatcatgtgatttttgtttgtaattctgtttatatggtttatcacatttattgacttgtgtatgttaaaccatccccgttaagtgatcacgatcagttttttcatctggatgatgggctgtaataactcctgcctcttaggattgttctgaggatcaaatgagttgatgcacgtgatgtgcttagaacagtgccagg

SEQ ID NO: 135140 - DNA, 750 bp, Homo sapiens
actgaattacagaattcactagagactcttgtagtagaaatccaaacatttatacaagtaacttcttttggagttaaagtaatattttcccctttgctctaattccgtccaaataatttggaattagggagtttgcttttgccagttggaagataaagacaaatgtggagactgaattagctctgtatatcctactttagatttctgatgtctgatttttaccttttttgttttataacttaaatagtattttaaaagtttattctgtatgtagaatatatggtatgttcagtgcacgagaactcaggatacaaattcctgttttagaaagcaattcacattttttttgataacgtttaatgtaacagctttttgaaaagcccaaagaaccgtagacggattgtaaacttctgaaggcaaggactatggcttattcatctttgtattttccctagaacttggcatactaccctgagcacaaaaggcaatgaacagttactttataatgaattgttttactacgcaatttatccaattacttttctgttacttttcaaaaaactaaaaatatctaaatgtatgtgttttcttatagtaataatatttctgaaatgtgaagaataggaatcagttaaagattaatgtcacttagcatttcagaattcagatttactaaaacatatattacaggataattactcatttttgcataaagatcccttttgaagtttatttgtaatctgataactc

SEQ ID NO: 135141 - DNA, 224 bp, Homo sapiens
ctcactcaaagcatggataaccctcaggcaataaaacattcaacatgcagatctactccaattccctctgggacctcgaactgtgcaggatcccagaacattgtaaatttcaccttggagttaattatttaatttttattatccatcctccctctcagatcaggtgcccaagtctcaatcacatgagcagcattttagactcttgtccagttagatccactctt

SEQ ID NO: 135142 - DNA, 159 bp, Homo sapiens
aaactatgtattctctcccattatagcctatcattacagatacttactgaaagcaattgacagcacagtcataagaaaactgtctctcatagggcttccacaaatccacataggaaatcaatttctacagtgacaggagagaaaaacacagacgtctgg

SEQ ID NO: 135143 - DNA, 152 bp, Homo sapiens
actgtagtgcagtggttaagaactttgtttctgaagtaagaatgttttaacttaaatacaagtttgttgtccctgtggtcttttgcaaattatttaacttctctaaactagtgggcttcaaacatggattcctgaatgtacagagagagttt

SEQ ID NO: 135144 - DNA, 837 bp, Homo sapiens
gtccttctttccagaatgtcttcccagagtaacccaacccttcctccaaactgccagtacagcctgacttctgtgcttctctcagctggaattctactgcacacacatctggctggttggcttgtttccctggtaatttagaagctgcttgaaaaaatctgacttttaaacatgcctattggtcagtggtctccaatgctttgccttgtgagtgttcattttaaaactgtggcttcctatacataatacctgtgaaaaaatgctggtatctactgggcaagaagttattgtgttctctctaaaccctctcaaaactatggctatcatatagacttggaggtagtgaggcttgtggggaacagaaggtaaaagagaaaaagatgctttatcatttaaatggtcctaagaaactaatttacacgctctgtttttaatctctcatataactataacctgtatacaactaggcccagtcactcttgctttgaagccaggtgcaaccaagggtaacagttaaatcgcatcactctgactcagaaagctttcaagaatttactagatctttgttgtaatttccttaaaactttctaaacatcctttttagacatgttttcttctgcctaagttttatgttgccatcagcaccttccctcaaattttagcagataaagtccctcgacctagttatatatcaaagaacacgttgatggaatgaaggggagccatgtaaattatttcattgtttagcttaattaacatttattgagcaccagctgtgtaccactcactgttttaagcttcatggttacaaagataaataagacataagacacaatc

SEQ ID NO: 135145 - DNA, 285 bp, Homo sapiens
tctgcaggatcccaactcaggcgttgagctgcttaactcaggagcgacgctgcttctcaggggcgagctgcagctcagggtgactcccatcttgtcactagccaggtgaccccttcattctggagccttagctctgaaagccgcaggtgggggtgccgtttcagatgccccttttccatttcaaaggctctgattctagatcttgaagccggatgcggcactggcacttggcttcagtttccactgtgacggacggaggtctcccaggcccagcccaggcagcca

SEQ ID NO: 135146 - DNA, 279 bp, Homo sapiens
ctggcctcaagtgatctgcctgcgttggcctcccaaagtgctgtgattacagacgtgagccactgtgtctgtcttgtctctgatatttatatgccattatgtggcctctactgccttaggattctaatgttcccactaagatcagctaactcagttccactacagggtttaccaccatcatctctcgcaaacaaagacagccacttcagagctcctaggaaatagtggtgctcccatcatcattgcattccttaatgacatggtgaaaattaacaatgg

SEQ ID NO: 135147 - DNA, 824 bp, Homo sapiens
ctttgaagcatacacagatgtacactatctggggaagcaagtcaaagccggaacaggtggaatgtcaaggactagacaaaagtatgatgtaacgtgaagcagagcttagaaagggctactagagaatgttacagaaagcgataatagtactcattgaataaaaattttattgtgaatgatcctgtgccagacactatgtgtattatacaatttacatgtgtaatttaatcattacaataattctatggcatatgcatgctcaatatttttttcagatgtgagaactaaaatgtagggagttaagtacttcacaccataaatatgtaagctgcagagatttgaaaccagttttccattgttccaaagcccatgtactcttaaccatagaagaacgaaagtcatttccactgcctccagaagccttttctctcttgcttactggaaaacatttcagtctggaaatacaggaattcactaatttgatacaaaagggccagtgagaagattctagctctatctgtattgccatccttgttaggcctctgagaaagctgagtttcatcaagatgtcattcctttctccaggcctgacctattcctactttaatgcactggggaagaggtaagtgattctaacctaatcacatatctccgtgctatgaatggagggtgtttggcggcatctccttgtgtccatgacaattcctttctctctcttcatgtgtatagcctttagttcatcctactctttgctcccatattacttccagggggccttcttttgtcacttgtctgctattctgttttaggtgggggaaggggcg

SEQ ID NO: 135148 - DNA, 548 bp, Homo sapiens
gttccatcagagttaagcaactataattctcatgtcagttcatcagtagacacttgtgaaaaaatgagtggatatgtatgactgaaagactgaaccaacaaacagataaggaccctgtttagacatcaggtctgtatgtaagtttccttcagttgcttgagagtacacacacatatacccgagtatgtcccctatatgtttattctctcttggaagactgagagagacgaaagaatggagacaattcttatataatcctctttccacattggcaaagggaagatacaatcacatattaatttccctctgggttctgccatgctgttggggcctaggtaaatagctatttggaaaatctggatagtcaatgttggatcattgaatactgcctcattttccagatgacaaaactaatgctaggcaccattaggtaacttgcccaaggccatacagctggtgagtgagaaatcaggaattgggtcttctgagtgcccttctccaccacccacctattgcgagcaatagaacatctagaacctgttctttct

SEQ ID NO: 135149 - DNA, 418 bp, Homo sapiens
ctccattgctgttctgttcccagcagtttttcttagtagaaggaggctttggctggctagtttcaagagcccttcagccttagactgctgcagtcccttcggacctggctgtgatcacttgcatccacctatagatggaagtgtgcaaagacccttctagttttggctgctattctcagctggctccctgagttttcctgtgaggtgcctgttgacagtgtcagggttcttctgctcccatccatcagacaccctgttgctatcctctgcttcctctgcacagatcctcatccacctggtcctgcagcttttgcccatttatcatccctttccagtcacttagttttctcttggctattatctcaagatttgagggattgggcaatttttgcacctcctctgctgtccccattctcct

SEQ ID NO: 135150 - DNA, 653 bp, Homo sapiens
gtctgaggccatagcccgtgattttggcactgatcatgccctccctgggggtagcaggagccattagttcaatcctagcattaacttgaccatatttggataaaacatcagtattgatcttaagtactattagcgagacctgcctatattaccagtagccaaggcagcagaagcagaaacagctggaaaaactacaaattggggccatcaggggcagatgtatcttggcactcagggctacagaacatgtggaaagaggcagcaacagcacctcctgtgatttttatgcaaagattgaggagggactcagagctagcatgtcagtttgttacccttgtgattttcgtccatgctcttgattattttttttttttgaggttatatgtccaggagactcaagagttatggaagaaaataatggagcaagaaaagatggagcagaagaaagggagaatggcccattattgggaaaattctgtctatagaaagaacactgtgattggttaaaacaaaagcagcaacaataaaattaccaaacgcctctgtgttctggacagtgtgctggacagaagggacatagagacagtgggacaaagtcatataactctattcatatctttatcttagctcttatattataatcatctacttac

SEQ ID NO: 135151 - DNA, 324 bp, Homo sapiens
gagcatgcctcactggccccacaagaagaaacaggcctaaggctcagtggtgtgctggagcctgctcacagatggcacatacccaatcctatgacctcatattagtaccttgcacaggccacagtgggagtgtttacaccacagaaatcagcagatgctgcaaattgagtcttctgttttgtttcctgagagcccattgttaaagcttaccagcacaccattgctctgtagacctgccaccttctcccaagcaaacgtttctgtgctgaggccttgtaagaacaatgtcctctgccatagagggcagaacccagaagagcgcat

SEQ ID NO: 135152 - DNA, 654 bp, Homo sapiens
cgccaggcaaaacctgcatctgggggcctcttccataggcacagttttattggatggtgtcaagttgcagggccacacagacacttcactttagaaatggaggacggatgctgtttttgttataatcttttatttcctctcttctgcatgattcttaatagtcccctgccggatctcccagcttccttttcatgctgtcatctcctgcctgccattgtcacctcacccttggacactccagtggccgtcatctccaggacagcccgtaaccctttagcttccaattcacgctatcctagcacatcccctgccggccggcccagtgctttcctgctgctgcattgggtatgcgttgcacgtctcccatagaaagtcctcacctccatgtgtttaattcctgtctccatggcacagcccaggtgtggtgctctccataaagcatgttccaatgccctgaattctttctttagggcctccattcttccatggagtttcgtggagcttggaggggaggaagttgggctgaaatcctgccatttccatcagctgtggattgatagttcttttcactgaacgccgttatcagaaagcatttcatattgtcctgtaagctgcaatacgtatttattccgaaaaggagaattgttggctcac

SEQ ID NO: 135153 - DNA, 301 bp, Homo sapiens
ttttctcggaacattgtctagattggaaggagccagctttgggctttaaagtgctgccaggtgtcagtgagagcagctttgctgcagagctgggtttagacagtctaagccctccttcccgctcaaagatggagaggttgcccttaaaaaactacgcaaacagtattagaaatttagctctccgggccaggcgtggtggctcacacctgtaatcccagcacttcgggaggctgaggtgggtggatcacctgaggttaggagttcaagaccagcctagccaacatggtgaaactccgtctcc

SEQ ID NO: 135154 - DNA, 746 bp, Homo sapiens
atccttatatgaattaactaaaatagtcacctctgtagacacagaaagtaaaatagttgttgccagggcttgggggatagaggaattggatattgctgttcattgggtaaaattttagttagcagtctgtctcttataactcacatgctttcagtgtgagagagaatagtttcaaaatggatggggagcagtaaagaaggaagaaaatgacctaagacacacacacacacacacacacacacacacacacacatatatatatatggatttatccatatataataagttacatatggatttatccatatataataagatacatatggatttatccatatataataagatacatatggatttatccatatataataagatacatatggatttatccatatataataagatacatatggatttatccatatataataagatacatatggatttatccatatataataagatacatatggatttatccatatataataagatacatatggatttatccatatataataagatacatatggatttatccatatataataagatacatatggatttatccatatataataagatacatatggatttatccatatataataagatacatatggatttatccatatataataagatacatatggatttatccatatataataagatacatatggatttatccatatataataagatacatatggatttatccatatataataagatacatatgg

SEQ ID NO: 135155 - DNA, 881 bp, Homo sapiens
caattctgtggagtacaaatgtgaacaaggatatgggatggtgttaatatataatacacaaaatggctcaagaagcctggaggctgttttgaacaaagttgtgaaaatgaacaaggtaggaacagcatgacagacaaaatgaaaatcaaaacctaggtcacgtaaaaaagaggtagaacccctagtttctagtccaaacaatgtcagcctcttaataccttcccaactacttacaccaggtctgaaatcacctcctccagggaagcgcctcctctcttacgtgtgccacgccatcagtgggatccaacaaaacactcaatttactcttctctctttgccatctgaaggctgtgggctctcctatgccaattctcacttgtctttacatccctggcccttataacaggacctgactggtatagactagcacatggcacacacacatgaaataacaatgaagaaataaacacctcttcagcaattaaaaaaaatacatcttaggtatgtgagaaatttgatactgagaataaaactggcatgggaatcaagatttgaaaatgtttatcattttaaactgagccggataaagcatagctgtgtcataaatttccacacatgtttgacaaagataccaaagagaaaccaatgtaaagagtattagatgttaacccctttgaagataggctgtcttatttatcaagcctaataagaagtagttattccataattatatgttgaaggaatgaataccaaggaatcaatcattacaagtgccaggaggaggactaacgtttaattgataattatttatttaaactaaatgaaaagtcgaattggcttcatttgatggctcatgcctgtagtcacagcattctgggagg

SEQ ID NO: 135156 - DNA, 384 bp, Homo sapiens
caaataaaaatgaacctgagtaggcatggagggactattatacttagcattaaaaataaacttatctaggagagaaaaaagaatagcattccacttacatttgaagtaagggcatctcaaggatgatgaaggatcactatttttcaaagccagaggattccaggctaggttgcagtaattaataggatgtaatatatgaaatggacaaaacatgatcaatgtttaatttccaagtcctaattcaaagttgtgttcctggacaattcggtggctgtcttccatgtggtgattcagggatccaggcttcttccccactgtggttccactgcccctgtggcctcattgactgcacctagttggcacaagtggaaagatagcatgagg

SEQ ID NO: 135157 - DNA, 570 bp, Homo sapiens
tcttcatttggttggaaaatagagttgatatgaaccagttcagagatacgaagtggagaccgggtacagttggaaggacagatgtaacttggctgtgaacccataaggagaatagcagccatcagtaaaatgaaaaattccttatttggttagaagcagctggcatgagcccatgaagagggaggagatggtagagtttgtgaatcatacatgaaaatgatcaaggataaggccttgattcagttctcctggactgtcaggtgactttaatctacagggaactataaagaggcatgaaccctggcagccatggtgggaagaggtacagggcattgggcaggtataatttctgtaccttgctagggatatatcccaagggagtgtggaaaatggctgagggcaaacctcaactcccaccaccgaggaacattaaaaccagagacataaacagaagaatagctctttctgcccaaagaaatgaggggtttatttgtgttttctccattttttaaacatcgtctttaggctcctgaagaggacagcagccattggttaaatgttaactttaaa

SEQ ID NO: 135158 - DNA, 202 bp, Homo sapiens
tttctaaactctcaaaagtggagcctggcaagcccactcaaagcttcagatccacaactggcacagcttcccttccacagattctataggttaaaacaatcaccggaccagcccagattcaaaagaaggagaaacaaactccacccctccatggaggaagtagcaaaaataatgtagacagtttttaccctttacatctgga

SEQ ID NO: 135159 - DNA, 234 bp, Homo sapiens
aggatgtggaggaaaggtaacacccctacgctactggtagggatgcaagttagcaaagctactatggagaacagtttggaggtttcttgaaaaactaaaaatagatctgccatatgatccaccaatcccactgcttggtatatatctcaaagaaaggaaataagtatatcagagatatctgcactctcttgttttattgcagcagtattcatgatagccaaaatttggaagcaa

SEQ ID NO: 135160 - DNA, 218 bp, Homo sapiens
tagctgaccgacgactaggcgactccaggcccacgaacagcaaagaaacaacctctggggtgggcttggagacctgggcctgcacagcttccttggtaaactgaggaggtgtgtaccagaggactgtcagctcattcctctccacacccaatactgtgggattctaggatacagtttgtcactgttgatggctcaatcttatgcactggacaaagata

SEQ ID NO: 135161 - DNA, 349 bp, Homo sapiens
catgcttgtatttgttggtatttgttgtcattttgcacattttcgtgaagtacatgtacgtattgttgcacgtactgcatacatcctggtagcctagaaaatgtaatatatttatgagctctatattttaaaaggaaaaacacttctcaaacacacagacttttcttcccaagctagacttgaaacagggttaatacatggcaggctaggttagataggtcaacaggattgatggaagggcacaagaggaagaagcctgggcttatcagtatcaaactagaccgttcgatactggatttcacagactgtggttggtttgggaacatgcaatcctagagacatggagcag

SEQ ID NO: 135162 - DNA, 424 bp, Homo sapiens
ttttatctttatatttcatagagtcaggagtcttgctgtgttccccaggctggtcttgaatgcctggccttaagtgatcctcctgcctcagactctcaaattgctatgataataggtgtgagccctctgcctggcctagaaacctttaaatgtatgctgtggaggaagtttactctaatttgtatcttaagtagggatgtaatctaaatgtctcttcatgataaaagtcaaatcatgagctaaatccccttttaaatgactcatttgcagagtagctccatttctacatttgcttaccttacctagagagatgttattagatgagttcagaatttttctctgaactaacagtggcaatgcagagtacaaataatatcaagacattaaagacctaactttgcatgattccagtataatgttacat

SEQ ID NO: 135163 - DNA, 419 bp, Homo sapiens
ctgtctgcccataattaggtccttatttcatgtgattaggtactttttgctgaatagcctgggcaggcccttttactatggctttggtctcaccccttggatgaccattttggtgctgtgctctccattctgaactttttttagagagggggtctgggtcttgctatgttgcccaggctggtctcaaactcctgggctcaggagtcctcccacctcagcctccgagtagcattctgaacattttgctcccagttcctagggcttgccaggctcctgctcacctttgctcacctttgtgtgtactgtttctctcctggaacgctcttgcccctttctacggcatcctgggagccctccttttcctcaacttcatcaggttcctggagagccactggtttgtgtgggcacacattatggag

SEQ ID NO: 135164 - DNA, 310 bp, Homo sapiens
cacttgtgagtggcaagagggtcagtagaaggcataggccagagatttcccccaccgttctttgcatcatcatcatcaccagccacatttcctttgtggtttactccctctgaacaaacctgctgtgactccagcttccctggtgacccaggcctctgggcatcaatagcaccatctcttcccattgtcctttcagcatagggacatagagacacagtccttcacctaaaagagtccactgactattagggaaggatggatgtgtaacacagatgtctgtaatgcagcaagaaacagagaggaaacagat

SEQ ID NO: 135165 - DNA, 389 bp, Homo sapiens
tccttacagggcatattaaaggaatcattctagagagctgcattcactgagcgtaatacaaatttcaggtgtaaatttgtgtccttggatacaaaaacagcttattctccaagtcagaagacatcacctaacttagttgacattcctaaattgtagaagacaaaaacactacctttgatgcatagcatacattaatcttccactgtgaaattttagaaaggaagagtggctaggtgtttctcataacctttgcagattacactaaggttgaagctgccagcctgtttggttgtgtatctacaaaccccggttccaatagagacccattatttaagtttgaagattgctgtttaacaggcctgttacttcagcagcagaagagccatttt

SEQ ID NO: 135166 - DNA, 319 bp, Homo sapiens
tgcatggatggatggaaggaaggaaggaaaatggagagaaggatgaatgaactgatggatggatggatggatggatggaaaatggaggaaaggatgaatgaacagatggatgaatggaggcatggatgcatggattcatgtatggatggatagatgggtggatggatggacaattagatgtttcactgaataaatagaagattagatgaaggatggatgctagatgaatcttggccctgctgacctctccagatttatctcccactatttccaccagacatgctaaaagctcacaaaattgaaaaatgtcatggctgtg

SEQ ID NO: 135167 - DNA, 745 bp, Homo sapiens
ggacaaagctcagggtcactccaaattttgtaagtcttcatttggagatggaacatcctaatatttttaagataccgacttaatatttgcacccaagttaaagattcctcttgatcagaatgaacaggaagctttaagctaagcacagtgctaccaagaagcaccatgttgaccttgaggactctggcaggaagctgtttgtggttgtcacacctagtttcctctgtgaaactactgctgcctgtgggtgatgtggttatatgctgctggctgctgttgattctcctgtttgtgtacaaggtgtttttccctcccagtgcctcccaatgtaggcatcggttcatgcacagtgaagtagttggctgcaagaaaccttgtaaggcagggagcagccttttgaatgcaataatctacccaaatcattttattgacttaattatagaatgaatttctttgaaacaaagtgaaagtcttagttgtattacactttaagacatagagaaaacatgtaggtttgtttctgtatacagtaaatttctgtgcttttctatatcttatgaaacttgaatagttggctctgttgccaggtgaaagttttgctaggttttttaaaaaattagaataagtacatttaatacacagggaaattttatcttgaatattaaaagacattgttaagctatcttaacctttcagagtttatttgaaaaatcagaaagatgttttactggctcctttgacacca

SEQ ID NO: 135168 - DNA, 785 bp, Homo sapiens
ctgtattcacctatattttaaaatagttgtttaagctttagttttttttaaataacaaacctttaacttgttaattcattgtaatttcttttagtgtatgacatgcagtttttacctaatttaaaatcatttaaaaatagttaactgatgctttggcatcatttggtcttcacatttattttgatggcacatttattgtatattaggttctgatatatactagggtgtgtttttggctaaactgttcagtttctgtttacatgtttttgattattgtagatgtataattttcctatgtattatggaaaattctttgttatactgtatttttagaatcttcttcttgggtagtataatccatttatcttctagattaacttaggatctctttttttattttaccagagtgggttttgattggcactgaattaaaatgataaattaatttgtggagaatttacttctgtcttatctaagacagaatatctgtacagtttttcaaaactgcttttgtgtctctatgtttttacttttctttgtaagtgtattatactttacattgtaagattgcttgttagtattttatgttttgggctacaattatcaatgatgagcaggatttatctcccattttctttttttttaagctggctattgttaacatgtaaaactttattcttatggtcttatttttcatccaattattttgaaagttgtataattttttgttggattcatgttcattgctttgttttgctctaattctctgtttttagtagatatac

SEQ ID NO: 135169 - DNA, 405 bp, Homo sapiens
attcaggccacagcatactgcttaaggatacattatagtataaaacataaagaatatttttaatagaaatcattgtgtcaacccacaagtaaggactaggcatgcacaacacattaattctgagatggatacactgtaatttgagtagcaattcataggtagactccaggggtttagaaacatcctcccacccgctgcagaagaatctgttctcataacaagcatggcctagagtagaaagccctacaaaaaatacgtttctcaaaggacagagctagtgattttcatgaaaatatactttgaatcaggatttccctaaagaaatattgatgaagtcctgtaatttcctccattaaaatgccactctttaccaagatgtattggataaggaaacacaaactgttt

SEQ ID NO: 135170 - DNA, 274 bp, Homo sapiens
agaaggagtatcttataagttacctagtcaacgttctggcttctgggcagaaaactatctaaactcagccagataatcagtttcaactaaatcaggaaaacatggaatcatctttatctaggtagtgttatagttacattgcctcatttatctacacatcaataaattctttctcattgctaatatttatcattcttatcatagtataagcaaatgttttaattctattatggtaaagataaagcttctgtaattaaaacactttaatctggaa

SEQ ID NO: 135171 - DNA, 475 bp, Homo sapiens
agtcaaataacaattgcaacagtgtgttctgctctgggtaacacactctgcaagcagccctgacaaattaacacttccccgtaaattctctccaccacctccacacaaagaaatgagtagttatgggattaaagtgcgaaataagtggggtgggactggggttgtttttgtaattctggggtttgcaaaatcttctgacattgcataactctcctaaaatacaatatgcaaaatgaccaataatatctatctctaatggcctctgcctctactcttatttaagttacccaagaatgccaaaagctatcaaacagggttctgatcttcatagcatggtttatacaaattacagagtgttatactttaacttaaagaaatctttctcttgcgtgaacccgggaggcggagcttgcagtgagccgagatcgcgccactgcactccagcctgggcgacagagcgagacttcgtctcaaa

SEQ ID NO: 135172 - DNA, 201 bp, Homo sapiens
cttacggcttgttccccctgtcctggaggtgctggctgccaagctggcagtgacagttttattggcaggcaggcccgctagaaggattgtaggctatttacagtgttgaggccatggctttgcaaggagacagttaacataaattcacatgatggatccgttatcacttcattgaacttgtggcggacccatcgaaggccg

SEQ ID NO: 135173 - DNA, 459 bp, Homo sapiens
ggatggagttgtaaacaaccagacctccaccctaggtccccatctcttggctctgtgcccacagccctggctccagctctcacgcccccttcacatgcctcatccagttcagccaggcatgtgtctccatcactcctctgagactaccctggttacaggcaccaacaacctccaggccgccaagtcctgaggtcacttgcttccttcccagctgctctcctccttctggggcccactccccctgggctttggaatggttcttctctctgtcctacttcattggctgacctgtctctgtcttagccatgctttcttcttttctaccgactgggaagatagacgggcctgggctcaggtttctttctttcctgcacctgccctctctcccttagtgatttaactcagactcagactttgtataccgtctatttgcagactctcaaatttttatgtcctgcc

SEQ ID NO: 135174 - DNA, 685 bp, Homo sapiens
aagtctagtggtagaatttcctcttcctctcagttttactattaagcccttacaactgactgggtgaggcgtactcagattatttaggacagaatagtcttctctactaagtcaaatttttgcgtatgctaatgacatttataaaatacatttacagcacacctagattaatactgaattaaaaaactggatactacagcctagtcaagttgacacataaaactagccaagttgatacataaaactagccatcatactaacaaaccatttatggggaagtagtattgatagactgaaatttgggttctagagttactcattgctattagttggttactgtttataggtccttttagcagacagagttagaaaatacatattttttaaaagataaaataggtttaaactgatacttcatattcaaattcagaaccgtatgcttctatttaaccttacaaattttactgtacattttatcttctttctgttacaatggtcatcccaattactgcattagcatggagaaatattcatttccttcatccacaaatacacacttagctttagaatcactatcccaaacctaccaccaagaatgtgattactgaatctatttacaaatatttattgcagtgctttaggtccttggaatatatctcattatggatgtgcagtcaaaacactg

SEQ ID NO: 135175 - DNA, 747 bp, Homo sapiens
gtctcaaaaaaaaaaacaaaataaacgtatatgttttgtacttttctgtaagtatggcatattttatatttaaaaaagaaaaagcatggaattagtaaaatgatagatatatgccttaaatatgtttaatctaaagctcaccaatatacttgtacctgccaatcttttaatattatgatttatctttttgttctttgtttttactatgcattatatacttttaatgatttatctgttgtacagagttcagagtaatctttctttacacaaatcactttcgttgtgtatcatttataatttctagttttgagggttttttcatgaagaaaaaatattctggacatgtacaacgttttcacaatcttgcacagttgttatacctttgcctcacctaatagcaattttgtttactcctgagtctttccaacaattttttagacttattttatcagtttatttcataggtaattaaattatagttataaatataaatggcacaaatattgtacagtctgttcttggaggcatacagatgaattgttggagcagaaatgtagaggagtattagagagcacctactggctgtgtgtgttcacattgcctttggcattggtcactatgcttgagagcaagggtggataaacattttctgtaaggggccagatggtaaatattttagggtttgtgagcccatattgtctgtgtcacagctactcaactctagtgcaaaagtagccatagataata

SEQ ID NO: 135176 - DNA, 616 bp, Homo sapiens
ccacatactttatataaaagttcaaagaagaagaaactatcaagtaccttaaagccaaagagctagaattaaagtattatcctgatcctaatgatataatacataataaaggcatcatcaccaatcaccaccagcatcaaaaaagcagtcatcaatcagtacttgtatggcactatacagcatgagtcagccagccatgattcctggcttcaaggagtttataatctaaagacagacatacagacattaagagacaaacagaagaccataaccataaaatcaaatagtctgcagtatgtaattacatcaagcacaagtccaaagtaagcacatctagaaatacgagggcaaatatgaagtgataataagtgtcttttttttaaatttcctatactgctcatctgcaagataagtgtctcttgaaagctaatttggatatagaattcttatgactaacaaatttttcaagtggcagaatacatctgttcaactgacacagaactgctatagattcactaccacaccaccaacgtgacattcaacttatcactggctcaacattaactaatattctcctttcttcaaggtcactattcacactatttcctgcttttat

SEQ ID NO: 135177 - DNA, 345 bp, Homo sapiens
ggttactaagaatgcagttccctcgttatgtaacatgggcaaaaatagtgttttgggccaaaatagggctgagaaagaggaatgtgaacaaacagcatggacaagtcattatttactcaaatcgtcctgtggctgggggggctttggaagagctttgatggtgtcccatctggccacagccgaggccacctttctgaagcaaagtttaatggaagcaaaggtgtctgtagaggaggctgttttaaggcaagccctggcccagcacacaggcaggctgggagactcctggatgagtgagggacggagactgcctcctgggacaccatcccattttggggcacatgc

SEQ ID NO: 135178 - DNA, 483 bp, Homo sapiens
ctgtaccctaattgataaagttctttcccacagggcatgggttaacaattctgatcttgtaattcatgtatactgaaatggaatgattacttacatcacacataggtaaaaacgatggcaaaaaaatgaatatgaactttagataataactgtgttaatattggttcattaatcataacaaatgtaccatattgatgtaagatgctaatactagagtagactgcatacattgtatgtgggagctctgtgctatcttcacaatttttctgtaaatctcaaactgttctaaaatgaaaactttattttaaatacacatcaaagttttaaaaattacattattttctagcaaatattgcctatcagcagtctagctttaataaacaaaacacactgatttgaaattagctatcaacatccccatctatggaatactgaccttcacatgtgttgatattgtgctatttgaatataaacccaactttc

SEQ ID NO: 135179 - DNA, 482 bp, Homo sapiens
gcagggctggaagagcagtcaagggtaaagaaagcagatgctggcactagtctggattagtctcatccatttggaagcctggaagcacactcaatcccatgtgcctgctgttaatggtgcctgtgagtcctagagatgcagtggctgctcccagctcccttgggtgacctttgagaggccactaggcctgctacactgaccatcaggcagcctagccccttctcactgcttgggggtagggggtggttagcctgggtgttgtgtggcagccaagaaagaacaaaaggcttgttcactgacttagttcctctcctaagggagtggagtggtgttgacttacagtttttccctcccctttttatcagaaaataagacctccctctgaagctagtgcagacagtacacttagctcctcagtcacagactggccatttgaacctcgtggcctagactaccaggacaaagacccggccaggctgagc

SEQ ID NO: 135180 - DNA, 318 bp, Homo sapiens
cagatttcagactcctttgcttaacacaagcccctctgactgtacatgcatagaaactacctatctctccagcgcttccttccatatcgtcacatgaaacacttgcttctgccacactgcatgtttgtcagcggcaggttttacccatgatgcctacatatactagggttccctctgcattcatgagcttctcttagtccttccgcacgtagcctgaggctcccctgcacctcctagtggctatgcagccctctgcacccccaagacacaaggcaacacatgcttagcctgccatagacctcccgggaaccccgcacc

SEQ ID NO: 135181 - DNA, 1155 bp, Homo sapiens
tctggaggggacacggtcacactgcagcatcagcacccggtgaatgtggttctcttcccatgtcagaattttgtgagctccacacgggcagggttgcatctgttttattctctgattgattctaagccccatgtccctggcacaggatggctgcttggcagtagggagtggatgaaccagtagtacccagggctgccaggcagggccctgcaggggacagacccaagggctgatatggggacacctgctgaggggggaatttaccacggtaagggcagggctgggaggctgggcagccagtttcaccctcgcacaggctgcctggcaagaccagcggctggaggtgatgtcctcagtagagaacggtggccactggaaacgtgtggccagaaggggaaacgctcgggcctctggtgggggccagcctggggtggggtcggccagggtcagctgcctttccttcatgctggggaggagatgttgtgtgcatgtgagaaagcatttgatagcatgccaaaagtttcctccattatgtgcgtgtcaagtgtttgaccaggtcagaactcttgttctatgcgaatgtgctcacgcagacagaagcggaggggctccgtcgctctgccctcacgccgctgaaccgcgagggtctcccgctcctcaggcttgcggctcggccgcgaagtgtgtcaggtgtgcatcctggggtgctcctttgtgctctgtcctacggtgacacaggcggcgtggggttagacaggtaccggtcagactacggtgacacaggcggcgtgcggttagacaggtaccggtcagattacggtggcacaggcggcgtggggttagacaggtaccggtcagattacggtggcacaggcggtgtggggttagacaggtaccggtcagattacggtggcacaggcggcgtggggttagacaggtaccggtcagattacggtggcacaggcggcgtggggttagacaggtaccggtcagattacggtggcacaggcagcgtggggttagacaggtaccggtcagattacggtggcacaggcggcgtggggttagacaggtaccggtcagattacggtggcacaggcggcgtggggttagacaggtaccggtcagattacggtgacacaggcggcgtggggt

SEQ ID NO: 135182 - DNA, 903 bp, Homo sapiens
tctggaggggacacggtcacactgcagcatcagcacccggtgaatgtggttctcttcccatgtcagaattttgtgagctccacacgggcagggttgcatctgttttattctctgattgattctaagccccatgtccctggcacaggatggctgcttggcagtagggagtggatgaaccagtagtacccagggctgccaggcagggccctgcaggggacagacccaagggctgatatggggacacctgctgaggggggaatttaccacggtaagggcagggctgggaggctgggcagccagtttcaccctcgcacaggctgcctggcaagaccagcggctggaggtgatgtcctcagtagagaacggtggccactggaaacgtgtggccagaaggggaaacgctcgggcctctggtgggggccagcctggggtggggtcggccagggtcagctgcctttccttcatgctggggaggagatgttgtgtgcatgtgagaaagcatttgatagcatgccaaaagtttcctccattatgtgcgtgtcaagtgtttgaccaggtcagaactcttgttctatgcgaatgtgctcacgcagacagaagcggaggggctccgtcgctctgccctcacgccgctgaaccgcgagggtctcccgctcctcaggcttgcggctcggccgcgaagtgtgtcaggtgtgcatcctggggtgctcctttgtgctctgtcctacggtgacacaggcggcgtggggttagacaggtaccggtcagactacggtgacacaggcggcgtgcggttagacaggtaccggtcagattacggtggcacaggcggcgtggggttagacaggtaccggtcagattacggtgtcaaactcccggttgggatcctctagatctgacctg

SEQ ID NO: 135183 - DNA, 266 bp, Homo sapiens
accctcagtgggctcaactttggccagtctctcttcctagacttagatacccctacgggtgttcagtacccactcacgatgttcttcctccctcaaaactctctctccatcctgtcctcctctctccatctccatgtcatggcctgagttccagccatcatcatccttcacctgaattattttaatagcttgtaactcattcttcctccaacctaccccccacagagcactctcagagtgatctttcccagatttaagcctgattt

SEQ ID NO: 135184 - DNA, 245 bp, Homo sapiens
gtcggagggaatttcagggagaggcttggccagacctgattggggaaggcgactgggatcggtccagggggctcctatagtgggttggccgggcttggctggctctcattcgaagaggcagcagagacctacctggggactgctttgggcctgattaaggggaatccttagaatttggctaggccacagagggggatatctggcatccactgagcttgaagggcaggaacaggggacaggagaga

SEQ ID NO: 135185 - DNA, 326 bp, Homo sapiens
agccgccccaagtggctgggactaaaagtgcatgccaccatgcccagctaaattttaaatttttttttgagagacagggtcttgatatgttgcccaggctggtctcaaactacggagcttaggtgatccacctgcctgggcctcccaaagtgttgggactacaggtgtgaggacttcatctggccaggctagtctggagctcctgacctcaggtgatcctcccgcctcggcctcccaaactgctggaattacaggcatgagccaccgctcggccacctctggagttctgattgttcccacagaagagacagatctgacaagtgggg

SEQ ID NO: 135186 - DNA, 483 bp, Homo sapiens
tgcccaggccgatctcaagctcctgggcttgagcgatctgcctgccttgttgttccaaagtgctgggatttacaggagtgagccactgtgcccggccctcataattttgtagatattgttattcgcatttgatgagtgaaaaatgttgatgctcataccgcttaagtgatgtggtcaagggccagcttggttggtaagaatgtcagttcacccagttccaatttgaatgttctttctgccagagagaaagacctccgcactatcacgtgatcttaccttctgtgtctgtgatgttcagtctgagtggtccaggtagggggagcctacgtattataggaagatccgagggtgcaaagggctgagaagccacctaccaagatttcagcctgaaacactaaagccaggggttctcagaagcctgtggaaagctgctgtgaagctccctctgcactgggggctggataaagccaccaatgcaggata

SEQ ID NO: 135187 - DNA, 781 bp, Homo sapiens
tctcagtggtccacagaggctcagggcaggagcaagatcagggttcgggtgctggcgccacccctcgtttagcccctacctgggatctgagtgagcacccatccttggaatgcaggataatagggttgctgtgaggatggaaggagactgtgcccatgaacacttgacacagctccctgccctggggaaagcacccaggaaatgcgggctgtttgtcttagtgatgttccacttaatagcacttgcggtggctccctggcccccgaggagcccaccttgccagttcttggccacaggagtacgagcccctctgtcaggacggtgggtctcgttgaggccatccttatcctgagcaacctaaagaactcacatggaacttagcaaacaggcagacccttgccttgttctcagggctgtgtgatcccgggtgagcaactcggcctctctgaacctggttctcctctgcaaaacagagatgatggcctgggaccctctcccactacagggaagtagcattggagggggaagagacagggggagcgtcccagcactgcccaaaattggacaggtgactttggacaagtctgaatgagactgaataagacaaaacggagtaacattagagcttgctggctactctctgccctgggccggtgctagatgttttacatgcactgttaatcactgttactcgtggagggagattttattattaactttcttttccagatgaggtaactgaggctcagagaggttgattcactttctcaaggacacacag

SEQ ID NO: 135188 - DNA, 103 bp, Homo sapiens
tcgtccagagtctgtgctcttatcattatgctgcactgttgtgttgcatggtatggaaggaaatagggtctaaattctagatctaccacgtactcactttgac

SEQ ID NO: 135189 - DNA, 378 bp, Homo sapiens
ctaaaaaaatgtggcaatgggttgatctaagtgactaatgcatgggaaatttttttctttaaagaagtaaggccaggaagcagaaattgccatctacagccaacaacagagatgcagattcttactttggtcactgaataaggtatttttcaaatattctccagtatttggcaagtttggcatatagtaaacgcacaataaatatttgttgcatgaagaaaaattttggtatttttgactgcttatactgaaaacaataacatgaatgtttatggagcatttaccacatgccatgcagtgtactaagcactttactttcattgtctcccttaatttcaacatcaacaccatgagggtattatctgcattttacaaatg

SEQ ID NO: 135190 - DNA, 629 bp, Homo sapiens
attgtggtctctgctggcaggacaaggtactgagggggagactgaccttacatcatgggcagctgctgtgccttagaaggacagcagatttgttgttttgtagacaccatgcggaagcagagaagaaggtagtgacatgcaaaatggtgtcttccctacggcaggatccgcagatgcatggagctgcacccagggttgagtggagacatgaaaggcttgggcttatgtgggaagctgtgcatgcaagaggtggcgggggtttctcagagcagaaaagcccagggcagacgttgaattcgctgcacttcctggacagaaacactattgggatgggcaaggcaggattcaaggcagaggtgtgaaggctcgccatagaggagggcttgttgagtgtcactcctggagcctacggagtcgcagggaggcctggcatggtcaggtagacttggtaaggcctgactgctggggaatgtatcctgccaatagattcctgggcctggaacagctcttctttggacacatgccatccatttttggaataagacaatctggcatttatgtacctggtgggttaccctctgggcctttttccaagaaactaaaagtttggagacactttgcatccagag

SEQ ID NO: 135191 - DNA, 159 bp, Homo sapiens
agctgcttcctcccagcactgcctcaaaactcccaaccaccattagaaacccccagggagccaccaaggtctaagaaggaaagaagggaagggttccccccaccaaacagaccaagtgggggaggacagggtggaatgaaagagagaatgcaaaagctc

SEQ ID NO: 135192 - DNA, 274 bp, Homo sapiens
ctcaacaggagtagggaatttgaaataaggagttgagaggtcaaaggtaaggggctgaatgcaggaccagagagcttcagtagcatcttgatgggcagagtatgagatgaacagtggcaacgaggaggatagggaaaaatcacattttctgtttgtgttttgtttttgtctggtggttttcaacctctctctgtttcacttgactatgcttgattatgaaatcttttttttttctttttttaatttaaagatctcaactggctttgttgtgatt

SEQ ID NO: 135193 - DNA, 813 bp, Homo sapiens
tgctttaaaaatagtatgaaatgaatatgatttttttttctaaaattaggtttactgagatacattttataaaagcaaaattcacagtttgggtgtgcagttacatgacttttggtagacaaaatcacttatgcaaccaccagcagaatgaagatatagagtattttcgtcacccccaaatctcccatgtgtacctatgtagtcagtcccctcccctgatctccagcaaatggcaatcactgttctgatttctgcccctaaaatttgtccatttacaaatgtcctataaatggaatcctaaagtatgtaacattttgtttcaggcttctttcactaagaataattcttttgaagttcatccatgttgtagcaggtatagtatttcttttttaaaattcttgagtagaaattcatcatgtagatgtgccagttggttgacctattcatcagttgttgtacatttggcttgtttacagtgtttagtgattctgaatcaggtcattataaatattctcttatgggttttgtatagacatatgttttaatttctcttgaataaataagtagtgttagattgctaggtcatatagtaagtgtaggtaggattttaaaatcctcttttgtaaaaacttgttttaaaaaatattttgtttcataatttaaaaaaatatttgttttaaaaaagatttacaggaatttggaagatggtacaacaatgttctgtgtacactttacccagtttcctccaatagttaagtctttttttctttagattttctttgtttctaattcatttgactcacaaaataaatg

SEQ ID NO: 135194 - DNA, 160 bp, Homo sapiens
gcagatgctaccttgatcctctccccttaactcaaagggatgccctcaggaagacccacaacaaaggaccaaccattcttctgccaggtgtccacatcctgtctccctgctgcccactgcctgcttgcttggaaatatttgctgctaaaatgtggtccct

SEQ ID NO: 135195 - DNA, 400 bp, Homo sapiens
tttatttgtgagcaataaagctttttaatcacctgggtgcaggcggactgagtctgaaaaaggagtcagcccttttcatccttctttaccccctgtggaaccataattctgagtcccgtgatcttctccatgtacatctttcacactgtgctcagcttccaatgcctggggtacactcttgtgtattcctttcatttacataacagatgatcctagagtacagtctcttagccaagaatgagaaatttttgtcttgttttttcctttttcattgtataagtgataaattccttcccaaagttagctctcttgcttctctaagcaggataattgctaaggaacattgtggattgaatgaggaaagtcctttcctcttatcaatgctctttcctcattgtcg

SEQ ID NO: 135196 - DNA, 271 bp, Homo sapiens
aaagaaacacagggcaacaaaacaggcctaagtgggcacggtggctcacacttgtaatcccagccacttgggaggctgaggcaggaggactgcttgaggctaggagttcaaggccagcctgggcagcatagcgagaccctatatctaaacacagaaaataaaacaacaggcccaggtcagcagaagaggccagagatccccgaacactgtggaatctcagtccccagaaaatctgaacactgtggaatctcagtccccagaaacccccaaa

SEQ ID NO: 135197 - DNA, 892 bp, Homo sapiens
aataattattggaagaaagaagagggaaaaatagtaggcaatcttcatgacactttaatgtgtatgtttactgcttaaaatgttcaaacacatctttgttttgtatagttaattttggtggtataatatttgaaaaggtgatagataaaaagtgcaggatgcaattcttgaagctgtaatttgcaggacactaataatacaagtccattttcttttctgagtgtgctatttatacaatttatatttttaacaaatcttagaactggaatgaaaatagtaattcatcttaagggtaagaaaggttgcagctgtgccaaatttggaaactttaatcagtcctcttagtgcttaagcacagactatggaatattctaatttgtatgtcacagagcacagtgctcagcagaaagcatgcactatcttaaattaatgttaattaattaatgttaaatgattgagtcaatttggcagtacttcttttcgtctctgaaaagaaatcatatttaatttagaagtggcaggtcaattttaaagccaagctaaaataagtaggtcaagtgaaattgtgcacagggcagggatagtggtgttatatgtacgaagaaaaaagactgaaaggaaaaatatcaaaatgtttacctgtgaagatgatgaataatttgttttttatatatttttgtttgcctttagtttaccacagtgggcaaatacattcttcggagcagtatactttcatgacatatgttaagctttacataactctttgttaaatctcccgttgatgaattaatagtaaacatgatacctatcaaatatgaagtgagcggtgtcctctgtagttgggcagcatagtagctttgagtggaacttacattctagcaaaattcatttt

SEQ ID NO: 135198 - DNA, 764 bp, Homo sapiens
gtaaattattattttttctttgttttctttgtttgagacagagtctcactctgttgcccaggctggacttgaactcctgggctcaagtgatcctcttggccaggcacggtggctcatacctgtaatcccagcactttgggaggccaaggcaggtagctcacttgagctcaggagttcaagaccagcctggataacatagtgagaccccatctctttttaaatttaaaaaaaataagtgatcctcccgcctcaccctccagagtagctgggattacagtcacgtgcctggctgggcaaattatttaaccctctgtcctttcatttcttatacatgcaaaaatgaaatagtaataatagattatagaattttgtggggattaaaaaagataatgcagtaaaggtatttataactgtgttaacatataattagtggtcaatttatgttagctctttttacctggagaaagaattatgtcatttacatgggattacatttatctaggattacactttcatgggatttactaactatggtttgaaagaagaatgcattttgttttatcattactgttactattttatacattactggaccccaaacttgttttttctgctgaaccatgaagcttataatttgctgtattccattatctggagccccagacacaaaactgataagcttcctggaaatagacatatggctagacttaaaatcctcaaattggagcgaaccttagttgcctagtcatttagataaaatattg

SEQ ID NO: 135199 - DNA, 325 bp, Homo sapiens
cacagaaaaaaaatgagtgatttaaaaaaaatatcgactctgtacaatcaatgtattagtatcaaaggaaaaaagcttatgatacatgaatctaaatgatgagaatcaaactctcaatttagttttttcttgttttcatcaattaaagagaaaaaaattaagtctaaaatcctctaaaaaatgtaaaccatatgaggacacaattggaaagagaacatagctcttagtgactgtttgagttgttttggatggagtcattacattgctagttctttcggttttttttttggtgtttttttttttttgagatggagtttcgctcttg

SEQ ID NO: 135200 - DNA, 1454 bp, Homo sapiens
  misc_feature (1)..(2): n is a, c, g, or t
  misc_feature (6)..(6): n is a, c, g, or t
  misc_feature (1212)..(1212): n is a, c, g, or t
  misc_feature (1227)..(1229): n is a, c, g, or t
nncacnaggctgggtctgacctctgtagcttcccatccagggggcctgaccctgcctcctgggctcacagagccagcctgtgccttccaggatggaaccatgacggggccctatcccggtaggatgaactgacatccattttgcctgagggttccagttgacatctattcctagtgcctcctttcactccccaaagtgagatcagccatgtatcatcagttatccagtctgtgcagtaaagagggtgctggggcccagaccccagccctgaaccctgctgcatggactcctggcaactgtccttaggctctctcgaggcccagcttcctgttggggagaacagtgcccacccgatttgtgggtgaaggtgtgagcgctctgtatggccctctccttcccacagtcctggctggcggcttcggaagcccactgggccctatggaatggagacacacagggcatttgagccccagcctcccagaaggggcaggaagtgtgggaaagagatgtcattggtgtgaagcccacagctgcgcctagcatgtctgtagagggaaccagtgacttcaagagtggaagcttgtcatcaagatggaaaaggatgcgaccagcatttggggtggccaaatgaagacggccaaatgccaccatgtatctcaggaggaggcccagcactgtcctgtccaacccacctataccccaaaccaacccttccaagacccctgggaagggctgtcctggagcgtgggtggggcaggaggtggctggcagacacaccctgggttgtggtgatggctagcaggctgtagaccatgacaagaagtggctcctcctcggggtggctctgaagagcactcagcagggtggaggtgatggcttggttgcagggagccttggcttccgggtggtgcaccagcgctgctcaagccagaggaagacgcctggggttagccccacagctcaggcatggggccagacacacaaggctcacaggctgggggatagcatctccactttgcatgaaggaaaccgaggtctgccttgttctgacccagagcaggcctccatgaatccctgtggcctaatggagtgaaggaccggaagggagccctgcccggccaggccacgcatcctggtccctgggagccagtcaggcagcactgaacacaatttcaacattgcatggaatcctgatctcaagtgatctgcccncctcagcccctcccnnngtgctgggattacaggcatgagccactgcgctgggctgcaagcccatttctaagcaaggcgtggagggaggtgtggctccgggtggtgggaaagacctaccctttgggatggggcccaacagcttccctagtttccccagggaggcaaagtctctcttcccagggactctgtcctggtcacagctgagctacaaaaggggtcgaagaggaggaggggagggaggg

SEQ ID NO: 135201 - DNA, 183 bp, Homo sapiens
gtatctagaggatcccgcacccaggcgcactgctgagggagacaacgcagagtccgcctccaagctacgcccgcgccccctcggacggcagcggcactccacaacacgccagcgtggacatttgcacgggtacaccgccacgtcggacacactggaccaggcgctccagaagtggaactggag

SEQ ID NO: 135202 - DNA, 322 bp, Homo sapiens
gaacaggtgtcatcaggaagctctgtgtttaagtggcaaagcactaacgtagacagcctgcgtctttgtatatgagatatagctctcaaaaaatatgtcagctaactcaaaaatatttggcaaactacagtgcatttagagattaagatagacaaagtcatcattcactatcatttatccctgttgcttaagctccgagaggggaggtaagaactatctgtaagtgcagttatgcaagtggtcagtgcacatgtgagcctccctgcaaggttcagactccttacataaacgggaataaactgcctcaccttgtccaaaaaca

SEQ ID NO: 135203 - DNA, 621 bp, Homo sapiens
gttccttgcctccatttccacaggtaacactacaatatacttcagagggtgattgtgagggttacagagataatactaattgttattattgctatagtgttccaaccactgttccaagcatgtcccatgtattaacttactatgccctcatagcagccctatgggttcatatctgggaaggtgctcaggacagagcctggcacccactaaatgctcagcaggtgtcagccattgttatggcctctctagtcctgtgccttccacttttttctctttttttggttccacactgaactctgcaccggccaacaggacacagatttgccaaactttggggcagcaccctgcaggggtggtgcatggggatgctactgctcaaagggcacagcttccgggatggtgggcagctgggcaggggtgccccagaggggtctggggctgggctgctaggagggctccatgacacagcctccagctttgtgcccagctctcagaggcccttcttatgggactctcatatcctgaacctattatggccctgggaccccacagtgggaggcccatgaggcatcctggaagcttctccttggcttctgcctgtggtacacgggcccctcctga

SEQ ID NO: 135204 - DNA, 279 bp, Homo sapiens
agcaagttctgtttgagtcaacagcttgatagaacctctaccctgagccttaccctgtgccatcccctggggacctggaaatggctcctgacagtccctgactttgaggagtcatgctggagacacagaaggaaactctccacagaactgctgaagtggacggggctgcactgcagacggcgggagcaggaacactgggagagatgcgggaggaagggcaggagggcctgggggcagccaacatcggaggtgacctgagaggagagcacaaaggctcgt

SEQ ID NO: 135205 - DNA, 236 bp, Homo sapiens
cagaatgtgcttggggggtgttggtggatggtagccaagctgagtgctgggggcagggtctggtgggcactcaggacaggcatcagacctggtgttggtatgtatgtatgcatgtaggtaggtgtgtatgcatgtagtaggtatgtatgcatgtagtaggtatgtatacatgcatccatgttttttttgttttttttttttgagacggagtcttgttctgttgcccaggctggagt

SEQ ID NO: 135206 - DNA, 751 bp, Homo sapiens
ggagccattgcccaccaaagcgagcatgtggtgtttcccgggtgtggagctgcagcatatgtttgtggagatggtggcaggcaggcaggcggggtggagctgggagagcgggatggccgtgctgtggcacctggcacacttgggagactgtgtgctgttgggccctaagtgatatgagaggacccagctgttggaggccccagccccaccacctgcctttgggactctccctacagctccgtgaggacagggcagggatggagtccacctgaccagctggtctgtgctgatctgctcggaaggggcatgatggggctccagccctactgaggcttccataccggtccctgacacagggctgcgttctttctgcacccccagtacccccaagtaggttggagtcccatccggagaccctccttcagatggctgttctcattcctcccaactcccacccaaaggtcatggttaagaattttggtattggccgggcgcagtggctcacgcctgtaatcccagcactttgggaggccgaggcaggcggatcacgaggtcaggagattgagaccatcctggttaacatggagaaaccctgtctctactaaaaatacaaaaaaaaaaaaagctgagtgtgatggcgtgcgtctgtagtcccagctacttgggaggctgaggcaggagaatggcgtgaactcgggaggcaaagcttgcagtgagccgagatcatgccactgcactccagcctgggtga

SEQ ID NO: 135207 - DNA, 187 bp, Homo sapiens
gactctgtctccccccacccagccaggctccttgtcacgactgcctcaccactaccactgcgagacagaaaatatcccagcaagaataaatggacaggcacagaccacccagagaaaggctggcaaaaaaaaaatagccgtccctgacctgtccctgaaaatgacacctggtcctttgggctgctgt

SEQ ID NO: 135208 - DNA, 355 bp, Homo sapiens
tgtcaaaaggccactgcagccctagttatggccagaaactctgttttccagttttggagcaattgtggcagtgagatcattccaactcgtggatcacagatacagcagcgagttcctgaatcccagacccagtggtggtcctctaactgaatgattatagcaaatgttgcagcatccctccaggataacttcagattcctggcatcattctagaaggcttagcccataattcattcctttggcccttccaataatcaggtaagcatctaattccctctattaaatattttctgttaaaaggcccaggatggtctgtttcctttactgaagctagcatgattcagtgtctcagtat

SEQ ID NO: 135209 - DNA, 324 bp, Homo sapiens
ccaatcagaatttccagaaatgaaagacagatttagggaactacgaaatgcagtggaaagttttaacaacagactagacaaagtagaggaaagaagttttgagctggaagacaaggttttcaaattaacctaatcagacaaaatttaaaaagaatgaaaagaaatgagcaaagtctccaagaaatgtgggattgtggatgggcacggtggctcacgcttttaatcctagcactttgggatgctgaggtgggcagatcacaaagtcaagagattgagaccaccctggcctacattatgaaacctcgtctctactaaaatacaaaa

SEQ ID NO: 135210 - DNA, 472 bp, Homo sapiens
cccatagcacctggccagaatttccttcctttataaggctgagtaatactccgttgtaaaaaaaaaaaaaaaattccattgtgtatatgtagtacattttgtttgttcattgaaaaattatttttttttcccaaggcagaagaatttttcttagtacagaacaaaatggagtctcctatgtctacttctttctacacagacacagcaacaatctgatttctctatcttttccccacatttcccccttttctattcaacaaaaccgccatcgtcatcatggtctgttctcaatgagctgttgtgtacacctcccagacggggtggcggccgggcagaagggctcctcacttcccagaaggggtggccgggcagaggcgccccccacctcctggacggggcggctggccgggcgggggctgccccctactccctcccggacggggcggctggccgggcgggggctgaccccccc

SEQ ID NO: 135211 - DNA, 430 bp, Homo sapiens
agggggtgtcaaagacagtgtatctctgtgccattccagggttcatgtcgaagcagtcctacctccaaagaccacggacctattgccagagaactgaatcagaaatttcaatgcatgggcgaaatccctctctgaatacatagaggtcagaggcagaggttggcagaaatgtggctcctgggtcaggtgaccgaaatgcattacctaatgaaaatgacaccaaagtgctgcagacaagagtctcgaaacggaggtcactggcgaggatgatggtgatgagaagcaggagggcacattttaaatggtgtcgaaggacaaatggcacggaacaaagagacccagctccaggagtttaggattctgctctgtcatggactggacaggaaggctgatcagacagctggcttccctggggagatattttttgtat

SEQ ID NO: 135212 - DNA, 117 bp, Homo sapiens
tgaggttttaatttatagcaaataagagattcgagtatgaagattttgatttgcaagatgcatattttttcttgacagaagaaagttcccttgagtctcaggggaaggcacagaagg

SEQ ID NO: 135213 - DNA, 740 bp, Homo sapiens
atattaaaacatattagcatgccacattaataagtcattttaagtcaacagcttattgtagttaataaaaatataagtattttcctagatcattgatatgatatcaccacataaagaaatcataatataaagtccccccttattgagatatatatatacattatgactacagtattatctatattatgcatacctaatagaattgtggttagtgttactttcagtattttaataggttgctagaatagtatactagattttaatataattgcatattttcaatgaattatttcacttgaatcttcttaatggatctttacatctttttcgtttttaaaaaatcgaatctaaaatggaatatttttgttaaaacactaaacatatcagcaatatagcacagggcgtaactacttcataattaatttcttcatatgcaaccagatgaatatgctctttttccttatctcccaaataaggtcaaaggtgattttatctcattatataatagataagagaaatcactttaaaagaataaatgtgtaaactttggaaagggaagatgcttatggcagaaaggatagcattcatgctgggcaggtgaacaggttttcatagttaaatagttatactgttattaaaggccataaagttataaaaataagttctacttatttggctatggatctttaaataaaatactcaaatgttctgatgccttatactctctattaaaaatttta

SEQ ID NO: 135214 - DNA, 463 bp, Homo sapiens
ctgattcgagtttgtgctttcaactactatgcaataatttacctgtatgaccttgatttaattctcacagcaacccatgaggtagattctacctttatcttatagaagacgaaactgagacccacagtttatgcaatttacccaagattgcacacttagtaactgaattgtagagctgggatttgaaccagggacaatctgactccaaagctagtctttctattctaccacagcctcattctcaagaattctatcacttgcaagaccaagatcttctgttcattatccaaataatatgttgctgggatcatgagcccctcatttatgtctcagatgcatcatctttcccaaattaacctcctcacctatactttacagtcccaaaccctccacaatacactaagacagcagatctcaaaacactaccgtctcgggacccttttgcagtcttaaaaattaacta

SEQ ID NO: 135215 - DNA, 220 bp, Homo sapiens
caagtaaagaaatcaagcacattatcttttcaaataaagttgaaatctctgctaggataaaggttcctttttcctgctttagcataatatgtgaatttggcaaaatgctgttcagaaactgacaatgggaaaaggagttactcctttatttagagtaggtgcaactctattttattaggctagatgcaacagggcattaatagggagaggctgaggtctg

SEQ ID NO: 135216 - DNA, 967 bp, Homo sapiens
agctgggactacagtcatgtgccaccatgtctgggtaatttttgtatttttagtgcagatggagtttcactttgttggccaggatggtctcgatctcttgaccttgtgatccgcctgcgtcgccctcccaaagtgctgggattgaaggcgtgagccacgcacctggccacgtccttattttgtatgcagcagacacacgccttctctgccgtgtggttggatccagccctttctctgagaattctggttctttttagtgaggaatggaatttagaagttaagatgtgggtgggagatgtgctcattgctcatgggccatcagaacctccacacccttctacctctgctgcaacccagccccacggcacttccttgcctgcctcattcctgtgcatcccgtcttgcatggtgacgaccccggctcacaacagcagagacagcatcacgcatggctcaaacacgctgtaacacagagcaggtttggaatggctccacccacagggccacaagaaacaaacccatggagagttccagatctgtttgcagcttttttctttagtctgagggtatgcagtcaaagtgctgtctccaaaaattacttaaatttgttttgtcccgactccccttcagatgatggctaatcatttgacagacacttgggttcctttgttggcattctgttgtagcattttccccgattcttgataattttattatttgaatatgtaaaatgtcatgattccaaaagttaaaactattcaaaaagctgtgcccagagaaatgtcttctcctctctatttctcctgccctgttttctccaaaaggaaccagttcgtttattttaacagctttcctgaactataattcatataccataaaattcacccgtttaaagtgtatttagtgttttttagtattcatggaattgtgaaaccaccgcaatcaattttagaacatttttatcacc

SEQ ID NO: 135217 - DNA, 264 bp, Homo sapiens
ggcagaggcaactcttacgactcctctatgcctgcaggaaattaattcccaatggaacatatggaactggactgaggggatgggtcaatgttgaggagttgtctccattgcatagtcctcctattactttgattttaaaagtcagctaatcttatgggctatgccacccaatcaagcaccagaggactgactattctgacactggtatggacacagtaagcccactgcacaccacaatggtcaaatcaaaaccagtcatgtatg

SEQ ID NO: 135218 - DNA, 256 bp, Homo sapiens
agctgggactacaggcgcctgccaccacacccggctaatttttgatatttttagtagagatggggtttcaccttgttggccagaatggtctcgatttccagaccttgtgatccacccgtcacagcctcccaaagtgctgggattacaggtgtgagccgtcatgcccggcccataaagtgtggtttctaaagctggttgtcccaacttcatgaggacagtaggaaggtttacatactaaagcacttggggcgatgtg

SEQ ID NO: 135219 - DNA, 419 bp, Homo sapiens
gaggaaatcacagagaacactgaccctatgccgaagaagtcatagaaagatcacacgactgcaggcatccaaaatcaaagtcaaagcatcttaacaacatgcatatatcctcaggaaaaaattctcccttataaaagcaatttcaaaaaattggaacaagcaactgctacaccagacgcaaagaaatcaatggaaggatacaggaaacatgtaaaagcagagaaacatgacaccattgtattagtccattttcacactgctgataaagacatacctgagactgggaagaaaaagaggtttaattggacttacagttccacatggctagggaggcctcagaatcctggcaggaggtgaaacacacttcttatatggtggtggcaagagaaaatgaggaggaagcaaaagcagaaaccctg

SEQ ID NO: 135220 - DNA, 320 bp, Homo sapiens
ggctacactggcatcataacattctactagaggttaagtcaataattcaaagttaaaacctccaacatttgagacttggtattattaaataaatcacctccattttggcaaatttacatctgtaaccaattcatttaagataagagctctctatattatggagagtcagtaaaatattggtgataaactctatgatcttggggaggtccttaatctccctaaattttaagctccctcatcagtaaaacaggaaaagggaaaatacatctgcccagggctgatgtgagggacaaacagggcatttgctgcccatagatgct

SEQ ID NO: 135221 - DNA, 439 bp, Homo sapiens
tctagaaggaggggcagacacccccaggaagaagttggaagtgaagaggatatcacaggtgattgagagcatgtgtgtcaggtgatagacgggaacctcttggtgccaggagacgcgtggaatttgacagtgggctgttggagagcaggtaagttgcatggattcctgctggtggttcatctgacagcaggaactttgctgaactgtctttcagctgaagcatcgcagtctccaagagagctgtcaagacctaggcagaaccccagcctgcaaggatcagtaggggtctaaatcagatgcttcctagagcttccctgggccagggatgacatatgggtttcacttgctgtgccagctctgccactcattgttcaaggcggtcaggctttggccggcatcgagccacctggagatcccatttcagtgcagatcctgactc

SEQ ID NO: 135222 - DNA, 305 bp, Homo sapiens
ttgtctgttttaatgaactgcatttaattgttatgtcttttttgtctcctttaatctagaacagtcctttttgctttttatttcttttgtaacattaacatttttgaagagtttaggatagttctgcagaatgtgtctcaatttgtatttgattgttttctcatagttacacttagattaaccattactggcagagatatgccataggtcatgagttctcagtacataagggcacatgacgtcaattatcctattgatgatgtacctaagtttggacttggttaaggtgggttgcaccagatttt

SEQ ID NO: 135223 - DNA, 497 bp, Homo sapiens
gctctgatatacacatgaagctcccctgaatcattcttatacatggttactgatttccatatcactatagtttcacagctaataggcgtatctctaaactctaatatcaagatacatggcctaataaagaatgtttccaccacattctctagttgcaagaaccactccagaacatggtttttctccacaaatattggaatttcagtgtttacaggaacaatgggaagaacatcagtaatgggaactggcccccagatggccctaactgtatttcaggcacaggatgagttaaataggctctgtgtgcctgaagacttcacatgcatagctttatgtctaacaaggaaagaatccactccaaaatgtttttcaaatgaacttttgggaaaaaaaaccctggcttaagtggaagattgcctgcatataacatctgttgtatatatgcatggctttactgactgaatcctgatttgttctcagtctttctctataaaaaa

SEQ ID NO: 135224 - DNA, 532 bp, Homo sapiens
caaattattatcattgacagtttacacaaagaacagtggaaacgcctcagttaaaggaacagaaccaacggtatttcttttaacgtgcatttggagtttgagcacttcctgtttaaatttgcagcaatagaggaagatgagctcaaggaggggaccccaaattcacaacagataatgagagctgtcactgagtttctactacatgcctcagtcacccagggtaaagatggagatattaacattctcatcttgcagacaaggccctgcgaagttaagcggcttgctgaagttcatgcagttagtcaccagccaaactagtgttctagctaaggtctgttggatcctaatgttcacggcccggtctccttggccgctggagcactgatcaccaaagctcaccacaaacaagcttcacttcagcaataatctctcctgctaacggatcagatggatgatttctgcaacttttgcttttatactgtattttcagttttgcagatgactttgcatttcaaatcacagcatcaacaag

SEQ ID NO: 135225 - DNA, 204 bp, Homo sapiens
actttctgctgtcaccttggagatttgtgaccaaatgttagctggtgtgcacacgtgtgtatgggcatgagcacctgctgatggtctccagagcacaggggcaggtctgtgtgcaagtgtaggtctaaatggagcctctcagagctggatgcagtggctcacacctgtaatcccagaactttgggaggcagaggtgggaggatt

SEQ ID NO: 135226 - DNA, 140 bp, Homo sapiens
caggaaaaaggaagtagaaagtataggcagtgatcatacatgagaagatatatgtgtgtgtgactgtttttgaggccattcgatagaggtgatatttgaatatggatgtgaataatatgaaggagttgggcatgaaaaga

SEQ ID NO: 135227 - DNA, 313 bp, Homo sapiens
gagactaaggccttcaatgtgtagtgtggagtgggaaaggtgtcccttcctccagatggtcacacagctgggcgagaggaacatgggccaaaagctcagctgcactcacccctcccaggtgcctttatgtcacacacaccttaagaggtacccctgaaaatctttcaaaagagtaaagtatccttggccaggtgcggtggctcacacctgtaatcgcagcactttgggaggccgaggcaggtggatcacttaaggtcaggagttcaagaccagcctggccaacatggtaaaactctgtctctactactcaaaa

SEQ ID NO: 135228 - DNA, 235 bp, Homo sapiens
cagctggtccactcctgcctgggcataagagctgtgactcaaacgcaggagttctgattccaactctagcactccttctagtgcacaccattcacaaaaacgcagaaaagtacaagagggagccagcagtggcctaaaatagcaacatgcattagtaggaatttttttttttttctgagacagagttttgctcttgttgcccaggctggagagctcttattgcccaggctggagt

SEQ ID NO: 135229 - DNA, 508 bp, Homo sapiens
acgcatcacgttgctgagtactcctgggatgatgtggtcatttcactgttggtgcatgaagaggtgcaagctagaaatggccggctgtgaccagaaccccaccaaggaaccgggacttgactttatggagtcagaagtaaaagaatccaacctgagtgtttaaagatgagaatcacagcagctgagggagacaaacaagactctggaggcagagagactggtaaggagatgagatgacatgaatggggtgccggacagaggcagtggaaagagagcacaagagaggatgcaagtatggtgtgaagccaggctctgcagggctcacataccaggggctcccgttaaggggttctacattttaacctgcgatcttgaagaaatgcctcactaaggggatcctgatgtatcaaggcagaaataggttaagttcccctatggcttcaggtgtagccagttaccacttgcaacttaaaattactctcagatgtagacctaattcctgaaaact

SEQ ID NO: 135230 - DNA, 843 bp, Homo sapiens
tgttctggagatagataactcatttacagtggtttctattaactaattaaagtacccatgattttttccttttctgctcagggatgatggagatttccttttaccttttttaatggggtaaattttttaatggggaaaataggccttttaaatattattgccagggtctgcaatataacttaaaattcctgtacatactgcaaatatttctttaaattgcacaggaaaatgagcaaactttttatttcttaatatctttggcaaaaaactttaaccagtaagcaattttataaccctgagggatcatcaaagatactatcctgattcctgtaaggaaaaatatattatttccttataacaaggcaaggagaaatgctattttattcctgataatttatataactagaataatttttttcctttcttttatggacctaaatctgccaattgggaattttgtgcatgaaatatgaagttactttttatagataatcagtgcttttaagtccctaaaaggctcctgctgaagtaatgatgatgttaataataaaagcctttgaaaggctgaaaacctacatagtggtaccatagtatttggagcttctataggagtggagaggggcagctcattgttgagagttgcatgctgcaacctaatggtcagcaatgaaagaaatacttgtagaatgttgaaaaaaaaaaaaaaaaaaaatttgggggtgggcggaaatttaaacatgttggggggggcaaataagaaggaatgtccaaaacgggggaggggggttcccaaaacgggggggtgaaacagttgtctggtcaggataacagcggggggggggg

SEQ ID NO: 135231 - DNA, 305 bp, Homo sapiens
cctgagagcctttcatggtgtctatgaggtccttgtttttccaactatgtatctgtgtcaggtcaggttttcttcatgtacttcaaccagtataacatgtcataacagactgaatgtaaaaacagatgtaagaatcggcctgtcttctattaagccaaacaaaggtatttgcaaaaagtgtaaaacttggtcactcttctcagaaaatttgtattttattttggaaaaatagtttttgtgtttttttttttaattttaaaaatatggtatttaatttcaggtgaggctatttatcatagagctct

SEQ ID NO: 135232 - DNA, 295 bp, Homo sapiens
gaaagtgctgataataaaatactcaattagaaaatacagtggtagaaaatatcctctttatagtagtaaccaaaaaatctgcaagaaaattttaaagaagtaaacagtacttatttgaagaaaactatacaagtctattcagagacatatatgaagattgaataaatggagagtcataacgtgttcctgggtataacttgccgtactggatattaaaacattataagaatgttttaattaacacagtgcagtactagtacaggaatagacaaaacaatggaacagtgtagagtcc

SEQ ID NO: 135233 - DNA, 1174 bp, Homo sapiens
acaggtgtgagccaccatgccttgccaaagttggctgtttctttagattcagaggaattattatctggcttgatctgaagaatgttaaaagtactatgatctgataattgcctaatatgtatgttacaatcttcttaactagggacatttattaaaatagaacaaactagtaaaagtattttgtacgatgctggattattgttaaagtctctaaagtctagttttgctgtatttaaaccaatgcaaatttaattgagaactgcacattttgaaagcaacttggaggaggcaggtcaagtgttgggacagtaaagtatgaatagattattatgggacaggaagcagcaatgtgacatgcctaattttggcctgatgagcaacagaaaaggggaatgggttgaatagataaagtgaaggaagttcattagagggacttgatgaaatcacctagagaggaattctaagaggccatttaatccagtacctctgtctctcatgtcagttgcaaataaaccatctcagaagatagtcattcatctagtgtatcgtacttacaatgccaccatctttacttgaggggcatctgtacttctctatacaagtaaggtgatcaaggcaaaattcacttacatgactctatagttcaatgagagtttcacataaatgcatagttagtgaccaccccaaagattctctctgtatacttaggtaagtccatcctccagcctaagcccacagcccctgaaaaaccactgatcgtatacgaactggtccacatatagtacaggcatgagaccaagaaaagctccatcatacaataggcattcaccccaggcactgtacgccaactgaaacccaggctacacaccacacacaacgacgcacacgccatgcaccacgagacgaaagacgcacagcgacatcaggaacatacaaagcccataaaacaaatacggacagacagagtgagaacatagcacgaaataagaaatgaaaatgatcgtaaacatgacgtcgatgaaaaacaccataccagacagagaatggacacggaacaaacactaagatgggttaacagaagtatgagagcgcacagaacaagacactagagaagagcaaaaaacgagcgaaagaaatagaaaagaaaagagtcaaacagcagagaaaaggagaa

SEQ ID NO: 135234 - DNA, 593 bp, Homo sapiens
tgggaaatcttgacatgtatttccctagagtgtagggacattagaaactagcgcttgcctcttctctggagaattctaaagcagcctttaataacagggcaaggaagaagtgcaggaatacatggttatcttagaccagtgattttcaaccagcggtaatttttttacctctgggagtcatttcacaaagtctggaaacatttttacttgtcacaactgaggggatactactggcatctagtgggtataggccaggatattgttaaacattctacaatgcaccagaacttctccctacccccagcccccacaccaaccagaattatgtagtccaaaatgtcaacagtgcagaaactgagaaatcctgacagacatagtaggggtttccaagctagagccatcttgaaagatctccacccaaaaatggcagaacaagggaatcccagaagtatactacttagagcaggagcttaaggaatggttgtaagaggtcagctggcaagagccaatgaatggtgcaatatagaggttcctgttggggtactctgaaatctccagcaatatactttatggatacctgccatgacagaggg

SEQ ID NO: 135235 - DNA, 473 bp, Homo sapiens
actctccacacacccctcacacctctcaaacacttgtccaatgctataaacagttcagtcaaaattcagaccttcccagtaagtgttagaataataatctaaaaagagttgagcatttccattttaaaaaccttctatgaggccgggcgcggtggctcacgcctgtaattccagcacttttggaggccaagatgggcggatcaagaggtcaggagatcaagaccatcctgactaacacggtgaaaccctgtctctgctaaaaatacaaaaaaaagttagccgggcatggtggcacgcaactgtagtcccagctactcgggaggctgaggcaggagaatcgcttgaacctgggaggcggaggttgcagtgagccgagattgcgccactacactccagcctgggtgacagagcaagactccatctcaaaaacaaacaaacagaaaacactcatttttccaccagtgccagtacaa

SEQ ID NO: 135236 - DNA, 209 bp, Homo sapiens
aagaaccctaacccaactggataaggaaattgagcattctgggtgggagagaatgatgttatacaagggagtgttgatgatgctgacccacctatgaggaagcacaaagcgatgggatgcatggatatggagagatttttcttctctgttagccaagactatccagcttagttttaccatccggcacccacagcaccacatggtaagcc

SEQ ID NO: 135237 - DNA, 622 bp, Homo sapiens
gggctgactgcttcaaaaacatctaattatttataagtttttccttgttcatttttgaattattgtctttgggttgatgcagagaagggaaagatcattcctagtggccctgctcctgttaatgtctgtgaaattgctttgaaagaagtgaaaatcggccgggcgcggtggctcacacctgtaatcccagcactttgggaggcctaggcgggcggatcacaaggtcaggagtttaaaccagcctggtcaacatagtgaaaccctgtctctactaaaaatacaaaaaaaaaaaaaaaaaaaaacgttgttgtgcgcgcgcggccctggggccccgcgagaaaacgtcttcttcataaaccacattcgcgtgtgggccgcgcgcgggcgccccaggcggcgatatggtggaaacacgtgtgggcacaataacgatggtggttctcccacagagggagaaatccgcgcggcgaccgaagagcaaccagagggcgccgagcgagatatctccccaaccgcatatacaacaaaagcccccgcgagggggaaaccacccagagagggcgcttcttgtggacacccaaacactgccccagacatcggagagctcctcgaagagggatca

SEQ ID NO: 135238 - DNA, 686 bp, Homo sapiens
agctttgctggagaaagttgtacaggccagcatatttagcatcactctaaattcatcattaccagctgacagcactccagcgaacatggtgaatgttccccaaacccaccagactttctgtaagaagtatcacaagcaccaactccacaaagtgacatagtccaagaagggcaaggattctctgtgtgtctagggaaagcagcattatgacaggaagcacagtggctatggtgggcagagtaagccgattttccagaaaaaagctaaaactacagagaagattgtgctaaggcttgagtgtgttgagctcaatttcagatctgagaaaatgtggctattaagagatgcaagcactttgaactgggaggagataagtgaaaaggccaagtgatccagttttaagtgtcatcttttgttttgttatgaagacaataaaatcttgagtttatgttccaaaaaatttaaaaataaattcatcattaccgaagttaatattggcagcagtcttactatatttctctaacaagtatcctactctactctttgcaacaaatgtttcatcccttcattactctcttctacctctcaccctccctgtttccttccctatgctgttggtagtcttgactcatacctcagaaggaaaaaggaagccatcatatgtgagctctcttacttcctaccac

SEQ ID NO: 135239 - DNA, 317 bp, Homo sapiens
cccacctcggcctcccaaagtgctgggattacaagcgtgagccacggcagccggccactgtttgattttttacttttcctagaagttaattttgacacatggccaaaattaacatgaaataataaaagtggtctgtttcccatttggagtctttttgatgaccgtaaatgaaaagattaaatttttaccagattaatccagaacagaagtcttccttactggtgtgacctgttagtttagaaactttgtcctgaataaatacattgtgtgttgcatcagtatgtatcatagttagtatccaactacacccaccaatt

SEQ ID NO: 135240 - DNA, 271 bp, Homo sapiens
gccgtggccagcagccaccgacggggtgggcagttccgcaggctccagatagacctgctgtgaggagttggctgagaggcgtgctgtcctcgaggacctgtcaccagagcatcacgcattgaacacaaccgcgtgtctgcctccgcagcataaagacccacgagagcatcccccttaggtggccttgacggccacctgacagccagctgggccgcgcttcctgccaacgcagagtgggtgccgtgcccgagggtgccactctacctcgcac

SEQ ID NO: 135241 - DNA, 457 bp, Homo sapiens
tctcgtagaccatgcctgggccagtcctgccttaccggagagctcaaggcttaaaatcaatgtccatgtgcaaccgtgacaaatggaacaagagggtgcatcatgctagcttatgatcacaatgacacatttaacgaaaacttcagtaaatagagcccatggatgaaataatagaggattagcctgggacaggataccatcctcgccccaacaaggagaaaaagaattccagcttttccaaatcactttgaattagtgatagctagaaaactcagagaatatgtacagaattgaaagaagaaaaaaattagccagaactctacttcctgaagaggatgaggcaagcagaagaagaaatttgcgtcttaatggaaaacgaagcacatttagaaagccaacccacaagccacggtcaacccacaagccacggtcaaaccacaagccacggtcaacccac

SEQ ID NO: 135242 - DNA, 842 bp, Homo sapiens
ggcgcaatctcagctcactgcaacctccgcctcctgggttcaagcgattctcctgcctcagtctcccgattagctgggattacaggcttgcaccaccacacccagctaatattgtatttttagtagggacggtttctccatgttggtcaggctggtctcgaactcccgacctcaagtgatccacccacctcggcctcccaaagtgctgggattacaggcgtgagccaccgtgccaggcccatgttagtttttaatattttttaatatgagtgtgcatatagttgttagtatgttattttattatctcttaaatgactacgggatctgtggttatatctcctctttcattgctgggcaacaacagcgaaagtccatcgtcaagaaggcaaacaaaaagagtcacctccagtgatacgaattctcagggatgcacaatgctcaccctggttaaggcgtagataagaaagatagcaaacatattggacagttgctaggacattcaagcataggaaattggattgaataacaccatgatggagtacaaactataaccgctgaacagacacgaacgaacggcatgggtccgcagcgctggactgcacaactcgctaatcccagagactacgggaggcccacgaaggcggactcacacacggccacgcgaaaccgcagaccaacactgggcaaaacaacgaggtgacacagagcctgggcacgatagcctacacacaatccacaagaacaagagcgggaaagttatgcacaacaaggagcggtagacgccgaaaactaaacagggaggccggaggaaaggaagaaatggcggaaacgacgagaaggag

SEQ ID NO: 135243 - DNA, 540 bp, Homo sapiens
ggcgcaatctcagctcactgcaacctccgcctcctgggttcaagcgattctcctgcctcagtctcccgattagctgggattacaggcttgcaccaccacacccagctaatattgtatttttagtagggacggtttctccatgttggtcaggctggtctcgaactcccgacctcaagtgatccacccacctcggcctcccaaagtgctgggattacaggcgtgagccaccgtgccaggcccatgttagtttttaatattttttaatatgagtgtgcatatagttgttagtatgttattttattatctcttaaatgactacgggatctgtggttatatctcctctttcattgctggcatcatttttttgtttttttgttttttttttttttgagacggagtctcgctctgttgcccaggctggagtgcagtggcgcgatctctgctcactgcaagctcagcgtcctgggttcataccattctctggcctcagcctcccgagtagctgggactataggagcccactaccacgtccggctaatt

SEQ ID NO: 135244 - DNA, 358 bp, Homo sapiens
gaacaaaggcctctatcctgggccttgctcccttatctgtgcagctgcagcttgatttttccccaggctgctctatctgtgcctgtagctttgatttttcaaaagaattttaccaaggactagccatagctgtctgcccaactgctttattccttttctcctccctcagcatcctataggagaaagtcacctttgtctccaaattccctggtcctggttttgaaaatcctgctggcacctactgctgaaggctgtggctggagaattcagtgagctactctgatctggacagggtctgatggtcctcacttgacctaagctgagctctcccaggctgtgagcatccccaaggtcagcc

SEQ ID NO: 135245 - DNA, 181 bp, Homo sapiens
gttgcttctaactgttacttgatattccatggtttaccttcaccatattttacttttccatttctcctagtgatagaaactagattgtttgcaacttctcattatctcaaacagtgctgtaattaagattttgtatcctctccttgtgacccagtgtgagaaactttggggaatacatata

SEQ ID NO: 135246 - DNA, 363 bp, Homo sapiens
gactttctagatcacttgacctgtatttaaatttctgatttgctatcattaattgagagttcctcttgaactcaacactgttctaagctagacatctctggccttatagcctgttatttctacttcatcttggtcaatcactatcattcggtaaactaagctagaaaacaggaagtcggccgggcgcggtggctcacgcctgtaatcccagcactttgggaggctgaggcaggcggatcacgaggtcaggacatcaacaccatcctggctaaaatggtgaaaccccgtctctactaaaaatacaaaaaattagccgggcgcggtggcgggtgcctgtagtcccagctactcaggaggctgagg

SEQ ID NO: 135247 - DNA, 363 bp, Homo sapiens
tggaaggtgcccttccatagtgttcagagagatttggactggagttttctagatcttagggaggagtggggagaagtggtctcagccagaaaactgttgggtgggttggctgtgacagagcatgtagtgacagcccctgggtgggcgaggctgggggctgctgtaactgccacagcccagagcccctcagctctctccctagagatggcttctccatcagttcaggtagctgttggctttgatttaacaggggtgggggcagatgaggaagttcaggcaacacagggcctgggtttcctgagttgttctgaattgtttgcccttttgtggaagctcaggtcttcagacccacttcctcttgtc

SEQ ID NO: 135248 - DNA, 681 bp, Homo sapiens
gatggcattgctaagattcccataggcgtttccctaatgaatgctccccagtgggactcagcctcagggactcagaaacctgccctcgaagatgtccctgtgagtatgatgcaggctcgcctttgctgagtcacagagacttaatcaggtagcaggcagccagcttactcatcacaacaagaactcagatgtcagccagtctggaacgcagaggtctgcctgccccggtcattttgtcccctatgggtctgattccttagaagccgggttccaccagaagccacgtttatccggtgctttccgggagggcaaggaatcaaaacaagaggagtttgttgttcttaccaagggtctggcaggtatcacttgaggctccttcatgcaccaaagggaaagatctgccaagggaaccatgtgttgaagtcaactaagccttgatgatacttctaagagcactgcaccactgccttcggcctccatttgtctttgttttcatgactgactggacccttcctgttcacatcaatctccagacacattgtgatgcaatcagttagatttcccactttctccattataatcatgtgccaacccaccctcttacgattttttttagcacaagttttgcaggttccaaacttttgcaagaaaggaagtctcttgctcgattcccacaatggc

SEQ ID NO: 135249 - DNA, 272 bp, Homo sapiens
attattattattattattattattattattattattttacattttaacatctctgaaacagggatgtgtcctacaatcaccatcagccaggaagtggtcaggatgcagtggttataactggattattttccctggcctggctgaccatctgcaaccccctggtgtttcaatgtacaaactattttaggaccatctgcgtactggctgttgcctgaaaatcttgtgttgatgtggatttgtaagactgggaaagcaccagcattcaaaacttg

SEQ ID NO: 135250 - DNA, 243 bp, Homo sapiens
tcaaaacaaacaaaaaagctcaaggcttgaataaaagttttcaagaagaaaaggtttgaaaatatattctagagtagcacttctcaaacaatagtgaacacagaaatcttccagggatcttgctaaaataaaagattatgattcggtaggccttagagcgaggtctaagaatctgtgtttctaaagacgctcccaagactgcagatgctcctggtctggtgatcgcactttgagtactaaagt

SEQ ID NO: 135251 - DNA, 421 bp, Homo sapiens
tacgcgagaatcactgtttccttctttctctctcttcctctctcccctcctgctctggccatcttttcattttaactggtccctgtgcaaatggccttagaactccacttgtaacccaatatctttgcaactcactccaactgcgagagacaagaagccaaaatacacaacagggaatgatctggactttgccattattgtagctagccttgttacaaccccacgatcacaaagatacgaatctcttaagggggtggaccccaagttcctgaggaacatgcgctttgccaagaagcacaacaaaaagggcctaaagaagatgcaggccaacaatgccaaggccatgagtgcacgtgccgaggctatcaaggccctcgtaaagcccaaggaggttaagcccaagatcccaaagggtgtcagc

SEQ ID NO: 135252 - DNA, 259 bp, Homo sapiens
aattccattggtcacaatgtatcacttcttatcacctctaccacttgtccatctaatccaagccaccactttctacagtcagaaatactgaaagaacctgctgttatccctatcattagtcaagctccagagggttttctttatacaaaagccagagtaattttatttttagagacaggatctcactatgttgcccaggctgacttctaacttccaggctcaagcaatcctcccacctcagcctcctcaatagctgggg

SEQ ID NO: 135253 - DNA, 562 bp, Homo sapiens
gatatcaaacagggttaattcaaagcttttagttataggaacattgggaggcccaaactgttgaattaaataactctacaatcctgtgctaaaatactcattaaaaatattgaacctcaataagaagaaagtctgtcaatgtgttatctataacccttgagtccttggatttttctactgtgaagtcatcccttcactcaaaacaaacaaaggagcaaatcagaacaacaagaaaaaacctgtgagaaccaattgcagcactggcatgttaccaggggctggggacaacgtctttacaaaggccaagtttttcttctcaacaagtgaggaatctagaataggctacagataagttaccttataattctagttcaatgatataactcctaagacactgacacaaacaatataatttggcagcaccaagagctaactttgctgggaaaggaaataatgtgacccctagagaaggagaaaggaagtgaggatttaaaataaggccaaagaattgaaattgatatggcaaaatgtgaatatttgctaaatccagatagtgggtatt

SEQ ID NO: 135254 - DNA, 424 bp, Homo sapiens
cattaaaatgtcttctcagtttacatcacttaacccatgtgacttctccaaacgctgcgagaaggattgtagcagctcagtttacttccagcctggagcagaagggctttaaaaaaaaagatatttttaggatctttagaaaaaatagttcttttctaacatttttgtaatccaagaaggcttttcttatcaaaagtgctcagtaatcttgttttacatagctattttgtaagctcttaaactgttgaaaacatatttgaaaaatatatatgattcaggagtcaggcgtggtgttttttctgtagtcccagctacttgggaggctgaggagggaggatggcttgagcccagtttgaggctgcagtgagctatgatagcaccactgcactccagcctgggtagcagaataggaccatgtctctta

SEQ ID NO: 135255 - DNA, 384 bp, Homo sapiens
  misc_feature (115)..(115): n is a, c, g, or t
  misc_feature (127)..(127): n is a, c, g, or t
  misc_feature (147)..(147): n is a, c, g, or t
  misc_feature (165)..(165): n is a, c, g, or t
  misc_feature (174)..(175): n is a, c, g, or t
  misc_feature (186)..(186): n is a, c, g, or t
  misc_feature (193)..(193): n is a, c, g, or t
  misc_feature (201)..(201): n is a, c, g, or t
ggttgggagttcttagacaaagggagaccactctttactagctctttcacctctacccactctgagattttctggctttgggaggtcctgactgtggctgggaagacagcttccnttctcttagagnccacgatggtggagggaaantctcaagacccctccctngccttgttnnccctttccttnggctgcnttctctanttcaggtccccacctctcctggtaccactccattcccattccttctttctgttttcctctctctctcagcaagttttttatgtgattacaggcactgcatggtaattagtgctaaactcatttgcacaactacagttaattggctacaacaattaattaatgtgttggaaatttggcactgga

SEQ ID NO: 135256 - DNA, 312 bp, Homo sapiens
ctgcctgggcataagagctactccagccgggcatagagctactccagcctgggcaaaaaagagctatagtacagccaccgaccaaaccgaaggatgtccacaagacctgggccagccctgcaggtacaggcagaggagaacagctcaggatggcagaagtccctggctccatggcccagaatccaaacaaagcagtgaatggccccactggcctcttacccttgaagctctgcagtgagagacagggtacaacaccactgatcaatggacttcagaaaaaggtaaggccctcaatgccatgaattcactagt

SEQ ID NO: 135257 - DNA, 350 bp, Homo sapiens
atctcaaaaaagaaaaagtgtagtctccagtctgatatgcagaggatctattcttaatataaagataatgaagtttgcattggatgttttttctatgaacatactcaattttggaattgacaaaaagttatttcttaatgcatgttttaatagttgattcttgtaatgttaatcatagagtcatttttggcaaaatagtaaggagttggacagataatttatattgccaatgtcttctcttaaataaggaatcctttcaggcaaacatttggagaagtcttatttacagataagaataatgggccaggcgcagtggctcatgcctgtaatcctagcactttgggagggca

SEQ ID NO: 135258 - DNA, 402 bp, Homo sapiens
ccatttatctaagttattgggttattgacataaaattgttcataattttccttattatctttctaatgtttgtagaatctctagcaatatcctctttcttactccctggtgttggttatttatatcttctcttttattttccttgatcagtctggctagaaccaggttcttcctgttgttctatttcattcatttacactctgatcttttattctttcttttgctcgtttggggtcttacttgctcttctgtttctagttttataaagtgaaagctgcaatcattgattagagacagttctacgctaaagtcataatgacattttatgtaatttcttttttcttttttttgagacagagtctcgctctgttgctcaggctggagtgcagtggagtgatctca

SEQ ID NO: 135259 - DNA, 249 bp, Homo sapiens
agggcctgaacacgtcttttctgctggaagtgagggaacagcctctctaccaacttttctcctcaggctcaagggtgggtgggacagtgcccctagagagagcaggggctgcaagctgagagtgtccacgtgaagaccatggtctcccagtcactgtttggtgccggtgtggtggtctcagttcagccaggtctgggctctcttcccatgaccaggaagaataagacatacagacaccagagagtgagt

SEQ ID NO: 135260 - DNA, 380 bp, Homo sapiens
tggtttaaccaggcgccagggctcaggcctggacctgctggattccaaagaagacttcgaggtggccgagcttgtctggcttccagaggagctttctctgtcccgcccgggggagtggctcaccttggtctgagaccaatgggaggaagcctgctgcgggcaactggtctgtgcctggaagttggacttgcattttctctggacctccaaagcaaacccgaatgaccactctcatcctccccttttgcttgtttgtgtatgtgcttgttttgcctggtcgtcaggcaggaggtggtgtcagatgatgagaggtgttgctcgtccctgggttggttctcttacggggctgtatggatgtcttagctcagactgctgtgaca

SEQ ID NO: 135261 - DNA, 607 bp, Homo sapiens
gatgagatgagatgagatgtaatgatgagatgtaatgaaatgagatgaaatgaatgagatgaaatgaaataatgaaaggaaattgaattgagatgagatgagatgaaatgatgagataaaatgagatgaaataagaaatgatgagatgaaatgatgaaatgatgagatgagatgaaatgatgagatgaaatgagattaaatgatgagatgaaatgatgagatgagatgtgatgaaatgagatgaaatgatgacatgatatgatgacatgaaatcagatgaaataatgagatgaaatgagatgaaatgatgagatgaaatgatgagatgagatgaaatgaggtgagatgaaatgtgatgagatgaaatgacataatgaaatgaaataaatgaaatgatgaaatggaaatgatgagatgagatgcaatgagttgaaatgatgagatgaaatgatgagatgaaaagatgagatgagacgagatgtgatgaaatgatgacatgaaatgacataaaatgagatgaaataagatgtaatgatgaaatgagatgaaatgatgagatgagatgaaatgaaatggtgagataaaatgatgatatgaaatgatgaga

SEQ ID NO: 135262 - DNA, 436 bp, Homo sapiens
tcacacaacggaacactattcagtgctaaaatggatgaggcaaacctgactgtatagaaatataatgataatcaatatgaactgttaagttagaaaaagaagaaaaacatctataaaatgatctcattgtttaaatacatgttagtttgtgtctaggaagtaaaacatggaggaacagcccccaaaactgtagggcatagattatagggagctttcactttcttggcacatgtatatgaaatgtttgagttattttttaccaccagcatgtattataattgtagtcagggaagaaaaaaggttttaaaaatgtctccacagctgggcgcagtggcttacatctgtaatctcagcactttgggaggccaaggcaggtggatcacctgaggtcaggagttcgagaccagcctgaccaacacggagaaaccccatctct

SEQ ID NO: 135263 - DNA, 110 bp, Homo sapiens
tcaatttgaggccaaagtccaaggatgaagacatgagttgacctagatcacttctgtccatagaaatagaatgaaagcttcaaacagtagccacatagacaatgggactt

SEQ ID NO: 135264 - DNA, 398 bp, Homo sapiens
ctctgagcctggtctggtttctcatctataaaatgggtttcacaggtgtattaatgaagacacaatatatgtgaagtgcttagcatatgccccagcatatagtgagtgctctatcagtggtagctcaaatgtctttattatggacctcagagagccacgggttgttggggaaagagctcggtgtgtcccagtgcattgcaaattgtctgggttcaacctggaagtctccatctgtgcccacatccactgtcctttacgatgatgggttctagattttattggctacagctggaaagaatgctagagaatctcacagaactggagtccaatccaggctcccctcttcctggataacctgtcttgaacctctcacctctcttgcactctgtacgttgtgc

SEQ ID NO: 135265 - DNA, 482 bp, Homo sapiens
cagcggaacaagcaaaaaccacagaaaaacatatgctggagtgctatcatcagaccttgcttccttttgattacaggctttaggcagaaggtgaagtgaagtcagagcaattgtggagtcctaattagggaaaaggagtcaggctggcaggacaaggggaaagcaaataagctacaggtctgcctttcttcatggtccagaacatataaacaaaaagaagaagcagataagctataggtctgcctttctttatggcccagaacatatagccctcctgtgcagacaacatacaaaactcataaacctcctgcttatcaccaaacactttgatctatcatcaaacacctcggctgacagaaggatgcaagttagttccctcctaccttggtgctgtcaatcagcccaagttccattctataaaatccccagcaagcctttgtctcctggcagttgggtcctctctgcttgtccctgcccgttgc

SEQ ID NO: 135266 - DNA, 692 bp, Homo sapiens
gaaaataccatttacttatggacaaagaatggcccttgagttcctggagtacttagccacagtactttcacagcctttgtcagggaattccagcatatcatggagcccactgggctttgggctccctctaactcttctcccatattgtttggtatataaattatctttgtacaccccaccaacacacacacacacacacacacacctctgcctttgcaactccttccttatttagtgctccatgttgcaattgacttggtcagttcagcacatatgtgctgagtgcctatgatgtgccaggtactgtgctagaccctaaatttagagaggaaagttacccttagggagctgccaatccagtaggggagatagataggcaaatagattcggtggcaaaaggaacttaagatggctcaggaatataaagtgccaactgatcatgtaagtttcatttatgttgctaaaacagcttgagtgcaaatttaccctcgtgatacatgtgaagataggacatttctccatagaggtttaaaagtgacagcagtgtcataagcaatatttataaagtctagtaataatctctttgttactattcttgaaggaagaggcgatcctgttcttcctcccccattaacatgcaatgtttgacctgaaagttgtagcagcttgattatagaagcctttgttgatct

SEQ ID NO: 135267 - DNA, 181 bp, Homo sapiens
aactattctagtgttgagttttccagtgggattgagatgcaagtgtccacagtgtaattgggagattccttaagattacctctaaaataaactacttatactcacattcttatctcacagtctgcttcttggtaaacccaaaccatgacatctttcatctttcaagccaactctaacttgg

SEQ ID NO: 135268 - DNA, 369 bp, Homo sapiens
aaattgcagagctcaagaagagccaggcccaggacaaagctaaacttcttgagatgcaagagtccatcaaggacctgagtgccatccgagcagatcttgctaataaattggctgaggaagagagagccaagaaagcagtgcttaaggacctttctgacctcactgcacaggcaaaatccagggatgaagaaacagctacaatcatcacacagttaaagctggaacgagatgtgcaccagagggagctgaaagatctcacatcatcattgcagagtgtgaaaacaaaacacgaacagaatatccaggagcttatgaagcactttaagaaagaaaagagtgaggctgagaatcatatcaggactctgaagg

SEQ ID NO: 135269 - DNA, 292 bp, Homo sapiens
atgcacatatagcccttggaaaagagtggaagatttgtaagtttcaggtatttaaggaaatatgtattcagtcattaaccactaagctaaccagacagagacctcagtggccacacacaacaaagaatacggactttataacattaagaaaagtcactaacagacagcaatgacaagcgtagataagaggacagttctgctatctggagttgccgtattatatttattttaaatgcctatttttcgtcataaaattttgagacaagcggaaagaaaagtatggcccatatac

SEQ ID NO: 135270 - DNA, 469 bp, Homo sapiens
agtccgttcgaatgagctgagaaggtttaagcccacagacggcagatatcacacccccgggccaggtttcagctgctttccagtccacagaggatgctccctaggaactcaaggtagcacctgcccccctggctcccctttggtctgaggttcttgctggacggggctcctcctgtccccaaagactgtgaagatggatggtctagcaagcagcacaaacgagaagagtgcatttgctccctaaacagaaaggtgtacaagagacctttgctctctgtgggtcttacctagaatgtttccttccctccatccaaatcaggatgtcactcagccctgactcttccaattgcttcagtctacatcgagccctccctttcgggcagactctgtgcccggcagctgaggctttcattttcttccggctccctgcgagtccctacatacctctggtcccttgctcagtcgaacg

SEQ ID NO: 135271 - DNA, 811 bp, Homo sapiens
tgagtaccagctgtttactggttagattacctctcccccaggagcctttaccgagtagcctttctctccattcagagcaatttattcattctgcagatatttattgcatcctttccatgaaagtgtgggaggcatttattatgcaccattatatactaggaataacccttcttcagctccccttccttcttttttttctaaatgcaggtgtgcttgaaatcctcacctgccagctggccttgctataccttttcctccatgcaaccccacaatcatttaatgagcatttatcgtatactactgagaaccctgcgttaaatgcctcttctcccctttttgtagtcccaattcccccttcaacaatctccatcctgccttttacacaacacaatcctgaaagctcacaatgtgcactgttttccatttattctagctaggcctcttcctccacttagtagccatctccccagctgcctttttctccccgaattagtccagaaaacacttattaatctcttactgtattattttcaaacagccacattatcatccctgcagcaggcttctccgcttttttctctatcaatctgtaaagcatttatggagcacgtgctgtaattccttcaccaacgtccactcaccaacgtgttatcttcctggttaagtttgctccattgaagtcagcaaacatcaatgaggcctctgctggatataggtaatcaccctcctttagacttccggtctccactccagccctccatgcaggtcctttgcgtctgcttccttctttccatcaagcatttattatcta

SEQ ID NO: 135272 - DNA, 492 bp, Homo sapiens
agccacctggaatttctgggacaggcccaacatgaaatattctggtctgttatcattcagctcccaaggaacactggtgcgcctccagctggcccctcgtgctttgctgctgatgtcaaacgctggcattgttgcagaaaaaaattaagttaatgaatataatttttttccatttaagagtttctctcctactttttcttacgcatttggcacctggtacctattgtagcaagcatatgctagcacttatcaaactgaataagcaataggaaaaaatgagcactgctgaactcagaaagagctgatcatgtgtagttcagcagccttttgtgtgcatgtgaggagtatgtggcttgaggttgggttttcttgattatgcacatgcaatataatcagtataattatattttgggggtataacattgttttcagttcaaatatagaactaaccatatcagcatttcatggggttccatagagagctttgcccct

SEQ ID NO: 135273 - DNA, 517 bp, Homo sapiens
cggatacacagtttgaaggtctgggagtggtcctggctaggcatatacattcaggcatcctcagtgcttacacatagtacttaaacccataagactagaccatcaccaaaccagaagtacagacagaaaagctaggaggtcagcgcacgaagctctgggctgctccacaccctctactgtggcccctcctgcagatcaagtgaaaatccaagattgggccaggctttcctagcttgcctcaagggtgagggctgtgtggtgggggtgagcaatctgcacagcccctgcagccccgacacagtctcactgctgctctggccgggacaaccttggtggtgtctcctctgcagctctgcttctggcacaagaaaggcagccagctctctcatccacccggccggctttctctctcgactactgtcagtgaggagcactgctacttccaacttccagtgagaaaaggaagtcagggaagtgtgaagcagcagaatttagaaagggaaaaaatacttcctac

SEQ ID NO: 135274 - DNA, 400 bp, Homo sapiens
gtgcccaccaccactccttgctaattctcgggccgttagtatagatgaggaatcactgtgtagcttaggctggctcaggctcctgacctcaggaatccacctgcctcagcctcccaaggtgctgttattatagacgtgagccaccgcacccagctaatgtttcttgattctctgggtaaacctacctccagacctctggatataccacctccaccttttgtttctccagcctcaggaagttaatgccttcctgctgttgctaatctctagattgcctcgtggtacccagtaggcctctcagctcttccattataaatgtaaccaagtgcctgtattacattacccctcttttcaatatccagagtggtttctattttcctgactgatatatgcaggaaaa

SEQ ID NO: 135275 - DNA, 492 bp, Homo sapiens
aaaagactcaggaaagcaggcatgatattactagaaaaagaagttacaagaggttgtagtccaaatcccatattgttcacaacaaaggcgcagtgaactaccattcacagaaaaagcctggaagactctgatggaacataattacatgacaaagagcttccaaaggaattcctgggacagaaaaatggtgccagggctcattatttccctgtttccagacagtaattttgtcatgacagtgtgctttattactttctgaataaacaattgaaggtcacaaaccaagtatgacctttacaattgcatgagctttcttacggcttttgccgtttataaatatttctacagccaacttcatgatagctatgtgaggcctagaaatctctctgaaagcagcaagtgaggcagagcaagacacacttaccccaagtccaccctgccgtgtggatgtctgacatataagacaccaaagtggaacatttaatagcacca

SEQ ID NO: 135276 - DNA, 443 bp, Homo sapiens
tcatcaaagtctcctcgggaggagggacatcagctctgagagcctcatggatcaaggcaggggcagaggcaatgtcagaaaggtgactggagccagctggtgtcagtgtcagactgtctggacatagtctgataacaacgggaagccttgggactttgagcaggaattccatgtgtttctgctggatcccctacgacaacctgagttcctctggaagtcagacacccttctacgccaaagttacctatgcagacaggcgtgcagcttccatggaggatcagatggcaaatcctgctctaattacgctggtaattatgagctgacacttgcagagcaagaaagaacattccttctgttaggaaatgatcaactgggaagccagtcccagcctctcaaacagggaaggcgctgtgaatttacaaacagctgatgaaaggaggtga

SEQ ID NO: 135277 - DNA, 316 bp, Homo sapiens
ctcatttattataaaaactctcagtacactaggaatggggtgggggggagcttcctccacttaataaagaacatctacaattacctacagccaacaacacacttaatggtcagaaactcaaggctttcccgctaagatgaggaacaaggcaaggatgtcccctctcaccttttcttttcaacactgtactgaaaatcctagcttacgcagcaagtcaagaaaaggaaataaaaggtatacagattgggaaagaagaaataaaactgtctttgcagatgataagattgtctatgtagaaaatctgaaagaattcacc

SEQ ID NO: 135278 - DNA, 780 bp, Homo sapiens
gtaaaaatgatttaggtatagcacttatgacaatgcctgacacacagtaagtactcagatatcatcgatgatgaggatgatagtgatgatggtgatgataatggtgataatgtgatgatgatggtgatgataattatgtaattgatgaagacaattactactaaaactaaaaagggaacgttgaaggtttggacaagcaagcacaactgggagatgaaatccatcccacttttgatcactgatccataagcttttggatggggttgtgtcatccataagaaaggaacaccttttattatttttcaacccagaggttgccccttttggtaacttctatattcaaaggtaaacttttgcattaaacttacaagaaggtatcatgtaagttagtggtctccttagaaatcacaatatgtataactcatgcaaacatgtttaaagaataacttatagaaatatctcttctttctttcttgtccccatttctaaattctcccttacaacatttcacaaaaatatagaggcacctcttacgctcttttgcctcagggcaagtttgtatttcaatgccaactgcaggagttttctgtaaggtattttcctctcctgaattttgttttttaaagactgaatattctgaaaagatggtactgttgagattcagaaagcaacatccccaacatgaaagcctcagaagcaaaagtttttctctgaccctctcctgccctcctgtctcttagtcccattctcctcctaggctagccatagaaactagactcc

SEQ ID NO: 135279 - DNA, 386 bp, Homo sapiens
tctcaggacggaacccaaagacaatttcacaggatttacaatttgcagctattggttctcctttgaccgaatccttgaatttgcttaaaaaacaatgaagagttgacaagatgggccactggaaaatgaaaagagcatcggcacttcacgttcattaaaacgtgaagagatgaccaactaatgctgctttcataccctggatagtgctgagtacctaacagctctttaggtcacaacgtaaaattcggcttccagctggtccagttttcccatctgtcgtatccacggaatgtccaaatgtaagggaaaaatgtggagtgtccagccgcccaccagtccacccagcaccacagcctaacctcaccgaggcctcccagcactcacac

SEQ ID NO: 135280 - DNA, 317 bp, Homo sapiens
gtttaacagaagagtcctctcagcaaaccttcacttcgatgtcaccactactgagatgccttctctcaatcagttacccaggttcttagatgctaaaatacaacttgagtcatagccttcctcaaggagggtccatggattcccagggacaagttaattccattcatccttttaggtccagttggcacctccttcctccacaagtctctggcacttcacagctccaacgtgcacccaatcgtgttgtttggtcacactggaatgaccatcacaccttgtctcttcaactagaccataagctactgaggaccagaaag

SEQ ID NO: 135281 - DNA, 684 bp, Homo sapiens
tacccagttcgacggagactctcccccaattgggggagagtggaaaaggccaggtgaactgccaggttctgcaaggcagaccacagtaacggctacaggatttttaaattaatgggaggggaaaagggggctcaggagatttctgggggtctgaactggtgatagcagaaatgctaaaggaatacatctcctgaaatgtgagggaaaacccacagagaaaatgggctttcatgagtaattggctcctctacccctttccaggctccgagagcgtttcacgggtttaccagagaaaatggcctccggagactgcaacgtgagagtctccgtcgaactagttcgacggagactctctctctccagctggctccagagtgcctggctgctccagagatacagacgcttctaactccatacaaggctggagaccagcagatgtggtacagaagtgagctctgccattccttttactttggggccctggcaccttttgccccaacagtcaagcttcctagggtcgaaaaaaactcctccatttccctctgcaacagctggttcctcctctccgcatcctcccgcgcccgttcagagttccgcagctttatttccagcatgatgtattttttcttttcctggtccagtttctagaatctttagtcacactcccttcttcgattcactgac

SEQ ID NO: 135282 - DNA, 812 bp, Homo sapiens
aaagaagaaggaatatccaagcactcatgtttctacacgtgaacagaggagatggctatttctatgtctactgcatgaaaaccatgggttagctactacatctgagatttcctccatttttgacattccattaaggcctttctaagaagtatgtttatctaagccaaggaagtaggttatatgggagggaaacactttagcttgcatattagggaactagtttatctcaccaaaatccatgatcacttattgctacctatcagaatgcagtccctaggggtatgagtgatggaatggaaggggtctagggctggcaggagcctgggacattgcataattgtggtggatatctgggcatcagagctctgaaaggaggtatcttggatccaagaacaaacttcgttcttcacaattttttccactgccagccctacatatggtaatcagagatctacatcagtcaataaaaagggatatagatcagttgggggtaagtcaggaaaatagaaaccccaggagttgttttaacagaaaatttaaaataagaattagaggactgaaaatttcaaaagaaaaactgagattacacagagatcgtaaatgcaggaagcagctatcatttctaaggttgcgggaacaaagaaaagagtttgaagttgtcagaaattaaatgcttaaaaaacggacccatacaaatggcacaacagacctctaagaagaagacactgcactgcccagcaggtgctggtacctctggagggagcgtgttggaacaaaccggagaccagaccacttacagctgtagggaaggg

SEQ ID NO: 135283 - DNA, 546 bp, Homo sapiens
cattactgttatcaagtgcctgctcctaacatcagaaatgttcaaggtactgagctaccttaattacctgcttgcaattcacaaatacattctttcaaccacatcctcccaaactacagaagtatcctgatgaaagaacaggtgtcaggctcaagggaaagaagcagatgtggtcacaggtgtctgtttcctttagggggctgattcaactatgcagatctaaccctgccaaggtagagtttagttaaagaggaagcctgcctagtgccttccacttctcagtctccaggcccatgtggttaatagcagaataaagtgtttacaattttctaatgaaaattttgaaggaaggggcttatgtttataagattccagcatctcagttcttcatcatatttcctccccaaagagcgatctctcttccagtgtcaggtttatgcacatcaaagccttctttcggatcattcattttgaagcataaataatgtcaaataactacatttaaggtcacctttcagaagcagaactgggtccgagcctgacgta

SEQ ID NO: 135284 - DNA, 398 bp, Homo sapiens
actagcaagcactgtgattggaggaaaggcattcaactgtacatcagaaccctgggtcatggtttaagcttgtcaataactagttatatcacttggcccaagtatcctttgacttctccaggtgggctcagttcctcatctatcttttcatgacactatgaatttgggattgatcctagttttagaagtttcaatagcaggtggatttagtaattccagtttgaagctttggttaagtagtgaccttgggaatataaccatgaaatgtcataaggaaccataaccattatataaaattgtctcaaaaactaaggtcagtgttgaagtgaagaccttgggtggtatactttgatgcagaaaaaaataaatagaacaaaatatcctacttaactgtcatt

SEQ ID NO: 135285 - DNA, 291 bp, Homo sapiens
caaaaagaagcatacttaattttctattctgatattctgaaacagaaacacaacatccctgtgacttcctttcttagaaggcttgataaataaacaccctgggttctcctgaaaagagagaactttcaggagttctctgttatagaagtagacaaaaaaatgattatttgctgcacagaatattgtttgtgggttcttatttttatttaatactctttacacatgatgtgtatttctcagctctgggttttaagaaataattttacttctcaaagaggcaaaactttttgg

SEQ ID NO: 135286 - DNA, 816 bp, Homo sapiens
gtttgaatttgtataccatatgcacatagaacttttcaaacaaagaagaatttaactaaaggtctgtggagtatatttgcccagtagatgtgggagttttctttcaggtctagcacaacagcagcagtacatctgagcatttttcttttcttgtcgtaaaatatacataacataaaatttaccatttcaaccacttttttcttttatttattttgttttgttttgttttgttttgagacagggtctccctctgtcaccccggctggagtgtagcagtgtgatcacagctcgcagcagcctccacctctcaggctcaggagatactcccacctcagcctcctgaatagctgtaaccacaggcacatgccactgcacccagctaatttttcgtattttttgaagagacaaggttttgtcatgttgctaggctggtctcgaactcctgggctcaagcaatgcaccctcctcagcctcccaaagtgctaggattacaatcatgagtcactgcacccagcctcaaccattttaaaacgttcggttcagcggcattaagtaccttcacattgctgttcagccatcaccaccatccatccccaaaacttttttatccttcccacgtgaaactccgtacccataaaatactaactcaccactctcctctccccgcagtccctggcacccactcctttactttctgttttttgtgaattggacagtgtaggaacctcctataagtagaatcatacactatttgtctttttgtgattggcttatttcccttagcatgatgtcctcaaggttcatccaggttgtagc

SEQ ID NO: 135287 - DNA, 161 bp, Homo sapiens
agcgatctgcccatctcagcctcccagagtgttgggattacaggcatgagccactctgcccagcctaaacagaatatttgactatgttatttaaaacaaagttttggtagaaatgtctttttttaatagggtaactcagccagtggtttagggacaaatct

SEQ ID NO: 135288 - DNA, 244 bp, Homo sapiens
gagccttcgcacttctggagagacagaactctgcaaatagagctgagggaatactcaaaagacagatttgggagttctaagaactcgtgcagtaaaatgacagcagaggagaaggggcaggaaaatgttaccctaagagcatggctggcaggaaggagtgaggctgggtccactgatccccactacttagcaggaaaatgccaccctacagggcatggctggtagggagaagccaagctgggtc

SEQ ID NO: 135289 - DNA, 666 bp, Homo sapiens
ggcactaaaaagaaaggctatgattgcaaatataaatggcttaaggaggtggaagcccagtttaatggaattaaggtggtcaacgtgtcaagacaatgctggcattttaggtatagagaaattttgttgcctagttgaaaattttcaagtgaccttgggagcctgataaggatgtaggttactggcagagctgggcaaggagtgagtgattgatattgccaaatggcttatgagacacaaaacaaaaataacttgttttggaaaaagtttaagtaaaatgattattcctgttaaagatttatttaagttgagacaaaaaaattggagacagagaatttttgtgagaagtttgagttcatagggaagcttaggaaacatgaaatttgatttccagagagcagagtgaaaaatgttttcaggaaagatagggcttagataagtcaaagaaaaagagaaaaagaggggaaaaccccatccaaatctctcgctctctcttcctctatgtattctaaatgtccatatatttaatgaagaacagatagtcagtggggaacactagcagacattaaagggatatgaggcatgaagagaatagctgactttggaatattacgtaacattgtcatttcagtgtaagctgagggttttgttgtgctcaggggcata

SEQ ID NO: 135290 - DNA, 1314 bp, Homo sapiens
gagatcagagcatggactgcaatgtagagcattctttgaaatggtagaacatcaggtgggaacattgcctataatcccaatactttaggaggccgaggtgggtggatcacttgaggtcaggagttcgagatcagcctggccaacatggcaaaaccccctctctactaaaaatacaaaaattagtcaggcgtagtggcttgtgcctgtaatcccagctactacggaggctgaggcatgagaatcacttgaacctgggaggcagaggttgcagtgagctgcaattgagccactgtagtccatcctgggtgacagagtgggactgcctcaaaaaaaaaaaaaaaagaaaaaaaaagaatatatttgacaccttagactggagttaaccagttgtgttatttatttttaattactgctgctgttgttggtcagatatattcatgccactataaatgttttcaattagagataagtaaacattttcatcccatcgctttttaagcagttaaaaactttaaataaccatccccttcactagcctgtgagcacattgaggacctgtgagctcattgaggacctgtgagctcattgagggtggtgcaggtacacttttttttttgtatgtttccagtacccagtggagtgtttggtatatggtggggctcacagctatttacagctgttgaagaaataaatgaatgcatcagctccattcctacaacagcatttgaaaatatttgtttatcttcactctcactaagactagtttttagagtagttgtctatcaaaaaagagaaaatatcagattaagatttaaattttgatgtatagtagcatatatcgttagtctaaattattttcttctgcttaaaatggggcttagcaaactatggcccatgggccaaatctggctgtctgtttttgtaaataaagttttattggaacacagccatgcttatgtatagtctatggctgctttcgtgttacaaaggccgagttcagtagttgtgacagagactgtaagctctgcacagcctaaaaagcataaataggctgggtgccatggctctcgcctgtaatcctagcattttgggagatcgaggtggacagattacttgagtccaggagtttgagagaccggcctgggcaacatagcgagaccctgtttctacaaaaaatagaaaaattagctgggtgtggtgtggcacacctgtagtcctagctcctcggggggctgaggtaggaagattgagccagggagatcaaggctgcagtgagccaagatcactctacaccccatcctgggtgacagagtg

SEQ ID NO: 135291 - DNA, 539 bp, Homo sapiens
  misc_feature (20)..(20): n is a, c, g, or t
agcagcccgactctagtggnatccccgaacccaatgagctgcttttgacttgatgtcattttgttggtttcaataactatttgttgaaataatctgtgccaaaggaggccaaaagggaagaggcataggactggggttcaaagagcagaccctgaagagtccttggaggacgagggagagtgcgagaggcttagcagggtggacagtgattctcattttacaaaaatgcccagtatcgagattgctgcagtgttttcagtgctggggaaatgacatccctaaggcttgcattctagatcctcaaaaaacaaattgcccttttaaagtctcacggttaaagagatatttggtgtctcttgaacatgtggtcggagggttttctgatgggaatccttggttgtttttaacaaaataagccagatccagaggctgcgtgacaggacccgggcacctctcaggctgtcttctcacagtttgtcttctttcctagcctaatttctagactctctgcacctgtggtctttgtttcactccagcat

SEQ ID NO: 135292 - DNA, 511 bp, Homo sapiens
agggtggtaagccacaaggaaacaagcattttattatgttgctggcctactggggataatttcgcagtatcttttaaattacaaattccctttgacccagaaattctaaggttttatcttactggtatagatgcacaggtatagaatgatgtatttacaaggttattcattgccatattatttgtaatcgcaaaagattggaagcaggaacataaacctcatcagtagttgaacagttaaattatgattcatattctttgtatgccaggaagctgtaaaaagggaggaggatgttatgcaccgatatggaaatatccttaactgaagaaaagcaagggcgaaagaatagatttgctcatatatgcattaaaaaatctctagataaacaggaaaggcacaactttagttacctactgtgtggaagagtgaacagggctgaaagggagatttctctatatacacctttattactgatccaaaaaaattaagtactttttctaaaggtgtgtgt

SEQ ID NO: 135293 - DNA, 918 bp, Homo sapiens
atatttcttgtccactatttttctcttcaaatgttttaaacttgttatttatccccactattgaatttctatcttagtccatttatgcttctatgacagagtacctgagactggataatttataaagaaaatacaattaatttttcacaattctgggagctggaaagtccaagatcaaggtggcagccagattggtatctggcgaggactgctctctgcttctgagatggcaccttgcttctataccttctgctgggaaggcatactgtgtcctcacgtggcagaagggacagaagggcaagagaggactcttttcaaccttgagccattttgtaaggatgctaaatccattcagggggcaaggtcctcatgacttaatcatctaccaaaaggctttccctctcaaaaccatcatagtgcgattaagtttcaacatgaattttgaaggggacacatccaaacacagcaatttctaatttcaatgataggtttaatatctttacattctacttatttcttttcaaatttgcctgattattttagtacttttttattccttcattacactttcaatatccactttatttacttaaaaatattaagcatacttttattttggatctgatcattcttatacctacagcctttgcaggtctctgtctctaacattgggttgtattctgcggcttttcagaggtgatcgtttggttctggaatgcctgtggagcatattctgggcgtgtctggggcctgtcctggtcaaaggtctctcagtatggggtctctcccgcgcttaaccatactggttgtggccaagcagtgctaccctgtaggtgtgacgcgccagcgtgtctcttcctccccggacagaacacacctgtttgcccggggggttaacgcaatcactttcgccagcgg

SEQ ID NO: 135294 - DNA, 358 bp, Homo sapiens
caaaagtatggaattcaattcttcttatatgctgcagccatgttcctgccctagatttggatgggtgtggtggcatgtgcctgtaatcccagctactggggagcctgaggcaggagaatcgcttgaacctgggaggcagaggttacagtgagccaagattgcaccactgcagtctgcctgggtcacagagctagactctgtctcaaaaacagaaaaacaaaaaaacaactttccagtggcttctcactgctctgagaataaactccaggctcttccattgcaaccaacaggatctggtgattcgaccccagcccctctttccaggccctcatcaccttgatcctcccttaacctatcc

SEQ ID NO: 135295 - DNA, 595 bp, Homo sapiens
cacagtggctcacacctgttatcccagtacttagggaggctgaggcaggcagatcacctgaggttgggagttcgagaccagcctgactaacgtggaaaaactctgtctccactacaaatacaaaattagccgggcgtaggggcacatgcctgtaatcccagctactcgggaggccgaggcaggagaatcacttgaacccgggaggtggaggttgtggtgagccaagatcacacctttgcactccagcctgggcaacaagaacgaaactctgtctcaaaataataacaataataacagtccttcacaaactctcccaaagtttggtatacttcctaattcttttaatgagaccagtataacattgatacaaaaacttaataaagccattaaaaaatgtctcttccttcctattctctgatagtgtttgtagagtattattattatttctaatgtttggaagaatttacctatgaagatatctgagccttgacttttcttcatgggaaagttttattacagatttagttctattctgatatttaaatttctcctgtattattttcagcaagttgtgcttttatagagtattttgtcc

SEQ ID NO: 135296 - DNA, 282 bp, Homo sapiens
taattaggcaggcatggtgatacaagcctatagtcctagctactcaggaagctgagaggggaggattgcttgagcccaggagttcaaggttgcggtgccaccacagcctagtcaacagagtgagaatctgtctctaatttatacaaacaaaaaaaagattttataaatggaagagtttacgttttcagctgaaaagtgctttatttcttcctcccagtggctatactcaggaaccaccagtcttgagtctggccagttgagcccctatggcttaagctggca

SEQ ID NO: 135297 - DNA, 405 bp, Homo sapiens
gaaatcatcacggaagaatttatcaatgtaaccgaataccacctgttccccaaaaactattgaaataaaaaaaaaaagataatgacatataatgttgttcgtattgtatgcaattagaacaactctttaaaattattcttaggagcttaaaattagaacagtaatttacttagcagtattttacatgcaggtggtttgcggaatttgtgatggggtttctttcttttttttttttcttttgagacagagtcttgctctgtcgcccaggctggagtgtagtggcgtgatctcggctcactgaaacctccgcctgccaggttcaagcaattctcctgcctcaacctcctaagtagtggggactacaggcacgcgccaccatgcccagccaatttttgtatttttagt

SEQ ID NO: 135298 - DNA, 473 bp, Homo sapiens
acagagacagggagaaaaaaaaattgagagatagagagatggagaagagagagaggaggacagcgacagcaagatcaagagaggcagagagatggacagaggacaaggcagaaggaagcaaagacagggctaggcaaagaaagagatcaaaacattaggagtgggaaaagtgggcgagggacaaaggagtttcgtggcctcagtctctctagcctggtctccccagggtgttggacccttactttgctattctctggtttccatagcaacagggagggcagcgccaaatttgcatacacatttacatcctttctatttgaataattcaacaggtttctgtgcatattcatgagataatgaatgaaggtgactctcaatccctgctcaaaacctggctatggtatcccctgctttgtagtgtatggtatggctctgagcctggttttgtaggccttgacctctccctgccagac

SEQ ID NO: 135299 - DNA, 779 bp, Homo sapiens
ccaggggactggctctcagcataccaaggacatgcaccagcaccggtctctgagttccctcagtttttattattattttcattatctcagcaagaggaatgcagtaggagagcagggtgataataaggaggaggtcagcaaaaaaacatgtgagcaaaagaatctatgtcataattaagttcaagggtaggtactatgcctggatgtgcacataggccagatttatgttactgtccacccaaacatttcagtggagtaaagaataactagacagcattgctgccaacatgtctcacctcccaccatagggtggttttcctcctatctcagaattgaacaggtgtacaatcgggttttataccgagacatcaagttcccaggggcaggcaggaaatggtggccttcctctatctcaactgcaagaggatctcctcttttactaatccacctcagcacagactctttatgggtgtcaggctgggggatggtcaagtctttcttatcccatgaggccacatttcagactatcacatggggacaaaccttggacaatacccggctttccagggcagaggtccctgtggctttttgcagtgcattgtgcccctggtttattgagactagagaatggcaatgagttttaccaagcatactgcttgtaaatattttgttaacaaggcacatcctgcacagccctagatcccttaaaccttgattccatataacacatgtttttgtgagctcaaagttggggcaaagtggctggggcaaagttacaa

SEQ ID NO: 135300 - DNA, 203 bp, Homo sapiens
aaatacagggaagatttgctttaattaaggaaaatgtatgtgataaaagaaatcactttggaagctagcagttggttctatatgtagttcgtgtagtggaacaaatagacttggctggaggcacctgtctcttatgagggagggagacagactgacacataacgtgctgttttctgtataaaggagagggtgcagtgttcggg

SEQ ID NO: 135301 - DNA, 315 bp, Homo sapiens
ggtttcaccactgcataatgcgaattaccatcttttcagctgcaacatgtcattctccattatctggccctaaagccagtgccatatatctcatgtactgctgtattccaagcatcctactctgagtaccattatctgtatcagtcatcttaggctaaggtatgctgtcatgtgaaaatggacaaatgtatgtgctacggatggattttcaaattagcacagcctgaagactatagaaaaataaaaggagactatgatagattctatgaaaaaattcggtgtctatatctttctattaaataattaatagcattt

SEQ ID NO: 135302 - DNA, 449 bp, Homo sapiens
gctggtgtgtgtcttgtgcaaggtgttgaaaagataagaagaaacaagatagacaagatccctgagctcatgaaccttacattctaaccaggtagacagacatagtaagaatgtacattagttatagattgtggtaattactgtgaagtaaataaactattgagatggaaaacaacagaaagcacccattttagatagggtggtcagtgtaggcctattttaataggagacagtgagtttaattaatgtgaagacctgacttctaggtagatggaagaatcacacaaatgtaatttcactctttcttgaaactccactagaaaaaagtaaggcactaagcttaacaaattctacagaacaaaagacttggattcctcaacaaataaattatcggattaggagtgaatagagaggtatctattcacagccaaagatgactttctgcccca

SEQ ID NO: 135303 - DNA, 453 bp, Homo sapiens
acatggtatgttgccatcagttgggtgtgtgtcaaaatacacctataactattagctgtgtgaaggaattgcttttttaaaaattgagaagagcagatttaaggttatcctatgatgctcttgtttgcactgtgatatgcttctcaaagaggagaaagggaagaattacatgcagtgtatcagcaattatatataagtgtctgctatggtttgaatgtgtcccccaaagttcatgtattaaaacttaatccccaatgcaacactgttgggcagcaaggtctgataagaggtgattaggtcatgtgaggactctgccatcatgagtggactgatgttattgcaggagtgggctggttatctcaatagtgggctttgtgataaaagcaagtttggccctctcttgctctctcactgttagcttcttctgccctttggccttctaccatgggatga

SEQ ID NO: 135304 - DNA, 505 bp, Homo sapiens
tcgacggaggactgctctggtcgaggacatatctcagtaagtgtggcatccaagcctcaccttgcaggagcagaatttccacttctgatccacctctacttaacattcctatcaggaaaagtctcaatatcctcttttagtcaatttgcatatataacctttattctgattctgtaaaagtcagcttactaaaaaatatcctatcttaaaactttatgttttaaatttgattttaaattttattttctttgatgacagtctcaacctctttcccgctttatttaaaaaaagaaaaaaagaattgttggaactataaagaatacattttgacacttgaagaaaggacaaaactgtggcctagagaggttactctgcattaaatcacagaattaatcacaaacaactagaaactatccattattaagtagatgttaaagctctaaaagtgatcctagtctctcttcacagatttatttataaatgaatcacctcacacatatcttaa

SEQ ID NO: 135305 - DNA, 404 bp, Homo sapiens
aggacctcagagttgtttcccactgtacatataaatacaatgtgcatgtgaagcacccatgtcagtactgcaccttcacacccagttctgttgatggctcaaagaatgtcgacttcaattgaaatagttctggcctggcatggcagctcacacttgtaatcccagcactttgggaggctgaggcgggtggattgcttgagcccaggagttcgagaccagcctgggcaatgtggctctacaaaaaatcatacacagctgggtgtggtggtgtgcctgtaatcccagttacttgggaggctgaggtgggaggatcgcttgagcatgggggtgcagaggttgcagtgacctgatgtgcctctacactccagcctgggggacagaatgagctcctgtctcaaaaaaaa

SEQ ID NO: 135306 - DNA, 419 bp, Homo sapiens
aggacctcagagttgtttcccactgtacatataaatacaatgtgcatgtgaagcacccatgtcagtactgcaccttcacacccagttctgttgatggctcaaagaatgtcgacttcaattgaaatagttctggcctggcatggcagctcacacttgtaatcccagcctcccaaagtgcggagattacagctgtgagccaccacacctggccgacaattttttttttttttttaacttttaagttcagggatacatgtgcgggtttgtaaaataggtaaacttgtgtcatgggtgtttgttgtacagattatttcgtcacccagttattaagtctagtattcattagttatttttcctgattgtctccctcccaccccctatcctccaccctccaaaataaaaaaatttgtttttagaaa

SEQ ID NO: 135307 - DNA, 742 bp, Homo sapiens
ggctgtttttttttacgtttttggctctcacataagaatggtattgtggaactagattcattctgtgctcatctggagagtggaactaggcatattctgttataagaagtataaattttactaaaactttgactgttagaaaaacatatgtgctggggcaaggaaataggaaacaaaatacagcttcctgctgttgatatatctgttacacaaagtgattcagaacattagtgccagtgcttcaccttcttcttcataagcctgaggcactaaaggaatgcaaaacactgggcttatgagagccagtctccatcctttgttattctaatttttcatgtgtgtagtgagaataaaccatttccatggtaggatcttccaataatcaagttcgcttttcaagagagttataaatatcttcaggtgaaatcagataattgacatttaaggcaattataagaaaatatatgatatacatatttaatttcatgcaacaaatacttttcaaacaaatgaccgtgaatacgtttagttaagagggcatttagcttcatgatgttcacccttaccatttacttattttctttttgctcttgttgtttagaattgtacaaatattaccttatgaattctagaatatatattatattcctaaagtgcaataataggttagttttaaacaaaataaatattgcttttgtcttctaatcggtgattgcttttctctattaagtactttaaaaac

SEQ ID NO: 135308 - DNA, 299 bp, Homo sapiens
agagcagagaccctgagaagttcacccctcagctgagtgggcaagtgccaggcatagtgctcaatgctagagagacagatatgagagaggtagagatgcttacacattccaacaccatttaaaggtgaaggtgaaggcctattttgttttctgcctgcccaacctgcttgggcgaattattttgccaactataagtctgactttaaggatttggcccctggggctgcaagggatgggaggtggaccggggggaacttcatgtcaaggcttcacatgttatgctagggcaagatgataca

SEQ ID NO: 135309 - DNA, 423 bp, Homo sapiens
gggcaggggcctggaggaggtggtcttgaagtgcatgccacagatcttccttcccagggagggcgagctggcaccatggtgtggcacagaccccgcgtcccttcagattctgccatgccaggctgtttggcctcagggaagcagcttccctgaccagtccttagcacctggcacgtggtgagccctgtccatggcaccagtcaccgtcaccatcagtcaagggactgcaccttggggtgctgggtgctgacgtcctatgggagggctccaggggtgccgcctgtctggtgctctgggggtcacccaatgaatatgagagccttcctgggagagaggggtctcgttcagcacccctcctgaggacccagccccaccccagggtgtgaggatgcaggccaagggggcctgagggagctgcagtag

SEQ ID NO: 135310 - DNA, 520 bp, Homo sapiens
  misc_feature (16)..(16): n is a, c, g, or t
aactctgcttcctgtnatgattgttgttactaatattactattatcttaagatacagaattaatacagtgaaaactacattgggctaaagtcagaacttagtgttctgatatagttgagaagggacgtgaaaatagccagcagaattcagtaattttaagaatcctctagcccttaaaattatttttgcttttcaggaatgtagatttagttctcatcagatgatgagtaaacatcttctgaggcattctttttttctgctttctttttttttttttaacaactttcaaccccattgatttttttttttaagtttgaagtagacagttggtatctgtctctgttacttaatcaaggtgtactatacattgtgtttagtatgatgaaagtacattttacaaaatgctacttaaagtcaaaagcaaaacaactttctaatatattgtgtcacttagataaataagaaaatattgtacattgcatagggaacctatgagaattatgtaaatgagcaatagact

SEQ ID NO: 135311 - DNA, 776 bp, Homo sapiens
gaaactggagtctctttgtgggatccagggcagtggctttcagattctgtttttgctgcctactgaggtgtcttaggagcttctgaggggaaatcactgagtacagggctccctttccaccttcaataggagcatcccctcccttacctgtttcatgtgaaggaggggcttaattactttaaggaagtttaaaccccagaactctagagcaggggttggcacattatggcctatgggtcacatcaggtctaaagctgaagcttgtttttgtaaataaagttttattggcacacatccacacccatgttggttatgtgttctctgtggtggcttccctgctaactggtggaggtaagtagttgcaaaagaggccttctgacccacaaagcccaaaatatttactgtctggccctttgtagaaagtttgctaactcatactttagagcatttcttctcaaacttcagtgtgaatagagatcagctgagactattcttaagatgtctgccatggcaatacacctggcagcaggtgcaatgtaagtacgtcttgcacagtgcaggcagtttcatggaccaaggaccccaggcgctgtgctctgaaacacatcactgcattttcactgaggccacagatccctggggtggcatggttaaaggcagaccagttcctgagagacagtcattgactttggctggaggactcaaaaaggccttgcaggaaattccttagactgcactgtagtcaacaacacttccatcccaccttccttccctct

SEQ ID NO: 135312 - DNA, 749 bp, Homo sapiens
cagtgaaagtataatatttctttgataatccaaaatttagaattctattactatcttctttcctattcccaatatatatgtgaatttatttacacatagaaagtttaatcactgctcgggataattctaattcaaaaggtttttcatttaagactgattaaagccctcttctacggtcctggaaacaacctgaaggcatttaaccattattgaatggttaaatggttaaatttaaccattattgaattccatttactatgtctggaaaataggcactaattaataacaaatatattgtgtttctgccataattgttctttttagttatttatgattttccagtttccagctgattcagcatctttctcaaaaacttttcttgcatttgagatgcattgacattaataatcagaaaatgacacacctctctaaacactttttaaatggtgcgtgtttgttttttaagattataatacctttgaattttgtttaactttttcactaaaactgctaactctaggaaatgttaagtgataaatggtcatatatttttctcgtctgagaaggtagataatttgaaaattgtgttctctgaatctatagttttctacaaggttgactggcaagtatgaaaaatataatgcaggaaatgagagtcaagtacacacttaggggaaaaaccaaccttttaaaggacaagactttgtatatttgtagaattttacaacctttcattttattaacattca

SEQ ID NO: 135313 - DNA, 348 bp, Homo sapiens
ggtaagtgggctctccctagatcttttcagagctgcagtctgcctgaccgtgtatcttcctttcctcttccatagctcctatttccaactcccctgccttagtgtatccattgacactaaggtgttgtgactgataccaagataatatgctgcctcttctgcctctctctttgagagagagagagagagaccaatggatcaggttcatttagcacctgaaagggggtggtgtttggggacagagagacctttggagttccagcttaagggtatcagcctccctggctgatgtaagtcagaggcctcttatacccactttgatgaggaaggactgtagagttgatgcca

SEQ ID NO: 135314 - DNA, 370 bp, Homo sapiens
atcaatccttttaacaactattcgccatgattatgtcctgtattttaggcatttgggtcctttcatcccaaagaatcctgaaatcgtttcctatctgtaccaagaatcctatgagtgttagtcactttattcatatctgaaatattatctctctcctcagctctctcccttccctcaggacagaaagaaacagtggttcttagagaagagaaatgttaaagaatgtaccttcccgagaaggaagaaaattctaattagtcaccacattctcatttctattaccaaataagggagattgtcataagtgacaactgaagatgacccctcagaactttcccccactacaaactctttggagttgacatgaggc

SEQ ID NO: 135315 - DNA, 330 bp, Homo sapiens
ggtatcagggaagaaagggcaattaggcataaaggttaataaacacagaaaaaagatttgatggcagtaaaaacattttaaacttcagtatgctttaaaaaaagaaaaactgaaacaaaaagacactgggaaaaatattagcgtatgttggtaaaaaggttaacactttactgttaagagtttttaaaattaatttattctttctatgacaaatatttattctgtatctactaagtgtcaggcacttcctaatctgcagaattaataataagcaaagcagagttgaaaaaggtaaacataggcccggcacagtggctcatgcctgtaatc

SEQ ID NO: 135316 - DNA, 323 bp, Homo sapiens
tcagtaagagctactccagcctgggcaataatgagctactccagcctgggcaataagagctactccagcctgggcaataagagctactccagcctgggcaacagagcaagggtctgtctcagataacagagagagagagaggtgcatgagaactgccctcccggccttcagagagaaagctggttttgtggagccttgtctaagcatcaggtgcacccctggcattcttactctgaaatttgattatctgtttaaaatcaatagcatcactttccacctccagagaggttgaaagatagggaactctcggctcaggctgacct

SEQ ID NO: 135317 - DNA, 135 bp, Homo sapiens
ttgtgcacattgaaaaacaatctacgctggggatgtttagagcatcaacactgtccatttcttctggacacactagagtcaaagatgcatttggtaggttaattaagcaaaatgaggggcagacaaagaaaacca

SEQ ID NO: 135318 - DNA, 295 bp, Homo sapiens
tatcactctggaatctctgccttccagtcccagtccttaaccctcaatttagcccacagaggtttccaagaagtatcccctcttctcagggctgcagatccttgcaaaattcaatacacatcaacatttactaacactgactagatgtcaggctccatccaagacactgggagcacagcaacaaataagataggataattatactcaaagtcctcacagccaggtaggggacacagcaaggaaccttcagctcaaagttcttggggaaactagtgtctcaggttaagagaagcag

SEQ ID NO: 135319 - DNA, 639 bp, Homo sapiens
aactctaaaaagaatcctttttaagccattttgtccgttggatactctgggaaacagacgacaagatgaaggtaacacctatgaaagacagggaaagaaaggagaactaggcagtaaaagcccttagaccatgatgctggtctatcattttgaaagaaggaaggggcaggaaaagcctgagtgctgttcaactctgacaacatcttggccagtctaatggacggggactctctgtgatgccattccagtagttacctgctacaggctggctacctcatctgtggagctccagagaccacgaaagataacactcattgccatagctacttgtcagcgcataagaaagtgaacacacagctggtaccaatgaccttccttttctgtttccaagttaatggctggcaccaaaggtctattcctctaccctactggtttatcactgggctgaagaaacccaagtagtgaattacccactaggaccctggaagaggaagtacaacggttatcctcagttttccctggaatctggaatgagcttcctagtttactgaaagtctactttgttgccttgaatttaacccaatcccatatgtgataattattttagcatatttgataataaagattttaggagtgttg

SEQ ID NO: 135320 - DNA, 456 bp, Homo sapiens
taaattcagttattttgattttcctcagatgagagactagtgttattttttaggtcagttaaaaagcttcgctgtcttagaaaagccctgggtgacaaagtccttactaaggcaaaaagcgaaacaaaacctcagaaacttctctgtgacagatggcccaatcttccttcttgctcatggggtatagtgaggacagctctttaatttgatagcatctctttaattagatgtgtcatccgggctcagaatgggtaccatcgggagcactcttaaataattaccactctttatgcctcgagtcattttgcatttttcaaatgtaatcttttgtgatcttccaccttctattttaatattcttatccacagaattttgctcttgtccagcaatcaactagttgtttatatagtattagccaatgtctaaagagttaacccatcacattttttctttttt

SEQ ID NO: 135321 - DNA, 160 bp, Homo sapiens
cttgttgttcttgtatatgacttttttcctctcccattatatcttctaactgcttactgtaagattatatgaatgctattatttttgtatgctaattttataactttctcccttaataaattcttttaattttcatctttgattaccttgggttttatag

SEQ ID NO: 135322 - DNA, 524 bp, Homo sapiens
gtcaagagaaacctccagcctttgaagattcaccccaaagtctgtgtggagatgaaagaacactggtgcagaaaccctgtgttctactcaccacatgaccactaactggctgtgtaaacctgggaaataaaaagttctaacttcagtcatccagaagcaagatccagacccctgttggaaggaatggagctaaacaggatatgtaaatctaaggtctattttatcacaacgttgcatatcaattagaatctacattgatttgctttctgccatgcgtccatatgtgcacaaatgaggcctggacatcaccagctagaggacaacagtcgtgtctttgtgtgccaatgactaatttttggagcatgtactactctgatatatacttctgatatatatatatactctgatatatacttctgatatatatatatactctgatatatacttctgtatatatcagattttatatcaaagctaatataattatgcaaacctatgtttctttttactctttaccatgatgt

SEQ ID NO: 135323 - DNA, 315 bp, Homo sapiens
tcaccccttccctcttcaggagaaactgaacacgttttccagcctaaactcggcagggcaaaccagaacattccccgtctaagcagttccggggagttttaacaatttcctcgtaaactcgtctacagaactcactgtatactgtttaaatgtcgcctgtgtgtggagcaacagttttattgtgccgtgcaatcctcaacaagaaattgtagtccagggagatgaaaatcccttatttggcattcaggcgttgatcaaggtcgtgcaaccctcgctaaaaggatttaggttcatctccgtcattctcagccgggg

SEQ ID NO: 135324 - DNA, 187 bp, Homo sapiens
gtgggaagttcctctcatcccttcatagtgtgaagcaggaagttcaaaaacgttcatttttgaagcaatatttgaatggtgcaagatgggagtccacatgacaccaaagagtcaattataaattaataactcaaatgcaacagaacccatgcttcttattcatgtaggaacatgttctaggaaagac

SEQ ID NO: 135325 - DNA, 194 bp, Homo sapiens
ccattttatctattgcacatgtcctgtgtattaaataagcgtcttgacttgtaaacacccctccgtctgaactcctggactcaagcaatcctcttgcctcagcctctcaaaatgctgggattaccggcaagagccaccacgcccaccttgtcactttcagatagttttttctcatcttgcatttgctattgata

SEQ ID NO: 135326 - DNA, 450 bp, Homo sapiens
gttttgccatgttggccaggctggtctcaaactcctgacctcaggtgatccacctgcctcggcctcccaaagtgctgggattacaggcgtaaggcaccacacccagccgagaggataagatttgaaagaggtgggcctagtttttgtggctgcttttcactggtgatgtatgatctaaaattgaaatatacagtcttaaggggctagggtaataaaaatctactacatccaaccaaggatgggaacactggcacaccatgctttgtgctgagaccttaaaggaatgaaccccaggagtaaaggtaaactaaaagaatctcagaatggtgagctgacttttatggcctcttttaccctggggggaatttgctgattctgggcatgggcagggatctgagaagcagaaaccttatgttggcggaaagcccctactggggacaagaaatcagc

SEQ ID NO: 135327 - DNA, 500 bp, Homo sapiens
tagtctcaatggaatctaaatactgccttgtgagttctgtgaaaaaatttaatatagcataacagacagaaatgattgtcttgtactttctgaaataagtgatactgcttcttcctccacattagtgaaaaaagactgaggaaggggcttttataagcaaaaccatttatacatttgaacactctaggagttgtcattttaaaattagttctcaaataatgagatacaactgtttattatataatcaaaacactacatgaaaacaggaaaactgttaaaatagtactataactgttacttgtatttgattattataaactcctgggaaaatgggataaatactgtattaaaaagaagatatcttcccactcagtaccaaaaacttccagatgtaagtaaaaatttaagtgtaaaacataaaaccataaaagtagtataaaaaatacgtgaagtaaatatagaatattagaatgattcccatttctagcaggtacctaaaa

SEQ ID NO: 135328 - DNA, 541 bp, Homo sapiens
gttcacagggggaatgctttcatcttttccttgttcagtataaagttggctgtgggtttgtcaaaagtggcttttattaccttaagttatgtcccttctatgccagttttgctgaaagttttcatcacaaagttatgctggattttgtcacatgttttttctgcatcttttgagatgattgtatgatttttgtttttacttctgtttatgtggtgtatcacatttattgactgacatatgttaaaccatccttgaatcccaggtatgagacccacttgatcatggtggattatattgttgatatgctgttcaatattgtttgctagtattttgttgagaatttttgcatctatgatcatcaggcatattagcctgcagttttctttttttgttatgcccttctctggttttggtattaggattagggtgatactacctactctgttattagtactttggaacacttagctcatttacattcaatgttagtattgagatgtcaggtactattttattcattgtgctatttgttgtctgaata

SEQ ID NO: 135329 - DNA, 431 bp, Homo sapiens
acatctgcctgcatggcagggcatggatataaactaagcatcttcaacttaaaatgtcctcagcagaactctggatcttcctcctcaaacccactcctccacacatccaatcggctctcctttctaaatatatccaggagctgactgcttctgccaactgcatcaggacccttgatccaagccaatatcatcttagctggattattacagtagtcttctagctggcctgcctgcttccactcttgcaacatgccaccccatcttaattttccatacagtagccagagtaatcttcttacagcacaagtctgacataaatccttggcaatgagccctgcgtgaactgcccgatggtatttcttttccctctgctcctgttatactagccccactggcttttttttttttttttttgagatagagtctcgctc

SEQ ID NO: 135330 - DNA, 400 bp, Homo sapiens
tactacttcgctcaagataaaaatttggagttattttaaaatatgaatatcaacttctctcccaaatatgccattaatacgctcatatagtaaaaccagtgtttaagattttaaagtaaggccgggcacggtggcttatccccataatcctagcactttcggaggctgaggtgggcggattacccgaggttgggagttcaagaccagcctggccaacatggtaaaaccccctctgtactaaaaatacaaaaattagccaggtgcagtagcacacacctgtaatcccagctactctggaggctgaggcaggagaatcgcttgaacccgataggtggtggctgcggtgagccgagattgcgccactgcactccagcctgggctacagagcggacttcgtctc

SEQ ID NO: 135331 - DNA, 549 bp, Homo sapiens
ttattattatgataaagtccacatgaatgccaaaggcccagaactccaccatttgcagtttgcagaaccctttcacatctactacctcctctacaaaacagtgatgattgttcccatttaacagagatgaaaactgaggctcagagagaggaacttcccaaagctttgcagcaagttggcaacagagtcaggacctgatctcagaccatgtgttttgcggccaatgttcccagccacctccctgctatctcctgtgggaaagcctcctggacacaggcgtgggggtacccatagtcccatgataacgccatctcccatcacacccgcctcagggcccaggcccagcagggattgcgttgcacatgtgactcagccgccttcacaaagggagctgtgtgtctggttccctaggcccgcctcccccacccactgcccatcccccagtcagggaaagagcagggagcctggcctagccaagatgcgggggaagcaaggtcatcctcatcgctaaaacgggacaaatctagtggtgcttcaggaccagcctta

SEQ ID NO: 135332 - DNA, 310 bp, Homo sapiens
attgcactccagcctgggcaacaagagtgaaactccgtctcaaacaaaacaaaacaaaaaaccacatagttctgaagaggagttaatgtcataagaaaattttcatatgttaactgaaaaacaagtatataaaaacaatatatagaggatgatcccaattttataaatatgcagtctgttactagagcttatcttgattggtggcattatgagctattcatttctttttgctcttttccaattgttacagtgaacctgaattacttttataatcagaagtaactcatatactttaaaaataactctgtga

SEQ ID NO: 135333 - DNA, 817 bp, Homo sapiens
gcctggcagcactgtccgctcccatgcctcttagctgtgtgagctgggcttttcacttgctctctctgagtccagctgcccctgcggtaagacatgaggatggctctggtctgatgggttgtggtgagggtgacatgaggtgagctgtgtgcatgctgggcacactggcgaggggctctcagtaatgggaggctgctgttgcagggcccgggctgtgatggggaaagggttgattgtcctgcgtttctcagttgaccagcggcatccgagggcctgaacagcgagtgactcagggactgcccttacgtgtcagagttagaagtcatgggagaatggaggctgctctctctgggtttccctgtcctgttaggaggggtgaggttgcacaggaaatctatggggaaaaggtgacaagtgaactggaagtagccgttccaaagttcctaggatttgcactgccaaacaatgagctttaagggacgcttggaaacatctggggagaaggaaggccgggacactgcgccctgccatcaccaacccctaacctcagtcctctgagcggctccactgtccctgtgccaggtgacttcatgtgcgtcctcattaaagcaaagtgcctgacatttccattgtccagtcaatgatgtcctcggttgctgactattgatggcctctaaccccttggtaagggtaactgcagcctaggaaagggtgatctgatctttctcttttttaaacagagacggggttttgctatgttgtccaggctagtctcaacctcctgggctcaagcgatcctcctaccttggccacccaa

SEQ ID NO: 135334 - DNA, 577 bp, Homo sapiens
cttggacttacccagttctccctgcttatttgattatagttctcaagaataactgtagaatgttatcctgagatagaaagggactggctagaacagaccaggctctgttccagtgccccccggaaacaggatgcacttcaatgctttagtccagcgaatcacgttcctctggagtgtaaaacccagggcaggctgctttaccggatccttcaactgcaggaccagtggggcacacacagagaagactccatctactttaggcagctttccggagccttgggaaaaagttcaccatagatcatcagcttctgttggtccttgctgcttatctgtaagtatcaaacccacttcatgaaacttgtgtgtgagcgttcaatcttaccagactcagacaagttggtcacagaactttctccaccaatggtttctttggtaatcttgcaaaaatataagcagcttctgatccatttgcttctgcctcctaaaatttctttccgaatgtagatgtcaagtgtattttactcccctgatttctggctctgtgtctcttactagctgttcctttgatgctatctgg

SEQ ID NO: 135335 - DNA, 442 bp, Homo sapiens
ttgcccaggctggtctcgaactcctgggctcaaacgatcctcccaccttggcctcccaaagcattgggattacaggtgtcagccagtgtgtccagcctaactatgctctaatgataacaatgacagtattaccctcattgaaaacatatcctatacatcacatcaagtactgtgatttttttttttttttaaatggagtctcgctctgttgcccaggctagagtacagtggcacgatcttggctcactgcaacctctgcctcctggtttcaagcaattctcctgcctcagcctcctgagtagctgggattacaggtgccagccaccacgcccggctaatttttgcattttgagtagagacggggtttcaccaagttggccgggctagtgtagaactcctgacctcaggtgatccacccatctcagcctcccaaagtgctggg

SEQ ID NO: 135336 - DNA, 430 bp, Homo sapiens
ctgcccctccgcttcagctggggaatgttacaatcagagctgggctggccaggccggccccaggtccctcaccctctccacagcatctgatcagtgcccaccaggactgtcggtctggcatacacccaaatgcccagtgttattgctttgggccagctgacattcccagtggcctttgtctgactgaaactattgctgtctccactgtttgtgagggagagaatgtggccctctgaaagcccacaatcctagaacgctgaagggcctcaagaatgtcttctaagttcttcatttcccagaagaagcgctcgaggcccagagaggggcagcgtcttgcctgggatcacacagcagcacaactagaaccacaccccaggtcttctgacttccatcttggtgtgaagagtcccggggcagccaagtgcagcag

SEQ ID NO: 135337 - DNA, 592 bp, Homo sapiens
ctgcttgctacctaacctatattggttcattggtcctttcagtgatacttgtttttgtattctagactatagataagtccatagacttctgtcatctttccctctagctaatgacagcagcactatcatcataaatattataggagcttctggtaactgagtacctactgcatacctggaactgtgataggtgtttcaaagataatcagtatctttgtctgaaaggtaggtagtattacccttgtataacttaaattgcagaagaattggctaaataaaataaatgatgaaaatagctgtaagacaagaaatgtgggaatgagtatattttttagggaagggggacacctgccttttaggtacaatgattgtttttaagtgagctaagcatgaacagatttcaggttttcaagagaatctgaatctgtgaattatgatgtgaaatagccttagagttgagatggccaattgaattatctttctaactacatggtgggtgaagcaaaaacaaatgtagacaaggtctgctgtaagcaattttataggctacttggtgtcacacaggtactaagtgataaagcaggatcccagc

SEQ ID NO: 135338 - DNA, 825 bp, Homo sapiens
tacaatttaaaattcagttcctcggtggcactaactacattccaagtgtccagtgaccacatgtgtccagcagccaccatttcagacagcacaaagaacatttccatcatcacagaacagcaaaacctaactctcaagatcttcagactacgttacaattcttcggaaaagaatgggaaaaaaacatttcattccctaagctcctaaatcctagtcatttttgacacttattcaatacgaatgatttataatagcatcaaggagtgtgaaagtttcatattttgcacaaaatttccatggcgtgattttaaacaacattttaattttcaccagagatgaggtgttaaaaagcatggtggaaattttatttggaagagttaagaatggaaagccaaaactatctatacaataaaaattatggggctggcctccaattatttttttaaacatcttataaaactgaaatccaaaatacaatcattttaaatacatccaaaaatgataaggaaggaaaaaaacaggtaagagagaaagacatcaagcaaaactgtgtctagggaatgtatcatttaaaactaccacctgctttcagcggtatttgaaagggactttgtccaattactacttcccatgatatggccacacttctatcctgaagcttgttctggtttccttagagcataggagtcaaatatggacacaagatgggacagagacactttctttttaaaatcaagcactagaaaggttgccgaatgatgcaaaactaagcaggatatgaagaataaaaggaagaactttaagagaaaaatcacaccatagcat

SEQ ID NO: 135339 - DNA, 448 bp, Homo sapiens
tctcacacttctgaactcaagcaatcctcctgcctcaaattcccagagtgttggcattacaggcgtgagctaccgcacccgtccttgttcctattatttgtttgtttgtttgtttgttttgagacagagtctcacactgtctcctgggctggaatgcaatggctcaatctcggctcactgcaagctctgcctcctgggttcacaccatgctcctgcctcagccacccaagtagctgggactacaggcacctgccaccacgcccagctaattttttgtatttttagtagagatggggttttaccttattagccaggatggtctcaatctcctgaccttgtgatctgcccacctcggcctcccaaagggctgggattacgggcatgagccactgcgcccggccagttctaacccaaattctaagtcactcacccaccggccatcttatga

SEQ ID NO: 135340 - DNA, 357 bp, Homo sapiens
tgcctcctcctgtgttttctcatttcaaacaaacaagtgagtcattcacaaatgctgcaagactggctactcatattttggatgcttgagtattttgttcaaacaagcatggatatatgacgactattcatttatcctggtaaaatcactaataggcttaacaggttgaacaagatctgataaagaatactcaagacttaggggaaaaaaaacctgtctcagaagaaaaaaaaaatcagtcatgtacctatacctgttgtaagaacacacttcaactttcatacactgctggaattgatgtatattggtaaaaagtttctggaggccacttaggtaacaaatagcaaaaaccccctt

SEQ ID NO: 135341 - DNA, 212 bp, Homo sapiens
cagattgtgatctgacttcatccatagttgtagcctgattttctctattcatcaggaatcattatattaataatataagctcctcactgtctattgtttacagctgtgggagttacaaagtaaattttctgtgccttttcccctcttttcttttgttgttactaatggtgttatttagcaaactgctattgaagctaaatgataaatgtaag

SEQ ID NO: 135342 - DNA, 768 bp, Homo sapiens
tatttttaatgcaaaaccagacatgtaaaattctgactaagttgattacacgtatttaacaaagtcatcctccaaaagtgctgggattacaagcatgagccactgcgcccaactctctgtttgttttttgatgaccacccccttgctccccaaatggctgtatcagcaaagttgggagcttaagaagaaatctaaacaggccattactacccctgcagctgcctgttctcctcaaccagtgtgatgccacccttacccgtctctattaaaaatacaaaattacccgagcgcagtggtgcacacctgtaatcccagctacctgggaggctgaggtaggagaatcacttgaagctgggaggtaaaggttgcagcgagccaagatcgcgccattgcactccagcctgggcaacaagagtgaaactccatctcaaaacaaaacaaaacaaacacatatattcctttctaaaaattaaatagttctcttgatcttaccttcagcttgagaggatagaacagtaccctatatctgcgctcccttttatttatttttgacagagagtctccctatgttgcccaggctggtcttgaactcctgggctcaagcaattctcctgcctcagcttcccaagtagctgggattacaggcaggtgctgctgggcctggcccatatggtcctttttaaagcaaaattccaggccaggcatggtgacatgaacactttgggaggccaaggcaggaggatcacttgaggccaggaggttgagacc

SEQ ID NO: 135343 - DNA, 539 bp, Homo sapiens
tcatccagtgtgtacaaaaactatactgcatagggtgtgcacagtaggcagggtcaaaacctgcaggactttgtagactataggaaaaccttaagctggggaatgacatgatcagatttgcatatttaaaatactactcaggcggcagtgtggaggattgtttggaggaagagaaccacttaagaccattgtttaggcaagagattatagtgacttggattaggataaatggcagcagaaatggagaaagaaagaaagatgggagaaaacttgctgggggtggggactgaattgtattgctgcctttcactgaggtagggatcactggagaatcatgaattttattttgggtcaacggagaagagattatgagtttgattttatacattttgatttgggggtatctatgagataaccaagagtagatggtataagcagttagatatattgatttggagcgctggagaagtctgggctagttttaaaaacttgagccatttagccttagatagtgattgaacccatgaatgaagggtggg

SEQ ID NO: 135344 - DNA, 596 bp, Homo sapiens
gtgcctggatgacagagcaagactctgtcccgaaaaaaaaaagaaaagaaaagaaagaaaagaaaaaaaactgggaaagaaagaagatagggtgtgcacagtaggcagggtcaaaacctgcaggactttgtagactataggaaaaccttaagctggggaatgacatgatcagatttgcatatttaaaatactactcaggcggcagtgtggaggattgtttggaggaagagaaccacttaagaccattgtttaggcaagagattatagtgacttggattaggataaatggcagcagaaatggagaaagaaagaaagatgggagaaaacttgctgggggtggggactgaattgtattgctgcctttcactgaggtagggatcactggagaatcatgaattttattttgggtcaacggagaagagattatgagtttgattttatacattttgatttgggggtatctatgagataaccaagagtagatggtataagcagttagatatattgatttggagcgctggagaagtctgggctagttttaaaaacttgagccatttagccttagatagtgattgaacccatgaatgaagggtggg

SEQ ID NO: 135345 - DNA, 423 bp, Homo sapiens
ctgtctacaagaaacccatttcaaatgtcacgatataactaggttaaaaaaaactagcctaatcccctgtttattagcatcaacaaaacgtctaatattaggcattactgccatctcttctccacccacaattagactgcacaaaaatataagagcctccaaagtaaacaggagacctagtccttgatctccatagtagccagagtttcacttgctccttccattactatacgatgccattttcacttcctcctcatttgtctttgagctttgttgcattgggtaggaagagaaacgttctttttttttttggagatggagtttccctcttgttgcccaggctggagtgcaatgggcacaatctcggctcactgcagcctccacctccggggttcaaagcaattctcctgcctcagcctcccg

SEQ ID NO: 135346 - DNA, 699 bp, Homo sapiens
gatgtatgttgtgaaagagaagaatcaaggctgactcgaaggcgcttgacctgagtcactggaaggatggagtctctattaattgaaaaaaggaagactctgagtggagagactttgggaggtgataaggagtttctctttggccatccccctgaaggggcaattggatttacaaatctggggtttcagacaaatctggagcattgtgtttatttttaaaatctgggctggagatgaaaattttgaaatccttagcatgttgatggaatttaaaactaggagactgaatgagatcaccaaagtaccagtgtacataagaaaagaacatcttagggtgtaagggtgggaaaaacaaacaaacaaaaaaaaacaaaaccctttttgggccccttgggcccccggaaaaggttttataaagcccaatcgttggggccgcgcggggccacaagagggtaacgggacacctggggcacaaagcggtggtgccaaaggagagaaccggggcacaagagcaaaggggaggggagttctccccgcgcagtagaaaaaaagggcccggggggataacacgagagggcttctgtgggaacaatattccgcaatggtggagtcactgcaggagggcacaataacgggggagctctcttacaccgggggggagttccagaggggaacgctgagagtattctaatttatggc

SEQ ID NO: 135347 - DNA, 155 bp, Homo sapiens
accccttccgactagcaaacacagaaatgtgattctttctgtatcagaggaagatggagtgacctctggtggcctaagaaaagccaccaccatgcccataccatgtggagagctaggaagggaggtctctactgtcttgtcctgtcttagtgggt

SEQ ID NO: 135348 - DNA, 411 bp, Homo sapiens
ggatagctgttctgaggtcaacgggggcactggaaagagggagagggcaacatgactgtgcatcgtgtgtaaaccatgggtggtctctggagacctcctaaataccccgaaaaaggcaaaagggggtctgtgtatgtagatatgtgtgtgtctgcacacatttgccatgggggtgcatttgttcacaggaaaagactcctaggtttcctctgactcccagagacccccaagatgcacaggggagagaactatggcatcattctctccagccactgggagaggaagttgttagctcagcaagttgtccagcaccctgctttgactggaatgaaagcctttcctttggcagccaagaccctccctattttcctccccactgatgctgcagtgcgggccagaaatacagcctct

SEQ ID NO: 135349 - DNA, 807 bp, Homo sapiens
gttctgcactttatgtcttcccccaacgctttgtgcaactgacgtcatattttgtttcttggtatgttatgtttttatgaacaaatttctgtggttatagttattcttactatcttttcttttaatttacattcttgtgttaaatgagatttacacactgccactacagtagcacaatattctgtgtttatatttacctttagtagtgagttttatattttcatattctttttgtgttctttagcatcttttcatttccacttgaagaattcccttgagtacttcttgtaaggcaggtctaatggtggtgcactaccttagtttttttgtggggctcgggggacagggtttcactctgtcacccaggctggagtgcagtggtgcaatcatgggttcactgcagccttgacctcctaggctcaagtgatcctcccaccttagcctcccaagtataataactgagactacatgtctatgccaccatgcctgacttttaaattttttgtagagatggggtctctccatgttgctcaggctggtctcgaactcttgtgctcaagtgatctgcccacttcagcttccttaactcagtttttatttgggaaagtctttatatctttttcattcttaaagaacagttttggttttttgcttaggattgccttcttcattcaggctcttttttgtttgcatatgaattttaaagtagttttttctgattctgtgaagaatgtcactggtagtttgatagaaataacattgaatctataaattgctttgggcagtatgtccatttaaaaaatattg

SEQ ID NO: 135350 - DNA, 137 bp, Homo sapiens
gggacgtgcttccagatggcccctctcctgactctgttacctggaaacagagtgggtgagaaagacccttgtcttctttgggcctcctctataaaatgaagcagccaggccacacaagctctggcggcttaccagca

SEQ ID NO: 135351 - DNA, 869 bp, Homo sapiens
caaaaagaggcctattatctttgtctacacaaataggtcttattgaatgttttcacctcggctagatcactactcttggcaagatttttgtttagtactattcaggaatctatttagttcaccaaaagtgatcaacttctaacttaaacattcaaataacagcataaaagaactgatatgtcaaaaaacaagtttcaatgaactatatgggtgtatagtagtcagattattactttcctttataagaaagtctgcaaatgaaaaaaaaaataattttaatgccaatgcaataactgaattaaattagtacaaactgagtatattatttaataagtataccaataagaagctggcagaatattttaagaaaccaaatgaccttgtctacttccaagtttctttataatagtattctttgtttgttttcctggagtaacttaacatttactgtaaggagaaatcctgttaaaatagtgtcttttagttatgtataaaatcccaatagtatcagaattgatccttaacttgtaggatgtagttcctatacagttcacaagctcaaagctttgttgttctctgtcgtcacatgactatcatgtgttcaacataagttttctacaaacatgcaaataaatacattaaaaactagtatataaacttatttcacttaaaaatatttatacaacatttatattgattcaacactaattgagatatcatgccaattcaaaattagcctgttcacactgaacatctgaattattcacattttaataatactaaaagggctgtctttaagttaaaaaaaatacacacaaaactctactgtgttttacatattaaaatacaggatgaatgataaaaatatt

SEQ ID NO: 135352 - DNA, 537 bp, Homo sapiens
ataaaggtgggaaaaggaagaaagctaaaatgatttcgcaaatgctctacagcatctgagttatgaagagaggcatttcaacaggaaaaggaggccacaatgtttagttaagtggtaaagaagactcactgaaacttaaggaaaaaccaaagagtatttccatggttattttcaaatatttgttctctcatcagttctactctgggcaaatatataatgcagaatttcactttttaaagatcacattattgaaactattctgctaagcaatgacttcttgatttacggtaggactcaccaagattttaaataaagcaataaaaacagatttgctctaatggctttagtgttatacactgtggttgatagtgtaatgttttattaagattgataaacattaagcattgtgtatttgaatcaaccactaatccaaaccagtaagcatctgttaccattcgtgattgtctgttatgtgaaaagcaacattattgcagagctaagagtatcttgagcagtaattgaaatagtagcctttgc

SEQ ID NO: 135353 - DNA, 111 bp, Homo sapiens
tttagtcttttctaaactttcatgatctttacatttttgaaaatttcaggccagttattttgtagaatgttcctcagttttgagttggtctgctatttcttcatgattaga

SEQ ID NO: 135354 - DNA, 465 bp, Homo sapiens
tacagaagcagccaattggccaagaccctcaattcatttaagcatttgctcaaacgtctccacttcagagagaccttccctaactgcccattttctggaagtggactctcctcacctctctccggagcacttatctctacctcattaatttttattcatttgtttacatatgtttattttctgtctcttcccactaaaatataagctttatgaaagcagacatttggtttgatttgttcacagatatgtctccaggaccttcagaacacacctaaaataagatggaggctcagtgagtgactgattgaataaataaaagcaagtgggtactttaaaatctaaataataatttcagattacctaatatttaatattttactattttctgttatcttttctaaggaacatactcacctcttaaattttcccatttagaatataacccttttcacccacatttccata

SEQ ID NO: 135355 - DNA, 383 bp, Homo sapiens
ttcatatttttaatgtctgtttcattgactacaattgccagtcagccagaattaagacaaataagcaattcacacccactgtgtctacctgctagtgagtactgacaagtaatttataaagtataatgtatgtctcaataaactggcatctgatccaatagatatatatgtcttgagaaaaagcattcaagaaaattttcatatatcttcattaggtcgagagaacagctttaaacacaatattaaaattctcaacaggccaggcacagtggctcacgcctgtaatcccaacattttggtaggccgaggtgggtggatcacttgagggcaagggttcatgactagcctggccaacttggagaaactcagtctctactaaaaat

SEQ ID NO: 135356 - DNA, 218 bp, Homo sapiens
ctcatcctcagctcatcctccactcatcccctgctcattctcagctcatcttcagctcagctcatccccagttcatccccagctcatcctcagctccgctcatcctcggctcagctcatccttagctcatcctcagctcatccccagctcatccccagcttattcccagctcatccccagctcatccccagctcatcctcagctcatccccagctcat

SEQ ID NO: 135357 - DNA, 137 bp, Homo sapiens
taatggacacagtggatctttttaactgtccagccatcctctgggtccatttggaagtcttataagtcatcttcctacagatctggcacatatttgttacatttattcccagacatttcactccatgcatggccaag

SEQ ID NO: 135358 - DNA, 282 bp, Homo sapiens
gattgtccacgttcagcgagcacagctgtgagccatggatcagtatccttcagaatttcagagttttaagaaacgcagtttccattcctactggttgctatgggattattatgaagacgagcaggccagtgcttgtctgtttcaaacgaggggcactgagcaaccctccccggactctggtggctcgacgaggctgctgtggcaacaggagctggcctgggtggccctgactctccacttcctctgtggtcagggctgaccctccttaaccctattttccaa

SEQ ID NO: 135359 - DNA, 498 bp, Homo sapiens
ggttagcattggctctccctgggagctcttgagaaatgcagaatcttaggccttaccctagatatattgaatcagaatctgtgttttaacaagatccgcagaagtactgatttttttgtgcagtccatattcagattcagattctcacagttgttctagtgataccctttatggtttttctttctctttttaaaaatcaggaatcaataaaagatcacatattgcattcgattgtcgtatgtctttagccttcacttccagctttcccacttgggacagtggcatttttgtatagtttaggccagttttgtagatgttctccattttggatttgtcaaataggtgtgatgatgtttttttgttgggtttttgagatcgagtctcgctctgtcacccaggctagagtgcagtggtgcgatctcggctcacctcgacctctgcctcccaggttcaagtgattctcatgcctcagcttcccaagtactgggactacaggtg

SEQ ID NO: 135360 - DNA, 683 bp, Homo sapiens
gggtttcttttaactggtgaaaactgtatttattttgtttgaccagactgtctaacttaaatgaaagcaatggataatggaaaggaaactgaacaaagacaaaagtcttcttcatcatagtgaaaggcatttaatcaggaagagttggaatcctggaagtttttctttttttcaggtacaagaggcatgatttttttctcttcctaaaatgtccttccccttatctgtgtacttattagttcaaggaataacaaatgagtcttaattgaacttagtctttggaaattgagctctttatttaggttatatgtgaaagagtttaaaatattgaaatactttggttgctaagcagatttagaaaagcaacaagcaattgtcgggcaaatccctaggtttgagaagatgtcctcagcaaaatatacccttaggacttacggaattagatcagggttcagcaaacagtagtttccaggccaaatgctgaggctacttgcttgtgtaaagaaaattataatggaatagggccacacttacttgtttaggtattgtttatgccttctttctactacaatggcaaagttgagtacttgtgacaaagatcacgtggctacaaagcttgaaaatatttactgtctggtacttgttagaaaaaatttgccaactccaagaaagaattacctcct

SEQ ID NO: 135361 - DNA, 845 bp, Homo sapiens
tagggattcatcactgcacaaaacaggcaaaattcttgccctaaaggagttttcattcctgtggaagaacagacagtaaacaagttaagtaagtaacatatgtggtatgttagtgatacatgccaaatagaaaaataaggcaaggaaaagggttaggatgtttgtgtgcaatgttgccattttaacttgggcaagcagagacagcttttagtaggaaagtgatatttgaatagaaacttgaaaaagggagggggttctcttaccactcctgttcagtgtagtattggaagccctagccagagcaatcaggcaagagaaagaaataatgggcatccagatgggaagagaggaagagcaactgcttgatataaagggaagagaatatggcatatggatattgctgggttttttgtctttcaagagacagattcttgcttgtcacccaggctggagtgcagtggcacaatcataattcactgcagctgggctcaaaggatactccagcctcagcctcccaagtagctggggctgcatgcacgcaccatcacacccggctaatttttaaatttttttgtacaaatagggtctcactatgtttcccaggctggtctccaactcctggcctcaagcaattctcccatctcagtgttgcaaagcattgggattataaatatgagccactgtgcccagccaatattgctgttttttttgtttttgttttttactaagatgggaaaaactgttagagaagaaagtctggaagggaatatttagaattcagttttagactttaattttgagatgcctatattgaatgtctgtaagttaatatgttgagttgaatg

SEQ ID NO: 135362 - DNA, 500 bp, Homo sapiens
gagtcatcatcagctaagaggattcaaggtttcctttcacagatctttagaagtcttttctgaaataaattctgagaagatttagctcaactctgatcaattaattttgccaccgattttgtgagcacctgctcttgagcgtgtgaggctgagaatcaaggttaatgaggtttgtgagttttgttttgttttgttttttcaaaataagctaaaatgataaaaggttttattccaagactcaagtgagtatcatcaacgtgatgtcatttccaggaaaagttcaatatattaaattctcctaatattttagttcctcctaaaagcatgttagacactgtataaaatcacattgaaagacaccaagaacaataagtttctatcaactaaaggtcttcctgtggatgcactcccagtaatgcaaaagagtttagatagttttcaaaactgactctgaaagtacaagttgtgcaccagaagaatatgagtctgtatttgcttaa

SEQ ID NO: 135363 - DNA, 215 bp, Homo sapiens
aatcatgggaacttcttcaaggccagcaagagaatctctgatctcagggaaggccttaagcgcttttttaaaggtctcacctgattagatcaggccacctacccaccagggtgatctcccttttgattaacccaaagccaaactgatgaggtaccttcattacccctgcaaaatcccttcacctttgccgtgcattgtagtccaatcacaggggt

SEQ ID NO: 135364 - DNA, 275 bp, Homo sapiens
gtgagaccctgtctctaaaaaaagaaagaaagaaagaaaaagacatgtccagaagaatacctaagagaccattaattgttaactgtggatacgtctggggaaaatgggaatgggatatggaagaagaatatttttacttttttattttatatttttgcgtgctgtttgaataattcagtctgtgaatatgttacttttattttaaaagtaaatcattgtttaagacaaggaaaggtgtttttccttaagatacctgaactctgttatctgtattt

SEQ ID NO: 135365 - DNA, 312 bp, Homo sapiens
cggagagacagcagcctgcagcctgagctccaaagtgagcaatcaatcagcctccagaggagccccagtgccttcgtctcctggggttgccacaacaaagcaccgtcaaccaggtggctggaacaatggacattcattgtcttatagatctggaggccagaagttccagatccaggtgttggcaaggctggttcctctggaggctgcaagggagactgttccaagcccctcccctggcttctggtggttgctgacaatctggcgttcctaggctcgtagaagcctcaccccatctctgcctcttgccttcac

SEQ ID NO: 135366 - DNA, 336 bp, Homo sapiens
atccagcccccttaaacgcacaggctcttctggcctcaggggctttgcagacctccaatgcaggagcagaaattcccctcttccttgttaatggaatttgatcttgttgaggtatccaccctctccccacagccacgtgctctggggagtgggtcatgcctggctaagacccctgcccttgattggcttaggtatcagcacatcatgcaacactggcccgagagacatgagtggatgtttgctgggggcttgtgggaaaagatttccttactgtacatgcgtgtgcacgcacacacacacacccttcttctatagggcctttgcgtgtttggctgt

SEQ ID NO: 135367 - DNA, 351 bp, Homo sapiens
gttaatctctcactgtacctaatttataaattcaattttccttttcttccctattctttacaaaatgaattgcaactataaaaattaatgtttatcatagtgagaaaggaaaggtagctcatagcaacctgtgctatgtgaagcaggcaaaattgatcaggctcagcgagaagtcagcatggaacggttagggcccatgcctggaggcaactgcttaaaggcattttgtacctgactagggtgctgcttcacccattatcttcatgtgcctaatatctgtgagacaaagaacaatgtatagcagatcaatagcttgttattctaatgtaaactggtaaacaatttaggaac

SEQ ID NO: 135368 - DNA, 210 bp, Homo sapiens
gtgtggagaagacagaaactgtcttctaaggttggtgctgtttctgtctcagacacaagaaccaaaagggcagatagaaaaacaagcagggctggggacggtggctcacgcctgtaatcccagcactttgggaggccaaggtgggagggtctcttgaacccaggagtttgagatcagcctgggcaacatggcaaaaccctgtctctaccc

SEQ ID NO: 135369 - DNA, 245 bp, Homo sapiens
gacagccttctctcatcagccccttcaggacttgcctcagttgcagagagctgccttccccaagatcacacccttccctggggactcacaaccaatggctgatccagaagaatccataaagcccgtatcatttcagcccaatttaggacagctttgttgagccattagacctacatgcagcccaacctctccttctacccacttcttctttcttccctttccttccacggtgtctgttccaagca

SEQ ID NO: 135370 - DNA, 343 bp, Homo sapiens
ctcttgtgtctgggataggaaaggagatcagaaacctgtgaagattgcaaactcctgactccataagaatgaggtggaaggtctgaggacagagagctgtagatgccctactcaattttaaagaccttagtaaacaagaaaaaataaaattaaatactatatgtgtattccatgggaaattatttttattgtttcttttggtggggagaacaccactatatgcagttttaggaggaaaagataagaaacatgaattctcagaagcaggtttcaacccccacagctcaagggttacattaaaaaagagaaatgaactgctgctgaaattagaagcaagagaacc

SEQ ID NO: 135371 - DNA, 702 bp, Homo sapiens
ttaaaagtatatttgatggggaaatatttaatatttttttctatgattgtgaataaagcaaagatgtccactctgaccacttctattcaatattatactatagctcctaaccaatgtaataaaagaggtaaaggaaataaaaggcacagaggttggaaaggaagaagaaaactcacagatacaatatgtgtacacagaaaatcctaagtaatgtataaaaagctaccagaactgatacgtgaatttagcacagaatataaagtcaatatacaaaaagcagctgtggccagttacagtggctcaagcctgtaatcccagcactttgggaggccgaggtgggtagaacccttgaacttgggagtttgagaccagcctggtcaatatggcgaaaccccatctctacaaaaaaatacaaaaattagccaggcatggtggtgcacacctgtaatcccagctactcagctaagtcaggaggatatcttgagcctggggaggtagaggctgcagtgagccgtgatcacaccactgcacttcagcctgggtaacagagtgagactctatgtctccaaaaaaaaaaacgcaattgtatttctatatactggcaatacataattggaaaatgtaaataaataacatatctaggaataaatttaacagaagatgtgttaagacctgtagagcaaaaactataaagcactattg

SEQ ID NO: 135372 - DNA, 362 bp, Homo sapiens
tgttcctttagggaatgaagacattgcaatattcctgcttcggcatggggcctatttctgttcctacatcttgctggatagtcctgaccccagcaaacatctgctgagaaagtacttcattgaagccagtcccttgcccagcagttatccgggaaaaacagctctccgtgtgaaatggtcccatctcagactgccctgggtagacctagactggctcatagacatctcctgccagatcacggagctcgacctttctgccaactgcctggcgaccctcccctcggttatcccctggggcctcatcaatctccggaagctgaacctctccgacaaccacctgggggagctgcctggcgtgcagt

SEQ ID NO: 135373 - DNA, 383 bp, Homo sapiens
tttcccacctatgccacaccaacagcatcctccgtgatagcacccctatctttgcaaaacaactggtagatcctctccacttacagtttttgatttgtataaccctcggatgaattcagccaactgcaaaaataaaagcagccgaacaaacaacagcaaagccaaagcaaaacaaaacaaaaagaaccttataaaagcgctgctgttgagcacactgagaacaacttggagcttgacctcgccacttgggggcgccctgggagctcagaaatgcaagctccgtccagccccgggagcccgggctgactcagggcagccccttccttctgactacacggtttctgtattcaactaaccacacgggaaatgagactgccttttag

SEQ ID NO: 135374 - DNA, 160 bp, Homo sapiens
cgtaagcacaagtcattccaggactccttctccctagaaatctataatgatcacactcccctaaatataatggataaaatgtctcctcttctagaattttatttgaataagcggacagtctcaaaattagcatactatatcaggagatgggagacttcta

SEQ ID NO: 135375 - DNA, 734 bp, Homo sapiens
gggcatgaggctatgttttgtaagcctttgtattttagctatgccagagacctggagtatttattatctgagctgctcatgttacccccaaaaaggtggaatcttggcagatctccattctttttcttgatgactaaaacccaagttaggtgttgacagaagtccagaagatctcagtgtgaagccgaactatgatatctggtactttcacatttacatgggttacactcccagctattttaagtacgagggatgatatagtttcttattagtatttttttccaccatgcatggtgaaaaactcatcctgaatcactttggaaggaatggaaagtttgagataacagaagtgccattcactctgaaatgttagacacccagactaccatttaaaaaaaatatagccatttaccaactcttatttgtgcagttggtggcacttccaatagattgttaagaatttctttttgctggtggaacggactggttgggggcagttcttgtagattcaacctatcagttcctttcatttatgataaagcagttgtgctgtacccataaagggccgttggaagtttctggatagatgtttttgtttggtctcatagcctatttggcaggagtaaagtagtctttctccttgtgtcccatccaacatgttgcattcagtatcagaaggactcttcagacctctgggaaggctgattggaggtgagaaatggaatgcgaatttt

SEQ ID NO: 135376 - DNA, 142 bp, Homo sapiens
tgaagccagggactgctatgctttggcatcaaggtttgcggtatctttacaaactgtgttacatgtattatttgaacaaaattggcaagtaaaggtaaaattaaaggggttatagagagagcacagatgaagtataataaag

SEQ ID NO: 135377 - DNA, 581 bp, Homo sapiens
atagactgagatccaatgtttaaatctttttatttcagtttgatctgtgcctttagattggggacaaaattttaaaaacaaatcttccaaatgacaccacaatgaaagccagttgtggtcttgaaaaatctctctattgcattacttatcctcacccttgttttttaagaggtagagagagattactgggaagcagtgagccaacataattgtcctttcctctacagaatagctgtgcagaaggggaccaccacacttaggaccagtgccaggtgacaatctttccgtcatgctgctgcagcattttgcaccttgagagacaggaaaaaaaatgggggtgagggagtggaagatgatgaaactatttctcttttatgtctacatccttactcctcaaaatactttaagctcactcagaccccatataccctgcccacaatactaacacatgtactttgcataagtaaattgttgattaaataagagcaaaactatattcttatgtgtagattaaccaaggctaatttcctggagtttaatacactttggattcaagtaaaaacaatcacttaatgcagcaa

SEQ ID NO: 135378 - DNA, 476 bp, Homo sapiens
tcagccaggctaggagagcctcctcacccccgccctaagccagacacaatggggttcccaggaggacactgtgcaaacttaggctctgcatatacaactgagggaggatggccacatatctgttatagcaggaaaagcaaaagatgcttactatctggctgacccagacttcaaaacgcaaagtcccccacactgccctgggctcgttatctgtccctttgccaacagtggttcaaggccacctgagatagtctcggcccccatccactttttcagtgcctggaacaaaacacagtctgcttccaaaactacctgtggctctttaaaattgtcaccataaaattatgcaattccctgatcactttaatattgaagcaatagtgttttgttttgtttttttcaattccaaattagtcgataaaagcatcaaacattccctgaaggaaaccatcaaatattcaaaatcagggccaccg

SEQ ID NO: 135379 - DNA, 183 bp, Homo sapiens
atgatttgactttgagacttactgtaaagtcactacaatgtaaatcctcaaattatattagtgtttttcaaagtagatttgacttttctaggctctttgcattttcataagaattttaggctgggcacagtggctcacacctgtaatcccagcaatttgggaggccgaggtgggtggatcacc

SEQ ID NO: 135380 - DNA, 122 bp, Homo sapiens
tttccagcctctactttggggaagggctggacccacatttcctgggtggaaaaggttctcggtgtttgggaagcagcttcgcaggagctgcaaggagctgcagagaaaggcagatctgggag

SEQ ID NO: 135381 - DNA, 679 bp, Homo sapiens
ttagaggcttttcttaatgtattcacctggtgtgttcagttatttctgaagatatagaaatgtttgatgaaatgaatgaagatacagaatgtagattcagtatcaagctctatctcataacagtaacattcctactacatgcaaaccctatacatactattatttaataccttttttcaccctactatcatcaatggctccattttatagatgaagaaattcaggattacagcagttaagtattttgtccagctaggtcgtacagccagtaagtattctgcccaggtcatacaaccagtatcagatttgtgattaatcgcattactgtcaagtcctcatgcaggccagtcagacttctgtgtgtgttccctcaccttccatttaagtttcagcctttatctatgtccttttgggtgtctgccatgctgatgatagagctcatcagtctttgataaatactgttaggtccttaagtgattttctgtgaaatcttacgcataggatttctgtggtcagggtttgacgtctgatcttgttcgtcagctccccttgctcaagaatgcaagtgcattacctcttaaattttaaaagctggtaaacttaataggaagtgcttctttatattgcaggtgctaaacttaaggagcccattaattacccccaaggagattgtagtctt

SEQ ID NO: 135382 - DNA, 144 bp, Homo sapiens
acattttccatgtacctttgtgtgttagctagaacataagaagatctcaagttattaggatttctgagctgcttcttgactaaataaaacataaaaatcatgggcagctggcaccatcaactccaggagggcctaagatgtcag

SEQ ID NO: 135383 - DNA, 576 bp, Homo sapiens
ccaatataacagatatgaggtgatatatctcattgttgttttaatttgcatttatttgatgatttgaaataataaggtttttttcatatatctgttggtcatttgtgtgtcttcttttaagaaatctctattcaagtcttttgcccattatttaatagggttatttgttttcttgttattgagaagttagagtcccttgaatattttggatattcaccctttatctaatataacatttccaaatatttttctcttcattcttggattgtctcttcattctactaattgttctctttgctgtatagaagctttttttagtttgatgcaaccctatttgtctgttttttctttctttgccaatgcttttgaaaacatattcacaaaatccctgaccagaccagtgtcatggtgtttttcccctagatttttcttctagtagttttatagtttcaagtcttaaatttaggtctttaatacattgtgggttgattcttacataaaaggggagattttcattcttctctatgtgaatatttagttttcccaacatcatttattaaaagtaatgtccttttc

SEQ ID NO: 135384 - DNA, 343 bp, Homo sapiens
actctgacgagttctcttaatcatggctcagttccgaaaaccaacaaaatagaagaaatcttttctaccgaccttgtgccaggagatgtcatggtcattccattaaatgggacaataatgccttgtgatgctgtgcttattaatggtacctgcattgtaaacgaaagcatgttaacaggagaaagtgttccagtgacaaagactaatttgccaaatccttcagtggatgtgaaaggaataggagatgaattatataatccagaaacacataaacgacatactttgttttgtgggacaactgttattcagactcgtttctacactggagaactcgtcaaagcca

SEQ ID NO: 135385 - DNA, 835 bp, Homo sapiens
aattgtatctgtgtaatgttaaaacaaacgaaataaaatagaaggaaaaactttctgagtttcaaaaacaacagactagtactctaaagaactctttaaaacaattaactgttaggattgcagttatgattggatattatttaattctgtttctgatgtggggttcctccactgtgttctgtgtgctattaatatttaccattgcagaagcttcattcagtgttgaaaatgaatgcttagtggatctgtgcctcttatgcatatgttacaaattatctggagttcctaatcaatgcagagttcccctcccctccgattgttctaaataattgaaagatgtctgctgtggaaaaaggcatgtatttaaatctgtatgattctcaaccatctttagttgggaaaggtccttgaaagccaatggaaatactttttttttttcttggcactaatcaagtgagtgttaccttttcacttagtaggatgtgttgttacgctagtaaaatagaaacctgtgtttattctcaggtattttagaaacaacagccatcattttattttatgtgtgtgttcttggctgtattcataaattatatattttgggctatcaaatattacttcattcaatataaataacaatagtagaagttgtttacttagatatgctttctagttgcattttctcagcctatgtaagactactttgttgtaatagcctttgaaatttacagtactgtctctctactatcttcagattacttgattcaaataaaccaattatgtttgtaattgatattaataaaaccagaataaaagttcatatctacccaaaaaaaaa

SEQ ID NO: 135386 - DNA, 436 bp, Homo sapiens
cttcagagtaactgatgtcatcgaaggaacagaggtccagtttcaggttcgggctgaaaatgaagctggagttggccacccaagtgaacccacagaaatcctatccattgaagatccaacaagtcctccctcaccaccccttgacctacatgtgactgatgctgggagaaaacacattgccattgcttggaagcctccagagaaaaatggtggaagtcctatcataggataccatgttgaaatgtgtccagtaggcactgagaaatggatgagagttaattctcgcccaataaaggacttgaaattcaaggttgaagaaggtgttgttcctgacaaagaatatgtcctgagagtgagagcagtcaatgctattggtgtcagcgagccatctgaaatctctgaaaatgtggtgccaaagacccagactgtaagagca

SEQ ID NO: 135387 - DNA, 516 bp, Homo sapiens
cttcagagtaactgatgtcatcgaaggaacagaggtccagtttcaggttcgggctgaaaatgaagctggagttggccacccaagtgaacccacagaaatcctatccattgaagatccaacaagtaagtagtgctgattatacacaagatattgtctagaacttgatgagactgtggatatgaatatttcactcttttctcaggtcctccctcaccaccccttgacctacatgtgactgatgctgggagaaaacacattgccattgcttggaagcctccagagaaaaatggtggaagtcctatcataggataccatgttgaaatgtgtccagtaggcactgagaaatggatgagagttaattctcgcccaataaaggacttgaaattcaaggttgaagaaggtgttgttcctgacaaagaatatgtcctgagagtgagagcagtcaatgctattggtgtcagcgagccatctgaaatctctgaaaatgtggtgccaaagacccagactgtaagagca

SEQ ID NO: 135388 - DNA, 310 bp, Homo sapiens
atagaatcctgtgcatccctgattctattcttccccaaaggaaaatggccagcgtgaccctcaccttataaaccctcgggtaaattagagggcgcctctaggctcactgttctgagaaagctctccagctatcaggcagccttgtcagtcacgtgcgctccattgcctaggagatgaaattatattgaaaagcattcatgtctgttttccacgaaactggcaaatacatggtttattatcataagcagcatattcccatatgacaattggtgtgtatagtgtaagaatgttctagagtctccatgccaaa

SEQ ID NO: 135389 - DNA, 794 bp, Homo sapiens
caccatgccaggccaaaatgataaattttttttttcacatgtgcagaacatgcagctttggtacataggcatatgtgtaccacagtggtttgctgcacccaaagtgataaattttatgttatgtatattttaccatgacaaaacaaaatctgtaacatcttttcatttaaaacaacttgtttactaatgcttaaacaccaatacattgaagatataaaaaattacccagagatttgccccactggaccttccatggcagaaggaggtatttataatgaatacaaagtagaaactaatacatttattatgaataaaataacatttcagaggaaggaacaattccttttggtcaaaagattgtggaagccatagaggagatggcatttgaattgagccatgatgcttaaaatagctgagaggtggaaacaactccaatgcccattgacaaatgaatggataaagaaaatgtggtacatacatacaaatggaatattgttcagccttaaaaagaaggaaatcttgtcacatgctacaacataggtgaatctcaaggacattatggtaactgaaataagccagtcacaaaaagacaaatactgtatgattctagttatatgtggtatccagagtagtcaaactcatggaaacagaaaacagaacagtggttgcccagggctgggaggggggaaaatgttgctcaatgagtacagggtttcagtgaggcgagatgaaaatattctaaagatctactccctcagactgggacattcctcacttctggactgcttcccccg

SEQ ID NO: 135390 - DNA, 346 bp, Homo sapiens
acctggcgtgaggtctcctggccacggacgttgttggcgtcacacctgtggcacctgaggtgaattgttcagatggaaacggcaccatcaggcaactggcaacagaagcctaaagccctgggtgcctcaggtcagaggaaggaaggaatgcaagggccccgctccccccaatgccaggagcgtgtgttcacagctttagacaggacaacccactgcaaatccaaagcagaaaacatggtccaactccatctctgtggcaccttcatagatggtgcccacctgccttggcagtgatgaccgacactgcgaacgctgtgctggcagtgtgtttaagggctttaactga

SEQ ID NO: 135391 - DNA, 171 bp, Homo sapiens
attaaagaagggatcccagacgggatgcggggaaactgtcactaacattcaatactggaccacatccttaaaaatagatttctctgagtggtagtccaattctacttctggtcaccaaacgttcaaatcatgcgtctggaatctgttggactatgccttgactattctcca

SEQ ID NO: 135392 - DNA, 625 bp, Homo sapiens
ctaagtccgtgaaaccagaaaaattctagaagataaatcagaaaaactcttctagacattgtcttaggcaaagagatcatgaccaagaatccaaaagcaaataaaacaaaaactaagataaatacatgggacctaattaaacaaaaagtcttctgtacagcaaaggaaataatcagcagagtaaacagacaagtcatagagtaggagaaaatattcacagactatgcatccagcaatggactaatatccaaaatcttcaagaactcaaacatatcagcaagaaaaaaaaacaactaatcccatccaaaagtgggctaaggacatgaatagacaattctcaaaagaagatatccatatggccaacaaacatgaaaaaatcctcaacatcactaattctcagaggaatgcaaaccaaaaccacaatgagatgccccataccttactcctgcaagaatgaccataattcagaaataaaaaaataacagatgttggcatggatgtagtaaaaaagaacacttttatactgctggtgggaatcccacttactgggtatctacccagaggtaaaggagtcattatatgaaaaagacacttgtgcaggcatgtttatagccacacaatccac

SEQ ID NO: 135393 - DNA, 159 bp, Homo sapiens
aagatcttctagcaacaaaaatgatttatcaagagaaatatgatgcaagatagataaaataattgcaggaacaaagaccagggtcttttgaaaagccacaaggagacaggatccagtggacaggtagaggggcttgccttttagagaagcagggattat

SEQ ID NO: 135394 - DNA, 470 bp, Homo sapiens
attctagagtgatcccgcacccaggcgcacttctggtggaaggaacagcaagtgctggcctgagctgagatcatacttagtgtgttcaaaaagcaaaaggaaagcctagtgtggcaggtggggagtgggtgaaggagagtggtaggtgatgtgaccaaagaggtggtggctggggctggattatgaaggcatctatataccgtggtaaggatgttggcctttacttgacatgagatcagaatccagtggaagatttggagcacaagaattgcacaatctgacctattttttaaaaagattactctggctgatgtggtgagctgagttagtaaggaagtgggcaagcgtggaagcagggagactagttgggaggatattgtggtaattcagagggaaaagagatacatgtgggccaagctagcagcagaggagatggggaatcctggattgatgttgatagtatagttcag

SEQ ID NO: 135395 - DNA, 343 bp, Homo sapiens
cgcctgcctctcctgcctcacccagatggctctaccctttgcccacctcacttcagccacagtggcctcacctaagtgcctccacatttggtatctattcattctctagccagtgcacctcagaatgcctggaattcagctgggcatggtggcccattcctgtaattccagcactttgtgaggccaaggtgggtggatcacttgaggtcaggagttcgagaccagcctgaccaacatggggaacccccgtctctaccgaaaatacaaaaattagttgggcatagtggtgcgtgcctgtaatcccagccactctggaggccgaggtaggagaattgcttgaacc

SEQ ID NO: 135396 - DNA, 324 bp, Homo sapiens
tacaggatggatctatcttagcataataacatgtagcaaaggccctgggtgccaaacacagcagcagtcacaggttccaggtgggcatattatgggagaccaccattcaacctactacaggcatcttgtgtaggcaccctgcctgcagctctcagtattctctgcatttaccgtgtgctttggatttggagttgaccagaaatatctcctcacctccactgcagcctgttctccaacctctaaatcggtgttggcagtggaaaaccactggaccagtaaaaataattgcgtttctggcctggctgtggcctcatgcagaaggca

SEQ ID NO: 135397 - DNA, 652 bp, Homo sapiens
aaacacttttctcttgtttccttggaccaagtgatgaagaggtggtgaggggacagcaaaaaatgcaattacatttcttctctttatttttattttttgagacaagagttttgctcttgttgcccagggtggagtgcaattgtgcgatctcggctcaccgcaacctccacttcccaggttcaagcgattctcctgcctcagcctcctgagtagctgggattacaggcatgcaccaccacatctggctaattttgtatttttagtagagacggggtttctccatgttggtcaggctggtcttcaactcttgacctcagatgatctgcccgcctcggcctcccaaagtgctaggattacaggtgtgagccaccactcacagccccctcttctctttctctgatcactccaatactcgttctaattgggaggaatggatttaactaatctttggtttttatctctgtgtagaaactgatttcttggcagaatggactgttaatatatttaaaaagactgaaaacctcttagaatcttaagtagtaaaatattcagagcgaagaagtagagattttacctttacaatatggtgacaacagataactgtaaaaacttctttttcaaatagaaccagcaggagcatgcatggaacaca

SEQ ID NO: 135398 - DNA, 484 bp, Homo sapiens
gatgatctgcccacctcagcttcccaaagtgctaggattataggcgtgagccattgagcccgggctcaatttttaaggaactgatgttatacagaaaatgttctctattataagattgtcagttcaaaaacaatgttcaaaagttcaaaatttaaaaatactagaaatctatactaataaatcttatgtatttctaaaactaaagaacgcccttctataaacctcataggccaaaaagagaagtcatactaaaattagaaaatatttacacctatattataaatactcctttgggatgccgtcaaagaaaaattcataacttaaatgcatatattaaaatttggaaaggcaaaaattaacaaaacagcacattttagaacttgaaacaactggagaattatctgggacaagacagataaatttatgaactaaacataaaaatagatcagattgacaaacccaaaagttagctccttgaaaggac

SEQ ID NO: 135399 - DNA, 413 bp, Homo sapiens
ggtaaaaataagaatgattcaggttgaacattaaaaaaatcttcttggtcattcaggttcctacttaaaacaggtacaactgatttgaataagaaaaaattgaaggtgtgggcatgtctaacatcctaattgcattttgctttttctatccctggtttgaattctttgttataatacatttttatgcattatctggggaaatgatagggaactagtgaaaaagaagactatggaaaatatagctatcaaaaacttggctgggactgcaggcgcccgccaccatgcccagctagtttttttgtatttttggtggagacggggtttcgccgtgttggccaggatcacttgaggccaggagttcaggaccagactgagcaacatagttgagacctcatctctatttaaaaaaaaaa

SEQ ID NO: 135400 - DNA, 421 bp, Homo sapiens
ccccaatgcaaggcaaggttgctgggttctgtgcagggccccagcaggttctcaggaggggaagaggcatcactgaaaatgacagtgaccactgaaggcgtctgtccaggtggcatccaggcccctgcagggttggctacaagccacagctggtttccccctcccgtctagagtaatggcccacaggctgtgtttcccaagggctcctcctgcaggatcctggcatttatatctgcaggaggactctgagacccatggagacctgtgctgagaaacagccacccttgtccccagggcagagaagtacccgggggaccctctggctgtctgcctgcagatcagcatgcagccccccagggtgcctttgggtctaaaaaggtgtgttctattcctttgaactggaccttttgagaagagcaag

SEQ ID NO: 135401 - DNA, 269 bp, Homo sapiens
ttaattcactatctatatgaattgtgatgagaacaaacagtgtaataatagaattttatagtacgtgatgaagatatatgctacactatttggggcttttcaatctttttcctcagtaaaacaatcctcatcttactgtaatttcctctaaagctaattcaagagcctttccatgagctgccactaaccagtattatatttagtatagatctttaatgaccccatcacaagtgtccactgaaagtagctggccatctttcttgaaaaat

SEQ ID NO: 135402 - DNA, 470 bp, Homo sapiens
cgggccgggattcccgcggggcgggcgcgggcgcggcttccgggtccgcctgcgggtgggaaaccggacgagttggactggggccgtcctccgtgcgccccgggcgggtttcggctttcatattcgctctctcccctctcctttgcgccgagtgagtgttcccggggccggagcccctggccccccgttccctggccgccgttccttcctgtacaaacaaaaccatctcgcccacctccaccccctcccccatatatgatagccgaggaccctgagggctgtccgggaggagcgcggggactctcatctgacaccggaaggaagccagggagaaaatggaagtcagtgcaaactcacctgccttcctttggaaacttcaagaaaaaaagagattgtatcaactgatggcttttagtctcctagactaaaaagaaagtttcgttgcagctttaaagataaatcacattttc

SEQ ID NO: 135403 - DNA, 322 bp, Homo sapiens
tggcattcagaatgggatcctgggacagaaaaaggacattagagaaaaactgagaaggtgtgaataaagatgaacttaatgaataatattccatgaatattggttcactaattgtgccaaaagtaccatttgaatgtaaaatgttaataaaggagagactgggtatagagtatataattccgtaactctaaaactgttctgaaagtaaagctttaccatgaaaaaaataaagaattcatagagggaaaaacaacatagggcaagccatcaaccctctcaggatgtcagtttttatatgcttgtaaaatttggcattgctcct

SEQ ID NO: 135404 - DNA, 298 bp, Homo sapiens
cccattaagctaccattgacatcttcacagaattagaaaaactacttaaaatatatattttatatatataaaaaatacattatatataatatatatttatatattttatatattatataaaatatatataatatattttatgtatatataaaatacatataaaattggcccatattgccaagacaatactaagcaaaaagaacaaagctggaagcatcatgctaactgacctcaaactatactacaaggctacagtaaccaaaatagcatggtactggcactaaaacagacacctgga

SEQ ID NO: 135405 - DNA, 510 bp, Homo sapiens
aattctccaatcgaaagaaacagagtggctgaatggatttaaaagacaagatccaaaaatatgctgtctacaagagactcactttagtctgaaggacataggtagacagaaagtagagatagacagttattccatgcaaatggtaaccaaaaaataacatgagtggctacacttatattaatttcagtcaaattctgtcatgaaacaaagtaggtcactatgtaatgataaaagaatcaatccattaagaggatataataattgtaattatatatgcacccaacattagagcacctaaaaatataaagtaaatattaacaaaactaagggaagaaatagacagcaatataatagtagaagacttcaatatcccacttttaacaatggatagaccaaccagacagaaaatcagaagggaaactgcagacttaataacaatatagaccaaatgggtctaacagacatatatggaccattccatcccaaaacaacagaatatatattcttctt

SEQ ID NO: 135406 - DNA, 392 bp, Homo sapiens
ggactactgagattacaggtgtgagccactgcgccctggcctcacatgtagctattgaaatttatattagttaaaattacataaaatttaaagttcaagctgtgtgccaaggtgctcacctgtagtcctagctacttgggaggctgagttgggaggactgcttgagcccaggagttcgaggccgtgattgaataccatcacacctatgaatagccactgcactccagcctgggcaacacagtgaggaccctgtctctaaaaaagaaaaaattcaggactgaatatggtggcttatgcttataatcccagcagattaggaggctgaggtgggaggaacacttgaggccaggagtttgaaaccagcctgggcaacatagtgagactttgcttct

SEQ ID NO: 135407 - DNA, 249 bp, Homo sapiens
ttaaggaaaatgctctactttgtggggtgaaggagagaaattaagggggaatgtaattttggctgttaaggaaataccattttcttttaacgtaattaagttcttgattgtgatgctcttaaatgaaccatgaaattctaagcacttaccatgcgagtgtgatttttaactaagcctttttttttctacccccaatctgaatgttaaggtggcagatgcataactaatcttagctgaatctatattaag

SEQ ID NO: 135408 - DNA, 579 bp, Homo sapiens
tttggtttgaaaagaaagtccagggttttggtttgaaaagaaagtccaggaaacaggagaaatagctttaacgtacattatgtttttttgctttgtttttgagacgggatctcactctttctctaaggccaccatggttccctgcggcctctacctcctgggtgcaagcggtgttcctgcctcggtctcctgagtggttgggacaacaggcacacgtccccacacttggctaatcttttttaaaaaaattcatagagacaaggtcttgctgtattgcccaggctggtctcaaactcctggactcaaaccatcctcccaccttaacccgcctaaattgctgggattacaggtgtgagctattgcgcccagcctgttttcttcatggttaccctaaggaacatatattttggattattttttaattcttttgaaccaaaatatatttattgttcattcaagttttaaaaaaaatttcctatcttatttccacagtcggttaaacttttagctaacttgcctattgtctctgctgagttaaagttgccaacttttgttttaaatatttttaccaaaaaaaaa

SEQ ID NO: 135409 - DNA, 237 bp, Homo sapiens
tcgagctcgcacccggccattctagtccacagagagggcaaaaggataaagactgaagagttgttcattgaatgtgaccaggaggtcgttggtggccttaatgagagcaatctcagtggactgatggggacaaaaactaaaatgattgagagaatcatgaaaatggatatagcaagtataggtaactctagaagcttagttatgaagggaagagaaatcgagtgatgactagagtgg

SEQ ID NO: 135410 - DNA, 187 bp, Homo sapiens
cagggtttcatcgtgttagccagtatggtctcgatctcctgacctcatgatctgcccccctcggcctcccaaagtgctgggattacaggagtgagccaccatgcctgaccgccctgtcaacttttcaagggacttgtttctttatatcgagcagatgttaggagcataggctttgcagtcagacatt

SEQ ID NO: 135411 - DNA, 288 bp, Homo sapiens
caggctaggactagttggtctcaaactcctgaccttgtgatccacctacctcggcctcccaaagtgctgcaattacagtcatgagccaccatgctgggcctataattttttagagttaatatttttataatactcttttcaaaaaaaaaacaccttgctgaatgtagatagcaaatgtcataggagaaatctgatacctgagagagtagtacatagtttcagaaccaaggttgagagttatgctctgggatctgcttctaaatgatctgactgccatatcagtgagtc

SEQ ID NO: 135412 - DNA, 227 bp, Homo sapiens
gctattctcaccggatcttgtatctttatgatagattactcgcacccggccttctcttttatctcagagagtgtgacccagtgtcacagctccagcaagcactttcacctgagatcctctgatgggacttaacaacctagtgttaacaggatttggttctggggagtttgaggggaggaggctgttaacttttcccatttttttcctttagtcgcacccccccccac

SEQ ID NO: 135413 - DNA, 370 bp, Homo sapiens
cagggttcagctgagctcttgtgcacacgcactgcagacctgatgagggaatggggcacccagaggtgagaggatggaggagcccgctagccagctagtcttctagtgggtgcaggtcaggggtgagcaccaggtatggtgctcagtgctcttgcctagcaaggggggcctagtgtctgtgttcatgtcccgcacctgccatctgtcttctgatcagaacagggtttgtagaggaggcaggctctccagggactatgagaagggtgaaaaggagagggctcgaggatctggaggatggaagatgtacaacgtgggaggatgcctatccggtgaagggattgtggacaagcagagggagtggggagggtgg

SEQ ID NO: 135414 - DNA, 408 bp, Homo sapiens
accaacagtgcacaagggtcccaatttctccatatcctctctaacacttcctgttttctgtttgtttctttaaatagtagccatcctaatggatgtgaggtggttatcttattgtagttttgatttgcatttccctaatgactgagcattttttaatgtgtttactggccatttgcatatcttctttagataaatgtcttttcaagtcatttgcctgtattttaaaattgggttgtttgttttttgttgttgttgacatttagttctctttacatttgagatactaatctcatcagatatgatttgcaaatattttctcccattctatgtgttgcctttttattctgttgatagtgtcttctaattcacaaaattaaataattttcacgtagtctaatttgtctattt

SEQ ID NO: 135415 - DNA, 483 bp, Homo sapiens
tacgcggcagtgcacgcttgctcctgcggtcgactctaagatcccccgaggcggctcgtgctcttccccgtctcgaatttttggcggcctgcacgtctccctgggattctgtctgttttctcagcgttttctgctggcacagagtctcactctgtcacccaggctggagtgcagtggtgtgatcttggctcactgcaaactccacctcccagattcaagcgagtctcctgcctcagcctcccaagtagctggggctacagacacacaccactatgcctggctaatttttgtatttttagtagagatggggtttcaccatgttggccaggctggtcttgaactcctcatctctggtgatccacctgcttcagcttcccaaagtgctgagattacagccgtgagccaccccatgcctggctgttttctttactatagagttgcagctttggcttattttgaagacaaattgttggttatcaatag

SEQ ID NO: 135416 - DNA, 1024 bp, Homo sapiens
atagaagaaaacaactggtattactaaagatgaagttaactctgcccgaggtggtcagaaaaagcttcacagaacaattagatgtttatttaaactcgttgctggaagaaccatgctttagaaggaaggaatgacgaagctctggagtcatttgagtgaactttgcagatcagagaatcatgagaaattcagcatgatgaatgcaaagaatagaagattgagatatgaggctggaaatctgagtggagaccagaatctgaaggaacttaaatgctagtcccaatttgttcttgcgatataagcaaccattgaaatgttttaagagatgtgattatggttgttaataggaaaatcattggcagtaggaagggagagaatgagtcacctgttaagggagtgttgcacatggaatactgcacagccatgaaaaataatgaaatcatgtcctttggagccacatggatgtagctggaggttattatcctaagaattaacacaggagcagaaaaccaaatactgcatgttctcacttataagcgggatctaaacattgagtacacatagaaacaaagaagggaacattagacaccgggacccccttgagggtggagggtgggaggaggatgaggattgaaaaactacctctcaggtactgtgctcactacctgggtggcgaagtcatttcatttgtacattgtaccccagagtcacgtaatttacccatgtagcaaacctgcacatggaccccttcaacctaaaagagaaaaaacgaacacaacaataaacaaaaaaaaaaacgtgttgcgggccggcctcggggccctacagaaaaggtttttaaagacaatgcgtgtgggggggcgggccccgtcaggtgaagggacacctcgggctaaacggggtcccaagggagactcggggcctgaccgtggctggttctcccaattaaaaagccgggggaacagccgtctgacaatccagagggggtcggggcatcgcgggcctaacagggcccggggcaata

SEQ ID NO: 135417 - DNA, 608 bp, Homo sapiens
tgcaatgaaaaagtggagaccacatcaaaataacctatgccactggattcacaatgtttgagaaatatctttgcccagagtaagcactgtcaaagatagaattctgtgccctcctccttccctccacaagatttgaaagagacaaggctcacatcttggagaatttctggctccttttgacctggcagtcttgagagatgcagctcggtcagaagattgcaaggatttcctgctttcagcctgtctagaaatactacaagatgaacatcccccatatctcattatttacttcttcctaagtcaggaaacttggagacatgtgaaaattcatttcatgagtttcagtaaatattttattttgagaggctgggtggtggtttgggtttcttttgtttatttcctttttttgagataccgaaatagaattgatttactaaataggtttagtcttacgtcaaagggttaatttagcttccaaaggcttgctctgtaatccagctacttgggtggctgaggcaggacaatcgtttgcacctgggacatggaagtgcagtgaaacaagctcgcaaccatgcattccaacctgggtgacgaaccgagactgtttt

SEQ ID NO: 135418 - DNA, 245 bp, Homo sapiens
gatctatggtgcatagttgttcctagagtatcaccctaacaggctttggagcaggtgcagggggtcagaccccacctccgggaggatggctttcccagaaatggaaatggccaggcacacatgcagctactagccctgagcactggagagggcgccgctgactcacaggtcagaaggcaagccccatttggacagccatgtacatatatggaggagtccccaccctgctttggagaccccactca

SEQ ID NO: 135419 - DNA, 329 bp, Homo sapiens
gatgacaaaagcttctgtattttctccacttcttattggatagttacttccctggcctggaggactccagatcattgtctgagacatataatgtcagctcttgggatgggtggaaagtgtgtttctcagagtgccagagagatttccttccctattctcacaataccattttgtggaaacacttgattgtttgggttagcaaatagcgggagaaggtagagacagacagaatttctgcgacctggatccctacgatggcctagtggaatctgattgtgctgacctgtgtccctaactcttaggacaaatgtctagggcagtgtataaca

SEQ ID NO: 135420 - DNA, 341 bp, Homo sapiens
tctttaagctcagggagaatcacaaatccaccatgctcagtacagagggctcaataaatggctagtgtgtttacaagaccacagaggcgcgcagaagctaaggttacactactagaaaatgaaggaggaaagactcacatccaggcctcccagggtccatgcccttcacaggaaagcccccacttctatgagcatgtttagaataaacacagtgtgatggttacttttatgtgtcaacgtgaccaggcaatggcacccagagatgtggtcaaacattattctagatgtttctgtgaagtcgttttttaggtaagattaacatctaaatcacactttgaagg

SEQ ID NO: 135421 - DNA, 363 bp, Homo sapiens
ccacacagggacatgtcaattactatctagaagcagcaggcttcccaggaggccctcttgacatgtgtccacagttccatcgtgattcttccagtcccacatgcatttattgaatgataagtgcaggccttagtaaccacctgagaccaggggcagaatatccatgatagatctgggtcctgaacgctgcctttgcccgttgcttccagaaaacagtggggagctctgtttcagctctagaaggagtggagcgggtgatgaattatctttactctaggctattcattttccctgggacacattttttaaatagagatttggaaaatgagacaaactaaaaataagaacataaaaagggagaaa

SEQ ID NO: 135422 - DNA, 760 bp, Homo sapiens
attgttgaggatatgaaacaactagaacactcatacgttgttggtagaagtataaaatggtgcaaccactttggaaaaccttttggcagtttataaaaataaagtcaggcacatagctccccaattttacaggaaattcaatttttaagggggaaaaatagatatatattcataaaaagacttgtgaatgaatttgtatattagttttatttctaatacatctaaactgaaaacaacccacatgtccatagacagatgaatagatacacattatacacacattatgtggtgtgttcataaaatggaaattaataaaaaggaccagactactaattcatgctacaacaggaatgaatctcaagaactttatgctgagtgaatgaatccatatccaaaaaagaatatattgtatactttcatttttatgaaattcaagaataggcaaaattattttatagtgatagaaatcatatcagtggttgcctgagtccaggagcatggatgattgcctggaaagggagcataagataactttttagaaatgttctgtatcttctttcgggagggtggagctacatgagtatataatttgtcaaaacttattaaatttatattttaaatgggcgcattttattatatgtaaattatatatgaatatagttaattaaaaaaactagttttatagctgcttgacacacaatagtcttgatctttttatgtatatcaaggaattagttttagcacttattatgtgcagagc

SEQ ID NO: 135423 - DNA, 892 bp, Homo sapiens
ctctaaactgttttgctgagattttgtctacaattttagtaaatctacaactcaatcctatgttatgtctttcagtccatgaaggagtgccataatttccatttgcttgggcctccattaagttctttcgtcaacattttatggtttttggcatgtagatcctatacatcttttgttatatgtgtattgggggtcggggttgtaagctattgtatgtggtattttttatttcagtttctacttgttcattggcaatgtacagaaatataactgatttttgtgtgttgatcttgcatcctgcaatcttgctaaagctaaactcagtttgttctaggaggggtgtgtgtgtgtgtgtgtgtgtgtgttccttgggattttatacataggtgatcatgttatctgtgagtaaggacagttttatttcttcctttccagtctctaggcctttctggttttcttgtcttatttcactgacgaagactattcaaaaggttaaatagcggtgttaagaaagaagatccttgtgttgttcttaatctctgagaacaagcagtatttcaccattaagtagaatgttggctataggttttagtagatggtctttatcaggtgaagaaaatttctttctattccaagtttgctgagagttttataataaatagatactgaatttttaaaatgaagatcaagtgggtttttggctttaaacgtgttgctatactagattaaacgtgatggccttctagtggtaaaccagactttcagctatttctttccatgtttctatgttctgcccttttttctttccttctgggactcagatgataggaagctcggcccttttgttattacctaaggtctctatggttctgttcaaggttttcaaactttg

SEQ ID NO: 135424 - DNA, 262 bp, Homo sapiens
acccaggaggcggaggttgcagtgagctgagatagtgccatcatactccagcctgggtgacagagcaagtctccatctcaaaaaaaaataaataaataaataaaagaaacttatcagcctcatataaagtcagttttcataatatcccatgtgagtttgagaagaatgtacaactaataattattgattgcagttctatatatatatatctgttaaattgagcttgttaattgcattcatatgcttaataaaagtaaataag

SEQ ID NO: 135425 - DNA, 550 bp, Homo sapiens
cccaaagataactgctaagtaataaggttaggtatcaacagataaggaggtttggatgaagttgggttgtcccccaaagcagacccggagaaaggtcttgggtgcaggcggtttgttagggtggtgtcgcaggaaggatagtaagctcctgtctcttgcttcaaacctgcccctctctacccagtgatgctggggctgggactctgcagccaggtcctgcttagccagctgctccctgggaggtgctgttagaggggagctgggggaagactgaaagtctggaggaggaagaaggcactcgctggcttttgtttgctttctgctcttgtccacaccaccccagcaatccttctgtggtctgaatgtttatgtcccttgcaaattcatatgttgaaggccttaccccaaggtgaaggtattaggaagtggggcctttgggaggtgattaggtcatagggcagagccctcatgaaccagattagtgcccttatgaaagagaccttagagaccccctcatcccttctagcatgtgagttcggagtgaggaggt

SEQ ID NO: 135426 - DNA, 266 bp, Homo sapiens
caccatgttggccaggctggtctcgaactcctggcctcaagtaatccgcccaccttggcctcccaaagtgtgggattagaggtgtgagccaccatgcccatcccagctgtctattttaaatagaagaccaggatgcatggtttggaatacaggccatcttgtctgtttgcaatacagaccaacaggtctagacgctaacatattttgttgtcaaggtaggcaatggaatgtaaagttccagccctgggtcaccacgggtggaatgg

SEQ ID NO: 135427 - DNA, 344 bp, Homo sapiens
gtctcaaaagaaaaaaaaaaaaagattcctggcccggcccccatcccagacctgctaattaagaatctggagggtagaattggattgagtagctgaggaggttgaggttcaacctggttgattgtcttgaccactccctcaggaagttggtctgagaactgggattggaccccagatgtacttactgcctctcagtttactgctctttgcacctggttgtactgctgccttttgagataaaaagttgtaaagaaggggacgtttaattttatgagatgacattttggttcttgtttcatagttttcttggggtcttactattgttttggtcaccctggtttgtt

SEQ ID NO: 135428 - DNA, 762 bp, Homo sapiens
gggaaaactggctagccatatgtagaaagctgaaactggatcccttccctacaccttatacaaaaattaattcaagatggattaaagacttacatgttagacctaaaaccataaaaaccctagaagaaaacctaggcagtaccattcaggacataggcatgggcaaggacttcatgtctaaaacaccaaaagcaatggcagcaaaagccaaaattgacaaatgggatctaattaaactaaagagcttctgcacagcgaaagaaactaccatcagagtgaacaggcaacctacagaatgggagaaaatttttgcaatctactcatctgacaaagggctaatatttagtttgccttctaaccttcagaaccctgccaattctgagagtatcattactattatttttttttacagcaatatcccctgtgcacaatgcacccttgcaggatttctgcctgactgtggcccatgcatagtgctcagtggagactgaaatatttctctgctaggctctgttctgcagatgcatttgcagtgagctagaatacgcttgcctgccttgggaagctttgaggcaacaatagcgtgaaaccaatcacagtaattatcacattaactcatgtcattttgttcaaatactttcaacctttaaaatgtgggagctaagctctaagatccaatgctgtctctagcatcctgatgcttgtatagcgtacatttagttaaaaggaaactcattttgaggttataattagcaagaaaaa

SEQ ID NO: 135429 - DNA, 379 bp, Homo sapiens
ctcctaagaaacttgcgtcctctgaattcatgtaacatttacttatctctcttcagatacctaattacaacccagactaagcccgtggtacatgccagttactcagaaggctgaggatcacttgagcccaaaagttcaaggctgcagtacactataattgggcctttgaacagccactgcactccaaactgggcaagatctagtctctttaaaaaataataataaaaaaaaaagcagccaggcatggtggcacacacctgtagacccaactactcaagaggctgaggaaggaggacggcttgagcccaggagctcaatgttacagtgagctatgaattgcaccactgtacttcagtctgggcaacaaagcgagactgtc

SEQ ID NO: 135430 - DNA, 636 bp, Homo sapiens
atataaggtcacctgtgcacacatgttcacattctgtatttgatcagatatgtacctgccaaacttttggagtgagataattagaatgacagtagttgaagctgacagtgaatttgaggtaaagctggaaagaatgtttttgaattttgcaaataatacattttcaagccagattaaaattgaataacttactttctagcttcaagggggtaattaagtgatcctctaacccaaattgcttttccaaattttgtggtagcagtgaataaactgatgcctcctgcttatttagacagcagccatttttgtttggtttggtttggttttgcggtgattttttttaacctagaaaaaatacaatttaaaaagcaatcatgttgttttctttgcctttgacagatgtggccttgtcaccacacagtaagccagaacacaatccattcctgagtcatagtaggatagtttgtgtaattctaaatgcactctccagtttaagagtgtgggtccctttttttctatctgaaattgaagatacaggtcagaaagatggtttaatgaatatgaattttctaaacatcttttcagtgtcttttaaggatatttttgatattacaatataataaagttaaatcatct

SEQ ID NO: 135431 - DNA, 198 bp, Homo sapiens
ctcatgaatacataaatagacgggctcgagaatgaatacatgtgctcatgagtgtattaaaacatgacatgaatgtataaaaatgtgctcatgaatgcatgaaaacatgtagtcataaatgtataaaaatgtactgactgcatgaaaaggtactcatgaatgaatacatgtgctcatgagtgtattaaaacatgaacg

SEQ ID NO: 135432 - DNA, 225 bp, Homo sapiens
tggctcactgcaacctttgcctcccaggttcaagtgattctcctgcctcagccttccaaagtgctgggattataggcataagccaccacgcccggccacaaggctttctttaatactcatccagtgagtgactttacagcaaagaagaacatcccttccaccctttctctcaggcctggttacagggccacatccaccaccacacaggaccagcctgggcacctc

SEQ ID NO: 135433 - DNA, 309 bp, Homo sapiens
  misc_feature (95)..(95): n is a, c, g, or t
cttaccaaaaatccagtatccttgccatccttgccaaatcccactaaaccaaacaacgttccttctgtgcccagtcctagtattcaaaggaaccntactgccagtcctgcacatgtgtgatagttgaaaatgtgaggttgctgaggtcttggtggggaagtgcgatcagggagaggagccgagagctgagaaagaagtttgggaaacacttgttgggggcagaggaggaagagccgtgaatgggaacaatgggagaatggcccttcaccttcctcccagacatgaggctctgcccttgcagtctcatct

SEQ ID NO: 135434 - DNA, 322 bp, Homo sapiens
aagcgagaccctgtctcagaaaaactaaaaacgggtatctttgaactgtctgtctgatatcttggtgggctatccaatgggcagtgcagcacttaggtgaggtaagaatttggaacagcctgcacatgtgtgatagttgaaaatgtgaggttgctgaggtcttggtggggaagtgcgatcagggagaggagccgagagctgagaaagaagtttgggaaacacttgttgggggcagaggaggaagagccgtgaatgggaacaatgggagaatggcccttcaccttcctcccagacatgaggctctgcccttgcagtctcatct

SEQ ID NO: 135435 - DNA, 726 bp, Homo sapiens
tactttttgaggttccagttactcatggtcaaccacagtccaaggtattacgtggaaagttccagaaatgaagaattcacaagttttcaatttctcatccttctgagcaggatgatacaatctctcactgtcccactctgttttgtccaggacttgaatcatctctttgtcctgtatgtccccctgtatagtcatccctcggtatcacgtaggatttgcttccaagatccccccaagactacccaaatcagatgatcttcaagacccttatataaaattgcataatacagtcacatgccacataaggacatttcggtcaacagcagcccacacctgtgatggtggttccataagattacactggagctgaaaaattcccgttgcctagctacctcagagcagtcatgacatcatagtgcagtgcattccttgtatttgtggtgatgctggcggaaacaaacctagtgcgttaccaaacagctttaacctggatgtggaggaggatgacattgagaatctcttagaggtggttcatgaggaatgggttaatgaggagtcattggaactgatacaggaacatgtagctgaagaagaggcaagagaatagggaactggctgggcacggtggctcacatctataatccctgcactttgggaggccgaggcaggtggatcacttgaggtcagtagtgtcaggagtggtggcacatgcctgtggtcccagct

SEQ ID NO: 135436 - DNA, 355 bp, Homo sapiens
acagtttttaccccacctgttgtaattgaatggcccctattataaggatagtgcccagcaggtgcacataaataacaagaaaagatagttatttctctagtaattagggataatttcatacccaaatatatattttaaaaccatgtttgcttatgaagttgctagaacaatatatcataaatgatatgtttaatttttatctaaatattataatttaaagtttccttctgctaagtctgctaagtaaaaatgtttagcccctaggcccctttattttaaaaatattattcacaaaaacatcatcacaaaggccttatctgcaggcagaataggtgtttccccacacagtgtgcag

SEQ ID NO: 135437 - DNA, 328 bp, Homo sapiens
ataaacgagtaaataagagaagagaaaatcttgtaagaagccagagggaaaaaacactttgtttatagtggagcaagaatatggattacagtagacttctcatcagaaaccatgcaagtgagaaaagagtaggataaaatatttcaagctcccaatggccaaagctagaactgttaaagcaacagaataagatagtactggattaatatgcaaagtataaaatcaacatctctgagtccatttgatataagtaaatagttgaacatacaaataataaataagagtgaagagacaatggaaatctttatgcagaattccaagtaactta

SEQ ID NO: 135438 - DNA, 692 bp, Homo sapiens
agggagactcaatctcaaaaaaaaaaaaaaaaaaaaaaaaaatagcccattgaaaggctgtgagcaaggaagtaataaggtcagatttgcagttgagaatgatccctgagtctcggttttcttatctatgaaatgaggctaagaataataaaatagagaattaaatgagataatgcctgtaaacagtgcctggcatatagcttattattcatccagctaagaggcccttccatatgtgaagctttgctctgtgaggtctgtattacaatcacattcagttatagctaattatttacttatgtagctatctctgaaacttagaaatgaaatcatcgaggaaaaaggccatttcttgatcctgtctgtgttccctgttcccagcataaagcctaacacgtattaggctaatgtcaccgagcaaagaaagcatcaaagtggcgggtcgggccctaaacccacgatgggagataccacattcggccacaagagggcgcgtcacattttctccaagagaagctgggccgctgatgaaggacgggctccgggcctcccagagacacttcacctcctgggatcttgctctaaggaagcccggtgcgaaggaggtggctttctcaggtggtcgcgctagatgtccaaggctttatgttcggtcagatgagctgtataataaaatgaaagtgttaactggc

SEQ ID NO: 135439 - DNA, 190 bp, Homo sapiens
caaaccacagggaaaacagaaccaccctcttccttcttggatattgctgaatgctggtcttgtgaacagtaaaaagcattaaatggcatagttgtgccaaataaagtttccaccattcagaaaaggacttacaatagtttcatacatgtgctgctggattatttaatgaacaaataagtcacagttaaag

SEQ ID NO: 135440 - DNA, 766 bp, Homo sapiens
cccacgcgtccgaacacggtgcccccgtgtttaattcacagtggtactgccaggcctatcctgcgaggttgcctccaaatacagcactcagtgcttttctgcccttcagcaaggggtggcttggaacctgcactcattccccagtgcagctagttaagggaaatttcaggagggctaactgcctattagaacagaagaaacagcattttggggttaaaaaaaaagatgattttcttctttggcatggttgctaggtgaacaaagttgcctttgtagctctgaatgacttaaagtttcaagagtttgatttcattctgtttattattttcttactggaaaggcaaattgaaaaggaagacaaatttgaaatcattcctttactacaaaaggaattttttgaaatctcctaataaactgggtcagttcccccaccctgtatgaatatatttgaaatcatttccttcctggcgacttgaggttttccctcgtgtctcctccatctctcttcagattattagtgtttaaaacccgcttagcagtcaaggaatctgctgctttctgtgtgggcctggctctcctgctgtcattgtttctgggcagctcttttagaaaggagacacgcttatcactggccttgcagaatgaggcgcgaacaacccgacaggttggcctgcctgccaggcccgccttcctagaatgagttgtctgaaagaatatgctgatctacagttaaaatgaggaaccaggagaatccctgctggaggag

SEQ ID NO: 135441 - DNA, 323 bp, Homo sapiens
tagggagacagggaaagtgggctggactgaagagtttattttctgaagccagacatttgtttgggctgccattggacacttgagtaacctcaagagagggctggccagggcaggacaggtcaggggatccagctaaacgggaggtccttgggaatgacacagataactaagtgccgaatcccaggaggtcaaacaggcccaggaaggggcagactgaaactcatatcaacacttggaaaaaaaaaagtgacagaagacaggaaaaggggtcaggtggcacactccttgggcagggctggtcccaagcttcctatgaaagcaga

SEQ ID NO: 135442 - DNA, 413 bp, Homo sapiens
acagacagcgaggctctcaggtcaccggcaccagtggcaccacccacagggactgcagggaagggcgggcaggctcccgttcgttctcccagcacccagtttccagacgaagcctccctgggatcctggcttcccacggctctgcactgtccctttctcagaacttaacgtgggcatttcctgaggcctcttcctccggatgagctggtttcggcctgggatcccagcgtccccacaccctctggtgaccaccacatggcccagcagccacacagcacccggcacccacctgggcgtctgaggctggaggaagctctgccctttctttcgagtcatgggggtggggcggtgtgcatcactttgggcccatggatggtgggtgccatgcggccacgtcagagcagggcatggtg

SEQ ID NO: 135443 - DNA, 390 bp, Homo sapiens
catcatactgttttccatagtagcttcaacatggtgtccccactgattggagcagtgagtagtcaccagagtttaagcacagtcagtgccctgctctttgtccccagttcatcccaggtggttctgcccatgtagcactcccagtggttcccatgggacaggactggagtgggcttcccagacttgtggagagctcggagttccacatctagttcctctcatctcagaaaccacgagtctagggaaattgtgtgcgagtggtgttctgacagtttaggagaccagggtggtgcactctgaaattgaactgtttctcttaccagtggtggcatcacttagttcttctccccctacttcaggtgcattaaagatggtattcttgtcttaaat

SEQ ID NO: 135444 - DNA, 327 bp, Homo sapiens
catactggaccttctggtcacacgattaacccgagcgctaccaggcatacctggacctttcctacatgacaaatagttacagtacctgcctgcccacagcctggatagaagacccagggaaggcctaggtagcctcgttttacaccatctaagattcctgtggccatcactgattgtccctggatggacacactacctagaggccattccgtagcctggacaatgacatatggtttgacgcaaagaagtaagtactcaatcaggttccttctcttgggaatttgaatgaggaaataccaatatgttttgccacaggggcaaaagcta

SEQ ID NO: 135445 - DNA, 231 bp, Homo sapiens
tttacatctctgggcctctgcttggaacacatcccatgcaggtcctacttccccttcccaaaccttaaccccttctagcccccagcccttttttttgtctactcaattcttaccctttaagcttctgcttaagcactatcttctcagggaggcagcctctcctgagctcctggctcaagttagagcccatggctataaaagccagtaccccatataattcttcttttgaac

SEQ ID NO: 135446 - DNA, 566 bp, Homo sapiens
tacaaacacagggaaaaagctaacacaacctttaagccgcattaacaggatcaagggatgtattattagtcctgctagcctccgaaccattgagagtacttctgaaagacagtgcttacttagcttgggctccagattttaagagacccgttaataatttggaaggtttattagcagactgcagatccaaaaatggtcctcctctatttgggaagatattgcaggaaacaatgctctaggagagaccacagctgggccagccagattggtcaaatccaccctagaaatgaattagggagaagagatggcagccagatggctttttaaatgttgataagctgaagtgtggccagaaaaagagaccagagaatgagggaataagtcacctaaagcatgatggcagaatctaagcataaacgcttagcagagaaaataaacacactgtccatatacaccatgcccagccccaagcccagggcagatctgatactctcctgctgaccctgacacagcctcagaatacttctcaacacagaccgccagctgtcactgcccctgtgaaagta

SEQ ID NO: 135447 - DNA, 586 bp, Homo sapiens [sequence omitted]

SEQ ID NO: 135448 - DNA, 316 bp, Homo sapiens
aggggacaggcagcagtaggacattaactttgtggcttttatggttttgtcaaggagcagatttggcactgaaagatactgtcaagcattcaccaaggaaatggaggacatgttggtgtgacatggtggtggacagattggtacctggtgtagtctggaggccgttccctctaaatctcatgtggaaaggtcatccccatgtcagaggtggggcctgatgggaagtgcttgggtcatgggagtggatccctcatggcttggtgccatccttgccatagtgagttctttttttttttttttttgagacagagtctca

SEQ ID NO: 135449 - DNA, 606 bp, Homo sapiens
gactacaggtatacgcctccacgtttggctcttccttccttttaggtaaggattagcatgcaatgacacttctctgcctcttgctgtattcactgtccatcccactccagctgtctctccctagtagttggtcaagattgtcctcagtcccctttacagccacagagtcctccattgtgctgataaccacaggcctctgctgatggacattttccttgctcccattctttagcgattacaaattgaattgcaataaaaagcctgtgcttacaccttttggtatttttgctagtgtctctctacggtagattcccaggaatgggattcttgagtcaaaggttgaacatacatgcaattttgctatagccattgccaaattcccctgcagaaggcctgcatcattttgcattcccatcagctctggctaggagtgccagcagaatgcattgccaaacttttggatttttgacaatctgataggtaggaaatggtatctctgagtagttttaatttgcatttcttttgtttgagcaatgttgatcatattttcacagggttatgagccatttgcatttctttgtctgtgaattgtgtgttaatattttt

SEQ ID NO: 135450 - DNA, 358 bp, Homo sapiens
ctcaaactacatttcaattcctctttaaaagttatatatctgagcagtggtttaagcagaaaattctgaaaagcaatttagaacacaccgctaattttttatttttgtaatcagactgttaagtagaacagagctaaaacctgggaccatgagcaaggaatgagaaggattccagaataaaagtatcaaataaaattctttgcactcacctttctctgatgatttaaactcaagcagctctgacagagagaagtcatgaattttcatcaacttcacacatgtcatacatttaaaaacattttgatttgccctgggacccctgtatgtctctgaagcatagtaatagtgctgggatgtt

SEQ ID NO: 135451 - DNA, 742 bp, Homo sapiens
gaataaaacagtgagtgaacaaaatatactgtgctataatgttttgataaaaatattcaaaacggacttgttatttcccaaaaaacatactttcatgcagattgaaatttgcaaatgatagtttagaaaatttatctacagaattatttctataaaatcctgacttgcaatggcagtctgtttttatttaaagatttatttgtattttatggatatttagaatatcacacatttactaataaatttcacattatctgtaagtatgaaggatgaactaaaacatataaaaataaaagttatatatgaaaacagatgattgcaaactaatgattctttggattaaaatacaccagaagaaaagaaaatattttatcatagactgaaagttgggatatgtaaatgaagcaagagactttggaatgacaggacaatgtgagtagaacagaaaaactttacaaggtaaattaattattttagggagaaatgggttctctttaatgcgtgaagaatcacctggaagcttactaaatattgaactctggggccctctccttgcgtgattctaatggagatgtttatataccacacctttcaaatggaccacacctttgaagaacagtgatattgaggcttatatgcacaataaaatgctcatttctttctttatctccttttcaatgaattgtcttagtactaagtattatactaataacagtttggggtacctctgagttgggaaaag

SEQ ID NO: 135452 - DNA, 590 bp, Homo sapiens
agctattctgggtcttctgcctcgctataaaagaatcagcttgtagatatccacaaaataacttgctgggattttgacataccacagattgtttatctattcacttattgaaggacatcttagttgcttccaatttttggcaactacaaataaaggtgctacagacattcgtacataggtttttgtgggaagaggaaatctactcatttgggtagacaccaaggagcgcaattattggatcacatggtgagactatgtttagctcattaggaaactgccatagctatatgttttttgcatttgttcagagatttttcgttacaatgtcactaacatgattaatcctcagaataaacctttgggttgggggttattagccttgccttctggctaatgttattaaatgttattgctgaaagaaaccctgaaggttcctaagcctctaagctttctgagtgtgagatccacatcccctatcactgctcttctatggcttccatggcaccgtgagtataatagttgctgaattagtgtccactacacactgaataccaataatggaaaaaccacttcactgtacagatgaaaac

SEQ ID NO: 135453 - DNA, 551 bp, Homo sapiens
gtacatatctcaaaacatcatgttatacacataaatatatacaatttttgtcaattaaaaattaattcattaaaagtaaatatgatacagaactccacccaacattctctgtcaaattttcctcctttatttttcttcatagcacttatcatataacatatatatgataatatatatcatatatattatgttgctaatatgttttgctaatatatcatatatatgataatatatatcatatatattatgttgctaatatgttgctaatatgttttggtcttttcctttctatttaaatgcaggatccatgagaacagagattttttttttttctgttttacattgctctattcccagcacttagaactgtgtttgacacagaagaggtactcaataaataaatattggtgaaaggtgttcagagacgttatacttttatacccttgttgaggtccctaatatactcagtgtgtatgaacaacaaaagcaggtttatgagatttcaaaaaaagatactttcctgtccaaagtgcttgttttgctgaagatac

SEQ ID NO: 135454 - DNA, 260 bp, Homo sapiens
atgcggtatctgtactgctggtgagcactgtgccacatttgcttatagtacatgtgcgtttcattcacaatacgttcagcacaggtactactgatgagcagtgtcagttagaggctagaagtgccagctcagattagactgctcagactcgcatccccattctccctttagtagctccaccacctccttgagcttcagtttcctcagctgtaagtagagctcatggtaaagactctggttacttgttaagcccttaacat

SEQ ID NO: 135455 - DNA, 469 bp, Homo sapiens
atggttccaatgataatttgatttttagagcccttgcagtgcttttctagtctgattttttttctcctggcactgtggggactcccattcaatccttgatcatgccatctatgggagtggagtggatttccttgggccggttgctgccaagtggagaatacgtggtagatgctggactcaggactcacgggtctgtgagcactctcctagtcccatcatgtggactcccacctggtgccagtggggcttccattcagtccctgttgatattgcctgtggggatggaaggctcttcccttgggcccctctttgctcctgggtggggagtggggaaacactggacctgcatagtcctttgctgctgggtggagggctaagagatgccagctgtgctgactggtgctgctggtgtgggtgatgtgggcctaccggctgtactgcatatgggggaggggatgaagtccccctg

SEQ ID NO: 135456 - DNA, 524 bp, Homo sapiens
agggcataatgatacctatgtcatggagttaatgtgataattaaataacttaatgaatgaaaaactctcagcctgacttaatataaaattccccacatagggcagctacaaagtcagtatcttagtcatttattgctgtaaaacaaaccacaccaaaatttagtagctttaaaaaaacaactcttacttgctcacaactctgtggactggctatttgaactgggctttgccaagcaattctgctagttttactacaaaggactgcaggaatctgaaggcttgactaagattggatagtgatatggtttggctgtgtcctcacccaaatctcatcttgaattcccaagtgttgtgggagggacttggtgggaggtaattgaatcatgggggcaggtctttcccatgctgttcttgcaatggtgagtaagtctcacaagatctgatggttttaaaaagaggagttccccgcagaagctctctctctctttttgcctgctgccatccgtgtaagacgtgacttgctc

SEQ ID NO: 135457 - DNA, 456 bp, Homo sapiens
tgatgatcagttgtctcacatttggccagtgagagtctcttgaggtggctgctgtgtccattttgatctgacctggttgatcgttgaatgcttccttgctttctggcaggataaaatgtatttcaacctgtacttatcttgccttaacctgggacactccttttctttaggaagttggcttcagtcttaattttatgtgattgctcacttctttcatctaaactttaaacagatttgacacattgagatcagcacttttgcctttttttggtagtcaacaagagcaactgaggtgtcctgttgatgctagtatttaatgtcttaaaacttgtcttaaaaacagaacattttcctgttcaatttatataagcaaaaagacactttaactgtatccagccaaactcttctatggcatctctgaaagtaatttatactttgccagtttgtacttttgct

SEQ ID NO: 135458 - DNA, 701 bp, Homo sapiens
aaaggaagcactcattccatgtgtcctgtgaaattcatccaacttcaggaagctggaggaatacatatggccaagctatctgggcagagagtagacagggaatggaggttgggcacagtggctcacacctgtaatcgcagccatttagaaggcaaaggcgggcagatcacttgagctcaggtgttcaagaccagcctgggcaacatggctaagtcctgtctctgcaaaaaataccaaaaactgagctggatatggtagcacacacctgtggtcccagctacttgggaggctgaggtgggagggttgcttgaccccgggagtttgaggctgcaatgagctgtgattgtgccactgcactccagcctggataacagaatgagactctgtcccaaaaataaaaaataaaatcaaagacacttaaaaagatggggaaaaggaaggacaggcacttaagcaagttataagctactttcctaactacacaagtggaatcttaagctgaggttcccaggagttgactggagccagagaagacagacctataggagcacccaattggagtcaccctccatagtagcccatatgtcttacatggatcagctttcgtggggcccttttactccatctggggaagggcgtcagatctgtggctctcatgtactgctcagtacactgccattcccagttctttttttcaaaaa

SEQ ID NO: 135459 - DNA, 727 bp, Homo sapiens
ggagatgcccgaggagacccactcagctttttgaaagatcatccctcctgcccataggattcagctatgactgaaaaattgaaggggcaattggacggttgaactttataaatgatctgcttctagatgtaaggagtcatatgatatatctaataattctatttaatcctatctatctatctatctatctatctatctatctatctctaaattatacagttaaattgatctctatatagatagatactctctatatctatacattgtctatataagtaactaaattagaacgatttggattcttcaaatgatgatggttttcctagttcactgaaatgacaggatagtttaccttgggtttatgaaataagcatggttgaaataattggcatcctgcacggattctgaatattttgcagataatttagggaaggagagggctcactgggataaaataagtgcacatgcagcaaagattttaatattctcattcttctggacgtctaggaattacagtgacataattcactgaaaatgtaggatagttgtctttttatatgacaattcattttttcttttcttagcatttttccccattaattctaaagagagactgccactgttaaaaaatttaccaatgcttacacagagtattgatgttaaaaacgacctaaatgaacagatatttaaacaacaaatactaccaaagagtgatgtgtaaagaata

SEQ ID NO: 135460 - DNA, 161 bp, Homo sapiens
cggaccggcactagagctactccagcctggcataagagctactcagcctgggcataagagctgaactatgaccaaatgtcctatggtacatctatttaaaaatacatttatggtttaattgtggataggtggtagagtttccctctatagtcttgtactgt

SEQ ID NO: 135461 - DNA, 891 bp, Homo sapiens
gccgtcattgttctcccacacaaatccaatattccaataaaaataaatttcctccagttgcttgatgtgacacaagcgtttctaactttgtatatgctcttcctcagtctctaccattctttttccttctttacctgtctaatttctatttttccttgaaaacccagtgcaggcatcactttctccttcttcctaggatgctatgggtgtttccccttctctgattaccaaaagcaccagttgtacacatagtcccagctccattacttgatgaccataactttggtttgaaacttaacctccacaatcctatttccctttacctctttaagataatgacacatctacctcttggggtcactataagaataatagattccattcaatatatgatgactggtgttattattttaaattattgtagtcattgttacatgcatcattattctattaactgatcggtttttctaatcagcctgaagggcaggttcatgtgtttgttttgttatttctttagtgtctcaaggaccagaaataggatgggagttcagtgaatctctactgtgtaatggaagagaaaaggtctctataggagccaaatgtccagcttcacaattggcctgttgtgggatattaggcagatcatttccctccctgggcctctgtaattttatctgagacacagaatgaaggaattagaaggtgactaaggtctcttctaattacataatgttattgaacttatcaaactataggatgagatgctttgatgatttttatgttattcctcaaagagtccactctaactccagggtctggtgcaacccaggtccaggctctcagaagttcactgccaaatctgaaaactggtttgtactgggtgggatgaat

SEQ ID NO: 135462 - DNA, 367 bp, Homo sapiens
ttcaaatttccatcaccacaaacatcctccagcagtcagcaccaaagccagatcacgtgacctccaatccatctgtagactgaaacgataacttgtttcagttatttcaaaaatttcacagactttatacgacttgttcccaaatctatatagatggtgtgataaggaaccaaatataaattatatttaaaagccctactgatccctagtagctttcagtcttttcatcactcaagtcactgaaagtctaactacttgtacaccaagaaccatttttgactttgaaagaaggtcctctgagcacaaagtgaaactgcctttgcaaaaattgtaactgaggaaattatgacagtgaaagacatcagac

SEQ ID NO: 135463 - DNA, 387 bp, Homo sapiens
aaagccaataattttgatgggtccataagtcgaggaagtttaaactcttcaagctatatgcatatactccctcttcctgcatactgttcttagaaactgataaagttgtattttaaattttgagtctgtgttcctattttccataatggatggcattttattctcattttacaaatgaagaaattaagggtgatgaggttgactataagatacttaacacctaatataaagcacctgaagttccttaagaaatgcatgtttaaactacacattttaactatttaagtaggtcaaggcaaaattaatcaggttttactccaataaaatttaaaagttaatcaggttttagcctaataaaaagtcactactaaaggctaagcagaaaca

SEQ ID NO: 135464 - DNA, 429 bp, Homo sapiens
tgctgttctatgcacctggcacagcactgatggaaccacctggatgggcatggctacaggttggccaaagaccatagagaggctcagccccagacttaccacagcacaaggcctccgagctctgaggccttttctggctctggcattctgaagtgacatggagcacgacaggcagagagcaaggattttagtccaagaaaggcactatcaacacatcccaaagcagggctgagccaggccaagtgacgaaccaagccattctgtaatggctaagctctctgggccctctgctgaaggacaagggaaacacacacagattcagtctctgccaggctggccaaccacagggccttcctagtgtcagtctcacctctggctaggggtggagggagattcagacccagtatctcttggctataccctgactac

SEQ ID NO: 135465 - DNA, 249 bp, Homo sapiens
aagcagacagctctaagcccagtcccagggcacaaagagacaaatgtttagggtcgatgtataggctttgagctggtaagaaataagttaactttaatttattgccatatggtttagaaaaggaggagggggttgtgttttctttgtttcactactacaggtttttggataaaaagtgttaagagtcttggcgaaaagtttgtcctgctaaggttaatacaagattgtagaagtggcttgaaagtttgt

SEQ ID NO: 135466 - DNA, 263 bp, Homo sapiens
tggatgaaacgaggcttcacccctgagtctgcaaccttagacaagtttctccacaatgctactctgagatcaagatctcaactgtacatcctggagacaacacaacaacacaagggaataaaatcttatacaactgtcagaggtattgtggagttcaaattagatgatatacaatgacaccaaggaaaatacattgtgaaatttgacgagattctgaactcaaaaagagatgctgctctattcatttcaaaacaactcataat

SEQ ID NO: 135467 - DNA, 447 bp, Homo sapiens
aaaaatgtgtaagtgtgcagctgtcttcaaactcttaggcttaaattctaggaaggaacctgtaagtgaaatcatctgaaacagattggcatttggccaaggccccagggatagcaccccaactcctaggaaaaagccgaagtattttgaataactgagtgtatttggagactggggtctctctggaaaaatttctaaaaggaaatatttttaacccagacagactacatggctcactcacaagtctgtctatttggctagaaataaactatgaaaaggagcaaaacagtcaccactccccagccccccactcacctgaggaggaaagtccacaagccaggtgaacagagaaactggggatttcatttgctccataatacggtgcctattggaactgtggagaaactggcttataggaaaataaacaggagacatttctatttgtag

SEQ ID NO: 135468 - DNA, 676 bp, Homo sapiens
gaggactcacaggaacctaacctgtgtttccccaaggaacagttgttcaatattcactaattgaatgttttgttgcaagttttctagaacataactaccactaataatgagaattgactatatgtgcaaaagtatagatgaatgaaaacatggtgtgttcagggaattttagtcactcattatagctacagtatggtttggtaaaaaaggccagagataagtaagtcagcaagagccgtatcaagaaggaccttgagtgcccttctcctatagtactctgtgtagctctcttttagcactcagtccaaataccttatgtgatgcttatttgcatatacttctaattgcactagaaagttgtacactgtactctaagccttaagcatgatgataaagaaaacgatggcaatgatgatgataacgatgatggtattgacgataactgccattcattaaatgctttctttgtgccagccattattaggtgcactgcacatgtgatctcctttcttggcttctacagtcctatgaagtaggaggtgttctctccattttacagttaagaacactgaggttcaaagaagttaagtagcttgtccacagtcactcagctgtgtagcaatactaaaagtaaaatattcaagtcctggaagcctctcttctttccagcttccca

SEQ ID NO: 135469 - DNA, 511 bp, Homo sapiens
gctcctctgtcctccccgcagcacctttgctttggctctttagctttggctggtctctccccgcatctccaccagcccggcctatcctctccctagttacgcgctgctccgtcccggcctccgcacactccccagggaggcccttggccgcccggccgcctcctccccgcgtcagggcctcccgccctggaggcccgcgccgggccccttgctcctgcgagtgctcattacggccgctcacctcacaccccggtccgccccctccctcctagggcggcctccgcggcagcccccgcagctctgcccacgccgaccccgccccccagcaccaccaccacgggctccggcagtcggaaaaaaaaaagaaaatcaccgcgtccccgagcggagaccgaggcactgcccgccccagctgctgcccacgtcacagtgcaggcggaccggagccccagcggcagagcagcctgcgccccgcgggccccgccgaagagtagcggcccggggcgggggc

SEQ ID NO: 135470 - DNA, 265 bp, Homo sapiens
gtcagatatgaagagactcaaggcaattaattcacagactttctgagaacctcattccaaagttggcacattgacaagctgtggatgaggcttttttccttttgtttgcattaatataggtgtttgaaagatgagatctcaagttgcattataaatttcactctgattctttgcaaactttgaaatgcatctcactgtagctgagctgggtccagccatcagatcaaaggggtgcttgttcctgttgaagttttttttttttttt

SEQ ID NO: 135471 - DNA, 732 bp, Homo sapiens
gtccatggtctgtattgaggcttcttggaatgacttcagacttggacccccccaggatcagaatagaaaagacacggagaatgggaagttggtttgagaagacaaaaacataaattggctggcatcaggatgaattagattttgccagctttatagaaatggaattttgttcttccccccaaaattgtgtgtgtgtggagggaggccaagagagatctaggtaatgtgtgtgggcaagaatgtctaatctaaagagagccctggaagcctgctgctgaagcagaattttaatgtgggaaaggggggtgtgtagtgaaagggggaagaatggagatggcagggctctggaattagaggaggtcattcatttcacaaacatttgcagaccccctactttgtgccagatattggagataaaaaggtcagtgaggcatgacctttgggttcacattctggtgggagagaagacagataaaaatatcaattacagccacttatccatagcttagttttccgtggtttccgttacccatggtcaacctcagcccaaagacagtaaacagaaaattccagaagtaaacaattcataagttttagatgtgcattgttctgagtagcatgatgaaatctcttgccctcccactgttccttcatcacaagaagggtaagtacagtacaagatagtttgagagagagagagaccacatgcatataacttttattacggtatat

SEQ ID NO: 135472 - DNA, 418 bp, Homo sapiens
atttttttgcatgaacatgtaacttgtaattctggttatcagcgttctcatgtttcttttgtttgctgaccttggtagtttctgagaatttctggagggagtaatagcaccagcaacagtacatgtgagaatcttaagttacttcaggaaggaacattgaagggcagattttacctttcaccaggttattggggtctctagtttggtgttccatagtccatagttctcatggttttgtttgtttgtttttttgtctgtcgcccaggctggagtgcagtggcacgatctcggctcactgcaacgtccacctcccgggttcaagggattctcctgcctcagcctccctggtagctgggactacaggcgcgtgccatcacgcccggctaattttttgtatttttagtagagacggggtttc

SEQ ID NO: 135473 - DNA, 326 bp, Homo sapiens
cttgccatagctgattcctgagggtaaaactacgttagggagagcgtttgctttggacagagcggttccctgggaaaaaaccctctccagcaaggccattgaggcttgaatccttctggctctggctcctggctttgtggtccaggtcacattccttaaatctgtgatcctcaatttcctcatctgttgaatggggatgataatatcacctaactcacagaatcactggaaagattaaatgtgcactcactctctagatgttgcttatggtagtatctcaataactaataaaaacagacacacacacacacacacacacacacaca

SEQ ID NO: 135474 - DNA, 183 bp, Homo sapiens
gtggcgttctagaggatcccgaagatcactcggcctcccaaagtgctgggattacaggcatgagtcaccacgtctggcccactacagttttatgtatccaaacaagattagaaataacctaaatgcacatcaatagaaaactcattaaataagccactgtacatctatgcagtgtaataatat

SEQ ID NO: 135475 - DNA, 477 bp, Homo sapiens
tgcagcaacacagaaaaaagcaaatgctataatgttaagtggaaaatagtgttataactaaaatacagtcatgtgctgcataacaatgtttttgtcaatgaatgacagaacagactgcattataccactctggcccctataaggttataatactgtatttttactgtaccttttctataggatgtttagatacacaaataccattgtgttacaattggctacaatattcagtacagtaacatgctgtacaggtttgtagcctaggagcaagcagtaggctatatcatatagcttaggtgaatagtgggctataccacctaggtttgtgtaaatacattgtctgatgtttgcacaatgatgaaagtgcctaacaacatatttctcagaacatatccccattgttaagcgatgcatgactgtacatgcaaaggaaaaagactggagggacacatcaaatgatatttgtgttagagtgat

SEQ ID NO: 135476 - DNA, 697 bp, Homo sapiens
gttaaaaataaaacagaaaatggagtgatgagatacaaatacatttaatagaaggagagaatagagataattgtagaaaagcaatattcaaataaacaatgcctgagaactttccagattctataataaaactaatcttcagagtcaagaagcatatattaaaattaatcaacacctggatgcattgtaatgaaaccagaagacattaaagacaaatattaaaactgagagaaaagacagattatctataaaaggttgattattagacccagctaacaacagaaataatagaagcaacaagagtttccacttctggtaactgttgaatagctcctattggaccaatactcccacacataactataacttgtggacaaaatatcaaaacaaaactatctgaaggcactgcccaggagaagattgacacttggaaaaaggaatggcactaggatgagtttctttgttttatggctagctcaaaggcaggcactggattgtaccatgcagggtagctaaaattcagatagaaaccttatggtatttctggcttaaagaaccagattatggagtgagtttaaagcagtctcagcagctggaaaaggaggtaggaagtcttaaaaagagtcagagagaggaaacctcaaattctgtgtataaactttaaggaaagccaggttcttttttggaacataagaaa

SEQ ID NO: 135477 - DNA, 954 bp, Homo sapiens
acatttggaaaactaattttaggaaaaaaaccgcgtataattgcaagaaaaacaataagatacctagaaataaatctaacaaatgtttaagaccttaatggagaaaatataagattttattgagagatagtagacttaaataaaggcagatataaagcatgttcatggaagactcactatgataaagatgacagttctctccacttaatctatatattcaatgcaattccaatcaaaatcccaacagggttttgttttttgccttttgctgtgtgtgtgtgtgtgtgtgtgtgtgtgtgtgtgtgtgtgtgtgtgtgatgtatatcatattgacgcgtgactcccaaatatatagtagaggaggagagaagcagcatctcgtgagtatcacccgacagaataatttcgctatggagagggactgatggctctctcatgcatcatcatcggaggttttatctaatcagacgcgtagatataatacttcgctcttcttcgtcatcatcataaacactgagtagcggcaggacgtaggaacttcctactatattatactagtacctcgcgaggagcaggatgttctcctactatacttataactacagcatgtgatgctgctcgtccgcactgatgcccgacactcaacctactcgatcgacgaacaaacgaaacaaggtggcttgcttcctaattattagttcgtgcaaggaagcacatcatatccagcatggattaatctaacctcacaagactgatatatacaagagacggggcgagcactccatccgtaggaacctgccatccaccaacagcaagtcaccaaatcattatttattgactcctctacccaaattaattatttacttaacatgcaagtacttcctaattggctgtgttacataacacacgcaaacccagtccttacaaacagatggtagtgctctgccacccacc

SEQ ID NO: 135478 - DNA, 172 bp, Homo sapiens
tgttcatacttctgaaaatcagaatgtggtcaagaaatgaccagagagtagaacagctttcagattgatctgcagatgcttttaggacagcccagccccggacaccctctgtgcttgctgtgctaataggatattcgactttcactctctcagctccggttacatggaaagg

SEQ ID NO: 135479 - DNA, 513 bp, Homo sapiens
ggtagaggtgcgagtataacttggagaatgtgaagtcaaactgattctgtgattctttggtcatctggctcctagcttagctcttgattcactaactatatcatggagtgtgctgtgtgccctctttctcactccatagctacctccaccctgggaggagggaggcctgaggggagagagaaagattgggaacagctggtcaatggagcagtgagaacacacacaacatttatcaattaagttcaccatcttatacaggtgcagtttgtggtggccgaaagtaattacaatagtaacatcatcaaagatcactgatcacaattaccataacagatgtaatgaaaaagatatagtgaaaaacagatataatgaaaaagtttgacatattgtgaaaattaccaaaatgtgacacagaaacacaaagtgagcatatgctgttggaaaaattgtgccaatagacttgctcaatgaagggctgccacagatcttcaatttataaataacataatatct

SEQ ID NO: 135480 - DNA, 445 bp, Homo sapiens
aagatttgtttcaaacaggtttatgaacaatgcagaagaaacaacatttctacaccctccataggaaactagtttggtgtatatttttctttgcacatttaatagatataaaatataacttttaaagttctcatatacatattgtgcacctttttgttgtacaatttataatccgtgcaccgattataaataaacagttcagtgagttagcacaattattatgtacccatgtagccatcacctcagaatgtttgctcatggctggttctagtcatctctggcatcatctcattcccggcacaatagatttaatctgttttagaacttagtaagtaatcttttgttcctggcttctttcacttaatatatttataagattctttcatgttgtatagtggtagtttattattttttattgctgagcggtatcccattgtatagatat

SEQ ID NO: 135481 - DNA, 478 bp, Homo sapiens
agagaacgtaccaaagagcagagtcagaagtgaggaggtttagcttgtttagggagttgcaaatgggcaaaatgcaagctgattttggttgttagttttcttttgaattgcattagaaatttaaggcaaaaaacaggcagaagccagattacagagactttcaaggcccaaagcagtaagggtttttccacagaccttggcttgaatgggggtgaatgactactcaatcattttcttattagtcggaaccctgaaattgctttctcatgccgcacttattcccattccctggattgtgtgtgaagatgtccacgagcaataaaaggtgtgtaacacttagccagccatttctgcctgggttttagatacatggcttttacgtagatagtagttgatggctttcatttggaatttttttttttttttttgagatggagtctcgctctgttgcccaggctggagtgcagtggcacgatct

SEQ ID NO: 135482 - DNA, 518 bp, Homo sapiens
gtctgcgtgattctagaggatcccggttgacgtggcttaaatgaaattagggagacctctgtttagtgatctgggaagacctatggttgattgttcagtctgcctgtactagttgcatgtccctgaagaaaagtgactgctttttccccatctccaaggttactgtctgctctgtggacaccagaaggtttcggagtagaacagttgaggtgggccagtgagaccaggacacaggtttaagatacttcaccctccatgagccttaacagaagtggacattttcttgagcaggaattatgcattaaatcttgggatgtacatagcacagtgtcttgctcccaggtgctcaatcaatattaatttaccaataagagaaacaatatggtacaaattaactgccaatttctctcaatcaaatactttgggtcctcactgaccccaagaaagccatcagaatgttctcataggaaactcactttgtaaattaaggcactaccagcaagactcaaggaacgaaa

SEQ ID NO: 135483 - DNA, 349 bp, Homo sapiens
gagaagaggcaaatctggttattagaagacatgtatgaaaaccaaacaaggtggcaaggacagcttgaaagaaaattccaaggctgctgacattcctagataactgcagctgtagttatgcctgctaaggtttgggcgcatggggcttggcttttgtcagctccctgggatttattttcccaaacaaagaaacctccaggttaggggcaccctattcattcccatcacctggcatgatttaaaggataattgcttagaattaaaatattgatccagattttttatattccccatcgctttttgtttcttctgggctgtagccagagatcattgattggcgctcaggaat

SEQ ID NO: 135484 - DNA, 178 bp, Homo sapiens
tccttctagatataagcatatcctcctgttcactgcacctagaaatcctctgccatgtttgtgtggcacaactataatgctgcttccacacttccgttgtttcattcttgttccaaatctctgatccctcaggatcactactttttctcaggatcactactttttctgggccaagcgc

SEQ ID NO: 135485 - DNA, 300 bp, Homo sapiens
  misc_feature (280)..(280): n is a, c, g, or t
  misc_feature (282)..(282): n is a, c, g, or t
aatatgatgaacggagagtctctcctcctgacgtcgttatgcacattgctgtgattcctaagcttgctttgttttaaatacacattcttgaatgaaacaagcccaaagttttgtggttaattatatattatactaagtgtgacactaatagcctttcagtttggagagactggttcttaaaactgcggactctggctggtgagtggcccgccctctccttgctgttctaagcaattttaaggtctccgttggaatatttgactggtttgttcatcatatnantggggccggctcgatcga

SEQ ID NO: 135486 - DNA, 118 bp, Homo sapiens
ttttgtgagcatcttgattttaaaactcatgactgccttttgcaaccccagtccaaatgaagtgattcaaaagacaacccttggccgtgcgcggtggctcacacctgtaatcccagca

SEQ ID NO: 135487 - DNA, 210 bp, Homo sapiens
tatattctgctttgctctttttggctcttattgtatttggtaggaatctgtgttcatgatagatgctatatgtggaatatgcattttggagaatgattttagacagcagtgagtgggagggaaaagaaaatggccctgacagatacaagtagtctattttgaattttgtaagttgaatagaattttggagagctatttgcaaggctgatt

SEQ ID NO: 135488 - DNA, 193 bp, Homo sapiens
gaacaaattgttttgaactcaatcctctttattttagaacctccctttattcctttccagagctactggtactctaattcctgagtcttttgagcattttgtgttgtaattagagttggctcttggttttcctaattactgacttagtatttagctcttattgcccaggctgtagtagctcttattgcccagg

SEQ ID NO: 135489 - DNA, 682 bp, Homo sapiens
gcgctctccagttccctcctggtcacctgctgcctgatggtggctctgtgcagtccgagcatcccgctggagaagctggcccaggcaccagagcagccgggccaggagaagcgtgagcacgcctctcgggacggcccggggcgggtgaacgagctcgggcgcccggcgagggacgagggcggcagcggccgggactggaagagcaagagcggccgtgggctcgccggccgtgagccgtggagcaagctgaagcaggcctgggtctcccagggcgggggcgccaaggccggggatctgcaggtccggccccgcggggacaccccgcaggcggaagccctggccgcagccgcccaggacgcgattggcccggaactcgcgcccacgcccgagccacccgaggagtacgtgtacccggactaccgtggcaagggctgcgtggacgagagcggcttcgtgtacgcgatcggggagaagttcgcgccgggcccctcggcctgcccgtgcctgtgcaccgaggaggggccgctgtgcgcgcagcccgagtgcccgaggctgcacccgcgctgcatccacgtcgacacgagccagtgctgcccgcagtgcaaggagaggaagaactactgcgagttccggggcaagacctatcagactttggaggagttcgtggtaagatgcgaacgcc

SEQ ID NO: 135490 - DNA, 721 bp, Homo sapiens
ctgacatgttgattgcacttcacatcacacacaataccgagggacttattctgtaaggtttctggccttcccctttatcataattgcagagtgtcacattgatctgatggagatggatttagaacagttgttgattggaagctcttgataaagacagggagttcaaacacagactctgcctggaaattcagcgtgaacatccctcatctatcataatttaaccgatgagaaagatcaagttaacctgccatccatcatatctatttaactgtactccagagtgaattaaattgtatttaacaacttttatcttacagggtttgcacactgaaagagaacagcacttcttcatcaagttgttgctctctgtttatcaatttaagattttgaaacttgttctaaaacattcaatatccagtaaattcctttcaaagactttatggtccttaattttcccccaagttttgttcttactggtaataatcaatatcagtttagtactatagcaatggagaagtattcttaggatgcaatggtataaaatagtatcttatccttgaaaatagacgtgctcaattgaaataagcttggttggtattgcaagtattaatttggagtactttcagacattttaagaggtatcgttttagggccatagaatagtagagttaggagggcacctgaagatctaatttaatcctttagtttgcagctaaggaaa

SEQ ID NO: 135491 - DNA, 281 bp, Homo sapiens
agtcttgaagcacaaatgggcattagctaggtgagtaaggcatcccatacaaagtgctcgtggcacttgggggaattactgatggtctgaggattggcagggaattgggtgctgctggcacgtgtgatgtgaggtggcgaaagtgtgttctccctttagattctcttcatctgtggccttgcctgtgagggctctagctggtcctgtatgcaatgtattagcgggacatttaggtgtctccttaggaggtgacggatagactgtgtgagtgggaagagaag

SEQ ID NO: 135492 - DNA, 494 bp, Homo sapiens
cactgtccgtccagcctgggggacagagcaagactcagtctcaaaaaaaaaaaaaaaaaaaaaaaaagttagatagttgtcttgaggaaattacttacgtaattatttgaattgcaagctgaactaactgctttcttcatgaaacaccatttttacttgaaagagtggctgacagacaaactatggttaaatagaattgggtgtttggtagatacattctttaaccaggagaatcttgtcacttcaagaaaaactattgacagtatttgttgccaattataaaaattttaactttcaagcaaaaattggaattttggaaaacttgtgtttgctactttgagcttgacagttttccaatatttcaagaattttctgggctgggcacggtggcttacgcctataatcctagcactttaagaggccaatgtgagaggatggcttgagaccaagagttcaagtccagcctaggcaacaaagtgagaccccatctctac

SEQ ID NO: 135493 - DNA, 124 bp, Homo sapiens
tcagcttcagactctccagactgccttcaactcttactggaagggaatttgcaggtaaatatcccagctccctcactccttgggtgggttaacactgtccctggtgggacttagccccaactgc

SEQ ID NO: 135494 - DNA, 483 bp, Homo sapiens
aataaagggatgcagaaaaatctatcaagcaaatggaaatcagaaaaaaatcagggattgtaattctaatttcagacaaaatatactttaaaccaacaacaatcaaaaaagaccggggcattacataatggtaaagtgttaaattcaaccagaagatataactatcctaaatataaatgcacccaacacaggagcactcagattcataaagcgagttcttagagacctacaaagagacttagactcccacacaataatagttggaggcttcaacactccactgacagtattagacagatcatcaaggcaagaaattaacaaagatattcaggacctgaactcagcattggaccacatggatatgatagagatctacagaactctccacccgaaaacaacagactatgcattcttctcattgccacatagcacatactctaaaattgaccacacaatcagacacaaaacaattctcagcaaatg

SEQ ID NO: 135495 - DNA, 320 bp, Homo sapiens
tagcacgtggtccacttccaggaagtggaggagtcagagcgccccacccctcatgcctcaaccttcagaactgacatgctcagcgcagaagggccacccctgggcatgagggtagaccatggtggtggtcccacactgctgagcgttcttcaagccttcctaaacatccctggataaaagagacagcatgagaatcacctagcctgacatgtgccggacacgtgcctgacacgtgcaatgttccttcagtgatctaaaatgacatcacaacataaagctcctggaagatgttctgggtagtggtgcctaaagtgatgccc

SEQ ID NO: 135496 - DNA, 432 bp, Homo sapiens
cctcagcctgtgcagtagctgggattacaggcgagagctcatttaattttcttgacagataatcttctgatccatgaactgatttgaatgtatcatttactagctctcttcttgggcaagctgctcaatatttgtaaaacatttttaaaatcagatatcaacctccaagagtgaggattggataaccttagaagggtgccagacacatatagagagcttaacaaaagatagtaaattttggtgcttctgagggccagagacagaccatgtccattatatctttgctatatattatagttgtgagtgatttttaaagcagtacttttaatttgcttgtgaacccccaaataatttttgtaaaactgtccctcttgcacacttttggttaacttacagcattttacatcatgcgttagttgaaaagaatgcagt

SEQ ID NO: 135497 - DNA, 131 bp, Homo sapiens
aattaaaagcatgaagcatgggtagtccaattgaggccattgaaccaaatccagccaggccttattttggagcccatgaacacagccacactcacacatttgcatagtgtctatggctactctcacgctac

SEQ ID NO: 135498 - DNA, 396 bp, Homo sapiens
gataaagaataaaaattggtttctaacagaccataaagtaagcaaacttacaccaaccatgatcaagtgaagtagatgggggaaggagaagaaatatgtttgaaatgacaaatagcacagaactgtgtactatgtagctctttatagtactaactttgaaacaaacagcataatttctaaaaaaaaaaaatactaattaccaaaattacctcagaaagaagaagaaatcctaaaagactataaaagaaattgaaaacagagtcagatatttagcctttaaaaaaaaagacaccaggtccagttgatttaatgggtgattttactgaaatttcaaaaattcaataattctaagaagcagattattcccaaattatataaataatcccaaatcccaaa

SEQ ID NO: 135499 - DNA, 218 bp, Homo sapiens
atagcccacttaaaataagcaacaatttaaggaagacttttatttaagtctttggatgtcttctgatttctgctttgccttttcaggcaacaaataaggagcctggcaagcagcaggagagagccagccccataagggagacaggctacaggctgcaggcaggaaggacagggtgccgcaattggaaattttatcctaaggttggaaataatgttacc

SEQ ID NO: 135500 - DNA, 708 bp, Homo sapiens
  misc_feature (475)..(475): n is a, c, g, or t
  misc_feature (494)..(494): n is a, c, g, or t
  misc_feature (708)..(708): n is a, c, g, or t
ggcctggataagcacgtctgaaattcacagggctgccagtgggaagggacaatggccagcagcaggctggaactccaggggcttgggtgaagctgtcatttcacaggtgaaatttctgtcttgaaacctcggtttttaagaccacctcactgcacccggccttggctttgttttgtttgttctgttttgttttgtttgttaagatgggttcttgctttgtcacccaggctggagtgtagtggcacgatcatagatcactgcagcctcaacttcccaggctcaagcgatccttccacctcaacctcccgagtaactagggctactggcgcatgccactacagccagctaattttttaaatgtttgttagagacaaggtctccttctgttgcccaggctggagttgaactcctgggctcaggcgatcctcctgccttagcctcccaaagtgctaggattacaggcgtgagccaacanacccagcatccatgtctgnttgttgttgctgtatgtacctcacacagggtctggcactcagtaaataatgaataaataggtgttacatttaaacaatgtgtaaaccagccgggcgcggcggctcatgcttaatcccagcactgtgggagaccaaggctggtggatcacttgagcccaggaggtggagattgcagtgagctgagatagcgcaatgcactgcagcctgggtacgn

SEQ ID NO: 135501 - DNA, 225 bp, Homo sapiens
cactcaaagcttactgccaatgtctgggcctttgtaaatttgatctgggtttagtcctgtctagagggactcggcttccttctctcccctgtagttttttagttgacgagcctttttgtttcctaagaagctttatgccagttccctttttcacaagaggtaacttgggtctctcagtcacttttggacatgaagcacctagtctttagacttagctatcgatca

SEQ ID NO: 135502 - DNA, 319 bp, Homo sapiens
tttgtttcttggccttttccccttctagctactggcaggttcaagtccacctctgaacctgccacttcagagggactattttccttattgagacacagtggaaagtcccagggagtggcagatgtaggccaagtttgggtcatgtacacatccctgaagcactgtgcccagggcaatgatgtttcatgattggctgagcctcagtaagggaccacctctgtgcctggagtgcagggcactgtgattagcaatgtcccaaggaccacagtggagggagagaggggctccctaaggactcaggagatggggattggatgtt

SEQ ID NO: 135503 - DNA, 368 bp, Homo sapiens
tggctgctgtggccttccttgatattgcagaatacactgagcaacatggtacacacgcttgctgtcagctgtcatactgccactaaacagcttccacttcagcatttgaaatgttccacttacagcctatgagtgattcagcctggtgccagtgaaacttttcctgccttgaactgctcaaagcccaagcaggctcctggacgttcaagggcacagactctctttgaatgtgcacgatgccaatctgacaggccagcgccacctctgctcgggtcccagctcaacgtctctgctgacctgctcacacgttcatgtacctctaaaacccagcattgcacgtctgaagctgcaatcacccctgcccctct

SEQ ID NO: 135504 - DNA, 320 bp, Homo sapiens
tgtacatcctaattaccgtggggtgttaaatatgcagatgctgattcagtaggtctgggataggggcctgggattcagcatttctaacaaactcccaaatgctgaagcaggtggtctttgaaccacattttaagtggcaagatttaagaagccctttaaaataccaattcctaaacactacctagagatttttatttaattagtctgtggtaggtcccaggtatcaatagtttcagagattttctaggtgattctaatgtaaagatcaagaaccactgggttaggagatctggatttcaataattattattttggcagct

SEQ ID NO: 135505 - DNA, 729 bp, Homo sapiens
atccttatcatccttcttttgctgtggcctgatcaaacagatttagattctctagacatttgttgaatactttctacataccaagttctgaaatgggtattttcacagcagcatctcattgaactcttacaccaatccaggaggctattctcattttctttctgttctttctctctttgttttttttttttttttttttgacggaatctcactctgttgcccaggctggagtgcagtggcatgatctcagctcactgcaacctccacctccctggttcaagcaattcccctgcttcagcctccggagtagctgggattacaggcacatgccaccatacccggctaatttttttgtatttttaacagagatggggtttcaccatgttggccagactggtctcctgacctcaggcaatccacctttgtctcccaaagtgctgggattatatgtgtgagctactgcgccaggcctacaatcacaaacttattgtataatgagtttgcaattttttttaacattgtataactttagataggggatcttttgattgaattgattgattaatccattgattgatttttagagacaggtctcactatgttgcccaggctggccttgaacctccgggctgaagggatcctcctgcatagctgcgattataggcacgtaacacggcacccgcttggataggagatttaaaaaaatatattagaaaagaagactcctgg

SEQ ID NO: 135506 - DNA, 242 bp, Homo sapiens
attacagttgtgagccaccgcgcctggccccaaatagctcattttctttaagaggtggcacacttggatttttctttctcttttgtaatattagagtcagagaatactaatatatggcgaaaccaatctaaaaattcttaagggcattgatatcagataaaaagctctgtgatgtgatctcgctgcagacattgcattgcaagcactctggtcttctgtgagggaagggtaccaaccagctc

SEQ ID NO: 135507 - DNA, 537 bp, Homo sapiens
aacatgcaacagtaatggctctaccacgcatattagcagcctcagaaaatatgaattaacagctaacaagaagcctcttagtacggttggtacaaaatatcagaaaaagatgtcaagcctgctattcaggggaaagcatgccagatattctgatgacagaagcacacaatctaaaatgtggctgacttaatgccgtgcagaaaaatggagggcgagagacagaggaaaaaaaaacacaaaacacacaagtgactgccagcagtgagtccttccgatcattcagtgacattagcctgaaaacctccatgaacctcagccaatggtatcgcaattgctgagataattattagacaagactgggaactcaacaatttaagtgtgaaagcactacaggatcaatattaatattgatagtaataagaagaaacaaacagatcattttcacatggagagctgcaagctttaagatttctcctattttacacgtgcccagcaatggggcagccaagacatgaacacaagtgcatgttaccatgg

SEQ ID NO: 135508 - DNA, 301 bp, Homo sapiens
aatgtctgcagacatttttggttgacccaactggagaagtgctgctggtatctaacagcaaggaggggccatgtatgctgtaaaacatatatgaaccctccaccccaacaacaaaaaaatctggcccaaatgtcaatattgaatgctccaactgaaaaaccttgcattagagcctaatttgctgctctacactgtgagattgagctttctataacaatagttgtctccatgtttactttttcagttaattattttacttcaaagatttttttttcttaatttttagagacatgttctcact

SEQ ID NO: 135509 - DNA, 470 bp, Homo sapiens
gtgtcttgactggctgagtgctggtgtgtggacgggaaccagcctaaggaaagcactcttgagactcttcatcctgcccgggtgtgggtagcctgggtctgtcactcgtgcccacacccggggccccactcctggcttcgataagcgacgtcaccaatgtctgccccagcacctggacagactcttgtggcccttccttctcgggaagcccagaaagaactgcagtgactgagacaaacccagcgctgctgcggggtgtgtggaggcatcttgccatagtgggtggggtgcacgtgccacaaacggctcactcttgatgatgagggtgactcacgcatccccttgtccccacagttctgtttcttggactttatcctaacaaaacaatcatgataagaacaaccagccccaaacataaagacacatgtgcaacaatgctcgctgaggtgttatttactatacaaaaaatt

SEQ ID NO: 135510 - DNA, 369 bp, Homo sapiens
catatgttgattgatgcctcatgtctccctagaacgtataaaacccaaccatgctctgaccaccttgggcacatgtcctcgggacctccggaggctgtgtcatgggcacgccctcaaccttagcaaaataaactttctaaattaactgaggcctgtctcagatattcggggttcataaaagcgtggtgggccacgttgagaagtgcagtaaagccaggagattcttcctctcccctagcaggtgagcgcaaggagatccacggtaacccaggcccacctccactgactctcaaatctgtactgtcaggactcccttccaggactgggccctgcagtgagggaaaaagctacagaagcagaatcacagtt

SEQ ID NO: 135511 - DNA, 244 bp, Homo sapiens
ctgttggagagtgctccttcaagattttgcacattttttattgagttacctgtctttgccttaaggaattgtagaattcctttttatattttggatataagtctttgccagttataaacatttgaaaagtctcccactaaatgacttttcttgtcactcttaaaattatgccctttgatgaatgaagttctaattttagtataagatttatcaatcttttgcttcataattagtggattggtat

SEQ ID NO: 135512 - DNA, 809 bp, Homo sapiens
taatggctgattgcgattctgcccactgcactgttccctacagcttggtgctctgtcacttccttgggtgtggaaaagaatactgagctatgagagacagagacagagacagacagacagagacaaagagagagtgggagtgaggaattaaagggctggcctaggaagaccacaggaaaatatgtggtgaagaatctgcttgagtaaagatttccatgaaaccaccaataacataaattgtttactaaccatgtagcttccttgcctcaagcagaattaggaaatggctttgtcagtaaaagattctttaattgcccaaggaaatgaatctaatgaaggagattctttctgtattgaggtactctaagataagaaattagcaaggaaaagttggtattcttagtattgataataaaaccaaaattattttctgtggattctttagaaaaaatggaaagtaagcatttatctgaataattaataggcttgatgaacaaggaatggttttggtttctacttgtagaaagtacagaagagaaacaggttttatttggaagttagcatataatctagctttgtgtgttttggctgtagtattttaattataactgtggcttggcaaaaattccatagcttagttcagtttgatttttctggggtagaaagcatgctaaagaatttggccagttatagctttgtcctaaaaaggtgttagctggtgggaatggatttaagaggaaataaagagagtaacagtgttttgtgggaaaagtacccatagtcttattccatagttgttatatgtggtg

SEQ ID NO: 135513 - DNA, 365 bp, Homo sapiens
acagcatttggagtataagtggtttttttttacgtggatgaattatatagtggtgaattctgagattttagtgcatccatcactcaagtagtgtacattgtatctaatatgtagttttttttaatccctagctcctcttccatcctctcctttctgagtctctaaagtccatcatatcagtctgtatgcctttgtgtactcatagcttagctcccacttataagtgagagcatatggtttttggttttctctgtagctctttagaatcccaaactgtagcctaagggaaaggtttccaaggtgctctccttattgcactccaaagtatgatttttatctccctaactctatgaatctagcaaaca

SEQ ID NO: 135514 - DNA, 335 bp, Homo sapiens
cctgaacacagaggcactcactagccaggcaacttataatgaattatttaaattctctgaatgtcagtttttgtgtctgaaaagtgggaggtcttagtacttatgttacaagatggttgtgaatataaataaaataatcgtcttagtgccaacacagtcccttatatatattagccaagaaatatttgttgacttgttgaattaagttttgtggcatgctgtgtcatcatgcaaattgaaatatgggttaagaagcaaagtgtcaaaagagctagtatttgagtaaagtaagtggattttttagtatttttggcaaagagtaaaatttttggcaa

SEQ ID NO: 135515 - DNA, 173 bp, Homo sapiens
tgggtttgaaatttgtccattaaatttacttgcaccgtgctgttaggcaagttacttaaggtttctgagccagtttcctcctgtataaagtaggatagtaaaaacaccgtcctggcagggcgtgatagctcatgcctgtaatcccagcactgtgggaagccaaggtgggaaga

SEQ ID NO: 135516 - DNA, 810 bp, Homo sapiens
atacacatggagccaaaacatagttcttgcttgaaaataaacaatataactttgtccttattctctaagaggaagaaaaaccaaataatagtaatgtactaggaaaatttccataaatacattgatatctcttataccattttatttaaatcttaagttgatacaaacacaaatagaatcatacaaaaattttcatataagaacaatttaacatatttcttatacagctaaatatattaatcccttctgtaagccttacaggatattttgcatattaatgtaactattttatagcacatgtttattcagtcatcagtgtaacgggtacctactgagctccaattacttgtgaaaatgacacagggctaatttgtccgtacttcatcatttatccaatttgttccatgaagaggtatgactgttggctgtatctggtgtattatgttgaataaccaagatagaaggtctaataaggcttgatttctgacattaagaaatgagaggtctagtgtatgtcttactttactactttaggtgaatatttcatgacaagtaaatattttttaaaaactttgacttctcaggccacagagaaactctcaagaaaaccaagtttagcttacaggtatttctagcatctgtgagttgttaaagactcccaaaccataaaattagatctttaaaaacatgcaaaaaggaacagacaagctgaagggttaataatgagaagcacgtgcttactctctgtgctttaaccacatggacactgttgtcactgctactaatgctcacgttttcaggtttctattt

SEQ ID NO: 135517 - DNA, 210 bp, Homo sapiens
ggagtttcaccatgttggccaggctgggcgcgaactcctgacctcagatgatccacctgcctcagcctcccaaagtgctaggattacaggcatgagccactgagcccggccatttgtgtgatgtttaatgcctcatcttccagttagattggaagctccataagagcaaggaccatggtgtcttccttaccgtcatattcccactgctta

SEQ ID NO: 135518 - DNA, 899 bp, Homo sapiens
ctagataatccatgaaaatttaaaggacagattttaacaactttatgctaaattgatagatctctaggatcagattgccatcactctcagatgcgaagcttccaaccacttataggttcctgatatcttgcttttatacagacctaatttctcttcctttaaactttcttttcctcagttgctatttgattgaaatattgagtcattaaaaatttccaagtgggaatttttgtgtttcttcatctatcatgaagctgctcaaataagtaggtgtttgaataggagtagaaacagtaataggctgaagccagaccaatacagcttcagctaaatgccgaccttgctaaagtctgggaggaccggtgtggtattctacaatgtacaagtctgtagccggtgcccttaatatgttggcttcatgtctcatgactctcttctgtaaatatgcagtttaaaaaatacaagttattctgctgtagaagatacatttgcaaaattgatgtatcccctctaagtaaagttggctaaacaataaggacatatttataattaatgaatttgagaagaatgctgacgatatgcattattctttgaagttaacatttttcaggtcctaaataaacaaaaagtaggttacttctgtctggagtgtatgcaaggggtaccatcttgtccttggttcctggctgctattccaaggtgctataaagtcagctaaagagagcaatcataatacattgatagcatccctcaatgtgtttctgagctacttgagaatcttatttttgaataggtagcaggaaaccatctttgcagggcagcatgggcaaagggattggagggactattattataaagatccactgaactgcttcagtatcataatatcttaaactaaa

SEQ ID NO: 135519 - DNA, 140 bp, Homo sapiens
acctcatgatccatccgcctcagccttccaaagtgctgagattacaggcgtgagccaccgtgcccagccaagcctatcctttaaagcacgtgttttaaatttcgatgaagcccaatttatctctcagtgtatgtttcttt

SEQ ID NO: 135520 - DNA, 199 bp, Homo sapiens
atcaaaattacagataatttatatggcagcttaaaggatctaaaatgctccaggtaaacttgaagaataaaaataaaacttttaaaacatttaaacaaccagacatcaagacttaattataaaccaacagtattgagacagaatgatatagatacaaagatagataaaatagagtaaattaatgtaataaaattttagc

SEQ ID NO: 135521 - DNA, 333 bp, Homo sapiens
gggagcctagatggcagagtattagggctgctttctcacttgccctctgggtttctgttctctaaaatccttgcaatcactaaatggcataactttttctacaaaagaaaggcaggaaattggggggcacaaaagagtcactgatccatactgactctgaaatctagcagggcaaacactgaaagttccttgattaggtctcaacactgggaaaagaattctccatgacttttgccttcatctctaggctcctgcttccaacctctgagtcatctttcccttttgatgaaaggtggcatgtgttagctcctgagcactttctcagcctgcttc

SEQ ID NO: 135522 - DNA, 412 bp, Homo sapiens
agtgacctcaccacagcctcgatttctgtaaaaggagacagagccctcccaggccactgcagctgtgccctccgtcccccacaccaggaggaagaacttgcctgccagactaaggctgaaaaatctctgtgtgtaaggtccccaggagggaagggaggagagggctcatgtgtcaacaatatacatttggtgagctgctgttatgccaggcacacaggtggtatatttcacactaggagtttctcacctgggatccccgttctatacaacctgtgcctgggcctatgtgttcatttttcctgggggaagggacacacaacttcactgctttatgaaaattataggatattactattcgggaggctgagacaggagaatcgcttgaacccgggaggtggaggctgcagcgact

SEQ ID NO: 135523 - DNA, 558 bp, Homo sapiens
gaaaaacaagagcaaggaaaacgtaatttcttagaggagctatataagttagaataaaatgcagactcttgaggatttgagcataatttgcacataggctagcattgaaacttcctggcttaaggaaagagcgggtagggggtgggaaaggtgagagaatgacagtctttctttggaagcctttagagaggaaagcaaggtttcatttaagctatgaaaaaagatacagatgtggagaaactagatgctgtttgtacgcatgcaggaaaattaagtaaaactcactctggacttttattggcttcttcctctaaatagttgggaagatgcaattggagatcctattaaattcactctatccaagtgatctatcttgattttctttcataatctttccttttgaaaataggaatgggctggatgcagtggctcatgcctgtaatcccagaactttgggaggccaaggtgggtgaattgcttgagctcagaagttcaagaccagcgtgggcaagatagcaaaaccaagtctctacaaaaaagtaaaaaaaaaaaaaaaaa

SEQ ID NO: 135524 - DNA, 461 bp, Homo sapiens
attttttagtagagacgagttttcgccacattggccaggctggtttcgaactcctgacctcagttgatccgcccgcctcagtctcccaaagtgtcaggattacaggcgtgagccaccacacctggccaagttgtcctattcttaaataaggatagcacatatagaattattatggggattcaggtgtaaccccagggctttgggaggcctaggtgggaggatcacttgatgccaggaatttaagttttcagcctgggcaacaaagtgaaaccccttctgtgagtccattttgtgttgctctagaggaatacctgaggctgggtaacttgataaacaagaggtttatttggcccatagttctgcaggctgtacaagcgtggtaccagcatctgctcagctctcagaggccttaggaaacttttactcctggcagaaggcagaaggagagcaggtatgacaca

SEQ ID NO: 135525 - DNA, 326 bp, Homo sapiens
ttgaacccaggaggcagagcttgcagtgagccgagattgcaccactgcactccagcctgggtgacagagagagactgtctcaaaaacaaacaaacaaaaactatccttagattaagacatggacgtggtgtacatgattgcttttgctgcatcttgccacctattttcagcgagggccagaataggaagccactggatggaattctttgctgtgcttcgcagctgttcagaacacgttctttacataatgccttttaaagaaatgaggttctatgggagaagcctctgtgtcaggactaattatgcttcccttggagacaagaaca

SEQ ID NO: 135526 - DNA, 160 bp, Homo sapiens
agaagaacagacatggggggaatcagaatgtccgcagaacctaaggctggtgaccactggacagtcttgaagaggtttaacccagacagagtaactaggtaagaggcaaggatcctaacaggcagagattgggaggttgacacctctgagcctaccagga

SEQ ID NO: 135527 - DNA, 586 bp, Homo sapiens
agaacttgtttccaggatcagaacctgggtttaagtcctggctctaccaccatttgctgagtgctcatggacgagtaactgaatcttgctgaaccacagttcctcatcattgggaactatttctgttggctcctgtgtctctttgacaaccccccattgtgtgattgtgtgtgtgtgtgtgctgtttgagcacctccttactttgtagtaccatgagatactccagcctcatttttatactccctgacccagccctaaaatcagacattactctaaggaaccctggtttcttttattggacaatggggtgggtatgctcattgctactggggcatcgttgcttctagacaaatctccagtgcagaagaatttcaaacaatttatggagaaactccctctcaaggaagtagaacataactccccaccccttaagtatgagctgcacgttgtgactttctgctaattagtacagtatgtaaagaaggaatgataaaagtcgcttcatatacagaaacctaagaaacacaaccccagccaggtgaacaaggtcaacatcaacagtgatagtcacattaatagtatgtac

SEQ ID NO: 135528 - DNA, 857 bp, Homo sapiens
gcaatcctcccacctcagcctccctagtagctgggactacgggcacatgtcaccacacctggctaatttttgtattttttgtagagacagggttccaccatgtttcccaggctggtctcaaactcctgggctcaagcaatccacctgctctggcctcctaaattgctaggattgcagacatgagccactgtgcctggactcagtgtcattttcatttgcattttcctgataacatgatattgaacatcttttcatatgcttacttgccatctctgtacatctcctttggacaggtatctgtatagggcttctgcccattttttaattgggttgttcatttgcttattgttgagttttaagagttctttgtatattttggacaatagtgggttttttttaatcagatgtgtcttttgcaaatattttctcctgggcttcttattctcttgacattatctcttgaaagagtttttaattttaatgaaattcaccttatcaattacttctttaatgggtcatgtctttggttgaatctaaaaagtcagtgtcataccaaaggtcatctaaattttctcctatgttatcttctaggagttttatagttttgcactttaaattatccatcttgagttaatttttgtaaaggatataaaatctcggtctagattaatttttatccatgtaggtgtccagttgctccagcatcatttcttataaagactgtctttatattgtattataggatatttaatttaggatattaaactaataatcctaacagctccattgtcttgcctttgctccttttgactatatttatgtgggtctatttctgggctttctattcttgcccatga

SEQ ID NO: 135529 - DNA, 548 bp, Homo sapiens
ttttaggtttctgggtgagattttatttttaacgttcctatgacctcaaatgcatactttgctcttccagaaccaaagagaccacaccacatgccagcattaaaaggagcataataagggcaccccgcctgtggccaggcttctgtgacaggcctgaccctgtagtccctcttctctcatccgcagctaggttagagagcacctctatggccattgcataaaggagaaaaccgaggctcaggtgggcagggggcgagggcagggcctggccactcaagtgatgaggttagagagccacccccacgcccactgggtaaaggaggaaaccaaggctcagatgggcagggggcaagggcaaggcccagccactggagccaggatctgatcttgacttcatcaaagcagggaagctgccacacgggcgccgctggccgagcctggggaaggatgtcctactgcaccacaagacagagccagttagccagttccatgtctggaggccaccaggctcacaatccagaaaggctgccaaatctccggcagaacac

SEQ ID NO: 135530 - DNA, 822 bp, Homo sapiens
ctcagttagctgcatttgggattctattatcaggcagtacttcattctattatagaataagcgtcctaggaaatcaagcagaggaagttggcttcataggcaaaaaaaaaaggactaaagaaagcagaaacaaagaaaaagtggattggtagtttcaaagttactttccttgtatggcaggaacaggtagccaaaaatataggttaaagatcagaacagacagaaatttattattatgccaattgaaactggcctgtttcggaaattaggctatctctctctcctgatttttctggcagtccggtaacaacttggttttagttatgtggaactttagcatgggcgacttcatttctgtgtgttttttgttgttgttgttttgagacagtttctctctgtcacccaagttagaatgcagtggcgcgatcatagctcactgcagtctgcctgccaggttcaacacattctcatgctttagcctcccaagtagctgggactacaggtgcacactaccacgcccgactaagtttttatattttttggtagagacagggttttaccatgttggccagcctggtcttgaactcttggcctcaagtgatctgcccacctcagcctctcaaagtgctgggattacaggcatgagccactgctcccagttgggacttcatttttgaagtttaggctggtcatcttgggcctcgtgcaggtgcttagtccaaaacaatggcctcctataatttttatttaataattttccccttttggtcaggccaaagcctgacctattgacctaggtcaatagtgctgctttcagttgtg

SEQ ID NO: 135531 - DNA, 867 bp, Homo sapiens
caaaaacagtaataaaagacaaagaaggttttatgtaatgataaagggatcaattcagcaagatatactctgggaaccctaccctggaacacccagagtcacaaaacaaatatttctaggcataaagaaatagacagcaatacagtagtaatagggacagcaatagacagatcattgagacagaaaattaacaaagaaacattagatttaagttggactttagactaaacggacttagcagacattcgcagaacattctacccaacaactatggaatatacattcttctcttcagcacatggaacattctctgagatagaccacatggttgggccacaaaacaagtctttataaatttttaaaaatcaaaatgatatcaagtattttctcagaccacagtggaataaaaactagaaattaataccaaaaggaacttcagaaactatacagacacatggaaattaaacaacatgctcctgaatgatcactgggtcaatgaagaaattaagacagaaattttaaattttttgaatcagatgaaaatgaaaacacaccatacacaggatacagcaaaaatagtgttaagagggaagtttgtggcattaaatgcctacattaaaaaattaacaacctaacttcacacctcaaggaactagaaaaacaagacaaagcaaatcccaagtttgcaaaagaaaggaaataacaaagatcagaatagaactaaataagaaatcccccaaaaatacaaaggaccaatgaaatgaaaagttggttattcaaaaagacagacaaaattgatagaccactcactagactaaccaagaaaagaagggagaagatccagataaacacacaatcagaaatgaa

SEQ ID NO: 135532 - DNA, 505 bp, Homo sapiens
ttttgtggcatcagttgtaataccttacttttcatttctcattttgttcttttgggtcttctctctttttttctaggtcagtctagcaaatggtttagcaattttgtttatattataaaagaacaatttttcatttcatcagttctttgtatttttttagtatctgttttgtttagttcttctctgacctttattatttcttttctcctgctaaattgtggtttggcttgtttttgcttctctagttctttgaggtgcatcattcgattgtttatttgaaacgtttctgattttttgacgtaggtgtttattgttataaacttccttcttagcattgctttggctgtaggttttggtcttgtgctttgattttcatttgtttcaagaatttttttaaatttctcccctaatttctttcttgaccctgtggtcattcaggagcatgttgtttactttccatgtatttgtacagtttccaaagttcctcttgttatcaatttctagt

SEQ ID NO: 135533 - DNA, 427 bp, Homo sapiens
aaggggcgagcccttgttccagggcattttctggatttcgaggtggaatgaaggaaatgccttctgaggcaggagacctgctcagccccacgcacggccctgggggctcactgaccacgggacgggaagaggaagagtggccggggctcacagctccctgcacggctgaccgtgggaagctctgcataaaccgggcttcggtgtgccggggccgatcctcaggcacgtcaccgggtgtcccatggtcaaggggaccagcaaagtgttcggtcacggccttgtctctgtcctgcacctgcagccatggccccgggacatcagagctctcaagacgcggggcagcctggtgcaggctgagcccccagctgtttgcacagtttgtgaggctcaggcttgccagacaaaaggaggttatttgcttttggta

SEQ ID NO: 135534 - DNA, 313 bp, Homo sapiens
gctgctccttagcaggaatcacggtggcacaaaattgttttagtaatcattttattcttcactgtcacacaatcacaggaggggaaaagccaatttcatttaagaatgtccgtcaagaggcagtaaaatatactaatgttttatatctaagcacttaacggtgcactattggacaaaattgtaactgcatattagccattttctgtggcaaacagatacaataattatcttgaggaagaagtaagtgtggattatttgagttgtgagacaaactagttgctttttgtttcttttacacacatggcctattact

SEQ ID NO: 135535 - DNA, 402 bp, Homo sapiens
tgtacacaatgcttagctcccacttataaataagaacatgcagtattcgattttctgtttctgggttaattcacttaagattatggcttaagtgccaatcctaagctgcatccatgttgctgcaaagaacacgatttcattcttttttatggctatgtagtattccttggagtacatgtatcacattttctttatctggtgccactattgatgggcacctaggttgattacatgattttgatattgcgaacagtgctgcaataaacatatgtgtgcctatgtccttttggtaaaacaatttcttttcctttgggtaggtacacagtaatggggttgttgggtcaactggtaattctatttgcagttctttgcaaaatctccaaactgctttccacagggatg

SEQ ID NO: 135536 - DNA, 688 bp, Homo sapiens
tatttttctctcatagagttgtgtttatttcatgcttatatttataaatagtcctaacaaatatacatgatctctatgaagataattagaaaacaatttaaatttaaatcaattaaaatggtgtaaacatttaaaaatccacttcctcaggtatatgatagccgctcgtggctaatgactattgtcttggacagtgaagcctttgagccttatggttacaggaaactaaagatattttttcaggccgggcacggtggctcacgcctgtaatcccagcactttgggaggccgaggcaggcggatcacgaggtcaggagatcaagaccatcctggctaacacagtgaaaccccgtctctactaaaaatacaaaaaattagccgggcacggtggcaggcgcctgtagtcccagctactcgggaggctgaggcaggagaatggcgtgaacgtggaaggcggagcttgcagtgagccaagatcgctccactgcactccagcctgggcgacagtgagactccatctcaaaaaaaaaaatttttcaaagtgtatttaagagaatcctaacatatgattagtaagactttcgagcctacaagtagtttacattttgatagaattctgtggatagaaagtggaaaggaacataaaaattttctgagttgtgcctgtatttttccttaatgataaatg

SEQ ID NO: 135537 - DNA, 654 bp, Homo sapiens
ataaatgaaattccagagctgggaaaaatatagcttgaacagaatatcaaagtataaaagaaggttaaaatatactataaaatagaaaacataatatgaagtatgaagtcacaactaagaaaaaacatgtatacactatcagtaaatgcaaatgacctaatctttcctaatattaagagaaaagcattatcagattggatcacaagcaaaaccaacagtaacagcagacttatttaacacacagtgattcagaaagattgaaaattatagaatagacaatgacgtaccataacaattcaaataccattatatcagaatggttacaaacagggcacaagtattaaatgggacaaaaaagaatctttagtgataataaatattgcattcttcaatgaaaacatgacacttgtgagtatctattaactaaaaacatagcattgacattcctaaagcaaaatcaaagtcaaacactcacaaaaatagacatagggttcttagtaatctttctctactaaatctatcaaagggctaagaggagtaaataaaaattaattgtcaatgtattttatgtatttttgcgtatgtgtgatcttttaatttacttttagtgacatctgttgtcaggtttagccataaaaattaagcaattcagaa

SEQ ID NO: 135538 - DNA, 1365 bp, Homo sapiens
aggaatttcccttatctccttcgcagtgcagctccttcaacctcgccatggcctctgccggaatgcagatcctgggagtcgtcctgacactgctgggctgggtgaatggcctggtctcctgtgccctgcccatgtggaaggtgaccgctttcatcggcaacagcatcgtggtggcccaggtggtgtgggagggcctgtggatgtcctgcgtggtgcagagcaccggccagatgcagtgcaaggtgtacgactcactgctggcgctgccacaggacctgcaggctgcacgtgccctctgtgtcatcgccctccttgtggccctgttcggcttgctggtctaccttgctggggccaagtgtaccacctgtgtggaggagaaggattccaaggcccgcctggtgctcacctctgggattgtctttgtcatctcaggggtcctgacgctaatccccgtgtgctggacggcgcatgccgtcatccgggacttctataaccccctggtggctgaggcccaaaagcgggagctgggggcctccctctacttgggctgggcggcctcaggccttttgttgctgggtggggggttgctgtgctgcacttgcccctcgggggggtcccagggccccagccattacatggcccgctactcaacatctgcccctgccatctctcgggggccctctgagtaccctaccaagaattacgtctgacgtggaggggaatgggggctccgctggcgctagagccatccagaagtggcagtgcccaacagctttgggatgggttcgtaccttttgtttctgcctcctgctatttttcttttgactgaggatatttaaaattcatttgaaaactgagccaaggtgttgactcagactctcacttaggctctgctgtttctcacccttggatgatggagccaaagaggggatgctttgagattctggatcttgacatgcccatcttagaagccagtcaagctatggaactaatgcggaggctgcttgctgtgctggctttgcaacaagacagactgtccccaagagttcctgctgctgctgggggctgggcttccctagatgtcactggacagctgccccccatcctactcaggtctctggagctcctctcttcacccctggaaaaacaaatgatctgttaacaaaggactgcccacctccggaacttctgacctctgtttcctccgtcctgataagacgtccaccccccagggccaggtcccagctatgtagacccccgcccccacctccaacactgcacccttctgccctgcccccctcgtctcaccccctttacactcacatttttatcaaataaagcatgttttgttagtgcaaaaaaaat

SEQ ID NO: 135539 - DNA, 7768 bp, Homo sapiens
  misc_feature (917)..(917): n is a, c, g, or t
  misc_feature (1047)..(1047): n is a, c, g, or t
ctcactgtccctggaatcttcaagggagttactgcattacatcatcagaaacaaggcatttctatattactatggaaagatttcgtctggagaagaagttacctggtcctgatgaagaagctgttgtggatcttggcaaaactagctcaactgtgaacaccaagtttgaaaaagaagaactagaaagtcatagagctgtatatattggtgttcacgtcccgtttagtaaagagagtcgtcggcgtcataggcatcgcggacacaaacatcaccaccggaggagaaaagataaagaatcagataaagaagatggacgggaatctccttcttatgatacaccatcccagagagttcagtttatccttggtactgaagatgatgatgaagaacatattccccatgatctcttcacggaaatggatgaactgtgttacagagatggagaagaatatgaatggaaagaaactgctagatggctgaaatttgaagaggatgttgaagatggcggtgaccgatggagtaaaccttatgtggcaactctctctttgcacagtctttttgaactaaggagttgcatcctcaatggaacagtcatgctggatatgagagcaagcactctagatgaaatagcagatatggtattagacaacatgatagcttctggccaattagacgagtccatacgagagaatgtcagagaagctcttctgaagagacatcatcatcagaatgagaaaagattcaccagtcggattcctcttgttcgatcttttgcagatataggcaagaaacattctgaccctcacttgcttgaaaggaatggggaaggcctttcagcctcccgccactctttgcgaacaggtctgtctgcctcaaacctttccttgagaggagaatcacctttatctcttcttctnggtcatcttcttccttcttcaagagctggaacccctgcaggctcaaggtgtacaaccccagtacccacccctcaaaacagtcctccttctagccctagcatcagccgcctgacctccagaagttcccaanagagtcagcgtcaggccccagaactactggtttcacctgccagtgatgatattcccacagtagtaattcatccgcctgaggaagacttagaagcagcgctgaaggcgaggagcagaagaatgaggaaaatgttgacttaactccaggtattttggcctctccccagtctgctcctggaaacttggacaatagtaaaagtggagaaattaaaggtaatggaagtggtggaagcagagaaaatagtactgttgacttcagcaaggttgatatgaatttcatgagaaaaattcctacgggtgctgaggcatccaacgtcctggtgggcgaagtagactttttggaaaggccaataattgcatttgtgagactggctcctgctgtcctccttacagggttgactgaggtccctgttccaaccaggtttttgtttttgttattgggtccagcgggcaaggcaccacagtaccatgaaattggacgatcaatagccactctcatgacagatgagattttccatgatgtagcttataaagcaaaagacagaaatgacctcttatctggaattgatgaatttttagatcaagtaactgtcctacctccaggagagtgggatccttctatacgcatagaaccaccaaaaagtgtcccttctcaggaaaagagaaagattcctgtgtttcacaatggatctacccccacactgggtgagactcctaaagaggccgctcatcatgctgggcctgagctacagaggactggacggctttttggtggtttgatacttgacatcaaaaggaaagcaccttttttcttgagtgacttcaaggatgcattaagcctgcagtgcctggcctcgattcttttcctatactgtgcctgtatgtctcctgtaatcacttttggagggctgcttggagaagctacagaaggcagaataagtgcaatagagtctctttttggagcatcattaactgggattgcctattcattgtttgctgggcaacctctaacaatattggggagcacaggtccagttctagtgtttgaaaaaattttatataaattctgcagagattatcaactttcttatctgtctttaagaaccagtattggtctgtggacttcttttttgtgcattgttttggttgcaacagatgcaagcagccttgtgtgttatattactcgatttacagaagaggcttttgcagcccttatttgcatcatattcatctacgaggctttggagaagctctttgatttaggagaaacatatgcatttaatatgcacaacaacttagataaactgaccagctactcatgtgtatgtactgaacctccaaaccccagcaatgaaactctagcacaatggaagaaagataatataacagcacacaatatttcctggagaaatcttactgtttctgaatgtaaaaaacttcgtggtgtattcttggggtcagcttgtggtcatcatggaccttatattccagatgtgctcttttggtgtgtcatcttgtttttcacaacattttttctgtcttcattcctcaagcaatttaagaccaagcgttactttcctaccaaggtgcgatcgacaatcagtgattttgctgtatttctcacaatagtaataatggttacaattgactaccttgtaggagttccatctcctaaacttcatgttcctgaaaaatttgagcctactcatccagagagagggtggatcataagcccactgggagataatccttggtggaccttattaatagctgctattcctgctttgctttgtaccattctcatctttatggatcaacaaatcacagctgtaattataaacagaaaggaacacaaattgaagaaaggagctggctatcaccttgatttgctcatggttggcgttatgttgggagtttgctctgtcatgggacttccatggtttgtggctgcaacagtgttgtcaataagtcatgtcaacagcttaaaagttgaatctgaatgttctgctccaggggaacaacccaagtttttgggaattcgtgaacagcgggttacagggctaatgatttttattctaatgggcctctctgtgttcatgacttcagtcctaaagtttattccaatgcctgttctgtatggtgttttcctttatatgggagtttcctcattaaaaggaatccagttatttgaccgtataaaattatttggaatgcctgctaagcatcagcctgatttgatatacctccgttatgtgccgctctggaaggtccatattttcacagtcattcagcttacttgtttggtccttttatgggtgataaaagtttcagctgctgcagtggtttttcccatgatggttcttgcattagtgtttgtgcgcaaactcatggacctgtgtttcacgaagagagaacttagttggcttgatgatcttatgccagaaagtaagaaaaagaaagaagatgacaaaaagaaaaaagagaaagaggaagctgaacggatgcttcaagacgatgatgatactgtgcaccttccatttgaagggggaagtctcttgcaaattccagtcaaggccctaaaatatagtcctgataaacctgtgagtgtgaaaataagttttgaagatgaaccaagaaagaaatacgtggatgctgaaacttcattatagaattgaaccaagaggcattatacatatagatatatacatatgtaatgtgtgcgtatcatgtcactatatataagaatattgtatgtcatgctgtttatgtgtgactaccgggtttttaaaagtagtgtctggagtttgtaatgagcaccgtggagactatgtatttaatgaaatgctctctttgaagtgaggtacatggttcttaactattcaaatatttattctgttagaaaaaaaaattttctgttttgcaatagaaggatgtggagaaatgctttcagtctacttttcttaaatctctgttcatcagtggcaattcgtaaaaaccttaagtgatactttgtttatatgtttataatttttaggtgtttcctgaaattttcacatattatttcacttttgttagtgctttatgggaagaatagggagtctataccagtgctgtgggaaaaatggtaacatttcagggcttctctatttgtgtttcatttctgtagatgtccatcgtgtttcactaactggcgttttcttagccatagagatgactgtagaacaatagaaactttaataatgatagtttttaacttttatgtttaaattttttttaaatcttaaaaccttcatatctaggtatccattgtgacagacaagtaaaattgcaggtgatttgataattaagcacccataccatttataacttctgaatttaaaaagttatacaatgccagtttgcaatagttgattttgatgcctttgtagaatattttttctgaatccttatgctcttttaaagccaatgattcccactctgttctctgccttgtctctctttgtcttaaaatgctttagtttccatcaggttcaagttcttgactattattctcttataagtagtaggcgtaaataatcaggagttagaattctctcagaagggtctatgatcagtattactttattaagaattacctttcattttctctttatgttattctttcacttttgtagattacatttaatagcttgttacctgtgattttattttaaaatatttattttgatatgatgcttaaatattatataaacatttggaaaagtaacaaatagagtaaattgttaatgtaaatagttggtgcttactttcatttatgtttattatcttaaagcaattgatagattttacatctttgatataaagcactgccatatttatattttaaaaggaaattagacattttatatgtagctcagattaatgacatttttattttgtgtattagtttttgcttttctgagctttttaaagtctaacaaatctttttagtcatcttttatatacttttagttccacatgaaataaatgttgttaagcctgtaggactggatgaatggggttgtgaaactgatttgacaagagaataatttacaaaaatcaaatgagtattgagaagccacagaaatatcaaaaatggtgacatcactattaggatgaaaattttatgaaattccaatgctccctttaaccatataattaaattacaaaggtatacataattaatctaataaaggatcatgaggaatgccaaaagctgaaattttagcaagtctggtgttttaaattcattataaactatttattaactaatgtaatgtcctcctctaagaccatattgtaagagtcttgttaaaatgatggattcaacttctgcctcggatgagaggttggaaatgtagctgcttttctttagaaaatatgtagctgtcatcatttggtactgcctaaaaagagttagactctattggcaattgatagagtattacccacggtgcttattattgtttatgagcttccattgtaatgattcctttttatttgtagcagcataattatttccaaagaccccagtatttgctgctatttttaaaactcccctgatgtacctgaacaagaggatttcctcacatcatttccttgtgtctggacatcaggggtaacaactgtacttactttacaggaagaaattttaaaactgaaaactacctgggatcatagtgtttctgtgattttatttaattgtgtatagtaattatccagtgccagaaaaaccgtcacttgcaaaatactttgcactcaaaatgtttttacaatgcttctaaatgttactggtttctgctttcttttgactacttgactgacaaaatgatctgactactccatttaagagcaaaggtaactcatgtttaagtaattaactgcttgttttaagtgattatatttcttccactgtttttgaaaaataatcaaagatagcattcattgagagacagtgacagatataatttactacatatattgatttttaaataaagttgccttaaataagtgtatgtaagcagtagtagttgctatgtactgatttacctcaaggtgcaaaataattaaacctgtacatattccatttacaaaataaattcagccctgcactttctttagatgccttgatttccagaatggagcttagtgctactgaataccctggccacagagccacctcaggatattcttttctccaccctagtttatttatttatagatatctgtttacaaagtctgtagtaaatcctgatgctgaccatctgaaatgtactttttttctgaatgctgtttcaatctaaaatagcagcttttgagaaaacaatgatgtaaattccttatgataaaaggatgattctatatattctttaatgatattaaatatgccgaagccaagcacacagtctttctaaagtgtgtgtatgtttgtgtgaatgtgaatgatactgatcttatatctgttaaaagttgttttaaaaagctgtggcatcccattgttcatatttgccaagtcttctgtaaagatgtctaggacgaaatattttatgtgctaatgcatgtatttgtaaaccagatttgtttaccactcaaaattaacttgttttcttcatccaaaaaagtttatttcttccacgtacttaaattttctgtgtgggtataatatagctttctaatttttttctttcacaaaggcaggttcaaaattctgttgaaagaaaaatgctttctgaaactgaggtataacaccagagcttgctgtttaaaggattatatgatgtacatcagttctataaatgtgctcagcagtttaacatgtgaatcctgttttaaagtgctcagatttcaactgtgtaagccattgatataacgctgtaattaaaaatgtttatatgaaataacttaatgttttaaatttatttatgtagatcacatcatttttatcgtatgcagtgcaaatatgtgaaatgtcttttggtttattccaacaattatttattttagaaagtaagtttaaagactttaaggacattcaaagtttaaaatagtgttcaaattgcaaaatttggcaatcttcatataaattggtttcttttctaacttttcaaaaactaacattaaatgtcaattataggaaaacatagttggaaatgtaatcatccaaagatcatttttaaaatgaaatttaattagcacatattgaacatttgacttaattgttaaaccccagttttgttttgtttttttaatcagatttttgcacactgattagtttttgtgttgtggcttttgttgctttattattcaaggttttttttttttttcttccccatgggggagattgtcttccaatgtttaactacgtttaaataaataaaaattgaattttattgttcatttatataaaatctgataccttgatgtaatttcacaatacagttccaatttttatggcttttataattacaatgatattttcttctataataaaatccaaagtaaacatttaaattgtagaactgatatttttcatttatatgaagtataagcctctactgggtctatattgtgaatcatcctgcctttcaaatttgtttcataattgttagatgaaaactatttttttggagatgttactgaagttgattgagcaataaaagtctacttaattagttgttggctat

SEQ ID NO: 135540 - DNA, 7397 bp, Homo sapiens
ctcactgtccctggaatcttcaagggagttactgcattacatcatcagaaacaaggcatttctatattactatggaaagatttcgtctggagaagaagttacctggtcctgatgaagaagctgttgtggatcttggcaaaactagctcaactgtgaacaccaagtttgaaaaagaagaactagaaagtcatagagctgtatatattggtgttcacgtcccgtttagtaaagagagtcgtcggcgtcataggcatcgcggacacaaacatcaccaccggaggagaaaagataaagaatcagataaagaagatggacgggaatctccttcttatgatacaccatcccagagagttcagtttatccttggtactgaagatgatgatgaagaacatattccccatgatctcttcacggaaatggatgaactgtgttacagagatggagaagaatatgaatggaaagaaactgctagatggctgaaatttgaagaggatgttgaagatggcggtgaccgatggagtaaaccttatgtggcaactctctctttgcacagtctttttgaactaaggagttgcatcctcaatggaacagtcatgctggatatgagagcaagcactctagatgaaatagcagatatggtattagacaacatgatagcttctggccaattagacgagtccatacgagagaatgtcagagaagctcttctgaagagacatcatcatcagaatgagaaaagattcaccagtcggattcctcttgttcgatcttttgcagatataggcaagaaacattctgaccctcacttgcttgaaaggaatggtattttggcctctccccagtctgctcctggaaacttggacaatagtaaaagtggagaaattaaaggtaatggaagtggtggaagcagagaaaatagtactgttgacttcagcaaggttgatatgaatttcatgagaaaaattcctacgggtgctgaggcatccaacgtcctggtgggcgaagtagactttttggaaaggccaataattgcatttgtgagactggctcctgctgtcctccttacagggttgactgaggtccctgttccaaccaggtttttgtttttgttattgggtccagcgggcaaggcaccacagtaccatgaaattggacgatcaatagccactctcatgacagatgagattttccatgatgtagcttataaagcaaaagacagaaatgacctcttatctggaattgatgaatttttagatcaagtaactgtcctacctccaggagagtgggatccttctatacgcatagaaccaccaaaaagtgtcccttctcaggaaaagagaaagattcctgtgtttcacaatggatctacccccacactgggtgagactcctaaagaggccgctcatcatgctgggcctgagctacagaggactggacggctttttggtggtttgatacttgacatcaaaaggaaagcaccttttttcttgagtgacttcaaggatgcattaagcctgcagtgcctggcctcgattcttttcctatactgtgcctgtatgtctcctgtaatcacttttggagggctgcttggagaagctacagaaggcagaataagtgcaatagagtctctttttggagcatcattaactgggattgcctattcattgtttgctgggcaacctctaacaatattggggagcacaggtccagttctagtgtttgaaaaaattttatataaattctgcagagattatcaactttcttatctgtctttaagaaccagtattggtctgtggacttcttttttgtgcattgttttggttgcaacagatgcaagcagccttgtgtgttatattactcgatttacagaagaggcttttgcagcccttatttgcatcatattcatctacgaggctttggagaagctctttgatttaggagaaacatatgcatttaatatgcacaacaacttagataaactgaccagctactcatgtgtatgtactgaacctccaaaccccagcaatgaaactctagcacaatggaagaaagataatataacagcacacaatatttcctggagaaatcttactgtttctgaatgtaaaaaacttcgtggtgtattcttggggtcagcttgtggtcatcatggaccttatattccagatgtgctcttttggtgtgtcatcttgtttttcacaacattttttctgtcttcattcctcaagcaatttaagaccaagcgttactttcctaccaaggtgcgatcgacaatcagtgattttgctgtatttctcacaatagtaataatggttacaattgactaccttgtaggagttccatctcctaaacttcatgttcctgaaaaatttgagcctactcatccagagagagggtggatcataagcccactgggagataatccttggtggaccttattaatagctgctattcctgctttgctttgtaccattctcatctttatggatcaacaaatcacagctgtaattataaacagaaaggaacacaaattgaagaaaggagctggctatcaccttgatttgctcatggttggcgttatgttgggagtttgctctgtcatgggacttccatggtttgtggctgcaacagtgttgtcaataagtcatgtcaacagcttaaaagttgaatctgaatgttctgctccaggggaacaacccaagtttttgggaattcgtgaacagcgggttacagggctaatgatttttattctaatgggcctctctgtgttcatgacttcagtcctaaagtttattccaatgcctgttctgtatggtgttttcctttatatgggagtttcctcattaaaaggaatccagttatttgaccgtataaaattatttggaatgcctgctaagcatcagcctgatttgatatacctccgttatgtgccgctctggaaggtccatattttcacagtcattcagcttacttgtttggtccttttatgggtgataaaagtttcagctgctgcagtggtttttcccatgatggttcttgcattagtgtttgtgcgcaaactcatggacctgtgtttcacgaagagagaacttagttggcttgatgatcttatgccagaaagtaagaaaaagaaagaagatgacaaaaagaaaaaagagaaagaggaagctgaacggatgcttcaagacgatgatgatactgtgcaccttccatttgaagggggaagtctcttgcaaattccagtcaaggccctaaaatatagtcctgataaacctgtgagtgtgaaaataagttttgaagatgaaccaagaaagaaatacgtggatgctgaaacttcattatagaattgaaccaagaggcattatacatatagatatatacatatgtaatgtgtgcgtatcatgtcactatatataagaatattgtatgtcatgctgtttatgtgtgactaccgggtttttaaaagtagtgtctggagtttgtaatgagcaccgtggagactatgtatttaatgaaatgctctctttgaagtgaggtacatggttcttaactattcaaatatttattctgttagaaaaaaaaattttctgttttgcaatagaaggatgtggagaaatgctttcagtctacttttcttaaatctctgttcatcagtggcaattcgtaaaaaccttaagtgatactttgtttatatgtttataatttttaggtgtttcctgaaattttcacatattatttcacttttgttagtgctttatgggaagaatagggagtctataccagtgctgtgggaaaaatggtaacatttcagggcttctctatttgtgtttcatttctgtagatgtccatcgtgtttcactaactggcgttttcttagccatagagatgactgtagaacaatagaaactttaataatgatagtttttaacttttatgtttaaattttttttaaatcttaaaaccttcatatctaggtatccattgtgacagacaagtaaaattgcaggtgatttgataattaagcacccataccatttataacttctgaatttaaaaagttatacaatgccagtttgcaatagttgattttgatgcctttgtagaatattttttctgaatccttatgctcttttaaagccaatgattcccactctgttctctgccttgtctctctttgtcttaaaatgctttagtttccatcaggttcaagttcttgactattattctcttataagtagtaggcgtaaataatcaggagttagaattctctcagaagggtctatgatcagtattactttattaagaattacctttcattttctctttatgttattctttcacttttgtagattacatttaatagcttgttacctgtgattttattttaaaatatttattttgatatgatgcttaaatattatataaacatttggaaaagtaacaaatagagtaaattgttaatgtaaatagttggtgcttactttcatttatgtttattatcttaaagcaattgatagattttacatctttgatataaagcactgccatatttatattttaaaaggaaattagacattttatatgtagctcagattaatgacatttttattttgtgtattagtttttgcttttctgagctttttaaagtctaacaaatctttttagtcatcttttatatacttttagttccacatgaaataaatgttgttaagcctgtaggactggatgaatggggttgtgaaactgatttgacaagagaataatttacaaaaatcaaatgagtattgagaagccacagaaatatcaaaaatggtgacatcactattaggatgaaaattttatgaaattccaatgctccctttaaccatataattaaattacaaaggtatacataattaatctaataaaggatcatgaggaatgccaaaagctgaaattttagcaagtctggtgttttaaattcattataaactatttattaactaatgtaatgtcctcctctaagaccatattgtaagagtcttgttaaaatgatggattcaacttctgcctcggatgagaggttggaaatgtagctgcttttctttagaaaatatgtagctgtcatcatttggtactgcctaaaaagagttagactctattggcaattgatagagtattacccacggtgcttattattgtttatgagcttccattgtaatgattcctttttatttgtagcagcataattatttccaaagaccccagtatttgctgctatttttaaaactcccctgatgtacctgaacaagaggatttcctcacatcatttccttgtgtctggacatcaggggtaacaactgtacttactttacaggaagaaattttaaaactgaaaactacctgggatcatagtgtttctgtgattttatttaattgtgtatagtaattatccagtgccagaaaaaccgtcacttgcaaaatactttgcactcaaaatgtttttacaatgcttctaaatgttactggtttctgctttcttttgactacttgactgacaaaatgatctgactactccatttaagagcaaaggtaactcatgtttaagtaattaactgcttgttttaagtgattatatttcttccactgtttttgaaaaataatcaaagatagcattcattgagagacagtgacagatataatttactacatatattgatttttaaataaagttgccttaaataagtgtatgtaagcagtagtagttgctatgtactgatttacctcaaggtgcaaaataattaaacctgtacatattccatttacaaaataaattcagccctgcactttctttagatgccttgatttccagaatggagcttagtgctactgaataccctggccacagagccacctcaggatattcttttctccaccctagtttatttatttatagatatctgtttacaaagtctgtagtaaatcctgatgctgaccatctgaaatgtactttttttctgaatgctgtttcaatctaaaatagcagcttttgagaaaacaatgatgtaaattccttatgataaaaggatgattctatatattctttaatgatattaaatatgccgaagccaagcacacagtctttctaaagtgtgtgtatgtttgtgtgaatgtgaatgatactgatcttatatctgttaaaagttgttttaaaaagctgtggcatcccattgttcatatttgccaagtcttctgtaaagatgtctaggacgaaatattttatgtgctaatgcatgtatttgtaaaccagatttgtttaccactcaaaattaacttgttttcttcatccaaaaaagtttatttcttccacgtacttaaattttctgtgtgggtataatatagctttctaatttttttctttcacaaaggcaggttcaaaattctgttgaaagaaaaatgctttctgaaactgaggtataacaccagagcttgctgtttaaaggattatatgatgtacatcagttctataaatgtgctcagcagtttaacatgtgaatcctgttttaaagtgctcagatttcaactgtgtaagccattgatataacgctgtaattaaaaatgtttatatgaaataacttaatgttttaaatttatttatgtagatcacatcatttttatcgtatgcagtgcaaatatgtgaaatgtcttttggtttattccaacaattatttattttagaaagtaagtttaaagactttaaggacattcaaagtttaaaatagtgttcaaattgcaaaatttggcaatcttcatataaattggtttcttttctaacttttcaaaaactaacattaaatgtcaattataggaaaacatagttggaaatgtaatcatccaaagatcatttttaaaatgaaatttaattagcacatattgaacatttgacttaattgttaaaccccagttttgttttgtttttttaatcagatttttgcacactgattagtttttgtgttgtggcttttgttgctttattattcaaggttttttttttttttcttccccatgggggagattgtcttccaatgtttaactacgtttaaataaataaaaattgaattttattgttcatttatataaaatctgataccttgatgtaatttcacaatacagttccaatttttatggcttttataattacaatgatattttcttctataataaaatccaaagtaaacatttaaattgtagaactgatatttttcatttatatgaagtataagcctctactgggtctatattgtgaatcatcctgcctttcaaatttgtttcataattgttagatgaaaactatttttttggagatgttactgaagttgattgagcaataaaagtctacttaattagttgttggctat

SEQ ID NO: 135541 - DNA, 4403 bp, Homo sapiens
ccttggagactagaaagaaactgctagatggctgtaacacagttcatccatttccgtgaagatgatgatgaagaacatattccccatgatctcttcacggaaatggatgaactgtgttacagagatggagaagaatatgaatggaaagaaactgctagatggctgaaatttgaagaggatgttgaagatggcggtgaccgatggagtaaaccttatgtggcaactctctctttgcacagtctttttgaactaaggagttgcatcctcaatggaacagtcatgctggatatgagagcaagcactctagatgaaatagcagatatggtattagacaacatgatagcttctggccaattagacgagtccatacgagagaatgtcagagaagctcttctgaagagacatcatcatcagaatgagaaaagattcaccagtcggattcctcttgttcgatcttttgcagatataggcaagaaacattctgaccctcacttgcttgaaaggaatggtattttggcctctccccagtctgctcctggaaacttggacaatagtaaaagtggagaaattaaaggtaatggaagtggtggaagcagagaaaatagtactgttgacttcagcaaggttgatatgaatttcatgagaaaaattcctacgggtgctgaggcatccaacgtcctggtgggcgaagtagactttttggaaaggccaataattgcatttgtgagactggctcctgctgtcctccttacagggttgactgaggtccctgttccaaccaggtttttgtttttgttattgggtccagcgggcaaggcaccacagtaccatgaaattggacgatcaatagccactctcatgacagatgagattttccatgatgtagcttataaagcaaaagacagaaatgacctcttatctggaattgatgaatttttagatcaagtaactgtcctacctccaggagagtgggatccttctatacgcatagaaccaccaaaaagtgtcccttctcaggaaaagagaaagattcctgtgtttcacaatggatctacccccacactgggtgagactcctaaagaggccgctcatcatgctgggcctgagctacagaggactggacggctttttggtggtttgatacttgacatcaaaaggaaagcaccttttttcttgagtgacttcaaggatgcattaagcctgcagtgcctggcctcgattcttttcctatactgtgcctgtatgtctcctgtaatcacttttggagggctgcttggagaagctacagaaggcagaataagtgcaatagagtctctttttggagcatcattaactgggattgcctattcattgtttgctgggcaacctctaacaatattggggagcacaggtccagttctagtgtttgaaaaaattttatataaattctgcagagattatcaactttcttatctgtctttaagaaccagtattggtctgtggacttcttttttgtgcattgttttggttgcaacagatgcaagcagccttgtgtgttatattactcgatttacagaagaggcttttgcagcccttatttgcatcatattcatctacgaggctttggagaagctctttgatttaggagaaacatatgcatttaatatgcacaacaacttagataaactgaccagctactcatgtgtatgtactgaacctccaaaccccagcaatgaaactctagcacaatggaagaaagataatataacagcacacaatatttcctggagaaatcttactgtttctgaatgtaaaaaacttcgtggtgtattcttggggtcagcttgtggtcatcatggaccttatattccagatgtgctcttttggtgtgtcatcttgtttttcacaacattttttctgtcttcattcctcaagcaatttaagaccaagcgttactttcctaccaaggtgcgatcgacaatcagtgattttgctgtatttctcacaatagtaataatggttacaattgactaccttgtaggagttccatctcctaaacttcatgttcctgaaaaatttgagcctactcatccagagagagggtggatcataagcccactgggagataatccttggtggaccttattaatagctgctattcctgctttgctttgtaccattctcatctttatggatcaacaaatcacagctgtaattataaacagaaaggaacacaaattgaagaaaggagctggctatcaccttgatttgctcatggttggcgttatgttgggagtttgctctgtcatgggacttccatggtttgtggctgcaacagtgttgtcaataagtcatgtcaacagcttaaaagttgaatctgaatgttctgctccaggggaacaacccaagtttttgggaattcgtgaacagcgggttacagggctaatgatttttattctaatgggcctctctgtgttcatgacttcagtcctaaagtttattccaatgcctgttctgtatggtgttttcctttatatgggagtttcctcattaaaaggaatccagttatttgaccgtataaaattatttggaatgcctgctaagcatcagcctgatttgatatacctccgttatgtgccgctctggaaggtccatattttcacagtcattcagcttacttgtttggtccttttatgggtgataaaagtttcagctgctgcagtggtttttcccatgatggttcttgcattagtgtttgtgcgcaaactcatggacctgtgtttcacgaagagagaacttagttggcttgatgatcttatgccagaaagtaagaaaaagaaagaagatgacaaaaagaaaaaagagaaagaggaagctgaacggatgcttcaagacgatgatgatactgtgcaccttccatttgaagggggaagtctcttgcaaattccagtcaaggccctaaaatatagtcctgataaacctgtgagtgtgaaaataagttttgaagatgaaccaagaaagaaatacgtggatgctgaaacttcattatagaattgaaccaagaggcattatacatatagatatatacatatgtaatgtgtgcgtatcatgtcactatatataagaatattgtatgtcatgctgtttatgtgtgactaccgggtttttaaaagtagtgtctggagtttgtaatgagcaccgtggagactatgtatttaatgaaatgctctctttgaagtgaggtacatggttcttaactattcaaatatttattctgttagaaaaaaaaattttctgttttgcaatagaaggatgtggagaaatgctttcagtctacttttcttaaatctctgttcatcagtggcaattcgtaaaaaccttaagtgatactttgtttatatgtttataatttttaggtgtttcctgaaattttcacatattatttcacttttgttagtgctttatgggaagaatagggagtctataccagtgctgtgggaaaaatggtaacatttcagggcttctctatttgtgtttcatttctgtagatgtccatcgtgtttcactaactggcgttttcttagccatagagatgactgtagaacaatagaaactttaataatgatagtttttaacttttatgtttaaattttttttaaatcttaaaaccttcatatctaggtatccattgtgacagacaagtaaaattgcaggtgatttgataattaagcacccataccatttataacttctgaatttaaaaagttatacaatgccagtttgcaatagttgattttgatgcctttgtagaatattttttctgaatccttatgctcttttaaagccaatgattcccactctgttctctgccttgtctctctttgtcttaaaatgctttagtttccatcaggttcaagttcttgactattattctcttataagtagtaggcgtaaataatcaggagttagaattctctcagaagggtctatgatcagtattactttattaagaattacctttcattttctctttatgttattctttcacttttgtagattacatttaatagcttgttacctgtgattttattttaaaatatttattttgatatgatgcttaaatattatataaacatttggaaaagtaacaaatagagtaaattgttaatgtaaatagttggtgcttactttcatttatgtttattatcttaaagcaattgatagattttacatctttgatataaagcactgccatatttatattttaaaaggaaattagacattttatatgtagctcagattaatgacatttttattttgtgtattagtttttgcttttctgagctttttaaagtctaacaaatctttttagtcatcttttatatacttttagttccacatgaaataaatgttgttaagcctgt

SEQ ID NO: 135542 - DNA, 770 bp, Homo sapiens
aacccaaactttattccattctgttgtttctgatgtattttccactttctagtctccatgcttctcaatgtgggaaaaaaagaagttaaaatctaccacattgtataattgatttagtaaaatgtaagcatgaaattcaggatccttaaaaatgtatcctactctaatttctcagatgtgtatgtactgaacctccaaaccccagcaatgaaactctagcacaatggaagaaagataatataacagcacacaatatttcctggagaaatcttactgtttctgaatgtaaaaaacttcgtggtgtattcttggggtcagcttgtggtcatcatggaccttatattccagatgtgctcttttggtgtgtcatcttgtttttcacaacattttttctgtcttcattcctcaagcaatttaagaccaagcgttactttcctaccaaggtaactgtgatataattttggaattctggtaatattcatatttttggtttttatttccttggtttatttcaaaacagtaatatattttttgaggttaatactccatgccaactggttaataaagaaattattcgtagtgaaaaatgtatattacgtgcctgagctcacagtaggaagatgatggtaccataagagttgctaggttagttgcgaaatgtgtttcttatatttttggaaagaattaaatataaatgtgtttcactgttaacattgtcactagttaaaagctccatttgtacgttgtagtgacaattttatcaataaaag

SEQ ID NO: 135543 - DNA, 386 bp, Homo sapiens
ctatcacattatcatggaaaaccatttaaaaatctttgccatttcacttctcactctgggatttttgaatggtcttctgtggatttaaaaagcttgtaaacataattttaaaagaatgcaattagctgtaatgagttcagttatttgagagaaagcagtctgttttatattttgttgccatttcaaaggatgcatataataggtcctcaatagattgtgatctcatgagtcaatgagaataatttgtttttagggtcctgatgaagaagctgttgtggatcttggcaaaactagctcaactgtgaacaccaagtttgaaaaagaagaactagaaagtaagttggtttaaaataacttacttcgcttagtaggataatttactaatt

SEQ ID NO: 135544 - DNA, 7788 bp, Homo sapiens
  misc_feature (829)..(829): n is a, c, g, or t
  misc_feature (959)..(959): n is a, c, g, or t
tagaacttatgacctcatgacgttttatctgtttgtatgttggtttctctacctctcgaagagagcagaaacttggctctgttttgttatttttaaattgctgtattcccaacacacagcggacgctcagtgaatagttaatgactgagtgggtcctgatattcatctgctggaacagttttgggggagaatatgaggtttggcaataaaatacctttacatcttaggaagccagtattattgaatattcagcttaatagaatttattgtattcatacagggaagcactttcagctataggaaggctattagtatataatagtagcctctttataaataatagtatttattaaaataaggcggtctttgtaattcatttttattggttggataatgttcatttctgcattgattatttgtgacagaataaaactttctagagctatttaaggttctaatttttgtcataaggtttcactcacagtttattcctatattatggtcatctgagtgtttagtaatttattttttttttcattgaatagatatggtattagacaacatgatagcttctggccaattagacgagtccatacgagagaatgtcagagaagctcttctgaagagacatcatcatcagaatgagaaaagattcaccagtcggattcctcttgttcgatcttttgcagatataggcaagaaacattctgaccctcacttgcttgaaaggaatggggaaggcctttcagcctcccgccactctttgcgaacaggtctgtctgcctcaaacctttccttgagaggagaatcacctttatctcttcttctnggtcatcttcttccttcttcaagagctggaacccctgcaggctcaaggtgtacaaccccagtacccacccctcaaaacagtcctccttctagccctagcatcagccgcctgacctccagaagttcccaanagagtcagcgtcaggccccagaactactggtttcacctgccagtgatgatattcccacagtagtaattcatccgcctgaggaagacttagaagcagcgctgaaggcgaggagcagaagaatgaggaaaatgttgacttaactccaggtattttggcctctccccagtctgctcctggaaacttggacaatagtaaaagtggagaaattaaaggtaatggaagtggtggaagcagagaaaatagtactgttgacttcagcaaggttgatatgaatttcatgagaaaaattcctacgggtgctgaggcatccaacgtcctggtgggcgaagtagactttttggaaaggccaataattgcatttgtgagactggctcctgctgtcctccttacagggttgactgaggtccctgttccaaccaggtttttgtttttgttattgggtccagcgggcaaggcaccacagtaccatgaaattggacgatcaatagccactctcatgacagatgagattttccatgatgtagcttataaagcaaaagacagaaatgacctcttatctggaattgatgaatttttagatcaagtaactgtcctacctccaggagagtgggatccttctatacgcatagaaccaccaaaaagtgtcccttctcaggaaaagagaaagattcctgtgtttcacaatggatctacccccacactgggtgagactcctaaagaggccgctcatcatgctgggcctgagctacagaggactggacggctttttggtggtttgatacttgacatcaaaaggaaagcaccttttttcttgagtgacttcaaggatgcattaagcctgcagtgcctggcctcgattcttttcctatactgtgcctgtatgtctcctgtaatcacttttggagggctgcttggagaagctacagaaggcagaataagtgcaatagagtctctttttggagcatcattaactgggattgcctattcattgtttgctgggcaacctctaacaatattggggagcacaggtccagttctagtgtttgaaaaaattttatataaattctgcagagattatcaactttcttatctgtctttaagaaccagtattggtctgtggacttcttttttgtgcattgttttggttgcaacagatgcaagcagccttgtgtgttatattactcgatttacagaagaggcttttgcagcccttatttgcatcatattcatctacgaggctttggagaagctctttgatttaggagaaacatatgcatttaatatgcacaacaacttagataaactgaccagctactcatgtgtatgtactgaacctccaaaccccagcaatgaaactctagcacaatggaagaaagataatataacagcacacaatatttcctggagaaatcttactgtttctgaatgtaaaaaacttcgtggtgtattcttggggtcagcttgtggtcatcatggaccttatattccagatgtgctcttttggtgtgtcatcttgtttttcacaacattttttctgtcttcattcctcaagcaatttaagaccaagcgttactttcctaccaaggtgcgatcgacaatcagtgattttgctgtatttctcacaatagtaataatggttacaattgactaccttgtaggagttccatctcctaaacttcatgttcctgaaaaatttgagcctactcatccagagagagggtggatcataagcccactgggagataatccttggtggaccttattaatagctgctattcctgctttgctttgtaccattctcatctttatggatcaacaaatcacagctgtaattataaacagaaaggaacacaaattgaagaaaggagctggctatcaccttgatttgctcatggttggcgttatgttgggagtttgctctgtcatgggacttccatggtttgtggctgcaacagtgttgtcaataagtcatgtcaacagcttaaaagttgaatctgaatgttctgctccaggggaacaacccaagtttttgggaattcgtgaacagcgggttacagggctaatgatttttattctaatgggcctctctgtgttcatgacttcagtcctaaagtttattccaatgcctgttctgtatggtgttttcctttatatgggagtttcctcattaaaaggaatccagttatttgaccgtataaaattatttggaatgcctgctaagcatcagcctgatttgatatacctccgttatgtgccgctctggaaggtccatattttcacagtcattcagcttacttgtttggtccttttatgggtgataaaagtttcagctgctgcagtggtttttcccatgatggttcttgcattagtgtttgtgcgcaaactcatggacctgtgtttcacgaagagagaacttagttggcttgatgatcttatgccagaaagtaagaaaaagaaagaagatgacaaaaagaaaaaagagaaagaggaagctgaacggatgcttcaagacgatgatgatactgtgcaccttccatttgaagggggaagtctcttgcaaattccagtcaaggccctaaaatatagtggtgatccctcaattggtaacatatcagatgaaatggccaaaactgcacagtggaaggcactttccatgaatactgagaatgccaaagtaaccagatctaacatgagtcctgataaacctgtgagtgtgaaaataagttttgaagatgaaccaagaaagaaatacgtggatgctgaaacttcattatagaattgaaccaagaggcattatacatatagatatatacatatgtaatgtgtgcgtatcatgtcactatatataagaatattgtatgtcatgctgtttatgtgtgactaccgggtttttaaaagtagtgtctggagtttgtaatgagcaccgtggagactatgtatttaatgaaatgctctctttgaagtgaggtacatggttcttaactattcaaatatttattctgttagaaaaaaaaattttctgttttgcaatagaaggatgtggagaaatgctttcagtctacttttcttaaatctctgttcatcagtggcaattcgtaaaaaccttaagtgatactttgtttatatgtttataatttttaggtgtttcctgaaattttcacatattatttcacttttgttagtgctttatgggaagaatagggagtctataccagtgctgtgggaaaaatggtaacatttcagggcttctctatttgtgtttcatttctgtagatgtccatcgtgtttcactaactggcgttttcttagccatagagatgactgtagaacaatagaaactttaataatgatagtttttaacttttatgtttaaattttttttaaatcttaaaaccttcatatctaggtatccattgtgacagacaagtaaaattgcaggtgatttgataattaagcacccataccatttataacttctgaatttaaaaagttatacaatgccagtttgcaatagttgattttgatgcctttgtagaatattttttctgaatccttatgctcttttaaagccaatgattcccactctgttctctgccttgtctctctttgtcttaaaatgctttagtttccatcaggttcaagttcttgactattattctcttataagtagtaggcgtaaataatcaggagttagaattctctcagaagggtctatgatcagtattactttattaagaattacctttcattttctctttatgttattctttcacttttgtagattacatttaatagcttgttacctgtgattttattttaaaatatttattttgatatgatgcttaaatattatataaacatttggaaaagtaacaaatagagtaaattgttaatgtaaatagttggtgcttactttcatttatgtttattatcttaaagcaattgatagattttacatctttgatataaagcactgccatatttatattttaaaaggaaattagacattttatatgtagctcagattaatgacatttttattttgtgtattagtttttgcttttctgagctttttaaagtctaacaaatctttttagtcatcttttatatacttttagttccacatgaaataaatgttgttaagcctgtaggactggatgaatggggttgtgaaactgatttgacaagagaataatttacaaaaatcaaatgagtattgagaagccacagaaatatcaaaaatggtgacatcactattaggatgaaaattttatgaaattccaatgctccctttaaccatataattaaattacaaaggtatacataattaatctaataaaggatcatgaggaatgccaaaagctgaaattttagcaagtctggtgttttaaattcattataaactatttattaactaatgtaatgtcctcctctaagaccatattgtaagagtcttgttaaaatgatggattcaacttctgcctcggatgagaggttggaaatgtagctgcttttctttagaaaatatgtagctgtcatcatttggtactgcctaaaaagagttagactctattggcaattgatagagtattacccacggtgcttattattgtttatgagcttccattgtaatgattcctttttatttgtagcagcataattatttccaaagaccccagtatttgctgctatttttaaaactcccctgatgtacctgaacaagaggatttcctcacatcatttccttgtgtctggacatcaggggtaacaactgtacttactttacaggaagaaattttaaaactgaaaactacctgggatcatagtgtttctgtgattttatttaattgtgtatagtaattatccagtgccagaaaaaccgtcacttgcaaaatactttgcactcaaaatgtttttacaatgcttctaaatgttactggtttctgctttcttttgactacttgactgacaaaatgatctgactactccatttaagagcaaaggtaactcatgtttaagtaattaactgcttgttttaagtgattatatttcttccactgtttttgaaaaataatcaaagatagcattcattgagagacagtgacagatataatttactacatatattgatttttaaataaagttgccttaaataagtgtatgtaagcagtagtagttgctatgtactgatttacctcaaggtgcaaaataattaaacctgtacatattccatttacaaaataaattcagccctgcactttctttagatgccttgatttccagaatggagcttagtgctactgaataccctggccacagagccacctcaggatattcttttctccaccctagtttatttatttatagatatctgtttacaaagtctgtagtaaatcctgatgctgaccatctgaaatgtactttttttctgaatgctgtttcaatctaaaatagcagcttttgagaaaacaatgatgtaaattccttatgataaaaggatgattctatatattctttaatgatattaaatatgccgaagccaagcacacagtctttctaaagtgtgtgtatgtttgtgtgaatgtgaatgatactgatcttatatctgttaaaagttgttttaaaaagctgtggcatcccattgttcatatttgccaagtcttctgtaaagatgtctaggacgaaatattttatgtgctaatgcatgtatttgtaaaccagatttgtttaccactcaaaattaacttgttttcttcatccaaaaaagtttatttcttccacgtacttaaattttctgtgtgggtataatatagctttctaatttttttctttcacaaaggcaggttcaaaattctgttgaaagaaaaatgctttctgaaactgaggtataacaccagagcttgctgtttaaaggattatatgatgtacatcagttctataaatgtgctcagcagtttaacatgtgaatcctgttttaaagtgctcagatttcaactgtgtaagccattgatataacgctgtaattaaaaatgtttatatgaaataacttaatgttttaaatttatttatgtagatcacatcatttttatcgtatgcagtgcaaatatgtgaaatgtcttttggtttattccaacaattatttattttagaaagtaagtttaaagactttaaggacattcaaagtttaaaatagtgttcaaattgcaaaatttggcaatcttcatataaattggtttcttttctaacttttcaaaaactaacattaaatgtcaattataggaaaacatagttggaaatgtaatcatccaaagatcatttttaaaatgaaatttaattagcacatattgaacatttgacttaattgttaaaccccagttttgttttgtttttttaatcagatttttgcacactgattagtttttgtgttgtggcttttgttgctttattattcaaggttttttttttttttcttccccatgggggagattgtcttccaatgtttaactacgtttaaataaataaaaattgaattttattgttcatttatataaaatctgataccttgatgtaatttcacaatacagttccaatttttatggcttttataattacaatgatattttcttctataataaaatccaaagtaaacatttaaattgtagaactgatatttttcatttatatgaagtataagcctctactgggtctatattgtgaatcatcctgcctttcaaatttgtttcataattgttagatgaaaactatttttttggagatgttactgaagttgattgagcaataaaagtctacttaattagttgttggctat

SEQ ID NO: 135545 - DNA, 4919 bp, Homo sapiens
ggttgcgcttccaattaggtgcatgagtaggtggcctccagtaatgttagcggttaggcgtacggcccgggctattggttgaatgggtaggctgatggtttcgggaacaacccaagtttttgggaattcgtgaacagcgggttacagggctaatgatttttattctaatgggcctctctgtgttcatgacttcagtcctaaagtttattccaatgcctgttctgtatggtgttttcctttatatgggagtttcctcattaaaaggaatccagttatttgaccgtataaaattatttggaatgcctgctaagcatcagcctgatttgatatacctccgttatgtgccgctctggaaggtccatattttcacagtcattcagcttacttgtttggtccttttatgggtgataaaagtttcagctgctgcagtggtttttcccatgatggttcttgcattagtgtttgtgcgcaaactcatggacctgtgtttcacgaagagagaacttagttggcttgatgatcttatgccagaaagtaagaaaaagaaagaagatgacaaaaagaaaaaagagaaagaggaagctgaacggatgcttcaagacgatgatgatactgtgcaccttccatttgaagggggaagtctcttgcaaattccagtcaaggccctaaaatatagtggtgatccctcaattggtaacatatcagatgaaatggccaaaactgcacagtggaaggcactttccatgaatactgagaatgccaaagtaaccagatctaacatgagtcctgataaacctgtgagtgtgaaaataagttttgaagatgaaccaagaaagaaatacgtggatgctgaaacttcattatagaattgaaccaagaggcattatacatatagatatatacatatgtaatgtgtgcgtatcatgtcactatatataagaatattgtatgtcatgctgtttatgtgtgactaccgggtttttaaaagtagtgtctggagtttgtaatgagcaccgtggagactatgtatttaatgaaatgctctctttgaagtgaggtacatggttcttaactattcaaatatttattctgttagaaaaaaaaattttctgttttgcaatagaaggatgtggagaaatgctttcagtctacttttcttaaatctctgttcatcagtggcaattcgtaaaaaccttaagtgatactttgtttatatgtttataatttttaggtgtttcctgaaattttcacatattatttcacttttgttagtgctttatgggaagaatagggagtctataccagtgctgtgggaaaaatggtaacatttcagggcttctctatttgtgtttcatttctgtagatgtccatcgtgtttcactaactggcgttttcttagccatagagatgactgtagaacaatagaaactttaataatgatagtttttaacttttatgtttaaattttttttaaatcttaaaaccttcatatctaggtatccattgtgacagacaagtaaaattgcaggtgatttgataattaagcacccataccatttataacttctgaatttaaaaagttatacaatgccagtttgcaatagttgattttgatgcctttgtagaatattttttctgaatccttatgctcttttaaagccaatgattcccactctgttctctgccttgtctctctttgtcttaaaatgctttagtttccatcaggttcaagttcttgactattattctcttataagtagtaggcgtaaataatcaggagttagaattctctcagaagggtctatgatcagtattactttattaagaattacctttcattttctctttatgttattctttcacttttgtagattacatttaatagcttgttacctgtgattttattttaaaatatttattttgatatgatgcttaaatattatataaacatttggaaaagtaacaaatagagtaaattgttaatgtaaatagttggtgcttactttcatttatgtttattatcttaaagcaattgatagattttacatctttgatataaagcactgccatatttatattttaaaaggaaattagacattttatatgtagctcagattaatgacatttttattttgtgtattagtttttgcttttctgagctttttaaagtctaacaaatctttttagtcatcttttatatacttttagttccacatgaaataaatgttgttaagcctgtaggactggatgaatggggttgtgaaactgatttgacaagagaataatttacaaaaatcaaatgagtattgagaagccacagaaatatcaaaaatggtgacatcactattaggatgaaaattttatgaaattccaatgctccctttaaccatataattaaattacaaaggtatacataattaatctaataaaggatcatgaggaatgccaaaagctgaaattttagcaagtctggtgttttaaattcattataaactatttattaactaatgtaatgtcctcctctaagaccatattgtaagagtcttgttaaaatgatggattcaacttctgcctcggatgagaggttggaaatgtagctgcttttctttagaaaatatgtagctgtcatcatttggtactgcctaaaaagagttagactctattggcaattgatagagtattacccacggtgcttattattgtttatgagcttccattgtaatgattcctttttatttgtagcagcataattatttccaaagaccccagtatttgctgctatttttaaaactcccctgatgtacctgaacaagaggatttcctcacatcatttccttgtgtctggacatcaggggtaacaactgtacttactttacaggaagaaattttaaaactgaaaactacctgggatcatagtgtttctgtgattttatttaattgtgtatagtaattatccagtgccagaaaaaccgtcacttgcaaaatactttgcactcaaaatgtttttacaatgcttctaaatgttactggtttctgctttcttttgactacttgactgacaaaatgatctgactactccatttaagagcaaaggtaactcatgtttaagtaattaactgcttgttttaagtgattatatttcttccactgtttttgaaaaataatcaaagatagcattcattgagagacagtgacagatataatttactacatatattgatttttaaataaagttgccttaaataagtgtatgtaagcagtagtagttgctatgtactgatttacctcaaggtgcaaaataattaaacctgtacatattccatttacaaaataaattcagccctgcactttctttagatgccttgatttccagaatggagcttagtgctactgaataccctggccacagagccacctcaggatattcttttctccaccctagtttatttatttatagatatctgtttacaaagtctgtagtaaatcctgatgctgaccatctgaaatgtactttttttctgaatgctgtttcaatctaaaatagcagcttttgagaaaacaatgatgtaaattccttatgataaaaggatgattctatatattctttaatgatattaaatatgccgaagccaagcacacagtctttctaaagtgtgtgtatgtttgtgtgaatgtgaatgatactgatcttatatctgttaaaagttgttttaaaaagctgtggcatcccattgttcatatttgccaagtcttctgtaaagatgtctaggacgaaatattttatgtgctaatgcatgtatttgtaaaccagatttgtttaccactcaaaattaacttgttttcttcatccaaaaaagtttatttcttccacgtacttaaattttctgtgtgggtataatatagctttctaatttttttctttcacaaaggcaggttcaaaattctgttgaaagaaaaatgctttctgaaactgaggtataacaccagagcttgctgtttaaaggattatatgatgtacatcagttctataaatgtgctcagcagtttaacatgtgaatcctgttttaaagtgctcagatttcaactgtgtaagccattgatataacgctgtaattaaaaatgtttatatgaaataacttaatgttttaaatttatttatgtagatcacatcatttttatcgtatgcagtgcaaatatgtgaaatgtcttttggtttattccaacaattatttattttagaaagtaagtttaaagactttaaggacattcaaagtttaaaatagtgttcaaattgcaaaatttggcaatcttcatataaattggtttcttttctaacttttcaaaaactaacattaaatgtcaattataggaaaacatagttggaaatgtaatcatccaaagatcatttttaaaatgaaatttaattagcacatattgaacatttgacttaattgttaaaccccagttttgttttgtttttttaatcagatttttgcacactgattagtttttgtgttgtggcttttgttgctttattattcaaggttttttttttttttcttccccatgggggagattgtcttccaatgtttaactacgtttaaataaataaaaattgaattttattgttcatttatataaaatctgataccttgatgtaatttcacaatacagttccaatttttatggcttttataattacaatgatattttcttctataataaaatccaaagtaaacatttaaattgtagaactgatatttttcatttatatgaagtataagcctctactgggtctatattgtgaatcatcctgcctttcaaatttgtttcataattgttagatgaaaactatttttttggagatgttactgaagttgattgagcaataaaagtctacttaattagttgttggctat

SEQ ID NO: 135546 - DNA, 4818 bp, Homo sapiens
atggtgttgtgactgcttgatgagtgggttatcacagggctaatgatttcaattcctcaatagggccatcgtctgctggttcatgacttcagctcctaaatgtttattccaatgcctgttctgtatggtgttttcctttatatgggagtttcctcattaaaaggaatccagttatttgaccgtataaaattatttggaatgcctgctaagcatcagcctgatttgatatacctccgttatgtgccgctctggaaggtccatattttcacagtcattcagcttacttgtttggtccttttatgggtgataaaagtttcagctgctgcagtggtttttcccatgatggttcttgcattagtgtttgtgcgcaaactcatggacctgtgtttcacgaagagagaacttagttggcttgatgatcttatgccagaaagtaagaaaaagaaagaagatgacaaaaagaaaaaagagaaagaggaagctgaacggatgcttcaagacgatgatgatactgtgcaccttccatttgaagggggaagtctcttgcaaattccagtcaaggccctaaaatatagtggtgatccctcaattggtaacatatcagatgaaatggccaaaactgcacagtggaaggcactttccatgaatactgagaatgccaaagtaaccagatctaacatgagtcctgataaacctgtgagtgtgaaaataagttttgaagatgaaccaagaaagaaatacgtggatgctgaaacttcattatagaattgaaccaagaggcattatacatatagatatatacatatgtaatgtgtgcgtatcatgtcactatatataagaatattgtatgtcatgctgtttatgtgtgactaccgggtttttaaaagtagtgtctggagtttgtaatgagcaccgtggagactatgtatttaatgaaatgctctctttgaagtgaggtacatggttcttaactattcaaatatttattctgttagaaaaaaaaattttctgttttgcaatagaaggatgtggagaaatgctttcagtctacttttcttaaatctctgttcatcagtggcaattcgtaaaaaccttaagtgatactttgtttatatgtttataatttttaggtgtttcctgaaattttcacatattatttcacttttgttagtgctttatgggaagaatagggagtctataccagtgctgtgggaaaaatggtaacatttcagggcttctctatttgtgtttcatttctgtagatgtccatcgtgtttcactaactggcgttttcttagccatagagatgactgtagaacaatagaaactttaataatgatagtttttaacttttatgtttaaattttttttaaatcttaaaaccttcatatctaggtatccattgtgacagacaagtaaaattgcaggtgatttgataattaagcacccataccatttataacttctgaatttaaaaagttatacaatgccagtttgcaatagttgattttgatgcctttgtagaatattttttctgaatccttatgctcttttaaagccaatgattcccactctgttctctgccttgtctctctttgtcttaaaatgctttagtttccatcaggttcaagttcttgactattattctcttataagtagtaggcgtaaataatcaggagttagaattctctcagaagggtctatgatcagtattactttattaagaattacctttcattttctctttatgttattctttcacttttgtagattacatttaatagcttgttacctgtgattttattttaaaatatttattttgatatgatgcttaaatattatataaacatttggaaaagtaacaaatagagtaaattgttaatgtaaatagttggtgcttactttcatttatgtttattatcttaaagcaattgatagattttacatctttgatataaagcactgccatatttatattttaaaaggaaattagacattttatatgtagctcagattaatgacatttttattttgtgtattagtttttgcttttctgagctttttaaagtctaacaaatctttttagtcatcttttatatacttttagttccacatgaaataaatgttgttaagcctgtaggactggatgaatggggttgtgaaactgatttgacaagagaataatttacaaaaatcaaatgagtattgagaagccacagaaatatcaaaaatggtgacatcactattaggatgaaaattttatgaaattccaatgctccctttaaccatataattaaattacaaaggtatacataattaatctaataaaggatcatgaggaatgccaaaagctgaaattttagcaagtctggtgttttaaattcattataaactatttattaactaatgtaatgtcctcctctaagaccatattgtaagagtcttgttaaaatgatggattcaacttctgcctcggatgagaggttggaaatgtagctgcttttctttagaaaatatgtagctgtcatcatttggtactgcctaaaaagagttagactctattggcaattgatagagtattacccacggtgcttattattgtttatgagcttccattgtaatgattcctttttatttgtagcagcataattatttccaaagaccccagtatttgctgctatttttaaaactcccctgatgtacctgaacaagaggatttcctcacatcatttccttgtgtctggacatcaggggtaacaactgtacttactttacaggaagaaattttaaaactgaaaactacctgggatcatagtgtttctgtgattttatttaattgtgtatagtaattatccagtgccagaaaaaccgtcacttgcaaaatactttgcactcaaaatgtttttacaatgcttctaaatgttactggtttctgctttcttttgactacttgactgacaaaatgatctgactactccatttaagagcaaaggtaactcatgtttaagtaattaactgcttgttttaagtgattatatttcttccactgtttttgaaaaataatcaaagatagcattcattgagagacagtgacagatataatttactacatatattgatttttaaataaagttgccttaaataagtgtatgtaagcagtagtagttgctatgtactgatttacctcaaggtgcaaaataattaaacctgtacatattccatttacaaaataaattcagccctgcactttctttagatgccttgatttccagaatggagcttagtgctactgaataccctggccacagagccacctcaggatattcttttctccaccctagtttatttatttatagatatctgtttacaaagtctgtagtaaatcctgatgctgaccatctgaaatgtactttttttctgaatgctgtttcaatctaaaatagcagcttttgagaaaacaatgatgtaaattccttatgataaaaggatgattctatatattctttaatgatattaaatatgccgaagccaagcacacagtctttctaaagtgtgtgtatgtttgtgtgaatgtgaatgatactgatcttatatctgttaaaagttgttttaaaaagctgtggcatcccattgttcatatttgccaagtcttctgtaaagatgtctaggacgaaatattttatgtgctaatgcatgtatttgtaaaccagatttgtttaccactcaaaattaacttgttttcttcatccaaaaaagtttatttcttccacgtacttaaattttctgtgtgggtataatatagctttctaatttttttctttcacaaaggcaggttcaaaattctgttgaaagaaaaatgctttctgaaactgaggtataacaccagagcttgctgtttaaaggattatatgatgtacatcagttctataaatgtgctcagcagtttaacatgtgaatcctgttttaaagtgctcagatttcaactgtgtaagccattgatataacgctgtaattaaaaatgtttatatgaaataacttaatgttttaaatttatttatgtagatcacatcatttttatcgtatgcagtgcaaatatgtgaaatgtcttttggtttattccaacaattatttattttagaaagtaagtttaaagactttaaggacattcaaagtttaaaatagtgttcaaattgcaaaatttggcaatcttcatataaattggtttcttttctaacttttcaaaaactaacattaaatgtcaattataggaaaacatagttggaaatgtaatcatccaaagatcatttttaaaatgaaatttaattagcacatattgaacatttgacttaattgttaaaccccagttttgttttgtttttttaatcagatttttgcacactgattagtttttgtgttgtggcttttgttgctttattattcaaggttttttttttttttcttccccatgggggagattgtcttccaatgtttaactacgtttaaataaataaaaattgaattttattgttcatttatataaaatctgataccttgatgtaatttcacaatacagttccaatttttatggcttttataattacaatgatattttcttctataataaaatccaaagtaaacatttaaattgtagaactgatatttttcatttatatgaagtataagcctctactgggtctatattgtgaatcatcctgcctttcaaatttgtttcataattgttagatgaaaactatttttttggagatgttactgaagttgattgagcaataaaagtctacttaattagttgttggctat

SEQ ID NO: 135547 - DNA, 594 bp, Homo sapiens
ccttggagactagaaagaaactgctagatggctgtaacacagttcatccatttccgtgaagatgatgatgaagaacatattccccatgatctcttcacggaaatggatgaactgtgttacagagatggagaagaatatgaatggaaagaaactgctagatggctgaaatttgaagaggatgttgaagatggcggtgaccgatggagtaaaccttatgtggcaactctctctttgcacagtctttttgaactaaggagttgcatcctcaatggaacagtcatgctggatatgagagcaagcactctagatgaaatagcagatatggtattagacaacatgatagcttctggccaattagacgagtccatacgagagaatgtcagagaagctcttctgaagagacatcatcatcagaatgagaaaagattcaccagtcggattcctcttgttcgatcttttgcagatataggcaagaaacattctgaccctcacttgcttgaaaggaatggtgagataagttgtggcatccaatttttgctaacacttctactgtaacagctttccagtatgttacgattaacatttggggatatt

SEQ ID NO: 135548 - DNA, 7191 bp, Homo sapiens
ccttggagactagaaagaaactgctagatggctgtaacacagttcatccatttccgtgaagagatcatggggaatatgttcttcatcatcatcttcagtaccaaggataaactgtgttacagagatggagaagaatatgaatggaaagaaactgctagatggctgaaatttgaagaggatgttgaagatggcggtgaccgatggagtaaaccttatgtggcaactctctctttgcacagtctttttgaactaaggagttgcatcctcaatggaacagtcatgctggatatgagagcaagcactctagatgaaatagcagatatggtattagacaacatgatagcttctggccaattagacgagtccatacgagagaatgtcagagaagctcttctgaagagacatcatcatcagaatgagaaaagattcaccagtcggattcctcttgttcgatcttttgcagatataggcaagaaacattctgaccctcacttgcttgaaaggaatggtattttggcctctccccagtctgctcctggaaacttggacaatagtaaaagtggagaaattaaaggtaatggaagtggtggaagcagagaaaatagtactgttgacttcagcaaggttgatatgaatttcatgagaaaaattcctacgggtgctgaggcatccaacgtcctggtgggcgaagtagactttttggaaaggccaataattgcatttgtgagactggctcctgctgtcctccttacagggttgactgaggtccctgttccaaccaggtttttgtttttgttattgggtccagcgggcaaggcaccacagtaccatgaaattggacgatcaatagccactctcatgacagatgagattttccatgatgtagcttataaagcaaaagacagaaatgacctcttatctggaattgatgaatttttagatcaagtaactgtcctacctccaggagagtgggatccttctatacgcatagaaccaccaaaaagtgtcccttctcaggaaaagagaaagattcctgtgtttcacaatggatctacccccacactgggtgagactcctaaagaggccgctcatcatgctgggcctgagctacagaggactggacggctttttggtggtttgatacttgacatcaaaaggaaagcaccttttttcttgagtgacttcaaggatgcattaagcctgcagtgcctggcctcgattcttttcctatactgtgcctgtatgtctcctgtaatcacttttggagggctgcttggagaagctacagaaggcagaataagtgcaatagagtctctttttggagcatcattaactgggattgcctattcattgtttgctgggcaacctctaacaatattggggagcacaggtccagttctagtgtttgaaaaaattttatataaattctgcagagattatcaactttcttatctgtctttaagaaccagtattggtctgtggacttcttttttgtgcattgttttggttgcaacagatgcaagcagccttgtgtgttatattactcgatttacagaagaggcttttgcagcccttatttgcatcatattcatctacgaggctttggagaagctctttgatttaggagaaacatatgcatttaatatgcacaacaacttagataaactgaccagctactcatgtgtatgtactgaacctccaaaccccagcaatgaaactctagcacaatggaagaaagataatataacagcacacaatatttcctggagaaatcttactgtttctgaatgtaaaaaacttcgtggtgtattcttggggtcagcttgtggtcatcatggaccttatattccagatgtgctcttttggtgtgtcatcttgtttttcacaacattttttctgtcttcattcctcaagcaatttaagaccaagcgttactttcctaccaaggtgcgatcgacaatcagtgattttgctgtatttctcacaatagtaataatggttacaattgactaccttgtaggagttccatctcctaaacttcatgttcctgaaaaatttgagcctactcatccagagagagggtggatcataagcccactgggagataatccttggtggaccttattaatagctgctattcctgctttgctttgtaccattctcatctttatggatcaacaaatcacagctgtaattataaacagaaaggaacacaaattgaagaaaggagctggctatcaccttgatttgctcatggttggcgttatgttgggagtttgctctgtcatgggacttccatggtttgtggctgcaacagtgttgtcaataagtcatgtcaacagcttaaaagttgaatctgaatgttctgctccaggggaacaacccaagtttttgggaattcgtgaacagcgggttacagggctaatgatttttattctaatgggcctctctgtgttcatgacttcagtcctaaagtttattccaatgcctgttctgtatggtgttttcctttatatgggagtttcctcattaaaaggaatccagttatttgaccgtataaaattatttggaatgcctgctaagcatcagcctgatttgatatacctccgttatgtgccgctctggaaggtccatattttcacagtcattcagcttacttgtttggtccttttatgggtgataaaagtttcagctgctgcagtggtttttcccatgatggttcttgcattagtgtttgtgcgcaaactcatggacctgtgtttcacgaagagagaacttagttggcttgatgatcttatgccagaaagtaagaaaaagaaagaagatgacaaaaagaaaaaagagaaagaggaagctgaacggatgcttcaagacgatgatgatactgtgcaccttccatttgaagggggaagtctcttgcaaattccagtcaaggccctaaaatatagtggtgatccctcaattggtaacatatcagatgaaatggccaaaactgcacagtggaaggcactttccatgaatactgagaatgccaaagtaaccagatctaacatgagtcctgataaacctgtgagtgtgaaaataagttttgaagatgaaccaagaaagaaatacgtggatgctgaaacttcattatagaattgaaccaagaggcattatacatatagatatatacatatgtaatgtgtgcgtatcatgtcactatatataagaatattgtatgtcatgctgtttatgtgtgactaccgggtttttaaaagtagtgtctggagtttgtaatgagcaccgtggagactatgtatttaatgaaatgctctctttgaagtgaggtacatggttcttaactattcaaatatttattctgttagaaaaaaaaattttctgttttgcaatagaaggatgtggagaaatgctttcagtctacttttcttaaatctctgttcatcagtggcaattcgtaaaaaccttaagtgatactttgtttatatgtttataatttttaggtgtttcctgaaattttcacatattatttcacttttgttagtgctttatgggaagaatagggagtctataccagtgctgtgggaaaaatggtaacatttcagggcttctctatttgtgtttcatttctgtagatgtccatcgtgtttcactaactggcgttttcttagccatagagatgactgtagaacaatagaaactttaataatgatagtttttaacttttatgtttaaattttttttaaatcttaaaaccttcatatctaggtatccattgtgacagacaagtaaaattgcaggtgatttgataattaagcacccataccatttataacttctgaatttaaaaagttatacaatgccagtttgcaatagttgattttgatgcctttgtagaatattttttctgaatccttatgctcttttaaagccaatgattcccactctgttctctgccttgtctctctttgtcttaaaatgctttagtttccatcaggttcaagttcttgactattattctcttataagtagtaggcgtaaataatcaggagttagaattctctcagaagggtctatgatcagtattactttattaagaattacctttcattttctctttatgttattctttcacttttgtagattacatttaatagcttgttacctgtgattttattttaaaatatttattttgatatgatgcttaaatattatataaacatttggaaaagtaacaaatagagtaaattgttaatgtaaatagttggtgcttactttcatttatgtttattatcttaaagcaattgatagattttacatctttgatataaagcactgccatatttatattttaaaaggaaattagacattttatatgtagctcagattaatgacatttttattttgtgtattagtttttgcttttctgagctttttaaagtctaacaaatctttttagtcatcttttatatacttttagttccacatgaaataaatgttgttaagcctgtaggactggatgaatggggttgtgaaactgatttgacaagagaataatttacaaaaatcaaatgagtattgagaagccacagaaatatcaaaaatggtgacatcactattaggatgaaaattttatgaaattccaatgctccctttaaccatataattaaattacaaaggtatacataattaatctaataaaggatcatgaggaatgccaaaagctgaaattttagcaagtctggtgttttaaattcattataaactatttattaactaatgtaatgtcctcctctaagaccatattgtaagagtcttgttaaaatgatggattcaacttctgcctcggatgagaggttggaaatgtagctgcttttctttagaaaatatgtagctgtcatcatttggtactgcctaaaaagagttagactctattggcaattgatagagtattacccacggtgcttattattgtttatgagcttccattgtaatgattcctttttatttgtagcagcataattatttccaaagaccccagtatttgctgctatttttaaaactcccctgatgtacctgaacaagaggatttcctcacatcatttccttgtgtctggacatcaggggtaacaactgtacttactttacaggaagaaattttaaaactgaaaactacctgggatcatagtgtttctgtgattttatttaattgtgtatagtaattatccagtgccagaaaaaccgtcacttgcaaaatactttgcactcaaaatgtttttacaatgcttctaaatgttactggtttctgctttcttttgactacttgactgacaaaatgatctgactactccatttaagagcaaaggtaactcatgtttaagtaattaactgcttgttttaagtgattatatttcttccactgtttttgaaaaataatcaaagatagcattcattgagagacagtgacagatataatttactacatatattgatttttaaataaagttgccttaaataagtgtatgtaagcagtagtagttgctatgtactgatttacctcaaggtgcaaaataattaaacctgtacatattccatttacaaaataaattcagccctgcactttctttagatgccttgatttccagaatggagcttagtgctactgaataccctggccacagagccacctcaggatattcttttctccaccctagtttatttatttatagatatctgtttacaaagtctgtagtaaatcctgatgctgaccatctgaaatgtactttttttctgaatgctgtttcaatctaaaatagcagcttttgagaaaacaatgatgtaaattccttatgataaaaggatgattctatatattctttaatgatattaaatatgccgaagccaagcacacagtctttctaaagtgtgtgtatgtttgtgtgaatgtgaatgatactgatcttatatctgttaaaagttgttttaaaaagctgtggcatcccattgttcatatttgccaagtcttctgtaaagatgtctaggacgaaatattttatgtgctaatgcatgtatttgtaaaccagatttgtttaccactcaaaattaacttgttttcttcatccaaaaaagtttatttcttccacgtacttaaattttctgtgtgggtataatatagctttctaatttttttctttcacaaaggcaggttcaaaattctgttgaaagaaaaatgctttctgaaactgaggtataacaccagagcttgctgtttaaaggattatatgatgtacatcagttctataaatgtgctcagcagtttaacatgtgaatcctgttttaaagtgctcagatttcaactgtgtaagccattgatataacgctgtaattaaaaatgtttatatgaaataacttaatgttttaaatttatttatgtagatcacatcatttttatcgtatgcagtgcaaatatgtgaaatgtcttttggtttattccaacaattatttattttagaaagtaagtttaaagactttaaggacattcaaagtttaaaatagtgttcaaattgcaaaatttggcaatcttcatataaattggtttcttttctaacttttcaaaaactaacattaaatgtcaattataggaaaacatagttggaaatgtaatcatccaaagatcatttttaaaatgaaatttaattagcacatattgaacatttgacttaattgttaaaccccagttttgttttgtttttttaatcagatttttgcacactgattagtttttgtgttgtggcttttgttgctttattattcaaggttttttttttttttcttccccatgggggagattgtcttccaatgtttaactacgtttaaataaataaaaattgaattttattgttcatttatataaaatctgataccttgatgtaatttcacaatacagttccaatttttatggcttttataattacaatgatattttcttctataataaaatccaaagtaaacatttaaattgtagaactgatatttttcatttatatgaagtataagcctctactgggtctatattgtgaatcatcctgcctttcaaatttgtttcataattgttagatgaaaactatttttttggagatgttactgaagttgattgagcaataaaagtctacttaattagttgttggctat

SEQ ID NO: 135549 - DNA, 8095 bp, Homo sapiens
  misc_feature (1136)..(1136): n is a, c, g, or t
  misc_feature (1266)..(1266): n is a, c, g, or t
ggtccgccggttcgctcagttctagcttcaggttccacgccgcggcctcgctctcctactagagccagcccagcagtcgcagcgcgcacacgcacgccccgcgtctcccgcgcccggcgcccggctctccccacgcgcgcacacctcgcgcacggacgcacccacgtttgtcctcgcgcgccgggggctcggcggcggcggcaggggcagcggcagaagcaggcagaccgcgcggggcagtaccgtagcggccgtcacgggctggccggccggccatggaggctgatggggccggcgagcagatgagaccgctactcacccggggtcctgatgaagaagctgttgtggatcttggcaaaactagctcaactgtgaacaccaagtttgaaaaagaagaactagaaagtcatagagctgtatatattggtgttcacgtcccgtttagtaaagagagtcgtcggcgtcataggcatcgcggacacaaacatcaccaccggaggagaaaagataaagaatcagataaagaagatggacgggaatctccttcttatgatacaccatcccagagagttcagtttatccttggtactgaagatgatgatgaagaacatattccccatgatctcttcacggaaatggatgaactgtgttacagagatggagaagaatatgaatggaaagaaactgctagatggctgaaatttgaagaggatgttgaagatggcggtgaccgatggagtaaaccttatgtggcaactctctctttgcacagtctttttgaactaaggagttgcatcctcaatggaacagtcatgctggatatgagagcaagcactctagatgaaatagcagatatggtattagacaacatgatagcttctggccaattagacgagtccatacgagagaatgtcagagaagctcttctgaagagacatcatcatcagaatgagaaaagattcaccagtcggattcctcttgttcgatcttttgcagatataggcaagaaacattctgaccctcacttgcttgaaaggaatggggaaggcctttcagcctcccgccactctttgcgaacaggtctgtctgcctcaaacctttccttgagaggagaatcacctttatctcttcttctnggtcatcttcttccttcttcaagagctggaacccctgcaggctcaaggtgtacaaccccagtacccacccctcaaaacagtcctccttctagccctagcatcagccgcctgacctccagaagttcccaanagagtcagcgtcaggccccagaactactggtttcacctgccagtgatgatattcccacagtagtaattcatccgcctgaggaagacttagaagcagcgctgaaggcgaggagcagaagaatgaggaaaatgttgacttaactccaggtattttggcctctccccagtctgctcctggaaacttggacaatagtaaaagtggagaaattaaaggtaatggaagtggtggaagcagagaaaatagtactgttgacttcagcaaggttgatatgaatttcatgagaaaaattcctacgggtgctgaggcatccaacgtcctggtgggcgaagtagactttttggaaaggccaataattgcatttgtgagactggctcctgctgtcctccttacagggttgactgaggtccctgttccaaccaggtttttgtttttgttattgggtccagcgggcaaggcaccacagtaccatgaaattggacgatcaatagccactctcatgacagatgagattttccatgatgtagcttataaagcaaaagacagaaatgacctcttatctggaattgatgaatttttagatcaagtaactgtcctacctccaggagagtgggatccttctatacgcatagaaccaccaaaaagtgtcccttctcaggaaaagagaaagattcctgtgtttcacaatggatctacccccacactgggtgagactcctaaagaggccgctcatcatgctgggcctgagctacagaggactggacggctttttggtggtttgatacttgacatcaaaaggaaagcaccttttttcttgagtgacttcaaggatgcattaagcctgcagtgcctggcctcgattcttttcctatactgtgcctgtatgtctcctgtaatcacttttggagggctgcttggagaagctacagaaggcagaataagtgcaatagagtctctttttggagcatcattaactgggattgcctattcattgtttgctgggcaacctctaacaatattggggagcacaggtccagttctagtgtttgaaaaaattttatataaattctgcagagattatcaactttcttatctgtctttaagaaccagtattggtctgtggacttcttttttgtgcattgttttggttgcaacagatgcaagcagccttgtgtgttatattactcgatttacagaagaggcttttgcagcccttatttgcatcatattcatctacgaggctttggagaagctctttgatttaggagaaacatatgcatttaatatgcacaacaacttagataaactgaccagctactcatgtgtatgtactgaacctccaaaccccagcaatgaaactctagcacaatggaagaaagataatataacagcacacaatatttcctggagaaatcttactgtttctgaatgtaaaaaacttcgtggtgtattcttggggtcagcttgtggtcatcatggaccttatattccagatgtgctcttttggtgtgtcatcttgtttttcacaacattttttctgtcttcattcctcaagcaatttaagaccaagcgttactttcctaccaaggtgcgatcgacaatcagtgattttgctgtatttctcacaatagtaataatggttacaattgactaccttgtaggagttccatctcctaaacttcatgttcctgaaaaatttgagcctactcatccagagagagggtggatcataagcccactgggagataatccttggtggaccttattaatagctgctattcctgctttgctttgtaccattctcatctttatggatcaacaaatcacagctgtaattataaacagaaaggaacacaaattgaagaaaggagctggctatcaccttgatttgctcatggttggcgttatgttgggagtttgctctgtcatgggacttccatggtttgtggctgcaacagtgttgtcaataagtcatgtcaacagcttaaaagttgaatctgaatgttctgctccaggggaacaacccaagtttttgggaattcgtgaacagcgggttacagggctaatgatttttattctaatgggcctctctgtgttcatgacttcagtcctaaagtttattccaatgcctgttctgtatggtgttttcctttatatgggagtttcctcattaaaaggaatccagttatttgaccgtataaaattatttggaatgcctgctaagcatcagcctgatttgatatacctccgttatgtgccgctctggaaggtccatattttcacagtcattcagcttacttgtttggtccttttatgggtgataaaagtttcagctgctgcagtggtttttcccatgatggttcttgcattagtgtttgtgcgcaaactcatggacctgtgtttcacgaagagagaacttagttggcttgatgatcttatgccagaaagtaagaaaaagaaagaagatgacaaaaagaaaaaagagaaagaggaagctgaacggatgcttcaagacgatgatgatactgtgcaccttccatttgaagggggaagtctcttgcaaattccagtcaaggccctaaaatatagtggtgatccctcaattggtaacatatcagatgaaatggccaaaactgcacagtggaaggcactttccatgaatactgagaatgccaaagtaaccagatctaacatgagtcctgataaacctgtgagtgtgaaaataagttttgaagatgaaccaagaaagaaatacgtggatgctgaaacttcattatagaattgaaccaagaggcattatacatatagatatatacatatgtaatgtgtgcgtatcatgtcactatatataagaatattgtatgtcatgctgtttatgtgtgactaccgggtttttaaaagtagtgtctggagtttgtaatgagcaccgtggagactatgtatttaatgaaatgctctctttgaagtgaggtacatggttcttaactattcaaatatttattctgttagaaaaaaaaattttctgttttgcaatagaaggatgtggagaaatgctttcagtctacttttcttaaatctctgttcatcagtggcaattcgtaaaaaccttaagtgatactttgtttatatgtttataatttttaggtgtttcctgaaattttcacatattatttcacttttgttagtgctttatgggaagaatagggagtctataccagtgctgtgggaaaaatggtaacatttcagggcttctctatttgtgtttcatttctgtagatgtccatcgtgtttcactaactggcgttttcttagccatagagatgactgtagaacaatagaaactttaataatgatagtttttaacttttatgtttaaattttttttaaatcttaaaaccttcatatctaggtatccattgtgacagacaagtaaaattgcaggtgatttgataattaagcacccataccatttataacttctgaatttaaaaagttatacaatgccagtttgcaatagttgattttgatgcctttgtagaatattttttctgaatccttatgctcttttaaagccaatgattcccactctgttctctgccttgtctctctttgtcttaaaatgctttagtttccatcaggttcaagttcttgactattattctcttataagtagtaggcgtaaataatcaggagttagaattctctcagaagggtctatgatcagtattactttattaagaattacctttcattttctctttatgttattctttcacttttgtagattacatttaatagcttgttacctgtgattttattttaaaatatttattttgatatgatgcttaaatattatataaacatttggaaaagtaacaaatagagtaaattgttaatgtaaatagttggtgcttactttcatttatgtttattatcttaaagcaattgatagattttacatctttgatataaagcactgccatatttatattttaaaaggaaattagacattttatatgtagctcagattaatgacatttttattttgtgtattagtttttgcttttctgagctttttaaagtctaacaaatctttttagtcatcttttatatacttttagttccacatgaaataaatgttgttaagcctgtaggactggatgaatggggttgtgaaactgatttgacaagagaataatttacaaaaatcaaatgagtattgagaagccacagaaatatcaaaaatggtgacatcactattaggatgaaaattttatgaaattccaatgctccctttaaccatataattaaattacaaaggtatacataattaatctaataaaggatcatgaggaatgccaaaagctgaaattttagcaagtctggtgttttaaattcattataaactatttattaactaatgtaatgtcctcctctaagaccatattgtaagagtcttgttaaaatgatggattcaacttctgcctcggatgagaggttggaaatgtagctgcttttctttagaaaatatgtagctgtcatcatttggtactgcctaaaaagagttagactctattggcaattgatagagtattacccacggtgcttattattgtttatgagcttccattgtaatgattcctttttatttgtagcagcataattatttccaaagaccccagtatttgctgctatttttaaaactcccctgatgtacctgaacaagaggatttcctcacatcatttccttgtgtctggacatcaggggtaacaactgtacttactttacaggaagaaattttaaaactgaaaactacctgggatcatagtgtttctgtgattttatttaattgtgtatagtaattatccagtgccagaaaaaccgtcacttgcaaaatactttgcactcaaaatgtttttacaatgcttctaaatgttactggtttctgctttcttttgactacttgactgacaaaatgatctgactactccatttaagagcaaaggtaactcatgtttaagtaattaactgcttgttttaagtgattatatttcttccactgtttttgaaaaataatcaaagatagcattcattgagagacagtgacagatataatttactacatatattgatttttaaataaagttgccttaaataagtgtatgtaagcagtagtagttgctatgtactgatttacctcaaggtgcaaaataattaaacctgtacatattccatttacaaaataaattcagccctgcactttctttagatgccttgatttccagaatggagcttagtgctactgaataccctggccacagagccacctcaggatattcttttctccaccctagtttatttatttatagatatctgtttacaaagtctgtagtaaatcctgatgctgaccatctgaaatgtactttttttctgaatgctgtttcaatctaaaatagcagcttttgagaaaacaatgatgtaaattccttatgataaaaggatgattctatatattctttaatgatattaaatatgccgaagccaagcacacagtctttctaaagtgtgtgtatgtttgtgtgaatgtgaatgatactgatcttatatctgttaaaagttgttttaaaaagctgtggcatcccattgttcatatttgccaagtcttctgtaaagatgtctaggacgaaatattttatgtgctaatgcatgtatttgtaaaccagatttgtttaccactcaaaattaacttgttttcttcatccaaaaaagtttatttcttccacgtacttaaattttctgtgtgggtataatatagctttctaatttttttctttcacaaaggcaggttcaaaattctgttgaaagaaaaatgctttctgaaactgaggtataacaccagagcttgctgtttaaaggattatatgatgtacatcagttctataaatgtgctcagcagtttaacatgtgaatcctgttttaaagtgctcagatttcaactgtgtaagccattgatataacgctgtaattaaaaatgtttatatgaaataacttaatgttttaaatttatttatgtagatcacatcatttttatcgtatgcagtgcaaatatgtgaaatgtcttttggtttattccaacaattatttattttagaaagtaagtttaaagactttaaggacattcaaagtttaaaatagtgttcaaattgcaaaatttggcaatcttcatataaattggtttcttttctaacttttcaaaaactaacattaaatgtcaattataggaaaacatagttggaaatgtaatcatccaaagatcatttttaaaatgaaatttaattagcacatattgaacatttgacttaattgttaaaccccagttttgttttgtttttttaatcagatttttgcacactgattagtttttgtgttgtggcttttgttgctttattattcaaggttttttttttttttcttccccatgggggagattgtcttccaatgtttaactacgtttaaataaataaaaattgaattttattgttcatttatataaaatctgataccttgatgtaatttcacaatacagttccaatttttatggcttttataattacaatgatattttcttctataataaaatccaaagtaaacatttaaattgtagaactgatatttttcatttatatgaagtataagcctctactgggtctatattgtgaatcatcctgcctttcaaatttgtttcataattgttagatgaaaactatttttttggagatgttactgaagttgattgagcaataaaagtctacttaattagttgttggctat

SEQ ID NO: 135550 - DNA, 1127 bp, Homo sapiens
ggtccgccggttcgctcagttctagcttcaggttccacgccgcggcctcgctctcctactagagccagcccagcagtcgcagcgcgcacacgcacgccccgcgtctcccgcgcccggcgcccggctctccccacgcgcgcacacctcgcgcacggacgcacccacgtttgtcctcgcgcgccgggggctcggcggcggcggcaggggcagcggcagaagcaggcagaccgcgcggggcagtaccgtagcggccgtcacgggctggccggccggccatggaggctgatggggccggcgagcagatgagaccgctactcacccggggtcctgatgaagaagctgttgtggatcttggcaaaactagctcaactgtgaacaccaagtttgaaaaagaagaactagaaagtcatagagctgtatatattggtgttcacgtcccgtttagtaaagagagtcgtcggcgtcataggcatcgcggacacaaacatcaccaccggaggagaaaagataaagaatcagataaagaagatggacgggaatctccttcttatgatacaccatcccagagagttcagtttatccttggtactgaagatgatgatgaagaacatattccccatgatctcttcacggaaatggatgaactgtgttacagagatggagaagaatatgaatggaaagaaactgctagatggctgaaatttgaagaggatgttgaagatggcggtgaccgatggagtaaaccttatgtggcaactctctctttgcacagtctttttgaactaaggagttgcatcctcaatggaacagtcatgctggatatgagagcaagcactctagatgaaatagcagatatggtattagacaacatgatagcttctggccaattagacgagtccatacgagagaatgtcagagaagctcttctgaagagacatcatcatcagaatgagaaaagattcaccagtcggattcctcttgttcgatcttttgcagatataggcaagaaacattctgaccctcacttgcttgaaaggaatggtgagataagttgtggcatccaatttttgctaacacttctactgtaacagctttccagtatgttacgattaacatttggggatatt

SEQ ID NO: 135551 - DNA, 143 bp, Homo sapiens
agaagcagagttgaggcttgttcaggaaaaccttgtgaccaagagataccaaacaaccttatatttggccacaaactaaagggctgcctgagctcttacttccatgaaactaattaaaaaataagaagagcatggggtgatca

SEQ ID NO: 135552 - DNA, 705 bp, Homo sapiens
taaattcaacaagggaaagaagatgagaaaagtgagagaagaggtaacaggagatggaaaggggaatacacaggaagggtcacaggcacagccagagaagcagcagcaaaggacaacaccaaatgaaaacaagcaggagacaaaacagctccaccgacacgggaggagaaagtatctctggcgtgaggaggggactggacaggtgcactaactgtactctcaactttgtgcagaataacaaatatcagaaaatgtcctaactaggttaagctttaaatacatatttttaagaacatgatcaatcacataggcacagcatggaggaagaagctaacctggtatggttcatctggaggcagcaatgttcatctcaggattctacaggtaacatgacccaagcatgctacaaccagcccacgtatccttcaggataacagcagctgtggcttcacacatgaacaatgcaggaaacagaaacccaggcccctgcactggagacagggatgccacaacacattccagttcccccaaaatatacacagtataaagactgctgttatgaggacagtgaaacagtatattcaagctccaaggaaagaaagggtatgagccaaacatttaaaagaacccaagttttcctcagattataagagcaaagggcaggcattctcacctaggaagaaatcgtgaagcaaaccctcatga

SEQ ID NO: 135553 - DNA, 193 bp, Homo sapiens
cttaaattcaatgatttaaaacacacacacatactttagagataatcagaagcaaatatttttttaaatgccagaatatacacataagcatagttaaataaaaaaaaatgttcactctgttgatgttaaagtccatggactcaaatctctttggacaattgggttcaaaatttttcacactgagatatattta

SEQ ID NO: 135554 - DNA, 332 bp, Homo sapiens
ttgtgtcctctttgtgtgtgtgtgtgacaaggatacttaacacaagatctctctcaataaatttttaagtatataatactttactgttcactataggtatcacgttgtacaggagatctctggaacttattcatcttgaataaatttatatttattgagtaacagctctcgttatccccctgattccatgcccttccaccattctattctctatcgccatactgttgattattttagatgcctttttatacgagaaatcatgcagtatttgctgatattacctatctcctgttgttttcttgttaaaaagaaaacatcccttgtgagggata

SEQ ID NO: 135555 - DNA, 489 bp, Homo sapiens
gtcacaaaagggcaaatactgtgtgtgattccacttacatgaggtaccaacaatagccaaattcaggaagacagcaattagaatggggtctccaggccaggtggaggagtggggaattattcagagttactgcttaatgggtacagagtatcagttggggaagatggaaaagttctggaaatggataatggtgatggttgcagaacagtgtgaatgtacttcatgccactgaattgtacacttaaaatggttaaaatggtaaatttgatgttatctatatggaaccacagttttttataaaaggatgaaactcagaaagccagagtcacctcaaaggtctctgctgctgctcaggcgtcagcctactgtgaatggacgggattgtgggaacgaagccttagataaggtattagagctggttatatgccattccacaggaaaggccatcgtaatccagagggagtcaaaactaatgacaccttccgatgg

SEQ ID NO: 135556 - DNA, 520 bp, Homo sapiens
gtcttttcatttaatcctcacaaccaccctgcaaggtgattttcatcatgtctaatttacagaaggagaaactgtggcttgcccaaggtcacaaaactaacaaaggattcaaatccaggaacgtcagatcatgatgcctttgccgtctgcattgagcgccgcagccctaattggttagcttgcgccacctagtggcagaactaaaacaggaaccaggtcagcctgcaacaaatattaaagcagcaggctgcacccttcaacggggcttgtgaaacctggagaagcacaggcacgcctgtgacccacactcactccaaccccacaactgataaaagacaacgcaaggcccagaatcagataacctgggaaagtgtgttgtaaatgaagcatcatttcctcttgaaatacattttttgtcttcctgtactgggaacataaaagtccctcaccatccccttgacctctcagcatttccagggcttccctcgacctcagtctgctgtccccctcccggacccag

SEQ ID NO: 135557 - DNA, 483 bp, Homo sapiens
cgatgcctgtttgctggagaggtagactgaggcagggagaagtgaaaagacttgccttgggccatcagcttcagagtccgctctgcctgactccacacatccttctcctttctggctgtctcatttgtgacacttctacatttctcctgcttcgggctgggaattccccgagggacagccctgagccacctctctgtcttatctctgccagggatgcaggagacagggagccttggtgaaggtctttcgttttttcgtttgtttgtttttgttttgttttgttttgtttcagacagagtctcgctctgtcacccctgccagagtgcaatggcactatctcggctcactgtaacctctgcctcctgggttcaagcaattctccttgcctcagcctcccgagtagtggatcacttggggccaggagtttgagaccagcctggccaacatggcaaaatgccgtctctactaaaaatacaaaaatta

SEQ ID NO: 135558 - DNA, 184 bp, Homo sapiens
cattctgggcaggcagagcagccgcgggaaagggaccatctcattcattcggcaaatcagcaaacaccatctgagcgtatgctctgtcaggacgcagggcacgggtggcagaacggatgtagttgacagaaatgcagtgatctctactatcttctgctcttgtaaaaccttgattccttaccgc

SEQ ID NO: 135559 - DNA, 725 bp, Homo sapiens
tccacagcattggtgagacaaagtattggatctgcattcttttcttttctggctcagaagcttatgtagttagcatgttccttaatataagatcttccgaaacagtgctaatgcaatcaatgggaactgcatttatgtgtcgtcagtcccacatatactgatgcacatatttgtaaggaactgcttgagacactttgctgtcttcctcatgcaaacaagagcacaggtatatgttatcgaaagaaaccagaaatgatctagtaagactaaattgtgcctaaagtaatggaaagaaaaacagcaggccaaggcctggccattatttattgagtgctgacagagaactctgcactctgcccagtgccaggccagacatgagagaagacatgcttttctgcttagtggtcttatcatttcagtgtaagcacatagtgtaacaacttgtctaatgtattttgggctatctgagatctagaataatagattacctaagattcagatcatcttaattaggatgttagcagattgaaatggaatggggttcttgatgcaagcaaatgagtagtaaatacattatcaattctacctcttctgtgcagaaatatttctaaaagccagtatccgatctggttcctttcctgctgaactatataaacatagtcctgatttgcagtacctagggagaactctttctgctactgtggatttttcaatagccccttttt

SEQ ID NO: 135560 - DNA, 268 bp, Homo sapiens
cggtccttatacccgacgatcacagctgattttttttaatacacagatttttttttactattatttttcttacatcttatgatgatcctcattctaagtttttatggtctcctttcctgtctcttctcttacaacttttctttcctaccctattaaaccttcccaacctctaaaagtcccaaagaatcttctgccaactagctaaatcgtttgccttttaggtttgcaacgtaaggaagttcacttacggtgatcactaaggtttttt

SEQ ID NO: 135561 - DNA, 799 bp, Homo sapiens
tattgaaatgtcctcacaacacagcagtctgacttccctcagagcaagtgctctacaagagggaggcagaagttgcaatgacctaacaacagaaatcacaaaccatccttgccacgatattccagtggttacacaggttagccctgttcagcaggagaggggactacacaaaggcatgataccaggaggcaaggaccactgggccatcttggaggctggctagcacaccaaggcacttagaattaacatacatgcaccaaactcctgagcatgactttcaaaacccttcgtcatctgactcctactgcactctaacctcatttcatcccaccctttctcagcccaataaactccagccttcctagcctcctccttctcctcaaaggtgagggatttgtacctatttcagagcctttatattaactgctccctcagactggattaattctctccactcatcattttatcatccagatctgagcataaatagcacctcctcagagaggccaccaagtctaaaaggccatctatcctctttctgtcccagaactcaatttttttggcagaacacttatcaccgtctgacatttgagcacatctggctcagtgttaaactctctggcacaattagtcactacggttaacatacctttaaccttcaaatgcataacctagcccaacaccctggccttgcagttgtggaaactgctcagctcgaaggaccttgtccttcaatctgcctcactcacactctaccatcatcaaactcagctcatcttgtgtcaccaaattcaattca

SEQ ID NO: 135562 - DNA, 357 bp, Homo sapiens
cagggtctcactgtgttgcccaggctggagtgcagtggcttgattgtcactcacagcagccttgaactcctgggctcaagaatcctcccacatcaaactgccggtgttacaggtgtgccactgtgcctggctaatttttaaaaaaaattttgtagagctggggtctcactgtgttgctcagattggtcttgaactcctgggttcaagcaagccttctgccttggcctcccaaagtgctgggattacaagtgtgagccaccgtgcccggcctgttttttaacctgcaaagtcacctgcccactttctccattctttctttttcacttaaaaagccttcttctggtcaagttattttta

SEQ ID NO: 135563 - DNA, 114 bp, Homo sapiens
ggagcatttcaaggctgagtagcatctcatatatactctaaaataagtttgcctaatgactttttagcaccacttgatttatgttttggctaagagttctaaatagtagtagtc

SEQ ID NO: 135564 - DNA, 517 bp, Homo sapiens
ctggcaagtgacagagccaagatttaaacccatgtctctctgccttcaagcccaggcaggcacgttctttccaagacactacattggctctcactttccaagtaggtgcattccaagagggagggaggacatcagcgtccagcagaccccaggcttctcccatctcctctacttgccctatctacatgggacccactgcggtaataggggaaggggacaacctagaaagcagagtgaggattgcctgctcttccaggaagaggtaaacgtttaccaagttaatagcaaacacacttagctggaaagggggctgtgggtaaggggccccagggtagggaggctgagcataggggggcatgggtggctggggcccccccggatatccagggttggggggaggatagttgtccccagacaccaaaaaactcttttcatgggacatggcctcgggttccgcggtccgccccggtggccgggcgccgcaggccggtacgcacggtgtccgctgcgcggccgc

SEQ ID NO: 135565 - DNA, 296 bp, Homo sapiens
attcaactatctatctatctatctatctatctatctatctatctatccatatctttgcactgtatggtgagagcctagaggcaatgacattccagtaacaagcagcacatttggcacccagatcttggttactaaataacattctctggctgggtatggtggctcacacctgtcttccctgcatattgtctatgcctcctcagcacaggcttttgccaaaacttgaaccttagggaatgcaatgccaccaaattcacctgccccaggattgtcactgctgctaccctgcagcatct

SEQ ID NO: 135566 - DNA, 535 bp, Homo sapiens
ctcttattgctgatgggaaccttgtgaaaggacctgcatctcctggacaaaccaagacacctatggcagtgcaggccccaccccctgaaaagcatcacactacttgactgactgaccacgccagcactatggataaacctcaagccttttaggttaactcctgtctgccacagattctcaggaaaagagatcatctttctaaatgcagattcacaggcagatgacagtccatgacctgaataacctcttagtgaagattttcagattctgctccacattctgggatgcttaccagggcttcagatttaggaggagaaagtttattttattttattttatttttattatgacctctatccaggcctcctttccttgcatgcaaaatcagtgtgatagaaaggagaatgaacaacaagcatattgtggtattagtgaaagaagcacctaccatttggaagcccaaagaggaatgtttatttttttaatttttatttttacttgtaaaaataaaatatttaatttatgatcttgaaaa

SEQ ID NO: 135567 - DNA, 540 bp, Homo sapiens
ttagacaaatacagacgctggagctagagaagagttctgttcaatatgtacctcaccaggaaccgtaggcacgaagtggccagactcctcactgtggagtgagagagttgcagagaggcggagaactttaccctttgtgggtagtttcccgtcacctcccactcctcaaaagcaccccggccagaacgccaagtctggctgattttcaggaggtgctactagatgagaagagagggttctcctattatttatttttaaggttgagaagggctcatcggtgagggaactcagcctcaaacaatgactcgcaggctggtggatcaggtcctcgtttcttactctttttgggaagtagggatgttttagtctctccttgccctgctagatttcccattgacggagtgtccccagggccctttagagcatccttgcctgctggagagtaaagagcagccccattccttgcagggtcctgtcacctccaacctgccaggtggaatcctaagagctggcatttagggaacacattcttccccaacc

SEQ ID NO: 135568 - DNA, 589 bp, Homo sapiens
  misc_feature (6)..(6): n is a, c, g, or t
agtcgncggagactctctcttccccccgctgctctctgcggggctcccgagccccagcccgggctgtccgcctcttggggagtcggggaatcgcttccgaatatcggggcatctcgaagggaccccggggagaggaggggtggggggaagagagagttgcagagaggcggagaactttaccctttgtgggtagtttcccgtcacctcccactcctcaaaagcaccccggccagaacgccaagtctggctgattttcaggaggtgctactagatgagaagagagggttctcctattatttatttttaaggttgagaagggctcatcggtgagggaactcagcctcaaacaatgactcgcaggctggtggatcaggtcctcgtttcttactctttttgggaagtagggatgttttagtctctccttgccctgctagatttcccattgacggagtgtccccagggccctttagagcatccttgcctgctggagagtaaagagcagccccattccttgcagggtcctgtcacctccaacctgccaggtggaatcctaagagctggcatttagggaacacattcttccccaacc

SEQ ID NO: 135569 - DNA, 488 bp, Homo sapiens
  misc_feature (6)..(6): n is a, c, g, or t
agtcgncggagactctctcttccccggggagaggaggggtggggggaagagagagttgcagagaggcggagaactttaccctttgtgggtagtttcccgtcacctcccactcctcaaaagcaccccggccagaacgccaagtctggctgattttcaggaggtgctactagatgagaagagagggttctcctattatttatttttaaggttgagaagggctcatcggtgagggaactcagcctcaaacaatgactcgcaggctggtggatcaggtcctcgtttcttactctttttgggaagtagggatgttttagtctctccttgccctgctagatttcccattgacggagtgtccccagggccctttagagcatccttgcctgctggagagtaaagagcagccccattccttgcagggtcctgtcacctccaacctgccaggtggaatcctaagagctggcatttagggaacacattcttccccaacc

SEQ ID NO: 135570 - DNA, 859 bp, Homo sapiens
ttatgcctttcggccggaaccgccatcttccagtaattcgccaaaatgacgaacacaaagggaaagaggagaggcacccgatatatgttctctaggccttttagaaaacatggagttgttcctttggccacatatatgcgaatctataagaaaggtgatattgtagacatcaagggaatgggtactgttcaaaaaggaatgccccacaagtgttaccatggcaaaactggaagagtctacaatgttacccagcatgctgttggcattgttgtaaacaaacaagttaagggcaagattcttgccaagagaattaatgtgcgtattgagcacattaagcactctaagagccgagatagcttcctgaaacgtgtgaaggaaaatgatcagaaaaagaaagaagccaaagagaaaggtacctgggttcaactaaagcgccagcctgctccacccagagaagcacactttgtgagaaccaatgggaaggagcctgagctgctggaacctattccctatgaattcatgggcataataggtggttaacaacacaaaaactaacggacctctggggtctacaaaaaacaagacgaaaaagccagaaaagaacaaaaacgtttgtgcggccgcccgtgggcccctaagaaaaaggttttcttaaacacaactgtgttggggcgcccggcccccacagagggtaggtgaacgtaggggccaacggcgggtccccaggaagaccccgtgcagtgacagggtcgtgggttccccccacaaaaaaaaaggctcgggggcacggcgttctgcaacacccacaggggtcctggggcaagggacttaaaggaccagagcgatagccgcgcgggat

SEQ ID NO: 135571 - DNA, 606 bp, Homo sapiens
tttaaagatgcaaagtattgatcctgggtatgtctgtgagggtgttgccaaaggagaataacatttgagtcagtgggctgaggaaggcagacccacccttaatctgggtggacaccatctaatcagctgccagcaaatataaagcaggcagagaaaatgtgaaaaagctagactggcttagcctcggaacccacatctttctcccatgctgaattcttcctgtcctcgaacgttggactcccaagtttttcagctttgggactcagactggcttccttgcccctcagcttgcaaacagcctattgtggaatcttgtgattgtgtgagttaatactacttaataaactcctctttatatatacatatgtatacacatatatctcctattagttctgtccctctagagaaccccgactaatgcagggcccatctgatacttgctcaaaaaatttaactggaaatgcaaaggaatggaggtccttagtagtagtagctaaagctgaaaagtcataatgcagaagacaggaccatgacagaccatgtgcaagctaaattttggaggatataaaaagtattaataagaaggcagaaaaaaattaaccactg

SEQ ID NO: 135572 - DNA, 733 bp, Homo sapiens
tctttttcagctagataccttgacttttctgaaaaactaaaaccagaagcatttcacgaagctaagcacaggacagaaggtttgctgggatgggaaacctgctcaaagtccttaccagggaaattgaaaactatccacactttttcctggattttgaaaatgctcagcctacagaaggagagagagaaatctggaaccagatcagcgccgtccttcaggattctgagagcatccttgcagacctgcaggcttacaaaggcgcaggcccagagatccgagatgcaattcaaaatcccaatgacattcagcttcaagaaaaagcttggaatgcggtgtgccctcttgtcgtgaggctaaagagattttacgagttttccattagactagaaaaagctcttcagagtttattggaatctctgacttgtccagccgtacacaaccaaaaagcaccaaacagccatggcaaagggaacaggccctggcaaaaagaggacaagggggttagatatgggcacccgggaaaagaggtatatatacaataggttaacacctatcgaattcgattgaaagagacacgtggaaaagggaaaaaattgggaaagagagagggggcgaaaagcaaacgacgcaggggaccgtaagtgtccaaggaacacagtggaactttacaggagcgttaacgttaaaccaaggggcaaacacagagggaagacaaaccaggaaaaagaatgaa

SEQ ID NO: 135573 - DNA, 234 bp, Homo sapiens
catattaaataggtagtcataataagtggaatcgatgtggaaagaggttcatattgaatgagaaaagcaagttacatagcagtatatataatgatctcagttttgtaagaatagatttgattttgtgtgtgtttattatttttctcatttatgcataggaaattgtctagaatagtatgcaaaggaaaaaagccctgtttatcaagttatgctatttaaattacttgatttttt

SEQ ID NO: 135574 - DNA, 594 bp, Homo sapiens
gagcaagttcaggtgtggttacatcagggttcccaacgttttttccacccccacactcctgacagatccctcggtgatatagaatccctccacccaaggacatttatcaggatctttagggaacagcgcatattttgagaaaaagtccagggttggaaagtggggttcccgtctccccattgacattgagaatgactaggttagatggtatattcctagtggaagcaaaagtcttagttacagaaagcattatttgagcaaacctaaactaaaggagatgctttaacacctgaagaagctgggtaaagcggggggggggggtaaagaagaaggggggtgactttgatgaccaccattcctagtggtgctggtattaggggggcaccctcctgttagagtgtgagcttaccacatggttggtgagcctgggacacagatagctaatggtaatggtgacaaaggagatacgcgctgtgataaagggacaaacagaatgctgccagcatgcatgggataatcattccgaagtggtacttgagatggtctttgagtaagatttaggaaagaaatttcgggctgagagtaccatggcca

SEQ ID NO: 135575 - DNA, 722 bp, Homo sapiens
aggagagtgaaaaatatgaactttagtctttgttttattttatgtttgctgagaaaaatgctgtactttatttatttatttattatttccataggtttctgggggaacaggtggcatttggtgacatgactaagttctttagtgatgatttgtgagatttaggtgcacccatcacctgagcagtatccgctgaacccagtttgtagtcttttatccctcaccctcctcccagcctttcccccaagtccccaaagtccattgtatcattcttatggctttgcatcctcatagctcagctcccacgtatgaaagagaacatgatatttggttttccatgctgagttatttcacttagaataatagtcttacttccatccaggttgctggaaatgccatgaatttattccttattatggctgaggtggtattcctcatatatatatatatgtatgtatatcacggtttctttatccactcattgattgacgggcatttgggctggttccatatttttgtaattgtaatttgtttgagttcctcatagattctggataatagccctttgtcagatgtatagactgtgaagatttcctcccactctgtggttgtctgtatactctgctgattgttccttttcctgtgcagaagctctttagttaagtctcacctatttgtttctgttgcatttgcttttgtgttcttggtcatgaagtctttgccta

SEQ ID NO: 135576 - DNA, 496 bp, Homo sapiens
tgtgtctcaatttcctcatctgtaaaaatattaccacctaccttgaaagtttccagttaaataaaatgtaaagtgtctacactgatctgacaaaagcattacaattattaaatataatcaactttccaaaccttaaatcatcttaagtctaaactcatactcatagtgtggctcacaaaacagcagaatcagcatgacctgaaagcttgttaaaaatgcagaatctcagccgggtgcagtggctcacacctgtaatcccagcactttgggaggccgaggcgggcagaccaagaagatcaagaccatcctggccaacatggtgaaaccccttctctactaaaggtccctaaagttgttcacttgatctgtttcagagttctgatactgagtgaagagcacctggtagtttactcttaattctgaaggactcgagagactaacagagatcatctaatctataataattgcacctccaaaaggcagcttttcaaacctg

SEQ ID NO: 135577 - DNA, 752 bp, Homo sapiens
gtacctcacaacctctgtgtttagatttttcttttatttttataatagtcaatggcagccaacataggtagtttgtttttttttaacctaaaaagtgatttgttctttacattaatgatgtatgggggtaaattctgagaaaaaattcttttcaatttcagaattgttataattggacacttaaaatttttgacatgatttaaatttttttaatattaaaaatgttttaaaaattttaaaaatagtaatatacagtaaaaattctgccttctgtccctctccttcagctacctcctactttcccttccctctgaaagatggtatatgctttcagatactcaaaccttttctaattttatgtgtgtgtgtatttttctacctttgttacacaagtgaaactgtactattcacacttttttttcccttgataatcttggagatctttttaaatcagaacataaattatttttaaccttgcatgtattccattgaataaccataccaaatttttatttaacacagttccatggggacatttagttattgagcattctttatttaacttattttagatatttttgtgttgttgtttaaaaaatgtccagaatatgaaattgaaatgtttgctagtaactaaattacctggctcttgatgattttttcccgaagtaacttaaattttattaaaatactagaattgtcttgtaaatggatgtcaaggccttctgtgcatttggcacctcataagtcag

SEQ ID NO: 135578 - DNA, 296 bp, Homo sapiens
gtcgggcactaagagctactccagcctgggtaataagagctactccagccgtgggcaatgagaccaaaccctattgtagccatctctggagggcaagaagtagtgagagactagccctattccagaaacccccactccccccatttgtgttgctgatcaatgcagtggtttccatggtggcagttcacaagatgctgaccaacttttcctgtgcttgtttaggttcaaggcctagaacccatgctcaacccagcccagctcttctgtccattgtattctacgctcctcattttgag

SEQ ID NO: 135579 - DNA, 212 bp, Homo sapiens
gagaaaacaaaattgcttgataaaaatgccatgttaacaactgaggaaattgttttacatatattaattttaacacaggaataatatgtcaaaccaggatttctcaacctcagcactatcgacattttaagctgtatagtttttggtgtgggaggctgtcctgtatattgtagaatgtttagtggcagccctggcctctacccaaggggcca

SEQ ID NO: 135580 - DNA, 483 bp, Homo sapiens
tccactagtgtaggctttcagatctatatagcatactgggttgaatagtgtcatcccaaaattcatatctactcagaacctcagaatgtgaccttatttggaaatagggtctttgcagacataatgagttaaatgaggtttcactggattagggtgagccttaaatctgatgactggtggtgctggatttatgtgaatgaacacacacagtcatagggaagaaggccatgtgacagcagcagaagaccctggaattacatagccacaagccaaggaaggcgacgactgccaggagctactagaagccaggagagaggcacagaacagaccctccctaagagcctctagggaggcgccaaccctgcccacaccttgattttagattcctggctcccagaactgtgaaggaacacatttctgttattttaagccacccggtttgtgctaatctgttgcatcagccctaggaaactaacacggaat

SEQ ID NO: 135581 - DNA, 559 bp, Homo sapiens
catgtgtgttcctttgatgataatgcagacagaattaaaatgttgtctatagtagtatttcttttaacatgaggaaattggtgtcattataaatttcttttgtgatgtgtagaatggaaatggagctccagcctgggtgacagatcaaggactctgtctcaagaaaaaaaaaaaaaaaagtgaactattatttgacgtacaactaagaaagagaaaatgccatttaaccatgcacgtgccgtaagttttaaaatgcttcctaatttgaatgatgataattttttcttaaaaaatcatgagtgtcagatatatgagtactatccatatattccttgttaaaatgaatactatagacagtaactactttcagattttaaataaatgttccttatatttgtgggaagacacaagaagccttttgtatgtgtgtgtaatttgggaaatgctttgcattgcctgaaggacatctagagtctacataggtctaaggctaaaaagcagagtgattcagagaaagaatataagattattgctgaaaatatactatttactggtgata

SEQ ID NO: 135582 - DNA, 394 bp, Homo sapiens
aaaaaaaaaaatttgacctaatagattgacttctgggagtttaatgaaataattaagaatgtgctgaaatatttaattcaaggatgtctgtagtagcattatttataaaaatgaaacgtttgagggccaggtgcagtggcttatgcctgtaatcccaacaccttgtgagggaggctgaggcaagtggattggttgaactcaggagcccagcctgggcaacatggtgaaaccctgtctctacaaaaaatataaaaattaggtaggtgggtgtggtggcacacaccttagtcccagttgcttgggagactgaggtgggaggattgcttgagcccaggaggtccaggctgcagttggccatgatcgcactactgcagtccagcctgtctcaaaaaaa

SEQ ID NO: 135583 - DNA, 473 bp, Homo sapiens
aaaagctcagggtgggaaagaaatggcttatcaaaagcacatatacaaggaaaaatgaaacataacaagattacaacacaggactaaaaagaatgtgatgagcagacattcttataagctgagactgcactgagcagatgagcttttaggataactgaggggtatccctgggtcaccttatgttggtcagacctgaggagtgttgcttagtgcaggtgccacattttaaatgacaggcgaagcagaccaggaggataaataaaatggtaatatataaaaatggctaataccaccacacggatgatgcctgaaaacagtaccccctcagtaaaagaaagcagtcacaaaaggccacttattatatgatgccatttatatgcaatgtccagaataggcatatctatagagacaaaaagcagatgagaggttgcctagggctgctcaataaaaataaaaataaagaacctaattgg

SEQ ID NO: 135584 - DNA, 455 bp, Homo sapiens
ggaatgccaacagaatccttcgtgacagggctggcacaagcacagtggaggggccccctgaaccagctcgtggggtgtcagggaaggcctcctggagcaggtgacattttgactcgggtcttctaagaccaaaaggtgttggtcaagtggagaagcaggggcaggattcttctggtggaaggtgaggcaaagtggtgcagcccacatgcagctgacagagaaggaagggtttcactcagggaactgatggcagctttgtcttgggtggatcctctgaggaagtctcttctggctcgaggtgacagacaccctgaatagctcttagggaaagtctggaaactaatacaatgtaaatgaagactttccagtaggctcagaatttcagctgaggccccaaaggcagaaacaaggccagagttgctgatcctaaagtgaagctggaccacccacctagg

SEQ ID NO: 135585 - DNA, 558 bp, Homo sapiens
cagccgagccactctgttctgaagacgcccttgtcctccacccctttgctttgggctctgagcttcttctgcctttcatctctgtaggatgaagccccacccgcccttcaggatgccagccttggcaacattgtgagaccctgtttctacaaaaagtaaacgtgtagtggtgcacgcctgtagttctagctacttgggaggctgagatgggaagatcacttcagcctgggaggttgaggctgcattgagctgagatcaagccacggcactccagcctgggagacagagcgaaaccccatctcaaaaaaacaaagaaagtggatgcacgctgctcctgccattggatcatcgcagcatttttcttttctctgatatgcgcctttttcctcatcgtgggggctcatgtttttgtactttcctctcgctactagattgtgagctgcgtgaaggaaggttcatagttgtgttgtatgtacaggcacacaaaatttgtccttggatagacacatatcaatccgcttccttctcctctctgaagttctttatttaaaaaaaaaa

SEQ ID NO: 135586 - DNA, 334 bp, Homo sapiens
actctggctagtcaagaacaatatacctctgggacaccaggcttcacaccttttctttctctggctttggccctcttgaccatagtctcacgaacttgtttgtttcccacttgcctgtgccctaatgtaagtcttcccagagtgaaatgaaataggaggcaggcactaccctgctgtctgttcccaggtttgtcccatatgtccccagccagttgggtgagatttattgacttcaaacttcgatctcttttccagtacctcagtccatcttgacatttctatgttatcatacataactatgattttttgggggggctggtttctccttatttct

SEQ ID NO: 135587 - DNA, 674 bp, Homo sapiens
tttcaagtctgcaataatgatctttattcttttctatataatatttttcctatagtagcttttagattttctagttttcactaatttgattgtgaggtttgccatggtttgaatgtcccttccaaagctcacattgaaatttaattgccattgtaatggtgttaataggtattaataggtatattgttaagaagtgattaggctgtgagggcttcatcctcatgaattgattaaagtcataatctcaggagtgcatttgttacctcaagaatgagttataaaagtgggtttggccctctctgtctctttcttgcatggtggttctcttttccctctgccttttgccgtagtatgatatagctacagcatgaaggccctcaccagatgctagcaccttaatgttggacttccaccctttgggactgtgataagacatttcttttctttataaatttctcagtctcacgtactctgttgtagcagcataaaacagactaaggcaaggtttctctgtgtatgggtgtttgagatgtatgtttatagttgttcatcaaatttgaaaacatttcggctgctctatctttaaatattttttggtccactctcttacctttccttctaggacttcaattacacatatattagcactcttgatactgttccacgggttctct

SEQ ID NO: 135588 - DNA, 290 bp, Homo sapiens
tttgtttttgtttttgttttttgagatggattctcactctgtcacccaggtgggagtgcaatggcgcaatcttggctcactgcaacctctgcctcctgggttcaagcaattctcctgtctcagcctcccaagtagctaggactacaggcacgtgccaccacaccctgacaggcatcctgccatgaccctatcagagagattgctgggccagaccagggctgcactggacacccagaccaccagggacaggggaggaggcactgaagatacactgaggctcttttcagcat

SEQ ID NO: 135589 - DNA, 409 bp, Homo sapiens
aatgttaaaaagtagattgaaagcagaattaaggattggacaaagacaaagctggttttagggaaatgagtgagcaaactgaaaagacaaaagttaagatttgatgatctaaaaagattcactattggccggatgtggtggctcatgcctgtaatcctagcactttgggaggccaagacaggtggatcacctgagatcaggagttcgagaccagcctggccaacatggcaaaaccctgtatctactaaaaatacaaaaattagccgggcatggtggcacatgcctgtaatcccagctactcgggaggctgagacaggagaatcacttgaacccaggaggcagaagttgcagtgagccaagatcacgccactatactccagcctgggcgacagagcaagactctatctca

SEQ ID NO: 135590 - DNA, 254 bp, Homo sapiens
cgcaagcaaggggactccaatgctctcaggccatgaactaatgaggagcttcatgcctgccctcagtctttcttcatacccagggcaaagctggcccacagacttccagacatgctttcttcgtttgggtagagatggggatccaagtcccctatgtatttcctccagagccacctgtaaaacatgggtgaaatctacctgccctctagctcaccacttccaggtcaagcccactcatggaccactttaacagt

SEQ ID NO: 135591 - DNA, 379 bp, Homo sapiens
tatttatttccttaataaagaaaaagggtttaggaccaaaggctctttgttgcatttctgttgtgaacccagtattttgacccatgcttattttcaaaggtaggaaaatttgttttcattttttacacaaacttttaaatcttggttgcaatgctgtttatgaccaagcgaaacagataatgtggtagcaattccttttatcatgttattgcttttcttttcatggatattactcttacagttctagccaagagatagaaatagtaaattttacttttcactttctaaatgccaaagtcatctctcagtcatttatcagaatttggaggctcatttcttagtgatcatatatcttagaatccaaaagatgagaggattt

SEQ ID NO: 135592 - DNA, 524 bp, Homo sapiens
tcgcaccattgcactccagcctgggcaacaagagtgaaactctgactcaaaaaaaaaaagatgctattgaaggattgctaggtatgattggcaaactgcttgtatggctttgagaggctagcggagaagaggactaggtaattacactgagggttccagccatgttgattgctaggattatggggccccataacagcagagggctcttgtaaggaagggtcaggtttaggtggtaggatgatgaggttgggttggatgacttaagggagggctctccttatagggatgatcaaaggcatctcctggggcctctggggaaatgatctgtttttgtgtcatactgggactaggcacacgctgtaacaccaaaagtattacaaaatttactcatccgttatgtattggtgttttccccgattagactgcaagttccttgaggtcaagacctctgcttatttatctcggtgcattttttgcctggcgcactaaaggtgctcagtacatgggtagtgaaatattgggga

SEQ ID NO: 135593 - DNA, 345 bp, Homo sapiens
ggggaagacaagaggccccaaaggccctagtacacccccaaccaatgcgggaacctcacgagccccccagcactcctctgccttccgggaccagcccaagcagctctgcacactgggccgccatggtgtctgctcctggttcttaccatacataacagggtgaggaaaaacggtgcaaggcagagccgaggcaggcagagatcaagtaggcgtgagtgggcttggtgaaacctctcccatagaggagcgggccaggtggagggggcttctcttagcaagcatacctgggatggctgcagggccttctcatcaggtgtacccccgcaggccacccacccccaccgc

SEQ ID NO: 135594 - DNA, 310 bp, Homo sapiens
tcactacggtcttgctctatagggtctatcaactttccaagactggattttattcaattagaaggttctagccaccccaaactagacgttatgcctctattccacagcaatatttgatgactcgcccctccccacaaaaaggaaaagaaaacatattgtatctgcttttagtagaaatcccctacatttgtataaccctttatacgtagtacttctttaatccctctcacaaacatgtaatattcacctgggaggtaggcaatactcccatttgaaagataaggagagagaatgataccatttaagtgat

SEQ ID NO: 135595 - DNA, 569 bp, Homo sapiens
aaaaataaaaagtcacaaattaaaacacgctgctggagaaaatcacttaaccacaaaggaagccagtaagaaaaaagaaggaaagagaaagaaaggaagaggagagttacaaaacaactaaaaaataagcaacaaaatgacagaattaagtccttacttatcaatagtaacactgaatgcaaataaactcaatttttcaattaaaaggcatagaatgcttgaatggaattaaaaaaaaaaaagacccactatatgctgcctacaggaaacccattttgccttcaaagatatacatagtttgaaagtgaagaggtgggaaaagatatttcatgcaaatagaaacccaaagagagtagtatgtgctgtattcatatctgataaaatacatcacaaatctaagattttaaaaagagattaaaagattactatatagagaaaggagtcaatctagcaaaagaataaatcaattataaatatgcatccaatgctggagctcccagatatataaagtaaacattaatagatttaaagggagagatacactgaaatacaatagcagaggagtttaa

SEQ ID NO: 135596 - DNA, 333 bp, Homo sapiens
tctacaggcatgtgctaccatgcctggctaatttttgtactttttgtagagatggggtttcaccatgattcccaggctagtctcaaaatcctggactcaagcgatccacctgccctggcctcccaaagttctaggattacaggtatgagccaacacgcctgccatcttgcttctttattgtcaatatttttactgcttttgtttatctaactacattggctaatttcaaaaaatattaagtaacactagaacagtaagcccctttgtccagtgtgtaaatttaaaaaggaatttgttttataggcttcaggcttgagacacaaatatgaattt

SEQ ID NO: 135597 - DNA, 423 bp, Homo sapiens
aaagaggcctaaaggggacgttggcaagacgttaacatctgttaaatgtcagtggctcctggcctggtggaggtgggagtcggggataggatgttctattattttctgggcatttgaaatgtatcaaaattcaaaacattaaaaaggaaaaggcctgaaacaaagtggccaggaaaggacaacagcaggaaatggcactatagaaaccaagggggatggcaggtgtcttccagcgctgcaggatcagctgcttctcaccccatcctctaggcccaggagaaatgcgggaggaagccagcctgctatggccatggtttggccagctctgagaagtttggcaatgccttgtcactagcaggagggaaatgcgtatatggtatggggagggcgagactgaagtcacaggggatgggcaggagggtt

SEQ ID NO: 135598 - DNA, 359 bp, Homo sapiens
tgcatgggcattaagagctactccagcctgggtaatagagctactccagacgttccaatgcgcatcttaacattctcaatccaacctttaactaaattctgattccttttcaaagaacgctctcaagattccctctagtgtaagcagtttcccgagccatcttcccaaacactagctttcacctaactcaatccccaaaatgtcacactggactcctcacccacagcatcctgctaattagccgttcccaacaggtcctccgttcccgtctccctttttgcgcacgattacctcgttcctcacagagttgccgccttaactcacccaacccttcaggagcccttattgcctgtctctca

SEQ ID NO: 135599 - DNA, 294 bp, Homo sapiens
tccctcacttcacaccacttcaacatgaaccctcaactccagacgttccaatgcgcatcttaacattctcaatccaacctttaactaaattctgattccttttcaaagaacgctctcaagattccctctagtgtaagcagtttcccgagccatcttcccaaacactagctttcacctaactcaatccccaaaatgtccagcacagcgccctcacagtggtgcccccaggtcttcgccttgatcgtgttctcctgcatctagggttaagggctcccggagggttaagggctcccg

SEQ ID NO: 135600 - DNA, 425 bp, Homo sapiens
ggctatggagacgaggagaataggaacattctaagcaagcccagtcagccagtgagaaagtggaaccagggcaaagtgtcagagagtgaggcctctttaattaatgacactttaagaaatattaactatttcaggaaatcagtcctgaaaagagattttgcctcctgaccatgaggaataaatacagatttattatatttacaaagctgccttttcaagtggttgacttagaggatcagggaatctctgtctctttgtagaaattaacttcaaataataactaactccttttatgtatttaccaggaacatttttgtcttttggttggtttgttttttattgattggtgcttaatggaaggcccagtgagacatttgtagctaaatttgttaggagccacttccaattaaagttcatttgtaatg

SEQ ID NO: 135601 - DNA, 656 bp, Homo sapiens
attccaaagggtaaacacatatgcaccaagaagattttcttgcgttaatatttccaaaataatgtgtctggaattccggttgatattagcatctttataagaaactagataattgtaatatcactgtgtactagaagctgtgataaaaagtgatgcagaataatgtgacaattgattactgaatacacatatagtatttctcaatattcattttttatctcaatattcattcattttaaaatgaatattcatttttctcaatattcattttattgcaaagtatcaagatgtggttagattcatattattctgaaaacactgatgagctcatctttttcatgtctacatagaggccaaattgaccaggttcatgaccagtacaaacatttcagctattttagcagtcagtaccaatcactctagctaaattggtctgtccatgattaatatcaattgctaagctgaaaagtttatgtgaatgcttaggctgcagtcaagtggtcatgtgagttaggtaaacatcagtggggtaatattatcgataatatgttatctgttttcccattataatctttattggattaagagtctaacatatattaatagcttgattttttaattagaaaaaaattaaaaatgttttaacattatttaaa

SEQ ID NO: 135602 - DNA, 598 bp, Homo sapiens
tatgtttaaccatccgtacatctctggaataaatcccacctgatcctggtgatatgttttgactctgtgtccccacccaaatctcatctgaatttgtaattcccatgtgtcagggaagggccctggtgggagatgattgaatcgtgggagcagacttctcctttgctgttcttgtattagtgagttctcacaagatctggttgtttcaaagtgtgtggcacttcccccttcactccctctttctctcctgctatgccatggtaagacatgcttacttccccttcaccttctcccttgattgtaaatttcctgaggcttcccagtcatgcttcccattaagcctgtggaactgtgagtcaattaaacctcctttcttcacaaattacccagtctcaggtagttctttatagaagtgtgaaaattgactaatacagaaaattggtgcccaagtgacctattgctataaagatactgaaaatgtggaagtgactttggaagtgggtaatgggtagaggttgcaagagtttagagggttaagataggaagatgggggaaagtttggaagttcctaaagacttgttgagtggttatgaccaaa

SEQ ID NO: 135603 - DNA, 749 bp, Homo sapiens
ggctctcttcttcatcactcaagctttattttctccagggagcctcctttctgaatctgcatttggggaatttcccctgccatggcagtcacagtaccatatgagaattgcctgttttcatatgggtaaccctactaagcctgaagttacctaaagttagatattcttctgatttatgtgtcattgtgtcacttgtcccatcagagtgcctggcacataatggatgcctggtaaatattttcagtggaacaaaaatgttaatagttttacaggatgaatagcagcccactgcagaatgtcttatatcataggcttccttgccaaaaggaattaaaaattgcttttgagtgtgatgtggttagagaggagaaaaaggttcaactgcttgggggaagattatcaatgatcttaaatggtaaaggccagcagtctaaagagtgtttgggaggctgtctcctgagtgttgattagctggtcattttggtcaggcacgggtcaccattttttactcttgctaatggattatagacagcagggctaaataaacagcagttctcagctggaatctagaggtgagttatagcctcagggaatgctcacctttttagagttaatgctttcaggacatcttgatagattcttaagaccactaactggttgccggaaacccaggattaaattgagttgaacctcggatttctgctgaactaagcagaactaaggcatgagcctttacagcttgagaaggg

SEQ ID NO: 135604 - DNA, 133 bp, Homo sapiens
cccaaagcttcataatgcacactcttttcaagtgtacgtggtggtatgttcatcaggagagaccatatgctgggccatgaaacaatcctaaatacattgaaacagacagaattaatacaagggtatattctcg

SEQ ID NO: 135605 - DNA, 104 bp, Homo sapiens
ccaaggagcccagagaacaccaagaggtcagtggtgggagagcatatttgagtacacacatttgatttgtgtgaacagagagaaacctgaaaaacaggcaggag

SEQ ID NO: 135606 - DNA, 381 bp, Homo sapiens
cagcctcccaagtagctgggattacaggtgcccaccaccatgcccgggtaatttttgtcgttgtagtagagacagggtttcactgtgttggccagtctggcctcgaactcctgacctcaaatgatccacccacctcggcctcccaaagtcctgggattatagacatgagccgccacacctggcctgagttgtgaatttctttatttagctttgaaatctctagtctcctagtattgttaacaatcaaacattttgaagaagatagatattctataggaaatacattctggaaacttttgggaatcgtctttaaagcccgtgttacaaagcgtgttatatgaaaaattgcttttgattttccctagctagagtaattttctg

SEQ ID NO: 135607 - DNA, 478 bp, Homo sapiens
cttctaaaaaataattataatctgtcaaatttcgggacagataatcttggcctcccagcccaagatttgatttgatttcattttattttagagacggagtctcgctttgtcgcccaggctggagtacaatggcacagtctcagcttactgtaaactccacctcacgcgttcaagctattcttctgcctcagcctcttgagtagctgggattacaggcgcgtgccaccatactcagctaatttttgtatttttaatagagatggggtttcaccatgttggtcaggctggtctcgaactcttgacctcgtgatccgcccacctaggcctcccaaagtgctgggattacaggggtgaaccatcccgcctggccaagtttttattttaacaactactgtgtgtgagagaagggggtgggctagagtagggtaatatgtacacgctatggctgaaacagaaaaatggtaactttattttctac

SEQ ID NO: 135608 - DNA, 414 bp, Homo sapiens
gctgggattataggcgtgagccattgtgcctgacgtcaaactattcttaaactttaattcccatgtttctaacattttaaaatatggtgttcaaagatattaggtctactttaaaaaatgttctataaatgtataactgacagtgatttaatgttttgataaaaattgtaaaggtcatggaataatcgaaatatttcacattgactattaagatccttttgtagatttcaggttttattagcatttttacagtcccatactactgtgccaagtgaggactacttgtatttaaaacattgtaaaatagagcttatgccttggtttcatgttttaggtgaaagagatgactaaatctaggatttttatttcttccatgggttatgtgaaatccaaatatatacttgggtaaactcc

SEQ ID NO: 135609 - DNA, 399 bp, Homo sapiens
tccaaacaccatttccaaagagctgtgctggttccctgactctctaaaggaacgagaaactccccttctccagaaggctcccacgacactggaagcacatactaaggactgagtctttgacacgtgaatgttgctgggtctaaggactgagtctttgacacgtgaatgctgctgggtctgctgtcccacacgctgcatctctttcgttaggatacaagtcatcatagtcaaagcactagctggacccagactgactcggaatttataaaacgtggttacgatactgaccaaagctgccggttcttcgtggcagcgcagagcctggagggtgtttaaagtcctcccaaggctactcagatgcatctcctgagggagcctgggacgggatctggttacagg

SEQ ID NO: 135610 - DNA, 111 bp, Homo sapiens
ttgagtcagatggacctggattcaaatccctgttccctcctcttactgtttgagggactttggacatgttacctgacttctctgaacttgagcttcctgatctgtaaaata

SEQ ID NO: 135611 - DNA, 362 bp, Homo sapiens
aacctggttctggaatcggcttgaatcattccagcctttcatacttatagctgtgtggccttgggcaacttacttaactttatctataaaatggggacaatagcttctcttcctcatagcatggttgtgaggattagatgaagttctcagtggcattccttgtaagctctagggagatgttagctgttactaatgtttggcaccatgacaaatgattagatggaactttggagcaattaataatacaaattaaaataaggggacaaagccagccaaggagaaaagtaaaagatcaagaataggggcatataatggctttatttttccttgagtctagtgtgattctaacacctgagtccaac

SEQ ID NO: 135612 - DNA, 511 bp, Homo sapiens
aaaataagaaaaaataataatcctttgcctaggaaattccttccttcttcaagggaaggcactccgaacacctccatgagctacacttccacacagctcaggggaggcggcaaggtcctcccagtacaggtgttaccagcagagggcacactcctctccccagtcctccaccaggctccacaggaaacgccagggcagggtttaaaggaaggtttatcaccccgactttacataaccaggtaaacagagtcacagccagaattggaagcagctttcccagggaatgcacaatcaggaaaagagtgtgggtttccagcatctccccacaagccactgttcgctcaatgactccaggaatggtcctggtgacaaagttttaccagtccactcaaaatgagaaaaataccagcaattgcatgtatattcaacagtatatttaagagtgtatattgcttatatacaactgtatatgggtgtctgtgtgtgtgatgtaaattcttctactgccctt

SEQ ID NO: 135613 - DNA, 428 bp, Homo sapiens
aggcaggagaatcacttgaacccgggaggcggaggttgcagtgagcctagatcatgccactgcactcctgcctggggaacaaagtgagactctgtttcaaaaaacaaacaaacaaaaatgtaacacaggcagagaggagaaaatagcattccaggcagtgggaaatagattcgaagaaggcattgacagcaccaggtttctctaagacatagcctgtctggctgggatcaaggctgcttgctgagaggcgtggaaaatgaagctaggcaggctgggaccagatcatggaacctatggtgattgttttgttctccatggcctctcattttttccctcttcctctgtctctctctctttttgtttttgtttttttccaagacagagtctcgctctgttgcccaggctggagatcaatagtgtgatctcag

SEQ ID NO: 135614 - DNA, 352 bp, Homo sapiens
tatcactaactttcaccgaagtgatcaataataccacttcagcctcaactcactgaggcattcacatcagcttcaactcactgagttgctatggatgagagaactaccctagacgacttctttgtggaccaagacagatcctgctatacctgtattaatgtctcaggccaaagagataaaagtatggaatgagggaaagagagaagaaaacacgtaatgctctgctacaataatacgtatctaactgaagtcataattttaaaatacgtatacacatctatatacacacacacatccccacagaaccatatcccttagctctactaaaaaggcctcaaagcaataatactac

SEQ ID NO: 135615 - DNA, 202 bp, Homo sapiens
aaaaaggcacgtcataggctaggagaaaaaatttgcctaccacatatgtaaccaaggactagcagctaggacatctgaagaattctcaacattcaacggggtagaagaatgaacgattcaatagaatatgggcaaaagacatgaagaggcattttaccaaacatagggtgctatggtccgaatgtttgcattctcctcaaat

SEQ ID NO: 135616 - DNA, 421 bp, Homo sapiens
aggtcaagtctttgctatggaagtctccaataagataactcctaacatcttttactaactccagcttcttaggtttgaattgttcacaatattttgggggtattttgttttgcctttggaaaaaacgttagcctctagcaaatcccatttaaaaaaaatctcacagtatctataggaacataaaattcatcagagtgcttcttctataataacaggtgatttggtttaaagtattaaaagctatttgcccacaccatcccagcactcagtttagcaaccttctgttggataacattaaactcagtctattagtgagggtgtcttgcaactagcattattttttcagagctgtgtgtgttaattcaatgtcttaattgagtctattaggaaccactttatttttgttttgtattagcttatg

SEQ ID NO: 135617 - DNA, 285 bp, Homo sapiens
aaaatttaaaatatgcatgtgtacatatatgtaggtagggactatcaaaagagatgtcaaaaccatctatttattctcatttttggatacagtacacattaccaagttgttacaatgtggttatttaaatatcatttgggccaggcacagtggtgcatgcttatagtcccagctgcttgggaggctgagttgggaagatcatttgagcccaggagatcagtgttggagtgtgctataatcatgcctgtaaacagccactgtactcccatctaggcaatatctctt

SEQ ID NO: 135618 - DNA, 298 bp, Homo sapiens
ttttattaatttctcttgctgaatttttgaccctgtaaagaaaaaaagatgcattgtaccaaaccacgctacaagacaggctcctccagacgggctttttccttcctgctgaaggacatggatatcggctttatgagctggttacagtcagctttatcgccaagccagtagattttcttaatatacttattgctgttctgtaaatagcacaaaggcaatcatgaatctgaatcacttatggggtcacagtgagattgataaaggtaatcttgggaagaaagtgttgagtagcctaaat

SEQ ID NO: 135619 - DNA, 423 bp, Homo sapiens
tggtaggcatagaaatggtgaagtgatcttgggtgtattttggaagttgagcctggaggatttactagttggatatggagtgtgaaagagaagttaagaacaactgaaagattttgtgacctgagtagctagagaaaacagaattgccatttactgaaattggaaaaagctttctctttctgcttatatgaccactgttaatatttaaaaactatgaattacagaacccatgtgcttgggaatagaagtgtctgaaaatgaggtcggagaaaattgtcagttaagaggctgaaagttctgtttgtggacagttctaatatgcctttttatagacagatgggtggtattactagggcatatagccgtagataaagaaatctgtggtgcttatttgcagatggtcgtgatggtgatggcggagac

SEQ ID NO: 135620 - DNA, 256 bp, Homo sapiens
cgactctcctcctcctgccgttctacgaaaagtcaatttctacagcttagccaaccaagtgattccctttttctatgtgcaaagtgtaaaacagcattgccatctctccttgccacggaattatttcaaacggtttactacagcagtttgtctttacatgcagagctgcctagaacaaacaaaagaaagatccaatgagtgaattttccaatgtagaggattccaggggtagatatgagggaagggagagagaact

SEQ ID NO: 135621 - DNA, 545 bp, Homo sapiens
cctcccaagtagctgggaccacaggcacacaccatcatgccgggctaatttttgtattttttgtaaagaggttttcaccatgttgcccaggctggtctgtaattcctgggctctagtgatctgtcacctcggcctcctgaagtgctgggattacaggaccacagccaacctctgcctctccattgacgaggttgataaggtggtgtagacggctagcactcgatggagacctcctgaccccatcaaagggaaggggaaaacacaggaagctctcccactgtgtggtcagggctagtaccagctctgtccctgggccttgacagggcctggagacacctttgggaggagcagttccagcccaaactcctgcaagggagggatggagaggggagaggctgaacacaacccacctggaacccggggctgggcccgatgctttgaataccaacttaatcttcacaacagcctgtgaagggtgtgtgtatgcacgcgcgcgtgtgtgtgtgtacaccaatttcttgctgagaaaaaggaggctcagagag

SEQ ID NO: 135622 - DNA, 654 bp, Homo sapiens
taaattttatttaatcaatgcctcagaaagagaggttcagggacctgccaaggtgccaagggactcaatctcaaattgactatgctttgggtctattatgaagcaaaggtgaggcagccaccatctgagatgggcaacctaagaaaaatgccatccctccttctgctgctttcttccaacttctatccttttatcatcagaactctagagaataaagtatgtggcctacttttacttagctttccataacacactgttcatctatcactctggatgtaaatttgatataaaaatgaccaaattattaaataaatgagtgctgtttgacacagcatcctctctgatccctttggccttgtttcccaagaaggcaggaccgagctgtgcctttgtggctgcctttaactgcatttccttctccctctcccttcccagcacatatatttctgagctctcctagtgtttacttctaaccacttaaggaaaatgtagatttcaaaaatagcattaattaacatatttttatttccaatcatttaaaataaaaattattcctttttctagacttttctaatttgaataatactgacacaaaaagctgcctacaatcccctttgaaattcactgtgatttaaataagaaataaaatagatc

SEQ ID NO: 135623 - DNA, 415 bp, Homo sapiens
cagtgccaatgactttgttttaaggggaaactcttgaaggaatggggcctacttgttgctataccccaaggtgatgcaagtaccccaaggtgatgcaagatttagttcccttgagaagggtgctaaggttatagcactagccccttaccaaccatctttagacacaagctaaagcagtgccaagtccatggtgaaatgcaatagactcctactgctttagagagagaaaccaggtgggcatcaccgcagggttcacatgttgagagtggctgacagcagagacactgtctgtctcccctaacacaagcagatgtaacacaaactctcacacacacaacttggtggtaaagcaccaagaacagggccttgtttttacatagcacatgcataagaaatacttgtgtttctcaactcc

SEQ ID NO: 135624 - DNA, 411 bp, Homo sapiens
gaatcaaagatgaagcacaagtatctgccttgggcaagtgaaagatgggtagggccattcattgagatagaatgggggttgagggaagtaatcttggggatgaaatagaggttgggaatttcaagttcagtttaagacaggtatttccaagtatctttggataagcatgtagaaaataccagcaggccattagatgtacaaactcagtatttaaattaggaatctgggctacagattaatacttaagagtgctcaggagggagaaaaacagacagaaattagagctatagtaacacaaagtactgcttaaggcaaatgtgtcaagaagatcaataataaatccttaaggcacaccaataattaagagactgccttgagaggtgggttaaaaactagaggtaggtcagggac

SEQ ID NO: 135625 - DNA, 357 bp, Homo sapiens
cgatggctttttataactccgggttctgcgcctttccccgggcttggaagggaaggggtgggggaggtgggaggcggggaaatgagctaaattttctggccttttcaaaaggtgccatcctcctaccgcgcactagtgatttcggggggttcccctgagcaccccctgcatgtagggctcacgccttagccccagaatggggattgcgcgtcccctcaggcctcagcccttgcctgcctcccaccccgctcccctccagcctggagctgcggagcccgagcagaccaacaggccgagctgcggcaggcaaaccccctgtccgtgtccccatgcacccccacggaaggccgtacgccc

SEQ ID NO: 135626 - DNA, 288 bp, Homo sapiens
atgatgcgcaagtcaaatgatgtcaactgtcttgcaacattctccaaaacttaccagttggctccaacacacctgtaagtctgcatcacttctctgttcagtcctgaaaaaccttcaatgtttctgccttgcacaaaggctaagagccaaatgtttcagcacagaccagggtggtggcagtggaggtgatgggaagtagttggattctggatatattttgaaggtagagccaatgagatttgttgatggtttggatgtgggatagaatcatggattacttcaagattt

SEQ ID NO: 135627 - DNA, 319 bp, Homo sapiens
ctgatgtacctttcttgattttcccttatctaaatcctgtctgaaaacatttagatgaggcaagtgttctctccaacttaatcccaacgcagagccttccaacctgacccacctgatggaggttcgtctgtggctggtgcccagctgccatactgcaattgtccttcaccttcacccttccctttgcctctcttctgcgttggatctctgcttctcattcttattctcagactcctcttgttggatttctcccttgtttcgtggaaaactcatccagtagcctgctaagaaggggtgaatgaaaggtatagtttttgaa

SEQ ID NO: 135628 - DNA, 743 bp, Homo sapiens
ctcagcaggtttctaaactatcacctctcatttgactttactcaatccttgtcgtatcagcatatactatttgcagtaatgcaataaatactttgaaatatacaataaataattaactacagttacactattgtgctactgaacagtagatcttattccatgtaagtgtattttcatacccattaactatctggaattgaattggatttttcattaacacaaataaatgacaaatgcttgaagtgttggatatctcaagttaccctgacttgatcattacacattgtatgcatctatcaaaacatcacatgtacaccatacacatttgacactaatatgtattaataataattaaaaataaaaaataaaaaattgaattttttcatgtaattgaaacaaaaaaaaaaaaaaaaaaaaaaaaaaaaaaaaaaaaaaaaaaaaaaaaaaaaaaaaaaaaaaaaaaaaaaaaaaaaaacacaaaaaaacgaaacaaaagagaaaaaaagaaccaaacaaaagacaacaacaacgaaagcaggggcgcgggggcgcgacgaggaaaaaaacgaagagcaacaccaagcaccgacgtaggggcgggcggcgccaggacgacagagaccaacgcggaaggagacaggccgcagcgaggagcaaagcggagagaaagaaggcggatggcgagcgccccacacaagaaagacaaagcagggagaaaagagagaggaggagaaaaaacgctg

SEQ ID NO: 135629 - DNA, 280 bp, Homo sapiens
aattcatgaattttagctaagttactctagctaagttgatcttgcagtcttgagttcaaaggctggaaacctgagctcaatctgtgttgcagtgtagaggcagaattccctcctcttaaaaagacctcaggtcttcagctgattgcatgagacccacccacattatagagggtaatcagctttacttctaaagtctactgatttaaatgttaatcacatgtaaaaaatactttcacaaaaaataacaatgatccttttaaaaagtaactaggaataaaaa

SEQ ID NO: 135630 - DNA, 475 bp, Homo sapiens
actgagtcaatctctgctttagaagtctcccacaaaaaggatcctacataaattactgtgtgtttaaaggtttctgattttaatctaataactgaaatatcaaactatattttaattcaggcatttgggcatcactaccacgtgttctcatcagatttaggaaccctgcagcaagatttatcagtgtcaaaatgctaaaatcctaaatttagtgccagaatccctctcaaatggcatttatattttgatagcttaacctactttgaatcccctgagcatcttgtctgtttttattagtagattttgctgatcttttttaacttttcaaaggctctttaaattatcctgaagtcatatatttaccatgagaaagcaggtgtctttttagagtgtagatgcttaagtcgctcataaaattaatttcctcgggttaggagaacattttgaaactctaatttgaaaaactctaatctgg

SEQ ID NO: 135631 - DNA, 429 bp, Homo sapiens
cacacaaaaaaccctcatatccaaaagtaaaggataaccagacaatctctaagataagaactctcaaaagtatggatccgcctttcctatcgctcagcctccttagtcttgacagcagagtgaaaactgttttctacaggtgaaagccctaagtcttcatcaaagccataccagggacggaaaggtagaaaagtattaacgctaaaatctcacgcctaagctttaacacccttccggaacagtaagacagaactaggcccatcagaaattctacataaaatcagtgaccactagtcactagtctcctagtgcttgaaactctgagaaagcaatcaagcagtccctcattttcctgagatttttgggctggcctgagcacacacaagaccaacggagtcaaattaagttggcaataaaacaagcggttcc

SEQ ID NO: 135632 - DNA, 374 bp, Homo sapiens
agttggtttaggccctacagctccagggaagtcactgataaggaaggagatggctccagccaatgagtaccagcctcccctaccccacaccaaaatgccaagaaacttagatattttcttatgtctgattcctcctcccttattcccaccctagccctccacagagatgtcagaatcactagggaagatcaatttggtaaactagctgggacacagccctgggccacactgacttccatcctgccctttgcggtaacacccagatggagggaggggaacagagggcagcacactatgtggccagcccatgcatccagggacaccctggcccacaacagtgccccagcagctgtcccaccccctctcatagaaaa

SEQ ID NO: 135633 - DNA, 711 bp, Homo sapiens
gtttctccattgccacatcatgccatagactaccagtaccctcttcacaactgagaattgtctttaatacctttaaatttaatcacattagagaacatattccaagaataacagaaccaaaccaattcataaagcttatccttaaaaattctattcttatggaaccactcttagggcagaaatctgtatgggtcagtcagggctccaccagaaaaacagaaattgctctgacataactttaggtgcaatttatggagaatgtacatgtatgtatatacatacctatatatatatgttgtgtgcatatatgttggtttgtgtgtgtgtgtgtgtgtgtgtgtgtgtgtgtgtgtgtgtggagagagagagatttattgaaaagaattgatttatgtgattatggaggctggctgggcaagtccaaaatctttagggcaatctgcaagctgggaattccttggaggaaacttaagctgcatgttttcttcatcagggaaagcactcatctgttcttttgatgattgagtcaaacccacccagattattgatgataatctcctttacttaaatcaactgattatagatgttacatatatctacaaaattcctttaccacaccacctagattaatgtttgattgaacaactggggcctatggcctaactaaacagtagtttaactttgctctggatgactcagagtcatcccaca

SEQ ID NO: 135634 - DNA, 446 bp, Homo sapiens
tacaggcactgaaactatttccaaaagccaatacaaccccaaatcctaaccctaaactgctgctcctctcatcatctttaatttttgaaaaactagtcaacaaatatgtctaccacattcttcatatccagtttcccgttaccactgtcactatttacaaccccacgatcacagatacacttgtaaaatgaaacttgttcataaattgggaattgttagtattccttagtgctgtcttgcctttctttaattagtttattaaccatattatccaaaacatattatcaggaggctcgctttgtattgttatttaggtaaatacctgtgtaggggacataagaccttcattaatatccaagaaaaagtgtatttatcaaagttcttgcgaactaaaatgttttaagtaattttcttttccttttgtattttcaaaggagctgcatggt

SEQ ID NO: 135635 - DNA, 395 bp, Homo sapiens
tgatctacccgcctcagcctcccaaagtgctggtattacaggcatgagccaccacgcccggctgtagagatgtatttctacatcatccttttagattgctccattgcattcaggaatttaaagaacttgaatgtcttctcaaaatcgggttctgtcactgcagtcttgtggcattaccaatattttgatagatggtgtgagctactgagctgaaaataagtttatttttattttttattttttattttttgagacggagtctcgctctgtcgcccaggctggagtgcagtggcacaatctccgctcactgcaaactctgcctcccaggttcatgccattctcctgcctcagcctcccgagtagctgggactacaggcgcccctcaccacacccgg

SEQ ID NO: 135636 - DNA, 331 bp, Homo sapiens
gggaaagggtatcctgatgggaatcatcaggcctccttggtgccagccctgaccctgttagtatcttgctgtcacttcacctccctgcatctcattttttaaaaccatggaatgaggagattggaccagatgatcattttccagactgcttagttgaacacaagcatcccatggtatattattaggttttcgttaaaacagagggtttcatggtttaataaattagaacacttcccattttattacttttttgaagaagaatttgcctatttaagttctggaaaattcggatgtaacttctccaaaaactgaaccacagagtacttatttc

SEQ ID NO: 135637 - DNA, 451 bp, Homo sapiens
actccgtccctccaggctggggtcattagagcagtgaagaataccaacaggcagatgccagtgaacagctgtgggctggttgtgccactgctaggtgccatcctgccccacctaacagagcccagatctattaggctctgctgacagccaggcagggaaccccaaggaaccagcaccatgctcccgtgccctcacagatcccgtgttccttcaccctcatatttccatgacaggtttttagcagaaggtcagtgtatttctaaatgaaatataacatgctaatcttttttgttgtttaggcaaacttttctcttttttttgagacagagtttcgctcttatcacccaggctggagggcaatggcacgatcttggctcaccgcaacctgcgcctcccaggttcaagcaattctcctgcctcagcctcccaagtagctaggattacaggcatg

SEQ ID NO: 135638 - DNA, 503 bp, Homo sapiens
ttgatatgcagtttcaccataatgtatctaggtatggattgtttttgaaatttattctgtttaaggtgatttatgttaaattacgccttctctatctgagagtttatatttttcattagagctggaaaattatagtgttatctctttgaatatttaatatcctctattttctcctatttttatgtcctccagttgaaattaggtcgatttttttttatcctttcattttccttacacttttttgtttctttcatatcttgtgaaagactatctctaagtctttaattgtatttaatttgccatgtaattgatccattgagtatataatatatatatatttatttcaatagcttttagagtacaagtggcttttagttatttggatgaattgtatagccacacttgtggctgactgccgcagttactacttgagatggtcactacagcagttactactgttactacttgagactgtcattacagcagttactactgttactgct

SEQ ID NO: 135639 - DNA, 181 bp, Homo sapiens
actcaaaaacatcatgaaaatgaaaaaagtatgcagagaaaaaaaatcaaccaaatgccaatttgagaggtagctctgagcctcatagtattttttgcacagctctctccagtttattattttaagcatagttgagatcccactgcattaatacttttggaaactacatataatgaacgta

SEQ ID NO: 135640 - DNA, 378 bp, Homo sapiens
tattcaaactcagagttccagccacgcttgcatccagggctcagatagcagagggacctgcctgaggcttgatttagaagggtccacctgaggatgtggatgaagcgtgaattcatttctggcaggggtggcagcagaggcagacagctctgtggaggcagaggtggggaaattctggtgtctccttcctagtgtggaccatcgcgcctgtgttgagcagtggagatagtggggtctttcctgcagaggcctccatggtagggctcaaacattgttctagctggggtggcctccaagcctaataccttgaccctcttcgagattctctgcactgccaaatatcttctaataaattccttctctgcataaaccaactag

SEQ ID NO: 135641 - DNA, 208 bp, Homo sapiens
tgccccatttgttatcatttgcacattctctctctcccactctctgcctctttctctctctctcagacttttattctctgaaccacctgagagtatgctgcacacctcatagctctctgctgccaaaccaccccatgtgtaccttttaagagttaagaaagctgttaattttgtagaccaaactcttgtaagaattatgaaataacaa

SEQ ID NO: 135642 - DNA, 744 bp, Homo sapiens
aggcttttaacagtaatttctggcttcacgtatttagtttcataactcatgatttttcaaaaacttctggtttgaagacaccgattgccgaaagtccattgtgctgcataattacacttggtccacgtgacagcactaacatgttctgaaatgtttttagaagtagtctcagcaaagatgaaggattcctccctgtttgaaaagaaaatattctttgttttttctttgatctaagctctaagactagcagctagcatctgaaacttttttgacgagagtgacaaaccaactctaatattaaaggcaattgatgattatgggcactgaagggaaggtaaccccaggctggtgccccggaatagggatgggtcacaatgttgaggacatttcgcctgttgcagaacccacctgcaacacagtgtggcccttgccatgtgacttgtgtgtgtgcctgtgtgtctgtgtgtgcgtgttttaattttgacttcataagtactctagttatgagcttatttaacattgggttttactaataggggtatgtgttgagaaaatttcaaagttttagaatatggttcacccacatgttgcttccctgtaaatataatttttaaaaccagattctgggccgggcatggtggctcacctctataatcccaaaacgttgggaggccgaggcaggcgaatcatgaagccaggagtttgagaccaggctgaccaacacggtgaaacccagtctctact

SEQ ID NO: 135643 - DNA, 290 bp, Homo sapiens
tatcattggctgtttttttgtgtaaagtggcttatggaatgttctgtcatgttgtttatcaaataaatcaccttttaaaaatgtaaatatctttaaagattaaaaaattttttttccagaattatacttttaggattacaatgtttaggatttcagctttagggcttctgatcttttaggatttcaacattaaggattagggagttcaggactgtatcttttgggtatatgattggctaccctccattaccatcttaactgttgataggatcaagaaagtaaccattttt

SEQ ID NO: 135644 - DNA, 194 bp, Homo sapiens
tatatccatttaatcctcacaataatattgtgtgggctctttagctttagctccccactctacagatgagaataccgagggcacagaagtgaggaatttgcctaagtagacaaagaatcagtggcagcaccaggcattggatccagacagtctggcacttgggcccttgctcttacccactgcaccaggctgag

SEQ ID NO: 135645 - DNA, 397 bp, Homo sapiens
agagtccgccgggcttcgcagaacgcagactttttggtctggggagcccctgggaagatgatcgaccttccaagggaagagctagagggataggacattcctgggatgggaggtaagctcaggacaagcactgtcagtgccttccctcagagctctgggcctctgcagatgaagatgctgttggcattttctgcacacctcctccttggctggtgcgctgccagatgctttcagaacggcgatgaaagtacaggagatggaattgggctttgttcttcctgacaggggcccactcagcctccccagtccttattcccctaatgagcacttaagctcacacctggaatcctcggccctggactcctcctctagaaaacgcagatggtgacagctgtct

SEQ ID NO: 135646 - DNA, 253 bp, Homo sapiens
atacattatcctctaggtagaagttctgacacatgttataacacagatgaaccttggaaacactatgccaaaggaaataagtcggacacaaaaggacaaatattatatgattccgcttatatgagatatctagaataggcacattcataaaaacatagagtttctgtgtgaggtgatggaaaagctttagaaataggccggccatggaggttcacactcataatcccagcactttcagaggccaaggtgggac

SEQ ID NO: 135647 - DNA, 523 bp, Homo sapiens
gaatctggaatttctcagggatgtttatgtatggatagaaataatatgatttctactttgttaatgtccagtttattaatcttcaaacaaccaacattcctctaaatattcagacactagttacacaatgattaaataaagaacttaggaatttaacaaatttgatttctcccaaatttaaatattgattgcaaattgaattcatatgggcacgaatctagtcttataagatactcttggttgtttcaaatgagttaagaaagagctaaaacacataagcagcatttcaaagattgccaagctattttaattgtacctgattttaaaaagggcaccaatgtgctaacagcggtttaggtttgtgactccgttgtctgtattttcattcctctattgtattcttgtcattatctttaccattattgtttctctgctcaccaaacctaaccagggctgctaacaattcagtgctattgtgtgaatgagaaacagcagtacttcctcaagtaagaaaaaaaaagaa

SEQ ID NO: 135648 - DNA, 370 bp, Homo sapiens
gcaggattcctatctcatggtgcgagctgccctgccgtgcgtccacgctgtggcaggccctcccgtgccctgtctcctggctgggagcttctgggcagtgtcggtcagcagtgtggtcagaggccccaggcctggcctgcgatgatgcttcttaggcaggagcctataggcgtgaggcggggccttctgctcctggtgtcataggtgacgtgacctggaggcctggtcaggcccgtccaccatgagttgaagtctctccctctgtggtgtgtgtgtgtgtcttggaagagacgtggagactgcgtgaggctgtttctctcagcccattgtccatgcgcatcgctgtccacggctctcgtctgcagcagtc

SEQ ID NO: 135649 - DNA, 138 bp, Homo sapiens
tcctgggttggaagggttctagtgatggctgtagacaaagaactgtgtcatccatacaatgggggaagatggggaagagtagaaggtggaaggtcctgaatggaaaagagagatatgtgggcaagtaaacaccatgtt

SEQ ID NO: 135650 - DNA, 229 bp, Homo sapiens
ttaatggcatgagaaaaggatcacattaagtagttataaagaggctgtagaggccgggcgcagtggctcatgcctgtaatcccagccaggatgcatacttctgatgctgacttttccatatcatcttccctgaccctcctgatctccactgagtacccacgtgatgttcatctccacgagtgtgacggacattactggaatgttcaggaagatgatatggaaaagtcag

SEQ ID NO: 135651 - DNA, 558 bp, Homo sapiens
aaagtgctgggattataggcgtgagccactctgcctagcctgcaatgatgttttaaggctgctctaactataagcatgactccgtaatctttggttgccactcctcctttgtgatctttgtctacagagacactgcttgtctgtgggaggtcttcttagcctctctggtgttatgaagagtaacatgactattttatttgaaagcctactgtttctatacttgaggagcacccagattgctttgggttcttaggtatcctgcatctggtattttatggtatcgatagatgtagggattttctcaggttctttaggctcttaacttggtaggaattggggaatgtgcctctgcttcatctctcgtgatttttataaccaaagcttcattacctctggccagtaagtgaagtttgaatatggcagaagaaaactgggatgcttccagtttgggataggggataaataaacagtattgttttgttatttccttcaatggaaagagtggggagagagtgtcctaagcaaagttgaatatcaagagaaattgtctttctaatg

SEQ ID NO: 135652 - DNA, 772 bp, Homo sapiens
aaagttaggattttttttttcttttttgagacagagtcttgctctgtcacccaggctggagtgcagtggtgtgatttcagctcactgcaaccttcgcctcccagcttcaagcgattctcatgcctcagcctcccaggtagctgggatttcaggtgtgcaaccaccacacccagttaatttttgtattttggtagagatagggtttcacatgttggccaagctggtcttgaactcttgacctcaagtgatccacctgtctcagccttcccaagtgctgggattacaggtgtgagccatcacactcggccaaagctaggatttgaatataagtttgtctgaccctcaaaacccatgctccttcctctgtgttagccaacttcctgcatagccaacttcccagggtcatggaaagaatcattaacgcaacccaggaatgctctcccggagtgtggctatatctagagaaattgtggaaagaggccaggcacggtggctcactcctgtaattccagcactttgggaggccaaggtgggagaatcatctgaggccaagagttcaagaccaacttggacaacatagtgagaaccctttctctattcaaaaaacaagaaagaaagaaagaatttgcctaaatagaacagaaaaggctgtatgtgcaagacagttactgcaggttttataatagtaaaaagctagaaaaaaactaattattcaacagtacataattaagcaaattaaaatacatatattcaataggatattaagcagcca

SEQ ID NO: 135653 - DNA, 761 bp, Homo sapiens
ttccggcatgctgggaggctgaggttacaggatttcttgagcccaggtgtatgaggccagcctggacaacatggtgcaaccttcgcctcccagcttcaagcgattctcatgcctcagcctcccaggtagctgggatttcaggtgtgcaaccaccacacccagttaatttttgtattttggtagagatagggtttcacatgttggccaagctggtcttgaactcttgacctcaagtgatccacctgtctcagccttcccaagtgctgggattacaggtgtgagccatcacactcggccaaagctaggatttgaatataagtttgtctgaccctcaaaacccatgctccttcctctgtgttagccaacttcctgcatagccaacttcccagggtcatggaaagaatcattaacgcaacccaggaatgctctcccggagtgtggctatatctagagaaattgtggaaagaggccaggcacggtggctcactcctgtaattccagcactttgggaggccaaggtgggagaatcatctgaggccaagagttcaagaccaacttggacaacatagtgagaaccctttctctattcaaaaaacaagaaagaaagaaagaatttgcctaaatagaacagaaaaggctgtatgtgcaagacagttactgcaggttttataatagtaaaaagctagaaaaaaactaattattcaacagtacataattaagcaaattaaaatacatatattcaataggatattaagcagcca

SEQ ID NO: 135654 - DNA, 128 bp, Homo sapiens
tgatttctcagatgagtgagatgaggggtagcaccatatttacaagaatcttataggtctgtaattttttgatgctattatttctagtctcccagaaagtgcattagtttccaatatttgtaggaggg

SEQ ID NO: 135655 - DNA, 356 bp, Homo sapiens
cagcactaaggtctcacacaggcttttacagctggtgaggaacaaggtcggggctggcaatactgggagttcctaaacacaaaaggcattctcctctatcagtttgcctcccaagttttaaatgatgtcctttgaacatcagatcgcctttatcaaaaaatttttaagcctgaattttaaaggaatgagatggagtgaattagtgtgaagtctttttttctgagcttggtgtttattctttattttgttttcaatcgtataacattttctgtaatgtcccatttgagtaaagttatcattatcctctataggcatatacttattaagtacctaccagttgtgaaaccctaaatagt

SEQ ID NO: 135656 - DNA, 466 bp, Homo sapiens
taggtagccaaacaataatgtcagcgttcaccccatttcttctgagaagcttcaaaatgcatatctctgattaagcatgcaataaaagtgaagatgagaatcacaattgggcttatggcatacctctttctaagaactgaagtcaaacgtctaaggaaaattcataaatattctcaccatttctcaagtaacgacaacaaaatatccgtttccttgccctctacgtgtcagcaaatgacagcataacccagtaatctggaagtttgcaaacttttcccataagggaccagatgacaaatattgagactttgcaggtcacatatggccacatatattctctgtcgcatattctgcgtgtctttctcccacttttaaaattgtaaaaaccatttttaacccatagattattaataaacgggggaaaaaaaacaggccgggcgtggtggttcatgcctttaatcccagc

SEQ ID NO: 135657 - DNA, 124 bp, Homo sapiens
tgggttaaagtgccttgttaaaggcatagatgttctttcaggttggaacaacaatccaaatcaaaccttcctctattcaatgtatgtgtcatactcacagccactcacaaatgttaaaagcagc

SEQ ID NO: 135658 - DNA, 381 bp, Homo sapiens
ttcatgagagaatggagttggaagagttttgcagattgtaaagtgctatagaattgcaagtacccacaggcatttatgcataaaatgcttattactgaagtatgtatagcagcaggaaaaaaacattggaactagctgaaatatccaacaattgggatatggttgagtaagcattctgtttaccgtcacacatgatgggtttgtaataacacaaggatgtctattttatcgttcacctgcaagtaacaaaaacttgacttacaatggcttcatcaaagaggatttcttgatcatatacaaataagcccagagagagacagcctggcccagttctggggcccagtagggccattcaggaaccagctacctctgttcactgct

SEQ ID NO: 135659 - DNA, 379 bp, Homo sapiens
cctacctggaaactggtgtttggtgctttctctgctttctccctctgctctaaactgttcagagggatgaaagagaactggaaacacagctctctagttatggacaggtcttatggttttttgggagaagagattgatgagcaaatgtttggggttaactatgcgtttagatgtttctcagtacttctggtgataggtcacctctaaagagatacaagcacttttcacacctcattttaggcctcatttaagtaatgagaagctgagtaggttttccccattttataggcatggaagttgaggaccacagaagaggaattattctttcctctgcacttatgcagtattctacttttttttttttttttttttttttttt

SEQ ID NO: 135660 - DNA, 133 bp, Homo sapiens
attttgatttcaaactatttattacagggcgcgaggctgtgttccgcctcctccagctcctcctgataaccttttggttatcaggcgtcaactggagacaacaatcagttaaaatccagtaaatttggggtta

SEQ ID NO: 135661 - DNA, 563 bp, Homo sapiens
tgtgtgctaatatgaaatgatctctaagacacaatataggcgaaaaatgcgctgggactagcctccaagctaagagtatgctaccatctgtataatgtcaaagggttgcaaggaaagacatatatagttgtatatgcataaaatatcagcgaacaaatactcatgaaactggaaacagtgatagcctcaagcagggggaactagggggctgaggatcagaaaagtagagactttcactactacattttgatatggtatgaatttaacctactcatattttgtcataagaaataagcactgcataataaaaactgcataatataaccacaaaaacttaaaaaactggaatgaaaggttaccttaggctcctagtttaccaaagccaaataaagaggcttatgaacaacaaaatacttattttaatcaagcatccttttgagatgttttcacctgttaacagtgcctgtcaacaatgctcatatcctaaacatgaaccaaaggtgcttccatgcacaacaaggaaaaaccagctcctgtgaacatgggagaagagtctgcaagta

SEQ ID NO: 135662 - DNA, 327 bp, Homo sapiens
ccaatgaacatattatcacttcatgtagttatcatttctttgtggtgagaacatttaaaatccactgttttagtcattttgatatatgcattattattgactacaatcaccatggtgtgcagtagatcaccacagcatattcttcgtgtcttacttgaaaccttccaccagcatcatctctttcttggtctactcccactgccaccctgtggtaaccaccatcctactctacttctggaggctcattcttaatgttcctttacaggggaaatacaatgggtatgggtggtgccttggggctaccagtaactaagcgcaccctgtagg

SEQ ID NO: 135663 - DNA, 361 bp, Homo sapiens
gtcagttttggcttttcagattttgaagcgtgtttgtgggctgaatcttgcccttatcacccatttctaggatgctttttgctccactcattctttgtcttgcttcacttgactttgaactgtatacttttttccatcgttttactttcagtatcttcatacatgtatgtttttgtacgcctctcttagaacagtgtatggttttgtaaaaattcagcctgtagcttttacctgcctccttcatgacctttataatccccttggttctcagcctgccactcacaggacttttccctgtgctgcgttcccagtgccccctccccgcccccacctgtgctttttgttggattagtagaattgc

SEQ ID NO: 135664 - DNA, 283 bp, Homo sapiens
aattagagaaaaatgaatatgtcaaaatgaagtacactatttccaaataatagacatcttcatttagtataatatttttacatctgtatatttccattagtaccaggacttaccaacataaagaagtgggaaatcatcaagctgtgaagatgcaaagtgactgtaccattttgtattccaaccagcaatgaatgaacttgttcattgcttcatatcctttccagcatttgccattgtcagtgttcacatattggctataatgtagtttggccatagtaggtgt

SEQ ID NO: 135665 - DNA, 561 bp, Homo sapiens
gtaagcaatgaaaaactcatggaagtagaaaacttttaaaaaatttgttgttggatcttatttattagttttaaggtgtcttataaagaaaatactattctgcttttcaacaaaattagaggcaaagtaatcttactgcattccacaattgggtgatcccttgggtgaggaaactcagttactcccctcaaaagctgtccatcacatttctctttaacaagttttccatgcttggttaccttgagctactttagaccaaactttatgggcaggtttaaactaaacctgaggatggtagtttgttttcaagcatcttattcacattttaaaaagctcttcacaacctcttcccatctgcccatttgtcccaagtggaatagctttttttttataacttctgattgcttgattctttgtctttaaagccttcatttaacctcttttttccttatggtttttgcaaaaattgaaaatgcatcgatattacagttaattttttcagtgtgtatgtggtattaggcttagaactataacacaggaagtttttagagtatgtccact

SEQ ID NO: 135666 - DNA, 252 bp, Homo sapiens
ggccagagcaggtccgggcctataaaggtggcggcggcggcgacgcgcccggctcctctcagcggcggtggcccaggtagaggggtccgcgctggcggcggcggcggcgctgttccccgcgcggtccgcggagcggggtccgggctgcgcgacgtggggcggcggcggcactgcggccccggcccaagcccgaccccgggtcgctctcggctgccggggcgaaggcagaagaggaaggaagcaaaaaagaga

SEQ ID NO: 135667 - DNA, 275 bp, Homo sapiens
gttttggatgaggaaagtcatgttttctaagtcctctcccctaataaaacctacccaacaatagtgctttgaaaagtggtagttatcttgaagatagatactcttgccaaatgcaaagataaacattctttttgtctgctttataaatatgaaatatgccagatctatagtattttaatgtgcatctactttaaatgagtcatcttggggtttttataattcccttacattcttgcccctctacacttgaaataacaaaatgccttaattttata

SEQ ID NO: 135668 - DNA, 204 bp, Homo sapiens
tcatctgaagaggacataagtctgagactgtgggaagatatgtgcagtgtcactgtgggtaacgggaaggcccgagtgagaccgtgggaaggtgtgtgcagtgtcactgtgggtaatgggaaggtccgagtacatttcagttaggaaatcatttgtgcctctattaagtttatatactatgtttactggcctcttttatgcttg

SEQ ID NO: 135669 - DNA, 123 bp, Homo sapiens
actggctggctttgtgggctactatctctctctagcttttagagtttggtttttcagaatatttccaatcatcttgcacctgctccataaaaacattcccaagtgccaccccatttaaaatgt

SEQ ID NO: 135670 - DNA, 285 bp, Homo sapiens
ctcaggatgtaagaggcagagtcatgatctaaagcttcatttagtcgttgccataaataattagggttgtatatgtaaatgatctctggcccagtagaagggataatgtcagcttctttccttctcttcagtggaccagatttgaaaagctatcagaaataaggaagtggggaaagatggaccacaacagagagaacactgcctgcagccccaggtcaggaagctgggagcagaccctcaagaaagagtcacaggccccagaccagagagctccacacccacccc

SEQ ID NO: 135671 - DNA, 287 bp, Homo sapiens
gagcaaaactctgtctcaaaaaaaaattttttttttttaaagaagcagcattaatgcaagtggtatcagcacaatgcttctaaatgtatcccagtgcttccaacttaggtgactgaaggggtggtgaccgggaatttgccgaagtgaagcccacagcacagatttgggatgaagttatgtgggatggtgaattttggacatgttgactctgatgtccatgttttgcaatgtgaggagttcacttgagaattggaaaacagattctgacgttcagggagaggctgggc

SEQ ID NO: 135672 - DNA, 221 bp, Homo sapiens
tactaactacaatttcagacacccactgcggggcttgggccatgtcccctgaagataagaggggactacggtaacacaatttatcaaaaacacattgctcccagacaccaagaactttgcagggattcacatccttttacttcataatcccacttctaggactttatcctaaagaaataatcagaggctgggcacggtggctcacgcctgtaatcccagca

SEQ ID NO: 135673 - DNA, 620 bp, Homo sapiens
gtcagcatagaggctctgagaaaatgagaaaataacagacctattgttttgttttgaggatcacttaagcaaatatgtaaaatcagatcacatagaataattccctgacctcagtgagtcttctttctaaactgcttcctgtctgcctcacccatctatttctgcagttccacccactgcagttttaaagtgactttggatagctgggtgaaaaggaagagggcaatacattaagactcagttaatataatttgcataatgaaattgtcaaagtgttcttggcccaaaaaacttgtttataaatgaaagtgaaagggttgaatggataatttgaagagagtgccttttcggctctatatattcaatcataggatgtcttgccactgagtcagcaaaggtttttctccaacctactccattaaattttattttacgcattctttttttaatacatataagtatttaaaattttgaaatgtcttagttgtgcttcttaaatgtaaagtgcatgctatcccatttgatagcaatttctgcataagcctgtaggtgaataaaacagaacttcataatacgtggaatatatcggatatacacatttgtggtaaccttagatatta

SEQ ID NO: 135674 - DNA, 415 bp, Homo sapiens
gggtggatggatggatgagtggatgggtggacaggtggatggaagagtgagtgggagagagaatgggtggcaaacctaccatgtgcatgtgaaatatgcactccagggccagagaaatgagcagtgtttcagcgcccagagagacactgtggagaaggtccaccaggatgcctacctgccttacacaagagcctaactttggcacacctgtggcacacctgtggagagctgttctggccccggttgtctggcaggcctgggctactccgagcaggggaactggggcacagtggctgcacctccggctataccctggtttttccagttcctgatgcccgcccctcaggtggcagcatgaggtgactcagggacagacgcccttatcgtgacgcaagtccagcccccagtggagccc

SEQ ID NO: 135675 - DNA, 710 bp, Homo sapiens
gctgtggtttctgtcctgtatcattccaagtagactggtgccaagtgtggcccatgaaagtcttgtcggtatgaatgtctgactgaacttaaaacgaccctgtggtgggtgctactgacttaacagtaagaaatatattttactctgtaatcagcatgtgcctatagacatgtatctctaaaacaaaaactttctgaaatagagaacacagtatgtgctatgtactcttaatagttcatattctattctattcattttatttaaacactctggttacaatccactaaactgctttcacaacaagtgggtcatgatccactgtttgaaaaacatggactaaaccttagattccttaccctaaaaagagtaatacctatttgcatagggttgttgtaacaattaaaatggatactccatgtaaagtgcctagcatagtacctagtatgtagcaagattctctcaacattggttattaccattattgacaatgtcttaactgttcttcctgcccacagtcttgaccatccccaatttattctctgcacagaggcaagaaggaattttctaaaacataaatctgaccacatcaagtgcttgcttgaaaatgctttaatgaatgcctgctgctcctaggataaggcccaggttcttgcatagcctacaaggttccaccagctctggccctagtggacttctccaacctcagctct

SEQ ID NO: 135676 - DNA, 110 bp, Homo sapiens
ctctatataatgtgttttgttttcctctggctgcttctaagatttttttgtcttctaagctagttgttagccgtttgaatataatgtgacttttaggtgtttgtttttgg

SEQ ID NO: 135677 - DNA, 251 bp, Homo sapiens
ctggcttcaagtgatctgcttgcctcagcctccccctgggattcaggcatgagctactgagtctagccaattttcattcattattatatctaatctggttaggttaaatattggatttccttaacataaaagtaatttaaaatctgaactttgatactacatgaaagcttgaggctttaagcataatgaattatttatataattgtttgtttttcatttaatgagatcaactcagaaaaggcattcgtgga

SEQ ID NO: 135678 - DNA, 440 bp, Homo sapiens
gacagaatgagaccctgtctcaaaaaaatgaaataaaataaaataaaacaaatcaatataatgcacatgctatgagtgatgtttctgattgtgtgttgtgctaattttgaataattaacaagggttttaagttgcatttactccatgaaagtatgtactctgtgtgaaaatttttaaagacacaaaaaaagaaaaaaataaaatcatgtctttcattcagagacagccattattaacatttcaatgcatgtatttccattttaaaaaattgttttgagtcaggtgcaatggcacgcacctgtagtcccagctacttggaagctgaggcaggaggattgcttgagcccaggaggtcaagaccagcctggacaacatagtgagaccttgtttcaaaaaaaaagaattaattgaaaattaatctcgcttgattagaacaatga

SEQ ID NO: 135679 - DNA, 462 bp, Homo sapiens
gcagagccatgtcagatgcagcagaaaacagtgactgctatgcctgcagcaagatggagaccagagtgccctgtaggccagcacgcagcacccactcagggcagtgacctggagcttcctcagatccctctaaggcagacgttctgaatccatctttgttagcagtctgggagacgaacttagctttggtcaaccggcaacagcaaggcaggctggttgtagggaaggtgggctcagacgtggccccagaggtacccctcacccagcatccccagccgtggctgactcttccctgggagttgtgatcagaaatggggtggagcccagcgcggtggctcacgcctgtttccagcactttgggaggctgaggtgggaggatccttgaggccaggagctcgagaccagcctatgcaaaatactgagatcctatctatacaaaaaattagctgggtatgatagtgc

SEQ ID NO: 135680 - DNA, 287 bp, Homo sapiens
ctccaggttaataccacattgcccctttaggccaataatgaattctgatcaattccacttaagaatcgttcattgtttctttgtcactgctctaacctcatggcaaatgctgagatatgtcttgaggtgatttatcacaagggtttctgaatcatgatatatcacattcattgcatccttcacttaccaggcacccatttccaaaatattacatatttatctccatttttaacactacagattaggtcaatggtgagtgcctttttttaaaagtccctactaattag

SEQ ID NO: 135681 - DNA, 402 bp, Homo sapiens
gtggacaaattcgtttctgtgtccacaccaactgtcaagcacattagatcagtccaaaccatgcagattactaaaacctcccacctttaggattcttcaatacagtatcttccatctgacccctccacaaacaaaaactcatgtaactgccccctcaattaaatttttttaaaacacttccagctgaaaagttttgatgaaagagtcaagaaacccatactttagattccttgactccaaacttccagttctcaaaattcagttatttcttacttttatcaatacacttacaggggctctcttttgatctcgcaccagtagacaaacctcctgtctcaaaaaattacagcctacaatttactgaagtcaagaatttccttttatacaataaatgcttgtccc

SEQ ID NO: 135682 - DNA, 406 bp, Homo sapiens
caggatttggtcctgtcttcttcccctccccgaattggtaaagagaccaaaatgcttaaagatacatgggtgttataaaactgctttgtaacacaatgtattaccatgatagaaaatatggggctgggcatggtggctcatgcctttaatcccagcactttgggaggccgaggtgggtggatcacctgaggtcaggagtttgagaccagcctggtcaacattgtgaaaccccatctctactagaaatatttaaaaaattagccgggcatgatggcgggcgcctgtaatcccagttactcaggaggttgaggcaggagaattgcttgaacccaggagacggaggctgcagtgagctgacacagtgccactgcactccagcctgggcgacagtgtgagattgcatccc

SEQ ID NO: 135683 - DNA, 454 bp, Homo sapiens
cagggacccgtcaactagagaaagtataggtggatgctgggctgtgaaaccctagatttctgccacatcagcctttcactccttctctcaacgaatacctaagcactcacaacagactttgtggacctaggtgtgaaagttactgtggtgaacagaaaggtccaggctctgccctcagagagcatctagctggtcttgtgccagggcttgaaccatgccatggtctttcagctgactagatgtctttactgagcacctactatgtgccaagccctggaaacagaaagatgaggaaagccagggcctctcccttgagcagtatagagcagaagaacgatggtggtttcaggagagcctgaggcactaaggatgctagcacttcacatctttctctgctactgttcattttatctggtaggattggattctgttggaactcaggaaacccaaaata

SEQ ID NO: 135684 - DNA, 390 bp, Homo sapiens
ctcaatagatgttagggaggtacttgacaaaacttaacatctatcccttctaaaaagaaaatcccttagtaaaaggattgaaaggtgttttccatcttaacatagtcaaaggtgtgttgcaaattaatagtcaacatcatttatgacagtgaaaccctagaaacatttaagcttcccaaataaggttgttggcaacaccattaaaaatgttctgttctttttttttttggatgtgcgatactttacttggcactaaaaagtaaatactaaatgacaagagaaagcaaaattgttatttgaagatattatatgattagaaaaacaaaggtcaacagacaaatggttagaagcaatttaataaaagtgcttgttcacaaattcagtgtacaa

SEQ ID NO: 135685 - DNA, 670 bp, Homo sapiens
aactcagttgctattgggtatagcgagcataacttacatgaaaaggctaaaaccctctatacagctgacacaattaagaatttctccatcttattcctaacagctccattttatcccattgtacaccttaaaaatatttaagaaaatacatagtcaaggatataattaagaagtatttacgaaaactccaaactccatgttttataactaagagaattctcacttatgtatagctacaattcatgtaaagaaacagcttttgcttagttattgatgatttcacctaatttgaatccaaacaaaaatcctgaatgacatatttaatttttacctcgacaatgactgaaacattattactgaatacttacatatttaaattgtgtatttcacttatgagaaaagtaaaaatacaaatttcaagatctcaaagcaagaaggctcaataaaacattatataaaaatgttgatctttgactattttataactgttatgctaaagagaaacatgaaacctttgcattgttaatattagatcaagtaagtagaaagcttaaatattaacatttaccttccttggtccttcatcgcatgttacttgctattcaggccacatgagtttattgtctgtgatattagaaacacacttatataacctaatgggttacgatcc

SEQ ID NO: 135686 - DNA, 399 bp, Homo sapiens
taaaaaagttgttgtaaaacttgtatatggagcacacacatgctctttgaaataaaccagttaaataaaatctgtgaataaatatatggagttggcaacatttctctatactgttttccacagttgtctaaggtattgtcgtcgacatctgttgtgtgacttaaaagggctgcacattgttcagggccttctctctcattgctttttgtcttatgtttttgctggggcacctcacttcttacaagtctttgtcggaaaaagttgaaattgatatgtgaagactgctgtagccgttctgcctatcaactgtcttctctggattgtccagagttgttagagttgaaaatatgtccagaatctgcccgcttcttaccacctcctctgctaccactttggtcc

SEQ ID NO: 135687 - DNA, 490 bp, Homo sapiens
gaaatgtgataggtcttattaaggtttttttgaaaagatttcttattttatgtaggtaaacatacatgcacgttgttcaacaatccccaaatctatagtagtatgaagtatagttagcttagtcctggtccagagttttacacatctgatttgttagggcttattgtgtattgtaaagaaattagaataagaacatttaaaaaattttaggccaggcgtggtggctcatgcctgtaatcccagcactttgggaagctgaggggggcagatcatgaggtcaggagatcaagaccattctgcccaacatggtgaaatcccatcctactaaaatacaaaaattaggagggcatggtggtggcaggcacctgtagtccaaactactcaggaggctgatgcaggagaatcccttgaaactgggggacggaggttgcagtgagccaagatcgcgccactgtactccagcctgggcgacgagcaaaaactccatctc

SEQ ID NO: 135688 - DNA, 579 bp, Homo sapiens
gcgacagtgagactgtgtccccccaccgccgctaaaaagtcaatgaagattaagtgagatgacatctgtgaaaatcctggaattgtccttacctgagttacctacactacaaattatccataatttgtttcactcaagctaactttcccctgctctccagcagtttgctgggctacctctgtctcaacatcagtcatgatgataccagtgagggcaaatggatttttaaagcaactgaaataagagcaaaaccctgtctctatacaattttctttctttctttctttctttttttgatacagagtctcgctttcacccgggctggagggcggtggtgccatctcagctcactgcaacctccgcctcccgggttcaagcaattctcctttgctcttaggatatagacaaaaccacttgcatggcaggcaaggtcttgtatgatcttgcctccgctcagcactagctcgactcaatcccttgttctcaatcccttgttttcccaagtagctgggattacaggtacccaccaccacgcccagctaattttttttatatttcagatggggtttcaccatgttg

SEQ ID NO: 135689 - DNA, 423 bp, Homo sapiens
tcatagactgacattcagcttctaagcagggtagggtctccagcctgacacacgtcttcgtggtcacccaagcccccgaaggcagtgttctgtgctcatcatccctctgcgcctgtggtgacccgcacagctcaccccgtccatcttaacgccctctctcctctcacctgctgcccctaccctcccggctgtcccctgtgtaggcttcgcagcttctccgcgtccatcagctctgaggctcctggaggccttctctcttctccttctccccctcctcctctccttcccctctcccaatctcccgctctcccagtctctttacacaacatctgtgcaccagaaattttaaatatgatcctgcagtccctaactgtgcccaaggggcagtctcatcatgggctgtgttctgcacacctcctggcc

SEQ ID NO: 135690 - DNA, 201 bp, Homo sapiens
gtagttattaacaccgctcagcagcaagcgatgaaaccacaagaagcatagtcatagcctgtgggaggcagggagcagagaaatggaagggaaatctttgctaatccagatggcacaaatgagtccctgatcagagacgagtggtgttatcactcagcctacctgtgccctgttcagtgataaactgagcagtcaaacccc

SEQ ID NO: 135691 - DNA, 304 bp, Homo sapiens
ttgctttttcattcttatatcagttgtgtaagtatgtgtgtgtgtgcaagtgctgttgtcttttgttgttctgatattacataaatttatagtcatcttgtctttgctcttgagttttttatgtttcaatttgttgaatttggtgcacagtttgcgtgatttttttttattcaaacctttatgacgttctcgtttctgtatttgagcttccctgttgacttgtttgtgaatacttactgtttgccatagtctgcttctggtgatgaagaataagaatgacgagtccttaggtagggcaagttga

SEQ ID NO: 135692 - DNA, 432 bp, Homo sapiens
tacctaacctggcatatttctgacaatccctatattgtgcttcagcaatagtgaattattactagtttattgtgtttttcaaagcctctatgacttgaacatgttatttcctctgaatggaagtcctctcctattatgtctacctaacaaactcctgcttcaaagcccagttcaaatgctacctcccttggtaagccttccctgaaatgctctggatctcataagaatacagatgtgagtcaagtaccaatagaaatatagctatcattcctgccccctcctattcaggtggaaacacagtcctctgaaaagaacgccttgagcatttagggctggaatctcacatgctctcgtgagataactcattttatccaggcactgccagcagagaaggcttctgggagtggagacttgtctgctgcattcagtgtt

SEQ ID NO: 135693 - DNA, 262 bp, Homo sapiens
tcaccaccatcttatgcattcatgtctcttcctggagagaaacacctgccacattcacaccactccacacagtcacagattggtcgttcacatgcattagttggttttcttccccatgttcatgaactgtatgcctaacctcatccaatcatctggcaaatgaacactgttgtccacagaggaagctacgtgaggggggtccatttgcaatgcaaatccgtcatcattgctagaaaagcaattcgaagtagcatgatttttt

SEQ ID NO: 135694 - DNA, 125 bp, Homo sapiens
ttttccaaagtggaatgtacgattttatattctcaccagcaatgtgtggcagatctgaaaacttaaaaaaaaaaaagacaggtatgggctgcgtacggtggctcatgcctgtactcccaacactt

SEQ ID NO: 135695 - DNA, 756 bp, Homo sapiens
gccgggtttcagccgtttgacatcactgatatcagtataattgcctgcatcaggatcatccatattaatggcaatgactttccagtcggtttccccttcgtcaatcatagccaatatgcctagaactttcacaccaattatttcacctcttgcacataccttgcttccaatttcacacacatcaattgggtcattgtcaccacaacagccagtatgtttatcattgtgccctgggtcttcccaagtctgagggatggcaccatagttccagacatatcctttatacgggaacaaattcgcaacatagcgaagttttctttttttcacatcttgtttaatggggtttaaagggtcctttgtagcaacctccatttttgcattagaccacagtggtacttcaactaccacgtggaacacatccttatctgcataaattggaatatcttgaaatggagacatatattgtcctttctcatttttgaggaagactcggtacttcagggagaagggcgtggcgcgctcctcagtgctgaagccgctcatggtgccggagtccagccgccaccactgccacagagccaccagcccacatgtggcgccgactgacagcctctcccatttcaagaaataagtcggcatacagagaatcctaaattacacacaacttcacaagattcagacatcatctgctgcataagatgagacctttaaaagcctattctagaactagccacccttgccaagaataaattggaa

SEQ ID NO: 135696 - DNA, 177 bp, Homo sapiens
aaaaacatgcaatcaaagtcaaaaagagaaaagcctaacgaactggggagaaacagagaagatttctcaggagacaagttttaggaattatttcagggtgcttgagatagttattaggtagaccacatctgctcctggtgggggtgatctagatctagagtgctgtgcaatgtagga

SEQ ID NO: 135697 - DNA, 427 bp, Homo sapiens
aattagctaggcatggtggtgcccttgtagtcccagggagctactcaggagggtgagatgggaggattgcttgagcccaggacaggaggttgaggctgcagtgagctaagattgatcctgctactgcactccagcctgggagacggagcgagatactgtctcaagaaaagaaaccaaaaaactttttctggagatctaacatacaggatagtaactgtagttgataataaggtattgtgtgcttgaaatttgctgagacagcagatcttaagtgtgcttgtcacaaaaaggtaactatttgaggtgatagatatgttaattaactggactggtgatcacttcaaaagacgtgtgtatataaaacatcacactgtataccttcaacagatacaattttaattacaccacaataaagtggagggaaaat

SEQ ID NO: 135698 - DNA, 417 bp, Homo sapiens
ctgagtgcagtggctcgtgcttgtaatcccagtactttgggaggccgaggcgcacggatcacctgaggtcaggagtttgagaccagcttggccaatatggggaaacccgtctctactaaaaataaaaaaattagctgggtgtggtggcgggcgcctgtaatcgcagctacttgggaggctgaggcaggaaaatcacttcaacctgggaggtggagattgcagtgagccgagatcacaccactgcactccagccagggtgacagagcgagacactctcaaaatataataaacaaataaaaataatatgagaataatgggatggccactttgggaagcagctgatagttcctcagaaagttaaacacagaatcaccatttgatctggcaattccactccttgttatatacccaagagat

SEQ ID NO: 135699 - DNA, 825 bp, Homo sapiens
agaaagcttctgttgtccccagcacttcccagggatgcgggaaggaaagcgccattagaagggaagaaaatgcatgagcaggtgtgtacaaattgtattatgggcggccagacgggcagagttccaatcatcctgcaaatccctgtggaacctctgggccccaccggagtgtcccagcctcttctgtgtccccttctcctcactgtgaaagcactgggccatgggaagcagtgggcttcctacgtattttccctgggaggcccgagcagcagccaccctgctctatatagtgcagtctgaggggcatccagggagtaggggccgtgtcagggctccctcctcactggctgcagcagaaggatcccaaccacccagtttttcagtcagtcccaggcatcatgggcccccgaggagcatgggcactcagtgccacttaccaagcatacctactccaggcagaaggctcaccagagtccaactagagagagcaggtgaggtctcactctgtaagagtgaaagtaagagtggttctcactcttgcaaagtcctctgatgtgtccacctgtagctagctgaaggatgtgtgcttgcatgtggtgtgttttaagaacaaaacatctgcacgacagctacgggcagttcatcaacacaggagatcttgaataataatcaaggattaattaagtttaaagcgtatcacattttgtaccagtgtcagaatctgggggaggaagaacaattaaaaaagaattaggggtttttattggtaaatccaaattcattcctaaatcaaatgatgaaaatatttgtcgttgttaatactct

SEQ ID NO: 135700 - DNA, 124 bp, Homo sapiens
aataacatttaatttaaataaaatgttgcttggtctgtccctgaggctaaagggctaaagggcagtggcataatccgaactcgctgcagcctccaactcctgggctcaagtgatcctcccacct

SEQ ID NO: 135701 - DNA, 245 bp, Homo sapiens
tagagaaggggtttctccatgttaccaaggctcgtcttgaattcctgggctcaagcaatcggccagactcagcctcccaaattgctgggattacaggcatgagccactgtgtcggacagtattaaagtttcttgccaggggccatccaaaccttcaaattcctctacctttcttgtttgtgtcttacatctatgctttgagtctcccctttgtgatgatgctcagttatgattaccccgactgaa

SEQ ID NO: 135702 - DNA, 727 bp, Homo sapiens
cgttttaaaattttaagagagtttataggctatgttgccatgactctaatcttcaaggcttgtttgctttaaaagtgtgagtttctgattataacagtaaagctaatagtttgtaagatatacaagaaatcacctgggaaatataaatcctctattaacccattacttggagataacccctattaccagtttattgtattcttcagtcttttttcctgtatgtactctgtgtgtgtgtgtgtgtccatctgaacatgtgactgaaatgcctatgttgaaacttttgttccccccttatcaccaccaaatagtacagtgttgaagagtccatcagtacaagccaaacataatatcttactattcgtaatgtacatgttttatttctatgggatttagacattttccatactcattaaccatttgtatctccttttgttatttacctttatttttatccttggtccctctcttttgtttaatttttattttattggcttataagaagtgagaactgatattaatcttttataatctcaccagtatcctttttcaatttgccatttccctttttataacagtgagggttttttttttactaatagaagttattatttttcattttgtgcatgtatgtgtggtccaaactgtcagtcttttttttattcttctgatttcttccaagtttgttgttatgtatagttgtacagagttttgcttttttgacaag

SEQ ID NO: 135703 - DNA, 216 bp, Homo sapiens
cctaagacataggagattctgcttattgatcggcttgttgcctgtctgctctgcgaggacaggaaatttttgtctgtttttgttcatgcaatatccctagcacctcaacagtgcctggcacatagtaggtgctcaagaaatatttgggttcctttctttctttttatttgtttagtttgttttttgagacagggtctcaccttgtgacctaggctg

SEQ ID NO: 135704 - DNA, 670 bp, Homo sapiens
aagacaggaataactggtcagagaacaaagtacgatagctgctaggtgagcagtatgacaaagcaccactagggacagttcagaaagaacagtcacctcttttgaaggatcagtggagactttgtaagaatttagtctgaccttgagtaggcaggagacacttggagttaggcattcattctaggtaaaggtatgaaccttataacccatgtcttggctgggcgtagtggtgcatgcctgtagtcctggcttcttgggaggctgaggctgggggtatcacttgagcccaggagttctgaactatagtgcgctatgctgattgggtgtctgcactaagttaggcatcatgtgatgaactcccaggagctgggggccaaccaagtttcctaaggagaagtgaactggttcaggtcggaaacagagcaggtcagaactcccatgctgatcagtagtggaatcacacatgtgaatagccccagcactcccacctgggcaacaaagtgagaccttgtcttttgagatggtttgctgagtcctgtctcaaggttggggtgagaattctggggttctcaattctgcttttgagattgcagacttgactgtaaagtttgtaaatgtgatactgggagccttcctaagccttatagggtattcttaggataggtttgcc

SEQ ID NO: 135705 - DNA, 730 bp, Homo sapiens
aagacaggaataactggtcagagaacaaagtacgatagctgctaggtgagcagtatgacaaagcaccactagggacagttcagaaagaacagtcacctcttttgaaggatcagtggagactttgtaagaatttagtctgaccttgagtaggcaggagacacttggagttaggcattcattctaggtaaaggtatgaaccttataacccatgtcttggctgggcgtagtggtgcatgcctgtagtcctggcttcttgggaggctgaggctgggggtatcacttgagcccaggagttctgaactatagtgcgctatgctgattgggtgtctgcactaagttaggcatcatgtgatgaactcccaggagctgggggccaaccaagtttcctaaggagaagtgaactggttcaggtcggaaacagagcaggtcagaactcccatgctgatcagtagtggaatcacacatgtgaatagccccagcactcccacctgggcaacaaagtgagaccttgtctcttaaaaaaaagtcgccagaatgtcctcatctgagagaaaccacaagtatacatactcagtttgagatggtttgctgagtcctgtctcaaggttggggtgagaattctggggttctcaattctgcttttgagattgcagacttgactgtaaagtttgtaaatgtgatactgggagccttcctaagccttatagggtattcttaggataggtttgcc

SEQ ID NO: 135706 - DNA, 803 bp, Homo sapiens
aacaaattgacagggactctcccctgagtatctcagactcacctctgtctgcagcatgtattactcttgagtgttagccagctttgacaagttaaaattaaaaatgtaaacaggccgggtgtggtgaccaatacctgtaatcccagcactttgaagccaaggaggagcacttgagcccaggatttcaagaccagcctgggcaacatggcaaaactctgtctctacaaaaaatagaaaaaattagccgggcgtggtggtacacacctgtagttccagttacctagggggcagaggtgggaggatcacttgagctcaggaggtcgaggctgcagtgagccgtgattgtgccactgcactccagcctaagcaacagagtgagaccctgtctaaaaaagaaaaaagaaaaagtaaacaagatcgagagagagatgctaccatcctggaacctgtgtttgattagcttttgtaggtaagaacaggtatgtggccagcagcagttactgagttgccctttttaagaagagatggaacagggaaacccccattagtatgcagggttgattccagtacatcagcctaggaattgttaagcatctgcccaggaattgttagcagtaatagtggctccttcttccaactgtctcctagtacctcaatattgagtgaattctgactatttcatattcatttactgaactatttacattgtgggagtgaaacataaccaggaaccattaggatctgacagttgggaggctatgttagatattgtcccagaaagcaggtgattttcggaaagtgaa

SEQ ID NO: 135707 - DNA, 254 bp, Homo sapiens
tactcaggaggctgaggcaggaggatcacttgagcccagcagttcaagtctcagcagttcaagtccagcctgggcaatatagcaagactgcatttcttttcttcttcttttttaatacctggaataaagaactcctataaaatcactaagaaaaggggtcacttaagaatctcattaacaaaaagaatttgaatatttttccaaggaagatatgcaaatggactgtaagcacatgaaaagatgcagatcaggga

SEQ ID NO: 135708 - DNA, 560 bp, Homo sapiens
ccccacctataacaaaccacttcaaaatcctacataaggtaaaaataatctcaagatacaagaatgtttaatgctcttcttagattctgtatttttcccctctgattttatactaacatacacacattttcactttaaagaatctcatttaggaggcttcattttaaaggagtatatggcagtatttgttcatttaaaaaatggcatggggaaaacaaaactgactttgaaaaattccctttattaacttactgattacctttcaggaaatgttccagccaccctctcctttttagttgttgtaagtctgtgacacaccattaaggaccaaatcatgcaccatgtgcttacagcatagctcctcttcctaaccttttcctttcttcctcgcccaactgactgatacatgcaacccaatccagaaatcaccacacatttggtggtaattcccctgaattttacttgcaaatgacaaaaatgcaaaaatgtcaatttgcttaattttcctaaagacaagggcaacttcacacccgccatctttttaggtttagagctaagag

SEQ ID NO: 135709 - DNA, 750 bp, Homo sapiens
cccccgggttcatgccattctcctgcctcagcctcccgagcagctgggagtacagatgcctgccaccatgcccggcctcagctgatgttttgactgcccttcagttgaatggtcaaaatcctgaaagtgccaactatttttatttcatgtggaactgcagcttccaccttgctacaagattctaaacatagctctcattaactgctagtattccctgtgagtgatttgacattccacctgcattttcctgagacctggtgaggatcatcctgttaaggttttatatcattacagtttcaaccaactaactggtaagagaagacatagaggtgccaaacctgagagcaatcaaacacaccgctgagctacagggtgatagaatcagctctccttaggggccttgcattgtggagtctgatcgggattgctgcactaagttcagccctgggttttatttgataaagaaggcctggcacccttgtgcttctctgtggccctgcattctaactccaggtgcccaatttatcagtcttttatttttccttgcatgattctccacacctttcacttgctttatttttcacttcctagatgatcattttcggctctgttcacaactctgcagtaatatctcaaaagagcttacctcttaacctcaccccagtcatctataggtgctcttttgtcgatctgagtacagaatcccaccccagagtggtactttacacttgcaccacctccagaaagctt

SEQ ID NO: 135710 - DNA, 267 bp, Homo sapiens
catattggtcaggctggtcctgatctcctgacctcgtgatccacccacctcggcctcccaaagtgctgggattacaggtgtgagccaccatgcccggcctcagctgatgttttgactgcccttcagttgaatggtcaaaatcctgaaagtgccaactatttttatttcatgtggaactgcagcttccaccttgctacaagattctaaacatagctctcattaactgctagtattccctgtgagtgatttgacattccacctgcattt

SEQ ID NO: 135711 - DNA, 301 bp, Homo sapiens
tgttcctatttggccatcttgtaaccacccccacttttttcttttgttcctcttctaggcagttcccaaccctcagaggtgaacactgttttgattttctgttaccataagactagtgttgcttgttcttgagtttcatgtaaaatagtacagtagtacagtcaggcttgtttcgcttgacataacgtttttgagatttgttcatggtgttttgtgttttggtagtttatttgtttattgctaagtagtattcctccatgcaaatatactacaatatgattatctcttcctgtgttgatga

SEQ ID NO: 135712 - DNA, 146 bp, Homo sapiens
ggtgtgttcattttcccaccaacactcctacttcataaccttattttgtgcagtgaacaaaagaagatgtgattgtgtccttcacagtggggcaggttctgctcatcctttttgtagaggttggaaaaggtgagtgaaagggcgca

SEQ ID NO: 135713 - DNA, 606 bp, Homo sapiens
gtgagaacacagcaagaagtgccatttatgaacaaagaagtggccctcaccagatgctaaatatgtgggtgttttgatcttgaacttctcagcctcccaaatggtgagaaataaatttctgttgctaataagccacagaattttgtggcttgcttgtggtatttcattatagcacactgaatgaactaagacataacatctttatttattaatttactcatttacataacattactgtgttctagaagacctaggctttgggtaggttcggtgaccacttcaaggttagcttctggaagatctgagatcagatcttgattcagtactcactttattatttattacatatttaatattttatcacatcacagcaataattataatttggtgatcataatttcattttttaatgttttcattttaatgtataggattgcctaggctgctttaactttttaattctctaggatttttatgaaattaaaaaaaaaatctcaacccgtaacttccttatgtgagtgttttctcctaaaccctcatgctacgtagtagaacacttgttctggtttcagtttacaaactagagaacccattaataatgactac

SEQ ID NO: 135714 - DNA, 807 bp, Homo sapiens
caagcctgtacctcttgtgcttacccaatttttgaccacaatctcttacctgctctagagggaatggaattctgcagaccctactcaaactgtgtctttactgactgatttgcactgatagaactgtgtctaataaatactcatgtaataatttggattgatttataacacttacaaattattggaaactcatgtatgtcataattccataccgaggaccatctctagcacaaatagtacctttgtgtgaattaacagaaaggtgcccggccggctgcagtggctcacgcctgtaatcacagcactttagaaggccaaggagggtggatcacttgacatcgggagttcgagaccagcctggcgaatgtggtgaaaccccatctctactaaaaatacaagattagccaggcgtagtgctgcacgtctgtaatcccagctactcgggaggctgaagcaggagaatcgcttgaacccgggaggtagaagttccagtgagctgagatcatgccactgcactccaacctgggcaagagagcaagactccatctcaaaaaaacaacaacaaaaaacaaacaaaaaactcagaaaggtgcccctctaggtagatgaattacaaaagctcaaagttaagctcaccccaggcctggctggattttaatctctacttgcccccttacagcttttaagatttctccccttttaagtaccattaagactgatgaatcttaactgaattgtcagattgtcatttgagcctttaaactggctcctttgtagactttctgacagaaacaagatctagcccca

SEQ ID NO: 135715 - DNA, 669 bp, Homo sapiens
gagaaagagcacatgtcaaacatttttatgggcctgaagaaaacctctctgttgtgcacagttgtaccctatttcctcagtttcagaatgcagcctcgtgcctttatgcactgaattgaggctaggcaaagtgctaccacatgactctatggtgaaatgggctctgaagtgggaatcgtcgctctgcccataggaaggagcaagaaacatgggaaaaggcagaagaaaagaaaaattggccacagggtttagatgaggtgctggcaccatctgtgctggtcagggttcccatttgaactcctgagtcatgaaaaagatttacatattatttacataaagataacagtattattcttattgtaaaactaatggaactgttcgtagaagaatgccgcaatcctgataacccaacatatctgactcttctagattttgtccatgtgctgattatttcactagatataatagtataatacagttagcttcccatattcatgggttctgcattcttagattcaatcaacagcagattggaaatatttggagggggcagggcgcagtggctcacgcctgtaatcccagaaccttgggaggccaaggtgggcagatcacctgaggtcaggagttcaagaccagcctggccaacacagtgaaaccctgtctctacta

SEQ ID NO: 135716 - DNA, 320 bp, Homo sapiens
aaaacaaaaaaagccatacaagtaaataacgacagcagaaaacagggacttgcagtaacacagacagtatattccgggtgccgacactcaggcagcacacgccggccctatggggcttagggctatcagggtgtacactcacagctcgtggcaagcccactgtggctggatcagggataccgggatagggaggggaagaaggattcaggggccaagtgcagcctccgggaggtcttaaaggaaaaactataaaaccaaagtaggccaggtatggtggctcatgcctgtgatcccagcactttgggaggccgaggcaggag

SEQ ID NO: 135717 - DNA, 341 bp, Homo sapiens
ctggggcaaggattcacctttctcttctctttccaaatgtcccaatacaatttactgagtacagcctagctttccccacggatttctgatcccaccactgctgttctgtattttaatttcttagatccgtgagtctctttctcagtccttcatccgggtttccttggtttgcctattcctgtcagtccagaatattttaatgactcctgctttacagacggcagtatgtctttatatcaacttcactacactcaagcatttattcttctagagaaaaattttcaatttatttatctaatttccctcaagactccacaattttacctgcattaacatcaaca

SEQ ID NO: 135718 - DNA, 475 bp, Homo sapiens
gagggtctatacttatttcatctccttaccagactctcctttctctcttcaggcctaggcattaacacaatttttatcactacattctgatgactgcagacatgaacatcactaagctattctttagtgatgatcttaagatcttaagccatgcaaggccatgattacaggttcctaatctacaaagtcagtggggaaaggatcagtttacccaacatgataaaagattgatttcttcactaatagtcagaaaggtaaatacaatccctagctagcagggagaaagggatatctctagatattctttggataggtatccctgtaatttacaccataatcctaaagagaggtctccagatacactaaccaaggggaactcaactttagcttttgggtttcactgaatgcctagggctttccagtctgcagttttgttttctctataagtatagtcttctttaggcttacacataca

SEQ ID NO: 135719 - DNA, 502 bp, Homo sapiens
accatgcaacacaccccaagatacattgaatttgaaccacattgtctcttgttttctagatacctcacgtttcttcctctaagcctttatgctgttgttcccacaacacactgtggctttcttcctccatgttttatgcctgaaaattccttctccttcaaatttcaacctaaatatcccctcttttagaataccctcctgttcccttaccgctagcctcctagagtagagaaaaagaatgtctgttactattattaaatcacagtgacattagaatagagacaacttgaaacagaagtccttttatgaataaaccaattattggaaagcaagagtttatataatttgatatatatgactttagatgaccacaatgttgtaggagatggcctaaagttctttttttagtatacccttttctcaaggaatggcttatcagattttataaatatttatgccaataattgtagtatagctgtcctaggtgtgtagtactaaaata

SEQ ID NO: 135720 - DNA, 258 bp, Homo sapiens
ttcagattaactgtttctgtccaaagccaagaagacagaagtggtggatgtgtctatagctgcctcgggcctctagtgcagggcaaagatgcccctcagaggagtcaggtgaggctgaaatcgagcccacatgtcacctacctgttggtacgtggtgtgggaattcgtcagactgacaggaaagggttgcttgccaggctctgcacccctgaagccccatcaacccagaggggttcctcttaataaattgcacaaaag

SEQ ID NO: 135721 - DNA, 339 bp, Homo sapiens
ggaccgcggtatggccaggccaggcttggaagagctgggggccgcgcacatgtgtggcagcagagggccgggcttggaaagcctgggggacaccgtgcagcttgtgtggcagcagagggccgggcttggaagagcctgggggacaccgtgcagcttgtgtggtagcagagggttgaacagtgggatgctggtttaaatgggctttcaagaagtttcagaaacaaagccgtgtgcaacttgtgtcttcctgggcacgggtttctgggctgaggtcccaggtaccccttctcgtatttgggaagagtgaggcattaatgagagggacaggcaagcagaccc

SEQ ID NO: 135722 - DNA, 96 bp, Homo sapiens
gcaaaatgacagttctgtgatcaatgacaaaacatagtggagaatgctgttagaacaagcatgcacccccagctttgctctgtgcaacacggtaag

SEQ ID NO: 135723 - DNA, 334 bp, Homo sapiens
ttgcagtatctcgttttgctcacaacttcatggctttgtcatttttcctgttttagtgtactgtattgtgtgtttattgctaaacgtttttagaagaacaaatatttcgaaataaatatgcatctctaatttagtcatctttaaatttcctcaagcagctttcaaacaaagtacaaacttattttcatattttgatacagtaaaactttaagccgttggtctctgcctgtgttttcagtattgtttctttcttcttcttctttttttttctttttttttttttttttgagatactaagttaaaaactattattctttggttcttttttattgat

SEQ ID NO: 135724 - DNA, 221 bp, Homo sapiens
gagtctacttgaaaaactattccttctgttgtatgtaaactctaagtttcctcttctacattaatatttaatcatattcaagtctctcccatttaaaaatcactgtcttcccattaagacccgtgatataattttccattgtttcaaagatctctcaaaaatttaagttttctttttgaaaatacttttttttccagttcatttgtgggcattttctgtat

SEQ ID NO: 135725 - DNA, 846 bp, Homo sapiens
  misc_feature (836)..(836): n is a, c, g, or t
gctttttttccttttttgcttttttctcttcagccaatggagatggtgttgttggacacagactttctgatgtaaataaataccttcgttattataaaacttattttcatgacttatctgcatttgcagtatctgactttccactcataatatgttaaaacgatgccagagagatattttctggatgcactgatttagctttaacaataaaattattgttacttgttctgattagtggtagagctcattaaccgtgttccttctttttcttactgaaatgatcctgtttaaaagctcagtgagccacactttcttctaacacaaatattaaaaatgacctactgtcacttgatgatagttgtttctcatgcacatatctattgactcaaaatgaccacaatatgtacacccggaaagcactatttttattagtctaaataaaaaattgcattacaaatttatattcaacgtattaggaaaaattggacttcaatatataaagagactgaatcttttctttctgcccagagataaaaaggcaaacatatttacactcatgtaatcttacactcatgcatcatttgatgaaaaacatgtattgaagcttacagtaatagtgatgttaaaatctttctctttacaatctatccacatctctctcctttttgattacaaaggcttatatgatgaaacggttatgtagcattcaaggaaaaaagcctttggtgaaaaggaacgctgcggaaggggcccaaggaaagatgtctcccaaaaagggggggcaagctggggaaggcccataactcgattacacggcacacacatttgctctttanagaagagaca

SEQ ID NO: 135726 - DNA, 170 bp, Homo sapiens
tttgactttaggaaggcaaatcgtcctctttttagcttgcacattcaaaatagtttgtgtctcataaagtggagatttgccttgataagtaacagaccttgagagctcttatctcccaaccattcatccaacaccatttaaatctttattttaagaacagatttctggca

SEQ ID NO: 135727 - DNA, 220 bp, Homo sapiens
tactttcatggggctaaaatatatgtataatgaatctgtttcaggagtcagaaaggctttcttgggcaccaaggattttgaattctagctcaggggtgaggggactagagtaagatttaggaagtttaacagttcctctctcagccccagaaaccccagtgagggaatctcaaaagtctgggactcccaagaaatcccagactgtcaaagccaagaatta

SEQ ID NO: 135728 - DNA, 652 bp, Homo sapiens
ggataaataggcaaagcacagatttttagggccgtgaaatcatcctgtataatgctacaatgatgggtacacatcattatacatttgtctaaactcatagaatgtataacaccaagagggaacccaaatgtaaactgtggactttgggtgataaagatgcgtcagtgtaggcttattgattaactgtaacagatgtaccactctggtgcaggttgttgacagtgggggaaactatgtctttgacgggcagagggtatatgggaactctctttctcctcaattttgctgtgaacctaaaactgctctttaaacgtctatttttaaaaacagaacagctgtgatatgaaactgcatggagacaggtcaaataactaaggactactggtctaaattcagaatcaccctcagctgtataggtatttatgtgttcacttgtggcttagcttactgctgcttaatgggaaagttttgcttcccttcctcacctctgttttttgtttttttggtttttttctttacagtgatagtgaacaattacagtccttggaaagactgaattatagcttaatgaatgtacagatacaaatgtctggatgtttatattgccaggggtagaaatgacgagggaaaacatgcaacccccacaattaaa

SEQ ID NO: 135729 - DNA, 828 bp, Homo sapiens
actgcactctagcctgggtgacagagggagaccctgtctcaaaaataaaaataaaaataaaaataaaatgggcaacaacagagaaggcaaatcaaattcttcatctttcatggaagagagttaacagatactgtttcaagttttataaataaaaaaaacatgtttaagattatttacagagttttggaggtaaacagcaaaacaacttaaaaaaaaagtggctatcttgaacaactggatgggctgattgagaaaggccataacaaatcatattataattttgctttagtctaatagtcataattccagatgttgaaagtcacaggtggctttcatatgcataatcgctatgtcaaaaaattttagcagggccgggtgtggtggctcacgcctgtaatcccagcacttcaggaggctgaggcaggtggatcacttgaggtcaggagtttgagaccattctggccaacatggtgaatccccgtctctaataaaactacaaaaatcagccaagtgtggtggtggctacctgtaatcccagctattcaggaggctgaggcactagaatcctttcaacctgggaggtggaggttatagtgagccaagatcgtgctactgcactccagcctgggtgacagagcaagactctgtcttaaaaaaaaaaaaaaattgagggtgtggtggggcgaggtgcttgtaattcccattacttttggaggctgaggtgggaggattgcttgagcccaggagtttgaggtcagcaacatagtgagacccctgtctctacaaaaaattaaaaatgggccaccagacataataaaacatataata

SEQ ID NO: 135730 - DNA, 174 bp, Homo sapiens
gccaccactcctggcccaaaatatttaaacttaacaattttttaaaatataaatggtaatttgcttggacataaagaatttctataacgtgtgctctttaatgaaaggcttttatatggaaaccacccacctatccagtagcacagagaaaacatgccgacatttgcaaatttg

SEQ ID NO: 135731 - DNA, 318 bp, Homo sapiens
ccgagatcatgccattgcaccccagcctaggcaacaagagtgcaacttggtctcaataaataaataaataaacaaacaaataaataaaaatgaaaagaagaagacgaagagttcatcccagcctcttctccaccctgggctaggaatagctctctataagatataggatttagacaatggatcctaaattggagattaggtaaaaacaaaagaagtgctccaggactacacttctgaaaggaagttttcctagcccagtaactgcaagataggtatagagctataggtcatcatcagctccctttacaagtcacatgg

SEQ ID NO: 135732 - DNA, 202 bp, Homo sapiens
ttggttcggagtggaaagattaacatgaaaaaagctggagtggtaggcagaaaggcctagagaagatctgtctgtctgtctgtctgttttattcccccaacccctccccaccagccacacccagattgaggagcaccagcagccatgggctggcatgtgacaggctggtcagtgtgctgggaacacagttctgggcagagga

SEQ ID NO: 135733 - DNA, 513 bp, Homo sapiens
  misc_feature (325)..(325): n is a, c, g, or t
  misc_feature (412)..(412): n is a, c, g, or t
acatagtgagaccccatctctacaaaataaataaataaaataaaataaaaacagctgatttcgaactacataagatttaaaacaggagttaacaaaaacaactctcattacaagataaaaatgaagtaataaaaacacattcaatcttgttttgtcaactttgtgcaaacccaagaaaagttgtgaataaggaactaaaaaccttttaaaacttttaacaatgcccagtcacctagaaccagaggtggacattttctcctattgctagctgtgttatttgcattcttttgccatgttgtgcagcgagtagcagcagatcaaactngtcatgggccaagctctctgaacccggtaggaaccatggtaatgctagctgtctgtgctctcacgtggagaaggaaatcattccctngaatcttctagcctcatcactgtacaagacactgaagtgctcagcgtgaagagcccagacctgctcttgtaaggttaagaagaataaaagaagtgctatca

SEQ ID NO: 135734 - DNA, 661 bp, Homo sapiens
aacagctataaaatcagcttgatgcaagtgaaattacagtaaaattacacacttaagtaaggccaggtttcctggtttctcccaatcctgatagtgattctatttaatttatgtatgtatgttaggtagacatgaaataggtctcatgggcaagagtttctgacttggatgagcaagagtttctgacctggaatgtcagttatttcatccctgtttttcagcatatgtgactcatggctggctacacatgacagaacttacaaacctggattctaaaattggcagagcagtagaatggagtattttcatttagcatttatagcttacaagtcatagaacaagcagacaatggaacattattataaatgatttactacatgtaaattatatacattatttggtgcattcagtgatgatgaatattttgtcctccaagaataagtgaggcttaaaccttttttttttggaaaaagtatattcactgtacaagcatatagattgaagcaaagaatactgagttttctctttaactgaagagtataagctttgatcagaatatactgatctcaaacaatttctctagtgctgtttataagacacacctatgcaacagttagaaggaataagttcagatgttcagtagcagggtggggtgactata

SEQ ID NO: 135735 - DNA, 396 bp, Homo sapiens
ctcattccaagaccttaacttttaagagccctttgttccaacgttagtgtggacgatgctcttgcaggatgcctttccttttgggtcttagacaggtaattgtttctgcacggatcgggtttggaagggaagaaggggtgggagcttgtttattgtactactgctttgggtggagggaatattttagcaaatgcctctcagttagaccaggccagctcccacacagaactttccagtctcccttcttgtttgctagttgctccttactttcagagccaccgtgttcttaaccctctacgtccccgaggtttctctagggctgaccagttctgattttccatcagacactgtaaaactgctttggaaacttcacggagaaacagctgaagaatgggg

SEQ ID NO: 135736 - DNA, 330 bp, Homo sapiens
ctcattccaagaccttaacttttaagagccctttgttccaacgttagtgtggacgatgctcttgcaggatgcctttccttttgggtcttagacaggataaggaagcctgtgtgggtaccaacaatcaaagctacatctgtgacacaggacactgctgtggacagtctcagtgctgcaactactactatgaactctggtggttctggctggtgtggaccatcatcatcatcctgagctgctgctgtgtttgccaccaccgccgagccaagcaccgccttcaggcccagcagcggcaacatgaaatcaacctgatcgcttaccgagaagccc

SEQ ID NO: 135737 - DNA, 503 bp, Homo sapiens
  misc_feature (406)..(406): n is a, c, g, or t
  misc_feature (480)..(480): n is a, c, g, or t
aaccgttcgactgagctccaagggaaatcatgcatgtgcttggaacagtcctggcacacaataagggttgcataaatattggtgacaattactgctactgccatcttttgtttttttttttggaaacggagtctcgctctgttgcccaggctggagtgcagtggcacgatctcagctcactgaaagctctgcctcccgggttcacgccattctcctgcctcagccttccgagtggctgggactgcaggcgcccgccaccacgcctggctaattttgaaaatatttggctgggcgtggtggctcatgcccacctcggcctcccggagtgtaaggattacgggcgagagccaccacacccggccgacactgatttttctttccagcgaggtcagagcccgggcagggntcagagcagagacaattgcgacatgacttatgtttcacaggaccattctggctgctgtctggacaagaagtcgnagggggtgagggtgaaagctggg

SEQ ID NO: 135738 - DNA, 202 bp, Homo sapiens
gcgcctgctgctcaggccgaaatgctgtggtgtgatcatggctccctgcagccttgaaatcctggcctcaagtgaccctcctgacttagccttgtgagtagctgaggcaggagaatggcatgaacctgggaggtggagcttgcaatgagctgagattatgccactgcactctagcctgggcaacagagtgagactccgtctc

SEQ ID NO: 135739 - DNA, 709 bp, Homo sapiens
gatcccccgggctgcaggctcgtgccgaattcggcacgatgtctcatataataattagattgtaatcattgttttaatctctgtctgggaaccaagattgaaagctgacttacttctctcttctgtcttgtgaaccatacggagcctattattttaaaatatgatcagacaagtaaggcttctcttactttgctctgctctgatcagaagagctcatgtgaagtctttgagattctcttatttatcatctttctaaaactgtgtttttgagcttgacagtactgaaaatgtctggatgaagcagaaaagaaagtgatgaaatgtgtttctgagcatcagagaccatctatattgccattaccttttctagttgtatataagaattcaagattagaagaatttagatttgttgcacatttttttcctcagcattttttcctcttgttttttaaaatgtattgcctctttccccattcagtgacactggacataggaatttttaattgtgtaattttctgttgcaaaaagggtaaataaatcctttgtcttttgaatatcttctatgtgaaataattgtgagtgacatttgaaaaagtgaatctgaagtcaaagtgagtaaattccttatttccctattttttaaaaacctggtatatgacatggctacagggcaaatgaaataaaaattgccatagttggtatgaaaaag

SEQ ID NO: 135740 - DNA, 3896 bp, Homo sapiens
ataaggctacggatgggcgggacggagcagcccaccgcaaagtggcggtttacttgaggcggttaccttagtactccgagtagactgagtctgtggcgagctgcgggccgattcctggccagtgccatctcagccggagcaggcctcggggcctcagaagcaggcttttatctggcccgaggctcccagccgttcagcgcgtcttcccataacctataccgattattgggactctcggctgcagacacaggagtcacagatgctgggaagtatggcccgaaagaaacctcgaaatacctcaaggttgcccctggctttaaaccccctgaagagcaaggacgtgttggcagtgctggctgagaggaacgaggctatagtaccagttggggcatgggtggaacctgcctcaccaggtagttcggaaatcccagcatatacatcagcatatttaattgaagaagaactaaaggaacagctaagaaaaaaacaagaagctttgaaacattttcagaaacaagttaaataccgagtaaatcaacaaattaggttgagaaaaaagcaacagcttcagaagtcttatgaaagagcacaaaaagaaggctccatagccatgcagtcttcagcaacacacttaacttccaaaaggacaagtgtttttccaaacaatttgaatgttgctattggaagttctaggttacctccttccctgatgcctggggatggaatagaggatgaagagaatcagaacgaattattccaacaacaagcccaggctcttagtgaaactatgaaacaggcacgtcaccggctagcatcctttaaaaccgtgattaaaaaaaagggatcagtgtttccagatgatggaaggaaaagctttcttaccagagaggaagtgctttccaggaaaccagcatccactgggataaatacaggaataagaggagagttgcccattaaggtccatcaaggtcttttagctgctgtaccttaccagaattatatggaaaatcaggaacttgactatgaggaacctgactatgaggaatcttcatctcttgtaactgatgagaaagggaaagaagatttgtttgggagaggccagcaggaccagcaggctatccattctgaagataagaacaaacctttcagcagagttcagaaagtaaaattcaaaaatccattatttgttctgatggaagaggaagaacaaaagcagttacattttgagggccttcaggatattctgccagaagcccaggattattttctagaagcccaaggtgatttgctggaaacccagggtgatttgacaggaatccagagtgttaagccagatacccaggctgttgaaatgaaggttcaggttactgagccagaaggccaggccattgagccagaaggccagcctattaggacagaaactcagggtattatgctgaaagcccagagtattgagctagaagaagggagtattgtgttgaaaacccaggattttctacccacaaatcaggctcttctaacgaaaaaccaggatgttttactcaaagaccactgtgttctccctaaagaccagagtattctactcaaatatcaggaccaggacttcccacccagagaccagcatgttctccacaaagaccaagatattctgccataatatcaggaccagaattttctacctaaggaccagaattttttatctagagaccagcatgttctccccaaagaccaagatattctgccaaaatatcaggaccagaattttctacctaaggaccagaattttttgtctagagaccagcatgttctccccaaagaccagaatattctacctaaatatcaagaccaggattttctacctaaagaccaggactttttatctagagaccagcatgttctccccaaagactggaatattctacccaaatgtcaggaccaggattttctacccagagaccaaggtgttcttcccaaagaccaaaatattctacccatatgtcaggaccaggattttctacccagagaccaaggttatcttcctaaagaccaaaatattctacccatatgtcaggaccgggattttctacccagagacctgcatgttctctccaacgaccagaatattctacccaaatgtcaggaccaagattttctaccaaaatatcagaaagtacactttaaggagccatactctgatatgacagatgagaaagggagagaagacttttctctggcagactatcagtgtttgcctcccaaatcccaggaccaggatgacatcaaaaatcagcaacctgcatcttttatgagagaagaaagagtgagagaggaattgcctctggactatcatcaatatgttgtacctaaaatccaggaccaagactcccctagagaacagaacaagcatatcaaactaccctcatcttttgagaaatgggagattgcaagaggaaatactcctggagtgccattggcttatgataggtatcaatcaggattgagcactgaattccaagctccactggcatttcagtctgacgtggataaagaagaagataagaaagagcgtcaaaagcagtacctgagacatagacgacttttcatggatattgagagagaacaagttaaagaacaacaaaggcaaaaagaacaaaagaagaaaattgaaaaaattaagaaaaagagagagcaagaatgttatgctgcagagcagaggatcctaagaatgaactttcatgaagatccatattcaggagagaagttgagtgagatattagcccagttacaacttcaagaaataaaaggaaccagagaaaaacaacagagagaaaaagaatacctgagatatgtagaagctttacgagcccaaatccaggagaaaatgcagctgtataatattactttacctccactatgctgttgtggtcctgattttgggatgctcatcctgatacctgtgccaacaactgtattttctataaaaaccacagagcatatactcgggcactacattcattcatcaattcctgtgatgtccctgggggtaattcaactcttcgagtcgcaattcataattttgcttctgcacacaggcggactttgaaaaatctataataagaatctgaaattaactggtagtattttggcttttacttaaaatcatccctgagagagtatttaagaaaagctgttcaagttataaaatatataatctgggaagaaatactgtctcatataataattagattgtaatcattgttttaatctctgtctgggaaccaagattgaaagctgacttacttctctcttctgtcttgtgaaccatacggagcctattattttaaaatatgatcagacaagtaaggcttctcttactttgctctgctctgatcagaagagctcatgtgaagtctttgagattctcttatttatcatctttctaaaactgtgtttttgagcttgacagtactgaaaatgtctggatgaagcagaaaagaaagtgatgaaatgtgtttctgagcatcagagaccatctatattgccattaccttttctagttgtatataagaattcaagattagaagaatttagatttgttgcacatttttttcctcagcattttttcctcttgttttttaaaatgtattgcctctttccccattcagtgacactggacataggaatttttaattgtgtaattttctgttgcaaaaagggtaaataaatcctttgtcttttgaatatcttctatgtgaaataattgtgagtgacatttgaaaaagtgaatctgaagtcaaagtgagtaaattccttatttccctattttttaaaaacctggtatatgacatggctacagggcaaatgaaataaaaattgccatagttggtatgaaaaag

SEQ ID NO: 135741 - DNA, 521 bp, Homo sapiens
accttgctaccaaatgaattaagttctagcgcttgtttttaccaagtatggttgcaaaatttgttcctgccttgaagcatgcagtatagacatgaaagaaggcacggtcaccgatccatcaagaagcctgccatccagggaaagaggcaggaagtatccaagtgcaattgagcaaaaacatagaaggattatctgaaagcagcgcaggcaaattggaatctgttagttctgtgaaacgaaatgacactactccttacaggtaattattctagaacttgacttataacatcccaaaggtaagtttagttaacttttaagtgtctgtggtgttcctgtggctcttttagggaatggctttgcttccattatgtagccattccacaaacttaactgaacataaatttaacctgaagaagggaagctccaggtttccccacctgtttggtatccagcctatccaaaagacaggctcctctttttcttattttgagcaaatgactgctcagtttcagcctctcttc

SEQ ID NO: 135742 - DNA, 124 bp, Homo sapiens
tcttctatttttagttcatttacaaaacaataaatgacaggtacagactgtggtttcagatgctaagagactggtaagttctgctattttatctctgaaggctgtaagtatcctgttttggttg

SEQ ID NO: 135743 - DNA, 805 bp, Homo sapiens
ggtaatgatgtgattgaacagtcaggaaatatgttacatgtttgacaaacacactggagagttcaacaaaaaataccaattggtattagacaaaaccaaagacaagcgttatggccgggcacagtgactcacgcctgtaatcccagcactttgggaggccaaggcaggtggatcacttggggccaggagtttgagaccagcctggccaacatggcaaaaccccatctctactaaaaatacaaaaattagctgggcttagtaatcccagctactcaggaggctgaagcacaagaatcacttgaacctggggggcagaggttgcggtgagccaagattgtaccactgcactccagcctaggtgacagagcgagaccctgtctcaaaataataataataataataataaaggcaaggattgtcaactccaagagaaacaaagggctatacaaaaaggaaccatgatcatatttactgttagcttaacagtgaaaaacatttgtttaaatcatagtattataaaccttgactactaatttaacaaaatactgttaaataactgatgagggtatagatgaaaaggaattgtgtggagagagagagagtgatcatctttctcctaaagtcaataaatgaaaaaaaaacagtaaatgcatatttaagaataaaagaataagtaggccaggcatagtggctcatgcctgtaattccagcactttgagaggctgaagcaggaggatagcttgaggccaggagttcaagacaagtctgggcaacatagtgagacccagtctctataaaaaaataa

SEQ ID NO: 135744 - DNA, 442 bp, Homo sapiens
tgagaaaggggagacagactctggagcagcagagaagggagggctcaggatgagaaatgtgagaatggggtttaggcatttccagaaaactctgactgactgactgactgttgggggatcatggtagacatggtgggaagtttagactagagatgccaattaacaagatcgtatcctcttccttcagcaggaaagtgtcacttaaaatctaattcaatcagtatatactgacagctattaattcacaggtgtggtgctggggagacagagagaggacactaaatgtcatatctcagggagctcatgcaccattagtataagcagacctattaatagatctaataaagtgtacatgctatgataaagagagatgtaaagttgtatggaatgaaagaggaaggaaaatgctacttgagtggggacaggaatgggggactagaaa

SEQ ID NO: 135745 - DNA, 441 bp, Homo sapiens
cccagcaaaactctctgatctatcttcttctcagcctctctgtgtagcctccattcctcctgggtatggggcaggaccctttctgaaatgagagttttcaaaggagaaggagaagatagagagtgacctttctaggttttatggtttgctttagcaggagggtttctaggttctatgacccatcttgaggaagataaattctggtttctgtgactcactttggaggatgaaggcaagcagaagagagggtatgaggagaaggttggaaagaccttgcttctgagttccttccaatgtccttcagttcaaaatactcaggctgaggcaccatgctttggggtgtcatgttctaagccccgacagcataagggcagcgttgagacagccagttcggactctcgcttggggtcccaggcgagagtctccgtcgaactgggtacc

SEQ ID NO: 135746 - DNA, 209 bp, Homo sapiens
atttgtctcatttctaaaagtgaattgcctgtttgccaagttgagaaacccctccaaaaatttctaatagtgtttaagatacatagtgattaaaatataaaaggtgcttaaaaatgcaatagtctctaaaattgatatttcatattctattagcagatcacttttttggaaaaaaatgtaatattttgtgagaattcagaccttcccat

SEQ ID NO: 135747 - DNA, 165 bp, Homo sapiens
gaggccctagccatgtattcatctgagcacagactgctatacaatttataaatgtaaaatattttaaccataattgtgtgagaccactgtctctttccacgctgtattcccctcggccatacttcctttcatatcaggcaggattggagtggcaacataattttt

SEQ ID NO: 135748 - DNA, 640 bp, Homo sapiens
caggggcagcattttaaaggaaatgagctgaaagtctactcattaaagtcaaaggaaaccttgtgcttttttttcttttcaatatatttgtttcttcaaagtgtagctataccagcttgcatagcccatattgggaattcagaaaaaggtgacactgttaaaaattttactttactttttggagaagttccttggagatagatcttttggggtaaaaaaattatttgggtgtctggaatttaaacctacgttgctcgtttcatttcagacatataagaaatgagtttcagaggcatttgttagttgtctgtttcctcgcagtgtaagactgtcaagcatataaatgcaggagccccagtggcctgaaagcagtcaagagttcctaccctccttggctcaatggaaacgcaagtgaactatacagcgttcaatggaccaatcaacagggcaaaaatcagtaagtgcatgtccagttttctgaggacaatattttagctacaaatgattcttttgatgctgtatgtatctcctcaccccatcccccttagggagtccaaaattgtgtcatttggcttcttatgtataatagcaaaattttatttatagcaaaataaaagtcagtagacatttgagtagctac

SEQ ID NO: 135749 - DNA, 118 bp, Homo sapiens
gaatacacccataaatgttcaaagatatatatatgagaatgatcactgtgacaccattttaaaagatacaaatcagagcacactaaatatcaactaacaggggaagggctgaataatt

SEQ ID NO: 135750 - DNA, 131 bp, Homo sapiens
atcagctggggagcaaggtggtgaagccggggctgctgagactggtggcagcgctggtgcaggagacccaggaaagcagcaggctccggagaaacctggagaagctactttgagttgtggcctccttcaga

SEQ ID NO: 135751 - DNA, 687 bp, Homo sapiens
gcacatatgggtagaggcagcctatgtaaacaaaaactcttcggggcctccaataattttaaagagtatataggagttctgaccaaaaacttagaaacccactggcttaaaaattctgtccctgccacttacaagctgtatggccttgggcaagagatttcatcctttcctgcctcagtttatccagttgtaaaaggaggtaatatgaaataaggtatgtgaatcaggccaggcgtggtggctcacgcctgtaatcccagcactttgggaggccaaggtgggcagatcacctgaggtcaggagtttaagaccagcttggccaacatgatgaaaccccgtctctgttaaaaatacaaaaattagccaggcatggtggtgggcatctgtaatctcagctactcaggatgctgaggcaagagaatcacttgaacctaggaggcagaggttgcagtgagccgagatcgcgccattgcactccagcctgggcaaaaagagtgaaactccatctcaaaaaacaaaaaaggtatgtgaatcatttcatgcaacaaaccaaggattctcttcccccgagaaagggtatcggcctcacatggctgaagagagagacaaagactggggcaacagagcagtggtgaatgggtctggtgactgtcgatcctggtcgtattacatatggggggatatagc

SEQ ID NO: 135752 - DNA, 309 bp, Homo sapiens
agtccgttcgactgagctggtagtgttagtggggcccaagtgagtgggcatttggggagggggttactatttcaggtagagagaggaaggctgtaccactgggtgagacataagactaaaggccttacacaccagttgggttctgctagtgtctctttgcactaaatcactgggaggtttctgcagaaaagtaatatcagatcttaggcccacattttagaaattttggatttccaaaatccaaaaagtgatggaaaccaaaagatttttttaggctgggtgcggtggctcatgcctgtaatcccagca

SEQ ID NO: 135753 - DNA, 239 bp, Homo sapiens
tctgagaccccctggcttgctcaggtctggcggggcctcaggaatctcccggtagagtttctctaccacagacatttctctttccttgcccctcacactgagctctggctcctgagtattccttaaaaagttatcgttggctgggcgtggtggctcacgcctgaatcacagcacgttgggaggctgagacgggcagatcacttgagtccaggagtttgagaccagccgcacgacatggc

SEQ ID NO: 135754 - DNA, 246 bp, Homo sapiens
tgtctggcacttagtaagggctcagtaaatatttgtggaatgtttgaataagacaggccttgtgcctgttggtaggttaaactggggctttgtcagaactgactgtcaaacatgcagcagagggcctctaggagggagggctctaggagcttagattggctgatggctgttttttagattagattccataggattaatatgggatttagggggaagtctagtgaccacattgataaaatttttatg

SEQ ID NO: 135755 - DNA, 919 bp, Homo sapiens
tcagcaaaactggatcaaaacaagctccgtgtactagcagccagcgaggaccactgggaccctcagcccagcatgggcacagtcagggaaggcagcgtacttgtgtgctcaggctagacttctccctaacgtagccatggttcccaaacctctgtgcttgttagatccattttataccaaaggtattaacatgggcagcctttgacacatgtattccaaaaagcaactttatattttcttacatattttttacacatttctttcttacatatttttcttacgtttatattttcttgcatcctgaagcctaagccgcacctccaaccaattaagtctcagtatctgggtgggacacaagcgcattgatttccacgtggggggaagttatggatagttatggataactgtaataagcgtgaagcctttatccagtgaaaagttagactctgctatttgggaagtgtctcatgtcagcttctggttcactgacaaggatggttaagctttttttcttttctcattcagtgtttagatgtgtgtatctctatatcagtttcttcctgtcttacagatgtagaattaggaatagagggcagaaatgaactattaatagcttatgattccagtcaatctacaggactgaaattggtagaactttaacttatattctcatctaaaacggcttacttccctcccagagacggccactcaccactgttaattgtccatttttatttttatagacttgttcttccggtccagtgtcgaaaactattgtgccttcttttcccggactaataaaaaactgtaaacttaaaatacacaaagtgacacattactgacatactgtattttcttctctcaacctttggtctacagaagaaattcacttattaaattctactagtttcaagatcaa

SEQ ID NO: 135756 - DNA, 607 bp, Homo sapiens
atcttgcccaccctctaatgacacgttggactgcgcactgaacatagatcctgtcgagggtgtttagaattgcgccttcgggtgacctggggtctgcttccagaaggtgacattttaaataaggtgccatggggcagctgaggagctgggattaggctttggcctaacgcccctcagtttcttcagatgtgatctgttagtgctgcgggcctggtaccttgaagaggtagctaactggatccaatccccacttcccctgtagtttcctcagttggagcaaaaatggcgatggtagaggtcagacgtcatcctctatcaggacttcctccggactgacacctgggagagagtcacacttcggtttacagcccttccccgctccctttgcgcaaaaggaaacagttatcacctcaactgtcaccattagcaagacttgttcttccggtccagtgtcgaaaactattgtgccttcttttcccggactaataaaaaactgtaaacttaaaatacacaaagtgacacattactgacatactgtattttcttctctcaacctttggtctacagaagaaattcacttattaaattctactagtttcaagatcaa

SEQ ID NO: 135757 - DNA, 349 bp, Homo sapiens
tgcctgattcatagcaagaaggggcagaaaggcagataaagagaagcagagatatcaagagaaaacaacatctagtgtaggagtctttaaaattgtgctgtaaagtgccaaatcataaatattttagactttgtggactatacagtatctattgtgactactcaactctgccagtgtagcacaaaagcaggcatgaacaatatgtgaacaaatgagtggggctgtattccaataaaattttatttacaaaaacaggtggagggacgaatgcccacaagccaaagtttgccatctcggtcctagagtactgctgtccagtagaaatacaatgtgagccatatatgtaatt

SEQ ID NO: 135758 - DNA, 556 bp, Homo sapiens
acaacacttatccaggtgaaacaatcagaaagggaccaacaccagcagcatagatgctcttgttgtgataagctgtactcttaagcatatataaaagtctagtgaattaggtagcagaaatattatcaaagcttactttctccacaccacaaatgaaggtcaattccaaataaattaaagatgaaatgtgaaagctaaaattataaaggttataggagacaatatcatagaatatctatatgactcaggggaagcatttaaaaagcaccaacagtaaaagaaaaaactaatgtattttatctttttaaagttaagaatttgtatccatcaaaaagcaacaaaaagagagtaaaaagacaactaatgagtaggagaggatatctgcaatacacaccactaacaaattcccatgttatatgcagaatgcctacaaattaccaaaaaagataacaagataaataatccagtccaaaaagtgaccaaagccttgaagagacacctcacaaaagaggaaatccaaatagtcaatgcatgtatgaaaaaatgctcaccttca

SEQ ID NO: 135759 - DNA, 444 bp, Homo sapiens
cctgggggctttgctccttttcccagctggcaggcccttgagcgcccaaaaatcccacaggttcctcccaaccaagggattattgctgcctcagagcaatggttgtattgtggaacactgaaactgtatgtgctgtaatttaatttaggacacatttagatgcactaccattgctgttctactttttggtacaggtatattttgacgtcactgatattttttatacagtgatatacttactcatggccttgtctaacttttgtgaagaactattttattctaaacagactcattacaaatggttaccttgttatttaacccatttgtctctacttttccctgtacttttcccatttgtaatttgtaaaatgttctcttatgatcaccatgtattttgtaaataataaaatagtatctgttaaatttgtgcttctaaaaaaaaaa

SEQ ID NO: 135760 - DNA, 2008 bp, Homo sapiens
accgttaaatttgaaacttggcggctaggggtgtgggcttgaggtggccggtttgttagggagtcgtgtgcgtgccttggtcgcttctgtagctccgagggcaggttgcggaagaaagcccaggcggtctgtggcccagaggaaaggcctgcagcaggacgaggacctgagccaggaatgcaggatggcggcggtgaagaaggaagggggtgctctgagtgaagccatgtccctggagggagatgaatgggaactgagtaaagaaaatgtacaacctttaaggcaagggcggatcatgtccacgcttcagggagcactggcacaagaatctgcctgtaacaatactcttcagcagcagaaacgggcatttgaatatgaaattcgattttacactggaaatgaccctctggatgtttgggataggtatatcagctggacagagcagaactatcctcaaggtgggaaggagagtaatatgtcaacgttattagaaagagctgtagaagcactacaaggagaaaaacgatattatagtgatcctcgatttctcaatctctggcttaaattagggcgtttatgcaatgagcctttggatatgtacagttacttgcacaaccaagggattggtgtttcacttgctcagttctatatctcatgggcagaagaatatgaagctagagaaaactttaggaaagcagatgcgatatttcaggaagggattcaacagaaggctgaaccactagaaagactacagtcccagcaccgacaattccaagctcgagtgtctcggcaaactctgttggcacttgagaaagaagaagaggaggaagtttttgagtcttctgtaccacaacgaagcacactagctgaactaaagagcaaagggaaaaagacagcaagagctccaatcatccgtgtaggaggtgctctcaaggctccaagccagaacagaggactccaaaatccatttcctcaacagatgcaaaataatagtagaattactgtttttgatgaaaatgctgatgaggcttctacagcagagttgtctaagcctacagtccagccatggatagcaccccccatgcccagggccaaagagaatgagctgcaagcaggcccttggaacacaggcaggtccttggaacacaggcctcgtggcaatacagcttcactgatagctgtacccgctgtgcttcccagtttcactccatatgtggaagagactgcacaacagccagttatgacaccatgtaaaattgaacctagtataaaccacatcctaagcaccagaaagcctggaaaggaagaaggagatcctctacaaagggttcagagccatcagcaagcgtctgaggagaagaaagagaagatgatgtattgtaaggagaagatttatgcaggagtaggggaattctcctttgaagaaattcgggctgaagttttccggaagaaattaaaagagcaaagggaagccgagctattgaccagtgcagagaagagagcagaaatgcagaaacagattgaagagatggagaagaagctaaaagaaatccaaatcacctgaacaaagccttatggaaggtagggaagttaactagtcctggggctttgctctttcagtgagctaggcaatcaagtctcacagattgctgcctcagagcaatggttgtattgtggaacactgaaactgtatgtgctgtaatttaatttaggacacatttagatgcactaccattgctgttctactttttggtacaggtatattttgacgtcactgatattttttatacagtgatatacttactcatggccttgtctaacttttgtgaagaactattttattctaaacagactcattacaaatggttaccttgttatttaacccatttgtctctacttttccctgtacttttcccatttgtaatttgtaaaatgttctcttatgatcaccatgtattttgtaaataataaaatagtatctgttaaatttgtgcttctaaaaaaaaaa

SEQ ID NO: 135761 - DNA, 435 bp, Homo sapiens
gagaagtatttttaccatctcttttaattcctcttgaatatttagccatggtctatatatgctgtctgagaacataaaactatggtaattttagttttcttcttcatctccagcctcgtggcaatacagcttcactgatagctgtacccgctgtgcttcccagtttcactccatatgtggaagagactgcacaacagccagttatgtgagtgtggtttttggatattttgaagtgggaattattaagggtgggcagaggcacctattctacttcccaaaggcagtttcttctttatgaagatgaaagtaaccaggccaggcgcagtagctcacacctgtaatcccagcacaggctgaggcaggaggatcccttgagcctaggtgttcaagaccagcctgggcagcctagtgagaccctgtctctatttattaaaa

SEQ ID NO: 135762 - DNA, 3722 bp, Homo sapiens
accgttaaatttgaaacttggcggctaggggtgtgggcttgaggtggccggtttgttagggagtcgtgtgcgtgccttggtcgcttctgtagctccgagggcaggttgcggaagaaagcccaggcggtctgtggcccagaggaaaggcctgcagcaggacgaggacctgagccaggaatgcaggatggcggcggtgaagaaggaagggggtgctctgagtgaagccatgtccctggagggagatgaatgggaactgagtaaagaaaatgtacaacctttaaggcaagggcggatcatgtccacgcttcagggagcactggcacaagaatctgcctgtaacaatactcttcagcagcagaaacgggcatttgaatatgaaattcgattttacactggaaatgaccctctggatgtttgggataggtatatcagctggacagagcagaactatcctcaaggtgggaaggagagtaatatgtcaacgttattagaaagagctgtagaagcactacaaggagaaaaacgatattatagtgatcctcgatttctcaatctctggcttaaattagggcgtttatgcaatgagcctttggatatgtacagttacttgcacaaccaagggattggtgtttcacttgctcagttctatatctcatgggcagaagaatatgaagctagagaaaactttaggaaagcagatgcgatatttcaggaagggattcaacagaaggctgaaccactagaaagactacagtcccagcaccgacaattccaagctcgagtgtctcggcaaactctgttggcacttgagaaagaagaagaggaggaagtttttgagtcttctgtaccacaacgaagcacactagctgaactaaagagcaaagggaaaaagacagcaagagctccaatcatccgtgtaggaggtgctctcaaggctccaagccagaacagaggactccaaaatccatttcctcaacagatgcaaaataatagtagaattactgtttttgatgaaaatgctgatgaggcttctacagcagagttgtctaagcctacagtccagccatggatagcaccccccatgcccagggccaaagagaatgagctgcaagcaggcccttggaacacaggcaggtccttggaacacaggcctcgtggcaatacagcttcactgatagctgtacccgctgtgcttcccagtttcactccatatgtggaagagactgcacaacagccagttatgacaccatgtaaaattgaacctagtataaaccacatcctaagcaccagaaagcctggaaaggaagaaggagatcctctacaaagggttcagagccatcagcaagcgtctgaggagaagaaagagaagatgatgtattgtaaggagaagatttatgcaggagtaggggaattctcctttgaagaaattcgggctgaagttttccggaagaaattaaaagagcaaagggaagccgagctattgaccagtgcagagaagagagcagaaatgcagaaacagattgaagagatggagaagaagctaaaagaaatccaaactactcagcaagaaagaacaggtgatcagcaagaagagacgatgcctacaaaggagacaactaaactgcaaattgcttccgagtctcagaaaataccaggaatgactctatccagttctgtttgtcaagtaaactgttgtgccagagaaacttcacttgcggagaacatttggcaggaacaacctcattctaaaggtcccagtgtacctttctccatttttgatgagtttcttctttcagaaaagaagaataaaagtcctcctgcagatcccccacgagttttagctcaacgaagaccccttgcagttctcaaaacctcagaaagcatcacctcaaatgaagatgtgtctccagatgtttgtgatgaatttacaggaattgaacccttgagcgaggatgccattatcacaggcttcagaaatgtaacaatttgtcctaacccagaagacacttgtgactttgccagagcagctcgttttgtatccactccttttcatgagataatgtccttgaaggatctcccttctgatcctgagagactgttaccggaagaagatctagatgtaaagacctctgaggaccagcagacagcttgtggcactatctacagtcagactctcagcatcaagaagctgagcccaattattgaagacagtcgtgaagccacacactcctctggcttctctggttcttctgcctcggttgcaagcacctcctccatcaaatgtcttcaaattcctgagaaactagaacttactaatgagacttcagaaaaccctactcagtcaccatggtgttcacagtatcgcagacagctactgaagtccctaccagagttaagtgcctctgcagagttgtgtatagaagacagaccaatgcctaagttggaaattgagaaggaaattgaattaggtaatgaggattactgcattaaacgagaatacctaatatgtgaagattacaagttattctgggtggcgccaagaaactctgcagaattaacagtaataaaggtatcttctcaacctgtcccatgggacttttatatcaacctcaagttaaaggaacgtttaaatgaagattttgatcatttttgcagctgttatcaatatcaagatggctgtattgtttggcaccaatatataaactgcttcacccttcaggatcttctccaacacagtgaatatattacccatgaaataacagtgttgattatttataaccttttgacaatagtggagatgctacacaaagcagaaatagtccatggtgacttgagtccaaggtgtctgattctcagaaacagaatccacgatccctatgattgtaacaagaacaatcaagctttgaagatagtggacttttcctacagtgttgaccttagggtgcagctggatgtttttaccctcagcggctttcggactgtacagatcctggaaggacaaaagatcctggctaactgttcttctccctaccaggtagacctgtttggtatagcagatttagcacatttactattgttcaaggaacacctacaggtcttctgggatgggtccttctggaaacttagccaaaatatttctgagctaaaagatggtgaattgtggaataaattctttgtgcggattctgaatgccaatgatgaggccacagtgtctgttcttggggagcttgcagcagaaatgaatggggtttttgacactacattccaaagtcacctgaacaaagccttatggaaggtagggaagttaactagtcctggggctttgctctttcagtgagctaggcaatcaagtctcacagattgctgcctcagagcaatggttgtattgtggaacactgaaactgtatgtgctgtaatttaatttaggacacatttagatgcactaccattgctgttctactttttggtacaggtatattttgacgtcactgatattttttatacagtgatatacttactcatggccttgtctaacttttgtgaagaactattttattctaaacagactcattacaaatggttaccttgttatttaacccatttgtctctacttttccctgtacttttcccatttgtaatttgtaaaatgttctcttatgatcaccatgtattttgtaaataataaaatagtatctgttaaatttgtgcttctaaaaaaaaaa

SEQ ID NO: 135763 - DNA, 3435 bp, Homo sapiens
accgttaaatttgaaacttggcggctaggggtgtgggcttgaggtggccggtttgttagggagtcgtgtgcgtgccttggtcgcttctgtagctccgagggcaggttgcggaagaaagcccaggcggtctgtggcccagaggaaaggcctgcagcaggacgaggacctgagccaggaatgcaggatggcggcggtgaagaaggaagggggtgctctgagtgaagccatgtccctggagggagatgaatgggaactgagtaaagaaaatgtacaacctttaaggcaagggcggatcatgtccacgcttcagggagcactggcacaagaatctgcctgtaacaatactcttcagcagcagaaacgggcatttgaatatgaaattcgattttacactggaaatgaccctctggatgtttgggataggtatatcagctggacagagcagaactatcctcaaggtgggaaggagagtaatatgtcaacgttattagaaagagctgtagaagcactacaaggagaaaaacgatattatagtgatcctcgatttctcaatctctggcttaaattagggcgtttatgcaatgagcctttggatatgtacagttacttgcacaaccaagggattggtgtttcacttgctcagttctatatctcatgggcagaagaatatgaagctagagaaaactttaggaaagcagatgcgatatttcaggaagggattcaacagaaggctgaaccactagaaagactacagtcccagcaccgctacagtccagccatggatagcaccccccatgcccagggccaaagagaatgagctgcaagcaggcccttggaacacaggcaggtccttggaacacaggcctcgtggcaatacagcttcactgatagctgtacccgctgtgcttcccagtttcactccatatgtggaagagactgcacaacagccagttatgacaccatgtaaaattgaacctagtataaaccacatcctaagcaccagaaagcctggaaaggaagaaggagatcctctacaaagggttcagagccatcagcaagcgtctgaggagaagaaagagaagatgatgtattgtaaggagaagatttatgcaggagtaggggaattctcctttgaagaaattcgggctgaagttttccggaagaaattaaaagagcaaagggaagccgagctattgaccagtgcagagaagagagcagaaatgcagaaacagattgaagagatggagaagaagctaaaagaaatccaaactactcagcaagaaagaacaggtgatcagcaagaagagacgatgcctacaaaggagacaactaaactgcaaattgcttccgagtctcagaaaataccaggaatgactctatccagttctgtttgtcaagtaaactgttgtgccagagaaacttcacttgcggagaacatttggcaggaacaacctcattctaaaggtcccagtgtacctttctccatttttgatgagtttcttctttcagaaaagaagaataaaagtcctcctgcagatcccccacgagttttagctcaacgaagaccccttgcagttctcaaaacctcagaaagcatcacctcaaatgaagatgtgtctccagatgtttgtgatgaatttacaggaattgaacccttgagcgaggatgccattatcacaggcttcagaaatgtaacaatttgtcctaacccagaagacacttgtgactttgccagagcagctcgttttgtatccactccttttcatgagataatgtccttgaaggatctcccttctgatcctgagagactgttaccggaagaagatctagatgtaaagacctctgaggaccagcagacagcttgtggcactatctacagtcagactctcagcatcaagaagctgagcccaattattgaagacagtcgtgaagccacacactcctctggcttctctggttcttctgcctcggttgcaagcacctcctccatcaaatgtcttcaaattcctgagaaactagaacttactaatgagacttcagaaaaccctactcagtcaccatggtgttcacagtatcgcagacagctactgaagtccctaccagagttaagtgcctctgcagagttgtgtatagaagacagaccaatgcctaagttggaaattgagaaggaaattgaattaggtaatgaggattactgcattaaacgagaatacctaatatgtgaagattacaagttattctgggtggcgccaagaaactctgcagaattaacagtaataaaggtatcttctcaacctgtcccatgggacttttatatcaacctcaagttaaaggaacgtttaaatgaagattttgatcatttttgcagctgttatcaatatcaagatggctgtattgtttggcaccaatatataaactgcttcacccttcaggatcttctccaacacagtgaatatattacccatgaaataacagtgttgattatttataaccttttgacaatagtggagatgctacacaaagcagaaatagtccatggtgacttgagtccaaggtgtctgattctcagaaacagaatccacgatccctatgattgtaacaagaacaatcaagctttgaagatagtggacttttcctacagtgttgaccttagggtgcagctggatgtttttaccctcagcggctttcggactgtacagatcctggaaggacaaaagatcctggctaactgttcttctccctaccaggtagacctgtttggtatagcagatttagcacatttactattgttcaaggaacacctacaggtcttctgggatgggtccttctggaaacttagccaaaatatttctgagctaaaagatggtgaattgtggaataaattctttgtgcggattctgaatgccaatgatgaggccacagtgtctgttcttggggagcttgcagcagaaatgaatggggtttttgacactacattccaaagtcacctgaacaaagccttatggaaggtagggaagttaactagtcctggggctttgctctttcagtgagctaggcaatcaagtctcacagattgctgcctcagagcaatggttgtattgtggaacactgaaactgtatgtgctgtaatttaatttaggacacatttagatgcactaccattgctgttctactttttggtacaggtatattttgacgtcactgatattttttatacagtgatatacttactcatggccttgtctaacttttgtgaagaactattttattctaaacagactcattacaaatggttaccttgttatttaacccatttgtctctacttttccctgtacttttcccatttgtaatttgtaaaatgttctcttatgatcaccatgtattttgtaaataataaaatagtatctgttaaatttgtgcttctaaaaaaaaaa

SEQ ID NO: 135764 - DNA, 258 bp, Homo sapiens
ttcccctagaatagatactgggtctgcagcgacctccaagggcagaggcaaacagatgttcagctctcctaaatacagctgaggccctgctggccaaggtgagaacttcatctgtgtctgaggtgctaaggccccgcgccgtgaggacagctgttgttcagggctagcctgccagctggggcacacgcagcccaggcaacgtttcctttcacctggaaacctgccacagtctacctggtttccctgtgctggggggag

SEQ ID NO: 135765 - DNA, 544 bp, Homo sapiens
taaaaatgttccacatcagtaatcatcagagaaatgcaagtcaaaatcggaatgagatgccatctcacaccagtaagaatggttgttattaaaagttacaaaacaacagatgctggtgaggctgcagaggaaaaggggaacaattatgcacttttggtgggaatgtaagttagttaaactactgtagaaagcagtttggatatttctcaaagaccttaaaacagagctaccattcaatccagtaatcccattattgggcatctaccgtataccccaaggataacagatcattctaccaaaagatacatgcactcatatgttcatcaccacactattaaaaatagcttaggattgtgatgtcatatctgctgaacaaaacacacatctccttctttctccattctcaagtaactaccattcaattgccaacttctatacatttgacaattttatatgcttcatataagaagaataatgcaggatttgtccatctgtgactggattatttcatgtaacataacatctgctaagtccatctatgttg

SEQ ID NO: 135766 - DNA, 826 bp, Homo sapiens
ggagcagaaaggaaagggagaaaaacgaatcccaaactttgggcttacctcttcctcctggctggctggccaaaatacatgttaccggtggagggtgtccaggttcttggtgtcttgaacaaagaatttgacaaaacgcacaaacaaagcacggaagggatgaagggatgtattgaacatgaaaatgcacaccacggtgtgggaggggcctgagtgtaggagctcaggggccccgttaacagaatttttgggagtttaaataccccttagagcattccattggttaattccatatgccttatgtaaatggagaggatgaagtaaagttacaaagtcatttacagcatacgccctatggagaggatatttcctgtcacagctcaagtgtgaattggccttatgttccctgcctccagaccctaattatctttctgttttctgagtcacttccatctgaatcttgcaacatatccctgtagttggtgttattatttccccactttacagatggggaaactgaggcccagtgagaagaagggtcttgtcaatgtcacacaactcatgagagcaaagccagggcaggaactggaattgtctgacttccagctctgtgtgtcattatacttgaacttatagctaataaacaataaacagtgaaccatgaaaaaaaaaaaaaaacaacaaacgaacacatagacggagagaagaagaaggagcaaagaaggacgaaagaaaaaagagaagagcagagagaagagagagacagagaaaggagaagagaagaagcaaagagaggagaggacagagagaggaggagaagagaacg

SEQ ID NO: 135767 - DNA, 240 bp, Homo sapiens
gcctgggcaacagagcaaaactctgtctcaaaaacaaaacgaaaaaaagaaccttccatggcttcacatcaggataaaagccagcgtccttccgtggcctactgtgcctgtccagggtggctctgtcttgtctctctgagtcgcacttctcttttctcactggggttcattgaagccagccctgacttccctgtgacgtgctctgtatgcctttgcctctagtccaagctcttctcccag

SEQ ID NO: 135768 - DNA, 230 bp, Homo sapiens
tgacttcattggactataacaagtgaattttgtttcacacacaaagaatattcccagtgcagacatctataccctcttcaatgttattttattaaggataccataattttaatttttccaatacagtcagtatttaaataagccgcaatgacaaagaataaaattcagtgactatggaagatgtaatgaggtactaaggaagtaaaaggtagtgcagaggcagggagaaa

SEQ ID NO: 135769 - DNA, 237 bp, Homo sapiens
gaataccttagcaaatgctcaccaaattaataaaatcatcatcctagtatttttagaatttaaaataccataaaaacttctcaatagcttcctaaaaaaggctaacctctaggatttgaaatggataattccaattcactcatatcaccactcactcttcctctatttcaccgtgctttgtaagaaaaaataaactcttccagtttttccctattaccaacatctacattagcatgg

SEQ ID NO: 135770 - DNA, 449 bp, Homo sapiens
agcagaagaaaagcagggactgaagggaggggcctgaccacctgctgaggagcaggcacatctgggctcttggggtgacggcagccactgagtacccagaatgagggcccaggggccctggccgcagggttaatgcctttgctcaaaacccccaaagctcctgatgccgagctggacatgtggaagcattcagccaatacttgtcagcagtggtcaggtttgtacaaatttatctgggtcagattatatgaagaaagtgctaaagtttcagaataagctcggtagggctctgattcgtaacagacttaaggaggagacatgggtgtggtcgccaggatccacattgcagccaaagtccgggggtctttcagtctagaatggtaactatgaacttccttgactgagggatctattacagaatcacagatttaacagaagaggggaacgtg

SEQ ID NO: 135771 - DNA, 816 bp, Homo sapiens
gctttgatgtttcaaagctgacgaggtcagcatcttccaggctgcaggaaacatgcctgccaggtatacctttcaagcagctgattaatatgtcatgtggtctctggtcagaggagagtgtaagggctgttgaaatgactcaccagctcagctcccgtgtctttgggaaacgctaccctgtcagcaagaggcctccagctgaaaagtaaagacacagatctgaaagggtacagttctagcgtccaacaaactattatacatcctaaatgaagtgagaaatggtaggctcttcacctgccagggcctggcggggcctgtgtcccaggactgcttaggaatccaagcctcgcactgtttatccattatactgatgagaagcctgtgagacagggaggcttgctgggcctccaaagtccacttgctggcttgttacttggcaccatcagatctacgctagggatggtgtaactagagcctttgagtgcatgaaaagtctgtggcctgacaaagcacttactgaccaaggaaaatcaacttcaggtgcagcaggaaaggtctggtacccagaatgtctggggttttgagacactggaaaagattgctaataatgtcatgggctcccttccctggaaataatctgaaaataggataagttccctccaatcttggatgggtcaacctcgtcttgaggtaaggagacggttacatcaacccatggagagggcctgtcagcaactctgagtctattagagggtatattttcaacacaaaaaacttttatcctggtaaaatatacctaacgtaaaagctaccatt

SEQ ID NO: 135772 - DNA, 498 bp, Homo sapiens
acgtatcacctgcctctaatggtaacatcaggacctctcatttcccagtagtgactttaatttcctgtcaccatttcctagacggttatgttcagaggctgggttgtgccatggcacatgaaagagaatgacaggatgcatcctcatttcatgttacaatttgccagaagatcattagagaagtccgtttatgccttactgcagatgaacggatcacatgattgcattcccattatttggcactgggattgaggtattagggaggtggagagtattacactcaaaataagtacaagtcttagtagggcagcagtggtcctcatggacactggtaagccgagtagagattcccccaagatgataaagttttaaggaaagccttttgggctatgggcctgatttatgtctgagttacataactttctttcctagacacataaaaatattaagagtaatcagtgacctggtggggaagaggttattcttcatcagacatca

SEQ ID NO: 135773 - DNA, 588 bp, Homo sapiens
taccttataataaaatatatgtagttggaagcatcttttgcgaaataatttcttttgtctagcttgtatataatgcaaaattgcaacttaccgagggcagcttaacaggatgtgttaaaattttgagtatttatattctttgacccagaaagttcactgctatgaattaatcagaagttcctataaaagtacagaatgattttactaccttgtttataatacagaaaaatttaaaaaatgtaattctaatactcagtataaacctactaaaatgaattgcattatatataaaaaaggaaacattaaacaagtcttaaaaataaattggagctttatgggtaatgacatgaaaaactgaccaagacatattatgtgaatgaagcaaggtgcaaaacactatgcatagtatgatcccatttgtgtaaaaatggggtggttgtgcatacatcacatgtaatgcattataattttctggagtaatacataggaaataacaatacctacctgtgagcaaagggctgaatatgtgtgatttcacttcatgtatttctatcattttgaatttgtacagaaaacatgaattacatt

SEQ ID NO: 135774 - DNA, 498 bp, Homo sapiens
cagcctccagctgccgggctcaagtgatcttcctgcctcagcctccagctgccaggctcaagtgatcttcctgcctcagcctccagagtagctgggtctacaggtgtgtgccattatgccggctaattttttacatttttgtagaaacggggtctccctgtgttgcccaggctggtctcaaattcctgggctcgagcaatcctcctgctttagcctcctaaagtcctgggatcataggcctgagccactgtgcctggccctattccaatctttatagaaagaaaattcacatgacatgaacacattcttgctgtcaaaaattttaatgacacagataaatcaaaattcacccatgaccataatccctcgaaaccttcccctctccagaggtaaccatggttatcaactgggtatggttcttttcagatatatttgagcatataaggatgtagtggctcatgcctgtaatcccaacactgcgggaagccgagatgggag

SEQ ID NO: 135775 - DNA, 410 bp, Homo sapiens
aaaaacttcactccttgactccagctggagtgcatatgtaatgagaagaaagagttttacactgatgaaggaatacaatcaccacccctggatcaacagtcagacttaaatagcaaatgtggcatgggttccaaagctctgtgattttcctatactgaaagatttctcccaaccatggaggagcctaacaattcagtcttcagggtctctaacagcactgacacactggatgttaattacattgtgattggagcttccttcccagacactccagtgtactactttcctcctttacagcctctcttctaactgccaataaaagagtcctcatgagctcagctccagcacagataagactgacagaaggttccgaggttggcatttgcaaaatcgcatgagcatataattgc

SEQ ID NO: 135776 - DNA, 758 bp, Homo sapiens
cactccaaaaagttcttttggggccctttgccataggttccccccagcccctgccccagacaaccactgatctgacttctatcactattgattagttttgcctgttagaacttcatataaatggaatcatagagtatactttctctttccctggcttctttcacttagctcagtgtttctgatatttatttatttcattgcatgtattagtagtttgccctatcttattgctgagtagtattctgttgtatggatatgccacaatttatccattcatcagttgatgaatgcttatgttgttaccagctttgacttttaggaataaaactggtatgaatatttgtgttcaagttatttttcatatatacattttaattagcatgagcgttctaattgctccacatccttgataacacgagatattgtcagttttcaattttagccattcttgtggttaatagtatcttgtagttacattggtttgcatttatctgatgattaaacatgttgagcatccatatgcatattggctattcgtatatcttctattgtgactcgtctgtttaaatctttagcttgtatttttaaattgggttgtcttattaagttatgagtttttaaatatggccaggcaacaaggtggctcacacctgtaatcccagcactttggaaggccgaggcgggtggatcacctgaactcaggagttcgagaccagcctggccaacatggtgaaaccccatctctagtaaaaatacaa

SEQ ID NO: 135777 - DNA, 335 bp, Homo sapiens
tcagagaacccatcttcaatttctgagattctttcctcagcttggtctagtctgctgttaatacagtgattgcactgtgaaattcttgaagtgtatttttcagctttgtcagatctgttaggttcatttttacattggctattttgtctgtcagctcctgtactgttttattgtgattcttagtttccttggattggggcttgccattctcctgaatcttcatgcattatccttagcaaactaatgcaggacagaaaaccaaatgccacatgttctcacttataagtgggagctaaatgatgagaactcatggacacaaagaactaggaactagg

SEQ ID NO: 135778 - DNA, 341 bp, Homo sapiens
catgatggtgacagccttgatgccaggagaggagctagcaactgaaccacagagacattcccagcagtcaacaggagccacagattgatgagctaaagagttgtgcaaacagtgtttgtttgttttgtttggagagggaagtccgtgtgtttagagctcagcttgtctccctccctcatgttacaggggaagaatcggaggttccgagtggggagtgactctcgcaaggccacgtggccagccacggccaagagcgacaccagaaggtgatagttctacttgcttctgagtccttagagcgcatagcctagtctgcagttacaaacatgcttgttcaaaac

SEQ ID NO: 135779 - DNA, 118 bp, Homo sapiens
atgtttgctttgatgatttcttttctgaagccccttcatagcattttcttgcacgtttgctttgatttcttttctgaagccccgtcatagagttttcttgcacgtttgctttgatttc

SEQ ID NO: 135780 - DNA, 135 bp, Homo sapiens
tgctgggattacaggtgtgagccaccgtgcctggccaggaggatttatttttaagagttacctctgcccaatcacaaatcctccagaaagttttctccacaattttctggctttctaattaaaaaaaaaaaaaaa

SEQ ID NO: 135781 - DNA, 123 bp, Homo sapiens
aacactgaagaaataggttcataaaacaaaatgtaaccatggggaagtatgtatgttaaagaactatatgaagctagaaaaataaataggccaggcacagtagctcacacctataatccagca

SEQ ID NO: 135782 - DNA, 780 bp, Homo sapiens
cacgaggtcacgagatcgagaccatcctggataacacggtgaaataaaatggtagttttacgtgtgaatgttatttgtgtgaaagattagagcttcaagtaagagatcagggaatcctgagtggttatatgctgtattttgggcttaaagatttgaacttaaccaagccacttaatcactacaatacgtgcctaacagacccccccatgaggctaatgaaatgctaaaggtgacctgagaaaatctgaaggcaagccactctgtaatttggtgacaacatacagtgaatttccgtgggaaaaagttaaagcttgtatgtaatatgtagattgatagatggtatgacataaagaatatgctatgctgtgatacatagaactgatatcatccaatgcactggtagacttgggccaagaaccatgtcaatcgaatgctgatgttgcttgtttatcctctgtgggatgttctgaatactaatcagaggtctggactatctggaagtacacacagggtttctgcattatttttgaagtacttttaacacaggaaggaagataatagatctgagttatattaggaaaaattactcaaaaaatatcaagaacaaattgacttaaaatctttttcagtgattagaaaattaaagatattaataatttgaaagacatcaatcactggacattaaggagatgtagattgagagaccagggcaggagaatcacttgaactcaggaattcgagaccacccttggacaacctagcaaaacctcgtctctacta

SEQ ID NO: 135783 - DNA, 369 bp, Homo sapiens
aaattttgtaactttttaggtattcttaaattttaaattgtggttaaaaacatgcaatagtcatttcagacattattaggtgtacagtttagaagtattaagtgcagtcctgttgttttccaggaggttagagatgatttttgtcttacaaaagtaaaagcaaatactcactaaacaacaaattgtcctttccacctctctctagctcctgaagaaccccattttactttcttttttcatgactttgactaagtattctatgtaagtgtgattatacagtgtctctttttttgactattttattttacttgacatagtatcgtaaagatttatcattattgtagtatttgtcaagatgtccctatttta

SEQ ID NO: 135784 - DNA, 281 bp, Homo sapiens
agctgggactgtgagtgcacgctaccatgcctggctaatttttgtatttttagtagagatggggtttcaccatgttggccagactggtcaggaactcctgacttcaagtgatccgcccacctccatctcccaaagtgctgggattacaggagtgagccaccactttatcttaagataaattttccatatgcttcaagaggagtaagctctaactggaatgtagggtactgaccctagctccatatgacctcacaaaaatctgttactaaaatagtttattt

SEQ ID NO: 135785 - DNA, 265 bp, Homo sapiens
ctatcaaaatattgtactgtactcaccctctttgtgatgatgtgagatgataaaatgcctatgggatgagatgaaatggggtgaataatgtagtgtttaaaacttagtgatttatttatctctggaattttccatttaatattttcacatcttggttgtctgagggtaactgaaatcacagagagcaaaaacaaggataaggttggggggactacagtacttcaatcctcattcttctcttgactgttctggctacctctgctaa

SEQ ID NO: 135786 - DNA, 240 bp, Homo sapiens
ttttcggaaagagcagcttaagatggtgccttcgtgaaggcttttgttctttctccagctgcatttccaaagatgagtttgtatcagtaagtgtaatctcagccagcctttgggataagagaagataatttaatgggtgaggccttggtttcaggcagggctgaggtgtgggattacagttcccattttcttggacttgtccttagcatgcgtaagaaaggacagagcagggtgcatgca

SEQ ID NO: 135787 - DNA, 811 bp, Homo sapiens
caactttgcttgatagattgcatgttgaggagtagagtcccactagggcattgatcaatggttctgttttggtcctcattctctaagtttaaggcaatgatcaatggttcagtttgggtccacattctctaagtttggcactaaaaatcctatgtccctggaaatctctcagttccaggcaaagtaaggtcattggtcacaaggatccatctaatttgccaggaatccttttgtgtgccttctctgtcaccctaatcactctcagaatgctcatccctgtgtgctgtgttatttaaagctgtgcttcttaaactttcgtgtgtatgagaatcatctggaaggcttgctaaaagtctctggggtggccccagagattctgagtcggtaggtctaaggtggggcccaggttttaccatttctactaagctctaggaatgttgctactggtgattcaaggggctaaattttttagagtattcattgataactaaacaaaccaataaactaatagaaagagaaaaggagatttatcagcaaaattctatttcagcaactgtgacctccatcctctgattcatctctagtgaaactatttatcataattggaaactgaaaattcaatacattataactgaaattttgcccaaatcttttatatttattagaataattatatccattagggcatctaaaatcttggtttctcaactctgaaagaaaaacaagtttattattaaaaattgtgctctaaaacatgctaaaaacagtgagtacaactattttgttggtgataaacattcatttagcctct

SEQ ID NO: 135788 - DNA, 455 bp, Homo sapiens
ggagagagtcgcccctcccgccgccgacgtgacggacgactccggcgggccaatgggaggcagccgccgcaccccggacaccaatcgcgagctctgtaggaggtggccaatcggagtgcaatgaggggcagtgggcgggaggctcagagtgactgacagctctcagaggcaatagctgcgagctgcccgtgctgggcgggcaaatgaaggagatctgagaaggcaggaggcccaatgaaacgcgagtgccagattcgcggggcggcttcagaattagattgacggttctgaagagtcacgtggactgtaaggccgggcctagtggaagactcctatggaccggctgggtgggcgttaggtttgatagtcgtggacacaagccaatgaatgcacgtgagaggtggtgcttgtaaagatgggcagccaattaatccaattcctgacgagttctgggt

SEQ ID NO: 135789 - DNA, 324 bp, Homo sapiens
ctgttccttctcccatgttctctatcatctcagtatatggccttaccagctgattaagccagagacctgagaggcatctttgattcctttttctttcatcccatacacagaagccatcagcaggtccaattctccaacatcttccacttggattactgttattacagattactcctcatctgtctcccaccgcacacactcgccaccttccaaatgatcctcgcacagcagggagagtgctcttcacagaatgtaaatctgaccacgctgctcccttgctcaggacatttgccgctcttcccatcacatttaaaatagagtcca

SEQ ID NO: 135790 - DNA, 466 bp, Homo sapiens
agttcagttaagctctccttccaactgcacagcttgaaaaggcccatggctttcagatggttcctaacccttctccagctgctctctgcaggcctgaaggcctctttcagacccgatggccatgaagcagtcatgagcatccccacacatgctaggctggagggtgcacctggaaccttctatgtcttggtgtttgtccttcaagtgtgcaaagttttgcaactaagatctaaaccagcttctctgcttaacaaacgcctgactctaggttgtgtggaactggtactcaactgtcatctcagagcatctggagttactttttaaagcccagttcccattattttaaacatgcttcatcgggattctttgacacctttagggcattctcctgtaaacttgcatgttatctgctattcttcctaagtactcctgaacaagcagctctgatatggaaagccaagaaaaa

SEQ ID NO: 135791 - DNA, 824 bp, Homo sapiens
tgtggcaaaattggtcagtaggagaaactaactaaaagattaaacaaaaacaaggaaacccagttgctgtttttccctctccctcccccatcttttaagaaaaaaattctttcaaaggaatttgggtcaagaaaaaggttgttttcaattttttcccattgctgcaacagttaacctttagtaagtataactgctaaatatttaagaaaatcaaatcgatggtgaaaattatttaatcattaatatctcagtggggttttaaacttaacagtcttccctgtatggacaaggtctagaaataacacaaataaaagtattatgccacactacatttactttatgggtttagggtgcatgcataaagggatcatatttccccatatagttaaaacacaagaactgcagcagtagtcatttctgaacatttctcaatttaattatacttaaatccagaagcactttaggcaagttacaaatgagagcattgagtataataaaacctgtaataaagcaacttagtaccatccacccggaatcattgcgatcaggcacaattaacaggagcataaatccaagacagaatggaaaatgttcgaatcagtattattgttggacaaagactagagaaggaagcaatagttttttaaatggtaatgcctgtgtttggtaatgattgcaaaatcttctatctcagcagccctggtgctaatttgtaaacacagccagacattatattgcctgtcagtttctgcattagaaaacatgacttcattttactttctaatcacgttttgactctagtgcgcacacgtatacccatccat

SEQ ID NO: 135792 - DNA, 107 bp, Homo sapiens
tgggctcccctttctctggggaacagggagggcctgtgtctggccaggctgaggttccagatctgttgccatcatggccccttcagggtcctgggaaattcctggct

SEQ ID NO: 135793 - DNA, 299 bp, Homo sapiens
gtgtgtgagggtggatgaccctgaacaaacaggcgtcccaggtgtgtcagcagcttctgtcgggtactctgcccctggcagggccacttgggggtgcactggggtgtgtggctgctgtttgtggcagagtgtggatgtgaggggctttgtgtggtgatgcgtgtgcacctggtgtggtcagggatggagtctggtgtgtcagaggggccaacccttttctacttaggggcctgtgggcggctgtctgagcttccaagggcccgtgtttatggagagaaagggagaaagggagtgtgtgt

SEQ ID NO: 135794 - DNA, 666 bp, Homo sapiens
gtgcggggctccccgatgaattcactcctcacaatcctcgtgaaggggtgacctccaagccctaaggacatcaagctggtcttgcacgataaatccatcccagcgttctgccgtcctctccagtgtgccaggaaagttctggatttcactgaatttagggtcagctacctgtggggcgaaagtttcggtgactgatgaagaaaatgggggtggggggtgggtcactcccagccgttccctccaacgcatcaaatccagaatctcgtatctgagtccctgtccacttacgcaagcttatattcctcccacccagatcccgcactctcaacatcgatttccacacattttccgcaggttttcgtagggaaacatatttgtaggccacacctcacactttctcttttggggcctgctggaactccagtctggatctaggtctagaaggaacacagaggtggtggtgagtcccgggcaggacggcggcaccttacagggcagctccctagggaaggcacttgagggtctttgggcaaaggggtctcagctccccaggcagtggcagaagagccacatgtgccttcaaagacgacctgcggagttcaccggcagatcccaatggacttgcagggctcgtggtcctcagcttcactgggatcttcccacatg

SEQ ID NO: 135795 - DNA, 453 bp, Homo sapiens
ataaggctactgtatgattccatttatctggaatgttcagaataggtggatccagagaaacagaaagtagattagtattgccaggggctgggagaatgggagtggctgataatggttacaggagttaattttgtggtaatgaaaatattctgaaattagatagtggtgatagttgtacaatcctgtgagtatactaaacaccactaaatttagtcctctttaagataattttattatgtctgagttatttcttaaattgctaaaaagtttaaaggagttaaattttatcatcaaaagcatatcatctcctgcctatatttccatgtgtaatccattcatttatctaatttctttggttctaatagccactagatttgatagccaaaaaacctttacttttatttttatttttgagatggagtcttgctctatcacccaggctggagtgcaagt

SEQ ID NO: 135796 - DNA, 605 bp, Homo sapiens
gttgggccgggcacgtctgaccctctgtccccgtctcccttagaggaatcgtgggcccctctgttcttgtgttgtcaccggtggaggccgtccttgacttccccctgggagcacggtgtgtcccctcgccatgcagagcacactgtgaagtcttttaatgaggagagaaaagccccttaaaagttgatattctgcagacaggtgagcacgtggcctcgtggtcacaggaaagaagaggcgtttcctgtgttctggcaacctcgagcttctctgtgagcgcatgcccaggcctgcctgagtgctgatgaaccagccggcacagcagagcactccgggtctgagggagctgctctccctgcagcaggcggctgggcagggcaccgtggtcctttgccatttttccagggccggggggtgtcagggtgtctgcgttggggggtgcagggggtgagcagagccagcagctgcacctgagcctccccttgtgagcagctcgtggctgtggcccagggtaccctggatccttggtgggtgacccagagggtggggtcctcttggtcgtcttctagagggagcatgggggctgagtgttcctgcctgggtgc

SEQ ID NO: 135797 - DNA, 327 bp, Homo sapiens
tgcacaggtctgacaccacgaggtagcccttagaaatttgatggcatttctgatgtgtccccaactcttctccaaccactcctcccagagcttgtttcttaagccccttgtggagctgattgctttcctcaaggcagctcagtttttcccagtttgctcctggtggtcctgaaatatgattgactcctgaatactccaggtgtgaaggagagtgggggtggcctttctacttgtcatggcctgggttttaagttgctgtccagtggagcagaggtgactttcccagtgaactacattttttcccctctaaatccttagcaattttgt

SEQ ID NO: 135798 - DNA, 190 bp, Homo sapiens
agatcttagggtcatctattgcatataagagaatatacatttttgtaaatgcgcatgggatgctcatgaaagatgattattgaggtacaaagaaaactcttaaaaatttctcccacgcctggcaaattgattttttcataatttatttatacataggcctgaagtaaggatctagctctaaaaagcaaca

SEQ ID NO: 135799 - DNA, 458 bp, Homo sapiens
tgcttagacacccacaaaggcggctctgtagtcctccttcccttcagtcccctatcccctgcccgcagggcaacgagtattacataaccaacaaaagtgcaaaatattcccacaatgtgtctggtcctctctgggagaggccgctctggctttcgcaagcattcctctcagccctggccctctgcctgcccctcactcctggttggtgctggtcaggctgactagaggccaaggctagtcacagtgggccagcgctcagacataaatgagaggttacttaccctcctgaaacagccactaattccacaaattggctgcttgttgttcaagacagagaccctcacggataaagtaaataaggatttatcctatcaatgaattgaaagatgcattcatttaaaaattacttgatatcacaattggcatttcaattttatagttcttcttgctctcacttt

SEQ ID NO: 135800 - DNA, 547 bp, Homo sapiens
agtcgctgttcctctttacccctcagttgccaccctctttccgacctgaagactggtctgggtgccccaagtgacagcagcactgccctggctatggagcctctgggctagacagagctggcacgcttgggtgggcaggctttcagggcttgcagagtgggtggctcattcccttgacaatcatccagggctggttacgttcaaatgccaaggaggcagagaagggaaggacactagctcagttagctctcgggaatgaatctctgagtagaaaagcccagcctggccgggcgtgatggctcacacctgtaatcccagcactttggaaggccgagatggaggatcgcttgagtccaggagttcaagactagccctggcaacatagtaagacctcatctctacaaaagaatacaaaaattagccagttggtgtggtggtggcatctctagtcccagctactcaggaggctgagatggcaggatcgcctgagcctggaagtgggccatatttgcccactgcactccagtgtgggcgacagactgactct

SEQ ID NO: 135801 - DNA, 513 bp, Homo sapiens
tgaagttaacctaacaggccatttggtataatactggattatagtcttccattttcattttcttttttaacactttgtctaatttaatttacttctgattattatcactctgcctggttaatttatatgctttgctttgtgctcattgagtttaattaattcagtgagagcctagccttctttagaatctgaataattttcatctgtcagatgcttgcgatggaaagaaaaagccaaaggtcatgacacaatagaacttgattggctggagttcagacttctattggcctctgtaatatctgttaatatatacacaactcttcctgttgtggcgttcatcttcttattttttaaagatattctttgtcagtttaataaactgccctttcacaacttgtcagtaaaaaatatgtcaagaaactgcacctcaaagaaagaagtagcatttggagtggtattaaagtaatccgtccattgtgaaactaacaatacatgtaatccaatatgtatttt

SEQ ID NO: 135802 - DNA, 113 bp, Homo sapiens
cctagtagctaggactagtagcaggcacaaggaaccatgcctggctaatttttttattttattttttgcagagacaggttctcactattttgtccaggctggtctcaaacccc

SEQ ID NO: 135803 - DNA, 631 bp, Homo sapiens
agccttgaactgccctatagtgcccaaatttattgttcagtttttctccagctgtcaccattctccttcccggcagtcaagtgcagttctctgttttcaaagttctctttgtcttttacttgttttgtctttttcctctttgtgtgcattctaaaaaaagcttctgggaggcactgattttcagctctccccaccatctggctcttggtccagggcactaggtgaaacaaactgtgatggctgcctagtgaagggacaggtggtagctactcagaccctatgtgaggtacatatatatattggtatcaaccgtccggagtcacaaggtctctgtggacaacactgccctagcttagtgggagctttcaatcaagctggccttgtctggtccttccttcatcagggatgaatattgcccttttatactgtcactaaaggtgttcagggccccaccctcttatcctggaggaaccataagagtaccgggctgctgaacttcctgggattgacttcatggagagaagcagaaggagtagggagggctgaactgggtcctggagcacagacaagctgggatgctgttggtcaaggctgctgtctggtggcgggcctcactagctggccacgagaa

SEQ ID NO: 135804 - DNA, 849 bp, Homo sapiens
tttttttttttaaaggggttctcactctgttgcccaggctggagtgtagtggtgcaatcacagctcactgcagtcttgaccttctgggcccaggtgtttataccacttaaacactgcaagtacttgggatcacaggtgtatgccaccatggccagctaatttatttttattttttatagagacagagtctccctatgttgcccaagctagctcaatgcactttaagataacaaagagcagaattttatcagataaatttaacagagattaaaataatttttaaaagtcaagcagaaattcaggagttgaaaaacttaattgacaaactaaaaatgcatcagtttctcaatagcagaatggatcaagcagaagaaagaattaatgagcttgaaaacaggctctatgaaaattcagtcacagcagaaaaaacaaaaaaataaaaaggaatgatgcatacctacaagatctagaaaataacctcaaaaggacaaatctaagttattggccttaaagagaatggagagacagagagagagagagaaaaagagagagagagagagagagagagagagagagagagaggcagcggcagggaaggagggagggagatcagggtagatgatttactcaaagaaataataatagggaactttacaaacctagagtaagatatgaatatccaggtataagaaaaccaaaaaacaagcagattcaacccaaataagactaccttaaggtatatagtcatcaaactctcaaagatcaaggataaagaaagaatcctaaaggcagtgagagaaaagaagcaaagatactttcccagacaaacaaaagctgagagatttcatg

SEQ ID NO: 135805 - DNA, 226 bp, Homo sapiens
tctcatttctctctctttaataaactttaataaactcaactttaatcataagactgaacgagtttctgtaactggaaaccaaaaaatcctatctattacaacatacatttgttcctcactctttcaacaagtacgtaacagggccaggcacagtggctcatgcctgtaatcccagcactctgggaggctgacgtgggaggattactgggacccaggagttcaagac

SEQ ID NO: 135806 - DNA, 305 bp, Homo sapiens
agggcaccaggaggaaagtctgttactactacgataggggtgttggaaattactattatggacaagcccacccaaggaatcctcactgaatctgcgtgactcataatttgctgctcaactatggtttctactgaaaaatggaaacccatcaccctcacaaagccaatgctgaggagatgaccaagtaccacagtgatgactacattaaattcttgtgctccatctatccagattacgtgtctgagcacagcaagcggatgcagagattcaacgttagtgaggactgtccagcatttgatggcctg

SEQ ID NO: 135807 - DNA, 467 bp, Homo sapiens
ctgacaacaaggacttgtttactcctgtagatacttaaatgaaatgtttgtcagaatcattcactataggatgggaagcattactggttttgtttctttgcttcatgacaatagctgagagaatatgaaattttattaaagaaaacaatagcctcctcgggaaaagattagattttgtaaacacttcaaatagattatacactatttttagaaaagttttttgagggctttttaaaaacagaaataaagcaagaagagtaattttatgactatagcccagaagtagagccgtcagtttaccatttccaaagatgatgtggtcggtcttgtgaggaattaagtataaattgaacaggtcaagacaagtgtccaactgttccagaaaaagcatggactgccgtgggaacatggagccaaaagacacagattaccctttatttcctttgtgtctgtgtctgtgtgtgtgt

SEQ ID NO: 135808 - DNA, 288 bp, Homo sapiens
gataaaagtaatgtattgatgttaaatttactgcagttgataactgtatcatggttgtgtaaagtattaataatatcctcattattgagaaatgcatattgaagtatttagaggtaaagaagagtaatgtatgaaattgaaatgattcaagaaaaatttgtgtatagaaagagcaaatgataaaacaagcaggattaaacgttaactgtgtgtcagtctaagaggaacctggctatcctttgtaattctattgcagtctttgtgtaaatttcaggttacttccaaatt

SEQ ID NO: 135809 - DNA, 215 bp, Homo sapiens
cactgcactccagcctgagtggcagagtgagactctgtctcaaaaaaaaaaaaagttaaacattccaaaggcacaatcttactgaatacagtcacttctcctttaagcaagaataacatggcttgattttcaattcatggtgtctgctaatcagaaaacaggttacattaggacaattaggctctaggcccctcagctactagtatctagcacaa

SEQ ID NO: 135810 - DNA, 383 bp, Homo sapiens
aaccccgccaggcaagccgaaatcattggcagggcttgatcctgaggataaaaaaacccacaaaggagtacaattattaaaacagaagctgctggcaaaagaatggacataaagaaaaatgggatagaattgacagtctagaaataaaccctcacacttatggtcaattactctttgaagagggtgtcaagacaatttaatggatgaacaactctcctttcaaatgatagtgcagaaacaactagataaccacatgcaaaacagtgaatttagattactctagcttccaccatatcaaacaattctctaaaaaattaatcactgagttaaatatcagacttataaccataaaaacatcttaaaatagacatagaggtaaatat

SEQ ID NO: 135811 - DNA, 187 bp, Homo sapiens
cagagatgtgtccactcaaggaaggagactgccgtgcagtgagctcagggagccatggcacctcccgggtgggcctggctcagcataggccctgtgaagcccagtcatcggaggggcctagagccttgctgggagtcagagttgctggcaccacgtggacagtcacctgtctccttaataccgtgcc

SEQ ID NO: 135812 - DNA, 429 bp, Homo sapiens
tgccccgtcgacgactaggaggaccccccgttatatcaacgtggtaaataacctgcaatgggaacctacccagcccaagttcttcaatcagacttctgagttcaaatcctgcttcaactactgtgtgaccccaggcaagtgccttaacctctctgggactctgatccccatatgtaaagtgggaagcatagcaatgcctgtcttctaggagtgttgtgagatcggtgtcttgcatagtcttttcttcctatatattcattatatttgttctttatatctgacaataaaaatagaataataggtatttatagtatctattattatactatttattctctatataaatgggcgattcacaatagttagctttttatcttgaaaagaatgttgaggccaggccaggtggctcacatctgtaatcccagcact

SEQ ID NO: 135813 - DNA, 410 bp, Homo sapiens
  misc_feature (2)..(2): n is a, c, g, or t
cngactctagtggatcccccccgacggggtgctgtgaaacctcctcattggactttctgcttctctattgccttccttctgatctgttttctattttaggaaatataagtgaggtcaggccattgcactgtgtgaaacccattaatgggttttcattgtacctcaaatgaaatccaaatgcaagctctgcaagcactagtctctgcatatttttcctccttctcaaaatgccccagttccaagaatgcttcttctgatccttggagctgtcctttaccatcttgaagttgtaggcctgggtgcattcagactcctctgaatgtcccaaaaacccacaaccacgacccgccccctcctctgaatgtcctacccaaaaacccacaaccacgacccgccccctcctctgaatg

SEQ ID NO: 135814 - DNA, 334 bp, Homo sapiens
gcgtgtgtgtgcccgctttgtctgggccaagcctggattgtaaattgcatcctctgcctgggaactaactgttctcatccttaacactgttaattggatttcttattctcctttcagcgaaaaagaaaagaattgtaaaactaaggaactgctacttagagaaaatttaagaacgctttttgcgtttgccctttgatgatttttgggtattaattttattggagcctagggctattatttaaaaaaacccacttcctttgatagctgttgttgcgattcatttttgaaacttttatgttctgcattattgaaggactcaagagacacaaataga

SEQ ID NO: 135815 - DNA, 261 bp, Homo sapiens
ccaagtccctgttgttggaaactttggttgtttctactttttcacttaagaactttgttgaacatcatttatatacatagatctttgtatatttctcattatttccttaaaaaatgttttggtgatagaactgctagctcaaaggacatacccatttttaacacttttaacatatactgtgagacagttcaatggtaagcagtctgtttaaactatgcatgcctattatttgccctatttgcaactagttctagaatctta

SEQ ID NO: 135816 - DNA, 532 bp, Homo sapiens
atctcatgactgatgtgtgtcctgaaggagggatctttagaaaattgttcaagttacatcgtgacaacatactggaacttgggaaagccccacatgacaattcagctactttcaagtgactctgttccatgtccctaggcctgtgtgctcttaaaaagttgcaatcatgtggtaactgccattttgaattactaatattttatcatattcatttattttggcattgttaaatagcaacactatggcatgatagaaaaaacatgggctaggccgggtgcggtggctcacgcctgtaatcccagcactttgggaggctgaggtgggcgattcatgaggtcaggagttcaagaccagcctggccaacatagtgaaaccctgtccctactaaaaatacaaaaattagctgggtatggtggcatgtgcctatattcccagctactcaggaggctgaggaaggagaattgcttgaacctgggaggtggaggttgcaccactgtactccagcctgggcaacagagtaagactctgtctc

SEQ ID NO: 135817 - DNA, 600 bp, Homo sapiens
gcatgttctctcacaccaactggggctggcgatgaagccatatggtgagcactgtaacataatggtttaaatgtggccttgggcaagtaactaagcctaacctaaaatggaagcaatatttgttgaatatcaaatgacataattcgtgtaaagcatggaatgagtgctgagtaaatagcattaccattattattattattattaactgggctgggccaaaaatgagaaccccttcttgtctctgcgatagaagcacagatgggaagacattcctgaagcagaagtattatctgtggttttttagaataccaaaaacaggctgggcatggtggctcatgcctgtaatcccagcactttgggaggccaaggtgggcagatctcttgaggttagaagttcgagaccagcctggccaacatggtgaaaccccgtccctactaaaaatacaaaaattagctgggtgcagtggtgggcgcctgtaatcccagctactcaggaggctgaggcatgagaatcacttgaacctgggagatggaggttgcagtgttcagagatcaagccactgcactccagcctgggcaacagaacaagactaggtctca

SEQ ID NO: 135818 - DNA, 353 bp, Homo sapiens
ccatgatccaggagaaaatgaagtgagccagacatttgggaccattttttcctaagggcccttgttgattttggaagaaatggctgagaagctgatcagtactatcgatatcttatggggaagagggaaaattggaatttaagttttaccaaggtggattttttttttatataaagctctcataatttgagttgagaccataaaaggccacagcctgggagtgggtaaatcagaagtagactggctccctcgggaattacaatacagcttgaaatcatttcagtttcttgagttggattaaggtaattcttgatgctactgtctatccatctcatagaagtaaaagtatatcc

SEQ ID NO: 135819 - DNA, 575 bp, Homo sapiens
gggggtccaggtgtctcttggggaccctgtctttctgcagctctgtccttgtggccacgcaggaggcccagtggagggtccctcggagggaaagtcccctgagtgtggaccctggtggacacgaggcccccagcgtgtggaggctgccagtgggatacttggctcagggcagaagggaggtgggtgggtgcagggggagaggagtcttcacagctgcaggggaggctcctccacagccgccctccccccaacacgcctgcaggtgggcgtgggcactggttgccttttctagaaccatttgaaagttagctgaagacagcatggcacactcccttcaataggtcccacagtgaccccgcgcagggcacagcccgggcacccttgtggcctcggctgtcctcgttggaaccacgatcctcatggttggcaccctcccctctggcctttgacctttcactttagaagacctgtccctgtcgtggactctaagcggccaccagtgctgcactgggccgggtgggggtgaagcctgtggggcggagttcgtcgcccccgtgtgtggttggtttcccacg

SEQ ID NO: 135820 - DNA, 200 bp, Homo sapiens
tgggtgaccgtccctttgccgcctcaccagaatgaacctccgagtgccccaggagccactcgaggacgatgagaaggtaaactgactcacttcagcgaaacagatttgtggcaatcatgttgcggcagtaattacagtttatggcaggagatacacacttagcaaaaataaatacaaatagcacgactcatgtggtggca

SEQ ID NO: 135821 - DNA, 463 bp, Homo sapiens
tttcaatagccgaatcctagaaaacaggactaaagtccatgaccttctgggccagttccagaaacacacctttaataaataatagccctccgtatacagttgcacatctggccaaaagggaaaaaaaaatgtgtctgtgttctgtgatgtatgtgtatcttctttcattcttgtctactctacctagattgtgaattactggagggtataaactgcctagcgaggggctttgtaaggttttttttgatcagtggatctcaggtctcaggactcttttacacacttaaaaattactgaagactgcgtattttgtttatgtggattatatctattgatattcactgtattagaaatttaaaaatgatttgatccaggccagcctcccaaagtgttgggattacaggcatgagccactgcatctggccaaaaataaacatttctttttgtgctataatataataaa

SEQ ID NO: 135822 - DNA, 717 bp, Homo sapiens
aaaccaggggcggtgatctgggaactaacagtggtctctgagggcccctgtgcttccccaccaggtctggattgaggctgcattcctgaggcaggagggagtgtccctggagatttttgagctgggctctggcatgatctgctgcttctcagacaccccccgcccaacccctaaactcctgagctcaggcaggtggagcccaccacatcaactgcactcacccctgagaattttgtttttgaatgcagagtggaatttagctgacataaaagaatttgagaggggagtgcggaattaatggcacggtgtagcctgtggcttatgtggtttctaattcagaggtatgtggattacgtgagtctgtaacatatgctgatctaattaaccaagttaaaaggttaaaaatccacttcagcctacataccaagaatgggtctaattggaaacaatatttcaacaacagtccccacgaatgcctaatttactggtaaacactcactctaatattgatgatgatactcattctcttttcctctgttcataaagtgatcattgcctgagtgaaacagtcacgagagagagagcgagggaagaaaggagggagggaggaaaaagtgagggagtgaaacattaggagttggtgaacattagttgattgagtgactgagtccacaattccaaaaacgttcctagaagactcaaaatctatttaacatg

SEQ ID NO: 135823 - DNA, 363 bp, Homo sapiens
gttcacacttcataatacgttttaattgtcatctcaatgagatgactcaaatttatatattgatatatctgtatcacaaaaaaattgcaaattgcgtgcattgtcaatgtgaattatagatagtatgctatgaaaacaaaaatattttctaatctgtctgacttttagtagagaagtcaagatgagatcataattaatccaggcttgaattaacatagctggaatagttaacatgggcatagtccctcatctgtctttggctatttgggggaaaagaaatacatgttaaagtgaaaattagtggaggaacttttaattagtcatacatttttactcagtttcatacacaagaatattcatttt

SEQ ID NO: 135824 - DNA, 213 bp, Homo sapiens
ccacacgctattctctgttctgctctgtccccaaaaggctgatctgtatagatgacaggttcatttgccctctgcctggggagagaggggaaaagagagactagtaggacatcaaaggggatgcggaaatgaggctgaatatttctcggtcttttatcggtctccacctggattgctgttagttggctgtatcttccaactaaggtcacagct

SEQ ID NO: 135825 - DNA, 373 bp, Homo sapiens
gagaccagcctgggcaacatggcgaaaccctgtctctaccaaaaatacaaaaaaccagctgggcatggtagcacatgcctatagtcccagctactcgggaggctaaggtgggaggatcgcttgagcctgggaggtgcaggctgcagtgagccaaggccgtagcactgtaccactgctctccaacttgggtgacaagagtgagaccctgtctcaaaaaaaggagatgagatgctgagagaagcaagtggtggcccagtcatggaggagggggacgggtttggaagccaagccaaggagtgtggactttgtcccagaggtagtagggagccatggagggttccagacctgaactgcactttagaaagaattgtcc

SEQ ID NO: 135826 - DNA, 416 bp, Homo sapiens
gctccttccccaagagctgagaccctgcattcacccacagatagtgtgcatgagcctcaatagacagcacacagatatgaccagccactgcaactctgctagatttggagaaaatgctcaatcttgacacttcaagattgcactgccatagagaaaataattaggaggctttcagcagctggcatggcattgtgaaatcaagagaaggtacacaatcccaagacttcagaagattggagcagatatatccatacaaaatatctgagagatcccccaaaatcttgagtcagactcacttgtgaagatctttacctcgaggaggttactgtttcttcaaatgtgaagacagagacacaaggcttcaagggaaatgaagaatcaaggacacatgagacaccaaaggaacaaaataaagc

SEQ ID NO: 135827 - DNA, 131 bp, Homo sapiens
tatatactaggatatgaagttaacaatacattttacatgggtacctttctgtcaagttggaatgaatttccgcatgaataagaaaggcccattttctcttcatttttgtattttgaatagtagagaggcaa

SEQ ID NO: 135828 - DNA, 216 bp, Homo sapiens
gcaagccaattagacagggcctcacagaccatggcaagatgcatgaatgctatctgagggcattgatgagttccaagcatgggagcagaacaattggatttattctaagaagctgattatggctgttagtcagagagaggaacgtacagaaagcaagagcagaggcgaaaaggccaatgagaggctactacacgtggaatgatggtggtaaagagg

SEQ ID NO: 135829 - DNA, 197 bp, Homo sapiens
cctctgttgtcacaaagccctttaggtgattctgatgcacgttcaagtttgaaaaccactgacagtcgcaccaccaactaatcagttaatgaagtaatgattgagcgcctactatgtgaccagtgctgtacactctactttggcccactgttctttctagaggtagagatgcaagtatgtatatataaaaagaatga

SEQ ID NO: 135830 - DNA, 456 bp, Homo sapiens
tctatatatccaccccaatcaatcatgattactgaaggccttctgattaccgaagagagttccctcgcaggcaagaaaaatttctgtccttgctaagcttctccacccttggactcagcggcctctccccaaacttttcactctatataaaaactttcattcccaattaatacatactcaaaatccaactgtccccatgaatttagggtgttggcaaagaatcacagtgcttctccagtccaacttttattggatagaggaaacagccctagaaagaaaatgtcaaggctgggtgtggtggctcactcctgtaatcccagcattttgggaggccaaggcaggtacatcacctgagatcaggagttcgagaccaggctggccaacatggtgaaaccccgtctactaaaaatagaaaaaattagccaggcatggcggcacacgcctgtaatcccagct

SEQ ID NO: 135831 - DNA, 425 bp, Homo sapiens
tcttaaccacaggcctacagttattctgagaaaaggggaagagccaactcagccaagtccatccagggacctgtggatgcaggggacagtggaggactagggtggccaggatagagacctccccagtgtggccaggatagagacctcttgggtgaggccagcatagagacctctcagggtggccaggtagagacccatgggacatccttggctggctgagcatctcctagtctcctagcctgaagacaacaggatgaagaggagaatcaagttgtctattttcagtaaacctgtagtttagcaactttagtagcctttagtaaaatacatagcgtggtttccagccccactgaaaccaattatcctttatacctgcttggaattattctctagttcatgtttgtatatcctgcctgtggaattgt

SEQ ID NO: 135832 - DNA, 445 bp, Homo sapiens
tcttaaccacaggcctacagttattctgagaaaaggggaagagccaactcagccaagtccatccagggacctgtggatgcaggggacagtggaggactagggtggccaggatagagacctccccagtgtggccaggatagagacctcttgggtgaggccagcatagagacctctcagggtggccaggtagagacccatgggacatccttggctggctgagcatctcctagtctcctagcctgaagacaacaggatgaagaggagaatcaagttgtctattttcagtaaacctgtagtttagcaactttagtagcctttagtaaaatacatagcgtggtttccagccccactgaaaccaattatcctttatacctgcttggaattattctctagttcatgttgtcgacgcggccgcgaatttagtagtagtaggcggccgctctag

SEQ ID NO: 135833 - DNA, 155 bp, Homo sapiens
cttctttacgggtctgcatgttactgcaattacttcttcatgtacaatttaattaattaaatctctcatacatttttaagcatcttctttccctaccaaacctacaaacctatatgcccttgaaaccatcttctcttttgctcctgatgcaacga

SEQ ID NO: 135834 - DNA, 109 bp, Homo sapiens
aagcatattttataaagtctctccaaacctgcttgttattgatgttgttaatacaatatttagattccattttgaacattccagctggcaaagattactgaatgtcagt

SEQ ID NO: 135835 - DNA, 321 bp, Homo sapiens
cttcaagccataagccgttagtagtgttcttttgaaaaagtcagtattggctgatcacagtggctcacgcctgtaatcccagcactttgggaggctgaggtggttggatcatttgcactcaggagttcaagtccagtctgggcaacatggtgaaacccccgtctctacaataattataaaaatcatttgggcgtggtgcatacttgtagacccagctactcgggaggttgaggtaggaggattgcttgagcccaggagtttgaagctgcagtgattcagccactgtactttggctcaggcaacagagcaagactctgctac

SEQ ID NO: 135836 - DNA, 172 bp, Homo sapiens
tgtagcatcctcacctctcagtcttcgaagaaagaattgaagaattaattaggctttggcttaagggaatgttgtggcttgtttaatctatatagaccactcagactttctccatctcagcagtaaggctgtttcactttcttgtttgcatgttcactggagttaacacttt

SEQ ID NO: 135837 - DNA, 703 bp, Homo sapiens
caaaatgtctgtagtgcgggaggctgcgcatgtgtgagggcagggggtatatgggaaagctctgcaccttcctcacaattttgctgtgaacataaactactcccaaaaagagtctttaaaaaataactaaatcgcaagcactgtcctttgtgttgttgttgttgtttgcttcccaaagtgctgagattacaggcgtgagccaccacacccagcaacaagcactgttctaagtgtatcacataaatagtcaaatgtaatgccaacaacaaccataaaacatagctaataataatcactaacatccatggaccaccaatctctcagtgacttaggactttataagcactaggtcatttacctctcataacagcctatcaagttcagtctgttctgccataatgcttgttttggaaatgagaacctattccaacatgattggtatatcagggaacaatataagcataatgcagattttgcatttgctcttgtgtgattttgtcagtgggaaacactgtcaggggttggtaaactacagccctctggccagtggtctgtttttgtaaataaagatttattggaacacactcattcattgaacaacaacagcagagttgagtcattgcaacagatacgtctgcaaagttgaaggtatttattatctggacttttaagaaaaagttgtgaagccctgtgttatgggaag

SEQ ID NO: 135838 - DNA, 563 bp, Homo sapiens
agtacttcccacttcccaggataggggtagaggtgcggggacagaggctgtccagggacagtatcttctctccagttacactcccatctgccagtttgcaggtgtagtgtcccctcccttccccagctcctcagggtgatcactccctctgctaaccaaagccaatactaccctctgtactcagagccagattccattctcattatgtgtatttatttgatcatttgctgggggtctgctgtgtcctaagtgctggggactcagtattaaataagacaactccttgttctccagagtcttccagcagactctgccagagaaaaatatcttatctaaattcaacaattacaggactatgtgatccctgtagaggtatgcatgggatgcaatagctgatagccatcagtagggccaaatgagttcttaaatgattgaaaatactttcatactgatgggtaaaagccacaacccgagtccctggccacttccctgggataccactcactcacatgccaaaatagaatagaataattacagggttaagcccaaaacgggacctgctc

SEQ ID NO: 135839 - DNA, 1854 bp, Homo sapiens
  misc_feature (803)..(803): n is a, c, g, or t
tatgtagattcaaaccccattattagtagttttcttctaagtagacaacctcttctttacccagaacttctctttgtaaccgtttcatccatattaggctgtgtattttaaacaaacaaataaaaataagttgatatttatcttccttcttagtcaaaatgcttcttggaggttggggactctttctttgacgtgttctgtagagtatatttcagtttgtctttttagtaaagatggcaacatctcattggattaggaaaaattgaaaaccatatgttccatgtaaagaaatcatttattgtttcgatatttgtgccactcaaacactgaatgctttatttctgcaaaagcatattgattcgttttctgcagtgaatcttatatttttcaaccttcttaaacaatatattctgaacttgatttagtctttacatgatgatttcctgataatcattattgtattagtttcctagggctgccataatagaatatcataaattgggttgtttaaacaacagagatttattggatcacagttctggaagcaagaagtctgagatcaagctattagaagggatggttccttataagggttgtgggagggaatctgtttcatgcctcttgcttagtttctggagtttatggcaatcgttggaattccttgacctgtaaggcatctccctgatttctgccttcatctttaatatagcattctcccagtgtatgtgtgcccatgtccaaatttcccctttctctacaggcataagtcatacttgagtagagaaccaccttactccattacnactgcatcttaattagggaccctatttccaaatatggtcattttctgagatacttggggttagaaatttaacatatgaattttgggagggcacaattaaacccataataattatgaacactattttttgtgcagagctttaccacaatgatttctgcaggactcaataatagagatgtttgcaagctgtacatagttcttagctttgcatacttttatttctccctcacctcctctgtctcctcttcattctgagatagagccatcatttcttacagatatcattgtactttcttccgaaagtgttttcttcccatgtaatatgaatggagggtccagattactggtgttactgtgtattaaagaagaataaattggttccaaattaaagtctccttggtaagtaatgatgtatttgggcaacagcgtgtaccttatggcatttcttttcatttcccaagggctctattttccctcttctgggtttttgactatgttaacttgagataaccctataaatgaatataagattgctggatactaaggtaccaatatattattttctccttacagaaaactaaagaaatatatctcatagaaatactagaaattggtgatcttgtttactaattgctcaagattttgctcactgatataggaaaatcacagttcccttttgggtactataagatgtgaaattggatttttacagtgtctgttagacttccgtcattcaataaacataatactagagcagaattgagttgaaatcaaatgttgtgagtgggtaaggtaatgtgcacatccagttctcagcaggtggttctaagcaggatgcggggcctgcaccccaagctgctaacctatcaagggtagcccatgtggttctgagggcaccgtgctgatgagcacccactgtggttctgattttggcagccacggctgaatcaagtctttgatctttggagtgacttctgccacagtgagcatatctgtttgttttgcccctccctttggtcattattccaacctggcagtacaggacaaaaaaa

SEQ ID NO: 135840 - DNA, 441 bp, Homo sapiens
tcctgagtgagcatgggtaatttgtgtcaaggaatttgtccattttatctaagttattgggttattgacataaaattgttcataattttccttattatctttctaatgtttgtagaatctctagcaatatcctctttcttactccctggtgttggttatttatatcttctcttttattttccttgatcagtctggctagaaccaggttcttcctgttgttctatttcattcatttacactctgatcttttattctttcttttgctcgtttggggtcttacttgctcttctgtttctagttttataaagtgaaagctgcaatcattgattagagacagttctacgctaaagtcataatgacattttatgtaatttcttttttcttttttttgagacagagtctcgctccagctcgggcgacaatgcgagactccatctccaa

SEQ ID NO: 135841 - DNA, 575 bp, Homo sapiens
ggctgaggcagtagacttgcttgaacctgggaggtggaggttgcagtgagccaagatcgtgccactgcactccagcctgggttacagagcaagactctgtctcaaaataaattaactagttaattaattaataattgtaaaggaagggtactaaagacagcacttgggcagcagcatgaagcatagtgtttccaaaacctagggcacagattgagtgcctaaagggcctgctggctttgttatttttgaagattccatggatggtgtatcttctgtagaagttaagcaattctgaaaagcaccatacactcccagtttgcccagatgagagaataacaaggggaagggcccaagaaggccagttttggtcctttttcaagtcaaaccacatccatccctaccgcctccaccaccaggggctttaaatgtattttcttattggatccccaaaaaccctaaaatggaactgcctatccccgtttcaaaaaccaggaggcctagcctcactgaggttagctgacaatggagactgcactctgcacacaatccctcctgcactttccacccctgttctg

SEQ ID NO: 135842 - DNA, 316 bp, Homo sapiens
  misc_feature (23)..(23): n is a, c, g, or t
  misc_feature (28)..(28): n is a, c, g, or t
tgaaaatatgctcagcatcgggnccggncgcggtggctcacgcttgtaatcccagcagcttaactggctaagttgaaggcagctcaatttggagtgtaatcttgggatttgacattggttcaaaagcacagccaaccaaaaaaatagataaatgggacttcatcaaaatttaaaacttttgtacatcaagggacaccatcgaagaaagtgaaaagacaacctaaagaatgagagaaaaactttgggaggccgaggtgggtggatcacaaggtcaggagttcaagaccacctgggaaacatggcaaaaccccatctc

SEQ ID NO: 135843 - DNA, 262 bp, Homo sapiens
aaaaaggatccttatagaagagactgagaggtaggaagggaacagaagtgatattgcagaggcctgaggcagacactgttaaagagggaggcacctggacacttttgctgtagacaagtagcccatctaatcctaaagagcccctttgatatggccacttaatgacgtatgaaatacttcaaaaatgattttaaaagtgtttaaaataatgggcttctgtgtcatttccataatattattctgggtgcctgccatgcgcaag

SEQ ID NO: 135844 - DNA, 456 bp, Homo sapiens
aggatgctggcaaagaatataaattggaccaagagatttaaaagaaaaggagctgaggctgggcatggtggcctgtgcctgtagtctcagacactcaggaggccaagataggaggagtgcttgagtccaacagttggagaccagcctgagcaacaaagcgagatgccacgttttaaaatgctttagttagttagttagttagttagttagttaaagatagatagatagatagatagatagatagatagatagataaagatagatattcttataagaaaaggagctggaatactctaagtgccaaactgaactgcccaagacttagcaaaaaacaaagcacagctgcttctcttcaggtcatgcctatgacagatgataagatctttttttggttgctagtgacagctgatttaagacagatggattcaggaaaccaagaaatgaccactgataaca

SEQ ID NO: 135845 - DNA, 169 bp, Homo sapiens
ccctgatggcttacccaggcctcgcctgctctgcacaggaccgtagaccccatgctgaggggcggccacagaggtgtgcagtgcaaagccacagaccaaactgcaagtaatttgttcatgtaagaattcagctcatgagctcagccctggcacaggctccagtcaacca

SEQ ID NO: 135846 - DNA, 320 bp, Homo sapiens
gacagacataaataatgtacatactaaataagtaaaccacagccaatgttagaaggtaattaacgccatggaaaaaagcattaatccaggttaaggggatcaggagtacaaaaggggagtactttgtaattttaagtagggtggttagggtagatcttattttaaaggtaatatttgagcaaagacttgaaagaaatgagaggagacagctgtgtgggtatctaaggggagagcattcccggaaaaggtaactggcaatgcaaagaccctgagtcaggtacatgtttggtgagttcatggaacagcagagagtccaggct

SEQ ID NO: 135847 - DNA, 377 bp, Homo sapiens
tatgccttttcccccctctatcaaatgcaaaccctttcacatactttgagttttaaaactagttaaaatctgaaggagctatttttaaaatatacataatcatatagtaatagtaagaaccacgacttcagccatatggatcatacacacacagcccacataccattcaactctgctaggcacttctaagtccacgggcaatgaccttcatagatttcataggcggaattcaataccttgcgtaataattgaagttacaaatgcccagtccgttagacttacttagaaaaaaacaacacaactctgtgggcttcctatttcaaaagctgtgtgggcaaggagcagaaagcaaaggttaattttgcaaaagaaatcaa

SEQ ID NO: 135848 - DNA, 386 bp, Homo sapiens
cttctggctacctttgactcctggcccaccccgactgtgctaaatgctggtgtggcccctgcacagaagcactagctatcttctggtccttctccacatcatcattcagcaaaccacttcccttgtctcgcctgcaaaccctttatggcaaccactggtcaacagcagctgacattcaaacagagcttccaatgtacaggatgcgatttccggcgcattataagcattgccaatgccctgtgatgggcaccggggtcagcacccacgtcccacttcagagagagattgttgctcagctgcccagagtcccttggcagacaggtggttatggctctcagcccttttggggatcaatcctgctggagagagacctctctggggccatg

SEQ ID NO: 135849 - DNA, 485 bp, Homo sapiens
gccatgtgagaagccctttgcatttccctgccttgtcctccccctgattccatccagaaagctctgcgatgcttgaggtacaatagccaaccggggatcagacggacaagaactacacgcctagcagagcagcaagcaggaaggaagggccagctccgtgcagacgttcctgagggggtacccgcccggactgcctactgcggacttattatcacttgagaaaaatacccacagtgccctgtgcctgtcagctgcagtttgttggctggactagctacagaaaatgaccactggcagtttttcccaccgttggtaaaatcctgcggtggtgcaaaggggcattgagcctcagaaatttttcctttacttttcccaggctgtctactcacttcttcagtctaattttttccaaactagactgggcacagggatggagagaattcaagtacaaattctcaggattttgctgttcaccgtcctttcca

SEQ ID NO: 135850 - DNA, 428 bp, Homo sapiens
tccaggaaagggaggagagacacatatatggtggattactaccagtggggtttttatgtttttccaaaaatggagctaggtgaaataaagtttggggagcaatcttctgctattgctgttgtttctattatactgctagtgctaccagtagacatttgttgagggccaactgtgtgctaggcattgtgcttagtgctttgtgtacattatcttatttagtgatttcatcagtcatctgaggtaggtgctagaacttttcttattttacagatgaagcataaatgtagagagaataagcaacttatccaagttcacacagttggtaagcagcatagctaggtcttaaggcattggtctatttcatgccaaagtctaagatcttaactttatgatcactacctccttaaaagatcactgagctgtgattt

SEQ ID NO: 135851 - DNA, 401 bp, Homo sapiens
ctcctcctccttcccagcttctctacttcttcctggcagtgtcctcagagtctctggccctgtcctggagcttggtttcagtagcagcagagaagagcagaggagagtgccctgaaagtggggcagaatgaattgtagctacacaccaccagctcagctccagctctttgaaagtaaatctgggtcacattagctgtgggctggaacatgaccacgtgggcagaattctgtgcaggcagcagaaaagacagccaatctgtcctttctctgaggtgcagggcccctgtgggaccccagttggtgagggaaggtggtttctggattgcaaggtgtaatgccatcttaatgccatcatgcttttctaatgacatcctaggtgacatagagaaaggtatggaatg

SEQ ID NO: 135852 - DNA, 335 bp, Homo sapiens
ccctgcttgccctcaacactacatgtaggcctcagcttccacacctagcatgtttgttaagcaagactaagccacatgaagcaacagggcaaggggagggcccttgtgttctcagggtcccacggcagaagtgtggttccgggagaaatgggggagtgtgcccttccctgaacaagcatattccctcagtgtggaggagcccctccaaaatttacaagtgctgtgatgacacgatgctcattcagaccaccggctgcagacagattgcagaaatacgtaagggctctgtccttggaggtaggatctggttgctccttgttccctaagcttggccc

SEQ ID NO: 135853 - DNA, 256 bp, Homo sapiens
tcgctcacgctgggagctgtagaccggagctgttcctattcggcctcttggctcctccctaccttttgaatgtatcttttttactcctaatattgtttatttgggttctctctctgttttcttggtgattatcaccagagttatgtcaaatttattagatttctcaaagaaccaccttttggctttgctgatccttttcatttaatttaatttagtttccatttattcagttgtttttttctaatttgataagttt

SEQ ID NO: 135854 - DNA, 297 bp, Homo sapiens
taaatgagatttggcttcaaggctgttgagaattctctggaactgctggtgctcaagttttctctggagtagagctctaagaattctgattcactgtaaggatggcttgctttctcttaggtctgatcccaggacctaatatgacttctggtaggctgagtgttttctagtggtcctaaattatactcagatcgctagaaattctttagatgtcatttagggatgtcttgtgacctaacaggaaggaactgctgtgtgtatctccacacagggaagtagacagtgggaagtgatgag

SEQ ID NO: 135855 - DNA, 341 bp, Homo sapiens
gctaattttgtatttttggtagagatggggtttctccatgttggtcaggctaatctcgatctcctgacctcaagtgatctgccctcctcggcctcccaaagtgctgggattgcaggcatgagcgaccgcacccggccaataatggtaatttttatcatttctaatatttaaaccttaaaaaaagttctcattttaactgtacctcttaaataatattcaaaaatagtgatgttaaattattatctcacttgagctttattgaggatgcttctagtatttgttaatcttaatggttcagttgaaactattaaacgtgtggtctgaaatgcatgctttgttca

SEQ ID NO: 135856 - DNA, 109 bp, Homo sapiens
agaaacctctctcacccgccagcagtgaggccaggaaggagagaagggatcaaaatgaaagagcccacacctggaacacaatccacagaaacaaaagcctgatggaggg

SEQ ID NO: 135857 - DNA, 278 bp, Homo sapiens
cccgcctccgcctaccaaagtgtggggattacaggtgtgaaccaccacacctggctaaatatttactttttatttgtttaaccagtatagaatacatgttgttatgggagaatggttatttccctcataaaataagatttaatgaacatatttgtgaaaaatgtcctagggtaatttatagccaataaatgtgaaaatatgagatgatattggggatcagaatctgtggctggagttggaaaagggaggaggaagtttcacaactaccatgcacattt

SEQ ID NO: 135858 - DNA, 645 bp, Homo sapiens
gataattcatagagattttccctacaaagtctgacatagtcattctgagatgacctaatagctggggagtgcttttcttcccctataaaataacaagtcccattccttccctatcctcaaaggatcaccaacatttttaaaacatttctaaaacatttcaaatgttagaaacatttttctgtcttatgagtggaattgcaatagaaggaatgaaatgaaatagtgggtgaaagtacttaaatgctagttactaagaccgagatcattgcagaaggagactacagcaacagtccagtgttattcatgggatgggtacaggtactcctggtgcaggcaggaaagtatttaaataccacacacccaccaaccttgaaaccttgagccacgcttaggtggcagggattcctcactacttacctataaattgggaataacaacagcagctttccctgccagggagaataaatctggtaatagatgcaaagaccttactccactgcctggcacaaaggaaactctaaagtagaagctgctattattactaattattattattattcttttttagagacaaggtctagctctgtctcccaagctggtctcaaatttcctggccttaagcaatcctcctgcctcagcctccca

SEQ ID NO: 135859 - DNA, 466 bp, Homo sapiens
gtgtgtgtgtgtgtgtgtgtgtgtttgtgtatgcacatatgtatgtgtgtagttcctgaagtctcctattaatggtatcaggaaatagcaaatatgagaattgcatccaataaagaatttcacggttgtgctaatgtagtattgttgtgggttgaatttgtgtccctcaaaaagttatgtttattggcagtttccagacagggggaataaagtatgtttaatttttaacttctagtacctgtgactgtgaccttacttggaaataaggctgagaagatgtaatcaagttaaaatgagatcatattggaggccaggcacagtggctcacccctgtaatcctagcactttgtgaggctgaggtgggaggattgcttaagctcaggagtccaagactagtctggacaacatagtgagaacctgtctctaaaaaatatgaaaaaagcaaaaacaaaaacaaaaacaaaaa

SEQ ID NO: 135860 - DNA, 552 bp, Homo sapiens
ccagcatgggtgacagagagagatcctgtcttataaaaacaaacaacaaacaaatgaataaacagaaaatctgtaaaagtctaaagaagatcaggccatagatatgtttaaaaataatgaaattgatccacttttcaagaaacagactatcaactgccaggagcaaatcttggagtcaatgtcttagtttcccaagactaatccttgaagctattgaaataatgaagtaaaactgattttaatttttactctattaaataaaaaataaaaaagccaaaattgacaaatgggatctaattaaactaaagagcttctgcacagcaaaagaaactatcatcagagtgaacaggcaacctacagaatgggagaaagtttttgtaatttatccatctgacaaggggctaatatccagaatctacaaggaacttacacaaatttacaagaaaaaaataaccccatcaaaaagtgagcaaaggatatgaactgacacttctcaaaagaagacatttatgtggcaaacaaacatgaaaaaaagctcatcatcactggtca

SEQ ID NO: 135861 - DNA, 414 bp, Homo sapiens
ctcatctccagactctaggcacatgactggaatgccatctgcctcctcaccctccatcccagcttctcccaagttgtactctgtgccacatcagccaaaaaagcctgtgaaatgccataccccattcttcctcttactgatctgaaacatacacgaacaccataaagcctctgataaggcctgcaggaaagaaacctgtctaaaacatgttttaaggcagcatctcccaaaggtctaactccagcacatctgttcaagtgacaccttcgaacattcagcccatcagtattccatagacacttccacacccctgtgatgtggccggccgtgcttggagccacgccactctttctacatcctgttcacctttcagagctcagtttcagactagccttctccagaatgcctttgctg

SEQ ID NO: 135862 - DNA, 337 bp, Homo sapiens
ttagctaatgggaaagaaggtagtgccagaataggccggggccctccccagagcttggaaagtctctgaggatttgcaaaaacatcccaagagtcatacagagactggtgggggaagcagtggttccctgggcattctttcctgcttcccctgttatacacaagcctgcatctgatccaggtgaagcagatggctgtctgtactattctggggccctccaggcaacagtgtaaatgctgtccccttcctccagccaacatttctgagattaccaccccaccctcttccagatgttgttaaccagaaaacaaactcctttcctgttacccaccagaag

SEQ ID NO: 135863 - DNA, 591 bp, Homo sapiens
tttgataaaatgaagagatagaaagtatttatatactcctattttaaacatgacagggctcaataattaatgaagaattttaagttggcttttaattggctattttgtgggtgtaagctagaatcttcattaacttatagtaatgaaggtaaagtgttttagaaataagcctgattacatatgtgatagcttcttaaggagttgggctgctttcatgcaatataacacttagaagactattttatagaatagatactccacaaatttctgttgaatttaatgcagtaaaattaaaatttaaaaagcacttaccaagcacagtgagtttagcttctgaactcatccccatagcttctactctaatttgggaggtgtcatcaatagacaggtctttgaatgtgatcgaatgagttttcccttcgtcttgcattgagaccgacctggtggtgtgtaggcgctggtcattcttgaaccatttaactcggatgttatcatgagataactccacagtaaatacagcactttccttctctttggcagttacatctttgagaggggtgaggaatttgagccggattcctatcaagaaaa

SEQ ID NO: 135864 - DNA, 470 bp, Homo sapiens
cgcaagcaatcacatataaaaacttcattgtttatgtggatatgtattccattttccttgttaaaccaaacaaatttctattccatttctcacatttcttgttttgtccccatgcccttttagctatttcccctttccaaaatgctccccacagccacgttctggatgaagctctcctagacaaaccctgcctggctcttgctgcttagacacgccaggaaccccttgcacaaagctgggactggtttatttgatttgtctgcctagcatgcagtcaccaagtttatagtatctcctacaatgaactagaagttccctaagggtgaggaccgaagtctctgcttctgtgcccatcactgtgctcggtacccagggaggtccgtctcaagtgaggggttttccatgcgtgagaaacagtatgttttagagatcctgccttgagcaaaggatacatgggactaggacacagg

SEQ ID NO: 135865 - DNA, 143 bp, Homo sapiens
gccactgcactccagcctgggtgacagagtgagaccctgtctcataaaaaagagaaatctgttcaaggtcctatgttctgtgacagagaccagcaataaacattgaaatatggaaggcgatttcaggtagtactgagtgataa

SEQ ID NO: 135866 - DNA, 195 bp, Homo sapiens
gtgacagtgaatatctgtgttcagatcctgttacattgatttttgagttttatgctaaattttatgagatgaaactcggtactgtttagaagtgctcccatatgactcattgtttacaaaataattttaaatggaattaataaagtaatacgtttattgtctgaaagaaatagatacttttgctttttttttttt

SEQ ID NO: 135867 - DNA, 140 bp, Homo sapiens
cctccacccttccctgcctcctgcctctccctgtctgcccttctcgggacccaggctccttctgtctgtccacaagcatgctcaggtctccccatcttaaaaacaaggtctggaccccctgaataacctctttcttgcat

SEQ ID NO: 135868 - DNA, 342 bp, Homo sapiens
catttcattttattttatttcccttcattttaaaaagacaccttaaaaaaaggtccaccgggtagcgtcctggaagcacacaggacagcaaggagaggatggttttagagaaagagggctaggctgagagacttgaccttgaaacttccatcctcttgcccttgggtgtaaatgatttgaatattgagaatgtcttgcaatataaagccagagttcacgaggctgtttgttttgggttctattaggcctgagggagtcacagagcttgaagagcggaaaagtacaaaagagttattagaagaaactctaagacaccccttacctccatcaacaatgcttcag

SEQ ID NO: 135869 - DNA, 308 bp, Homo sapiens
gggcaccctaagaaattatctttgtgaggaacatgtaaaatgtcctgaggtccatattgatcttccttcctccacaacgagaaaataacaaaagtaaatatttggggccacgtttattttggtaagataagttccagtctggtttctaaaattagggattctgtggaatgcacgtggtttggggcatcctgcggagaactttgtctcagggatatgtagtttcttatgtgttgttgcttgcttggaaatgtgcatctaaaccttccctcacgtctgctcatctgtgcagacccagtgccgatggtagg

SEQ ID NO: 135870 - DNA, 495 bp, Homo sapiens
gttgtgaggacataattgatacttaaagactaccgatatagcaaaattactaaggtgatggctgtaggattacaagaggggcaattttttttcttttctttgttttttttgagacgtagtttcactgttgcccaggctagcgtgctatggcaggatctcagctcaccgcaacctctgcctccccagttcaagcgattctcctgcctcagcctcccaagtagctgggattacaggcatgtgccaccatgcccggctacttttgtatttttagtagagacggggtttctccatgttggtcaggctggtctcgaactcccgacctcaggtgatccgcccacctcggcctcccaaagtgctggaattacaggcgtgagcaaccgcgcccggccaaaggggggcagttattattattattattattatttgaaatggagtctcgctctgtcgcccaggctggagggcagtggtgctgtctcggctcactgcaacctctcc

SEQ ID NO: 135871 - DNA, 408 bp, Homo sapiens
tttaagagattaatttgaaagagttcttgatacaaacagaatacaaatctctcacagtaaattcatcatgaatatttattccagcctgtagttctcttaaagaagttgctaatactgatgtttgattaatccatcttttcttttatgatgtgtgtatgtttcccacctcaagagcagatagaaaaaatcttctatgtattttaacatttttgtctttacatttgggcctttttttttttcttttttttttggaaagggagtctcattctgtcacccaggctggagtgcagtggcatgatctcgctcactgcaacctccgccccccaggttcaagcaattctcctgcctcagcctcccgagtagctgggattatagatgtccgccaccacacccagctaattttttata

SEQ ID NO: 135872 - DNA, 171 bp, Homo sapiens
caggatatgccacagatgatgtctataaacccttatttcctttttcttccccccagtgggtaatagggaagtaggagagaagccattaggcagcagggagcaaaaggcaaaattaaatgcttttgtagacactttttgcactttttgcttcaaccagggagtcggaggttg

SEQ ID NO: 135873 - DNA, 754 bp, Homo sapiens
gttgtactacttttgtctcctcaaattagtttaaattaacttttgggaaaatagtggctatgaaaaaagaggagcataaagaaatcgatctgcttacaaatttgcatttagatataaaaatattaaatcctaaacattgtagaacttcagttctatactttttaaacattaaatcttttaagagaacttgcataataaagattttgccttaatctgaaacatattcatagatctactttgagttcagagcctcctttctctatgcctgtcattcagttttattatcaaacatttgcgttctatatatgattaatgtaatacacttttagatttcttaaagacgacaattgcatggacaattcatcacttggtagcaacttatgatattgctagtgatgcctaaaacagctatgaaaatttgatctcatgtacttttgtcggaacattttaaaatatcaagtataaactcttgatgccaaaaagcaggctttgctttttaatgatagacactattttcacatggagtcagttatgaattattttgcctctcttaccactttactaaagtcttctctcattaccctagctgaaagtattgctttgtcacctgaattactaatatctgattacttgcatggttgtaactgggtaaatatcatgcagtaatacactattttttagacttgtactcccagtggaagcctgtctccagatcttatgcaaaagtccaataaatgaagcagaattaatacaa

SEQ ID NO: 135874 - DNA, 531 bp, Homo sapiens
cattgcacagggctgtagctgcgctaggtattgcattccagaaagctccttggcttttaatgtgtggttcttcttttaagtttatcccatggtatggtctctgaagttcttggccaaattcttaaagctggactggccatctttccagtttccctccatcctcttgtgctcctctaagttctcaacatccattatttcatttactcaagaaatatgtattgggcacccatcaggatacagggatgaacttgtgaaacacactgaattgccaaaaggaaaaatactgcagttttagactgtggaataataacaatgaccagaactcttaggtgaaaacatcttagtttcacatggactcaggagagactgtcttttcttttgcactgcttataaggcattaggagagtaggtataatcacgtttaggtttgaatcagttagcagctgtgctggctcttctctgaagtgcttgccacaaactcagatttctgtatttatgctggaattacctcctttctcctcctctgtggtc

SEQ ID NO: 135875 - DNA, 184 bp, Homo sapiens
tacttttccaagggcctgggactggctggacagacactgcttataaggcattaggagagtaggtataatcacgtttaggtttgaatcagttagcagctgtgctggctcttctctgaagtgcttgccacaaactcagatttctgtatttatgctggaattacctcctttctcctcctctgtggtc

SEQ ID NO: 135876 - DNA, 317 bp, Homo sapiens
tttgattttgtggcttcaaatttgctcaagacttgttaagttgaccttgttactgcacacagaaggaaatcacagtcggtgtctcttctgtgagggaacctgcctgggagtttgtggccacgtgttcatttttaagacacgaggctatacacagttaaaaagccaattcttggccgggtgtggtggctcacgcctgtaatcccagcactttgggaggccgaggcaggcagatcacctgtgctcaggagtttgaaacaagcctggccaacatggggaaaccccatctctactaaaaaatacaaaaattagccaggctt

SEQ ID NO: 135877 - DNA, 170 bp, Homo sapiens
ctggagcccatggttttctcctggagctggttttctcctggagcctggttttctcctggagctggtttctcttattaaattttccatcagccttgtgactattagaaaagaacactgtcacattataacaatgactgagtaaagagcaaaacagaaaattgtcatctact

SEQ ID NO: 135878 - DNA, 809 bp, Homo sapiens
taaaattgtttattcaaaatgtgaaatggggatggacataaaagaataagggaaaattatagaaacttcatttttatattaattttatttacaaatgttcacacaaattaatagtaaaatattcttatttggaggattatgaaccaaggtgaataactttcttagagtaatttaagataatggaggactttataaaaataaaattcataatcttaagagccttgataaacttgattttaacttttggtaattgaacgagctgcactgatcaggggaaaaaaattctactaatataaacttggtattttggaaattagaaagtcaaagcaccacaaatcttctagactatgagtaactagagtaactagtgttatctagagtaacattgattcatattctatgtgtccggggatggttatactctgagcttatagctttcttttttgctagaaccctacacttgtttacttttcctgagtagctttttttggtgatatttttaataagtggaataatgaaaatgttcaccgtgtttatagttttaccttataacagtagttggtgtacagttcaagatttgtattttggtttttttattattcagccagttcttttgtaagcagttattttttgcagtgttcctaggttttcacttgaaagcttaagttaatatttttatccattgattttggagggatatgtttattaacattattgtgcttttggtaatttccaagagccagggcaatgaatcctatcttcttcattgtcatccacacaatgttgtaagataaactattatcacatat

SEQ ID NO: 135879 - DNA, 475 bp, Homo sapiens
cccgctctgaccctcattgaccactcctcctgagactctctgctctcaggtctcagcagcggctctgctgtggccagtctctcctttcagggtagaccactgagtgtccacctagaacagaacctttctgtgcacctgggtaacctgaccatcgcctcgtgttcataggatgagctgctaatagtggcgtttctttcccaagcagccatcttttggtaaagattatcatgcttgtatagaaaatgctaatggtcacagaattcctgacataaaaagtctgtcacagtttgtttcgcagaaacatttttaaacaaagatctaatgttgggcatataaacaaggcagtttactgtagattcccagtgcttctctttgcatttgtattaggcttgcaaaagagaaaagggtcttaacatttagcataggaagcaatgtcttgtgatggtgctgtaattggaagtcagtgacctgtatc

SEQ ID NO: 135880 - DNA, 864 bp, Homo sapiens
agaacccccaaaaacagttgccctaaactcagctcaagtgtgatttggtaaggccatggtctctcccattttacaaatgggagcaccgagatacccaccaagaaaaatgaaattcttccctcacacctcacaatacaggtgcatcatttagtgttctgtagttgtaagtcatagaaacaggctctggctaatacaagagctgaaagactaagggggagagctgggcggcttggaagatgcagatgggcaggaatccctggatggcttcctcaaggagaagctacaggaaggatcttgctcaagagaaagagtctgattggcctaagttacatcctctgttcacccttttgccaggtgagtgaggggccactcacttggcacatggactggaggaagggtggttcccaaatgaagagcaaggtgctgttacccaaaggcaggaaaatagatgtgggccaggccaaagcccacctttcgactattgtgagtactgtagggaaggatactgcccctgaggtctgcaggcttctatatgtaagccagccagaggtgtccatgaatgcagtatcagaaagtcagtcggatctataagcaccctgtgtgcagagcactctactaagggctttagagtgtaccaaggagtggagacatgctctcacttctgatttgtgagcttgacagggatgaatgtaaccacataagttaaatgtcatgttagacttgtagccccatatagacaaggattttaatgtccccaagctaagactctgggtgggtgcatgtccattggcccaggaatccagatggaaaccactttgtggaaatgaaatcttgtgcctaacatgctcactctcttttgccctc

SEQ ID NO: 135881 - DNA, 284 bp, Homo sapiens
ctcctcccccccgggagcctctggggatcacacttaccctgaagagggcccagtcccctttggaggggtagagggctcaaccttcctgctctcataggctgggaggggaggggctctctgatggtattcccccacttgcactgtttagggtggctgggtctgtctgtcagcagcagagccacccaggatctctaggaaggtggagtcccaggctaatggcagggcaatagctaggagggagagatagcaaggcagactctgcagtatgtgcactgggacagact

SEQ ID NO: 135882 - DNA, 292 bp, Homo sapiens
gattctgcatttcttaaaggcagaaactgttttagttatctttttggtccacatttgtagtagttgttgatatgcattgaattgatcagatttacttttttttttttaatcttgaatacttactagcacatatattgtgctagatagtaggaataaaaagataagtaagacacaattcctgctgaagaggaattacaatgtggtaaaacaggtagatagtcaaacaattatgatgcagcatgataaagtttagtaatagaagtttcaagaaagtatttagtgccaagaagaa

SEQ ID NO: 135883 - DNA, 1707 bp, Homo sapiens
attgaatgattataagaatttttaaaaatacatatccacattttttcatacacagatcaaaggagtgtttcaaagtcttttacatgtaacaattgtgacttcattacaattgaatgaggcatttaaccatagtatttctcatgaggatgttactcaaaacgatgccttacatataaaaaagcacttaaatctaatataaaaatattacaaattctaagccctcttaaaccctaatttatgtataaccttatattataaaatgcttaatactgacacaattttaaggcttttaccaaagtgaagcctgtgatcagagaataatttgaaactctaagttctgataagacaaaggttgaaaatgttgatcttgaaaatcttcatatgattttccagtctgaaatatgaaatagtactgataagggtactaatttttaaaagaagattttgaacttctttaatgagttgtttttaatattcttctaaaagtctcaagaggtatataacacaaggctaaaactaatattctaaaaatagtatgaaattaaagaaaactctaacttctatctatgcaaatagcggagcttccacaattcatctgttagctagaacttaagatttcactgtttacatctttcatgttttcattcacttatttattttgcaaatatttactggatgtttcctatatgccagggttctaagtgctgtggatttaatagtaaaaaagataaatgtctctgatctgagtttacattgtaataggtccagaagaaaagacagacacctaagtaagaaaaatataatattaaatgctatgttagagcattaactgcatgatgaggtagtgactgggtggctactttagagtgggtagtcagagaaggcttctctctgaagtaatgtgaaggacaagaagaagctgaccatgtaactgttattccagtaaaaagaaacagctatggccaaggttccatggtagaagaaaacttggtaagtgtaaagtataagaaaaatgtcaggaacaaggacaggaaccagaccacataaggctttgtattcaagataaggaacttggatttttttaactgtggtaaaattcatataatataaaatttaccattttaaccattttaaagtgcacagttcagaagcattaagtatattcataatgttatgtaaccatcaccactatctatgtccagtatttttccatcagtcccccacaaagaacttcctactcattagcacttattttccattttcccttcccctagtccctggcaaccactaatctttctttctctatgaatttgccaattctgaatatttcatataaatggaattatgcaacatgtgtctggctttcacttagcataatgttttcaaagttcatgcactttgtaccatgtatcagtagttcattcgtttttatgactgaataatattctttgtatggatacactatatgatatggtttggctgtgttcccacccaaatctgatcttgaattctacatgtttaggagaaacccagtgggaggtaattgaatcatgggggcaggtctctccttggctattcttgtgacagtgaataagtctcatgagatctgatggttttaaaaatgggaggttccctgcacaagttctcttgtctgctaccagtgagatgtgcctttcaccttccaccatgattgtgaggcctccccag

SEQ ID NO: 135884 - DNA, 454 bp, Homo sapiens
atgggaagaacaaataaaagtaagaagagagcacctttggctccaatcgtcttgatttctattttgactgtggtcaacattaccaagcatttaccacattccaggaaacatgttcagagctttatgtggattcttttgtttagtctttattagaaccccatgaggtaggtactgttgtagtgggcattttatagatgagtaaactaaggcacagagaaatttgagaacctgtctgcagtcccctggctgttaagatttggaccgatgcttgtctgacttcagaccctgcactctttattaatgtgacactttgcacagaactactcattttctttgcttttgcctagcaaggcttatttcatcaatctgaaacacttacccacttttttggtccataattaagaactgatctctgaatcaaaatgctaactactttcaaatgcagaatatttcc

SEQ ID NO: 135885 - DNA, 489 bp, Homo sapiens
tggagtatttataactgccagcagtccttggttgcagtctattcagaaaggtattaattctcttacgcttatgatttgcaaaggaaaagaaactcctcagaccaaaacaataacagcaacaacaaaaaactgttttcgtttgggaggaggaccaaaaggaaggaataagggtcaggcactgactctacaggtactcactgatctctttgttatgactatggagttttctttactttattcccacattttttcactgcactgggacctgcattttttttttctgtttttgtcatttgtcacgtttgactttctgcttttccttagttaggtcatgagaccaatcacagaaattatttatttatacattttcaaaatgtcttttcctctcctacccttcttcatgctatttcaaaaattacaccactggataaatttaaatgttcttcctgttttgcatctaaacccagcagtgaactatcactagagaaa

SEQ ID NO: 135886 - DNA, 706 bp, Homo sapiens
ttttatttttttccaaacagtagaacacaacttctctttagaggatggtgaattttactacttgaagttatgtagaacgttaggactattccagggctattatttttgaaggccattgagaatctgaattagtattgttatcccattttacagatgaggaaacagcagacagtataacaagttaaccagtgacaagattaaattagaccttttattctctttcttaactacatgagtctactagtttttctgtcatatacttaaagctgaataacaaatttgagattgtaagttaactctggttccaaaacaggataaatacctgttgaatgaaatcagtgccatgggattgtttgaacgagcttggaccttgatttccaggtctacctgaaatatagtcactcttacaaacacagattcttttccacaaacctctgaggtagggagtaaaatatggaggccaagaacacaagctctggaaccagactgtgtgcgtttgacccaggttccatggcctactgtgtgaacttaatctgttgcgtaactctctctggcttagtttcctcctctgtaacatgaggtcattagtagtacctgtctcataaagttattttatgcattaaaggagttaatatattgtgtaaagcacttagaatagtgcctgtcaaataataagcactcaataaaagttgttgctgctcttata

SEQ ID NO: 135887 - DNA, 426 bp, Homo sapiens
tctgtctcagaaaaaaaagagaaggggagatgcttacttattatcaaagtaattagaggccagacatcgtggcctgtaatcccagcacttcaggaggctcagacaggaggattgctttagcccaggagttcaagaccagcttgagcaacatcacaaaacccgtctctacaaaaagtttaaaaattagccagtcatggtggcgtccgctgatagtcccagctactcaggaggctgaggtggtgggaagatcacttgagccccagaggttgaggctgcaatgagctgtgattatgccaatgcattccagcttgggtgacacacccagaccccgtctcaaaaacaaaacaaaaaaaacaaaatctgaaaggatgccaaaacataaaaatcacattatcagtttaattgtgattttgctgggaaactgca

SEQ ID NO: 135888 - DNA, 313 bp, Homo sapiens
taatagatgactgtagaaatagttttgctcaactacttgctttcttgatgtcaatttatgttgatattacttaatgattgtttgcctctttttgagtgtaatgaagtgaggtagatttgacatttatcttttgaatactttgtcttgaatggcgcataatataagtgaaatccaggcagaagtatcagccttcttccaagcagctttcttttgtaccatagaaagttttcttttgtttaaaagtttttcaactacaaatttctttaacagatgcaggtttttaaattttttaatctatttcttcttgagggag

SEQ ID NO: 135889 - DNA, 143 bp, Homo sapiens
tatgatttctcacaggaaataatatatgggaatcagagtgtgattttgaaaagaaaagtatgaaagaaaatgagtaccttgtgagattaagcactacaccagcttgattctatcatactaatttatcaaaccctgtgttatta

SEQ ID NO: 135890 - DNA, 258 bp, Homo sapiens
gcccacccaccccccaaaaaagcagcacttaaaattcaagaccaatacgatctcaggcaacacggacactgttcacagaaggcactaaaagcatggtgcgcccttaccacctctctaaccccaggcactgagagcctgctctcactcaacatgccctccctagccgcagagtccgcgctcgctccactcaaagcaaacagtgagctgtcttgcccacagtgaactccgcacacaggccacttgcgcacagcacgctcc

SEQ ID NO: 135891 - DNA, 225 bp, Homo sapiens
tggaaacatataaaacattgatgaaagaaattgaagaggacataaataaatggaaagccatgccatgtttatggattggaaaaatcaatattgttaaaaagtccatacaggttaagtatctctaatccaaaaatcataatgcttcaagatctgaaattgttttagttctgacataccacaagtgaaaaatccacacctaatctcatgtgacagttcacaggcaaa

SEQ ID NO: 135892 - DNA, 301 bp, Homo sapiens
cttgccattatctagaggtttctaaaggctttcaattaaaagagcaggaggcctcactcctcaataataaagaacagagaaaaccacaggcttacaggccagtaaccccacccagccacgcgagtggtttcacagcccttcgaaggaaaggccacctgctgctcagaccacaggcccacagatgggcaggcagaggcatatctgagcctgcccacccacctcttgtccacagagacacagtaatctgtggtaccgtgagacctagaacacaaaccccatcatccagacctgaactgcttct

SEQ ID NO: 135893 - DNA, 298 bp, Homo sapiens
agactccgtctgaaaaaaattaaaaagatcataaaactcacatggctcctaagcaccctaggagaaagttctgctcccttccatgacctatggggccctgtgtgacctccaacctctacccagttctccaggcccgtctctaagattccatgctcctcatggaatttcacatcctctctcccgtaggagcgaattataattcctcaagccctctttcccctcccatcctttgcccatgctgttctttatgtctggaattcccttttctggtctccttttcatcctttcctcctcctca

SEQ ID NO: 135894 - DNA, 424 bp, Homo sapiens
caggaaaggtcagatgacagcaagatgggggactaggagggagacacactgttgaaaagtggccatctgttgtgtggaacccctattaacctcaatagggaaagtaccaagttcaagaggccaaagaagagcccaagagccagcaaaatagacatggggttttattagggattcacaggggagagagtccagtggcagtgggttggacaggagacccggcttccctgcagaaacggtccaatggcggcgggctggacagcacaacagcccagtggtggcaacctgggcaggaaaaccgcaactgcttgcaaacagcatgcagtttattcagcattttcacttaacaccctcctcttaacctccacctggcaaccttcatccaacccagaactcagggcctggatccccctgcatggtccatgtt

SEQ ID NO: 135895 - DNA, 498 bp, Homo sapiens
cactaatacaattcaacaaattctgaagattaatttaatccagactttgcctgtttggcatgacagtggagagcatttcatctgaatctcaaggaagccactaaataactactttgtgagtcctggcaagtctatgttgggacacttccaatccctccctctgtccctctcctgctgacacggtcccatccagtgcctggccctggtgcccaggaaggtggcttgaatggtgacagagatcacaagagaggtttctgactcctcttgacatacttctggtggaatgaaaatatgtccaattctagatttcttctgatttcagaacatttattgtattttttttatttttgagacagcagtctcgctctgtcaccaggctggagtgcagtggtatcatctcagttcactggaacctccgactcactggttcgagtgattctcctgcctcagcctcttgagtagctgcgattataggcacatgccaccactcccagccaa

SEQ ID NO: 135896 - DNA, 522 bp, Homo sapiens
attcagtcacatctcaagcaaccatttattctgttatttaatagaaggggagaaacccagttaccataacaactcacatccacatggtaattatggagtatctaaaatacagcaaaccatacttttcacagtattttctaggggaaatgtgtaataagcacagataccacttctccccattattattcacaatgttcacctaattgtttcatattgcacagatgctaacattattccttgtacttcatatcaaatatgttttttaaaataaagatgacactgaaagaaaaaggcaaatacacttcttatattttaaatgattggttacagcatatgtacttttctagggaaaaaatttaaaggaggcagaaaaaaattaatttattaggtaaaaagaatcaaatgattatcacttgaaaaaaagaagaaagaatgtagaactaaagattttatttagaacagagctgccaataggtctggataagttttctctgaaataaaaatgaaaagagagctcattac

SEQ ID NO: 135897 - DNA, 145 bp, Homo sapiens
tgtgaagcaaaggatggacaaccagttgatgagacagagacaatgcaagagaatgttccagcctagatcaggttagaagttttgtgattctaaccagaagaggcattggagaaagggaagcctgccagaatatatccagggcctg

SEQ ID NO: 135898 - DNA, 525 bp, Homo sapiens
taatgcatttccaccatatgccaccttgagacactaaccttagcggatggctccaggggcacgtaggaagggttgttgctcttaacgcggcccctttttcaagaattgctgtagttggaagcagctccacagtaatttcctatagccctggggagtatgcttttaccaatggcacctctagatgcccttcactctctcttgcagcagggccaagactgataacgaatggcccgtgggaagcgcacgaagtccaacgtgaatcaacgatagcactaatgaaattgcttcaagttctagagcagaaggtaaactgaatgcctttcagagacatttgaacttgtgcccttccaagttcccagagaagaaagaaaatgcacatggggtgcaagccaagagtaggaacaagccatcacatatttcttatttttacttaaaatctgtaacacaggccgggcgcggtggctcatgcctgtaatcccagcactttgggaggcagaggcaggaggatcatgaggtcaggagttt

SEQ ID NO: 135899 - DNA, 292 bp, Homo sapiens
cccacctgccttctgagttcacaattatatgccaaagagactacagtagctttctagtagaccagaagtctccctgcacagtgtatcacatgctgcaatttgctttgagtatagatacctatgcatataagtagctgtatggactgccataactctagggactgctgccgttgctatagccacaccatagcaatagggaccgtcactgtagcaatagtgaccactgccatagcaggtctcatagctataggaacctctctagctatagcaaccaccatagctacagaggccc

SEQ ID NO: 135900 - DNA, 788 bp, Homo sapiens
atggaagatttgctaccctgatcttttccctagcatacttctaaagttgattgaatccctgagtatcaatgaagaaatcagagtttaagtggctagggagagccaggtataaagactgattaatagagtacttcagctaattaaaaatttaaatagtaataatttatgaatgtgaataaattggaaggcagcaaaaagcatgattatagaatattaagttcaattatatatagacagtccagtttcctagtgaataggtcaagattatttgttttgttttgtggcactatcatagttcactataacttcaaactcctgggctcaggctatcctcccacctcagcctctgaagtagctgggactactcacatgcgccaccatgcccagctaatggtttttttctttagagatgggggtcactatactgcccaggctggtcttgaactcctaagctcaagtgcttctcccacatcagcctcccaaagtgctgggattacagccatgagccactgcatctggccaagatcaagattatggatattggtatgttaacttttaaaataaaagtacatgggctgggcgcagtggctaacgcctgtaatcccagcaatttgggaggccgaggcaggcagaccacctgaggtcaggggttcgtgaccagcctggccaacatggcgaaaccccgtctctactaaacatacaaaaattagctgggcatggtggcacatgcctgtaatcccagctactcgggaggctgaggcaggagaatcacttgaactcgggaggcg

SEQ ID NO: 135901 - DNA, 169 bp, Homo sapiens
tagagacagagatgctgttttaggtcaaaattttattgaactctaattcatatactaaagtttagtgttgaattttgctccagcaatgtagcaggcatgattaactcccactacaaaatatctacaaatgtaacaaacatagttttacatgcaaaccctaactcattac

SEQ ID NO: 135902 - DNA, 508 bp, Homo sapiens
ggcaaatgacctattagaaaggaggtacttgatagtagggtcagcaatgtggcagaataggaaactcctgactctccctccacccatgaatgcaccaaataaatatctattcatggatcagttctctctcagagaaagtcagagactagttgaaagattcctacccatggggcaactgaggaaacatcctcatcgaatgggtaggaaaaactgaagcacgctagggccagaccccaccctgggcattgtgccataaaattgggaagggaagccccagcatccaacttctccccatggagaggagggttttaaccccacatatagcatcctaacttaagattcttcatggtctggctcttaattcaccaactctgggagcagaggggattagacatacgcaagtctttctagaccacaggaaaaaagccgcagttagatatgggcatttaagcacttcagagctttcatcccccaggagcaatacatagaagggacttaagaaatgaag

SEQ ID NO: 135903 - DNA, 752 bp, Homo sapiens
cgccgcctcccaaagtgctgggattacaggcgtgagccaccctgcctggcctccccgagcattcttttctccatctattcttaaaataataagaacaaaacaccatgtattaagcacatacgcagcaggaactatgctaaatgcttcacaaatgttaaatcctcacaacaatctttgaagtgttatctctgttttaaaacgagaaaaatgaggctcagggaggttaggcaatttggcagaggtcacacaactaggattttcatcctgtgttatctgaccctggagcccttaactacttatgctaataatgaacatttatacactactttgggcgtgtccaagtttggtgggtcctgaagcttgtgcaatctggggtgctctttaagaataaaattattttgtactcataagaattatgagtacaaaattagattcagagcctgggaaagggtcctggcctagctttacagtttacaaatcatttcacaagcaggctcattttatcctcctggcctccctgtgaggtggggattatgatattcatttgacttaggagaaaacagagcctcaggaggttacctgcctgtccaagatctgaattttatgggaggcagagctaggactgaagccgctgaccacaaccgtgtctttaagaagacaaactccaggcagatggttgtcagacagctagacatgcctaaacaaaagcagctgtgataacagctttctctgtggtgtttggggagaagaca

SEQ ID NO: 135904 - DNA, 634 bp, Homo sapiens
tctttttttatgtagtggcgcgcacatacacacacacacaccccaaaccaaaatgtcaagtctatgaggaagagcaatggaaagagcctgaagggaaaagattgggaaccatggcattttgagaacctatctacagctactaaggctttttgggtgttgggaaaacaggctattgcttaacaagggtggggaagagcgacatgaatgtcatgaaacaagaatgggggcatcaaagacaaattcatcattactttgctggtgtcttacaggactttcttccctttgaaaccttagtaacattttttcccctttggaaaaaatgtcagaggtcctaagagcgggcctgaaaaaagaaaggagtagatgtctggaagaagcagaagccgcttccaaacattacttggataatggtgccctcttctggggtgactgatgtgacaatgtgactctgaaaccctgtctcctactacttggttcaaaacatccagaaagtaattgactaaagaaacaatgagactaaaggttaagcacttacaaaatcatttaaaagtttgaatttaggagctagatacatgcataaatatacatatgataaatgtattcaaagatgtctcttttcctttttttttttttt

SEQ ID NO: 135905 - DNA, 380 bp, Homo sapiens
attcagctggcctagctgctcacacagctgctggaagttcctgactctgctgagcaactaaaacttcaaggtgcttcaggttggacttcatttctataaactctccttgtctctggggagagaggcagtgagaaagacagtgatggacagtgcaagtcagaaagcacaataaaacatgagaacagaccaatggatgtgacagcagaaccaaggcttgctccttgtagggaacctctcagggtaagcacaattacactcgggagttgaacccctggggcccacatcatgtcaaggaaccttggggaaggaagctagtctatatgctggcccctttccaagtggcctgtgctggcctcttgtcctagctgaataatttgcaa

SEQ ID NO: 135906 - DNA, 718 bp, Homo sapiens
gagccggaggggctgcactgcaccgagcttgcacagggcgaggcgggggcaggacctgggacccagccaccccggaggaaaccggagaggaagccagcttggtcttgctctctgcctcgtcccaatccccggctcttaccaaatgcagatccgttggctgaatgccttttagtctgcatacatgcatctcataccgcacagcccaaatttctacaacttgtccaggtgcagtctcctcagaactacaaagcaagaaaagatcacctttgggctcaggaactcacagtcgttctccctctcccggaaggcacaatgaccaggacagtaccgagctttgcagccatattgaactcaccatcaactcagcacattcaactcaatcagtcaaaatcgtcttttcctgctggtaaataacactgaaatacaaggaagctgagccttcacaaggtcgaacaacacatttgatgccatgcaactgagaagtggttcaagctggatttgaacaaatgtagtcagactctgcagcctatgcatgtacccactgtgctatgctgtcgcattgaataaaatgcagtgccctcaatacgaagtcaatgtgagcacataccaagaatcatattgggaaggagaagtcctcagtaggcaaaacactttccagcaatgttaacctggatgtggatagaaaggagacttgggaatttctctgacttaattcatc

SEQ ID NO: 135907 - DNA, 1520 bp, Homo sapiens
gagccggaggggctgcactgcaccgagcttgcacagggcgaggcgggggcaggacctgggacccagccaccccggaggaaaccggagaggaagccagcttggtcttgctctctgcctcgtcccaatccccggctcttaccaaatgcagatccgttggctgaatgccttttagtctgcatacatgcatctcataccgcacagcccaaatttctacaacttgtccaggtgcagtctcctcagaactacaaagcaagaaaagatcacctttgggctcaggaactcacagtcgttctccctctcccggaaggcacaatgaccaggacagtaccgagctttgcagccatattgaactcaccatcaactcagcacattcaactcaatcagtcaaaatcgtcttttcctgctggtaaataacactgaaattgtgggaagatgggatggtaagaacaaagtctgtctctggaagcacgggcgctgtctctgaagacaaattgatcgtaacacaagcagacccggtggaacgacctccatgctgaaccctcagctccccctgcatttggaccatggcctgatggaaggtgcgagaaaccctgtgaccacgttacagcacaggggcagcttggccaggccaccccttgggcctaatttttctccctggccaaaggggtcagactattccagtgctgtctgctccctggcctccagagtaatcaaacacacatgtttggcgctccactaatcagggaatgaaataaagctagatgtttccatatgttgattcaatttacaagcaaaagtaagtgtcaggtagggggcacaacagtaaggggtgagcagtgaagaaatgattccacaatgacgtttcgtaaggagcaaaaagatgaggaagaaaaggggagacacatcattgaaggccaggctctgtgacaatttatatttgcctatatatctgtatctctctctgtcttatctaatgaaataccaacaacaacctgagaacagttctgtcttccgtcacagataaagagactgatctcagagtggtacagatctacaaccacgtgaagaattggatttatattcatctgactccagaaagttcctgagattcctctgcttcatcatctttcccatgccctttaaaacacgttatcaaatagcaacaggtggtgcaataactagacaaatgattctcagcctttttctttgccattagcactcccggaaggagacgtgttggacacttttccttgtcaccaccccatgaaccttccataccacaggtatactgtgtattcggttatgtatcatctgtacatctgtttctaaaacacagaaacagtaagagccccccatccaagaatccattttaatcctcttgggtgtgatgtcaccccccaaaaatgcatatgctctggagtcagtcacaaacacattacgaatgcatgatcacttaagaatgttaccaaagtttataaatttgagatgataattctatgttatttagttcattttagaga

SEQ ID NO: 135908 - DNA, 448 bp, Homo sapiens
ccaaatttctacaacttgtccaggtgcagtctcctcagaactacaaagcaagaaaagatcacctttgggctcaggaactcacagtcgttctccctctcccggaaggcacaatgaccaggacagtaccgagctttgcagccatattgaactcaccatcaactcagcacattcaactcaatcagtcaaaatcgtcttttcctgctggtaaataacactgaaatagtgccaactgttagtctttcttatctggagtcttcttcccaagtttttattttatgtgaaagcattgtgttctcagcagttattttggtctccatattttatagccaacccctttgatttaaaatattacagaaggctctgttccatccctttttcttcctaaactgatttttgcaaaacccttaatctgggcttgaaggaaatacaatcttttcctacacaattt

SEQ ID NO: 135909 - DNA, 465 bp, Homo sapiens
gagccggaggggctgcactgcaccgagcttgcacagggcgaggcgggggcaggacctgggacccagccaccccggaggaaaccggagaggaagccagcttggtcttgctctctgcctcgtcccaatccccggctcttaccaaatgcagatccgttggctgaatgccttttagtctgcatacatgcatctcataccgcacagcccaaatttctacaacttgtccaggtgcagtctcctcagaactacaaagcaagaaaagatcacctttgggctcaggaactcacagtcgttctccctctcccggaaggcacaatgaccaggacagtaccgagctttgcagccatattgaactcaccatcaactcagcacattcaactcaatcagtcaaaatcgtcttttcctgctggtaaataacactgaaatccactgcactccagccttggtgaaagagtcagactctgtctc

SEQ ID NO: 135910 - DNA, 1229 bp, Homo sapiens
gagccggaggggctgcactgcaccgagcttgcacagggcgaggcgggggcaggacctgggacccagccaccccggaggaaaccggagaggaagccagcttggtcttgctctctgcctcgtcccaatccccggctcttaccaaatgcagatccgttggctgaatgccttttagtctgcatacatgcatctcataccgcacagcccaaatttctacaacttgtccaggtgcagtctcctcagaactacaaagcaagaaaagatcacctttgggctcaggaactcacagtcgttctccctctcccggaaggcacaatgaccaggacagtaccgagctttgcagccatattgaactcaccatcaactcagcacattcaactcaatcagtcaaaatcgtcttttcctgctggtaaataacactgaaattgtgggaagatgggatggtaagaacaaagtctgtctctggaagcacgggcgctgtctctgaagacaaattgatcgtaacacaagcagacccggtggaacgacctccatgctgaaccctcagctccccctgcatttggaccatggcctgatggaaggtgcgagaaaccctgtgaccacgttacagcacaggggcagcttggccaggccaccccttgggcctaatttttctccctggccaaaggggtcagactattccagtgctgtctgctccctggcctccagagtaatcaaacacacatgtttggcgctccactaatcagggaatgaaataaagctagatgtttccatatgttgattcaatttacaagcaaaagtaagtgtcaggtagggggcacaacagtaaggggtgagcagtgaagaaatgattccacaatgacgtttcgtaaggagcaaaaagatgaggaagaaaaggggagacacatcattgaaggccaggctctgtgacaatttatatttgcctatatatctgtatctctctctgtcttatctaatgaaataccaacaacaacctgagaacagttctgtcttccgtcacagataaagagactgatctcagagtggtacagatctacaaccacgtgaagaattggatttatattcatctgactccagaaagttcctgagattcctctgcttcatcatctttcccatgccctttaaaacacgttatcaaatagcaacaggtctcccttttctgactctcaccctcttctttctttcccttataaggacaattgtagtacagg

SEQ ID NO: 135911 - DNA, 1078 bp, Homo sapiens
gagccggaggggctgcactgcaccgagcttgcacagggcgaggcgggggcaggacctgggacccagccaccccggaggaaaccggagaggaagccagcttggtcttgctctctgcctcgtcccaatccccggctcttaccaaatgcagatccgttggctgaatgccttttagtctgcatacatgcatctcataccgcacagcccaaatttctacaacttgtccaggtgcagtctcctcagaactacaaagcaagaaaagatcacctttgggctcaggaactcacagtcgttctccctctcccggaaggcacaatgaccaggacagtaccgagctttgcagccatattgaactcaccatcaactcagcacattcaactcaatcagtcaaaatcgtcttttcctgctggtaaataacactgaaattgtgggaagatgggatggtaagaacaaagtctgtctctggaagcacgggcgctgtctctgaagacaaattgatcgtaacacaagcagacccggtggaacgacctccatgctgaaccctcagctccccctgcatttggaccatggcctgatggaagataaagagactgatctcagagtggtacagatctacaaccacgtgaagaattggatttatattcatctgactccagaaagttcctgagattcctctgcttcatcatctttcccatgccctttaaaacacgttatcaaatagcaacaggtggtgcaataactagacaaatgattctcagcctttttctttgccattagcactcccggaaggagacgtgttggacacttttccttgtcaccaccccatgaaccttccataccacaggtatactgtgtattcggttatgtatcatctgtacatctgtttctaaaacacagaaacagtaagagccccccatccaagaatccattttaatcctcttgggtgtgatgtcaccccccaaaaatgcatatgctctggagtcagtcacaaacacattacgaatgcatgatcacttaagaatgttaccaaagtttataaatttgagatgataattctatgttatttagttcattttagaga

SEQ ID NO: 135912 - DNA, 241 bp, Homo sapiens
ttgttgtgtccagggttttctgtgctaccttttacattttatctgttttccccagatacctaatgtataggaacaaccagcaaaaactattcttgaactattgtgaactcctaaagtgttggttaaatccaaacagcgtgagtagcctacgactgccaattcactaccgagtgactatcgacctgtagatttataatacagctgagatggaaggctggctgagttccttcatttcttattg

SEQ ID NO: 135913 - DNA, 398 bp, Homo sapiens
ccaacattgcccactctggaatccagtatccattactttttcctagtccaactaagcagccttcatgcccagtctaattgggtggggggactgccacaccttcagcttcattgtatcttccctcttgggaagcttctgcttttcaacccaaaataagggttctcttgtacccaggtagccctcttttaagctgattttggctagcatgccaaggagcttatcattcaccctagtgtgcccagatttttttctagcctgaaataagtgagctgtcatccaggtctggcacttttgtgcttccgttagtactgcagggagtcatcctcaaagagcattatcaccactgacctgtcaccagaaaggcacagtgatgatgataaatttggactgattcatcc

SEQ ID NO: 135914 - DNA, 367 bp, Homo sapiens
ctaaagtgctgggattataggcatgagccaccgtgccccacctagtatatggaatttaatttagaaaaatagagttgctaacagtggtttttagtaaatccttgggattagtgacatgagagactagaatcttccttgactgtgtctctgtggaagcttccagcagtgctgcccctgaagcaggagagcgagcctctgtcctaagattgctacaggattccgattccctgttcttcccatggctaccccagaatcctttcaagaggcccccagacccagaagatgctccctccattgcttgcctcaagtagctcgccgtggtagaaccaatgtctgcagaaaggtcattgcaagcccggcttggctt

SEQ ID NO: 135915 - DNA, 769 bp, Homo sapiens
ggctcagcccttatatcaacttgctcagttctcacaaatctgcgaggtagggaagctgttataaccccctgctccagaggaggagagcggggcccacaggggctgtgtcatttgcctagagtcacgcaggagtgagtagcagaggcagccgcaaacccagctccgagtcttcctctgttccctgcactagactcactcctctcacgtcagaagtggagaaaggggccagaggaaagctgacgccattggcaaaatcacgtccagcctgaaggggcccgtcggctctaactaatgcctcccattcacattgcccatcttcccatctttcaagaaaatccagaaatccagattgctaggtaaaacctggttttaaatggatccaattttgttttaaccctgcgactgagcccaaacaaagcacatcagcagactgcacttagcctggggccggcacgtgccaccctgctgttgcagctgtctctaaggactgcgctgtcctctgcctgtctaaagaccctggggaactctgggtctggtggccaaaggggagtcacctcagtgaacaacagctccttcagcccattgatatgaataattaatttctgcgtgctcactgccagcccacaaaggttaccaacaagctcggcattcaggaagccactctgtgccctctgagacaatgaggacaggcgtggggggatcctaggggtgttcagggagccccataatgaagcccagcatggtgagctgtgctcagtcgaacggactg

SEQ ID NO: 135916 - DNA, 302 bp, Homo sapiens
aaaatattaggtaattggcacaagaatagtgaaaacgttagaattttataaactatcacaattagcttttattatagataaaatggacaagttagaatcacaaaattgggtagatatactagacatgcaatctcaattcatgcttttaccaaaataaattcagatttattaaggggttaagtatacttttaatcaataacaaataaaatcttaaataaaaataaaacagcatgtttgcctgtcaaattagcaaataaaaacaatagagtacactggtggtagttaggataaatgaaataggt

SEQ ID NO: 135917 - DNA, 444 bp, Homo sapiens
tccccaggatacaaccattatttgcccttcctctgtgcttccactgtatggtgtgtagtcccctacccttacagagtaactatttacacatctggccttacctctagaccaccctttcccctgataacttgttacatgtttatcttgactactttttaaaatagtagtaataaaaattgtagaaagtaaaaaatttcctcttcaaagttccccttcttgttaaagaataaatcataagtgttagaaataatagtttctttttattaaagactaactttcttcaagcctccttgctttgtgctagtaactctttgttaagccctatcctacgtaactgttggacatgctcacaggcacgttccagctcacagcctatgccccttccttatttggaaatgctattgcttccttaaacctttcgtaagcaacttctttgttcttcct

SEQ ID NO: 135918 - DNA, 847 bp, Homo sapiens
cttgggtgatagagtgagaccctgtatcaaaacaaacaaacaaacaaacagaaaactatccctctgaaatattaataagaaaaaacatataggaataaactcattgtagaaagaataacaaactgaaaatatcgcagaagaaatcactgaagtatatgtagcatgaggatagtttttcagttaaacttttaagaaacagtttgatgtcttgtgagatatttaaatgtttagccaacattggtgtatgtacccctctgaacatgtgcgtgtatgcacagttttcatagttgaattcaacaactgtgtattgggagagacattgtaccaatcaccacattggatggatcttagggataaagaaatgaaagtgatgtgctccttgttctcaaacagcttatcattgtgttacagaaggaaataaacacaacggacagtaatacagcacaagaagtactaagctcagggtggtgccatctgatattttgttccacttcacctttctactgataactgtatttttcctgtggcgaattcacacctgcctccccagctacattccctctctgttttggggtgtgcatggctgaactccaccctccctagaatccagtggtggagcaagtgagttaggctgagacagacagaaagattgagtgacggccgggcgtggtggcttatgcctgtaatcccagcactttgggaggccaaggcaggtggatcacgaggtcaggagatcgagaccatcttggccaacatggtgaaatcctgtctctagtaaaataaaataaaaaaaatagctggccatggtggtgcgtgtctatagtcccagctacttgggaggctgagg

SEQ ID NO: 135919 - DNA, 784 bp, Homo sapiens
catattgcccagttctttcttaccatacatgtgctaacaaaaaagggaaggtgggagcttccaaggtgtacatgcctggccctaagtagaccctttctattggcgcagcctccggtattcccccatgcaagcttccagcttccttatctatgtttgcagcttgatcttcaggctgctcttggttagaaaagaaatgatttcttgggctgctttttgttagaagggaagttctgctgaggactctcttgcccctaggatctgcctaagtaatttctatcttccgtctgtatcattactttatgggaaaatccaacattaacagatatgctctagtctataagatggggtgaaaacctgacctcatgatgagatcatttggcattgggaaagatgagaaaagaaaatgggaagggaaaatgggaggcttgcggggaggaaactgtggaaactgtagaaactggtggcacaaaagataaaaggggagttactgaaataatactgctttaagatttattcattatggccaggcatggtggctcatgcctataatcccagcactttgggaggccaaggcgggcggatcacgaggtcaggagttcgagaccagtctggccaacatggtgaaacaccatctctactgaaaatacaaaaattagctgggtgtggtggtggatgcctataatcctagctacttgggaggctgaggaaggagaatcgcttgaacccaggaagtggaggttgcagtgagccacgatcacactactgtactccagccggggcaaca

SEQ ID NO: 135920 - DNA, 758 bp, Homo sapiens
caaaaccccgtctctactaaaaatacaaaaattagctgggcatggtgatgggcgcctatagtcccagctacgcaggaggctgaggcaggagaatcgcttgaacccgggaggcagaggttgcagtgagccaagatcatgccactgcactgcagcctgggtgacagagcaagactccatctaaaacaaacaaacaaacaaacaaaccaaataaaaagacagagaatggggaattgaggacatctagtcagttggatagatctggattctattcttagcaattctgtgatcttgggcaatttacattgtcttttaagttatcagctgttcttaggttataaaaagatccattttgtaaattgtgtcaagcagatgtcgaccatttataataaacttatcaagatatgaagttaatttctttgctgtcattcgaaagacaaactgatagggtcagcaaactaccttaaacatgttctcattaaaacaaaaattaaaaacacagctcctatagccagacgtggtggcagatgcctgtggtcccagctaattgggagactgaggtaggaggatcctttgagcccaggagtttgcagccatcttgggcaacatagtgagacccttatctgaaaaacaaacaaacaaacaaaccaaaaccctagcaaagcacattttctatagaagctactcagtggacataattaaaacaaatggtagtatcttgaaaaaattaagacatttagtgtgaaccacatgtctagaaa

SEQ ID NO: 135921 - DNA, 818 bp, Homo sapiens
actgaaaatataaaacattgctgaaagaaataaaaaagatgaaaatgaataggaagacatcctgtgttcatagattgaaagataacattgttaaaatgtccatactacacaaagagatctacagagtaaatgaaatccctatcaaaatgccaaggcatttttttttgcagaaatataaaaaagcctacaatttacatggagtcagaagggactccaaatagccaaaagattcttgaaaaagaacaaatttggagatcacatgcttcctgatttccaagcttattacaaaactacagtaatcaaaacagtgtggtacaggcataaagacaggcatgtagaccagtgggatggaatactagaaacacacgagaaataaatcctcatgtatatattcaaatgatcttttacaaggatggcagcactactcaatgggaaaaggatagtctcttcaacaaatggtattggggaaactagatatccacatgcaaaagaataaagttgagcttttaccttatgccatgtacaaaagttaattcaaaataggttcaaaacctaaacaatatctacagctataaaagtcctagaggaaaacatagagcaaaagcttcataatattggtcttgacaatgatttcttagacatgataccaaagcccagtcaaaaaaaccacaaattgacaggtgagactacatcaaacttaaaaaacttctgcacactaaaggaaacaattaacagagtgaaaaggcaacctacaggatgggaaaaaaatttgaaaatcatgtatctgaaacagggttaatatctagactataaagaaa

SEQ ID NO: 135922 - DNA, 520 bp, Homo sapiens
gagacagggtttcattatgttggctaggctggtctcgaactcctgacctcaggtaatccattactttcaacgaatattttgtgtttctgaaagtccagagagtcacgtaatgtatttattgagcactttctatgttcagggacctactaggtactagggataggtagtggataaggcagacagcacctctgccccactagagcttatattcagctgtagcctcttagtacaatgttaagatgagttggtttgcttcaattcctacagaggccataaaccaggatcctaagaagaggtaaatttgggtaagtgaaagaggggaggctaaagcttagagcatacagctgctgaaagatttaagaactaagcgtgacactgagacaagtaggatggtgcacgaggagaaatacagtttgaggagttgaatacacatgaaaactgaattgaacctaaaataataatagccaacccctggaaagcactggttatgtggcaggtactgttctcatgaatttatatg

SEQ ID NO: 135923 - DNA, 489 bp, Homo sapiens
agaggagggagcatgcctaggtagccccctagacctggtgaggctggtgcgtggggcagcctccatggagaggagttgggcaaggagggaggaggtgctggccagtagagcacgtgtgtctctgtgcgtcagagcaaggacccgggctctccccgtaagtgagaagagtccatggaggttttggggctgaggaggagttttacagatgaccggtctgttcttggcacttgcaattagcggaccgtctgtatccgagtgttgatcgggtggattctaaccctgtgggagaactccccagcccgtagcctgcgctcactgtacctggcagttgtattaatgacgtcaaatgcacagtccagcttgagtcccctctagaacgtgggcagcggacactaagccgagaggaatcgctgtgggttggcagacactgtggagactgactcctggacaggctgtggaatgtgtggaagcaggtacagcccaggcccg

SEQ ID NO: 135924 - DNA, 258 bp, Homo sapiens
aaaaaatgaagctgacatttgctcctgctgtatttgtggtcactagctttgtcagtatcaaagctcacagcatataacatccattttactggcacaggataattctggagcagcagtggcttcctgatcatcactgattcctgatcttggtgcttcttgatcatggctctgtggtggtgggattctgggagctgacatctgcaaggcaacttcccagttaggcagcagctcctttggtggatcagtccaatagtgtaa

SEQ ID NO: 135925 - DNA, 158 bp, Homo sapiens
atttcacagcagcattattcataacagccaaaagtggaaacatccaaatgtttatcaattgatagggtaggtaaacaaaatgtgggctagccatacaatggaatagtacacagcagtacaaagacgggaagggctgacacatggcacaacatggatga

SEQ ID NO: 135926 - DNA, 247 bp, Homo sapiens
ttgtggggagctgacttccagaattatttctagtggggagttggttatggcttaaaagtttagttatcagttagatgtctcacacccaggatatatttgtcccactgaaacactgttctgtggaatcttggttataaatcaacatatagtagtgggatagagagaccttaactactgtgtgtaatggttggtctttctgtagcaaatattgttcagcagtctgccttggggcaggagtggcatactt

SEQ ID NO: 135927 - DNA, 430 bp, Homo sapiens
tttcaagaggaacatgataagatctgctggcaaggatctttattggcatcctgggaacttctggggtgaatgtgtgtgctgagctcaaatcagaatatctgcaggaaaaaaaaaaaaaaaaaagaagaagaaaaagaagaagaagccagaccaggaaagtgaaaggaaatggatatcgctgctggaggcaacgactaatttaagcagagtaggagaaaaactctttttttttttcctttgtgccagttccttttacacgacttcagaacattctatgacaacccagcgtgcaacttggcactgtcagaagagtcctgggaaagaaaggaaatgcggtaagaaatggaaacagagtattgttgttgagagcctggagaccatttgcagagtattttgctcaggggggagtaagaaaataggaaaaacctta

SEQ ID NO: 135928 - DNA, 122 bp, Homo sapiens
gaatgttaccagtaaccactgaatgatttaggtagtggatcatttaccattctagccgccagatgacactgctgacacctggctgacagcatgactataaccttgtgagcgaccatgaaata

SEQ ID NO: 135929 - DNA, 275 bp, Homo sapiens
gctggtggcatgtgcatctgcccccacagaagctcagggggtcttctcagttctgggctcctgagggttgcagaactaatgggaagtctcatgggtccccgggcagcacacagacaatgcctggcctgtagagccctccttgttgtgtgtcagctgggacatttccagaagcactgatggctttttcacagttgatgctgatggactaaaatggtccttgcaaggagttcttttggcttttcctggagaactgcatttaatctgggctaaaatat

SEQ ID NO: 135930 - DNA, 169 bp, Homo sapiens
gactacttttggaggaaaagccttgagctttcttcttcttggaagctttcagcatttgatgacgggtagatctagagccagaattctcctggctctgctgctaacaagctgacttggggcaagttacattaattctgagcattcatttctttttttttttttttttttt

SEQ ID NO: 135931 - DNA, 239 bp, Homo sapiens
ataacagtaacaaccacataaactgtcatgttagctatgaaaagagttggtggaaggaatgggctctcaccaagacagtgaaaaatagaggtaggtggtaaacaaatatgcaaaaggaccattcagaaacccaagcaaactatcattctccccattttactggtgctataaatacctgaaaaaaagtgccacagaaatggattagtgttatcatcaacaaatatatttgagccgggcac

SEQ ID NO: 135932 - DNA, 440 bp, Homo sapiens
ttattagcagcattatggtataacagttaagagcttaagctctggagtcagactgtctggattcaaatcctggttttatcttttactagatgcatgattttgggtagatatttggcctctctgtgtcgcagttccctcttctgtaaaatagtgacactacatattctcttagggttctttgaggattacaggagaagatacacatagagcattcgtacacagtacttggcacatagtagatgctcaataaaattagtttattttttgaggcagggtcttgctgtgttccccacactggagtgcagtggcatgatcacggctcactgcatcactgcagccttgacttcctgggctcaagcaatcctcccacctcagcctcttgagaagccgggactacaggtccacaacacccgctcagctaggtcgttgttacacattct

SEQ ID NO: 135933 - DNA, 354 bp, Homo sapiens
aaaatccgtggagctggaaagcaggtaaacaagtgataacattctagcatatcagagagggttgacccataaggcagcaataggaatgaaaagtcatgaagcaactagatacctctgggtgtgagagtaaaaaagggttaaaagcaggaagatatttgaaaatctgttaagaagcagatggactttccagaacctccctacaaccctgtacagctaggtgactgctcctttccaatcccagcaaaagatgagagctttctcctctgaagaggtggagagggtaaacaaagggtctttggttaggggtcaaccttgtttaattgaacgtgagggtatcatacgaaacactgaatt

SEQ ID NO: 135934 - DNA, 242 bp, Homo sapiens
gcaaagtgcagggctcattatgtgtagatcaaatgacatttatctatggttaaaaatattgtgttgaatatattattctacaacttgtttatttccctcgctcctatgtcatgtagatttttgcagtgctaccctctcattaactgcttagtgttttttggatagacatatcatggcttattcaaccatgtcgatgggcatttaggtgttagctcattttcacactgctataagcaattagt

SEQ ID NO: 135935 - DNA, 585 bp, Homo sapiens
ggttctttggtaataaagaacagaggtttacatgtctgtggctgaaataagatgataaagactcatatgaaatgattaaaggggtgggctgtcagaggaattcaaacatgaactgtaactgggttgcacttcacaggcaccagatacggaggacagtttggattccagatggctccatagactgcactggcagagtgtctgtgatttccatttagtacggtatccccagcatctagaataatgcttaacatataatagaccccagtaattacctgttgagaaaataaataaaaggaagtagtaaatcttcactctagagctttatcaaaatggagaagtgagtggcttcaagtacgtgattgataagagctgctgttagccggctatgctcttggtccttcacatatattattatttgagtatgttcagtcctgtgaaggggtgatggtaccctcattttactggtgatagaatttaaattcaccagattatgacttgcccaagttcgtgcagaatactaatttggagagttcaggtctacttgactctaaaccttgttctggtaactgatgccctatatattga

SEQ ID NO: 135936 - DNA, 434 bp, Homo sapiens
gaatttatatggctttcaatctactgagggagaaggttaatatttttaatccccattttaaaagcctgacaatagaagattaacaaagaccttattggcaatcttataatgctaaggttctaactcttgggcttcttcacagatcacgagcagaccacactaccttaggaaatctttaaaactgctttataagagagtagccttggaaggaaaaaaaaggaagataagaatggaaacttctaaccagacatagactgtaaattgtccagtgggtactgttacctgggaactaaaactaccaacacaaacatttgagtgtttcttctgatataaatctaaagcttagcttttatttctctgttgtagtctagatacggtccttttagtgtacattagagttgaaaattattttgtggtatataaaataaaatagt

SEQ ID NO: 135937 - DNA, 262 bp, Homo sapiens
gtgccccccatattaggtgaggttctgggaactgggaagccgaaggtgagtagcactggaccttgaccttgaagagactgtggtgaatggaaggaggatgagtatatgggggaagatctggcattgttgcaagcctggaatctggggtccccagcaggagactagcaacataccagatcggaggtgataggttagggtggagcctgtggaaatgaagaagaagagataatttggagtgctactctggcttgaggacaggacg

SEQ ID NO: 135938 - DNA, 283 bp, Homo sapiens
gtcatgctagcaagtggcagagctggacctgaaaccacgtagttcagcgacaaaacctgtgctacatttttgttgcatactcacttacctgcagaggccaggcaggtcatgtgaatggatgaagtgggccaaaaaaaaaaaaaaaagggagctagatttcatgttgttccaaagaaggtagccaagcagaccagtgttgctagctagctcttctgactgttcctgggaagccagaaatcctggctttcatgtgaaatctctcaatttattcagattagctcag

SEQ ID NO: 135939 - DNA, 372 bp, Homo sapiens
gcaggggaaaaaaggaagagtctgatactgtgctgctgagcaatgcgagacttttcatgatttgcctcaacaattacagagaacacccctttgacattcaagggtacagactgcacccccactttgtggcgttctgatgtcttggcatataaatattcccgtatgctgtattatttttcagtgttgaaatattggtatttttgttgacacgatgctgtcattgtggtctgttgaaaatctgggctgggcacagtggctcatgcttgtaatcctggcactttgggaggccaaggtgggaggatcacttaaagccaggagttccagaccagcctggacaatatagcaagacccccatctccacaaaaaaagaaa

SEQ ID NO: 135940 - DNA, 158 bp, Homo sapiens
aaacaaaatgaaagataccacctaaaagtgagaggacgtattgtagtagaggaagggctggctgggcacctatcatctatgccccccagcctggaggggtgtttaaggtttgaaacgtgccacactcatggaatactgcacttgcagccggttcaccg

SEQ ID NO: 135941 - DNA, 423 bp, Homo sapiens
tcagaagttcgaggttacaatgagctaattgtgccactgcaccccagcctcggtgacagagcaagacaatgtcctaaaaagaaaaaaaaaaaaagatgtgcaaaacatacacagaggagggaaagagtagagaagtagactgatttgtgggcagaaggcagaatatcctggatagaagaaaagcagatagttgaaaaattaactttgtgggggctagcatagtgtatgaaaatttggatttgggcctctgggcataaagagccaagaaccaataagaattttgacctgcgtggaacaataggatgaaaatttcatgaccaaagaattctggccataataaattcaggtgtgaagaaattagaagaattttcttcagatattcaagccaacatgtacatgccagaaatacaacagaatggatag

SEQ ID NO: 135942 - DNA, 390 bp, Homo sapiens
cagactttcatcctttctaaacattagctgactcctggccagtggctctggttctgtagtgcaggaaatgggctcactgataagacacatctttgggaggcagcaatgatcaggagcagatttatcagttgcagtatcctaggtcatggagatccctaacccgccagggctctcaacatcgcgtggctgcttatttggtatgcttaaaaccaaaaatcttggacttactgaattttgtggttcttctccctccaactcaaccaccccttattagaagctgaaagctgaacaccaacaacattctgtcaagaagaccaaagacagagtgtgtggaggcatcagggagccctgtccaactggcatgagaacagaccattcaatggagtaggt

SEQ ID NO: 135943 - DNA, 361 bp, Homo sapiens
atagccaagacacttagatctaaaagactcatagtcaattcaagcattctaggccaggcaggaatggaggtgggcaggcgttcatcaaacctttaaaatcttctaagtaatataagagtcaaaaagccgaaaggcaagtttacagaactgatttatctataaattttatgcattgagctactgcagtcttggttttagttacagacttgtagcaattagctatacagaacataagcattttgttaaaaccatttaaactagagagtttagagactttgttgtattgcaacactttttgcagtctttttagtaatttgttctaagatggctaataaaaaaataataagatctccccaggcac

SEQ ID NO: 135944 - DNA, 379 bp, Homo sapiens
atggactttccaatctccagaattgtgagagataaatgcatgtcttttatgagctacccagtctacgctattttgttaatagcatctcaaacagcccaaggcaggtaggcagggaatataatgggaagatgaattttatagagggaacaagaggagaaatgggcgtatttgtgaaggagagagggaaaaagtaggagggaatatatagcagatgtgtttgtgagatcataactcttccttgtcagttacgatgtcctgaccttgggcttgactttagcaccgggagcaggtcagcatccctagacttcagtcaacagggagatgagacaaaattgcaacttggctttctagggtacacgtgccgactcaatataccaat

SEQ ID NO: 135945 - DNA, 531 bp, Homo sapiens
tagagttgttaactttaacttgagtagctcctgtgggtcagttgatttattgagtacttgcaatgctaagtttaataacacatgttactgcattcagtaagttcacagcagcctgaaacagggctagatttctctgataagttttccccagaactgtccaataaatgaacatttatgaactgtctgttatattccagacattgctagatgcttgtttaaaagatgaataagatatgcctagcctttggaagcttccaaactggtggtaaggagagtggggagaggtaaattcataaaatatgcataatctgtagtgggaacccaggtctgccctgaggggccaggagtgtgtgtgggcagaaagtgagccagtagtctagctagggggagcacctgtctcttttgtgcttcactgccagcatctgacatcaatgacatgccagaatcacacagtaataatactggagtgattccttgttactctctgacacaaacatttttctcgatttttatttataattttatatataa

SEQ ID NO: 135946 - DNA, 745 bp, Homo sapiens
cccttgaccattttgtttgtttttcgtcttaacctgttttgaaaaaaactttagaccactatcacacacgatgggttctttatgattaaattaggttaaaatttttcacaaaaatacagcataaatgattttgtgaatttcttattgtatcttatcaggatagaagcaataatttcttaaaatattatttaatatccagtacatattcaaatattcctaatggtctcagatgtgtttttttacatcggcttgctcaaaccaaatattgtacaccatttaaaaaaaatcgacatagaaaaatcaattacagtctttttgagggggagggggaactcctaaaccagaataagttcagagaggccccctgaccacagtcttaatttctattccttgtaaatgcctcagagtaattcttaggcttctgctatatggaaactacatccctttgtcttttatacaaattacttgaaaaaaatggaggtaatttctcttgattactttaagaaatgaagtagaatttttgtagaacagtatacaaaccataaataaacggcttgatgaatttgcacaaattgaacacacccacgtaagcaggtctctgacccaagaaacaggatttttcccagctccaaaaagcgccccttccagattccccaagggtacctactctaacatccagcgtcatgggttcatttgccttatgcaaatttcttctctttccctgaaaaaggaagcacgaagtaga

SEQ ID NO: 135947 - DNA, 221 bp, Homo sapiens
ctttcagtaacttgttggcagtccatcccagaaatataccccatttatgtgacttggaagtgtcattaggaagaccgccatagcctctgctccttctgcctatacattgttgtaggtgaagacattttttgaagccttgcatgggcagctaggcttaagtcagcagggaaacgtctgcttcttaaccagtggttttaaccaaacatttttttcagtgaagt

SEQ ID NO: 135948 - DNA, 421 bp, Homo sapiens
tcttccactggctaaatttgaaataatttgagcagtctgtgtggattatgacacactgaaaaaatccacgcacccactatctatttagttttgaagaagaatgtccttattttttggagctgcatgttgaagtattgcaggatgatgtgtcaggatttctgcaacttactttaaaatggtttaccaaaaacactgttcacaaatgtagatgtaaagagtggggaaagcaaaggaggagacattaaccattcacgatctaggtaaagggcatgggggtgtgcactgtactattcttttgtctgcagcttaggaaaaaaaaaaagaggcaggaggggagacaaggtcagcaaataaatacaacatcaaaagttagggctgacagctgaggcagacagctccaaaggaaacattttcttttttc

SEQ ID NO: 135949 - DNA, 268 bp, Homo sapiens
ggtaacaggggtaggaagaactgctctacttaagggacaggtctgtcagacaagcatatatactacatgcatttgtttacatagtctcattttttctacacaaatgatggcatacaatacacactattctgtatcttttgttaattattatatgcattcaataaaatgcacaaatcttatgtgtagaaattgatcatcttgatttttcaaatttaacaatataccttgatatcattcttcaccaagacttaaagaactatttctcttt

SEQ ID NO: 135950 - DNA, 556 bp, Homo sapiens
gcagactcaaaaccaaagtaaagtgacatccagcccctccatatgtgagctttaacttagaattctgcaggaaggaacagattttgtcagtgccatgatttattcatttatttttgattgacaaaaattatatgtcatcccattaataatttatattaataccattaataatttaaaattaatatctttaaaatttcatagctattttaatggtgggcttagttagaagactcttccttgtgctgaagaaaagcagtaaggagcaacatcaccctgtttgtctttagcttttattacccgtgtctttttaatctctccttatgtaggacctcatcttttggttgaggtgattgttggtatttttttctcattcagaatttttacaagacttggccaggcatggttgcttatgtctgtaatcccagcactttgggaggccaaggcaggaggatcacttgagctcaggagttcaagaccacattgggcaacatagtgagatctcatctctactaaaaattttaaaaattaggcatggtgatgcacacctgtagtccca

SEQ ID NO: 135951 - DNA, 1596 bp, Homo sapiens
agcagaaaagtgaactcaagaactgaaaaggaaattcagaaactgaatttcctgaaaaggaattcaggaaccgaaagagaggccaatggaaaatatccaaatgacaaaaaaaaaacaacaaaaaaaacacaaaaacacatgtgtgcggcgcgcgcgacagcgcggcaccccagcaaacaaaattcacaagaaacaaacgcggagagggagcgccggaggcgcaccacgcggcggacgacggcaacaggcgcgccacacggcggcacagagagaagaagaacataggcgacacagtacaaataaggaagagggagacaataacaacaccaaaacaaactacaaagaccaccggcggaaacagaagagaaagctcaacgaaacaacaaacaaaaagaaatagacaatacagacgagagcaatacacaaacgacacccaccaacaacacaggaacagcacaaaaagagaaagcgaccacaaaaaaaaaaaaaaacagccccccacgaaagagtggaaacagaaactaacagaacagacaaacaaccaaacaaaaaaagcagcagacacaaaaaacaaaaacaaccaaaaaaaaaaaaaaagaaacagaaccaaaaaaagcagaaccacaacgcacagaaaagcaaaaaaaagaaaaaacaaaacaaaaacagcaccacacaaagaaacataaagaaaacaaacaccacgagaagcgaacagaaaagacgaaagaaaaaaggaaaggaaaagagacggagaagagagaagcgacaagacaagagcaggtgagatagagaaagagaggaaggaaggacgaagaagaagaaggacgaaagagaaagggaggaggaagagagggcggagaagcggcacagatagtatgaagagagaaaaggaaaagaagaaggagacgactaaataaagcaacggagagagaaacgagaaacacaaaagtaaagaaaagaagacgacaagagacggaaaacagcggaaggcgaagaacacgaggcgacactgggagcagtagaagcaaaagaggcaacgacgaagggaggtagaacgagaaagaaaacgagagagaagggggaggagagggggaagaggaaagcacggaggaggagagagacggaagaagaaggcgggaggaagagagagaaggggggaagaagaggaggcgataggggagggagaggaaaagaggagggggagaagaacgcgaggagcagagggccgccgcgcagaaaaggagaaggacgagaggagagggggaagagagggggagagagggggggtacaaagggggggggaggagaagggaggggaaagggagaggacgagcgaaaaggaaacgacggaggaggcagaaagcagaagaagagggaggggagagagagaaaaaacagaatggacaagacgaacaaggcggcgggcagagccgcacagaacgacaggaaacgacgaggggagaagggacaagatcgggagcaagagaaaaagaaagaaaggaaagcgacagagagaagagacaaaacgaagcgaggaaagggaacacggaggcacggagagaagacgcgagacgacggaaggcagaagaggac

SEQ ID NO: 135952 - DNA, 934 bp, Homo sapiens
gtcaggagatcgagaccatcccggctaacgcagtgaaaccccgtctttattaaaaatcaataattaccgggctttgtgagcgggcgcctgtagttccacctactcggaggctgaggcaggagaatggcgtgaacctgggaggacggagcttgcagtgagccgagatctcgccgctgcactccagcctgggcgacagagcgagactccatctcaaccacaccatttaggacgttgggctacagtaagacttggtaagagggaccaaggaagcatggaagaaggagctggatggttcccagagcaaccagagaaggcttcacagagatgaaattggagctggattctgatgggtaagtaggagtttgcctggtagaaaaaaaaatagagaagggcaggaaaagaaacagcccttttcaaaaaagaggagaccaaacattgcatgcacatatcctttgactcggcaattgcactggcaggaattctgctgttatcctcacacacatacggctccaggcatatgtctaaggatcctcatagcagcaatgtctgcaagacttagtcactgggagtggcctgtggtccctcactaggacactgctgaaataaactatggtacagccataccgtgaattcccacacaaccattaaaaagaatgaaggagggccaggtgcggtggctcatgcctgtaatcccagcactctgggaggccgagcgggtgaatcacctgaggtcaggcgtttgagacgagcctggccaacatgatgaaaccccgtttttactaaaaatacaaaaaattagccgggtatggtggcaggcgcctgtagtcccagctactggggaggctgaggcaggagaatcacttgaaccctggagacggaggttgccgtgagcagagagagcgccattgacctccagcctgggtgacaagagtga

SEQ ID NO: 135953 - DNA, 893 bp, Homo sapiens
ggctactgtcccatgttaggcacccaatgactctggaggctggtgtcaaaacattcatatatatatgtgtgtgtgtgtattttaaattaaaattgtattattgtttgaaagtgctttcaatatgaacgtatcctagtatgatttgtaaaataaaaaacagggtgtgcttctccccagcagtttctagagatctagactagagatctgagactgtcttacagttggccattgccttaccacattgcctcacactggagagaaagagaatgatacgtgtatatttataatggcattcgcttcctgccttgttatggtattaaaatacttaggatttgttaccagtacacaaataactgactaatgatactcttgtgaatacagcagaagtatgtctcatttacatacatgcaaggatatatacttcttaatccccaagagcatgaaatttgaaaatgtaaatttggaatgagtgtgttaattttcaaaaatcagagttagttatactattctttcaattttttataaatttgagctttcaggataaaaagtttttaaaataaatatgttatacttaaagctgaattgttaacgccgtctgggcaagataaaagcagcaaagagctggtaaattattttgaagatttaaaaactcaccaaattaaaactgctgtgtaacccattgttttagaagaaagacctgtattccttcatcttatggcctttgttacatttgttaactccggccgcgtggacggtccgcgggtcatttccagaaaagggttttcctgacacaccaaggggaacgggggggagcacctggggttgccctggggggcctaccttgtgggggggccgggagcatacccccgaaggggggggagaaaacctactag

SEQ ID NO: 135954 - DNA, 306 bp, Homo sapiens
cctgacgcccaccagagctgggctataacaaggcatatggctgggcaagagggtgagaggccaaggccagaggacagtttgagcccaggactttgagacctgcctgggcaacatagggagaccccgtctctacagaaaatttctaaaattaaaaactttagcctgacgtggtggtgcacgcccagggtcccagctactcgggaggctgaggcgggaggatggcttgagcccgggaggccaaggctgcagtgagccgagattgcaccactgcactccagcctgggccacagagcgagactctgtctc

SEQ ID NO: 135955 - DNA, 104 bp, Homo sapiens
agcttcctaaagtaccaggattataggcgtgagccaccgtgcctggctgtcaaagtgatttaggaagaaaatgtggttagtgtacattaggaaacttctgcttg

SEQ ID NO: 135956 - DNA, 573 bp, Homo sapiens
agaaattctgactactcctcctgatgctcatactcttttccagcctggacaaccccacctttctaggatcacgtcctattacctcccatatgagaaatttatgccctgcccagactggtctactgtttctagaacattccatgtgccatttacaatatctgtgcctttgcttacagcatctctgttgctttgatttaaccaccaccaccaccctgcccccatcacgtacacaaaatctaagtcctaacaactctccaacgtccatctcaaaccacatcctgggctctttctctagagtcttggagactccaacctattgagaatcctctctcctttgaacattccgaaccatttagagcttctcatctggtgctttgttgctgctgatgttgctcttgccataaatagctaacgttcctggagagttcactgggcaccgtaactgagctctttgcacacattatcttattggcaccccacggcagctccacagtgtggggaccattatatcgtggtgtagtcgattaagatgctgaggctgagggaggcaaatcccttgcccaagatctcacc

SEQ ID NO: 135957 - DNA, 590 bp, Homo sapiens
caggccggccaggcctgtgatccacctgcccagccacagtccatctgggctccaggacaagcatggtccattgagcaactgagctggtactgggggccagagcctggtgtgggaatgaacaaaactctgatgattccgcagaatgaggaggggacaccatggctcatgcctgtaatcccagagctttggaggcccagtggggaagaatcacttgagccttggactttgagaccaacctgggcaatacagcaagaccccatctctagaaaaaaaatatttaaaactgagctgggcagccaggtgtggtggctcacacctgtaatcgcagcattttgggaggccaaggtggggcggatcacctgaggtcgggagttcaagaccagcctgaccaacatggagaaaccccttctctatgaaaaatacaaaattagcagggtgtgatagcgcatgcctctaatcccagctccttgggagactaaggcaggagagtcgcttgaacccaggaggcggaggttgcagtgagctgtatcatgccattgcactccagcctgggcaacacgagcaaaactccgtctcaaaaaaataaaaaa

SEQ ID NO: 135958 - DNA, 799 bp, Homo sapiens
cgcaatttatttaaatatatatgtatgtatgtatgtatgtatgtatatagctacatatatttgtttatatatgtgtgtgtgtatacgtttatggaatgttgctctcctcagaatttaatctccatgaagacaaagtccatgtctgattttctttcactgaagtattattcctagtgcctaacacagtacccagcatatagtcagcatcaataaaacttgttggaagaatgaaagaatgaatgaacgaatgctttgtggaatccctgcatgacagaagtccttctgttcacaatagacaactgcagtccagagcccattctcttaaaagtctttcttttaacctcaaagccacatgagtcaattcctcaaagagaatgcacttactcctccaggctgattatacagtgaccttccagcagagccatttaggaagaaaagagtcagatctctgatggagccagactagatggagagaagccaaatgagaattccctttctaatgcgttggaaagatctgaagaagaaaatgaaacaaaaatcttagacttagagcctttgaggaattcttgccatctggtggcaataatattaatctgcaggcaaccaagcacttttcctcggctttctatagtatctcaacatttctgaaattgtacaatgattttaaccttggtgtgggtctcctttgatttcatcatgccctgtattctagaaatttatggccttcagttctgggaaattttctcaaattatttcttttagtatttttcttcccaatattttttctttctcttgttga

SEQ ID NO: 135959 - DNA, 234 bp, Homo sapiens
ttccttccgcttgtgggtacatatccaaaggatttgaaagcagcatgtcaaagagatatctgcactcccataatcattgcagcattattcataatagccaagatctagaaacaagtgtccattaatggatgaagaaaatgtgacatatatacacaatgagatactatttagccttaagaaagaaggaacaacatgggtgaacctaatggacattacactaagtaaaataagcta

SEQ ID NO: 135960 - DNA, 533 bp, Homo sapiens
acagaaagcatagaactcaaggaaagctcttaataagaatgggttccggtgagggagctaatttcataaaatagtgccgagaaaaagaaacagacttttgttaaatgggggcagaagctgccagtggattttcacgtttgagatttctttcttttttaatttaaaatccaggacactcaagttacgattcccacagcaacagtaattttgtctgatgcatcaatgacatttctgttgaggaaaaatctctgtttttccggtggtgttgctgcacttgtactgtcgagaagattggtgacagtggaaatcgttgaatttttcagtcctgggagtaaaaatgtatgtggtatagttggtcttagcttttgtctcctgtgcatggactgtagcatattacccatagggttggccttgtctacctaacaacttctccagctggtttgttctagacttcatccctttatggtgccttgtcatttgctctcccacagcctgtgtcctcaaccaggaggaagacctaggcaaaacttagg

SEQ ID NO: 135961 - DNA, 741 bp, Homo sapiens
caactttatgatggaaacaccataaatgctgtgaaaccaaaaactacatttgtagaagtgtaacaagtagaatgaagctatttgaagtccttctattctcagcgctgatgagactctctgtgggtactaatatttgcttcaaggaatcaatttgtaaaagggataaaaacagatgtaaatgtgaccaaattagagaatagctaaatagctcgagcctgtggtaatgttatatgtttttaattatgcctcctttttattccttttggaaagaaatctcggtggacaattttattttatgaccttctgggaaataccataataagatggatactcatacttgctttgaaatcaaccacaagctttgaaatctctactctaccatttaatgtgaaattcaattgaggcctttaaggcacagctcccacaaatccaagactcaagctttcccaatgcagaattattgttaaataatacatgtctcaacaaatcatgatgaaatttgtaaaatccaatggtaaatagaaaatattccaaatctttaaaaagtggtgaggaaaaatgtagaatgttacttaaaagaaataagactaagtaaatgttttaatttcaacactgggagcttcagataaatagggaaaaaaatctatcaattataagatatatggattgtaggccaagaaactatactgaaagaagtatcattcactagtctttattagagaaatacatttaagatataca

SEQ ID NO: 135962 - DNA, 428 bp, Homo sapiens
ttgataagtgataagaaaaagaatttgagtggaccagtaactaaacacattttcacgatatttcagaatagcaaggaaaaggagaggatgttaaaagagtccagaaatgggagtggggtggaaagttgaccacaaagataatttctaggccgggcatggtgactcatgcctataatcccagcacttcgtgaggccgaggtgggtggatcatgaagtcaggagttcaagaccatcctggccaacatggtgaaaccccgtctctactaaaaataccaaaattagccgggtgtggtggcgtgtgcctgtagtctcagctactcaggatgctgaggcaggagaatcgcttgaactcgggaggcggaggttgcagtgagccaagatcccgccaatgcactccagcctgggtgacagagctagacttcctctca

SEQ ID NO: 135963 - DNA, 360 bp, Homo sapiens
gtgggagtgaaagcgtcagtgcattgagccagtgtgtgtgtgagggtgagcatgagggaggcatgagtgagtgtgaggggattactgggtgtgcgaatgagacacccagtgtaagtgtaagtcagtgtaagtcagtgagggttggtgagtgtgaggaagtatgagtgggtggcagcacaagtgtgtaagtgtgcgattgagtgcgagcatttgtgtaaatgtgtatgagtgccttgtgtcagtgtgagcacgagtgatgttattgtgaatgcgtgtgagtgaatgtgagcattttgcttgtgtcagtgaatgggaggttataacagtataggtgtgagtgcaaagtgagaaagtgtgtgg

SEQ ID NO: 135964 - DNA, 275 bp, Homo sapiens
gcgttatgatgcatattgctctctgctgctctggaccaggtattcatgctccgtggacttctccatctgagcacttcaagctcaacacatctaaagctgtaacttccattttataagagctgagattttttgagagagagaaaaaagttgttgctggttccaaagatctgaagcttgtaaactcaaaagatcagaggaaagagggtctgtcctgagagaagttctgccactacacagggaggagaaagaagcctgggacataacctagaggaacg

SEQ ID NO: 135965 - DNA, 777 bp, Homo sapiens
gttgatgactgctaactgattacagtgatggttgccaaaggtcaaggtggctgtgacaatttcttaaaacacaagaatgaaatttgccccattgattgactcttcttttcacaaaagatttctctgtagtattcgatgctgttcgatagcattttacccacagtagaacgtcttccaaaattggagtcagttctgtcaaaccctgctgctgctgctttatcaactaagtttatgtaatattctaacaatttgaacaatttttcatatctgtgctttatctactatctgatttattgttatttttttgtagtctctttttcctgagctccaggttttcatagtagcccaaataagactgtctttttcttttaaggttgttttttttcctcactgtctttaacactgcaaaaatgtttgcatgtagaattcataattgcagcatatctaaagtatccattctgtgccaggcactgtcctgagcactttaaatatattaattcattttatcatcataacaactcctatggcatattcagttattatctgcctttttcaaattaggaaactgggatacagggaagttgagtaatttgcccagtatagaacctttcctgacttccttccttctttgaattaacgccccttcctctatttgcttaactctgtcgtattacttgccacgatgtgctgctattagtttatcttctttcatttgatttgagctgttggaaggaatataatatatatgtttcataaatcttttataaggaagatgtg

SEQ ID NO: 135966 - DNA, 279 bp, Homo sapiens
atttccttccggactaagaagccataaacccagatgtaatttggggcttatccattcatccaccctcacatccacccacccacctatccatccatccatccatccatccgtccatccgtccatccatccacatctatccatccacctacctacccatctgtccatccgtccatccatccatccacccacctacctatccatccatccatccatccatccatccatccatccatccaccgaggcttccatcatttaccgaatgcctactatgtgccaggc

SEQ ID NO: 135967 - DNA, 282 bp, Homo sapiens
tccctgtgtgtctatcttcatgagcgtacagaaaaaacagtaagttgaaaagtttagataatattatttaaaacctgacagaaaattggagaaacttgactaattaacattgctcatagttaaagctcttagtcttgatgaaggtgaattagtaaactaagaaagtttgtgaagaaatacattggcactccaagatggccaaacaggaagagctccggtctgcagctcccagcgagactgaagaagaagacaggcgattcctgcatttccaacagaggtacc

SEQ ID NO: 135968 - DNA, 337 bp, Homo sapiens
ggagactggctacgagaaacaccttcgtattataattattgcaatttcttgtttgtactgcagatgtcatgccctcattagacagggattttgtgtatatgcatttgttttcatgttttcataagaaaaaccttcaccattcgttggagatcagacccgtggtttagaaggtgtgatgttctctccatgctatttcagtataatcaattagtgttatgttcatctctggtttcttgacattgattaggatggatttttatgatctttaagggttttcatctctctaaaaacatatatactttatttattagaattaattgcctctctgaattgcctg

SEQ ID NO: 135969 - DNA, 457 bp, Homo sapiens
cccagctgtctaactctacaggcctgctttccaggcacgtgattttgtaagttactgcccactacccaaggattcaaacttcaagaattactaaatggatacagccaacaactttccatttaggtcaagtgaatgaatctaatgtcttctttctatcagacttcccctctctccttctcttttcaaaggtccatgtctatcctgacggagcactttcagcagcagcttgccctcacggttcaacaggtactgacaccacacacaagaaacatttcagaatgtacctactggtctcaaactaagtcctgaccccctgacctattccttatctgctttcttcctttaatgctcacagccatggtcctgatgctcattctataatcaggcccttcacctgttctttggaaaggtccaaggggctctgggtctcccttaccatgaatcatactggctgtct

SEQ ID NO: 135970 - DNA, 411 bp, Homo sapiens
attcccccttccacccgctcgtcagccacagctaaccactattagttttccagagttttcctgcctcagggcctttgtacatgctggctccctttgcatagaatactctttctcctcatccagctttctcagtggctggtttcctggaaatcacttcctccaggaagccttccctgtctttccctatgttccttacaagatccacctcttgtaagggaagagacagccactgtcttgtgaaaagtgtcccaagcccttggcacagtattacttggtagctctgcaggaaatacaaaagcagtggcagagggagaggaagagagggagttgatgtgaaagaggctaaggcagtcaaattgtcagagcttgatagtaagttggatctggggagggaagtcggacctaagataa

SEQ ID NO: 135971 - DNA, 749 bp, Homo sapiens
ggtgtcggggcttccattccagggtcaagtgagaaaccttcagccatcggggcgggtgtcggggcttccattccagggtcaagtgagaaaccttcagccacttggcagagactccaccaatcctgtgttgaagccaggccccagctgtgacagcaaggggccaaagtcttttaccaaaaggtaaaacaggctacccagatgggacgggtgtggccaagcagtgctaccaccttgggcaagacccttctcctagctgggattaggttttctcctttaaaattccacccctccagcaatcctcagtgatggcctgttgttttcctaatgccagtcccaggaagcaaagctcaacaaaatcacctgttgtcagggatagtggaagacggaaagataaagcactggcttccacaaagtcacagatggtgggtggaggttcccacagagagttcacgggaatccccaggccgtcctcagggctttagtttactccctccctataactcaagaaaatacaggggtttccaatagaaatttaaacctagtagcctagaagtattcctaagggactgcagattgagtaaaatgtaaaatataatatacccaacttttattaatgtaaaaatgtatcagttgacccagttatcccctctctttcctaaggagtgcctccccagttaggcggacacaaagggttccatattagaaacttgattcacattcccctttcctttctcagccactcacacaga

SEQ ID NO: 135972 - DNA, 334 bp, Homo sapiens
gatctagaggatcccgtcggagcaagcggggaaattaaaattagtactgacattatacaattaaggaaagatagttcaagggaaatattatgtcattaccacacaaataattaataaaatgagataccaaaacccatgatctacttattagtattttaagagaggttaatcaatttatagtcaattaagaagcattagtgacttaaatgatcaaaatcggtgttacaaaaatgtaaagtaacacctcattagacattctaggtccagttttttgtagaaatgcattttgcagaaatgttgggcattaaatatagtattaaaaaataaaaatagc

SEQ ID NO: 135973 - DNA, 655 bp, Homo sapiens
atcactcaccatagtatataccttctgtaacattcattattgagttttcataatgacttagtttttatagtgatgatccagtaacactacaccacttcatctagttgtggtctaatttattaaacaatttcttatcatttagtttattcctaaagaatagagtcattcattcagcaagcatttagaagtctacagtgttcaagctttgtgtgccagcctcataaaaatgaagaaaatatggaccttgccctcaaggaactctccaactatagtagaggtagatatatcaacaattattataatggtatctgataagggtacatgttagaaggcattttaaaggtacaaagagcgtacaccagagtgtacaccagacggagtgcccaactgtgagagctggaggttaggtcctgatttagcaatggtatagaaatgggaggaggaagaacaactgagtaagagaatgcagtaatcaaaatgtatgtcaagggatgatttgggacagatattaaaatagattggaagggggctaaagattttcaacgatggaaaagatgaagtaaaaatttaattattagctataatgttttctagtaattcataatctaatacaacattattattagaggaagattcttgcttttaaggatttgaa

SEQ ID NO: 135974 - DNA, 183 bp, Homo sapiens
agcagtatcaaatataaaaggaacatcagctcacacagatgagaagaatcactgcaataactctggcaactcaaaaaggcagagtgtcttcatacctccaaataactgcactatttccccagcaatggttcttaatcaggttgaaatggcagaaatttcagaaatagaatcagaatatggatg

SEQ ID NO: 135975 - DNA, 259 bp, Homo sapiens
tgttaaatatataaataaggccctgcccctgagattttggtttggaaatgggggctggggatatgtttgttttaatgttccagatcattctgatagccatgtttgggtggtagtagtaaataatgataatagctaacatttcctaagtgctttctctgcatcaggaaactgtgcatattacataatttctcatttaatctacataataaccttctgagatattattaacaattaattgacgtacgtataaactgaaacc

SEQ ID NO: 135976 - DNA, 168 bp, Homo sapiens
tcagttttgcatgggaatgtccagagtcattgaggctgtttttgtgactaggcctcctttattgagagtgagcttcagggggaatgtagatgacttcattcagtcctcaccctaaaagttaaatggaagcacaatcacacacctaagaagcagaggctaaataaacca

SEQ ID NO: 135977 - DNA, 143 bp, Homo sapiens
ctctattgcacaaaccatcttctaacatgctatagaatttatttattatgattatattttctttcccatattcctccattagaatgttaaatccctaagaacagaaccttcatctgctttattcagttcctagaacaatgcct

SEQ ID NO: 135978 - DNA, 507 bp, Homo sapiens
ttgttaaagcaataataacagtaggataagcaatctgagagcaagccccgcaagcttgagatcgtaatcaaagagtggcgcttcctagttgaaatcacttccttgatgtgagaacccagccatatttttggtctggatacttactaccaaaactagagagagtgcaaacgtattttcttttttctcctgcccattcagagttgcagaaatcaaatcctatattccagatcagtccttaagttttagccatgctttctgttcttagttacatcatttctatggtaagagaagttgaaggagtgtagggaatgagggctccctgctctatgctgtgatttgggaaatgaccctcaacttcatagtggtcagctcaggaaagtattcaggacaaggacagtctcatggcagtaaatggtccatgttcccatgaagtttggggggaaaaaatgaagtacatgaggaatcatctggggatgggtagagagttctgaggctctggctggcagg

SEQ ID NO: 135979 - DNA, 675 bp, Homo sapiens
aataacgttgctaaaagaaaatagatcctaatattgctctagtttaaactacatatgcaaattgcagtcactgagacattaagacaatattgagaagcagacttaaatcgcaaattttatttatattatgcctgttaaataaaaaattatgatttttacattttattgtaatattttttctttatttcattttatagaaatcagctttttctcatgtaaaatgcacacattaaagtgatgtaacttgatgtcatttttacatagtctaaaatattacaggatttttcaactcctctatgagtttacttggttagataaactaaatttcctataatagaaaaatatttgctcattaaggagttattattttcataaactacaagcaaacaagggacattcatttacaattagaaaaaaattccaacatcctgaaaatgtatatgaaatatcattgatacaagtattatacaaatctattagtatggtgttgtgaattaactagcaattatctgctagtttccagagttgtaaattaactcaagtgtctaatctgagtatagatcatggagctggatataaactaagagatttataagagccagtttctacctttaggaagaagtttcctcagggaaagcagtgacccgcttggctttttactatggagatagagac

SEQ ID NO: 135980 - DNA, 407 bp, Homo sapiens
aatgagtaactctataaaataaaaccatcaaaaggcactaaggtttatgaccagctgagataaattttgggtacttgccaacactgcaaatctttgggaatcaccataacaagaaatgaccacacacctctggagattctaatagccagagaatatatgatttggatccactcttacccaaagaaggaaactcctttttacctctattctccaagcagtttcaaattctctagtttacaaaaactaattttattcattcatgcctgcatcaagagtttatgccattccataagtcaagactcggttatccagtgagactagcaaattaaaaaaaataaaatattccagccaggcacagtggctcatgcctgtaatcccaacactttgggaggctaaggtgggtggat

SEQ ID NO: 135981 - DNA, 604 bp, Homo sapiens
gcaggtgtgctcagagagggaagctgattgtggccaggagcctcggaggttcgtggggtttcgtcctggttccctgggctgggccagcgagagcagggctggctcagggtgcggtgtcctgacacactggtaccagcaggttctgaagcaacaggtagtgaccccacatcctggcccccacccagctttactggcatggccagtgctgagataggaaatagggtttccattcctgaccccagcctgggctctcacgaagaagctggtgaccaaatcttagtcctcgagtgccctttcctttatttcagcccctctgcccccagctttgtctttttccagtgtctccttctatatgtgtctccacttctcagccctccattgttttgccttttgtcttcttccctttggtcccactgtctggcccaggatttttcccctaagaatttacgcctggactcctcagagcctcagtttccccaattctctgtctcttcagggtcctttcttttagacctatttgttcctgccccttctccattccctcttctttttaaaaaaaattttaattaaaaaacaaaatacagatggggtctatgttgcccag

SEQ ID NO: 135982 - DNA, 370 bp, Homo sapiens
cttgtgtgtctggactggtggcaggtttgtatgttaccagagtgatctccatggtaacggatcaacatggcgccaatgacaactctacactaagagcttcaggttcccatgagaaagtggatcctcacagcaaataggaagaaatcaagaaatatggatccacactccccttccctgtagaattctggccgtgaagtttcagttcatataaccaacaccatgtcctatttaaccacttgggtccctctgagtaaaccaagactcttctgagaatgcagtgttctctcagatttcaactaaattcatacaaagtttaatcagacttgcatagcaaagaactatattgcagtggagcaagaatgtaacttgg

SEQ ID NO: 135983 - DNA, 665 bp, Homo sapiens
ggcttgagaacaaatgggatgggggtgttcgagagagggaggaagctcaggggatggcagttttaaactgtgggattgggaacaagacagtaatagaatttagcagattagaacacattgagtttgagatgccagataatgcctgggtgaagatgatcagcaattggaaacatggatcaaaacttgagcaaaagttcaagctggatatgtagatttgaggtagatctgctcaggcaggatagttgaaatcgtgagaatttgaaatttccaaagtagaggatacagtcaagaatcagcctgcaattgaggataaaactagaagagttcctacatttatagaactaggaacaacgacaacaaacaaacaaaaaaaaaaaaaaggaaggagagggccgggcgctgtggctcacgcctgtaatcccagcactttgggaggccgaggcgggtggatcacgaggtcaggagactgagaacatcctggccaacatggtgaaaccccgtctccactaaaaatacaaaaattagctgggcgtcgtggtgcgtgcctgtagtcccagctacttgggaggctgaggcaggagaatcaatggaacccaggaggcggaggttgcagtgagccgagattgcaccactgcactcctggggacagagcaagactttgtctc

SEQ ID NO: 135984 - DNA, 329 bp, Homo sapiens
aatgacaggcatttgttgcttgttggctgggcctcttgcatacagttctcccaacatccctgtgaggtggtgatgcttatccccattctccaggggaggaggctgaggcccagagaggtgaagtcgtgtgccacaaaataccccagccatatggtggtagaaccaagttttcagccagactcaccagctcacagcagagctgccctggactctacagccattcagtgtatagctgggccactccatcattcaaggcagttcaacgtcaagattcctgatttgcctcaacctggggcctctagaagataccatcacccccaacaagctga

SEQ ID NO: 135985 - DNA, 521 bp, Homo sapiens
gaaacccttagacggtaccaacacaccaaagacgttgctaaagaatacagcagtaacaattggttgtcttggttatgtttgtcctcaagaggtggtccccatgctacagcagtttacgagactctggtgcacctctctgagaaacataagagacaatgagaaaaggattcagcattccgtggaatctgcatcatgatcagtgtgaatccccatggcataatccaagattttatatttttttgtgatgctgttgcatcatggattaacccaaaagattatctcagagacatgttctgtaagatccttcatggatttaaaaatcaaattggcaatgaaaatgggaggcatttctctgaccagtttcctcttcccttaaaagagcatcttgtagctttttatggtgtttaatgtaatacacttaagctgcagtcccaaaattaggggtccttcagtcttggagactatgagggagcctctgcacccagggaaaatgctacccttcatggggggaagggtaaacc

SEQ ID NO: 135986 - DNA, 1049 bp, Homo sapiens
acagcgcccagtctggagtgcaatggcgcgatcttggctcactgcggcctccgcctcctgggttcaagcgattctcctgcctcagccttccgagtagctgggactacaagcatgcaccaccacacccaactaatttgtgtatttttggtagatacggagtttcaccatgttggccaggctggtctcaaactcctgacctcaagtgatcctcccgctttggcctcccaaagtgctgggattacaggcatgagccactgcacccggccgagagagcttgtattttaaataccctattcttggctaaaaaaaagcaaaaacgacttgcaaaacccagggagacgctaagaaagaacagtttttaagtgtcgcttatgctgtcacctagagcctagaaatgacttagcatttcacttgagtgtttttcaggacacacacattttgaaaacactgagatcacactcacccgtgttttgcaaatgtttctgacgcatgggaagtaattcccattcattcagttctcaacatcattttaacagttgcgtggtatttctgggtcctagacaggttactgtttacgtaactggtcagctgttgctgagtgcttggtggcctgatttcctgtgctactggaaatgactgcaggccgaaccagtagggcaggagaccaccacgcgtgccaggtacctgtagttcccatgtggttcagggtgaactggagaggggagagctgggtggtggcgaaaggggtgtcaggccatggagagtggcctgaggctggtggctttgtgggtggcccaccttggctggttggagttggcactaggcagagtgagctgggggaaagggccaggatgtgtttcatgatttggccttggtgggatagaaaatagccccagaatagcttgagctctcccaggcagaacggcagggtcttgtgtctggggtgtctgggtggatttcttatgggtagcggaacccaagtgccagggccaggtgctgacctctccctctggcaagtcactgcacttcatgcctcggtttcctcctcc

SEQ ID NO: 135987 - DNA, 688 bp, Homo sapiens
gtgtccttggagaattcaggaaagaaagctgagctcatttgaattctgtgtcaggaaggactcttattgctagctgtcttgttattatacagggaacaatgttttcacatgattccattatatttctagtgctttattcgataagaagactacaaaaagggataaacttgactctatttccctgaacctgtttgtctccctactttagacttctcatttacttaatatttttttcttgtattctatacatatgagtaagattaaataaccttacatttctgcaacactgtagaattgttaaatcaaatctcgggggaagtttccccattagtgtaaattatttccataattcccattgtatctgtcagcaagaggttatataagactattcaaatatatattcggaaaattttgaggctaggcgtggtggcttatgcatgtaatcccagcactttgggaggccgaggccggcggatcacgaggtcaggagttcgagaccagcctggccaacacggtgaaaacctgtctctactaaaaatacaaaaattacccgggcgtggtggtgcatacctgtaatcccagctactcggaaggctgaggcaggagaatcgcttgaacccgggaggtggaggttacagtgagccgagatggcaccactgcactccagcctgagacagagtgagactcc

SEQ ID NO: 135988 - DNA, 1396 bp, Homo sapiens
ggctggaccagtagtcaacacccacatgccaaaggatagagtcactggccagcaccaaggctatggctttgtggaattcttgagtgaggaagatgctgactatgccattaagatcatgaacatgatcaaactctatgggaagccaatacgggtgaacaaagcatcagctcacaacaaaaacctggatgtaggggccaacattttcattgggaacctggaccctgagattgatgagaagttgctttatgatactttcagcgcctttggggtcatcttacaaacccccaaaattatgcgggaccctgacacaggcaactccaaaggttatgcctttattaattttgcttcatttgatgcttcggatgcagcaattgaagccatgaatgggcagtacctctgtaaccgtcctatcaccgtatcttatgccttcaagaaggactccaagggtgagcgccatggctcagcagccgaacgacttctggcagctcagaacccgctctcccaggctgatcgccctcatcagctgtttgcagatgcacctcctccaccctctgctcccaatcctgtggtatcatcattggggtctgggcttcctccaccaggcatgcctcctcctggctccttcccacccccagtgccacctcctggagccctcccacctgggatacccccagccatgcccccaccacctatgcctcctggggctgcaggacatggccccccatcggcaggaaccccaggggcaggacatcctggtcatggacactcacatcctcacccattcccaccgggtgggatgccccatccagggatgtctcagatgcagcttgcacaccatggccctcatggcttaggacatccccacgctggacccccaggctctgggggccagccaccgccccgaccaccacctggaatgcctcatcctggacctcctccaatgggcatgcccccccgagggcctccattcggatctcccatgggtcacccaggtcctatgcctccgcatggtatgcgtggacctcctccactgatgcccccccatggatacactggccctccacgacccccaccctatggctaccagcgggggcctctccctccacccagacccactccccggccaccagttccccctcgaggcccacttcgaggccctctccctcagtaaattcacattttccttcctcctgttacattttcccaatatcttttctattccttggaccaatcagagatgctgtagctccttggggcaaaggtactaatccctttcagcacccccactccattcccctttttaatgtaactttttccacaggaggtatttcttttttatgttggtcctgagtattttgcaaatgcacagagaaaataaaactaaactccttgttta

SEQ ID NO: 135989 - DNA, 455 bp, Homo sapiens
ggctggaccagtagtcaacacccacatgccaaaggatagagtcactggccagcaccaaggctatggctttgtggaattcttgagtgaggaagatgctgactatgccattaagatcatgaacatgatcaaactcctatggctaccagcgggggcctctccctccacccagacccactccccggccaccagttccccctcgaggcccacttcgaggccctctccctcagtaaattcacattttccttcctcctgttacattttcccaatatcttttctattccttggaccaatcagagatgctgtagctccttggggcaaaggtactaatccctttcagcacccccactccattcccctttttaatgtaactttttccacaggaggtatttcttttttatgttggtcctgagtattttgcaaatgcacagagaaaataaaactaaactccttgttta

SEQ ID NO: 135990 - DNA, 487 bp, Homo sapiens
agccctcattttgcatggtggtactgtgggactagaaaaatggcctttggggcaaactggtgcaaagtgacctttttcttttggagtaaaacatgcacgcacacatgcacgcttacttgcgaagcaatcttaatcgtcaatggagaaatggattgcttgtgatctttaattttttttttgttaaggcacaaaaatctcttactgtaaattgtaaacgtataggggagtgacaagcagtaaaacattgattaaatacactgtaatttataacattaaaaacattgatagttaaagtacgtaaccctttgacgcagcaggttcatttctaagtggatagcttagagcaatctggtgtctccttttaatagtattttaaattataatttttatcataaaatgacattcataaaaaaaccctacctaaacacataattttagaaaaatcaatacaatgcctcaattgtgatgtaaaataaataaggggaaa

SEQ ID NO: 135991 - DNA, 401 bp, Homo sapiens
tcacccaggctggagtgccgtggcgtgatctcagctcactgaaaccccgcctcccaggctcaggtgatcctcctacctcagcacccttgagtagctgggacgataggcgtgccaccacacctggctaattttttgtaatttttgtagaaacggggttttgccatgttgcctaggctggtctcgaacacctgggcccaagtaatctgcttgtctcagccctcagcctcccagagtgctgggattgcaggtgcaagtcactgcgcccagcccctcgtgtgttttctaaccatttctttgccatgtgttttctaagaactgtggtgtatgtggtggggatgaatagcgagctattcatcggcaccccacaataaaaatctgacccaggccccccatttctttcc

SEQ ID NO: 135992 - DNA, 369 bp, Homo sapiens
agctgggactgcaggtgtgcgccactatgcccagctaatttttgtatttttagtagagacggggttttaccatgttggttggccagtatggtctcgatctcttgacctcgtgatctgcctgcctcggcctcccaaagtgctggggttacaggcgtgagccacggcacctggcccattctgggtatattcttagttaagcagggttgtcttggctgtgttggcagcagccctgttggcatatattccctggcaatttgtggtcaactgaaacccctaagcctgtttcatgtgagctactattaagccattccttccccattctatactttggtagttaggtttcattttgtggttttgattcttcatttc

SEQ ID NO: 135993 - DNA, 358 bp, Homo sapiens
tatgtggaatgaatgaatgaatgaatgaaagaaattttgatatgttacatggtaaaggtaagataattataagaaaggcaaaatatgaaactatacttgtgattttagaactaagttctggatagttttaataaccacatatcttgtattatttatatacattcatgtgacattaatatatcatctttaaataaaaaatactaaaataaaaaacaatacatgaaaaaggcatgtgtaatgtatattatatatatttgcattaatattttacatttaaatgaaagaagcttagagtaaattagtctacaaacccacctcaaatttattttgaatgtaggaagaatatcatttatactta

SEQ ID NO: 135994 - DNA, 670 bp, Homo sapiens
gattttatatttgatgcaaaacttaacagaattttaaaatatcctgatagtagattattttcattttctgggtttgttatttttaagttttattacattatgagcacagatgtatacattgtttttcctttttgaaaactgtcaaagtttttttttgtttgcaaatgggcagttttgtgaatgttccatggaaacttggaaagaaggtgtagtctctatttttagagtaatgtatatcacttaattttatttaggttttccatattctgaaaaaaatttttttttgcttattctgtcatgtcctgagagaaaagaaagtttcctattgctgagattttattttctaatttaagacttctgttttctgtaggtttttctttattgatattgcttctgtattactgggtaattagatagtcataacatttaatctacattttgtattgtgccctttagcattacaaggtgtttatcttttttcattgaacatatactatgctgcattaaaacccatctgatattaataccatgaacgttattttctttttacttgctcttgcctgttgtaatctttgcctttccttttattttcaacccttcttggttacttattgatttgtcgtattcttgtgtgcagcagatatttggattttgctttgaggcccacctc

SEQ ID NO: 135995 - DNA, 512 bp, Homo sapiens
gatctagaggtccctgtctcagtctcggggaggctgcattcagtccttgatggggtcaacggctcaggggacaatagtgaatctggctaaataaatataacccggttgcctaaaaccttaaggtcggggaaaagacataaacctttctaatgaagaaaagcatgcccggccaatttttaatctgacctcaagtgatctgcccacctcggcctcccaaagtgctgagattacaggtgtgagtcaccacacccagccttggagctgtgtattttctgaaattctctcagaggtagattggtacaccaaatgcgtcaatgaaccacgtcagtaacctgtttaattcaagtcaccgcttcctgcctctgataaagcattatgtcttatgctgtcttcttgcttccaaagtcaagctgtgtcagcaaggaagaaggttgtgatgtggctaatgaaagacgtgggtctccatcaaccctgtagctgtaggtttattttccctcatatctccctcctcc

SEQ ID NO: 135996 - DNA, 171 bp, Homo sapiens
tagggattacacgcgtgagccatggttcctggcccctgaaccattttttaaaggaaatcgatatatttattctcaagtaatgaactaagttgttttataatgtgaaccttggcactttgttgttttaatctgtagtagtcattctataatgctatgagagagtatatatat

SEQ ID NO: 135997 - DNA, 316 bp, Homo sapiens
atcttgaactctctggctctgattctcactcttttttgcctgtgccatcgtgtttctgtcccgtaactctgtggatgccattccacttcccaggagtgccttttccttgtctgtctcctgtctctttccaagtattttccaacatttgagaccaacttgagttcaattctcaccttctccatgatggaaggcttccctctcttttaaccacttcatctcacctggaaatctcgttcccttatgtccttctgacactaaatatgcagccacatataaatatactggctgagtggtccagtcgttaagcagccagtat

SEQ ID NO: 135998 - DNA, 558 bp, Homo sapiens
cccagcctcgctgccgccttgcagtttgatctcagactgctgtgctagcaatcagcgagactccgtgggcgtgggaccctccgagccacgtgagggatttaatctcctggtgtgccgttttttaagcccttcggcaaagcgcagtatttgggtgggagtgacccgattttccaggtgccgtccatcacccctttctttgactaggaaaaggaactccctgaccccttgtgctttccgagtgaggcaatgcctcgccctgcttcagctcgcgcacggtgcgcgcacccactgacctgcgcccactgtctggcactccctagtgagatgaacccggtacctcagatggaaatgcagaaatcacctgtcttctgtgtcgctcacgctgggagctgcagaccggagctgttcctattaggccatcttggctcctcccctctcacctctcattttcaaagggatatcaatctctttaagttcttaagtacttccacttgagttagaatatgagcttccatttgatgtttttagactccttcttcgtctttgactgcatgaata

SEQ ID NO: 135999 - DNA, 522 bp, Homo sapiens
aaaagctaaggggagttaacgcgccgctgcagctcattgtcaaagccagcttcaggcagagaacgaaggagggagcgacttcggggctgggttaatgttttcccgcaggcaagtggtagcagatgtcaagggttaaggacaatttaggaggtaagaatttccaggctgcacttgtgtcgggtgcctcgggcgatgagcccaggagcccgctctccacgcagtgacgcttcccaagctggtgctttagacccctcacttgcctggctgctctgaggccccgtccctgatggcttctgacaatttggtgtcctttgtaaagacgacctcagatcctatcagcttcagtttcacaaaacctggatcccctgcctctgtggtatgtctggactgccctgggcaggcagggcctggctctgagatgaagatttctcagcactgaaggaccgcctgcctttgagctgtgaaactagtctatcctcacatagacaccagtaaactgaggcttgagaggctcaaggacac

SEQ ID NO: 136000 - DNA, 230 bp, Homo sapiens
aaaagctaaggggagttaacgcgccgctgcagctcattgtcaaagccagcttcaggcagagaacgaaggagggagcgacttcggggctgggtgagctggattctgttcctgctctgccaccaccataagcggtcccagctgttacaacgcggctctgcacctccacttcctcctctgtaaaatgagtgtcctcgcctctgtcctcgctccctctcaagacttctggggga

SEQ ID NO: 136001 - DNA, 967 bp, Homo sapiens
atcctcctgcctcagcctctcaaagtgctgggattatgggcaagagccaccgtacctggccaactggcttaaagacatgcaaaagggccgtctcttccacagtgttttgtgaaacaatacagagacatgtggagaggacaaagggtgaagccttcttgaataagcttgctccccaaccatgaaggatgccaacccactgacctcccaacgtgtggtcccagcccatcgtaatcaaacctgactccccactactaccaagtccagcccaatgaaggtagaaaagcatcgtgcagtttcctccttaaaggacctgccctgtgtgcacaccatgtccaccaatattctgctggccagagcttagtcatgtggcctcaactcaagggggctggaggtctctgcacagagctgtctcagcagcttacccagagcaccagagtgacagcgggctcctgccaggtggaagtgttcacaaaaatgagtaagagaaaatatggatgtgcctttatgaattacaaactccatgggcttccatagagcatggcttttacataatctaaattccttctctttgcgactccctcctgaactcatccccagaccctccctgagtggagctggtcacaccaagtcagcctgtgcctctagttgctaccatttcttttataggtgttgtcccagttaagatttcactggcagtagggctggattctggtttccagggcaatcaagagcagagcatgaacggtgcgtctttggtagacaatttaactctgtgtttctggcacccctcacttttgtgatcaaaagaaagaccagaggagcctttctgcaattctgccctctttccctgttttgcttttctcccaaggcctagctgattgattgcagttctttctggatttagtaacttggttttattcctacccactaatcttgatgtctttttccctactagatcatacctttc

SEQ ID NO: 136002 - DNA, 731 bp, Homo sapiens
atttttctttgggctgctaaagggtgcacagactgtgtactaattggtaaatgttttaaaaacaaagcatagaattcagaattgccctgaatctgccttcaaggactgatacaaaaccttgtttttgtcctttgaagctttcttaactgctacctaaagttatttgctggaatgggtgcccttggaactgttctgaggctcctaatagagatttattttggaatcaaacccatggatgcctcctctgggatccacctaagagaaattaatgagcactttttgttttgtgaattaagtttagtttcttaatccttttatatgtttggggttgactgtaaaattacagcgtattttgaaaataaccagagaaaaggaggctttatatagtcctattgtttagctaagagttcctctaacttttaaacagagtgcttttctgtacagaaattagctttattgaatttttttagagcagtaatggaaaaactagtcacaaaataactctaagatagcaatacttaatgtaaaacagggtttaatcaaattgttccaaagcaaaaagcaactccataccatatcttattttgtataataagaccatcacccagggttttaggatatacccatttgaaaacataagtaaacggtgttccactgccatgctcatgccctccttgtctgccagtattcttctttttccagcttgcctttaaagtagaattactctatag

SEQ ID NO: 136003 - DNA, 353 bp, Homo sapiens
cacctcccttctgtgcctggccccagggtcttgggtacccaacacttgtcactcagctcagttagtcctcactaggtttagagaggagaggaccaagccacagggagtggtgcagctgctaaaacctaggtcctcctctctcaggtctgcacccacaaggccagcatttccctatacacattcaacatcatagcatagcgcttcatatgtcccagacatgtgccaaacatggtaggttagttaggtaatttagtccccatgcccgccctgtgagttagggctctgttttacagatggggaaacagaggcacagattagtcaagccatttaccccaggtcacacagcaatacta

SEQ ID NO: 136004 - DNA, 238 bp, Homo sapiens
tttaaaacttagtttgactattttgcagtaatgaaaaatggtcctgacatacagaatgccatctagcttacaactgcatggggcatgcagaagaaagagatgaacaatctttacctgaaaagagaccaccctctcctttaatgggagtggaaattaaagaataatgctcatagtttgctgcaaacactattgctcaatttaatactctaatggaattcacacatttctttttctacag

SEQ ID NO: 136005 - DNA, 473 bp, Homo sapiens
atttcctgggtttgatttattcatcttgtgaaataaagggagagatggaaagaatctctgcagctcctgattttatgatcttctaactctaaaattatcacaaaaatttctattgaaaactgtcacttatcatgtaagggaggggagttgtagtataagttcttttggttacattagaaacaaacttggccgggcgcggcggctcacctctgtaatctcagcacttcgaaagaccaaggcaggtggatcaacctaaggtcaggaattccagaccagcttggccaacgtggtgaaaccctgtctctaccaaaaatacaaaaattagccgggcatgggggcgcgtgcctgtaatcccagctactcaggaaactgaggcaggagaattgtttgcacccgagaggcagaggttgcagtgagccgagatcgcgccattgcactgcagcctgggtgacaagagtgaaactccgtctcaa

SEQ ID NO: 136006 - DNA, 815 bp, Homo sapiens
ggcctaagacatggcctcactgcatagataagacaggccacacagctgacttgcccagacatgtctgcaatggaaaattccatcccctgacacatgtgcagtaaggggaacaaagcaatatggagtaactcaaggcagacattgaaagtgaaattcgaacgagattgaaaatgtcctacatcctaaatctcagattaaattgatccagaaagctcctgcaagaaaaaggaccaaagttggctgatcctgaagcttgagacaagatagggcctcaaaagatgagtgtaatgtaaacatatcttgcattccacaactcacaactgtagttggagttttcatgttaacttacacatgtgtgtatacaaataatctgtacagaaagatattattgacaagcttgaaaatagatgtgcattgttaggttgaaatgcttttgagtctcactcatgaatatagctagtctgcttcaagtttacttatggagttcttccattctgcccacccgctaccgtttttaaagcagtcaaccgtgtttagaggaacatttattcccaaaggatatatttgaaaaataacaatctttggattcaggataactaacaaattcaatatagaataaataaataatgaacccacacttagacgagtgctagtaaatttacagaatgtcaaggaaataagattatcaaaaataccagacaaaaaaagaaaaatcaccttccccaaatcagttgcaatgaagaatgatttaccaataacaacactggaagctagaagacagaggaataatatcttcaagaagatgagagaaaata

SEQ ID NO: 136007 - DNA, 260 bp, Homo sapiens
ggcgggcccagctgctctgcaacacctctggcttctatccaaccctgtgtgctcccctctctcttttgcatcagagacaccacccaaactttctgctccaaattcttctttccctcttcaacctatccgtcagacctctgggaagagttccaggcacttatgaagtccaaccaccagaactgctccctcatcacacttctttctcccttctggttacatatttggtttgatcccactgcccctgctagatggccagccct

SEQ ID NO: 136008 - DNA, 408 bp, Homo sapiens
tgcctggccaccacaatatcaacatttttaaatgaaaaatcttatcttagttaccatagcattagcacctctttaaataactccattaatttaacctaaatctaaacgttctctaaagttcatcattaggatcttgaattatggaacctcttgacttttctagttccttaaataatgacaagtattcaagtacatttttgtcttccatttttaatatccctgtaacatgaggggaattggcaagattctcttcataaacccccctcgctatcccattcaccgaattcatcagtatagccaggaatcctaataggtttcagcaggaacatttctgacagctcaatatttttctgtccaatgatttggaaaatcctgtttctctttattagagctgaagtaactaaaaag

SEQ ID NO: 136009 - DNA, 234 bp, Homo sapiens
taagattccattgtgtaattataccaacttgtctattctgtgttgatggacatgttcccgtttttggctatttgaataatgttaactgtgcacattcttgtacatatgtctcttatggtacatgtacatgcatttcggttgaatatatgtcaagagtataattgcatatcttggcctttagtattaaaagcacgtttctggctgggcgcagtggttcatgcctataatcccagc

SEQ ID NO: 136010 - DNA, 196 bp, Homo sapiens
gatagagtctcactctgtcacccagggtggaatacactgtcacaatcttggccactgcactacagactgggagacagagtgagaaaaaaaaaaaaagatgctagagtaattggcatccataggcaaaatatgaacctcataccttatgcaaaaaatgaactcaaaatggactacagaattaaatgtagaatgtgaa

SEQ ID NO: 136011 - DNA, 239 bp, Homo sapiens
caatacattaatgaagtctgaatggggaacatggacttctacccccacctggctgtgatgagatggaagcccctttcccctgccatagtggtatcagaaaacaaaacaaaacacaacaaaaacaaaagtcacaaacagctaagtcaatagacttaaataatatagagagactcataccatattcaaaagatccaattttctataaaaaaaattagtcatgccaacaagccaggaagata

SEQ ID NO: 136012 - DNA, 466 bp, Homo sapiens
ttcctctgggccaaattattcaagtgcttggagcgcacatgcacatagacacacacataatcaaaacccatcccctccccaataacttatttttatgctatttatgcttcaaagaaccactttattgcagcttagttttttcttctctttcctagctaggcaggagggagagttagggaccttgacaagaattgaatgacagctgcctccaggaaagggaggacaagcaagctggtcctagaacaaagtttgtaactgaacacctttagtatcttttctcttcatataatctatctcttgatacacttatgtttctacctccttggaaatcagtacccttatattgcccctctggctgttcttaggctccttctgaggagtacttgctctcataatacgtaatcaaaatgcaaaactttcatgtccttgctgttaggttttcagccatgttactatgttacattga

SEQ ID NO: 136013 - DNA, 360 bp, Homo sapiens
ggtggaaagaaaagacaggaagtctctctgaacttattctgatttgggggtgctacccgacttaaaattttaaaaacttaaggccaggcgcgatggcgcatgcctgtaatcccagcactttgggaagccgaggtgggtggatcacctgaggtcaggagttcaagaccagcctaacacggtgaaaccctgtctctactaaatacaaaaaaaatagccgggcctggtggcacatgcctgtaatccgagctacttgggaggctgagacaggagaatcgcttgtacctgggaagtagaggtttcagtgagccgagatcatgccattgcactccagcctgggcaacaagagtgaaactctgtctc

SEQ ID NO: 136014 - DNA, 498 bp, Homo sapiens
gcagttcctccctgtcataatgtagcttcttttatgtgtatcctcatccatcagaaataggaaaatgtgttattatcttgttcccaatatcacagagtccaccaaaattctctaatggttggaaattaatgctaaaaggaagggaaatgtgaagttgacagttttattcgttcattcaaaaaatacttattaactatacactgaatactagaatacactgatcaaatatgtttacctctcatgagccttaaagacttcttggagtggtagataatcaataacaaattaaagtaagtactgtggttgaagatgaagcctgttaagaagaaaagagcatagttagaggagccactttagataaggttgttaaagatggcctctctgaggaagtgacatgggagctgaaagataagaatgaatgcacagctatgctagagcagtgtggaaaatcattccagggagaaggaataagaagggcaaatgctggaaggcaggaag

SEQ ID NO: 136015 - DNA, 938 bp, Homo sapiens
agcgggggaagcgactgcggattggaaaactgaaacccagagaaaagggacttgcccaaggccacacaccaaattagtgacagagctagaactagactccagttctccgacttccagctaagtctctttagcttcagcctactgcctctatagcggaaggacttgttccaaggaacaagttaaactgccccagggaaaaggaacctgtgtggcctactttgtattatttacacttcagctggaatgaatttcagatcctcccctgaaacttttaatggggaaaaggaactagagagactaagacaatgagacttgaacatttttaactaaacaggaaacagaagggctaacacagcacccatgtctgaagtgaccatgattagctggtttctagctggtgactagctggccctgactggtccacttactaccttaaagttctcccaggtttggtcctacgccctcttgccactgcactctatattctcttcttgggtacccctccacacccacaacttcattttccacctgtatgcaaatgtacacaagtgtgtatctcaagcccagccctcatctctaagctccagatctatatagccaattgcctcaacatctcctttaggatacctcaaaggcaacccaaactctacatttctgaaattgaaacaatctctgtgtatcccaaccttttcctccaagcctggatctcttccagtgctcctacctttatccacaatatacccaagcccaaaacccaagttagtacctcttccatttacttaatacctcttccatttcccatctatcactaagtcttatcagctttacttcctgaatatcttttatataggtcctagctaccatcacatccttcctgccttccctcccagccatatttgcgcactgcaaccagagtgatccttcaaaatgcaaagctg

SEQ ID NO: 136016 - DNA, 281 bp, Homo sapiens
cctcggcctcctgagtagctgggattataggcgtgcactaccacgcccagctaatttttgtatttttagtagagatggggtttcaccatgttggtcaggctggtctcgaactcctgacctcgtgatccacctgccttggcctcctaaagtgatgggagtacaggcatgagccaccgcgcccagccaagtatcagaattttagagaattcttaggatctaaagtccatccctcacttttctggagctctgctgtgcagtaggtatatgctacatgtggctgt

SEQ ID NO: 136017 - DNA, 789 bp, Homo sapiens
ggattagaggcatgagctaccgtgcctggcctgaaagtgtcttttaaaaccttgaagtgaccctctgacaaactgaggaactttaactttgcctccatagattgatagaaaagtatgagtagtagcccttttgaaaatgatagaccaaccttatttctctgacagccaacagggttatgatacttattttataaatggtaacctccctctgacccttacttggagtgagttttcaatagtatgcattcaataaacattcaccatttttattccagccattactgtccttgtgcctcttactggaacctgtactttcatgctcagcaggtgtccagcattaaaagaaaaagtaaagattacctagaaagaactcctcaacagtagtgccacccaccatcctagaggtcgtcatagtgtttgtagctggcctttcttccccttgagaattctccgttggtttccgtgatttggttatcaacagtcctgcctgctcgcttgctgtcctgtgtagcttttgctgcttaggtgctgagtggttctatatttctttcccagtcctcttttgagtgcctggctgacattttcaatctctattgggctccaaaccaaaccagtttcgtggtattgtcctccaaaccttgccctcttatagcatgaacaatgtgttgagcatggggtattataagagttctcatttagcattccacagttgaggaatgtgtgttacttcaattacctttgagctgtagaaaaatctttagctgtggtaacagccacttctaggagagg

SEQ ID NO: 136018 - DNA, 748 bp, Homo sapiens
ttaagaacacgtgtcttctgacacggatgaacaccttatgatgaagccatgtgaaacaagttccttcattttaagcagctgaacatctatcctttaaatattttcttttgtaaaactttaaggctctctacaccaatgcttccccaaatttgtgttccttaaagggctgttaagtaggctattaattagcgttactcaaaaattattctatgttcaaattttagaaataatatttctcagataccttcaatatgctaatatgtcctggaaataacccaggaattctaagagagaagggagtgtgtagtgttattccctcgctggcctaggtatacttctggtgatgaaatattattaactgccatctagaaaaacatttcaaagaatgccagctgggaaatgctactactctaattttaagacttaataaaagatcctcagcaaggcaactttcggcccctcacagagacagtactttgaaattcatattgagattttaccctctcttccaacgattttgggaaaattatgaactgagactcttcagaaaatatctttcttctggaaaaaaatgtcgctcccttaccctcatccttactttgtatcctggcttataacaggccatgcatttttgtagcaaacttttcaaaaacaattatataacctggtcccttctttctggggcctggatctgcttacacagcaggaagaataacaccaccaacctttacatagcccagctagccag

SEQ ID NO: 136019 - DNA, 610 bp, Homo sapiens
  misc_feature (610)..(610): n is a, c, g, or t
gctcacatgactttcatgacagtataatctatatttttctcccacctctcaaatcatttcttagatttttctatctctgtctttcctttaaacatcagtgtttccaacctggtgcagcagctcatgcttgtaatcccagcactttgagtggccgaggcaggtagattgcttgagcctaggagttcaagaccagcctgggtaacatggcaaaaaccccatcttaaacaaaagaaaaaaaaaaaaaaaaaaaaaacactttttgggcgcgcgccttgggcccttggaaaaaggtttttaaacccttcggttggggcgcgcgcggggcgcccaataggggataagggagaccatggggccaaaacgcgtgttccctaagaggagacacccggggccaatagagaaacagaggcgcggggagttcttctcccccaatatagaaagagagcccgcggggggggacaacacccgagagggttttgtgtgaaaccagaattttcgcgagaggtgggaagttctcacggggaggctccattaccgagggggactctcttctacaccagggggggttcccaaggggagagctgcggattatccaatttttaggcccctn

SEQ ID NO: 136020 - DNA, 530 bp, Homo sapiens
cagtcatgtatgtaatcttactgatattcagatcttaagggtgaagaaggccgggctggtctcaaactcctgacctcagggtgatctgcccaacttggcctcccaaagtgctgggattacaggcatgagccactgcgcctggcctgtaataagtcttaaaatcaggaagcgtgtgtattctttctaaacaaatgaagaaactaaagccacagagcctaaagttaagtaagaaaactagtagagtcagaagtagacctaagttagcctcattcacagtacctttcttttttaatatcttgtagtacaggtagaccatccctaatacaaaatctgaaatgctccaaaatccaaaacttttttaaatagagacagagtcttgctatgttgcccaggctggtctgaagctcttgggctcaagcaatcctcctgtctcagcttcccaaagtgctgggattacaggcatgagctgccactcatggccagtgagcatcttttcttacacttattgatcctatagtttttcttcttga

SEQ ID NO: 136021 - DNA, 717 bp, Homo sapiens
  misc_feature (717)..(717): n is a, c, g, or t
gcgtcttgctcctggggggttggcagccccagtggctgaggccggcgccaaggacagcaccttttccgccagcccatttcatggattggccgctgggcccagggacccggctggctctttctctgcacgtcctgattggtgcatcgttccttatctggtgcgtgttaatcccgtgatccgagaagcatagtgcttggcacacggtagctctgtgaaggcgtctgtgtgttcagacctgcattcaaattccgaatcccgtacttacagtgacatgcctcagtttccccatctttacacctcattgtgttctggtgaagattaaatgagatactttatgtaccaaaaaaaaaaaaaacacaaaaaaaaaaaaaacatgtgtgtgtgggccgcgacctgggaccacggagaaaagagtttctaaaaaccattgcgcgtgtgggggcgcgcgggggccccacgtgggtacacgtggaacagtggcccaaagaggggatcccagaggagagactcgcggcgcagaggacagaagggggcggggggttttccccccgcgacataaaaaaaaagccgccgcggggggggaacaccgcgggagggtgttctggggcaacaaaagccccagaagggggggcccggaggggccacagcggggagcatatcacccaggggaccccagagagaggccggaaataaaaccgaggcggggtggcggggggn

SEQ ID NO: 136022 - DNA, 348 bp, Homo sapiens
aaatctaacaactgggaattgtcacaattcacgcatcaccagagatttgctacaatgacccttcctgccatcatctggtaaaatctgcataagtccatccgtaccttgtaggctgtccttttgtggcctggtgaattacaccatcattatgtgatgctccctatgaaaaccattctacaatttttataatggccattgattttaaaatgtatgatcataaaagatttgtttcaagtgattttgttccttgaatattaaagtttttacactccaggtagatagttacaataatataatggatgatgtaatggttgagaagttttctttggcagtgatcttctaggcgag

SEQ ID NO: 136023 - DNA, 184 bp, Homo sapiens
agctgaaatcactttttaaatgcaaatcttatttttgtttgaatgctcacctcctttgtaattttttttaccattttggtaaaaccaggaatagctatattgttgtccacagtgaggctggcagagccttcagagaccacctcctaggtctgatccccttgtattaacagaacacatgaaaaga

SEQ ID NO: 136024 - DNA, 460 bp, Homo sapiens
tattttacagtttgactctttctttgacatttcctatatgtgtgtggttcttggaattatttttaaaccagttgtaacatctgaacgagttacatgaaatcttttaacacatgctcattttatatctgtatgaatcacgactatattctttttaaaagttatcttttgctggggtcgagggtggtggctcctgcctgtaatcccagcacttttggaggctgaggcaggaggattacttgctgccaggatttccagaccagcctgggcaatataacgagaccccatctctacaaaaaaaatttaaaaattagctgagtatggtgacgcgtgcctgtagtcccagctactcaggaggctgaggtgggagaatctcctgagcccaggaggctgaggttgtagtgggccgtgagtgcactactgcactccagcctggagacaaggcgagaccctgtctcaactt

SEQ ID NO: 136025 - DNA, 335 bp, Homo sapiens
cacaaccctctgccgctctctcattatttgccactcccacgtataaagctttaaaatcaacctgtatgctgacaattcctgttcggacctgattacgacctttcatgaattccaaaatcaggctacctgctgctttctgcacatatttatttacctataaaccacacaggtacaaacatattccaaactgaactcaccttcattctcacccactcccaagagacatgaatgacattcaaagaacacccatgcccattaagtttgggcattgtccccaaatatgccatgctcatttctacttcttcactaactcccctcctctctacttgcctgag

SEQ ID NO: 136026 - DNA, 288 bp, Homo sapiens
aaagatgagttgaggagagactattggctagagtttttaatttgtttggtttttggattttaatgtgttatttaatttttaaaaatagagaaagaaattcaaagtctaggttatgttaccagataaactgttaacttgccttgtatagtgatgtgttgatattcattttaccaaattgcttgggctttcagttttccaacctggaaaatgtatgatagccgaatatagaaaatttcttctaaaggttagatattatttctgtcttcgtgagctgctctgaatttgctt

SEQ ID NO: 136027 - DNA, 410 bp, Homo sapiens
aaattcaacgatacataattagcttacatacctccctgattacatcagtgtgaaatctttgggctacaaggaaatatctaaactgtagacaactctatagctattagtacaataaaatagatttcgagacaaggattttcatacttgataatgttacaggtacagaagagctctaaattcatagaatttacaaaagaaactgtgaaaatggaaagtattacagtctcaacttgcactttttttcttaattattgtactgacacgacaggcctagaaataccataatcaagcatcattttcttgtttaaccccacagtaatattccagctcccaagagtttatataataaccaagtcataaaatgtagaataatttcaactttcttttactcgatacccctgtatgcatta

SEQ ID NO: 136028 - DNA, 474 bp, Homo sapiens
tgcacgtgtcatctcatagctgttcctagagtgtccaccctaacaggcttggagccaaaggaagagtatggttctctatactgaaagaatagagaaaagaataaaggcataaccctgcagagcaccaatatccaaaggttggctgaagttgaggagaggcaattaagagaagtaagaggaaaaccaggagagatgtatcatggagtccaaggggtatagagttttaagaaggcaaataatgtttaatgtagtagaagaaatcaaataatataagagtctaagaagttgggcatggtggtgtatgccaatagtcctggctactcaggaggctgaggcaggaggattgcttgaggccaagagttagaggctgtagtgcactatgattatgcctgtgactagctactgcactccagcctgggcagcatagtgagatcccatctctaaaaaaaaaaaaacacacacagttaagagtct

SEQ ID NO: 136029 - DNA, 420 bp, Homo sapiens
agggataatcccggcgggatgtctaataaccgactacgagtaatttgatgatcaatcacccattcagtagaatgttgtctttctctccctcctggtttaatgaggagtacaaaatggccagtttccagcctcagcttccatttaatacaaacattaactgtgctcccctaatggaaccgtgtctcccttaagcacaggaccaccaagttcaccaagttccatatttcaggggccagaagcatacatttcttaagtgaattatttggggtaataataagaaggggtcatctcatctccaccttttaggttctatatgggttaaacatttagacttcatcttaaagaagtataaacctaagaagcctcacaggatggtttgttggatgtataactaatgaacccttaagcaaccattctacc

SEQ ID NO: 136030 - DNA, 501 bp, Homo sapiens
agttcgagaccagcctggtcaacgtggtgaaaccccatctctactaaaaatacaaaaaattagctgggcatggtagcgggtgcctgtaatcccagctactcaggaggctgaagcaggagaatcacttgaacccaggaggcggaggttgcagtgagccaaaatcgcaccactgcactccagcctgggcaataagagcgaaactccgtatcaaaaaaaataaaaaaaataaaatcctagcaaacttacaagatttgaaaagacataaattttctgacctcgagggcaggccctattagcatatggtagacaccagagaaacattctcaaaaatgataggagtaatctctaaatgaaggtatgagagtttacatcaggtacaattttaaagcaaaaaaagagaaagcattgaaattaatgcaagaagtttacggtcactcagtgagtaaattaaaaacaagtgaggacctgtaatcccagcactctgggaggccaaggtgggcg

SEQ ID NO: 136031 - DNA, 760 bp, Homo sapiens
attgtgaacactctggatattaggctatgtagaatatgaattctgttagttttgtctaataagtgtttgtccctttgctttaacaagtaattttgttgtctgggcttgaactgtaagcccttcctttggtcaagtgatccagtcttggttctgactttttaattttattttaacttggttgctttcagtccgttcaacatgagtggtttaaggatcaaccagagatgtaaaatgacagagtttaggaatttcctctttggaattttccttcacagaatttatctactccagcatttctggtttcctagtttctgttttctggttctctgggatagaaaaattggcattttccatttggactctattgctgttgtgtgcacagtcaggatgacctttctcctgaggctaaaatcaggtagtaaggaatttacttgtagaggctcctattcccttgttcttcaagtaaacatgcacaactcatgtcttgtattgccttatgtccaggtttttagttgttttctaaatggattaatctctttgggtttactaacgtattcattatcccccagagtgttaatctattttatttgctgtagcataggcttttaccagcacggtagcttttatcccatagccaaggaacaatatgaattctgacaactctcaagtatgtccaacaaattatatattttggaaaaggaaaaaaagcaccagattgacttatggacccagtggatgcactgtaagcaaaacttgaacc

SEQ ID NO: 136032 - DNA, 442 bp, Homo sapiens
ttttcacttcaccttaatgctctggttttaatatggacatctgtctctctcttgataatccatttctgaaaatcagatattctatgtaggaatacattctatgcagaagcttattttccactattttaagtgggaaaaattttaatgtattacatgtcaatgtaaaactcaacgaattcactaagtattaataaaatacagcaaaatacctatatataacaaatatcatgttaggatgttagatgctaaaaacacttgctgctctccaaatagttaatatagtaagtaacaattgctctgtgtgcaggaatacatagcacatcccctgtgatgctctgcatattcttcaaaatgtccaccaaggattctgatattctgtcaaaaatgttactcaagacatttcctgcatatcataatgttgtattgcattttggggatgtat

SEQ ID NO: 136033 - DNA, 335 bp, Homo sapiens
tcacgtaatatgtacatgtagtcctagagcacaatttgaggaatacaaaaatggtaatcctagaattaaatttgcctgaagaaaacaaagctcaagaatctttattaaggactttgagtgaagcctaataattttgatgcatcttaaaagaaaccttggatatgtataagcatagaaatagtatattctgtatacctgtgtttaaatgtctaaaattatttaattggttatattgctgaaatttatttatttatttatggaatgagccatgttgcaaaatcatggaatctattttctttatgccaccctaggtcaaaactcaatagcatctgaag

SEQ ID NO: 136034 - DNA, 517 bp, Homo sapiens
attatcacctatatatttttcacttccctcttcagtttgaattattcatatctgtatactatatatgttgtttttaactttattgataagacttgacctcaagtagattccgccacttctcaaaaatgtatttatcctccagaatgtttttaaaaatatatatgtcactgacatttaaatcaaggtaatttagccactgaaataaatttgaaggagatatctcccaaatgtttgtataatagcagtaacatcatatttagtgaaagtctccagagtgaattactttgaggagtttgtctcagtaatcactagtacatttgtttaaaaatcagttttctttcctcaactggcatagtttatatagtctcttggaataaactatttttctttactgtgtgaaattctactttacccctaacttggttttccccatcacagaatgccaatggctctcttctttccatttgaatcacataagttaattttgcagtggtttcccccatcgctgtttagggaa

SEQ ID NO: 136035 - DNA, 216 bp, Homo sapiens
ctgcctcagcctcccacagtgctgggattacaggtgtgagccactgcacccagcctcaaatgtgtatactttcataccagcttgtaagcttctgagatcaggtatggtatctatttctttatatgcataatagtttgaatatgctagttcttaagttttaaaattcaaattgagccatcataaacgtgggcacagattatggagggggatcctcta

SEQ ID NO: 136036 - DNA, 535 bp, Homo sapiens
attcgacggagactctccaattctcttgagatgtacacaagtaccatcttctgagacaagctttctgtcttatctatggatcaacggattatagatgggttgaaaccagctttgattatcccatctggccaccctaatttataattcagtaatgactttaataggcaaaataaggaggaaaggaggctcgcagttacaaactgtgagctacaaactcacagttcatctcttttcacaaggaattcatcatctggaaaaacttacttctaacagattctaatggaggtattagggtggggctcaggcaaaaagatcaataacaaatgtaaattttatgatgttgttctccatggcggaacctctgccaagcaaacaataaaagcacacactttgtgctctcttcacaacccatttctggactctctgtcactcaaatgtttatcatgaaagaaaatgtgtttcaggcacaactattaaacttctgagtgacagagagtctccgtcgaactgggatcctctagatcactccaacatg

SEQ ID NO: 136037 - DNA, 290 bp, Homo sapiens
tatgattatttggcacgttttgtttggcagattgggtcagagtagcaaattcagctattgtgtgcgtggcctcaaaagtcaggaaatgtttttctcctaaaacattatcaaccatttgttgttggctaggagcttgttggaacatggcttgggtaatgcaggccagcaaggtgagttgacaaactagaatctcgtggtagtacatttggggaaaaggttcattagtaactactacatacttgaaagcaggtttaggaatatgctgttaattcttgtctgaatgaagagga

SEQ ID NO: 136038 - DNA, 808 bp, Homo sapiens
tgaatgagttaatgaaaagtgccaagggaaagcagactgaggatggaaagtagaactgaagatcaaggactctggagtcctgcagacatgggttcaacttatgagcatgtgaccttggtttcttgaccttggaagttcattgacttttgcaagcctttgttttctcttctaaaagatccacagcattttataaaactttcaccatccataaaaaagcaataataatagtaccttccttgaggggttgttgttaaggattgagtgagaattttttaagtgtgagcacagtgtctgaaacataacaagttctcaacaaaaagttggttattactacactgcatttaaagttaatgcttttatttacgaattatttgtagttgttaacagcataatgatccaaatatagtcatttcattgatttttttttggattagtttctatagagttagcttctttaagaataatatttgtcttaattttatagtattttatacttttcatagatagcttatttcaatgacacatggcttcgatagaaagtctatatatttccttgaatccttttaaattatatttttctgaaatgctaacaacaatggtggttagtaaggctgaaaaggagttccattttggttagtcctgtagtaaggaattggatatgaaaagttggtcacaggaattaggctggatactgaaagcaaaattctctttacaaagtaaaggcactagattaatctttgccagatgtcaaataattattacatatgctttaatacggaaagatctcgagggtatgtttggtaaaaac

SEQ ID NO: 136039 - DNA, 594 bp, Homo sapiens
cttcagatgcatttttgttgcaattgtttttcaagtaatgaaaactttttattgaagaatagcttacacgctgaaaggtacatacatgatcaataagcaatttgagagattttcacagaatgaacacatgtgtgttatcagcactcagaccaagagacagaacattaccagcagcccaagcgcccctgcaggccctcagtcaccagctccggaagggacctctcacccgacggctgttgcctgttttcaaacttaaaaaaaaaagaagactgactgggcacagtggttcacatctgtaatcccagcactttgggaggccgagacaggtggattccttgaggccaagagttcaagaccagcctggccaatatggcaaaaccccgtctctaccaaaaatacaaaaaaacaaaacaaaacaaaaaaaaacattagctggatgtggtggcgcatgcctgtaatcccagctactagggtagctgaggcaggagaatctcttgaacctgggaggtgaaggttatagtaggcagaggttgcagtgagcagagtttgcgccactgcactccagcctgggtaacagagtgagagtccatctaa

SEQ ID NO: 136040 - DNA, 342 bp, Homo sapiens
acaaacaatgagatcatgttattttcagcaacaaggttgggactgaagaacgtatgaaatatgccaggcacaaaaacataaatattgcatgttctcacttacatatgggagctggaaaattttatcacatggagatatagagtggaaagatagataacagagactgagaaggatgattggggctgagggtggaggataaaaaatagtggattaagatgtacaaatcatagaaggaataaatttaatgcttgacagcagacaatgtctattggctgtgctgtactcactgcttcaggcaataaaatccatgcccttttttttttaattataaaaaatttttac

SEQ ID NO: 136041 - DNA, 151 bp, Homo sapiens
gagggggtcacacaatcccacgggcgccactggcagaaatcatccaggcatggagttcagttaaatttaactcagtacaggaaatgttttctactccagctggatttctgcacctttgagctgtgaatttagatggatgagcaacaatctc

SEQ ID NO: 136042 - DNA, 582 bp, Homo sapiens
cagtttatcatcagttctggccacacaggaaggcaactcgcaccccttgcaggtcggtggccaggcccttaaaagcaccctgagagcccccagcattttcttctcctgctatggctgctgtggaagccgatgctgagatggtggatcacaacacagagggaacccaaacccccaggcaccaccaccagagggacagcttggatagggccaaagaatgcttcagcaacacaaagctgaagtgggcgtcagtgacacaaagacttccgttgtgccaagcctcggagacttgtaagtttgttactgcagcagagcctggcctgttttgatgagcacatatacttaaacgcacaaatcgatttcgggctgacaaaaactcaaaacagtttcctcctgaaggcccacgtggtaacaatcctctaatctgaaattctttacaaacacaatgatactcaaaaagaaaccaacaagaaaacctaagttgcatttattcacgtccacgccatctaaagctactgtgtaaagttagtgactgtctagaggaacaagacatcactacgtcaagaatcacaggcatttaccccc

SEQ ID NO: 136043 - DNA, 245 bp, Homo sapiens
cctctgggacgcttgggaactgtgcccctgtttacagacggcaagcccttagtggtagggccctgagattctgagaaacataaggtctgctttatttaatttcctctcgtttaccaagagtcacaacctattttagtaaataaattcaggaaattggtaaagcactttactccatccgttatgcctcggtcatcagcatggttgtcacggtctctctggctcacgggctgctgcggctcacagcc

SEQ ID NO: 136044 - DNA, 365 bp, Homo sapiens
gtgggttgaccggggcttgtgggttgaccgtggcttgtgggttgaccggggcatgtgggttgaccgtggcttgtgggttgaccgtggcttgtgggttgaccgtggctcgtgggttgaccgtggctttatcatctttgcctcaaagcagctccatgtcacctccagctcaaaacctcagtcattttgctctcacctttgagtaaggccagggacctggaaaagtgggactaaaatgtctccaggacgttttaccaggaaaactaccagaacctggtaccttcttggttatggatggtaaggggagagcaaaatgactgaggttttgagctggaggtgacatggagctgctttgaggcaaagatgat

SEQ ID NO: 136045 - DNA, 229 bp, Homo sapiens
ccagttactgggggagaggaaatgtatgcaactgtagtcccagctactggtggggtagcggggagttgggaggccaagggcagctgaggtgggaggatcacctgagcccaagaaggtcaaggctgcagtgagctgagcttgtgctactgcactcagcctgggcaacagtgagcaaagtgagacccccatctcgaaagagaatttaaaaaaaaaaaaagaagaagcaaca

SEQ ID NO: 136046 - DNA, 322 bp, Homo sapiens
gggtagaaaacaagaaaaagcaagaccgggattcccctagggtgggactctaacccacaattctagagggaatgccaattccgaacaccccagagcatctggcatggatgacaaacagtaccaagtgctgaaaaccccagagcatcttgggagtgtccaacagtgaaccccaaaggcatgagacctaacacagttgggggccacagtacaacatgactctggcatcccaggatcaacacagtgggggaccactcacaaccaagtgtcttgctttaaccaattgctcaactatccaaaggaaaaactacaaacgtgacaaaga

SEQ ID NO: 136047 - DNA, 268 bp, Homo sapiens
aaagtgttatttcagctgtcttaactctaatacataaattactgcatcagcaacatccatacttaagagttcagagagtgagaatctagggccttgtggcctagctagcatttccagtggctatccttggctacacctctgtcctttcaatatccctggtatacctacgttacagaaaatctgtgttaacaccaatgtactagggtgtggtgttatatacctctagtctcagctacttgggaggctgaggcaggaggactgcttgagc

SEQ ID NO: 136048 - DNA, 393 bp, Homo sapiens
tcgggggaatttgtgttcccgttctccttaagaagcttgtaccaatgttctttccctcttctgcagtcagctacccagcctcacctgtgtgatgggacatttgattttgaattgggtttcttttttaacatagtcaagttagctgacacagtgcagctactttgattgaaataggcccctgttgtttggatttcactttttgtgtggccttcactaggaccccaactggtccctaaccagatgtcaccgtcagcacacaaatcatgaccaccctccccagacccaaggcggcctcgctgggatgcaggcattccttccggaactcgccttgggccgcccattctcactcctgctctttcttctgtccatgaagtccccctgggccccgcaccc

SEQ ID NO: 136049 - DNA, 282 bp, Homo sapiens
ataaaatttatttgtaacaccaaaatcaatattcatggcactgaaaaagtgccatgaattcaacgggcatgaacaaaacagtgaaaaatttgagtcaccaaatgtgcacattctcagctgaggctgagcaaagcaacattctgtcttgttttagttctcaaactataaacaagtgtcctttacatggtctatttagggccacgctgttgtgcttttgtgtagattttgccgtttaaaagggcccttaagcacagtgctgaagtgctatcacgctcttaagca

SEQ ID NO: 136050 - DNA, 744 bp, Homo sapiens
acaattctaaactcttaaacataagtatctgataataattggaataaaatttatagtaacagtctgtgcctggttccctatccagttatatttccagttcctgtaaaacattattctttatagctccccctgtgtctctgttgaataaaactgtcctagtccatttctttaatgttgtatcttaatgatcagattaatatttttatcaattttttaaaagtatcaaaaaacaaaatgtggcttgctcaatttttacttttattttttaagttaaaaaataccagacactatttttgcatatttttttctatttgtaaaaataatcttcctgtcattatcagactgaaaatatttgcaatgaagactaattttctaccaaaaaactggctagatcaaggatgtgaaagttcagagaaacatgttgatgtactttatacaacaataaacagtgctgttttcaaagacaaaacaaaacaagaaacagaaagacacaaaagaaacaacacacaaacaacaacaagacaaaaaaacaacaaaaaaaaaaaagaaaagaacaaacaaaagaaaacgagaagacaaaaaaaaagaaaagaaaagacagaaaggaaaaaaaaaaacaaaagacgagaacgaaaaaaaaaaaacaagagaagacaccacaaaaagagcaaaaaaagaaaagcaacaaaagaaacacaaaaaaaaaaaacaggagaaaaagacaagaaaaagagaagaaaaaag

SEQ ID NO: 136051 - DNA, 288 bp, Homo sapiens
ctgaaccatctataatctgaaagctttttcaaatactagtaagccaggcacaattaccaattattcaaataacatttattatagctagtgatttccactgactatatctgcaataattagagctggtaggtttttaaaaatatagattttaagagtatatggaaagtccttgaaaggcaatgtttctgggctgttaggaataaggcattcctttaacacgaaataatgaattttaaacagtaataataataacaaggaagaaatgaatgactgaatgaatcagaaggc

SEQ ID NO: 136052 - DNA, 709 bp, Homo sapiens
agttcgacggaggactctcaagaagaagcctttcggtttaggttcttctgagagctcaatcactgggattcttcttttaacgactggaaaatgtctgcttgattaggaagttagtcatttcacattttgacatctaaaacaatgggaagttaaaaagcctcacaaattacatttataagtaacaggatacatcactttaaagatgaaaacctcaaggatttgtggcgcctttctttgttctcgttaatcctattttactttttgagtgttagatattctgtaaatatcggcatttgaattcaaacaatagatgttgataactagttctctaacttggtacaaaaacattattattgtctgtcagcagattttgtattctgagagttaaccttctgtatttgatgttttctttgtcaatcactattattctagcccgaatactgtcttcctcattccgttttaaaaccttaagcagttgtaagcacaaacacattattatttatattacggtagaattagagtggtaaaactgagacctcacctgaccaggtctccatgaagctgtaaataaagactttctcttccctctccagcacatatttctgatgctggtgtctctacagtgcaaaggacgagatgtaagtcagaggaagaggaggaggaggaagaggaagaggaggtggtggtggttgtagtggcagtggtagtg

SEQ ID NO: 136053 - DNA, 589 bp, Homo sapiens
tcggatgcaagtgtccctctaggacttgtgcagcaaccctcatccatgtctgatagcattcacatccgtgcccaatagagggacctgccccagcctctgtgtcccctccacacagtgggggcctcttcactggcagtggaactgcatgcctgccatactgcttaacatcatccagttaggggccttggactgtgaatgcaccatacagatccctggctgtgatcaaacaaatcacattccctcacatgtgtttcaccccataaggcagaaactaccacccatccaaccctctggccttaccccatgaaacttcccttggaccttcgacctttcctcctaccccctctcaccttgccattgatagagattatatcccaaagccctctaaccatctaatcctgcctggtgtagtcactgactcctgaccaggtctccatgaagctgtaaataaagactttctcttccctctccagcacatatttctgatgctggtgtctctacagtgcaaaggacgagatgtaagtcagaggaagaggaggaggaggaagaggaagaggaggtggtggtggttgtagtggcagtggtagtg

SEQ ID NO: 136054 - DNA, 503 bp, Homo sapiens
tcagtccccacaaacagaaatgctgttgcagggtgagtgtgctaaaaatactcctgggatttttcaagtccttggagacatccatcttaaaatagtgcaaaaagaaccgaataaatactcatttatgtgctattttaatgaacaactgcaggcaatatgcctaatatggcagggaggtcttcagtgtcctttctccttcattcttgattagcgtctgagctcagatggcatgcatcagtatgtttgtggcattacagaggtgctgggagtgagggagagtgcaggggtagggaagcattacatgcctgtaatcccagctatttgggatgctgaggcatgagaatcgcttgaactcaagagggagaggttgcagtgagccaagatcatgccactgcaccccagcctgggccacagagcgagactctgtcccaaaaataaagaaaagtcagcttctgtgctcctgcccagaaccactgaatcagatgctgggtgtcagctctgga

SEQ ID NO: 136055 - DNA, 111 bp, Homo sapiens
tggtggagggaaaggaggctaggagggggcagataactccagggatcctttgattggaaaaatcctgtttttagaactcctgtcagagtaacaacaaagcaaagaaacatg

SEQ ID NO: 136056 - DNA, 431 bp, Homo sapiens
tttgctccagctgtactgtaaacactctttgtttactgcataccctcagtaaatacctgttgaatgaccggatagatgtggcagcaggtacattacctcaacttctggtacaccttgggagaagctttcccaagaacaccctgggttcatttcctcctagcctctgctctcctggggcccagagattgaaggcgcttaacctgctcatctcaccacgtctcccgccttatctctcacccttctcatcagcaccctacactccaccacgctggcttcatagctccttccccgaatgtgccaggcttctctgtgaccatctcttgagcgtacagctggctatacctgggctgccctcctcccacatttcaggtctcagttcagacacccgcaaccccaccatgtatctccccagtacagccatactcctctgc

SEQ ID NO: 136057 - DNA, 2606 bp, Homo sapiens
  misc_feature (1384)..(1384): n is a, c, g, or t
ctaaatatagttccctcctcgggacaacaaagaagccatcctctgaatgactgcattccccatggccagcttctgggctgtttgtcagattcccccagcaggatgggagggaggagtgggggcaaacaggagtggccagggctggagaggagctgctgaagtccatgcagcagggtgctgtcttccagccatatgacatttgggcccagacgctcagtggctatggccttgaccgtgagttcctgccttctgtctctggggatgcatggggcccagagccctgtcccgggcaggtgctactaagttgtgactgaagaagaggagagagaaatggtgatctccccagcaggaaatgaaaagtgtctgtcggctccagtccagtcaagctgggtgacctctgggcagattctatccttaagtctcagtttccacatctgtgaagtagggataaggactatgtcaaggagactagagagaaattgtgccaggtggcgggcactagtggtcctatctggccagggctctgtgcctgcatgtgatggattgcaggcatagcctttgaagtgctttttgatgtgcctttcacttcaggatggagtccctcttctggtcccagggctaagaggtagatagaggccctgcaaggtactcattccttactaaaacaagaccccaagcccagagcccctgccttccctcccaggcctcttatttctgatctcagcttctcagccatccagagcccagttgggtgctgaggcccctttaaaaagcccagagcccccgccttccctcccaggcctcttatttctgatttcagcttctcagccatccagagcccagttgggtgctgaggcccctttaacaccttggctcaaatgtggacagaacccttgagcacagctaagagcaattagaattatggaaaagaaaaaaacctggatttctcagctcagggcctgtctgtgcttggagggcactgacacatgtcctctccacccacccactcagttctactaagggtagagggcctgacctcttcctcaggtctaacaaacactgggaaaggtgaggccagcccctactgctagcggtcttcaggagagactcaatacaaacagctttactggatggagagcctggcctttgtacaacaaaaggtcactctgccccaggacttgcctggggtggacatacaggccacttcccacctgtttgacaccctcaggatgtagataagtcaggactagatgtttgatccccgagtgctgaccaggacagagatgtcaagctttggtggatgccttaaggccctgttgatttagaccttcctttctgctcacagactggccccctggcaggggtgcaccatagcgggatcagncattggatgtgtggaggagcagatgcatagctatctgttgctatggccaccgttcaccaagcatgaactctgtacaacagccctgcaaaacagctcctgccttcatctttgtttttaatagaggtagagtcagcagcccaaggtttcacagctgttaagtggcaaaactaggattcagtttgtgcaccttggagtccggaagtctctagtatgaccacaattcttaaagagtgtgttcctgctgggaatggcagttgcacatccaactagacaagctggtgggctcgattataacaaaagcctcaagctttcttgaggggagtcatgtggaactaacctaccagcactccttgctgataccccaaaggaaaccagtagctttggtatatttaggtttttcaaaggtttttggcaaagttccatgccaaaattttttttccgtacctagaaaaacaattaagtttgaagggaatatgctttgtcatgcataggagcctgtttagggaaaggaagatattcctaaggatgaaaatgcacccgtcttgatggataattgtaaacagcagggtcttataggaattgatgctagaagaatcttagctcatatttttaattaaagatctgggagaggaaatgtatagtgaaaatcgcaagtctacgaaggcctttcgggggaatgagaagccaaattaatggaatgtatgttttttgctctagttctcaaaccattgctaatgatctgcattttgttggcctgtttgccacagtaagatgcaagtgctttcacccactcaacacatatttattgtgcgcccatgatgttccagccacagtactggccacaggcatgagtgtggtattattctgctttacagaagggctttacaaaagcttatggtttcaaaatttccctgcttttgtttatggttctaacccttgcttgttttagaaatcattatgcaaagaacaactgcattctttttaatgtctgcatggagggatttttctgtgaaatgactgtacaataatcagttccctctggttggacatttttgttatttctggattataaataatataacgatatagccttaaacacacttgttctcagatatttacatatatggacaagtgtttctgagggtagtcaccaggaagggaaatgattgggtcaaaggacatatacatttaactatttgatagatgctgatggattgcctgc

SEQ ID NO: 136058 - DNA, 356 bp, Homo sapiens
caattgctctgttttctgttcccttggaactatgtatatacctctactatagctatcacattttattgtaactttttttcctcaccagcctatagaatccttaaaagcagatgtcttatcatatccttcctaacacaaatttggtgaaaatgagtagagtgaatgaaggtcgaagaagaatagcaatacagccactctgcagattcgaggatggacatgtttgagccctcattaatcccatcttcaggaggctgcattggtactatatgtggcatttatttcaatagagatgctcaaggcaaaaacgatattttactggtctacaagttcccaaatttcctttaggaaaatacttg

SEQ ID NO: 136059 - DNA, 489 bp, Homo sapiens
ccacaaactagtcattgttaaagctgctcataagttcacagaggttcactgtactcctcctacctactcttctaggtgcttctaagttttcaaaataaatcttaaaaattatctttagcagatatttcctacaatttaatatacaagtccagataatccaattagtgaaaatacattctgcagctagctaatcaaggttcagactcagatattctctaaagtactttgaagttacttaacagcttttaggttactagtaatacctgctctgaaaaggttccaggctcaaactactcctgctcgagttccaccgcaggggattctgggaactccattcagtatttgttcaagcgctaaaacagacccaaaactactttcttggataactatgggctagaccaataggtaggcataactgctcttttcacccaagatgtgtaaatggcgaggttcaactgtcattgccgtatcattcccatcaacttctgg

SEQ ID NO: 136060 - DNA, 419 bp, Homo sapiens
agttcacagaaaggttcttgaataaatgcatatgcagtgaatttctatgaacttgagagtatttatttccctattctaactgaagaattacagatttttgaagagtacctagaatgtaataaacactatgtcagaagttatagaaataagaaaaatgttcagataataagacagtacaaactaaaagttgcattctttatgtactgaattatggaaatggattttgtctttgtgccttcattctacgtctttattccaaagcaaataccatataaccttttcaataaaactctgtcatgtaggccagagactctgccatcagctcgtgtttctgttccttttatgtttctgtaggatacaatgatttagaataggatgtgtccagggcttgctttttttgttttgttgcaataaggaca

SEQ ID NO: 136061 - DNA, 669 bp, Homo sapiens
gtgccaggaggatcttggacataattttcagggtgtataagccctgcactaaagtaaagtttaccagtgccaagagtttgacgttttcttcttcatgttttctttggctggagcctggctttagttgaagagttctgtcaacaaatggaattctctatttgggactgggattcttgattggtggtgcttctgtctcctcttgctgtgagtttcctcaaacttagagtcctgtgggatctgtgtttgaacagagactggaaatgcttacctcatctccacatttcttagccatttgtcaccagactgtagattgactggtgggatgcctgtttctagagagaaaagatactgcttttctctgactccagctgagaagaggttggttaaattacgaatctgatgactatctatgaacctaaggaggaaaagttaatttcttttgagggtttgcataatgttttaaaacaaatttatagaaatatagatgatggaaaaaagcaatagggtaaacctaaattattaaaaataaataatacataggaaataaacagcatagaaaagaaacaaaaaagagattgttaccaaaaaccataagtttttttttttttgaaaattctaagaaggtggataaatttctggaattttcaatgagcaaaaaagtgaaaagat

SEQ ID NO: 136062 - DNA, 249 bp, Homo sapiens
gctgccagaacacaagagctagaagctttctgactctgtagagatagaatttctacatttctagaaacacaagaattaccagaagatgcattaaaagaacatacaatggaaatagcacggtggctcatgcttgtaatcccagtgctttgagaggcaaaggcggaagggccacttgaggcccggagttcaaggccagcttgggcaacatagtgagaccctgactctttaaaaaaaaaaaaaatagccagg

SEQ ID NO: 136063 - DNA, 314 bp, Homo sapiens
taattgtttagggtctgcaggtgttcaccttgggaaacattgcaattgttgctcaggaataatactcttaaatgaaaaattcacaaaaggaaatcagtattctatgatagttacaagagcacatcaaaattaagttttaatatttccatttttttctttgatttttaaattttaactggagtcttctccatccagagaaacaaatgtctatgagaatgagttgcaaagagactgagctgctggctttattccctagaaattcatggtataatgaatttatttcctagaaatttattgaatgaattatttaatga

SEQ ID NO: 136064 - DNA, 358 bp, Homo sapiens
ctgggaatgagtgtggggtaggatgagcccttagatagcagagggtaaccaagggacatctgaaaggctactttaggaggaagctggcatcaaagactggaatccaaagaagctatgcagacaaaaagcaaccaggtcctagataataggaaggcatctaagagggggtaggagcccagaggcacaacctaaggaacagccacactcatgtctccagggaggctgcgcataagtaaatcagtcacaagctcccatcagttttgattattttctcttctttctgaatttgtttcctgtcttcctcacttgagtgtgggtgggagattgcccatggccatgtggacaatcttctctccat

SEQ ID NO: 136065 - DNA, 372 bp, Homo sapiens
ccagattcaagtgattctcctgcctcagcctcccaagtagctgggataccggctaattttgtatgttcggtagagacggggtttctccatgttggtcaggctggtctcaaactctcgaccttaggtgatccgcccgcctcggcctctcagattgctgggcatacaggcatgagccaccgcgaccggccctctgagtctttcttatctgtaaaatgggtataataatacctatctaatcggttttagtaatggtggagataatgcctgaaagtgctagtatagaggtttaatagccagcaaggactgttattagaatgaatagtaatatgactactgtcacattttgcaaatgtgtaaagaagagggctaagt

SEQ ID NO: 136066 - DNA, 181 bp, Homo sapiens
ttcatgtttaactaaataactaaatttatactattttttagactattacaactaagtattttgatagtaaagtacagtttttaaataatgcagcattcatttttattaaaactattattcgtgaacagctttgtattcatatactttttttttttttttttttgagatgaagtctcactct

SEQ ID NO: 136067 - DNA, 865 bp, Homo sapiens
taatatagccatgtgctttcgtcccttagcctttttgcaagtcctgacttagccatcctcccctaacttccattccagtgacttcaaacagggagatatattgccaccaccccaccccctgtggagtatttggcaatatctgtagatgttttgggttgtcaggtgtgtgtgtgttgcgggggaggtgctagaagtatccaatgggcagaggccaggagtgctaagcataaggcacaggacagtcctctggggggacaaagagctacctggcctgtaatgtcgatctttggtgattgagagaccccagcgcccaaagacatccctaaccttcaggatttaatcctcttcagtcaaacgtttccttaaccctatcagcccatgtttttcttttcttggtgaaagctgagcacttcataggctgtttacaggtccttctccacaggaaaatacttcctccaggacaagaaccctgtcttggttccaaactttcccaattataagagtcacctttgcgcttgttaaacctgcttccaggtgcttctcctgaggtttcctgattcagctagactggaggtgggacctgacgaggtggttggtttttagtgttctcaggagtgtggatgttttaataggtgttgggtcctcatgttaatcgacctgtgggtgtgtcacagtctttgtgtcacagatgtcctgagaaaggaaacaatttgaggatgagtggaggggaatttgtggtgtagagaaggccacagttaatatgtggggtgaatttctgaagacctctcagttcaaaacttgaataactcaagactcatcctgacaaaagccagtggatgtttcttttgccaaataaaatataccc

SEQ ID NO: 136068 - DNA, 1113 bp, Homo sapiens
cccacagctagctccctctcagccccacagctggactgtgggtgggggtgggggaattggtttcaacctccttcctggccctccccaccaaggagcatatgactgacaggctctccctgccccctgccccaagcgtaacaagtgaccactgctctctgggggcagccactggcttcaggttcgcctcctactccattgcctccataattacaagatgctcttagcctgactcccacggactcccatcacccagcgctcggctctctcggtggggagggcagagaatgtttcactgtccctctgtcttctgtggcatcctttgccttgcagccacagcccagctagcccaggccaagggagtccgacccccaccccgaagcacagggaagttgctgccctttcccgcagtgacaggaatcctctcaaaggttctggaaggcaaggatgcggccatccctggagacgccaaggaccatcatgtgaggtggcttttatcctcctcgcccctactggtacagacgagaagaaactgtgactcagaagttaagcattttcccatggtcactgggctacacagaaaggccaggatttgaacccaagcttctgcttccacccatcttcattaggagtcaagttatactgtgggtctcaaccatggctgctcactggaatcacctggaagcttcccaagtactgatgtctgtgtccccagcccagaggttctgatatcattgtctgggtgtggcctagccttggatctgcaaaagctccctaggcagttccactgcatgaagttgagaaccactgatacagagtgacctcacctccccacccccaatggaggtgctatggtttgaagagcaaaactcatgttgaaatttaactgttcttgcacctcctgcagagcctgggagctcccagtccagccaaggatgttggatctcatggtcctaagtacttctttgacaccccattcccctcagtaaaatagtttgaccccttctccaccaaaaaaaaaaaaaaagaaagaaatttaattgccatgatgatggtattaaaaggtgggacctttaagaggtgattaggttatgagggttcagccctcatgaatgg

SEQ ID NO: 136069 - DNA, 558 bp, Homo sapiens
cccacagctagctccctctcagccccacagctggactgtgggtgggggtgggggaattggtttcaacctccttcctggccctccccaccaaggagcatatgactgacaggctctccctgccccctgccccaagcgtaacaagtgaccactgctctctgggggcagccactggcttcaggttcgcctcctactccattgcctccataattacaagatgctcttagcctgactcccacggactcccatcacccagcgctcggctctctcggtggggagggcagagaatgtttcactgtccctctgtcttctgtggcatcctttgccttgcagccacagcccagctagcccaggccaagggagtccgacccccaccccgaagcacagggaagttgctgccctttcccgcagtgacaggaatcctctcaaaggttctggaaggcaaggatgcggccatccctggagacgccaaggtcagggagccctgggggaagggggagggagggcttgcgtctgttgcaggtcccaggcaaaggggctgctttccactcccgagggggg

SEQ ID NO: 136070 - DNA, 686 bp, Homo sapiens
ggatttttatcattttgattttcctcaaattgatgtgtaccttcataagaatgatcatagaaaacataaccactatcttaagcataaaatttagcatgcaagtattcacatggaaatgaaatatttgtaaaagctccctgtaattgtttttctgagaataagaaaatgcccatttggtatgtgtaagatgatctgtgtggagaagttgttttcccgagtctttgttcagcttgatcctgggactcacgcgctctgtggctgggcttattgtaccaggcaagcaaagcctcggctgttcggttgtcaatgcacagatgctcatccactgagcaacaaggagaagtcagcccctgtcaggccccagtgccaagctcactgcttacccttctgagccctattcctttccagtacctgggggccttcaacagggagaaacctacactctgcaagcataatggattgagtgagggctcacagtttttggaagactttactgttggtcctacatggagttttaaatcttgtgaaatcttccttggtatctaaatcaagttttatacctgagggcttcttttttttttttgagtcttgctctgtcgcccaggctagagtgcagtggcgcgatctcagctcactgcaacctccgcctctcaggttcaagcaattctcctgcctcagtctcccga

SEQ ID NO: 136071 - DNA, 163 bp, Homo sapiens
atttgagggatctggtgctcttcatgggcccttccacgagggcaatgggacattcctgtcgcagcatctggggcctcctcctgcccactcaaaggccagcatgtgtgggtggggccaggggaggttgttggcttgcttgagccccctgtgtgacctctgcctt

SEQ ID NO: 136072 - DNA, 816 bp, Homo sapiens
gaatgaaacagtaatcaagacttgtgtactataaatccttttctgattccttacagatttgtagtggtaagggttagatttaattttatataaggtttaaataatcatcaagcttatataatgtgatctgaattgcagttgtttgcatttcctctataaaaactttctctaataaggaaatcaaatgctttgtagacctatttaccttacttttgttgcagtcactgttgctgggatgctgtacatatattccggggtaatatatgggtacaaaactgtacaagatattgaataatttagctttaaaaaatcccacaaattttatgaaattttacagtcctgctacttctgcttttgaatctcttgccagaagacatgggtaaaatatctgcttctctcattttaagagcacagccaagtgaattattaaaatagaaagtatacacttaatacagctcttagtttgtatggaccctttacattttcagtattttttctttaatgaggttatcttaactctctagcattttaaaagtgtatttagaattgtttttcctgtagttcactatataaagcatttggtttgaaaaaaaaattgttacgtgtgactcttgataagacacagaaagagtgaaagagcatgagtgatggccaccttcctggctgtctctaagtagcagggtagatatgatcccagatgcactttagcaaacggaacttccaacttatctgagtatttatctttgacaaggtagggctaagcttgcctagatttgctttggatctttctagtataagaaatattcacagaaattg

SEQ ID NO: 136073 - DNA, 304 bp, Homo sapiens
gcgtaagattacataggcgaggacgctggctcacgcctatatcccagcactctgggaggcgaaggtgggcagatacctgaggtcagaagttgaagaccagcctgcccaacatggtgaaacccctgtctctactgaaaagaaatatcaaaaaattagccggggcgcagtggtctcgctccctgtaatctcagcactttgggaggccgaggcgggtgaatcatttgagatcaggagttcaagaccagcctggccaacatggtgaaaccccttctctactaaaaatacaaaaattagctggacggtg

SEQ ID NO: 136074 - DNA, 247 bp, Homo sapiens
gaatgacttacctcaacttcccggggtagctggggaaactcagtgatataaacagaagtactttggacactagaatctatctgctgtgcaaagtcagccgctaatgtttactgttacccacttaccaaaattattgatttccccctaaaacgcttttcagttgagttgattaaaatgttttctacttttaaaaaactaattggtgaatctggcaattgcttaagactcagcacagagaacacgtatc

SEQ ID NO: 136075 - DNA, 533 bp, Homo sapiens
gtcctgttataaacagtactgatggcattttatgtgaatatttatgagggaccttttaattaaaggatctcaaaattctcttatcacctgttagttaattttcacaatgtcatgctagagtgcgtgcatagtaatgttatatgccaagtacagatggagagatcaaagcctgcagatgttcagttacagaacttgccaagaacctgcagtgatcaactgggctttttccagcctggggcaccagcctctggttaccggtgccacccggctttccccagcttggtaaccagtgagaatcaggtctagggctagctggaaaacgacaggaatggtgactttggactcaccccaaccctttcctgccatgtgaactcccacctcccacccactcatcttcctttcttgtcagtctgtttattactctgagctgatttccactgaccccagaaaaggattaattgataactacaggggttagtaattattgacaaggtcacacttttccaaaaaatatatgcattttcaaatggaaa

SEQ ID NO: 136076 - DNA, 325 bp, Homo sapiens
ctgagaaagtcttaaaggcaaaagtgatttggggcagagatgtcttgcatgaggggcctcaaactttgtcatcccagaggccctagtgagacctgttgtcattttctactacttggacatgaaagcagcttctcaaaaataacttctgacaaattcaaacccaactgacctgctagtaccataataaaaataataaggtgttgtgactacaagaaagaatagagaaaattaaaggggcagtgatccatcatgattgaaagctagggaaagccgtgcatagtgagtaggctcagggcaaagaaagctgggccagatcttagtgccc

SEQ ID NO: 136077 - DNA, 672 bp, Homo sapiens
gggttttaagaaaggcattgacgtccttgggaactaggtaatacagtttcctctccttttcctatttttgattttggctttggctttgtatttgaaattctcttcttcacttcagatggaggtgtgggaggggatgtgtggggtgtagtatgtgtggccccacaggtagatcacctgatcagtcttttaccctaaacataagagagggaaaagcacaaaaaacaacagctctaagatggggcatgtacatgtccaaatttgaactcagtcatgtttttgtcaaactaagatgatgaactagttataagatgaagtttgactggacgaatgtagatcctattttgaccataaagctagttgcataagtaagcacaggatgatgttgaggggtttgtggcttaggagtagcacttaaggacatctgcggagggccaaatgtgagtccgtagtgagatgtggcaacaacaaaaataaaatctcagatgcattattgaaagaaaaaaagaatatctagaattgggggagatgataatcctatttatttttttttttgagacagggtcttgccctgtagcccaggctggagtgcagtggtatgatcacagctcacttcagccctgccagtagctgggactgtgggtacacactactgtgcctggccaacttttaaaa

SEQ ID NO: 136078 - DNA, 191 bp, Homo sapiens
ctgcctcagccttccagtgggctgagattacaggcatgaggtaccacatgccagtgaaaggctcttcttggagatagaactgggtgactaatacatgtagaaagaatgatgttttaaagtcaccatcttacagtccccatagtaataattgatttagtaattgcggaaaccattgtgtaaaggattgccag

SEQ ID NO: 136079 - DNA, 623 bp, Homo sapiens
cagccactgtgcctggactcatacgcatttaaaatctggcctgcacaagttgccagtgttcattcaccttaataatttattgttatcaagaatttatatgtgtttttatgtagaaactctacccaatgtaataatattacaaacataagcctcctaaatagcagtattatttacttttgatattttccttagattctcctgagtacagttgtttcattataactgttcttatgttgtttgtagaatattaaattgttcaaaaggaataacaatatgcaaagtatttgataataaaagctcgaaatgaggccactgcacataaagactaaatagattcatttgtgtagaaagccaaaaccacaacaaatgaatgaaaacactgcaagtatagttgtttgtctgtaaatatgaaggcccaatattaattatcccatctagtaataaatgcaaaacatgagtgactatacaccttgacaaaagcatctcattgtttctttcacacaattgaaagccaagtagaaagcagggtaaagttactgatataaatatacgtgcacaaaagagttaacataacaggtctgagtagctattgtcaggaaatcctgattgcaaggttggtattt

SEQ ID NO: 136080 - DNA, 661 bp, Homo sapiens
ggaaaaaacagtcctccttgagggacagctttgggcttcagttaagcctggagcttcgtggagacccagctccaccctaccctctatgaaatcctacgtactgatactggttttgtctaaaacacagatgaaatatagagcacgcctgttacaccagacctgggtccacatcagacatcactaatggatcagaattgccacctgcaaacgtgtgtctctgggggtgactgtctccgtatctccagttctggtttgcctgcacagcccagaaccctggatgcccctgcccaccacatggtccatttctcccttagggaggcagagacagcagagatgaagcacattccagtgccagcacctctttgttcctggttccacatccctggctgctcggctgcacacagctggtcggccagactgttgcatctgttcccaatattgatgtgattctcagtgatttgctttggaaatcaaaacctggggattgttggctttatctaaaaagcaagtcctgctccactggggaagaggaatgactcggctcacagcagagttgcgtttgtttggtttttcctgtcggacacaaacatccacccaacgggtcctgcccaacatggacgatgcgcgagcctcctctggagtttgatttgggaggataata

SEQ ID NO: 136081 - DNA, 152 bp, Homo sapiens
ccagctgccgcagactttcttacaaaactctaggaagattagacaaatatcttcactagaggttatttatgcaataggcattgtttctttttttcttttatttttggagacagggacagattggatatagtgattcttaaggaaaactatag

SEQ ID NO: 136082 - DNA, 159 bp, Homo sapiens
atagggtcttgctctgtttcccaggctgaaatgcagtgatgccatcatggcttactgcagccttgacctcctggactcaagcaatgccttcccctcggcctttcaaggagctgggactaccggcactcactaccatgcctggctgttcttattttttgt

SEQ ID NO: 136083 - DNA, 408 bp, Homo sapiens
gcggagctgacagtggccctcatctcaacggggtcaccatccatgaagcactgggtctggccctcggagcccgacaaacaaaaccaggtagagccgaggcgtcttagcaggtgctgctgagctgatggagaccctccacccgccaggcccgcgctgcctccacggacctgcctcccaagaagcacccctcctgccagcacccaaccccaacaggggcgcagccctcaatccagcgtgtgcaccatcagatcacagccccctctccccggcgggtggggctggctcttggccagcggatcccacagacgccccgttctctgggtgttgactgccctccctctccccagaaggaaagacagacaccatcttccataagcagctgagtgtatttctgctcatttcccaccg

SEQ ID NO: 136084 - DNA, 798 bp, Homo sapiens
gagactcaggacacaacctatgtgtggttgagatcttttcctgatgatcagttcatgtgttcaaaaaacatacagaaatgaagaaggcaagggccccaccccaggagacacaaagcctaagacaggaaatgagacctgaaaataatcatgataccaaaatagaaaaaattgaatgccacaagaaatcagagaaatctgatgggaaatagagctacacattggaatcactggaaaacatttttaaaagaggatgctcaagccccacccattagttccagtttaaaggtctggagacggacccaggcattggtaatttttaagtcttccctgacactactaacatgtaacaaggatggagaactcttgttgcaataggtagaacttaaaactaaatgaatgattttcagctagaagtactggaattacctaaggatctttttcaacatacataagactatacctttttggccctatttatgtaatcctcttgagaaacagaagctgaatggaaaagccaccttattttatatattacattatatagaaagcattttcaaataagggataagtgatgctaaaccttctctaaataatatttatgggaatgttaataatatgagtattctaggctgggtgcgatggctcatgcctgtaatcccagcactttgggagactgaggtgggtggatcataaggtcaggagatccagaccttcctggctaacacagtgaaaccccatctctaccaaaaacgcaaaaacaaaattagctgggtgtggtggcaggcacctgtagtccca

SEQ ID NO: 136085 - DNA, 610 bp, Homo sapiens
ctttcttttacttctgtattactcccgatatatagcaggcactccttgtgtatggatagatgaactgcatgaattttgtcaaggattaccaggaaaaacattgagcaacatgaacaagttgtctttttcctgtttcaagagctctcctgcccagtttacatgcgcacctgagcacagtccttcttccctgctaaaccttgctgaacgtccttttgcctttggtttgggaatgttgggcgcacatcccaccagatccagctctccctcccatttagcttcagcagaagaggtggcagaattactaattttagctgacatgatgtttactgctgcaagtatcactaattaatgatgtaaccgcagaataacaagtcccagatttcccttagcaaagcaaaactgagagtaaaccccacactggaccactccacagcatccgagcctaccaactggaaagagacaatcaccaggggctcaatctgacccagaatttgtgctaggagaaatttaaccccataatgccatgttaaagagctgcctgctacccactcaccccatgtgcagatcccagcttgtcagccctcagggagccctcagggaataggaccag

SEQ ID NO: 136086 - DNA, 434 bp, Homo sapiens
gctggactcctccaggtggggcgcccggagcactcccgaccacctgctccaaggacactgcctcctggaagcgtccctggtttcccttcggaggtgaactcgttcagggcacttctcggagtcgcagtctcaggtggccagggcaggccttctccctatgggtgctccccacgtccgccctgggcttggcaatgagaagcagccccgccccgcgtgaccaggacccgcctgcagcgcccgcggcggccacacgggggcagcaggcgagcgccgcccgaattcccgggtcccagcctgggctggaccggagggcactggcgggttgcctcgccccaagagcctcagtttctctgtctatataatggactaggctgtctgccagggcctttttggtcctagcaatctgaccccaagcgagctttattaacaaatag

SEQ ID NO: 136087 - DNA, 382 bp, Homo sapiens
aatgtattgaggataatgggaaactcttatggagatggggagcctagagagtctagccaacctatctcatcatttttgaaatctttggaggtgaaggattggaattggaagtgcaggtgtgactcatggttttatagatagaaagagatacacacacacacacagagagagagagagagaaactgagcttcatttatggaaaggacttagaagcagtgacagcccggccaggcgcggtggctcatgcctgtaatcccaacactttgggaggctgaggcgggcggatcacgaggtcagaagatcaagaccatcctgattaacatggtgaaaccccgtctctactaaaaaatacaaaaaaattagccgggtgtggtggtggatg

SEQ ID NO: 136088 - DNA, 372 bp, Homo sapiens
atgagtgagcattcttggttaagatggctccagcaaacatgctgcttgcctctgccacaccttgcctctcagattctgagaatccaagtttgtttctgcctcttctcaagggagacagcacgtagacacatcttcctcccaagggttgtgaaatgttaatgttattaaagctcatgcccttcttattggagaatacgtgtctctttgttgacgtgctgtttttgatatgttgttactctctgatctggagcatcctgaaagaaataattgcttttactcctacatagaagattatttaagtagtgcatttatctcaattagtcagccaacaaatatttatggagtgcttataatgagccagcccatgggcta

SEQ ID NO: 136089 - DNA, 346 bp, Homo sapiens
cctcagaggggaaccaaaataaccctgaaatagctccctgctctcctaagaggaaagggttactctggcaagagaaggaatttctcagtaagttgaagcaaagatttaattaaaagacagtggcctattttacaagattcctttggtgaagagattgggaaaacttagaccagatgaattcctttccaggccatacaggcattggataatgatttaaaatgaatatgagtcgggcaggccataacacttgaggtttgtaaaataaatctttcaaatgggtggacatagtgcttcgaagtccaggattcattataaacactgataaccattgtagtaaatgaatttc

SEQ ID NO: 136090 - DNA, 255 bp, Homo sapiens
aggtgaggtaatgaaatgagtagattcatacttggttaagaaggagaaagaaagaggagaggagagagatgacattagccaatgatatggtttggctgtgtccccacccaaatctcaccttgaattgtaataatccccacgtgtcatgggcaggccaggtggggataactgaatcatggtggcggttttcccaatactgttctcatggtaatgagtaagtctcatgagatctgatggttttataaatggaagttc

SEQ ID NO: 136091 - DNA, 560 bp, Homo sapiens
gaatgcaaagtagcttgaaccaccttgctgaccaatcttaggtatcatggttacctctgtggaagcacaaggtgggtatttgtttagacttgatccttcctgggacaaagtgctggtcaggatagtaaagggagattaaatgtacttaaatgtgcttccagaagacaggtatgtcatcataaagaagaaagggctattagctcctgacctacttagaaaaagtgtaactaaagtggaaccaggaattgtgtgagatctgcctatgtcctgttctctctctctcagggagagcagagggcaggaggtttcaccaggagctcacctgactctctcctaggcacctatgtttctgactttccttagatacaaccagaaagctaacacacttagatacttggagacatttgaaacaactcgacagccagttcactatccttggctacccaactgtttgggagagtaggaatgctccagaagaaaattgaatcggcaccactttcccattttgacccttgagaaaagaaagaaagaaaatcagcatttattgagtaatttgcctt

SEQ ID NO: 136092 - DNA, 197 bp, Homo sapiens
acattcaaagatcacgaattaaatattcagaggaccattgtttcatttttgaattaaagtctatgtctgtttttctaaaattggtattcaaatctcttaagaactacagtgtgtattccataggttaactttttgcttccccatccctctaatgggatccttgtccagaacctggccttatgccttaggccttgtta

SEQ ID NO: 136093 - DNA, 283 bp, Homo sapiens
cagagagtcagtgaagtgactgcagtgaagccaggatcatgactcaggccaggccacactctctccacgttgttgttattagaacctcactatacaaatgagcatccgtgacaacaggctggccaaccatcccagtttgcctgagattgagaaggttcccaggatgcaggacttccaggattttggtatttggttttgtctttgtttgtttgtttagagacatggttttgctctgttgcccaggctggagtgcacaatcatacctcattgaagcctcaaactc

SEQ ID NO: 136094 - DNA, 493 bp, Homo sapiens
cagaagagacaaaaacagcatcaatgaagagcaatcatagaaggttcacagttgcctcagaaccaattcaacaattcatagggggttggcatcacataaacagctgggaaaaagcagttaaatgattttctacatgctcttagggagagactgtgtctaatctgatgcagttgctccaaaggagcgcagctaatgacatctacaccaaatatcagttcaataaattgcttcctttcattaatctgagtgtcggtgtctgcattaacggtgttaacacagcagaaggtctaaaggagagataataaggacctgtttttagtgacatgtgggggcggccctgtgaaaacaagcaaatatataactggtcccttgactctggtgaatcaaaaccatttcatttattcattctgtcactccaaaattattctttgagtgactactatgtgcctggtcctgggctatgtcctcatgtaccaatggacaaagggccttc

SEQ ID NO: 136095 - DNA, 223 bp, Homo sapiens
ctctggtcacaagagcttcaggtggggcaatcccctgttcacttgtcactcctatttagctgtaagtgtgtagagttcaagactgctcttttatcttcagtgtctttcatactgcctggctcagactagctttcggaaaatatttcctttttttttttttcccctgagacggagtcttgctctgtcgcccaggctggagtgcagtggcatgatcttggctcat

SEQ ID NO: 136096 - DNA, 659 bp, Homo sapiens
aggctgtgttctgtaggcagtaggatggcatgcccagagctttgtgtgtgcacgtgcgtgcatgtttaatcactattgcacctcagcttaggctggtttagaaagagaaggcactacctaaacgaaaaccaaaccggaattcatatatggtgggtgtccatgaagtttccttatttccctttctacatggaagacttgctgaaggcagggattgtatcttcctgacctttgtatctcccatgatgtatgtcacacagaaatgaggaaggcttcaagggaaaggaaccagtttgactgcagctacaacccaagaagagatggaaagactgtaatcagccgagtagctacactgggaaggtgattaaagagctttcattttaaaaggctcgaggtccagagggtttcatgggtgtcctctgtctgacctttaatgaacaggtggctccagtgtatttaaactattccggaccataaagaagacggaaatttctataactcatatcatgaatccaacacaagcttaatagcaaaagatgacataaagaaattattgacgattctcctgaatgaacatagacacaaatactagcaaactgcatgtagcagtgtgtgaataaaacaattaagacttattctaggactataagggtagatgtgta

SEQ ID NO: 136097 - DNA, 307 bp, Homo sapiens
agtggctttcctttttttccccctttcatttttttccttacatttcattattctgtatggcatatgcccgctttacctatttcagcctgaaggataaatcttagatttacttaattgctttgttcgcctacatcgttgccattctctatgccctgtaacttcagtccacctgacttctagaatagagagccagggtaaacacaatattcctggcatttcaccttccaatgccccacaattcatatgaaatgtcatcttctttctgtaggagacagcatggaagaggaagactctgtcttaaaaaaaa

SEQ ID NO: 136098 - DNA, 622 bp, Homo sapiens
gttaaaaatgaaattatagaaaaatatttattgacatgggtaagtgtttacaataaacagtgttaaatgaaaaaaattaaatcaaatataccatatgatcctatttttacaaaaatgtacatatgtgattatatacatgcatagaaaatgtgaacgtttaaatacccaaatgtcaactgtggttatctctgagtggtgtgattacaggagagttttattttattctctttgcttatctgcatttattatattgagcatgttttcatgcataataagataatcagtaaaaggtattaaaatatacttctgttctatttcatgttgtgaaagttaaatgtcgtaccatttttcctcttagattgtaattatccttctatattcatccaactgttttgatccatgaattggtttagttggaagtaattagaaattctcactcaggtcagaaaagacaaagctgtaaagagctgtgttagttcataactcttgccccacctagaagatacaatttcagtttgctaacagatgagatgataaatggaatatagatttcaagttgactttattcttctactctaactaatcttgttattctgcctaagatttcaggtaatgttactcc

SEQ ID NO: 136099 - DNA, 378 bp, Homo sapiens
aaaagtagactgactagttataatagagtgagatatgaccagctgccaaatctagaaagtagtttgtttggtatagttttgttttgaaggttttactgaacagtccctccaaaatatttttttaaaacatacagcactattaagggtaatttatttactttctgacactactttttaaaataacattttatttttgttttttttttttttccataaaagctgggaagtgttgcaactgagaagctaagtaccacgtttattttagaggcagtaaacacagcctaaggccctacttataattatgacaggaaaaagactcattttggcttcatatggttttgagtcacaaaaacacatctgcactctacctttcctaga

SEQ ID NO: 136100 - DNA, 544 bp, Homo sapiens
ttcctaacttgggttccctggtgttttctgtctcccctaatgggtataatcaatccctgcaatttatctatagttcagcccctgcccatgggccacatactcttaaaattaatggttcttcattattaggcacacttatatgtgtgaaagtttgcaggcaagacatgtttgacttatcttccactttgtcctaattaaatcctactgataggattctcacacaatcactctccccagtaaatatgcaagcatccaaagaacacatgaaaacgatggttataagaatcatattcatttctgagtattatttacttaagtctaaaaaaatagctgaatgatacataaaaatgcagagaacctctagggggaaatggcaacacaacagagtattaataaaatagaattgcaagtctgaaaaaaccctatgatgacaaagatggacagagtgcagtcccgtgttccttcacaatggggatatactctgaaaaatgcatccttaggcaatttcatcattatgcaggcatcacagtgtacttacacaaac

SEQ ID NO: 136101 - DNA, 456 bp, Homo sapiens
aaaaagtcataggacaaaacaaggtgagaatggtctcatgaaaaccaaagatatagagtgtttctagaatgaaggattcattgaatgctgctaagaaaaagatgagatgaggaatgaaaacatcagggggactaatgaacaggggcactactgctgaaaccatacagtgtctttaagatgcagaagtagggttgaaaccacactgaagtaggtgacactctcttcttccttatccgggaatgagttggttgttggtgatcatcagtctgatccactccaagagagatcgtagcagggtccagtctgtgctctcctgcgatcattcgccatgactagaagttaaaactacacaaacgcgcgatcaaaacccgggacccgcacgcccagatgaccgggacgaggccatacttcacatcttctctcacagactcacaattacgcaacggtcacctcaaa

SEQ ID NO: 136102 - DNA, 531 bp, Homo sapiens
cacaaaggccatgagtccttggctctctatgttccaagtcaagcacacgttcaagtgggggcctcgtgatccaagtggggccacattttctcccctactccaaaccccatacctattccccaagttacagaaaattttgatgggtctgagaaaatggggttacatggggtaggggatgacatgagtgtaaagaggatagaaagaggctgtggttctaggactcacctctccagcctaatgtactattagcctcccataagcacgctgtgctgccataattcccagcaatttacaaatttaccaggaacattcccctcctgtgtctttgctcaggttccttgttcaaacaagagtgcctgcccttctctatcctatgtcctcctatagctgcacaactcactcatgtcttaattagattacatggctatgttttggttccttttttacctcgtatgtcttatctcccaacaaaactgaccacttggtgggcaatgacaatgtcccaaatcctgtgtttcttgcaacgcttag

SEQ ID NO: 136103 - DNA, 286 bp, Homo sapiens
ttgggcctgactcacactttcgaagcaagcaacgcttgcacactctcaagaaacacaattaaaatgtactgtgaagaaaggaaacatcactaatccgtcactaattcatatgcacttagaacatccctcagcctagtagacaagcagactgcctgtggatatggagaggtctcatttggctaaacgttgcttaaaagcaaaaccaattcttaacatacatccgaattctcaattctgtcatagattgaatctgtgctcactatggcaaggacaaaaaaatttcttt

SEQ ID NO: 136104 - DNA, 400 bp, Homo sapiens
ttaaactgtatgttgactccctacttggccattattaagtgctacacacttttttttttctttaagagactggatcttgctatgtcgcccaagctggggtgcagtggctattcacaggtaatcaggacacactacagcctccaactcttgggctcaagcaatcctcctgcctcaaggctcctgagtagctgggactacagaacacgccactgtgctcagctaaatgctacccctacgtatacttcttactttctctttaatctttgtagatgagaaggcaaaatataatggtgcctaggcctcagctaaatgctacccctacgtatacttcttactttctctttaatctttgtagatgagaaggcaaaatataatggtgcctaggccaaaaaatacattt

SEQ ID NO: 136105 - DNA, 579 bp, Homo sapiens
gttcaggaggctgaggcgggaggattgcttaagcccaggaggtcaaggctgcggcgagctgagctatactgcattcaagcctgggcaacagaatgaggctctgtctcaaaaaagaaaagaaaagagaagagaagaaaaataacacaagtttgttatcttgcagtttccatgggtcaggagttggaacccaggctagctgggtccttggctcaggcaactcaccaggtagaaatcaaggcatcaaccaaggttctagtttcaccagaaatgcagggtcctcttccacgctcactggtggttggcaggattcattccttgtggttgaaggacgaaggtcgcgttttctagctggttcttctccggctgtcactctcagttcccagtagacctctcttgggtcctatccacgtggctatctcacaacttcaaagccaacaaaagaatctctgctttttctaaagtgaagtcttgtatacactctcaggagtgactgactgtcttgtctttttgctatcaatcaaaagctgtgctccctctgaaggttctggggggcaaccaggggagtgacagcccatcata

SEQ ID NO: 136106 - DNA, 403 bp, Homo sapiens
tgggcctcaggtgcgagcagcgcatcggcccgtttctcattctgttatgactcctttttcctaggataaaatttggataaaataggagtcaagactgaggctcaggttttacctctgaaaactcttggctcaaagacccttaataatctgactcctgcttatctttccaaaataatttcttgccgttctcccttggtacttggcttaaactctcaacaccctctctgccccttagttgcagctcgcccctgagttagcagctcgcccctgagttagcagctcgcccctgagttagcagctcgcccctgagctgcagctcgcccctgagttagatgcagctcgcccctgagttagcagctcgcctgagttagcagctcgcctgagttagcagctcgcccctgag

SEQ ID NO: 136107 - DNA, 594 bp, Homo sapiens
tgggcctcaggtgcgagcagcgcatcggcccgtttctcattctgttatgactcctttttcctaggataaaatttggataaaataggagtcaagactgaggctcaggttttacctctgaaaactcttggctcaaagacccttaataatctgactcctgcttatctttccaaaataatttcttgccgttctcccttggtacttggcttaaactctcaacaccctctctgccccttagtactttgacttgtgtaacttccacttcctcacatctgccaaatactagtttagagttaattccctcttacaaatccctgatcctctgtgatgaccttcgtatgtgctttcattgcattatgtacttaccatcaatttgtgtgtttatactggactgcaacctcggacgcaggactgtgtcttgttcatttcattcctaaaacttagcacgttgcacgacacttaaaaagaggcgcttagtaattgctgggttaaattgagttgctagtaatggatttattattattattattattattattattattattattattattattattattattattttgaaatggagtcttgctgtcaccc

SEQ ID NO: 136108 - DNA, 216 bp, Homo sapiens
actgtaccatctgtgggcagtggggcatcccccggctgaccagcccttcagacccagctcagaccacagctcccatgggcttccccttcctcaccagctccgtctccacccttgtctctgtggggcagtctttcctcatagcagcggcttctccatccctctctgcttggatcattccagaaggctctggatatctctttcccatgcctttccctt

SEQ ID NO: 136109 - DNA, 404 bp, Homo sapiens
tgtggttccaaagatgacagaagagccttttaatgtcattaattaggcaagcttactaaaaatatatatatcctgctgttaatgatcatatgatagttgacagttcaggttcaatatacgtctctacaacagggtccaacccaaacattatgaatacttcagagcacttgacaaaagtgttttagtgtaattatatttttgaactataatttagatattagtttataagcaactttgggtgtgttttagattgataatgtatgtccccttccttacatgtttctatgatatagctcagtgcttaatctctagctttttgcatattaagcctcctgtagtatttcttcaatttatgaatgaccaaacaaaccaaggtgtgtcagagtaaattgctttagtactag

SEQ ID NO: 136110 - DNA, 640 bp, Homo sapiens
gtcataaaaaagaatgaaatcctgtcatttttagcaacatggagggaactgtgggtcataatgtcaggtgaaataaaccaggcacagaaagtcaaatattacatgttctcactcataggtgggagtttaaaaagtagatctcatggaggtggagactgaaatcatggtaaacagaggctgggaaggtgtattcgtccattatcacactgctataaagaatactacctgagactgggtaattataaaggaaggaggtttaattgactcgtagttctgcaggcttaacagaaagcatggatgggaggcctcaggaaacttacagtcatggtggaaggtgaaggggaagcaggtaccttcttcacaatgcatcaagagggagtgtgtgcaagaacaatgaagtgcccctctttaaaaccatcagctctcatgagaactcactccctatctcgagaacagcatgggagaaacagcccccattatccaatcacctcccacctggtccctcccctgacatgtggggattacaattcaagatgtgatttgggttggaacacagagccaaaccacatcagaaggaaaaggggaaagcgggtagatgaagtgaagctagttaatgggtacaaaaacgcagttagaaaaa

SEQ ID NO: 136111 - DNA, 739 bp, Homo sapiens
caagtaggaaacggaagatcactgctcactgtctgcatatagactctggcctcgtttctcaaagccagaggcacctacacaaagaatgtctgtcaatccagagtggcgaagaaccaactgtactggtttttaacatttccctgtgggaacgaaacctagcaaattaatgatatcctctgcaatggagtacggagaaaatccacttttccattcttacttgccacagagcttgggagaatccagccaattaatggtacaatctctattagaggtaaaatgaaggagttgcagtgtgagggcagatgtgatgtctatggagctacaaccatcctgcaaccagaaggaaagaggctaaagtttccaggagccatgaggaacataagaatagagccaactgagagggcttatgagcagtgagatggatcttggtgacatagttaatacctggatcaagctatgcctgaagctagttaaccatgtacttttcaattacaccaaccaacaaactctttttacgtaagtcaatttaagttgggttttctgttccttataaatagaagaacactgagggatacctagattcactatgtagatgctggtttataggctaagtctctgattgagaggcctaccttctcctgcaacacagatacatggtactgtaaaaattgtgccatcttgaagatgacaagtagacactagcagaagtcctttaatagctgatcccttttgtaacctc

SEQ ID NO: 136112 - DNA, 533 bp, Homo sapiens
caagtaggaaacggaagatcactgctcactgtctgcatatagactctggcctcgtttctcaaagccagaggcacctacacaaagaatgtctgtcaatccagagtggcgaagaaccaactgtactggtttttaacatttccctgtgggaacgaaacctagcaaattaatgatatcctctgcaatggagtacggagaaaatccacttttccattcttacttgccacagagcttgggagaatccagccaattaatggtacaatctctattagaggtaaaatgaaggtcagtgaagttataaatataaaaggggacaatgcctactggccagcatccatctgcttccatggggtctttaataactgttcagggactaccaagcaaaaaatgtgcagtaccacattctgagaaacccaccattttaagtagcttcctgattttcactataaattctactctttcctttcttgatttggttgtgtcagccctatgacagcttgtctccacaggacctaagctgggagagatgagttaca

SEQ ID NO: 136113 - DNA, 771 bp, Homo sapiens
caatcacagctacctatgtgacagtgagataacagtgatttttgaaagcctctgttgtttttccggctacaagacatctaaggcggcatggacttcctagaaagttctttttacagaccattttcatctcagagctgcctcaatcgccaaagataagcgggagctatttgcgtctggtgatgctctaactccaagtgatttctcttcataggaaatgttcatgatgtcaccctcaaagataaaagcttgttggaattgttaacaattgactttctcatttataaaggcaataccttgcttagtcattttctgcgtctgtgtcctctacttcctgacctcccattcagagcttgctttatgtctcccagattactggccctgttatcgtacctagcgccagacccagtacctctacaaaaaaaaaaaaaaaaaaaaaaaaaaatttggggggggttgggccttaaaaaatttcataaaccactcgtggggcgcgggcccaagggtaggtacacgggcacactggtccaaggaaccgggccagacaggcgggtcccccataaaagcgcgggggaccgaggttgtacaacccaagggggctgaggcacacgggaccacaagagagccacaagccgataatcgccccccggcggggcgtaaacagaagaaggacacacgacaacacgaaacagcacacacacaacagaccaactacaacgacacgacacatacacaacgaaacacatgaccagtgaaagaaaaggcaagacaaca

SEQ ID NO: 136114 - DNA, 226 bp, Homo sapiens
agggtgggactgggactgcatcccaagagcagtggcattgagcaattgtagtacatctttatgcctacgtgtgccccagaatcttcagggagttgcctgtcttcaagagagagacagacttaagccatgaggctacaggcagaccagcatgaaataaaaatagagagcccttctagaattctctggaaggcataagctctaaagtcagtgctggtggtgccaaagt

SEQ ID NO: 136115 - DNA, 274 bp, Homo sapiens
ccacccgcacggtaaatacaccacggagcccccaaagaaggcaaacttacttgaaatattcctgttctattacctccctcaaacaattaagctgctgaaagcgcatgtgagtgaccccagagacagaattgaatgcagaaagaaccacagattattgtgtgtgttaaattatgtatggacagctttctttgtgttgaagaactgtaagatagtaaaaaatggaaaggagcctgactatatatatgtatatgtatacacatacacacatatttcc

SEQ ID NO: 136116 - DNA, 493 bp, Homo sapiens
gattgggctgaggttgggaattcaagaccagcctggccaaaaggtgaaaccctatctctaccaataatacgaaaaattagccaggcgtggtggttcatgcctgtaatcccagctacttgggacaggcgtggtggttcatgcctgtaatcccagctacttgggaggctgaggcaggagaatcgtttgaacctgggaggcggaggttgcactgagccgagatcgcgccattgcactccagcctgggggacagattgagactccatcaaaaagagaaaagaaaaccacaaaaaaactcagacaattctataatagagggagaatacgcatgcaacccagggatttttctcagataccctccccattctcaaatagcatgtgctctaagctcctatggtaaaagcttcatgcccctgcaaaactcacacacctgatcccactcctcaagcacttcatggagaagcagcagctcccagctctataacagataggggat

SEQ ID NO: 136117 - DNA, 610 bp, Homo sapiens
aagtactgtttcaaattaatggttcctaagcttatctgaataaaaaaaaaaaagcacttggagagttcattaaaaacccacattggttaccagaggctggaatagaaggactggggagatattagtcaaaggatataaaatttcagttagatagaaggaataaattcaagagatctactgtacaacatggtgactacaattaataacaatgtattatatatttaaaaattgcagagagcagattttatgtgttctcactacaaagaatgatgtgtatattaaatagcttgatttagcccttccacaatgtatacatatcaaacaaatcatcatgttgtataccatagatatatacaattttgcttgttaattaaaatgaagaaacaaaaaacacaaactcctgagtcctcactgtgatatacttaatcagaatttccaaggtagacatctagtgatctgtgtatttaacaaacacatctaggtgcttcatatcatggagaaaaatggaaaacacagttctgaaacaattaattcatggagcatgacccagtatcattgtgggataagtttccttccgcatcaatgtaggtctggatatttcccttatgga

SEQ ID NO: 136118 - DNA, 259 bp, Homo sapiens
ccccgcctgtccaataccccatctcaataatgggctcatatcaggcagggccagggttcttctcttcccataggccaacacactataatatttgctttccttccttcctttccaaagcctaccagattagattgctggagtcccatccagctcactgagacagatggaaaacggaaagtaaggcaacccaaactgttcatggtggaaaaagagagggggcagagcaacccaacgtcccagcacccagatcctcttttcc

SEQ ID NO: 136119 - DNA, 792 bp, Homo sapiens
cacggtggctcacgcctgtaatcccaccactttggaaggacgaggtgggtggatcacaaggtcaagagtttgagaacagtctggccaacatggtgaaatcctgtctctactaaaaatacaaaaattagctgggcatggtggtgcatgcctatattcccagctacacgggatgctgaggcaggagagttgcttgaacccaggaggcagaggttgcagtgagccaagatcacgtcaccgcactccagcctgggtgacagagcaatactccatctcaaaaaaataaataataataatttttcaccgataagatttgagcattcacaattcaacatataacacatttcaaaattaattacacattagtaaacagtgcatacaatgaatcagctcacaggcctctcaatgataagatcacttttaacttttttatcttttcgctacaagttctaccagctgcattcagacaatttttatagaaacaaagactataaataatttttacacagacactacaataccggcttccaggagaccatctactctccttggctggaagcccagaaaataaagaggtgcgagacacaccacgagaacaactggcaccagtaagcacgagtttgtacttgctttcagccatcctctggggttacaaaaaaggtacctttaacaataattaggcaccaattaaacagatgatttcaatcttacctcttgctgcctaaccttccaaactttttcaacaggtgacatacactattggaccccaaagaaactatcttatcttccccctaa

SEQ ID NO: 136120 - DNA, 187 bp, Homo sapiens
cttttttcttaagcacagcctcaggggagcctgccccatccagatattaccgttgccccgattctgcccatagctcgcgtggctgggggcagtgggaggtgtgtctcctactgaggacgaggagtcgtcggacttcagtcccgcgcagccacgttggaaacggcgacctagcggcttggcaacccag

SEQ ID NO: 136121 - DNA, 298 bp, Homo sapiens
agtcatctatctatctatctatatagaaaaacatttttaagacgttgggatatgtgattgtgaggactggcaagttcaaaatctgcaaggctggccaacagctggaaattctggcaagaatgggtgttgcagtctttcttgggttaaaggcagtctggatgatgaattcttttctcccagagagacctcttttcttttaaggatttcaactgattggatggagtctatgcatattatggagggtaatctgcttttctcaaggactactaatatacatgttaatcacgtctctaaaact

SEQ ID NO: 136122 - DNA, 449 bp, Homo sapiens
cctggctgaggcgagcaccagctgcaggaacctcgacatctggctaagcagacaggagcaggggaagcaaggggtccgggttggcctgcaaagaccagacgtcaggtacctagagacctcagtgaaacccctcccaccaagaacaacctcacccactgccattcactgaacacctcctgcttaccaggcatgtgacctcatttaatcctcacatttaatctccgaaaaggagggcctagtatcatcctcacaaccattcatccaggaggcgacagctgggatgtaaaaaccaggtgtgtctgagttgtgactttgacatgggtctctaagtaactcaaatcctgtatctcagcctggaggcaatggggtgtcagggaaggcttcctagaggaggtgacacctgcaccggatctcttaggatgataaaatgaatccagccagtgagggag

SEQ ID NO: 136123 - DNA, 418 bp, Homo sapiens
catagaagctgcatggtgagtgcatattgagcaagttcccatccgaattgttctgctgtctcagtgaatactatggggcagatcagctgctctgagtgtgtgtattgggcatgagacttgggtatgggcaagggggtgaagtggaataggggtttgaggaaacccaaagaggttttaaatagctgctgtacaaatcccacttctctgaatcactttatctcctttcccagtgtgcctacagatgcctgctgctgttgtccataacagaaaacaattatgttaacaggcaaatctccaactatgggaaaatgagctgataaattcagctacattaactcaataaatcattttggcaagaagaggctattctctagccacgtctcatgagatttatctctgggcttgacaaattctgaac

SEQ ID NO: 136124 - DNA, 698 bp, Homo sapiens
gggtccctggggggcatcttagaattctgcctaccacagagagtgtgtcatgaattaaaacagaaagtacatgaagaagggcaatttcattggggttaaatattgagttttgtcttcaaatgaatattgtttgaaatatctgtgtcatgtggtagagaatactgtatttggtgactttctacatagtacctatgggctctgacacacattttgtgtcagctcaaatcctacaaaatcatcttcctaatcactgtagtcacccaatggaacaaaagttgtaattgcatggatgacaagagcatcttaaaatgtctttgcatcgttacaatcttaatgtaaaaatttcatcttatatgctttcacttcacttattgttttgtgtctatgacacacatatacacacacatcttgaaataatataaaattatttcacattacatatttgcttgcaggtagtgtgagatattcttgtgaaaggtatatgtacaaaatgcttcttttacatattttgccaacagtatacatttattccccaatgctaatggattctctggcttcaggacagaaactaaaacacattctttcttacactttgaattttaagaaaaagtatctttataatgatatgttattatgtactgctacagagtgaacctcatgcagtaaaatatagtttatgtgatgcctgatactacaca

SEQ ID NO: 136125 - DNA, 331 bp, Homo sapiens
ggtgccagagcatggaggggaatcaggggtaaataatccatcccagggaggcagagaggcagcaggaggcgggactgtacgggagccaaaacccctcgtccccagtgcatgcttcattgtctcatcacacttcgcttacaaaacataatttcaaagataaatttgttaacaatttcaagataaatactgtagagtacaggacccttctaagcactgcctctttccccaggctctcgacacctattgactctgcccccaaaccagagttctgacactagaaagaattcatgaacaattatcatgttaacatccaaactctcttgctttcttc

SEQ ID NO: 136126 - DNA, 413 bp, Homo sapiens
agaaagtgttcagtataagagcagtgaagtcttctaaatagtttctagagcaataaggcaaacaattagaactcagaataaaataccatctgtgtgctaactgtgccagatctaacagcacacagtttttctttttttctttttaagacaggtaatgcacagggtattagcatacatttttaagaaaaacaaattctaagttgtgagtggtttatttattgaatctttaagaaaccgcttaatccaacagaaaataaatgtgtttcccagctgaacaatgcatactcccctcaaaaaaagacacatacgtgtgtaactattttaacagtctgcaatctattctaattataatatagctaagcccaagttgctcctgatcactttcttcccagatccagcagataaggtgtgtt

SEQ ID NO: 136127 - DNA, 687 bp, Homo sapiens
ccaattttctgtacggaccaaaaccaaaggataaaaaaggcaaaaggtagcatgagaggacaccgaactgtactccaggggaagcagacaagtgagaattcactcccaacttctacaaccccactcaccatagctgaacgggaacccacacactccactgttgtctaagtaactggatcacgtctgagatccgtgtacacatcggcacgtggatctcagctctgcacttgttcttgaccccagggctttgaagttttgtcagctaaggcaagggtattggaaaatgctaatccagtctcagtggttaccggtgcagctcaccttacacacctgtgccacagaaaggccgtgtgagaaaggccatgttgagagccacactttgggagatgggcttattttgtaaaactaaagtgtccaaatataaagagctcctacaaataaacaacaccccaatggaaaaacataggatatggaaaaaaaaaaagtttacaaaacacaaatgattcttaagtatataaagagttgctcttctggccaggcgccagtggctcacacctgtaatcccggcaccctgggaagccgatgtgggtggatcacctgaggtcaggagttcaagaccagcctggccaacattgtgaaaccccatctctactaaaaaaatagaaaaaattagccggtcgtggtggt

SEQ ID NO: 136128 - DNA, 792 bp, Homo sapiens
gtgcccgtgacctggcaccatatggaggatggtttccatggagtgctcaggaccattgacatgagcttcttgcactttccctgctccatgagaattctgagtgcattagttcaatttgtaaagggactgtgaccatctttcttctctgctggtactgcggtgtggattccactggcatccagcctcccacagggctctctgttgctgatttaggtggtgcatagtggggctagggagggggtagaggttgctgtcacctttctggtccaggttttagaaccatacaatgcatgctcctgatgtccagaggacgtggtagaaaagacaggtttggaggtgggagtgtggctgtctctattctctgttgggaaaacctgggctgacaatattcagtggccatttgtgggagtgaatcagccggtaagagctgttctcagcctccctaaggggcagttcaggctcccagattgatccagactgtgtgtgactttcgtccatttgacttgactttggaatagcacaagggcatcatgtacttcacgaggctttcccaatgtggctcagaggcaggagctctgatgctctgggctgctgtgaggtggtggtggtggtggagaaactggcttcacccacctagtattctgtgaacagtagtgacttttcccgctgtttctcagcctgtgggatcagagtcttcactgtctgggctggaaactttaagatagaatggatagagcttccacagtggttggcatctagtggtggatgaagcacagcgtgcagctgcccgac

SEQ ID NO: 136129 - DNA, 346 bp, Homo sapiens
tcatacacaagagaaggccatgtgaggacatggcaagaaagcagctttctgcaacccaggaagagagcccacactagaaaccaaccctgatgacactgtgatcttgaatttgtggcctccagaactgtgagaaaattaatttctgtttttaagctacctgtctatgatattttgctatagcaaccctagcaaactaatacagtcccgtttcactttttaaaagattaaaaatacaaggtgttaaatttaaagataaaaatacaatgaaacattttttgagatcatagaagagagagacaccatttattataaaaacaatgtgtattttaaaagaaggggctgggcg

SEQ ID NO: 136130 - DNA, 685 bp, Homo sapiens
atagaatggattcctttgatggggagagcctggaagtagagaggtcaattcggagacttttgagaacaaatgaaactcaaaggactaaactgaattagtaccatgagaataaagagaaagactgataggcattgatggttgattggatattgggagaagatagagaaggataagttaaagattattccaagaggtatgggagaagaatgaaagggaagaaaaatctgtagaataaaataatgctttttatatttgaagcaacagttctgcatctaatttgaaatgtccatttgtcagatgctgtatgggttggattgtatccccccaaaagatatggtgaagtcctaactcccaatccctcagaatgtgaccttatttggaaatagggtcttgcagatgtaagtagctgagattactccagtatggtagacccttactctgatgtggctagtgtccttataagaaaaaaagacatacagagacagagacaaacatggagaatatggccacatgatggtagaaccagatactgaaatgatgcatgtcaaggaataccaatgattgccagcaaaaaccagtagccagaaaaggcaaggaaggattctcccttacaggtttcagagagagtatggccctgctgataccttcatttcaaacttctaccctccagaaattgtgatatgat

SEQ ID NO: 136131 - DNA, 285 bp, Homo sapiens
tattatctttatcgaacacatcctattttttgcccactatattcgttgcacatcagttaaggtggtgaacaggaagtatgaatgaaaggctttggtgaggtggtatattagtttttccacaaacaaaaagtggtttacagaaaatttcaaaaatttactttgaaaaataagtcacactggtaagtatgtacttcttcatgtaaatatgcatttgtatttaataagattacaaaaatgctaaattatcactttaggctgaataatccatagggacccagaagatca

SEQ ID NO: 136132 - DNA, 600 bp, Homo sapiens
gtaagatgacatctcattctggttttggtttgcatttctctgatgactggtgatgctgagcttttcttcatatacgtgtaggccatgtgtatgtcttcttttaaaaaaagtctattcatgtctttgcccaccttttaatgggatcttcttgtttttgctgttgttgaagtgtctgaattccttgtatattctggatatcagttccctatcagataaatagtttgcaaacattttctctcattctacaggctgtctcttcaatctcctgctgatttcttttgctctgctgaagctttttggtttcgataaggcccatttgtctatttctgttttagttgcctgtgtttttgaggtcttagtcactgattctttgcctatatcaatgtccagaagagttttccctaggttttattctagtatttttatagtttcaggtcttaacgtttaagtctttaatccatcttgagttgattttttgtatatggtgagagactggggtccaatttcattcttatgcacagggcaatccaatttttccagcaccatttctttaagagggtatcctttctctgatgtatgttgttggtagcgttgtcaaag

SEQ ID NO: 136133 - DNA, 363 bp, Homo sapiens
gagcattatggacctttcgctgagtttcacttggacatatgaacttctgatctcaactgactcatttagttggagcagggaatcccaatgcctttggaaatagaaaatggatatgactcaggatgaaacatcagtggaaacagacctttcaagattttttaaaaaaatataactactggttagcatagtcataaaattagatagttcttcttccttatttagaaaacagaatacagaccgggtgtggtggctcatgcctataatcccagcactttgggaggctgaggcaggcagatgatttgaggtcaggagttcaagaccagcctgaccaacatggtgaaatcctgtctctactaaaaatac

SEQ ID NO: 136134 - DNA, 456 bp, Homo sapiens
gcaccaccatacccagctaatttttttgtatatttggtagagacagggtttcaccatgttgcctgggctgatctccaactcctgggctcaggagatccgccggcctcgacctcccaaaggtgtgaaccactgccctctgccttaacaaggtttaataggtgttaactattattacttttattatcacttgtactaatgttatctatttgtaagcttctcaagggccggtctcatcctcctcactgttctgatattagtacataatactcaaatggtggttgaaccaaaccaaagtgtccaggccaccactttacaagagtcaggtttccatcgatgggattttaaaatataagtcatattttcaaaatcagtaggatagcttgctatttacagaattcctgtagaaaattatttttgaaagattaatcatttcataattcaaatcacttatgtctc

SEQ ID NO: 136135 - DNA, 757 bp, Homo sapiens
  misc_feature (1)..(2): n is a, c, g, or t
nngcttctgtgcccggcctgaactgttaagtgtttgtgaagaattatttgggggcctatttgagagctgttatatggatcatcctcctggagagggttcttaagcctctgagaccgggtttggggctgaggctttctgacccacacaagtcatgctgacccctgaagggccgcaggccagatcttgccaggtgagcactttccccgctcacattcaggatagggcgagggggttggtaccgattcaccctcagggcctagatttgggggcttcagcttgctgcagataggtgctcccttcactctcacctgaggctgggctggagcctggtgtctgccccaccctgctggtcagccccctaggacctgagccccgtaagcctggactggccacgccctggggcagcagcactgggtgcttggcgctcacgaccttcctgggcccctgggtccctcacttctcccttgtttctaccttcctggcttgtcagattcccacagctcttaaggagaaattcagtatttactgcagcatgtgttttcagtgtgatggttcatctaggtaccctagcctgtcattgctggagttggaaatctctgttgtctgctgttgttttgtgaaacaagcgtgtgaggttataagtttccctcaacgtaccacactaaccacatttccctaagttttgatgtgtagtgttttcactgccattcagttcaaaatattttctcatttcaagtatgatgtcttctttgaaaaa

SEQ ID NO: 136136 - DNA, 327 bp, Homo sapiens
catcactggcatattatcaaatgcttcgaacaaatgaactgagcaaacgtttaagatgggccttctgaggttatgatgaggatggaaatgagttaacctcagtgcatctgtgggtacatcgtaggtgttcagaagggcactctgccttcccagctccctcataagtagcccagtaaagggccgggtaggtaactatttcaatcagcaaagaagccaccccaatcctgggctctccaaaaaaaaacaactttcctccactcactcatcaggtggcccaccccactgggccagataactattggggttccttcccagcagcagggtatg

SEQ ID NO: 136137 - DNA, 784 bp, Homo sapiens
ccacggttgccaggaggcggacaggggcggctcctggggggctaccacctcgaggccgttccgccagaacttgagcgacttgggaaggcacagtgtcctgcccttgaagaggaacctgtgtcctggaggcagcagcctgggagctcctcctctgaggacaccgcagaggcgagtgactctggcggcgcagcgctggctttcccgtccgcagaggagagctgtggggctgggtgagctggaccagggagcacagctggctgctctcggcctccgatggggagtggacagcttagggggttgcccccgtgccagccagcctgctggtcactctgggcttcatcacaccctcacctgcctgcgcaggcacctagcactgcaggctggagcttctggccatgctggtcaacttccccaacgagcctctgctgcctgggaacagcaaggccagagctacaccgccctgcacttggcagccatgtaccttggagatggtgaagctgctagtgggaacataggacgccgatgttgacatcagggactacactgggaaaagggcctcccagcatgtgagtcagagcatcacagaagagattgagaccctgatgggagtcctggacaaggacgatggggagagcaccgccagcagcgggggtgagtactggaagatttaaaagctgccccctccatctcaccacctacaaactctcacacgtcctggaagatggggggaccctctccaccatcaccacttggctgaaggtggtccagacgtgaagccaaggat

SEQ ID NO: 136138 - DNA, 443 bp, Homo sapiens
  misc_feature (208)..(208): n is a, c, g, or t
atatggttatctctatatcttatgtctttaatattggattttgaaatactaaagatttaatcaggtaaatgtaacctagtgatctggtgaaaatcatctagatgtgaattggatgccttggtactgttttttatgcttctagttgacaattgggttttatcaatgtcttagacttcttgttgttggtataggctataccacctcacantgtagaacagcaaatgacatttttacagtatttttttgtaaagcaaactattttgtgccttgaatttggtatatgtgtattagtgaaacattgtaaaggtgaacttctacctctgtatctaaatgtataccatccacttgtaaatgactataaactattatgtgattgcttttttttttagaatgtctggttcaaatagtggccaaggtttaaggctgttaaaataagccaactg

SEQ ID NO: 136139 - DNA, 387 bp, Homo sapiens
cctgtcaagaatagacaggagctcataagcagagttcaaatttaaacgtgcacgggaatcatctggggatgttgttaaaatgcaggttctgattctgcaggtctggggtggggcctgaaataggcactttcagcaagctctcagctgatgctgatgctgctggtccagggactaatccttaagtagccaggccatagaggagctgtggttgaatcaggttagcctgattgttttatgttgttgttgttttcttttttttttttgagacggagtctcgctcgtcgcccaggctggagtgcagtggcacgatctcggctcgctgcaacctccgcctcctgggttcatgccattctcctgcctcagcctcccaagtagctgggactacag

SEQ ID NO: 136140 - DNA, 248 bp, Homo sapiens
tgcaaagatctttcccatcaaggcctcctcttttctggggggtggggaaaagggacccagcagacaatggagggcagtcctttggtcctgctccctcctgaacccctccccagtgcacaaccctccaggttcttaggtgtcgcgctctctgcaaactacaccacacactgcagcctgtcactctgatctcagctaacagtgcctcactcgcttcctgagccctgtccttagccccactacccaatcca

SEQ ID NO: 136141 - DNA, 794 bp, Homo sapiens
attgttaataatttttttttcatttacacacagctgtgttattaacatcagacttaacaacaatcatgaatcaaaaaggcacaacatgcacaaaatcactgcttggctgtggtaaagatcttgaagatacacatcccattctccattatagcaagtactttgtatacctgtatatatacatacacttagttatctgagctctgcttggcaagaaaattataccatactgaagatagaggtacaacaatcctcaagaaaaataaatatataatttaataatccataaaatataactggataatttttattttatgctaccaattgacatcatcccataggctgtaaaatcagatctccagatatttgtcaccaattgaatggacatgcacaaatcagaaacaggtacagaaccagaactagactttgctaagaaaactagactcattctggaaaaagaattagaaaacgttagaacgctttgagtcaaaaactaatgaccacatgggactgttttgtatcttggctgtatcaatgtcagtatactcactgtgatatacactacagttttgaaaaaggttatctttgagagaaactgaataaagggaacatgggctctttgtattatatcttacaactataaatgaatctacaatgatctcagaataaaactttaacttaaaaggtaaacaatcaacaatcagccacaaaggcagagatagtaaaactgtcctactactgtgtgtgtcagaaaaaggatccatcctgtaaacagcttccaaggtgttcttcttggt

SEQ ID NO: 136142 - DNA, 328 bp, Homo sapiens
tttaccaccctggtatattttaatctatgtagtcagagtcttctggaattccgaaagttttatcaattttattttcttcaaacccaaattttcttttggcccaagattttattgcaaatatgttatcagtctatctgttagcaagtactttatttgcctgatgtatttcttcaacaacttgcgggtcacattatttgcatttttcaacttctgcctttgatccaagagtgaagaatgctctttggctaacacggttcactccttcatctcatgttggccaattttagtttttctgatgcttttctgtaagtttgcatgcttttggctt

SEQ ID NO: 136143 - DNA, 325 bp, Homo sapiens
ctagaaggagtcctaaatgtggaaacaaaatcttgatatacaccaaaatagaacctccttaaagcataaatctcacaggacctacaaaacaatatcacaatgcaaaataaaccaaagtattaaggcaacaatacagaatggcagaatggataaaaaaatccaccaaccaagtatctgctgtcttcaagagactcacgtaacacataaggactcataaacttaaggtaaagggaaagggaaagatattctacccaaatggaaaccaaaactgagcaagagtagctattcttatatcagacaaaggagactctgatgcaacaatagt

SEQ ID NO: 136144 - DNA, 352 bp, Homo sapiens
agtacacaagcaacatgctatcattgcagatgccagaaagtaggatcacattgttgtgctatagatctccagaacttctttatcttgcaaaactcaaaaactctatcatttctcaaactcaaaactcaacaattctccattccctcttcctccaccccatggccaccaccattctactttgtctctatgaatttgaatactataggtatctcatataagtggaatcatccagtatttgtcatcttaagatttctttctttgtgtaacgttatcaaggttgatccacattgttgcgtgtgtcagaagttcccttctcttttaaaggctgaatatttcattgctttatagactg

SEQ ID NO: 136145 - DNA, 367 bp, Homo sapiens
agcaggagaatcacttgaacctgggaggcagaggttgcagtgagctgacatcgcgacactgcactccagcctgcgtaacagagtgagactccatctcaaaaagaaaagaaaaaaagtatagaaagttgacatctcaaaatgtaatcttacatatttacataaattatattcctcaaagaaaagctctctcctatctatatctcattccatataagttttctgtgagctaagaagctccccttcagattgcctgacctctagtcaaggttcttcatcgccatctaaatgtcagatttattctctatgtcttcttactaatagtgttttggtttaagtatgtggaaaataaagccaataagactatctg

SEQ ID NO: 136146 - DNA, 183 bp, Homo sapiens
gggatcacatttctctagagcaactatccaacatgaggcacaagaactaagtcgaactgggctaaaattgacaaaattaaagacaaaagaattatctcttttaaaaattggggcctactgtgctctgacagcatgctaaaggacaaccatcgtttggaaacattgtttcagaaccagagaaga

SEQ ID NO: 136147 - DNA, 411 bp, Homo sapiens
attgtgagacaagtaaccccttacccctcactctcctctatttttcttcaaagcatttgccacctggcacattatacatgttttattgtctgtctccctccactgcaaatataaattccttgatggcaggaacaaatacatacttcgcacatattaggcactcactaaatattcatcagatagatgggtaaacaaatcacaaaataggaaaagcctcaaagctactccttggcaaaattatagaacagtactcatctagtttctacacccttctctcacttaacggtatcatccattccttccccagacctcgaacgtcctctgctttttcacacacttttgcttatgacatcacctcttacaagccttcttagtaaagccccaccctctaaaacttctactttcttttct

SEQ ID NO: 136148 - DNA, 333 bp, Homo sapiens
ggagtgaagaggaggctgccgtgatgcgcagtccagagtgagcaggagtgacctcccactcttccacgccaggttcctctctctcccttctctgtcctgtgctttccgaaatggagctggctgacaccacgttttccatccttcaaaccaactatcttctgctgactcccctctcacctccaaaagctaggcctttctcaggggctccagttccttgatcccgcctctctgaagtcctgcagcaccggcccgtattgccatacatgcaggctgctcacacgactttcatggaatcataaaattggaagccaccccggaggcccatctagtgct

SEQ ID NO: 136149 - DNA, 437 bp, Homo sapiens
aaaatgagaatggaaatagaggtcggagtgaagtggatgtgcagaatactcaatatcattctgatttttttccccatgtggcactattaactttagccactctatttaaaattgcttattgtggtggggggtgggaggaggtggttagaaaatgtatgtttaacctattcacttgcctttatttcttgttccttaagttttttaatgctttctatgacatcgctatcccaatctctactatgcttgtgtcttctggtttacccccatgtttctttcatgccttctcccagaggagtgactcacagtttgcatatactagacccaaatttttagactacagccaaagtaaatccacgtacagacataggggaaacactgagattggggatgatcttattttgtttaatttctagaaaaccaagttaattgagataaag

SEQ ID NO: 136150 - DNA, 719 bp, Homo sapiens
cacagggctgcccggcttctgccccacagggctgcctggggtcctggccactttgggtgaggagaggatggctccagcctcctgaccttggaggctccacagacagaagacgccgccccgggacatgagggccctgcctggctttgaccctcctctgataacaggggacagccgatgccctgctgggcccacggggaacagaagccagtctgggctgggccatcccctgcaagtggtccactccccccaccggctgatggtggagtctaggctggcctggtgacatgtgggcctccagaggtgacagaaggaattttcaaacttccaaggccccagaggcctccacccctgcccaagcacagttcaaaccttcaagctcttgggggtacttttgtgatggctgggttggggctggtgcttcatcttctcttccagtcagtggagtgaaacagcaggtccatcttgcatgtctgtgtctgcagacggatggtccagggccatccctacaccctcctgtgctgggcccgcagggaagccagttctaccagcagtctgcaggtaacagggtcccaggccaggcgctccccttgaccccctgtgggtttgttcctgccacccgctctgcccctccctgggtgccccccacccccagatctcctgcaagatggacgtcagggtcctgggagaaaacagttctgtgctggggccgctttgactcc

SEQ ID NO: 136151 - DNA, 276 bp, Homo sapiens
attatgcctttataccaggaacaaaaatatgtgtcttaaaacattgtaatttaatagtttttactgttcacaatctgtattttttaacaatacacttccaaataaatcagaatttcaaagttcttgaagtatatagaccattagtggttcactgcctcacgctattcctacctacacacccctttctcctaacacatgcatatactttgcaaactacttgaaagcaggaattatctgaatcatctttctattttacaacacaattaataaactgct

SEQ ID NO: 136152 - DNA, 456 bp, Homo sapiens
acacagggtttgggataaaactggcttcaaggcaagaggctgtaaaacaggctgactgcttgaattgacaaaattcctatactccctggattccctccctgttggcctacaaatttccttccctggagatatgtcactcctcattcttgagaggtccttcttctgtaacttcatgctgattagggatgccgtgtccagagatattaggggagtgaaaatctctagacactaaatctaaatgtgttttgaggtctcccaagataggctgcaaaggctggtattgttggaagctgcagttgtaatttttctaatctggaagatacaaattttaccaagagatttaagatccagggaccaaacaacagtagtacaaacaataaagttagtagttctactaggggcagaatattaccaagtaattggtattgcccatttgatagcttcccaaatagtcag

SEQ ID NO: 136153 - DNA, 352 bp, Homo sapiens
tgggagatttcaatcacagggtcaggagattgaaaccatcctggctaaaacggtgaaacactatctctacaaaaaatacaaaaaagtagtcagacgtggtggcaggtgcctgtagtcccagctactcgggaggctgaggcatgagaatcccttgaacccgggaggcggaggttgcagtgagccgagatcgcgccactgcactccagcctgggcaacagagcgagactccatctcaaaaaaatatgtatatttttaaatttctcagttgtaacttctaacatggtgtacttggtagagataacccatatgaacaaaaatgctttggggtcctctttctaagagtgtaaaggga

SEQ ID NO: 136154 - DNA, 708 bp, Homo sapiens
tatcatcttcaccaattttaggtgtacagttaattcagtagcattaagtacatccacattgttgtgccactgtcgccaccatccatccaacagaacccctctcatcttccttccattcatttctaatagggactaattcactacaggaattgtttctaaccattcattgagaagtaacctagcatcaccctcccactggcagcacagaaagggggttaagtcagacacaaaggatttctctcacactcaggctgagggactttgtgatcacacataatcatgtagtgcctcagtatttgggttaatggccaaaagaactttgtgaatggaattaaacattatatgagcagcttcctcaagagaaattgctctagtctccataataactgaactcctggaggttctgacctttcaggttaaaatgtagttgcctctcagaggttaaaatctcctccttcttccttgctttctacttccttcctatttcttctcagcaacccctgtcctcacctcagtggcatgcacattactccaatcaaaagactcaatcattgatctttaattttcaaacttttgcaaagtagccttctaacagttgaaatcttaaacagcctctaacgtccaatgaatcccatatctagtccattctgggcacttcctgaagaagggaaattcagttgtctcatgatcacatgttgagccagctag

SEQ ID NO: 136155 - DNA, 414 bp, Homo sapiens
aggtgactcatttctaacattttgtctgtatcatcagctgaagtagtttttttgatgctggtgttaatttcttaccattctacaaattgcatttaatttctcatctaaactctaaaaattagtctgttttaaagccctgagtgagatatttaaagccagctttttccacagttttctcataaaaatgataagcataaaataaaaggtgctggcaaatgtgggaatagactcatttcaaaaagcaaaaaattgacactatcagacttaaaatatactacaaacctatagtagccaaaacagcatgatactggcataaaaacagacacatagaccaatgaagcagaatagacaatgcaaactttaatccacatatctacagccaactgatttttgacgaaggtgcaaagaacgctc

SEQ ID NO: 136156 - DNA, 390 bp, Homo sapiens
caaaactatagtacaatagcacaaacaggatattgacattgatgtagtcaagatacagacaatcctaccactacaaggatccctcctcttggccttttataactatacccgcttccctcctgccccacctctgccctcttaacccatggcagcaacttatctgttctccatttgtgtaactttataatgtcaagaatgttatatgaatggaataatacagtatgtaaccttttgggattggttttattcacccagtataattcgctggagatttcattcaggtggttttgtttatcaatagtttattcctctgtattgctaaatagtaccagttgagtatccctaatccaaaaatacaaaatacaaaatgctgtaagatctgaaactttt

SEQ ID NO: 136157 - DNA, 378 bp, Homo sapiens
gtcttctgtgcagcttcctcacatcttaaatggaatatttatgtggccagatagtttcctacctcaccctctctgtttttcctcaacttcctggaaaagtgtgggaagttcttgccacttactttaggtccatatacaacattgcagtttatcacaagcttcaaggagatttggagctttcgagtctctccttccatgtcactttctattccctgcctgggattccctccagtaggatgacataacattagagattggcattgactggggtgagtgttgaattaaagacacacaggtagacacatctgggagaccaagaaaccttagctcaggagacacaaagaatgaaaaagaactcttgttgactcaagaaggagg

SEQ ID NO: 136158 - DNA, 150 bp, Homo sapiens
tgagtggtgactgagtcaaagaagtacagttttattaaagttattaagctgtgtagttactataattcaggaaacatgggttacatttgtatccactatgaactaaagtgctcttttaaaaaccagatcaaagcaggttcatgcctgtaa

SEQ ID NO: 136159 - DNA, 523 bp, Homo sapiens
gcagaagaaacagcaagtgcacaggccctgagcttccctgggggagggggtggaggatgagcttggcttgttcaagggacagcaaggagcacagtgaggctgatcccagtggccaaggggagagggctgctggagtccagggagaaagatcaggacggattttcggccatggtgaggaggcgggactttatcttaaacgtgaagggaagccacctgaaggtatgtgatccatcatgcattcattcaacagccgtctgtggaatcttctttagaaatgcagagacacatcctaaaggatcctgtccacagcctaaggagatgccataggggaacctggggggcttccaggaatggcctcacctaaacccctgtgtttcacagacattcagggaaggccatgaccaacccaccaccccaggccacagagcacaagggccgagaccccaggcttccgggctcctagtccagaggggggactgtctggctcctcttgttccatcccccccacctctcctttttgtaa

SEQ ID NO: 136160 - DNA, 680 bp, Homo sapiens
gataaaatacaggacatcaaatatatcacatacattcatatatctcaagaaatgaaagcaatgaaagagctgtgatatgatccatattttttgtttattgacaactaatgcaaaattccaaacaataatgaagcaactacagattggggaaaatagtaaatcagaaagagcaattgagagagcctttttagaaaaaagttttctcctttggaattatgttacattttgagtaattattatgatattcaaccattaatttatacatttgtttttaatttaacatatattttgagtactaaatatatcaggcactattataggtgcttgtgttaattaacaaccagttttctagaatgtgtaaagtgccatagaaaatacctcttgggttctatgctcactacctggatgatgggttcagtcatacccaaacctcagcatcatgcagtatactctgtaacaaacactcacatatatcctcaaatctaaaagttgaaattaaaaaaaaaaataaaaagcaaataattatattaagtatattaactaaaacaaaactgattccgttttagaaaaagaatttagaaatgagggggagtggagactagaataacacttatggtgttcaatcagaatcaaaactatcaatatatacttaagtttactttttttctacattagataga

SEQ ID NO: 136161 - DNA, 833 bp, Homo sapiens
gagacttatatcaaaagaattgcaggaattagctagcatactagcaggagccagggatgtatccttggaattagatttttagggtgtttgatcaaggggactagaatgtaagcatagataagcaagaattaatttactcaggagtactatctcaggacatgggatttaacacccttgcaaggaccttaggggataaggcaaattcactgctgaggtggcttttagaagcttggaaaatgctgtggctaacactcagggaaatggaaaggcctgagttgcccttacagatggcacaggaaaggttaaagaggcttaggaaagtaggcatgctggaatagatgtgtaatgtaagaccagacatctaaccagagaatcatgggaggacccagaggacacatcattcaccatcattcacaggcctggtgaaatgaggttgaagatttggacactgaaaactacagcagcagagactaatgttgaacccctaacacagcactgttctctgaagagaccaaccagctagttggtgccaagtcaagtatatcagacttctttcaacccaaaagagcaagagttttatcttcaccaggtatagatacttattctgagtatggtcttatacttcctgcctaaagattctcagcttctctggggcttacagaataattcataggcatggaattccacacaacatagcatccaaccactttacagtgaagagggtgtggagtagtttcatgaccatgggattcattggcaatatcacatgtaccatcctaaagcagccagccttatagaacactggatcagcctttgtaagtacagatgaagtg

SEQ ID NO: 136162 - DNA, 629 bp, Homo sapiens
acagcaaccagaaaacatctgctcacttccttcaaaatgggaaagatcaccttctacgaggacagggccttccagggccgcagctacgaatgcaccactgactgccccaacctacaaccctatttcagccgctgcaactccatcagggtggagagcggctgctggatgatctatgagcgccccaactaccagggccaccagtacttcctgcggcgtggggagtaccctgactaccagcaatggatgggcctcagcgactccatccgctcctgctgcctcatccccccgcactctggcgcttacagaatgaagatctacgacagagatgaattgaggggacaaatgtcagagctcacagacgactgtatctctgttcaggaccgcttccacctcactgaaattcactccctcaatgtgctggagggcagctggatcctctatgagatgcccaactacagggggaggcagtatctgctgaggccgggggagtacaggaggtttcttgattggggggctccaaatgccaaagttggctctcttagacgagtcatggatttgtactgaagtatttacgttttccacttttctcctttaaaatctaataaaatatttagcttgtgtttctggca

SEQ ID NO: 136163 - DNA, 714 bp, Homo sapiens
ttaccagggactgaccctggtgttcaaactcagccatttacttgtaacgtaattctacatcatgcttcataaaggacaggcattagaatcacctggaggtcttcttaaaaccagatttttgcctaccctcccacccctggcacagaatctgggaatttgtatttctggcgagtttccaattgatgctgatgctggggtctcaaaacccctttgagacaccacttccctaccgtatttaattaaccaaggttatgtgagcacagcctccccagttatcagatggggaaagaaaggcttttaaacttatggggcattttaaagcacacttggtcaatttaactttttcttgatcttataccttcctcttgctgacactattttctatttggaaagctggcagctttaatatgagaagatattttcactttaccttcgctgattgaaaatacccttagcttatatattctttcaagctgctccagagacagaggatatctgataggaaaggtcgtgaggatttggccacgtctttggaaactcagtgtaatagaattggttttaaggtacccagctgatacagtggcccgttttttcacgactaaagaaaactcagtttgactctagagacagagaggtgaagtaagactcttccttaagaatctgggactaccaattgagaaagtttagggagttaaatattttaaaaattataaa

SEQ ID NO: 136164 - DNA, 297 bp, Homo sapiens
atcctgcaggtggggtttagctctggtgaaaagagcacagatcctttgatttgggtttgaatcccagcacttcctcttactaagctgtgtgatcttgggacattactaacctctgtgaggttcagtttttcttggctgcaaaatgtaagcacaatactaataagtaactgacagatgctgtgcttctgccagacactgtacccagtgctttgtgtgtattggctgagtgaatcctcatgacaccctaatgaggtaggtctcttctcttcttgctttcattttacaggagaggaaaat

SEQ ID NO: 136165 - DNA, 453 bp, Homo sapiens
acttactctgtaagggatctgctctttataaacaatgcactttactctgctctaaggagaatagcccacccatcacaataacgtcaaaataataactaagagaccatcactcagaaatcctggcttaaaataactagaaggtcaggctttaacctgagacaggaaattcctgagttaagatagaaactttcttacttcaaatcccttcttactttcatgttctgtaaattaagtagaaataaatatttactcattttcaaaggtctcttacaaataatttttatcagttttaatagttagagataacgaagtaaattaggaaaaataattaaatcttcattttgaattttttgacttagcgtgacagccagtttcctggagttgctttggtttaatttcactacagaagacttagaagacaattcttttcttacatttttttccttaagaaat

SEQ ID NO: 136166 - DNA, 179 bp, Homo sapiens
aggttatgcatgcaaaatgcttaacacatgcctggaataaattgtagcagcctaggatgtattcatcctaggatcagcttccattattttattttctacattgtagcatacacaatctagaacagtactaaaagagactagttgtaagtcatgaggagggtgaggctaaggttaaaaaa

SEQ ID NO: 136167 - DNA, 482 bp, Homo sapiens
aacaaaacttatcaaatactagcataccaatgagaaaaaaaatcaaataataattaacataattatgatgttttcataactatatcaagaaaggtctatgacaataaaaatgtaactgtaaaattatacattatgatacttagaaaaatatgtgtttaaatggaaacaatgagaaacaagcaaaaaaagattaaactgatacattaagaagctgggatagtaaaatgtttctttaaaaaaagtgttacattatggtatggttatgtttttttttttttaactaaaagtaaattattctcttctcactcactactcaaaaaaaaaccttgttggctgggcccccagcatctgggttccccattccagggggtccctcagggcccggggtagcctccggcggctgggatgccagtacgtcggaccagaggcctccattcaacacaggagggtcccgcagcggaaggcggggaagggcgcccccc

SEQ ID NO: 136168 - DNA, 358 bp, Homo sapiens
ttttcttgttttccaagaccttgaggaataatgttcaagtattttgtagatgaccctgtatttaaatttatctgattcttttcctcatgattagtcttgggttatgggtttggggagcaagaccacagagttaatgtaccatctttatcacatcctgtcaatggcatatactaccaacatgatttatgactgttcatattgaccttgatcacctagctgaggtcatttgtcaagtttccccagagtaaagttactctgctcccctccctttcctccaccctcaactttccattctacactctttgggaggaagtcactatgtatagcttacactaaaggagtaggaatttatggtccc

SEQ ID NO: 136169 - DNA, 209 bp, Homo sapiens
cttttaccaatgtgtgatgtccttctttgtcccttgaaacagtttttgccttaaaatctactgtttgacattagcatagtcactccagctatcttttgattgctgcttgcatggtatatctgtttctatactttcactttctacctgtgtctttgaatctaaagtgtgcctcttgtagacaacatatagttggatcatgttttttgcca

SEQ ID NO: 136170 - DNA, 377 bp, Homo sapiens
acaggtacttgttttgcattttgttaatatatctcttaagcctctttaactctctaagttccccctcgttctcttattttttttattctttgcaaattatttgttgaagaaatatagtcaattattgtttagacttttccagagtctggattttgctgattgagtttcaatgatgtcatttaacatgttcccctggctctatgtttcttacaaaatataagctaggcagggtgacacacacctgtagtccaagctactcaggatgcaaaggcaaaaaaatttctttagaccaggagttcaaggctgcagtatgctatgatcacacctgtgaacagtcactgtgctccagcctgggaaacacaatgagaccccaccca

SEQ ID NO: 136171 - DNA, 405 bp, Homo sapiens
catagagccaaggaccttcatggtcttcatcttctattagccccattcccagaatcttcacacagtacaatcataggtttcttggccactctccaagtaaacctacaaactggtgaattcagcttcttcagaagcataatcacagcaccttcaagcacagatgaatcttaaaaaaatgctttatcccaatggctcacatattttatataaaagaaaactagccaggcacagtggctcacgcctgtaatcccagcactttgggaggccgaggtgggcggatcatgaggtcaggagatggagaccatcctagctaacacggtgaaaacccgtctccactaaaaatacaaaaaattagccgggcgtggtggcgggtgcctgtagtcccagctactcgggaggctgagg

SEQ ID NO: 136172 - DNA, 493 bp, Homo sapiens
tgcacaagcacatatttcaaagtctctattataaatctattcaaagatctttcaccccatttttttgaggatgctttcagagtaaattaatctaataaaaaaacagggttcaatactgaaattatccccaaatatttctgcctctttactgatacgatgttaagctaacacctttggctaaatgcttacattttcttgacagatcagcaaccagcacagcaactggtcttaaatggtgagtctccttgacttctctaaagaatactattttccataagatttcacaagtttggtaatatttccaagtttgatgagaagttttattgtgagcagttctggaggctaatagtagataatgaagagctctgctgccatgtccatggaatacctgaaggctacaagagaacattaatagaccttcaagggtaaacagtggaaatggaaagtagaaaatgcttttagctgcttttctgatgctcctagcactagtgaa

SEQ ID NO: 136173 - DNA, 289 bp, Homo sapiens
agtaaactctacgggttgtgtacatccccatagcttttgatcttaattggctggggagaagtcaaagctcaaagaaattgtttatacctataactctgacgcataaggagactttttgccagcctagaccctgcatacactcaacttttaattgctgatccagaaagaatttactcaaaaagagctatcccaggatacataaaatatatttcaagaacaaatggggaaggaatgtgaaaaacagggcataagaaaccccataaaaaatgttttcatcgaacaaaaggaa

SEQ ID NO: 136174 - DNA, 894 bp, Homo sapiens
  misc_feature (601)..(601): n is a, c, g, or t
  misc_feature (653)..(654): n is a, c, g, or t
  misc_feature (662)..(662): n is a, c, g, or t
agctctgtggcgtgcaaatggaatcttgctgaagctcaacagaaacttggtagcttagcactgcataattctgagtccttggatcaggagcatgccaaagcacaaacagcagtatcagaactgaggcaacgggaagaagagtggcgacagaaagaagaagctctagtacaaagagagaagatgtgtctgtggagcacggatgccattagcaaggatgttttaataagagtttattaatcaagataaaagaaaagacacagaagatgaagataaatcagaatcatttatgcaaaaatatgagcaaaaaatcagacatttggtatgttgagtcgatgggatgatagccagagattttgtctgaccatccataccttgtatgtgaagaaactgctaaatatcttattttatggtgttttcacctggaagctgagaagaaaggggctttaatggaacaaatagcacatcaagctgttgtaatgcagtttattatggaaatggcaaaaactgtaatgtggatccaagagggtgttttcgtttatttttccagaaagccaaagcagaggaagaaggttatttgaagcattcaaaatgaacttgaagnttcaagtcaagagtaagacttattctcaatcacaaagtttcactatgacagnnagaatcangtccccatcggggtggattaatagctattagaatctttcccagaatcgaagtattttcgattttatcgacaaggttggagtaaagggcttaaagaaggtgacccaggggcggtattgtgaagggggcaggtttttgaaaagaagtttgaaggggggcaataggggggaaaaaaaagggggttagaaaagaggaagtttagatagcaaggcagtttaaaataagaaaatcgtc

SEQ ID NO: 136175 - DNA, 835 bp, Homo sapiens
gagttagaatgcatgggttcattctacttcacatttaaatgggacagtatttcctgagctagagggctgttgtgagaattaaatgggatatgtttgcctgacatttagtatattgtgagatataccacctttccttgacatattgtgttagtaaaagaaaatttatgctgtaggaaaattgtatattatccatcttcaagtagtctgtatagatgttacagctgtgcctagaagtcagcagaatcccaagaaatatctttgtgttttaggttggtttgctggtgtttcacagttgttgtgatgaagtaatgaaactctgtgtcatggatttaattttagtcaagtttttaaatgttacactttttcaataagagacttgaatagatattttatgccctaataaagtactgaatacttgctgtaaaaacagacaaaaacaaaaaacagaaaaaaaaaaaacaacgaacacaacaaaaaaaaaaatatgaaccaacaagaaacacaaaccaacacaccgtgtgtgggcgcaccagggcgacgcgagctggaagaaagagcttaagagaacacctatgagtgagagcccgggcgaccccagagagaacagacagaagagcgcgacagacggagcacccaagaaaaaagcccgtcgggagaaagaagaaaaggagcaggcagggagtcgcccacaagagaaaaaaacagcgcggcgggggaaaacacaggagtggttactcacagaacaaccaaaaaggagggcacaacgaggggacgcacaaggagaggaatcaaacaagaggcggagcaacgggaggggcaaaaaaaagagacgcgg

SEQ ID NO: 136176 - DNA, 267 bp, Homo sapiens
ggtcgacgtttctctttttgtatatttaaaatttttaatctatactctgatttttgtgatataaacatctagctagttttctccaaaaatgaattatgaacaatccatcttttttaaataatacaaaacatcaccattatcaagcgctaaattcctacatatatttcggtatttctaaatttcctgttctgttttattcattgatgtcttttcagctgttagtaagcaatttgtggaaataaataacatgcacattttgacatctgg

SEQ ID NO: 136177 - DNA, 434 bp, Homo sapiens
gggaatgggaagggaatgaggacaaggatctgaacagtgagctctgtgagtggtgggattctgagggctgcaaggagaacattcttagaagctttctgaggccagaacctgggactgccttatcctctctgagtccccactgacctacacagctcctggtacatgtaggttctcaataaatattgaaaagcagtaagtagtaattgagtgttccaagaagaaatagttgagagagaagatatggaagtaggagagcagactggaaggcagctttcatgtaggcgaattccactttagggttggagccatgtgagagggagtgaggtggtgtgtacaggtcagtgtgagccgaagctccagttttctcatagtgctttcttcacctccaaatggacatttccaaaacatttttaaaaggttttgttgattttgtt

SEQ ID NO: 136178 - DNA, 470 bp, Homo sapiens
agctcggtacctacttttcacaggaatcgtaattgaaacagatttgtttgttagaagagggggaggtattaatgaggctacacaggcactgctgtgaaccaggaaaactacacagtgtgggtatgagggagtgaagaatacatttatgttttaggtctcacttctttctttgcctgtattaagtagtaagggggagaactaacaaggtacctctgcatttaatggttcttttgcagtttggctgaactgtgtcttgaaatccttgaagagcattactaagatggtatagaagttacttgcttaaaaggagaaaagaaaaagctttaatatagacaactcaatagctgaactactcttgcaatgtgaatagccattccttgggtttctaaatgattttcacacttcccacacttgtttaaatttgtaatatcctttatggttttcctttattggccaggagaagaaaaaca

SEQ ID NO: 136179 - DNA, 372 bp, Homo sapiens
ctggacatattccgacagggcaggctgtggctctggatggggggcagtgagggggtgcatgcatgtgctggaactcacatccgggagagaaagcgcggcagacaggcctcacgaatgaatgtgtgttttgaaacattaggttcgatgtctaaagagtacaattcaacaactcaggccaccaggaacaggccccactctctcctggagctctatggcagggttatcagaggatggctggtgccagacatgtgctgacagggatctgggacagtcagaccagaagcaaatgatcaggcgcgacccaatcaacgtggcactaaaacaatgcgtgcaggttcgatcatagttacctgacccacccccagaagagtg

SEQ ID NO: 136180 - DNA, 637 bp, Homo sapiens
tgatacagattggtattggtacatgtgtttctactgtgattagtacttccctgagagatggaagcaattttgtagatcttttacaagaactgggcagttttcagtagttaatttagccttctttactagaatctctgttgttactaaagatcactctctgggcagcatgatgcccaatccatagcaggtgttcaattcatatttattgagcgaatgtttagattcttttgggaaatgttggtcttctcgctgatgttgcctatcactaaagctccaactagtatgtcttttgactttgtatgtggtattcttgtgtttgttttctatttagaagttcaataattttattgaattcaagtctgtcaattttctccccttgttatttgcttttgacattatgcttagaaagcctctccactttcagattataaatatcacatgtatttttaaagatattgatcaatattttataattagatctaaatttttaatccatttggaatttggtgtatgctataaagtaacttaattttaacttaattcttctctagtggttagttctttattgaatataatcgtcctttctcaattgaagtgaaatatataacttagactgatttttagtattcttttactt

SEQ ID NO: 136181 - DNA, 97 bp, Homo sapiens
aggactttaggttgggaactactgcactattctgcagtgaccacaattttcaggagaaaagccaggactcatggtgtgacaactatgaatagatgta

SEQ ID NO: 136182 - DNA, 464 bp, Homo sapiens
gtcagatctaaaacccttggtaattgactggttgagtggttggtttggatcctggggaacttgtggcagaagatattgctcataataggaataataataataattagtgttctgccatgcttttgcttacaatgttgtaatagtatattcttgcaagtaagtcaacatgcaaccaaaaaggctagagtaatagttgtccaaagaactgctctaattgaggaggcagtagcatagcctgaaccagcttctaggtttgctttccattttgctgtaaatctgggaaagtctctctctttttctctctgtgtgtgtgtgtgtgtgtgtgtgtgtgtgtgtgtgtgtacgtgtgtgtattttatctttcttttttacgtatcatattttatctccatgaaacatgaccttaggaataagccttccaagtaatgtgggacctgaacatcctggcgacaagggacaagctc

SEQ ID NO: 136183 - DNA, 195 bp, Homo sapiens
gcacggagtcctgcactgaatccacacaaatgaagtgagttgtaggcgttgggtattaaaaggaatctagaggtgatttaaagtgtaccggagaatgcaggtaggtttctgcaaatactgcaccattttatatcagggacttgagcatccacagatttggtgtctgaggggtcctggaaccaatccccccccccc

SEQ ID NO: 136184 - DNA, 420 bp, Homo sapiens
cgacctgccttccaagaattctgtcttctctgaattccctttttactgattacagcaatgacttagtttaggtttttattctctgacctgtgaatttattttgtctccttgactgatcagtaattctttgagggcgaagaccatggcttgtttgtcagcatgtggcatggagactgattcaacatttatttgttgaatgaatagatgagtaaatgaatgaatgaatgaacaaatggggagctagataaacataattataagatagttgaagacagaagtaaacacagagcatcatgggagcaggaaggtaaaagcagattggaagtggcagggtgaagggagattgccacatggaaagggaacagaagtcagatggtggcacaatataaaaagaacatccctttcatacacatctttgat

SEQ ID NO: 136185 - DNA, 419 bp, Homo sapiens
cagggtctcatagcttacagctggctgggactggattcaagttgagacagtctgaaatccagtgcctgccctctaaagtatactatgatgcctatgtgcctaatctcacagattcctaaatgtggaactggccgtgtttcgatgaccctgcctttagtgttgtcccactaagtctctctctccttttaaagctggcctcttagaactcaagaccacaaaataacctcctgttcctctgcacagaaatcaatgtggactagttgtacaggctatttgcatttcccattttgatttaattggttgattattttaattagccaacaaatttgatgaatttttcaccagtgaactcagtggtgattttcatgtatcttaaaaactaggcttagcctgctctctggtgaactcatgaaatagct

SEQ ID NO: 136186 - DNA, 629 bp, Homo sapiens
agaaaagaaaactgaggcttagggaggtaagcccttgtctaaaacagaaccaagatgtgaattcagatccgacggtggagtctgtactcagaaccaccatgacatgctccaggtgtgtcctgcaatctctcaggtgcatggtgggtggtacagggaggcgagccgtgatctaagggccgcggatgttccagacattgaatggctgcccccctcccagggggctggcagatattttgggccttatttcccagaacgcattcatttttcccagtccctcccacacaccctaaccctctttaggattcttcccagacgcttcagacacagaatagtgaatggtgactgaggtcagtgccacaaaagaacaagggatagcaggaccaggaacactggccttgaccaggcaatgagataaagggcccttgtctgtgcccactgttgcttaggaagagcctcacatcagagggggtgaggatatgtaaagcccacagatggcccttgagtgaggaggagagcaggggtagtgggagagggaataaggctgcccctggctttgcaccactgtgggccagatgggctggagtcgagcttctgtacccaggagattcaagtaccctggcggtgggcac

SEQ ID NO: 136187 - DNA, 416 bp, Homo sapiens
cttgagcctgggaggcagaggctgcagtgagccatgaccatgccgctgcattccagcctgggtgactgagcaagaccctgtctcaaataataataagaatcatcatcatccagggggcctttaattaacaatgaatcgttatctgattctaaaaaatattctccattgtaaaatacttactataatctgttattttctttgtaatctcaaactgtcttaaataattttaatatttcctccaatgttaaaatattgcacacttcctactttttgcctgttctaccacacacattctccatggtcaggcacagtggcttacatctgtaatcccagcactttgggaggcagaggtaggcagatcacctgaactcaggagttcaagcccagcctgggcaacatggggaaaccgtctctac

SEQ ID NO: 136188 - DNA, 347 bp, Homo sapiens
gcttttcacacgggacgtggactagctgcttgcctgagagaccacccttctggattccagaggacccagccagagtcgtcacggcagggtctgcagggttggagaaggctctgttggggccgggcacagcaggtggtggcaggaggataatgccggggcctggacagggggtacaggggcgggaatggatgcacaggtacagaccctgctcttacgtctaggaggcgggtatagtcaatgcgatgtgtaatgtgtacatacagtgtgaaatgtatgtagcatgtaaagtacacataataaagtttatatgatttgtaaagtacaaatgctatgtcaagtgtacatac

SEQ ID NO: 136189 - DNA, 171 bp, Homo sapiens
accaccagaaaagtgatgtgcacagtaacacagggttcacatggaagggcttattacagggaatgttgaccttgatcaatggtgacactgacctctctgccaggtttctacaatgcaaagttactatctttcctgtgtagttaatttttggggactgtggatttttgaaag

SEQ ID NO: 136190 - DNA, 196 bp, Homo sapiens
ctgctggagctgggattgctatacgacagaaagacatacctcgtataaaccaatgttgtgtggggtctctgcagcagcattatattccagcaaatagaatgaacagcctcatgctgacacatttgttcccaaagcccagcagtctcctgctttgctggtctaccacttgcttgtgtccttttattgatatccaatt

SEQ ID NO: 136191 - DNA, 477 bp, Homo sapiens
agtgactgctaatgggcacagggtacatgaaaatgttctggagttagatagtggtgatggttatacagctctataaatatattaaaaaccacagaactgtacattttaagataacaaattgtatggcatacgaattatgtctcatcttttttaaaaaaggcattgttaggaccaccccatatttatttagttccatttttaaacttccctaaaaactcttgctagatagactaaagcttgtctacagagccacactgccaataacactgactggtcaaggtagtcatgtacccaggaactacccttatttccttctctggccactcaattgcctcttggcatggtgaagacatgcttaacactcacttgtgtgggattaaacagaatacagtgtgagtcgcaaatacagtgagggcaaagcagaaaacagctagaacagggaataaaaagaaggtatccatctatcatcccagctac

SEQ ID NO: 136192 - DNA, 437 bp, Homo sapiens
ccgaggaggcccttctcctacagcagccttgacaggtctgtctggcctctgccctgacacctccagggctggccatctatgtggggaagattatgattggaaggaaggtttttcttagagctgccagtctttattttctacctgctgctcttcattttgtcctcagaggaggaacgtgtcctctcttccctaggacgtctgtcttggtattgaagacagtgcttctgtgcttcttacttatcttccttgaggttagccatccttgtctctgcaccctctccctcagtcctggccactcccatgtgaacctcagtgtttattcctgacccaggatacctcagctccaactggaccccaggcagtaagaggcttcctcttagagtcagcggattcccactgatgcagcccaagattacctgccccgtcctcctcctcct

SEQ ID NO: 136193 - DNA, 449 bp, Homo sapiens
tcacagggaaccttcgcgtcccccacgctgctgcagcatccagagacactgccgcaggggtgcatgcggccagcctgctctgtgccagcctctgccaggcagccccaggggagggagctgagctggcaccagtgcttgtccttggagaggagcgggcctggctgatcatgaaggcaaggctttccactggcctctaaatgtgtgggcctgaccgggacactggggaccccaggaaccccagggctgtaggactagatctgaaagagcctcaggcaaagtagcatttgaagcaaccggagggacatgggtttagaactgaggtctgggtttgaatttcaacttgactttgaacaagttacttctgtgatcagggctggcttcatggatgcatgacctgtgtggtcacacagggccctaactttggttcactgctctgctgttaccctctt

SEQ ID NO: 136194 - DNA, 316 bp, Homo sapiens
tatcttcatgcaatctatagttatcttgtttattcttcatgcaacctataggcgagatagataccatgtacgataatctcccttttacaaatgaggaaatggaggcaaagggacataaagttttgcagctggtaatcggcagaatcggggtacctggggctaggtggggagtgatcttgctcccatcactgtaccttttacctctgcacgatactgccttatttgtaaatcaagtagcatattacgcacatgacggatgcataacattgaaaggaatttcctagtgaatgcttctataaaataaagaattctgctg

SEQ ID NO: 136195 - DNA, 542 bp, Homo sapiens
ggatattgccccaaatgaacatacctggatgaatttcattaaattatatagacgtgtaaagcatattcatatacattctccctacatatataatttgcccaattctctgtgcctgaatatttgaaaaggatatttgatcagcatctaattggactatgagggagctggtgataggtcctaccgttcaccaacactgggctccctaaattataaggggacgcagtgcggcatagcagttaagagttccgttactccagagtcagacagaccagattgcaatctcaactgcaccacttactaaatgtgtgaccttggccaatatttatattatccaatttacagctactccaactgttgtcaaaacaaaactagttatgataatgctccctatctgctaaaaccactgtgaaggttaaatcaaataatccctgaccgatgacagactgataataatccctgaccgctgacagacagactaagagagagggagcgaaagagagagagaaagaatgctatgtgaaacaaaatctgcaatactagca

SEQ ID NO: 136196 - DNA, 308 bp, Homo sapiens
gtcttagagcagttttaggttcatagcaaaattcagtggacattacagagtttctgtttactgcctgactacccctacatgcacagttttccccacgatcaataccggggtggtacatttgttatagttgataaacctactttaacacatcatcatcaaccacagtccaaagttttagtttattctgtaattgattctcacatgttgaaccaccctccctttttgttttttggtttttattttgataaatccgacatggcctttgtaaataatccatttaacatgctattgaaacttctaaaactagg

SEQ ID NO: 136197 - DNA, 230 bp, Homo sapiens
atacgtactgtatgcaaatgataaagctgccattttccttcgtttctctacacatttttttgtgatttgaatacctatctcctattccaaattattttcacgccaaccaaccacctatttattctttgaaccagcatttcctgtgtagtttcttcattctaatttatacaccaattcaggggttaagaatttttttaaaagacacaatataaggaaatactaataagata

SEQ ID NO: 136198 - DNA, 654 bp, Homo sapiens
gcaaagagtagcagtgagccgagatagcagcatagcactccagcctgtgtgacagagcaagactctgtctcaaggaaaaaaaaaagagtttatttcatgaggtatgaagacatcctgtcttcagggactgaggcaaccttgcttgtccttttggccattttcaaggttatggaagaaaaagtatgtgtagcctgttctttttctagccaataatccatttgcagcctgacttgctttaagatgcttttccaaagagcttccagattatggttgtggaaactgagtacactgagtgcctaggctatggcagaccctagaggtttaatctccccaaacctccattttcaacccagtctctattgcagggcatgtaaaaaagaaaagctcactctcccaggctctcttgcagctatgggtgaccatgtgacttagttctggccaatgagatgttggcaggaagtccctgaggagatggccttacttccaaaatagaaggcaaagctctatgtggcgaaagccttctgtctttcctccagcctggcatgaggacatgaggcctgcaacgatgaaacaacaaccaggagaatatgctaaggtgccactgctgggcatctatgccaggactggagtacacacctctggacaatttcttat

SEQ ID NO: 136199 - DNA, 634 bp, Homo sapiens
  misc_feature (252)..(252): n is a, c, g, or t
agagtgcaaatcatgacaggtaaggtaagagacacgactgagcccactctgactgtggtgtacactgaggaactggcagggagagaggccttccacattcagctgggctcaggaaaaggaccacacaacattgtggccaccagggggcgggctgcacctgctggaccactgacccgtttgaaagccttattcttgggagtgaagtgtctttagatgggaaggatgctgtccccaggtcccacctgacaagtnagagaacatccctggggacaagggtagaggtagaagatggctaggaagccaggtgtcagtggacatagacatttgattggaagaatccatgtgtgatgggggagagtgggtcttggtaagaaaggatcaggatgttgaggaagcatgggagttatgggtgttgaaggcagaaggatgagcttctggggatcccttagggatggtgtcctggaacaagctgagtggggaatacagggtgtcttgaggtgtaaggatgtcctctgcctttcctaacaccttgatcatcccggttatggggaaaagtagtagctggaggtcacatccttcccctagagatctctatctccttgcttcagatgctactcgcaggccactccagccc

SEQ ID NO: 136200 - DNA, 779 bp, Homo sapiens
caaacacaataatagggcttaggacagcttttcttgtgtgtgtgcttaatagtaaatcaaggtcacccacatgttcacagctgtgttgctctgggtggcatgggcatcggtactgtattagtccatttttacactgctgataaagacgtacccaagactgggtaatttataaagaaaaagaggcttaatggactcacattaagcctctggggagccctcacaataatggcagaaggtgaaaggcatgtcttacgtggcagcagacaagagataatgaggaccaagtgaaaggggtttccccttataaaaccgtcagatctcatgagacttattcactaccacaagaacagtatgggggagactgcccccatgattcagttacctcctgctgggtccctcccgcaacacgtggaaactataggagctacaattcaagaagagatttgggtggggacacagccaaactgtatcaggcacacgcatcgctttagggagttctcatttccttccattcaacctgatcctttatctgcttgttctttcctcctttcccttccattctctttcactccctcctccctggcttccctctcttctgctctccctccctccttccttcttcctgtccccatctcctgtcttctggtgactctgggtcaaaggaccctggtccagaagggttccgtgtggggatgtgttgtgctgaacccctgttaacctcagtagggaaggtaccaggttcaagaggccaaagaagagacctggagccagcaaacaag

SEQ ID NO: 136201 - DNA, 606 bp, Homo sapiens
gaggtagaagccaggctccatattctaatttgaaggtgcatcagcaggcacaaggtactgactcaatccaagcctcaggctgctcatccacaagctgagatcataggcccttctgtatgaagctcttgtgaaggctaaatgagctagactgtagaacgtgtcaaatgcctagcacagaggaactgttgggtaacttgttgaagcaaaaggatatacatcaaagaacactacaaactctaaagtgatataaacatgtaagaaattattataacaaggacaaaattctatgcaaaacactaacgcttagctaattgcttaagtattatgggaaaattcattatactgtccaaatgtaaaacatgctcatttacagcagtttcccctacagctgtgccagtggtgaggtagagaatatttgaagatttattttaaacacagctgctttatgtattattgtcaattttctccattttcttcagtttgaacctttgaactccatcttttatgtttctaaaatggtcagaacagtagacatttgatgaaggtaactcacaaatgcgcaagtgaacactccaaagtgagatagaatccatatgaattcctttt

SEQ ID NO: 136202 - DNA, 1436 bp, Homo sapiens
gctacctagagttaccctttctctgatcgctcttgactagagagactcgtcatgtgatcaactgtggccagagggcatcctgcagacagctcctgtcacaccacactgaccagactcttatgagtatttaagcatcttcagggaagcgattgactgtcttataatggtcttacaagtacggaactttattacctgctaataatcagagcacatgatggcacaatagaatatacgagtgaagttctaaatgcaaggttgttcttattctgtgagtggcaaaactcatgcagtgagcagataaagctggcaggaggcattggcgccctaatgctgggcactaaccacctgcccggactgcgaatatctgttgggtcctttctatatctggtctattctcgtgtttgattatatcctggtggcaagaatagcaaaatcaactctccttcctatcccatgtggagaggcatgatttgagtcagagagcattatcctctctgcgttatccaaccccatgtcccatgatgcactttgtagacaagcaagtgtccctggtggagaatccacagccacacatcctcattggttgcaaggatcagtgtccaatatctactgccatgatcattctcagttttacatccacagagcttcatagaattctaacaccacaggtccaagtagaggttttggcctcagagtgggctagattccacctctgacagcagctgtgggactgtttttccatctgtaaaatggagacaagagtatcacctacctcatggtgttggtgggatcgttaaacagaattctgatcatgaaacccttagcctgctccctgcataggctgcatgcgctcagtgagctatggctctgtttcatgctgactttaccatcatgtaagcagttttaaaaatgctagaagctttagtcatagaattaccatatgatacagcctactgcagagtccagaggctgaggcaggagagttacttgaacctgggaggcggaggttgcagtgagccaagatcgcgccactgcactccagcctgggcaacagagtgagattctgtctcaacacaaaaaagaagacatgtgtccccatcacagtatcatacagagtgcttccactgccctaaaataccctgtgctcttcctattcatccctctcttcaaccccagcaaccactgatccttttaccatctccatggttttgcctttcccagaatgtcatattgttggaatcatacgctatgtagcctttgcaaatgggcttctttcactgagcaatgtgcattgaaggtgcctctatgtcttttcaagggttgatagctcattcctttttattgctaaataatattccattgtctgaatgtaccacattttgtttatccattcacctactgaaggacatcttggttgcttccaagtttgggcaatt

SEQ ID NO: 136203 - DNA, 2013 bp, Homo sapiens
  misc_feature (1957)..(1957): n is a, c, g, or t
tttctagtctgctttttttgtttaattcttgtaatgtaagcaataaatatggagtgtcagtagtctccttccaccccagaaatgtgttggtgtaacattctcgtttcttttaacaacctggaagtacctttcttgtgatcttcactgaggaattagaactatgatagaagttaggctgtggcaaatgggacattcgtagagtgggatagaggtggcagaatgaacctggtgtagggcaggagtatgttgtgtagttacatcaatttgatgcatgctttccatctgcactccagacggctttctcagttccaagattttgcagagagaaggagcaaaccttttcattggaaaaacagaaacaaccctcccccccattttttcccctctattcatcaaacctttatgtatctttcatcttccagttacctctaggcatttagatagtgaaatttacctttgagatataacaataagtgattaactgttcactttcagatgtaatggcaaacaattgttaaaagttattaactgatcacagatttgcctggacttcccttcccagggagggaacagaagttaggaggcaactttgggatggtgctagagcatggaaagcacagagaatggacaaacaggtctttttctcttttctctgatgttttacctttaaaagatccaacatccttaccgttggtatttttagtaaggttatagtaaatagctttacaccaggatggattctgaaatataaattctaaattatatttgttataactatattttatgttgtatgttatcaggagccatcagagaatgacctttttgtgtttggaacacttggttccatgaaaagtatgctttgtgttttaactgttaaaataatttaaaaattaattattttacataattaaagaagttaaaaactattaacattaaataatttcacaatttcaacatgtcaaacctatgaagggagataggaaacaatgagaaacttacttttgctcctttatacagaattattaactatattttactaactaaaaaactctagtattctttacctaaagtcaattggctggtaagagggagagatgcaaaattctccagctctgaacttggagctacttcacactctactcttaatggaaacttgaactaatgatagatagtatttttttcctctatttaaaatttttgtcttgattaggagatttttcagttctccatataataattttctacaatcagatctatgctgtggcatattttgctttatttaaaaatttttttttagagatgagttcttgctctgtcacctaggctggagtgcagtggcatgatcatggctcactgcagccttgaccttccagcctgccaagtagctgggattacagacaggcatgtgctattacacctggctaatttttaaagttttttttgtaaagatagggtctttctatgttgcccaggctcgtcttgagctcctggcctcaatcgatcttcctgccaaggttttggaattacaggtgtgagccaccatgcctggcctgctttgacatattttatagtgtgttaattacaaatagtcttcatatgccagaatataagagcaagtgttatctactttttagatgggaattgcagaagctgcatcaaaagtatgctttgaggtatatatagtgaaacagagcctttctgaagagaattatatcaaactaattacaaccaagaaataatagtatgaagcggatgctgtttggaggacaggaaaatttatcgggaaaattacataatccctctgattccactatccagagatagccattattattaatatttggtatgtacatccttatattatttttttcttatgcatgattttgtatatatggttatttttctttccataaaaatggtattaaactgtatatactgttttgtagcctacatattncatatagaagtatattgttaacattttccatgtcaataaatattcttctatggctt

SEQ ID NO: 136204 - DNA, 2876 bp, Homo sapiens
tacgggctggatttgtacggtgggctccacatggacttctggtgtgcccggcttgccacgaaaggctgtgaagatgtccgagtctctgggtggctccagactgagttccttagcttccaggatggggatttccctaccaagatttgtgacacagactatatccagtacccaaactactgttccttcaaaagccagcagtgtctgatgagaaaccgcaatcggaaggtctctgctgctgatgaagctgtgaccaaacgcacccaacccttggcagccatctgtccctgcagccatagcccacattcccatgacctccctctgcttgttttgggaccatgtctgtacagcctctaggccccagccccggaggtgaatgccatgccatgattctggtgtgctccatggcatccccagcctagctcccaatcccactttggcacgatgttagccaacagctcctcaaccaacagttctgttctcccgtgtcctgactaccgacctacccaccgcctgcacttggtggtctacagcttggtgctggctgccgggctccccctcaacgcgctagccctctgggtcttcctgcgcgcgctgcgcgtgcactcggtggtgagcgtgtacatgtgtaacctggcggccagcgacctgctcttcaccctctcgctgcccgttcgtctctcctactacgcactgcaccactggcccttccccgacctcctgtgccagacgacgggcgccatcttccagatgaacatgtacggcagctgcatcttcctgatgctcatcaacgtggaccgctacgccgccatcgtgcacccgctgcgactgcgccacctgcggcggccccgcgtggcgcggctgctctgcctgggcgtgtgggcgctcatcctggtgtttgccgtgcccgccgcccgcgtgcacaggccctcgcgttgccgctaccgggacctcgaggtgcgcctatgcttcgagagcttcagcgacgagctgtggaaaggcaggctgctgcccctcgtgctgctggccgaggcgctgggcttcctgctgcccctggcggcggtggtctactcgtcgggccgagtcttctggacgctggcgcgccccgacgccacgcagagccagcggcggcggaagaccgtgcgcctcctgctggctaacctcgtcatcttcctgctgtgcttcgtgccctacaacagcacgctggcggtctacgggctgctgcggagcaagctggtggcggccagcgtgcctgcccgcgatcgcgtgcgcggggtgctgatggtgatggtgctgctggccggcgccaactgcgtgctggacccgctggtgtactactttagcgccgagggcttccgcaacaccctgcgcggcctgggcactccgcaccgggccaggacctcggccaccaacgggacgcgggcggcgctcgcgcaatccgaaaggtccgccgtcaccaccgacgccaccaggccggatgccgccagtcaggggctgctccgaccctccgactcccactctctgtcttccttcacacagtgtccccaggattccgccctctgaacacacatgccattgcgctgtccgtgcccgactcccaacgcctctcgttctgggaggcttacagggtgtacacacaagaaggtgggctgggcacttggacctttgggtggcaattccagcttagcaacgcagaagagtacaaagtgtggaagccagggcccagggaaggcagtgctgctggaaatggcttctttaaactgtgagcacgcagagcaccccttctccagcggtgggaagtgatgcagagagcccacccgtgcagagggcagaagaggacgaaatgcctttgggtgggcagggcattaaactgctaaaagctggttagatggaacagaaaatgggcattctggatctaaaccgccacaggggcctgagagctgaagagcaccaggtttggtggacaaagctactgagatgcctgttcatctgctgacttctgtctaggctcatggatgccaccccctttcatttcggcctaggcttcccctgctcaccactgaggcctaatacaagagttcctatggacagaactacattctttctcgcatagtgacttgtgacaatttagacttggcatccagcatgggatagttggggcaaggcaaaactaacttagagtttccccctcaacaacatccaagtccaaaccctttttaggttatcctttcttccatcacatccccttttccaggcctcctccattttaggtccttaatattctttctttttctctctctctcgtttctctcttctctctcctctcctctcctctctcttctcctcttctctctctctccctctctctcctttgtccagagtaaggataaaattctttctactaaagcactggttctcaaactttttggtctcagaccccactcttagaaattgaggatctcaaagagctttgcttatattttgttcttttgatacttaccatactagaaattaaagcgaatacatttttaaaataaatacacatgcacacattacattagccatgggagcaataatgtcaccacacacacttcatgaagcctctggaaaactctacagtatacttgtgagagaatgagagtgaaagggacaaataacatctgtgtagcagtattatgaaaatagcttgacctcgtggacttcctcagagggttggtccctggatcacactttgagaaccatacttgtcctgaagtattggagttcatgtctaacttcttcccagggcattatgtacagtgctttttattactgtggggagagggcagtgctaaataaattaatcactactgatagtcttcatggctcagggttttcct

SEQ ID NO: 136205 - DNA, 2715 bp, Homo sapiens
gagcccagcccagagcaggcagcggaagccagcttggggcagcgcagagcaacacggagcacaggtctctgctgctgatgaagctgtgaccaaacgcacccaacccttggcagccatctgtccctgcagccatagcccacattcccatgacctccctctgcttgttttgggaccatgtctgtacagcctctaggccccagccccggaggtgaatgccatgccatgattctggtgtgctccatggcatccccagcctagctcccaatcccactttggcacgatgttagccaacagctcctcaaccaacagttctgttctcccgtgtcctgactaccgacctacccaccgcctgcacttggtggtctacagcttggtgctggctgccgggctccccctcaacgcgctagccctctgggtcttcctgcgcgcgctgcgcgtgcactcggtggtgagcgtgtacatgtgtaacctggcggccagcgacctgctcttcaccctctcgctgcccgttcgtctctcctactacgcactgcaccactggcccttccccgacctcctgtgccagacgacgggcgccatcttccagatgaacatgtacggcagctgcatcttcctgatgctcatcaacgtggaccgctacgccgccatcgtgcacccgctgcgactgcgccacctgcggcggccccgcgtggcgcggctgctctgcctgggcgtgtgggcgctcatcctggtgtttgccgtgcccgccgcccgcgtgcacaggccctcgcgttgccgctaccgggacctcgaggtgcgcctatgcttcgagagcttcagcgacgagctgtggaaaggcaggctgctgcccctcgtgctgctggccgaggcgctgggcttcctgctgcccctggcggcggtggtctactcgtcgggccgagtcttctggacgctggcgcgccccgacgccacgcagagccagcggcggcggaagaccgtgcgcctcctgctggctaacctcgtcatcttcctgctgtgcttcgtgccctacaacagcacgctggcggtctacgggctgctgcggagcaagctggtggcggccagcgtgcctgcccgcgatcgcgtgcgcggggtgctgatggtgatggtgctgctggccggcgccaactgcgtgctggacccgctggtgtactactttagcgccgagggcttccgcaacaccctgcgcggcctgggcactccgcaccgggccaggacctcggccaccaacgggacgcgggcggcgctcgcgcaatccgaaaggtccgccgtcaccaccgacgccaccaggccggatgccgccagtcaggggctgctccgaccctccgactcccactctctgtcttccttcacacagtgtccccaggattccgccctctgaacacacatgccattgcgctgtccgtgcccgactcccaacgcctctcgttctgggaggcttacagggtgtacacacaagaaggtgggctgggcacttggacctttgggtggcaattccagcttagcaacgcagaagagtacaaagtgtggaagccagggcccagggaaggcagtgctgctggaaatggcttctttaaactgtgagcacgcagagcaccccttctccagcggtgggaagtgatgcagagagcccacccgtgcagagggcagaagaggacgaaatgcctttgggtgggcagggcattaaactgctaaaagctggttagatggaacagaaaatgggcattctggatctaaaccgccacaggggcctgagagctgaagagcaccaggtttggtggacaaagctactgagatgcctgttcatctgctgacttctgtctaggctcatggatgccaccccctttcatttcggcctaggcttcccctgctcaccactgaggcctaatacaagagttcctatggacagaactacattctttctcgcatagtgacttgtgacaatttagacttggcatccagcatgggatagttggggcaaggcaaaactaacttagagtttccccctcaacaacatccaagtccaaaccctttttaggttatcctttcttccatcacatccccttttccaggcctcctccattttaggtccttaatattctttctttttctctctctctcgtttctctcttctctctcctctcctctcctctctcttctcctcttctctctctctccctctctctcctttgtccagagtaaggataaaattctttctactaaagcactggttctcaaactttttggtctcagaccccactcttagaaattgaggatctcaaagagctttgcttatattttgttcttttgatacttaccatactagaaattaaagcgaatacatttttaaaataaatacacatgcacacattacattagccatgggagcaataatgtcaccacacacacttcatgaagcctctggaaaactctacagtatacttgtgagagaatgagagtgaaagggacaaataacatctgtgtagcagtattatgaaaatagcttgacctcgtggacttcctcagagggttggtccctggatcacactttgagaaccatacttgtcctgaagtattggagttcatgtctaacttcttcccagggcattatgtacagtgctttttattactgtggggagagggcagtgctaaataaattaatcactactgatagtcttcatggctcagggttttcct

SEQ ID NO: 136206 - DNA, 2089 bp, Homo sapiens
tacgggctggatttgtacggtgggctccacatggacttctggtgtgcccggcttgccacgaaaggctgtgaagatgtccgagtctctgggtggctccagactgagttccttagcttccaggatggggatttccctaccaagatttgtgacacagactatatccagtacccaaactactgttccttcaaaagccagcagtgtctgatgagaaaccgcaatcggaaggtctctgctgctgatgaagctgtgaccaaacgcacccaacccttggcagccatctgtccctgcagccatagcccacattcccatgacctccctctgcttgttttgggaccatgtctgtacagcctctaggccccagccccggaggtgaatgccatgccatgattctggtgtgctccatggcatccccagcctagctcccaatcccactttggcacgatgttagccaacagctcctcaaccaacagttctgttctcccgtgtcctgactaccgacctacccaccgcctgcacttggtggtctacagcttggtgctggctgccgggctccccctcaacgcgctagccctctgggtcttcctgcgcgcgctgcgcgtgcactcggtggtgagcgtgtacatgtgtaacctggcggccagcgacctgctcttcaccctctcgctgcccgttcgtctctcctactacgcactgcaccactggcccttccccgacctcctgtgccagacgacgggcgccatcttccagatgaacatgtacggcagctgcatcttcctgatgctcatcaacgtggaccgctacgccgccatcgtgcacccgctgcgactgcgccacctgcggcggccccgcgtggcgcggctgctctgcctgggcgtgtgggcgctcatcctggtgtttgccgtgcccgccgcccgcgtgcacaggccctcgcgttgccgctaccgggacctcgaggtgcgcctatgcttcgagagcttcagcgacgagctgtggaaaggcaggctgctgcccctcgtgctgctggccgaggcgctgggcttcctgctgcccctggcggcggtggtctactcgtcgggccgagtcttctggacgctggcgcgccccgacgccacgcagagccagcggcggcggaagaccgtgcgcctcctgctggctaacctcgtcatcttcctgctgtgcttcgtgccctacaacagcacgctggcggtctacgggctgctgcggagcaagctggtggcggccagcgtgcctgcccgcgatcgcgtgcgcggggtgctgatggtgatggtgctgctggccggcgccaactgcgtgctggacccgctggtgtactactttagcgccgagggcttccgcaacaccctgcgcggcctgggcactccgcaccgggccaggacctcggccaccaacgggacgcgggcggcgctcgcgcaatccgaaaggtccgccgtcaccaccgacgccaccaggccggatgccgccagtcaggggctgctccgaccctccgactcccactctctgtcttccttcacacagtgtccccaggattccgccctctgaacacacatgccattgcgctgtccgtgcccgactcccaacgcctctcgttctgggaggcttacagggtgtacacacaagaaggtgggctgggcacttggacctttgggtggcaattccagcttagcaacgcagaagagtacaaagtgtggaagccagggcccagggaaggcagtgctgctggaaatggcttctttaaactgtgagcacgcagagcaccccttctccagcggtgggaagtgatgcagagagcccacccgtgcagagggcagaagaggacgaaatgcctttgggtgggcagggcattaaactgctaaaagctggttagatggaacagaaaatgggcattctggatctaaaccgccacaggggcctgagagctgaagagcaccaggtttggtggacaaagctactgagatgcctgttcatctgctgacttctgtctaggctcatggatgccaccccctttcatttcggcctaggcttcccctgctcaccactgaggcctaatacaagagttcctatggacaga

SEQ ID NO: 136207 - DNA, 2717 bp, Homo sapiens
gagcaaagagcagtgcccagcccagctcagagggcaaatgggacagatcccagaggccctgaggaggtctctgctgctgatgaagctgtgaccaaacgcacccaacccttggcagccatctgtccctgcagccatagcccacattcccatgacctccctctgcttgttttgggaccatgtctgtacagcctctaggccccagccccggaggtgaatgccatgccatgattctggtgtgctccatggcatccccagcctagctcccaatcccactttggcacgatgttagccaacagctcctcaaccaacagttctgttctcccgtgtcctgactaccgacctacccaccgcctgcacttggtggtctacagcttggtgctggctgccgggctccccctcaacgcgctagccctctgggtcttcctgcgcgcgctgcgcgtgcactcggtggtgagcgtgtacatgtgtaacctggcggccagcgacctgctcttcaccctctcgctgcccgttcgtctctcctactacgcactgcaccactggcccttccccgacctcctgtgccagacgacgggcgccatcttccagatgaacatgtacggcagctgcatcttcctgatgctcatcaacgtggaccgctacgccgccatcgtgcacccgctgcgactgcgccacctgcggcggccccgcgtggcgcggctgctctgcctgggcgtgtgggcgctcatcctggtgtttgccgtgcccgccgcccgcgtgcacaggccctcgcgttgccgctaccgggacctcgaggtgcgcctatgcttcgagagcttcagcgacgagctgtggaaaggcaggctgctgcccctcgtgctgctggccgaggcgctgggcttcctgctgcccctggcggcggtggtctactcgtcgggccgagtcttctggacgctggcgcgccccgacgccacgcagagccagcggcggcggaagaccgtgcgcctcctgctggctaacctcgtcatcttcctgctgtgcttcgtgccctacaacagcacgctggcggtctacgggctgctgcggagcaagctggtggcggccagcgtgcctgcccgcgatcgcgtgcgcggggtgctgatggtgatggtgctgctggccggcgccaactgcgtgctggacccgctggtgtactactttagcgccgagggcttccgcaacaccctgcgcggcctgggcactccgcaccgggccaggacctcggccaccaacgggacgcgggcggcgctcgcgcaatccgaaaggtccgccgtcaccaccgacgccaccaggccggatgccgccagtcaggggctgctccgaccctccgactcccactctctgtcttccttcacacagtgtccccaggattccgccctctgaacacacatgccattgcgctgtccgtgcccgactcccaacgcctctcgttctgggaggcttacagggtgtacacacaagaaggtgggctgggcacttggacctttgggtggcaattccagcttagcaacgcagaagagtacaaagtgtggaagccagggcccagggaaggcagtgctgctggaaatggcttctttaaactgtgagcacgcagagcaccccttctccagcggtgggaagtgatgcagagagcccacccgtgcagagggcagaagaggacgaaatgcctttgggtgggcagggcattaaactgctaaaagctggttagatggaacagaaaatgggcattctggatctaaaccgccacaggggcctgagagctgaagagcaccaggtttggtggacaaagctactgagatgcctgttcatctgctgacttctgtctaggctcatggatgccaccccctttcatttcggcctaggcttcccctgctcaccactgaggcctaatacaagagttcctatggacagaactacattctttctcgcatagtgacttgtgacaatttagacttggcatccagcatgggatagttggggcaaggcaaaactaacttagagtttccccctcaacaacatccaagtccaaaccctttttaggttatcctttcttccatcacatccccttttccaggcctcctccattttaggtccttaatattctttctttttctctctctctcgtttctctcttctctctcctctcctctcctctctcttctcctcttctctctctctccctctctctcctttgtccagagtaaggataaaattctttctactaaagcactggttctcaaactttttggtctcagaccccactcttagaaattgaggatctcaaagagctttgcttatattttgttcttttgatacttaccatactagaaattaaagcgaatacatttttaaaataaatacacatgcacacattacattagccatgggagcaataatgtcaccacacacacttcatgaagcctctggaaaactctacagtatacttgtgagagaatgagagtgaaagggacaaataacatctgtgtagcagtattatgaaaatagcttgacctcgtggacttcctcagagggttggtccctggatcacactttgagaaccatacttgtcctgaagtattggagttcatgtctaacttcttcccagggcattatgtacagtgctttttattactgtggggagagggcagtgctaaataaattaatcactactgatagtcttcatggctcagggttttcct

SEQ ID NO: 136208 - DNA, 482 bp, Homo sapiens
ttctgcaacccttctttgcccttaccatgccctatctttagagggcctccatttctttgtgcggtgtctgcagctgtggttagtgcgtgagataaaagtgcaggatcctataaatagataaattcagagtgttccagagtaagagacatggctagagaaatagtcaaagccctcgcttcatttaaccaagttatcgttacctgttgagtacttttcagagtagaagatcatgttgaaacagttaaatcactgaaatttataaccaagaaggaaagctctagttattctgatacccctcccccactttcatactttctctactctgaaacagatcaacaggctgactgtagtgattgttttccttttcatgaggaagtatgaccttatctgtcagtggatctgtacaaataccaggagttgatgtgaatgctcctgtgcaccattgtatgcttggcaggtcttaactgcactcatctaattat

SEQ ID NO: 136209 - DNA, 548 bp, Homo sapiens
atgcattctgtatgattcaatttatattaagttccaattatattaaaacagaaaaaaatacatatctgtagagatagaaatgaggccagcggttaactggagcagggggtaggatggaggtcactgactttaagaggcaagaggatgatttctggaaagatggaaacattctatgtcttgctcagggtggtggttgcatgagtgtgtactttgttcaaatgccattgacctgtacatttaaaatgtgtgtattttgctattttaaactaaacctgcacaatgttgatttttaaaataagtcatttaaaataaacatttgaatttcaggattgccttggaaagccacatgtgggaatactgggcaagtaatcctacttaaccacagccaggtggagctgagctacagccaccctgttcagattggagcagcctctcacaaggctctcacacaccctcccttttcgttcatttatactatttgtcagatcactgcttgttggcctctgctctttaaaaagcgttcatttattcattgacttttttttcag

SEQ ID NO: 136210 - DNA, 153 bp, Homo sapiens
gattcagactctgtcttgtgccgcttccctaagtgggaggactgagggctgctctgagaaaggttgggttggatccatatctgcctcccagagccaggcacttcctgggtgcttggaaaacgcatgctgaataattgagtgagctgttattga

SEQ ID NO: 136211 - DNA, 342 bp, Homo sapiens
ccagcatgcagcctcaagagcatgatattctcgccctgggtcacctagctggaagaaggctctggtgtccccacctctgcaggtcctgacacctcctggccagagaccatggtggaggcgccgtggctggggtctggcctcggagagcctggtggttttcattccccatgagcctcacggattccccatgagcctcatggatgccccatgatctttacacttaaacagcttatgtgcctccttgtcaccgaggaaaagtgcaacctcccagattctgtctttcagttcttgccatgcaattgcaaagctagtgattcagtaaacatttccatttctctatgc

SEQ ID NO: 136212 - DNA, 320 bp, Homo sapiens
ggtggatggatcacgaggtcaggagttcgagaccagcctggccaagatagtgaaaccccttctctactaaaaatacaaaaattagccgggcatggtggtgggcgcctgtaatcccagctacttgggaggctgaggcagagaactgcttgaacctgggaggcggaggttacagtgagccgagatcaggccactgcactgagtgacagagtgagactccatcttaacaaaacaaaaaacaacaacaacaacaaaaatggattctgcaggtcaaagatggtagttatgtgaaattttctttgcaaattgaacgtattgcttgg

SEQ ID NO: 136213 - DNA, 634 bp, Homo sapiens
ggacccattgatgtcttctttaaaactttaagacagtagcagaacttaaagggcaccaaggttttatatttttaaagataaagtagaaatcaggtcccagggcaggatgcacacaggctaaactaagtagcatatggtctggcaacttttcagactgtagaggcagaggcatcaatcagctctcgcgatctcacgcaccctgttgcatgacagagctgtcagtcgagtgcattgttaaccacaggcctgatgaggagtgggaagcacaacttttgacatttgactttgcagatgaatgaattcttccaactttacagtctttgaaataaaggactctctctaaagttctgtgtggcagactcatgctccattactctggaaagagattgtattagaaaccagtcagatcaggatctgaattggtcttgttggcgttgaaagtcccccttgactttctatttgctttcctattactgctccaaaaccattctactggttcacttagcgatttttgaggctgatgaaggaagtgattggggtatggactgtgaattggttggtttgcatttgaggttgcattcattatatcactactctatgaagataattggcaaaactgttcattcagcagaga

SEQ ID NO: 136214 - DNA, 318 bp, Homo sapiens
acaagacaatcagcgccccaagtggaagaaaataaaaggtagatataattcccaaaccatgacaaatgcaatccagatctaaaccatatcataccatatccaaaaatatgctgaatgctcatatctaactttctaaattaaagtctataaagtaaaatcacaaaagtatcagaagaaaatacaagagattggccaggtatagtagctcatgcctgtaatcccagcactttgggaggctgaggtgggaggatagcttgaggccagaagtttgagaccagtctgggcaacacactgagatacgttctctaccaaaaaaaa

SEQ ID NO: 136215 - DNA, 686 bp, Homo sapiens
gggtagacggaatcaagagcttagaaactgttgacgttgccatgtctaagaagaaaatttttctccaaagttttcttcttagacatggcagcttcagcagtttcttccaaagaaatccaagtcaagagactccacattaagattttgaaatcaaaagggatattgggtgcactctttccagagaaatataactttctgaaagcaaaaaatccttgaatgtgaagagaacaaaaatccgtgaaaaccatgaggtagtcaaaaggagaaaaataaaagaactgctccacacagacttggctcggctgaaatgaaatggcctggcttggctgcagaaggcagtcagcattgatcttacgatgttctccactgctaaggaagggagaaaacaaacagggttgccaagggctgaggaaaggcagggcaggaacagaacagcccagcactgggatgggcagaccccggggctggggcagacaagagctgcagaaggccctgcaagctgcagaagggccaaggaaagagagattagaaatcagccaaaaacacaggtttagagcgagtgaggaggagggagaaccagagtcagctatatggtgtgggcgagccagtgccatttccagatgaacttcaaggtggtaaaagcagagcactggacccagcacaggacctcgaaccaagcacaggat

SEQ ID NO: 136216 - DNA, 364 bp, Homo sapiens
aaaatgatgaagaaaaacatataaaatatatcacacaagtttatttctccctaaaactgccttatttcttcccataagtaaaattcctactttatcacaatccttgtaatgtttataatttgggttctcacatagaaaaacaaacatccttaacgtttcaagttaacatgactttaggaggtaatatgatggttgtttatttttcagaaaacatttttatgtgtttgtttttatctagggagtctacttagaaaatgtcatctattgcataatgttagatgtaaacttgcagagacttcagccacgtcacttaactgccctgaaaatgtcttctctacagtaaaataacagcagtgaacgaggt

SEQ ID NO: 136217 - DNA, 252 bp, Homo sapiens
ggagggagggaagggaagggcatgtaaagctcttagcacagttgctagaacatagctagtgtcctaaataaataaataacaaacagtaagtaaggcaatacaaaagctactactacacaactttttaaaattatttctaactagcattataaatcattttttaaaagacaacctgaagaatgggagaaaatatttgcaaatcataataagggcccaatatcctgaatacataaagaactcttgaaactcaac

SEQ ID NO: 136218 - DNA, 344 bp, Homo sapiens
cgcctagataatcccagctactcaggaggctgaggcaggagaatcgcttgaacccgggaggcggaggttgcagtgagaccggatcgctctccactgggcgacagatttgaatctacgctgtgcccatctatgcagaatgaagatttccgcaagccgtaacagatggttccctacccattccagagctgctaattataaccaccagcttcaggcggtaggctgagacctttattgttttgtgtacatttagtcatcagtaaaccccatggaataaagccaagtatgtctgctctacaaataagaaaattgaggcccagagagactgcccaaggtccctcacagta

SEQ ID NO: 136219 - DNA, 527 bp, Homo sapiens
cacggtggctcacacatgtaatcccagcactttgggaagccgagtcaggaggatcacttgaggtcaggaattcgagacccgcctggccaacatggtgaaatgtcgtctctactaaaaatccaaaaattagctgggtatgggagtgcgtctgtaatcccagtttcttgggaggctgaaggaggaggattgcttgaaactgggagggggaggttgcagtgagctgagattgcgccattgtattccagcctgggcaacagagcaagactccgcctcaaataaataaataaaggtaatatcaactcactgtagaaaattatttatacatgcatacatgcacatatatataaatgtgtgttcatagatatacattatatgcatatataaataaaaatgttggctgtgccgtggcattcaaggacacgctccttggagtacagttttcgactgcagctgtgcctccacaaagaaaccacaagaacaaatccagggggagggctattgttgaaagaggtactccgatacttctc

SEQ ID NO: 136220 - DNA, 445 bp, Homo sapiens
agccccaccctcggtccctggctcacttgctctcccttccctggaacaacgccctgcttcctttgcgcccctgccagcttcatggcctctttctctgctcctgcaagtctcggagctgggggagctgggggagctggggattatctcgcaaactgcattttacagataaggaggctgaggactgacagcttcctgtctagttgggggaatgaggtggaaagaaaatgacagccaacagccaagtcactgagggaggccagcagatgccccaggagagtgagtggccatggctgaccacagcaggcaggggcttccaggaggaggtgacagctctcacaatgtctcaagtcctccaaagagcagcagcccacagctttggggtctcagccattcctcccacaaacataaaaagagaaggggcctggggtctctcagattagcagac

SEQ ID NO: 136221 - DNA, 387 bp, Homo sapiens
atatttcattgtgagctaacatttggctgatgttcatatgtgggaatcttggggccctgggaaaggaagccttctcctgggaggatttgtatgtgctttgttaggtgctttggggcctaactcctgagaactactctgagctaacttcttgaatttggatttcactgatcatgcaggtgttgtaaatttgaaacccaaactttatgaggacaggcctgtggccttaaattctcagtaacacttgctttttcaccacctagagctgggcgtcattcagattaattcccgtgtcccttcttttacccagccttccatttcacagaggctgtagctttgaaggattcaattttgtggtgacttggttccagtcatcactttttgtctctt

SEQ ID NO: 136222 - DNA, 164 bp, Homo sapiens
accccttagtagagaagttcaatagcacctagtgttagaagttcaatagcaaaaaaagaggaaaagaggtctcatgtacccaacacccaccttcccccagtggtgatatctttacatacctatagtgcattatcaaaacgaggaaattagttggcacaatacag

SEQ ID NO: 136223 - DNA, 597 bp, Homo sapiens
tgcccagagaaagaggaagaagctgagtgtgagacagaaaggaaatgggatgacagagagagaatagaagaggaaaattagcaagagagactaaaagagacagagatcaaagagaaacacagaaggtaaaactggggagacaaataatgtaaaaggaaaaaagagtacaagacaaagtgagagaatgctgagaggttggcagggctgggggaagtttctggggacttaagcaacaaggaggtgcaggggaagggtgcatgcagtgcgtggccactgaggaacgacaaaacccgggaactgggggatggatgcaagtgagaaagggatgtggaggagagtttaggatcaggctgcttgaggtgtaacgggttgcctacagcaaaaactagatggctgtttatcaggaggtggtcaaaaggattcaagttatggaagagtaaatgaataagataacattaaggttttgttgttttagtgagaggctggaaggccaccaggggcagttagctgtcagtaaggcagcagaagggctggggtcgctacataaggaaaatcagtactagggttgtaaactcaaatgactacagggccagcaaa

SEQ ID NO: 136224 - DNA, 404 bp, Homo sapiens
ccccaccgggggcctggcctggagcagaacgcagcacacagcaggcgctcaaacgtgtctgtgatctggagccacctctgggagatggacttccccggagctggagccatcctgggagatggacttccccagagccggcaagtccctccccaggcagtgccaggcccagcccaccaggcagcacctttaggattctctgaattcactcgtcaatcaattaaacattcaggaaggaggctctggaaaccagcactgtcagccaacggggagaaggcggggaagaaaggagcgctgaccaggtgccctctccacacggttctcatgcaatcctcacacaccaccaagagatccagcgtgtatcagcccggctgacatgctggggaaactgaggcttgcatgacctg

SEQ ID NO: 136225 - DNA, 119 bp, Homo sapiens
tctgatgcatagccaggtctgtagtgagctgccgatgagggacttggcagtggccaagagacaagttccctccagaatgcaggtaagcatgggagaatgccaggctagctctagcccca

SEQ ID NO: 136226 - DNA, 425 bp, Homo sapiens
ttatgggatggtgaaaacaagtggaggttgggagtcaatcagagacaggatcaagacttgtttgtgggctcaagtgtcttgtttgggtgtgttagatgaatcatttaaccccacgtataaaatatcagtatgtttgtatgttttcgcacctctcacagaaatattgcagttacaaagtaaatggcatcatctggttccccgctccccccacaataaagctctaccaacacaagaaaaaaaaataaataaaagaaaagaatgtgtaaactaaggcacagagaaattaagtaacttgcccaaggtctcacagttaactagtggcagagctggggtttggagttaggctaacagctgtaggcagtggctacaccaaatggctcaatccattattcgtcattttcagtcttccataagtgacttccctt

SEQ ID NO: 136227 - DNA, 603 bp, Homo sapiens
  misc_feature (538)..(538): n is a, c, g, or t
aaaattttcttgctacaccatctgtaaagggggttgaatccttttattcttcacagcaatttataggctgagttttgagataggtactagtctagtgtgcctggataagatggcacatgtaaaatcatcccctgaacttgcatacaccccagctgttgcaactcaagtctgttattacatgacagccaagaaagagacttggtaccttttccttattcattactgtaacagttggttctgtttggacttcctgtaatttctactctattgtgaaataatttacaccttgggcttccgcaatgaattccagaatctactcctggccatcatgctctcggccactttaaccattcccatctggcagtggttcttgacccggtttggcaagaagacagctgtatatgttgggatctcatcagcagtgccatttctcatcttggtggccctcatggagagtaacctcatcattacatatgcggtagctgtggcagctggcatcagtgtggcagctgccttcttactaccctggtccatgctngctgatgtcattgacgacttccatctgaagcagccccacttccatggaaccgagcccatcttctt

SEQ ID NO: 136228 - DNA, 1061 bp, Homo sapiens
  misc_feature (70)..(70): n is a, c, g, or t
gctagggcccggataggaagcaaggggctccacccaccattctgaccacctgcttggctgtccacccccncaccctcaaaccctcagaggaaggattatttttcccactacacaagtgaggaaccgaagcctggaatcacacggtcagctgactaaggtcactccaggcccagaacctgcgcctccctttcttcctgtggtggtctttactctcaagatgtttctgccacagaaacaacaggtagctcctaccttcctcatctaaagcctcagatgggtaatgggcacatcaaaaaaacaagcaagtaaacaaaaggtggcagaagcaaggaaaagccacaggaaatgcaatgactactcatcacaaacaatcacacaaaaagaagggtttgctattgtgaaatatgtatttggtcttcatcccgggcacttggcagggattccaaacctaaaatcctcggaatctccacagtgatgtctttttgcatgtgaatgattgactgagggctggcagtccctaggcagcttcaggatggggctggttaccagaaagaccaaggcaggatcagtcccggtaaggggagatggactgaagattaggtttatcaccaatggccaatcatttagtcaatcatgtctccataatgaagcctccataaaaagacataaggacaggctcaggaagcttctggatggctgaacacacaaaggttcctgaacggtggcactgaggtatggcatggaagctctgcactccttctcccacacctggcctatgcatctcttcatctgtatcctttgcaatatcctttataataaataggtaaatataagtcaatttcgctgagttatgtgagccactctaccgaattaattgaacccaaagaaggggtctcaacttgaagctggttggtcagaagttccagaggcgtggacttgcactgctgggaagaaaggagtgttcttgtgggactgagccctcaacatatgggatctgaagctatctccaggtaaatatcagagttgaactgaaggacacctagctggtgtcctgcaaaact

SEQ ID NO: 136229 - DNA, 633 bp, Homo sapiens
  misc_feature (70)..(70): n is a, c, g, or t
gctagggcccggataggaagcaaggggctccacccaccattctgaccacctgcttggctgtccacccccncaccctcaaaccctcagaggaaggattatttttcccactacacaagtgaggaaccgaagcctggaatcacacggtcagctgactaaggtcactccaggcccagaacctgcgcctccctttcttcctgtggtggtctttactctcaagatgtttctgccacagaaacaacaggtagctcctaccttcctcatctaaagcctcagatgggtaatgggcacatcaaaaaaacaagcaagtaaacaaaaggtggcagaagcaaggaaaagccacaggaaatgcaatgactactcatcacaaacaatcacacaaaaagaagggtttgctattgtgaaatatgtatttggtcttcatcccgggcacttggcagggattccaaacctaaaatcctcggaatctccacagtgatgtctttttgcatgtgaatgattgactgagggctggcagtccctaggcagcttcaggatggggctggttaccagaaagaccaaggcaggatcagaagctatctccaggtaaatatcagagttgaactgaaggacacctagctggtgtcctgcaaaact

SEQ ID NO: 136230 - DNA, 422 bp, Homo sapiens
gtgcattttatggctgtctggcccaatttatatcagttaaaaatatacccacaattttttaaaactttttaagtgagaatgcttgatttagaactggatgttacagtcatataccattcattataattcagtagagacacatacataatctgcagagaaatatttagattctctttctcttcgttgttttctttattcactttagagattgagtaaacaggctatctttataattattatttttcatacagctaagtctatattctactttctttttctttttctttttgacatatagtcttactttgttacccaggctgctgtgtgatggtgcaattatggcttactgcagcctcaacctcccaggcttacgcgatctttccacctcaacctctcaagtagctgggccacagttgctcgcc

SEQ ID NO: 136231 - DNA, 153 bp, Homo sapiens
tcatggtacccttaaatctacacctgccatgctaaaactatcaaggtgtaaactggtcctagaagagacaacttaaatttgatcatacttaacattagcaattactttgtaattactttatttgatttgtttccatgggaattttgagtgttc

SEQ ID NO: 136232 - DNA, 606 bp, Homo sapiens
tgaagacacaatgtggaaggtctggcgcacctgatgatgggcgaccaaggtaaaagtaaagattaattcaacaaatctatattctagagcagaaatacaatcatgactatgacatggcatccacagagtgttcatataacaaggaaatgaaaacatttgggcaagttagaatgaatgacagaatggaagtgctgtgagactggtacaaagtgaagtaggaattcagaaaaaggaaagcataacatcaatccaagtctgtcttatgtgaatatccccaccttgtgccatctgttggaggaattaaaaaaaaatctggaaaaaataatttaggaactttacattgcaatttcctatgtggagttaaatcctagttgtgcataaaatcggggttaagtctggacagtttatataactgatttacagtgtaaacttatgtttcctaaatttttatatctcaatataatcatggagcaattttctcaatttccccacttttctcttgtgtgagtagtgaattcaggggatctggaatgaagttttgtggattaatgtctttctttatgaaaaaaagactataaaaaaataaattcaagaacatcttcatta

SEQ ID NO: 136233 - DNA, 144 bp, Homo sapiens
aatatgactaccaacttaatttcttagtctttgtttcagataatatatctcagtggagtatttagagtttaagaagatgagtaatcatggagctgagtacttgataagtttgagaacatgttcatgatcattgtggggatatga

SEQ ID NO: 136234 - DNA, 209 bp, Homo sapiens
ctatgtcacctacagcatatacactggtccttttgaccctacacattcccatcctctgaccctacatgatcttggctaacctgccttcctataccagcagaacctgtatttcttttttagaccctgacaaatgttaggtcaatttgtcagtgcatttgtagtcaaaatttggttgtctagatgtggatgaaccctggcgtaggtgcaat

SEQ ID NO: 136235 - DNA, 405 bp, Homo sapiens
aacgctagtcaacaggcctcaaagtgtacacatgaagacacatcttccttcatcctctcgccagttgacaaattaatgattacacgttcaggcattttacccagatgcaataaaattaagaatgacatcttagaaaatgtggttcaagagaagacatacgcagggattgacaaaatccatcttacttcctttcgaatctctttgatggttacttggttctcaaacacagatcactgctaacaggactcaaaaacaccacttgggaccatcaaccagtgctgcttcgggcgacccgctgggaacacccccacctgacccaagcgtccaccactccttgagcacaagctctgggggtgacctgtgcctgccggcttagttttagaccctacgggaacagctgacatc

SEQ ID NO: 136236 - DNA, 147 bp, Homo sapiens
aacttggaagacatccattcagttggatggagagtatttaatcatttaaaaagtaggccaaagagacttatctcaaccatactgctaaatagttatgagctgcatcatacataaattaagtgtgctctaactgggggtatggataga

SEQ ID NO: 136237 - DNA, 668 bp, Homo sapiens
tgtccgtgttttgacaattcctggaaattaattggtacgcgtatttctcatggccctaacatgacgcaaagcgggagaaagcaaagcaacagtgcggggcccggagaccacgctggaactcgctctgctagaggttcccaggtctctcggctggcatgtgcatttcacagaatgtttaaaaaatacaaaataccaatttctccccttcagggcttacttcaagtgcctcttgactttcactgaagtctttgactgcttcttctcttcccctccagttttacaaattattctcattttcaatttaactttttcagtccttaagcttccctcatctattttcataataaaacaatattgacagatgagaaaacggtaacaaattagataacttagatgaaatggataaattcctagaaagacacataccactgagactgacccaagggaaaagtaaaaaatctgaatagacctataataagtagagtgaattagtaatcaaaacaatacccatggagaaagttcaagactaaatggctttcctggcaaattgtcccaaatctttaaagatgaattaacagcagttcttcacaaacttttcgagacagaagagtaagaagcacttctcaactccttccatgaagccggtattaccccgataccaacaccag

SEQ ID NO: 136238 - DNA, 515 bp, Homo sapiens
agtcagtgctcgccatcgtcatgtgctggtgccataggaagggtgggcaccacaggaagggtgggtggctgccataggaagagagccagatgtggcaggagtgagccagtggaaagctgttctgagaggcagctgcctgaggactgggtagaccctggacgcaacagagctgccacctgcccagagcaggctcagtaatggtggccttggagggcaggggacagggcccaggggtctccaggagctgtacccgtgagtgaggctccaggatctgccagtgccctcaggactctgccccaagggccttggcactgaccaggtgccttggatggacaccgaagtctgtgtcctcagtgggagggtcacactgggctcagggccaggacaccctgggccttccatcccaggagagacgagcccccagccagtgcaaggggccctggctgaggaaaccctgggcctctgcttgcccagctccaggaaaagttgccctgccaggagggaggtgcccaggc

SEQ ID NO: 136239 - DNA, 173 bp, Homo sapiens
tcccaattcagaatgcccaaatattctccatcctttgaggaagtgacttgcctcccattttcttcatgtagattgtttgtttttgtctctatatattcgtttagacacttgttgctcaaagcaatagaaacccagtttaaatggcttttaataaattgttttgagtaaccacc

SEQ ID NO: 136240 - DNA, 240 bp, Homo sapiens
caatgttacttttttgttactgaatagtattccatgatatagatatatcatagtttagccgttcgtccattaaataacatctggccgggtgcggtggctcatgcctgtaatcccagcactttgggaggccgaggcaggtggatcatgagatcaggggatcgagaccatcctggctgacatggtgaaactccatatctactaaaaatacaaaaaattagccggtcgtgatggcggatgcct

SEQ ID NO: 136241 - DNA, 201 bp, Homo sapiens
aaggggaggaagaaaaacagggaaaaaactggtcggtggtccattcagaacacataaacatttatagattacgctgactgtcttatagtggtgtagtttgtggtgtcccaaaacaattacaatagtaacatcaaagatcagtgatcagctgggcgcggtggctcacgcctgtaatcccagcactttgggaggccgaggcgg

SEQ ID NO: 136242 - DNA, 394 bp, Homo sapiens
tttaaagaaacttagtttaaaacccactttaataacaaaattatagagactgagaacagaatagtggtttccaaagaatagtaacaggaataagtggtgggtgtcactacaaaggagtagaatgaggaggtctttggtttcatggaacagttctgtatcatgattgcagtggtgctcattctaatctatacggagaatcaagttgcgaagaactatacacacaggttgggggaagtgaaagtcccagagggaactaggggccccagaagggagtgctttaaaggctgagaaatacggtttgaatgaggagttgggggtcctagaagaaggttgaaggtccaagaagttgagtgttggaaggtgtgagattaggatcccaaggagtgttggaagt

SEQ ID NO: 136243 - DNA, 100 bp, Homo sapiens
atatcccagtcagatgggagatgtagcagaatgtgtttcttgacctattagaaaacatgctgtgagataatggggtaggagagattaatcccactggacc

SEQ ID NO: 136244 - DNA, 404 bp, Homo sapiens
atcaccaaaacacattgtaactttgaaaaactctttcccttgggaaccgtcatttgatccatatagtggctatgtgatggtggttcaagtgatactgggcaccaagtaattgaacaagaatttcctaaatgtgtttggtggaatactaaagtgagacttctttttcaaaattttgtttttattttctatttttaacatttttgtgggtacatagtaggtgtatacatttatggggtacatgaagtgttttgatacagacctgtaatgtgaaataagcacattatagggaatggagtatcccctcaagcatttgccctttgagttacaaacaatccaactacactctttaagttattttaaaatttataattatgttattattgactatagtcaccctatcccta

SEQ ID NO: 136245 - DNA, 809 bp, Homo sapiens
gacaactgagtgatgtcagagcaccagggggtctgtgaaacagttcataagaaaccataaatcaggggccatacaaaagagctgagcaaatgagacatgccaagtgaccacgtgacagtgtgtgagaaacttgtaaagctgtgcacgtgtgtccgtgatgagctgaccatatgaagaaaatgacggtgtgcacgactgagagggcatgggtgactgtgggtgacttatcgagggcctagtggtgattgtgaaatactgaccgagtatatcagaagctgactgagggacagtgatgactgagacagtggctgagaaacggattgtgtgtccatgggtaaaccctttgcaagagactttatgaaaggctgtaaatcaaggactgagggtactggaagctgattgagaagaaacgtgagactaggtgacgacagtgtctgagatactgtgtgattgtgtatgcgtgtgaatgtctttgtgggagaggctgtaatcagggatcgtgggtgtgtgaaaaagtggcttgagtgagaaaggggtaggagaggtgatttttgtgcatgtgtgggaaacttcatgagagactagttagtggtgactataaatcagtgactatttgtgtatgtgagaaagtaacaggccaaatgagtgcctaaacgtttcatgagattgtgtgactgcacgtgtatgtaaggaactgactggtgagagaaactattggcaatattgactgaatgagacaggctgttaaacatgattgtgtgtgtgaaactgttaggagactgtagtaaggctggaatccatgacacaga

SEQ ID NO: 136246 - DNA, 680 bp, Homo sapiens
gagctcggtaccgacgctctctctgtggggctctgacacaacaggattaggttttataagaagagactccaggccaggcatggtagctcatgcctgtaataatcccagcactttgggagaccaaggcaggaggattgcatgagcgaagccaggagtttgagaccagcctgggccacataatgagaccccgtccctacaaaaataaaaattaaatctagccaggtgtagtggcatgtacctataatcccagctgctcaggaggctgaggcaggagggttgttgagcccaggaatttaatgctgcagtgagctatggttgtgccactgtactccagcttgggtgacagagtgagaccctgtgtcttagaaaagaaagcaaaaggtaatgacattttgacactaataaagtaggaaggccatccttttagagtaagggataatcaccaaggtattctgtgcctgcaggctgaggagtaggggaaggaggtgaacacgtgagccatccttgtctccagccccatcctgctgtgcatgttcccctcatatctcccaggcttctgttctccaagctgctaatggccttcatgaaagtagttcagtttctcagtcttcttaaacagaccagacacctgcctgactggcagagaagcttgctggaagaccgttcactgcctggttggc

SEQ ID NO: 136247 - DNA, 460 bp, Homo sapiens
tgctttgcctcatccaatcatcattcatctcttggttaggtggtgtttaaatgaagcatggaataggtcaagccttctcatagcatttacaacatataagaccttataggatctggcctctgtctcctctttccctcagcactttatcatgtagccacaaactatttgtagttccaccagattctctgggatgtatcatacataactctatgcctctaaactcttcgctctgcctgaattctccttttctctcttttatcttagtgaacatcagccaagacccaattcaaatgtaagctgaactgtaagactttctctgaacaccatctctgcttctccactgcaatttgaccactgcctccctctgccatcttggaatcttatataagtaagtatattgtagtttttttttttttttttttttttttttttttttttttttctgggggaaaggttttag

SEQ ID NO: 136248 - DNA, 181 bp, Homo sapiens
gtggcacatgtaccctagaacttaaagcataataaaaaagaaaagaaaaaaaacccaccacaaaaaaaataaaaaaaaataaaccaacaaacaaacacaacctaaattccctgaatgggcttaacagtggaatgaacattgcagaagtactgatgcctcaagatggatcaatagaaatgat

SEQ ID NO: 136249 - DNA, 252 bp, Homo sapiens
gaggaaaaagaagaaattcatccataagtgagaaccaacagacactggctacaaggcaggctgtcccatgctcagtaaggggtgctggatcatgcatagtgttcccaggtcattctatgcttggtaaggggtcctgggtcacgcacagtgctcccaggtcgtcccatgctcggtaagggtgctggatcatgcacagtgctcccagtatataagtgacaggcactcagtctgtagctatttgcctaagttttt

SEQ ID NO: 136250 - DNA, 493 bp, Homo sapiens
tgattttcttgaggttactgatagaatccatattttagttggatttatttttattcattctcaatattcccaacctgtttccttctcagtctttcccttctctgtaaatgtagtaaccagctgccagaagactgggagtcaccctccattcctctctgatgcctcctatcaaataaagattgcctgctctgcctccagaatctctctcatttctgctcacttttctctatgctctgccaccatcctagttcaagtcaccacaatttctctctgtaatatcacgatagattatttgctggaggtgcagtttttaatatagagaaaaaattgaccatttaaacccttttcagatgtacactttagtcatttttagtatattcacaatgttttacaaccattactagctctagaacattctcatcaccctgaacgggaagtggaggtcgccccactgcaccagcctggatgatgagtgaaactctgtctcaaaaaa

SEQ ID NO: 136251 - DNA, 797 bp, Homo sapiens
tgattttcttgaggttactgatagaatccatattttagttggatttatttttattcattctcaatattcccaacctgtttccttctcagtctttcccttctctgtaaatgtagtaaccagctgccagaagactgggagtcaccctccattcctctctgatgcctcctatcaaataaagattgcctgctctgcctccagaatctctctcatttctgctcacttttctctatgctctgccaccatcctagttcaagtcaccacaatttctctctgtaatatcacgatagattatttgctggaggtgcagtttttaatatagagaaaaaattgaccatttaaacccttttcagatgtacactttagtcatttttagtatattcacaatgttttacaaccattactagctctagaacattctcatcaccctgaacgggaacccaaacccattaagctgtcattcctattcccctaacccctggcagcctctagtcactttctatctctacagatttgcctattctggatattttataaaatggagtcctggccaggaacagtggctcatggctgtaatcccaacactttgggaagccgaggtgggaggatctcttgaggtcaggagttctggcaaaaccctgtctctattgaaaatacaaaaaatccagccaggtgtggtggcgcatgcctgtagtcccagctactcgagaggctgaggcacaagaattgcttgaacccgggaggtggaggtcgccccactgcaccagcctggatgatgagtgaaactctgtctcaaaaaa

SEQ ID NO: 136252 - DNA, 640 bp, Homo sapiens
caggaagtagtcctgtggtgggagggagagaaagggtaagtgtatgtgttgtgttacaataccattgtaattatggtagtacgagtgctttaagattattaaagagcctctccccacccctgatgtaattcgatttctttgaaattgacttttggatttatatctatacaattaaactagttgtattaaaagaagtcttaaaagccctcctgtctatagtaacaacttttccatgattttatcatcatttgattaaggaccagtcatttaacactgattgtgaaataggaggaaacacccatttaaccttgaaagataaatttaattattttctaattttgcattcattctgttggttttgaagaaaagtcacctgtaatctttaaccacttaatataaccactattaacattttatgtctttttcctatgtataaataagtttttaaaacatacctaaatacctgatcttatcatttaacatttaaggagaatggtctttattcctctgcctttttcctaaatgttgatgtgccggaggtggaggttacagtgagccaagatcgcgccactgcactccagcctgagcgacaagctcaggactccacctccaaaaaaaaaataaataataaacaaagggg

SEQ ID NO: 136253 - DNA, 573 bp, Homo sapiens
caggaagtagtcctgtggtgggagggagagaaagggtaagtgtatgtgttgtgttacaataccattgtaattatggtagtacgagtgctttaagattattaaagagcctctccccacccctgatgtaattcgatttctttgaaattgacttttggatttatatctatacaattaaactagttgtattaaaagaagtcttaaaagccctcctgtctatagtaacaacttttccatgattttatcatcatttgattaaggaccagtcatttaacactgattgtgaaataggaggaaacacccatttaaccttgaaagataaatttaattattttctaattttgcattcattctgttggttttgaagaaaagtcacctgtaatctttaaccacttaatataaccactattaacattttatgtctttttcctatgtataaataagtttttaaaacatacctaaatacctgatcttatcatttaacatttaaggagaatggtctttattcctctgcctttttcctaaatgttgatgtgccggaggtgtccttgggtctgtcacctttatggtgaccat

SEQ ID NO: 136254 - DNA, 684 bp, Homo sapiens
ccttcggtttgaggaaatcctttactattgacctggtcaaccttctctgttacccggaagctgtcttcccttctcccccttttgacctttttaaacttttctcttggtttccccgctgacagaaagataacaaccctctcaatatcgtgccctcttagagactcatgtctctcggcttccttgcacagccaagacctgaaattgaaattatccttactatctcaattcttggtcacattctctttccccatccccactcttcaagctacctctgtcaggctgctaccaccaaaacttttctggcagatgtcaccaagaacctcctaactggcaaagtcaggaagcactttacagttctcactttatttgacctctgaggcattcgacatttgatcatgtttccttcctgacattctctctacccttgacttctataccactctcacttgtttcttttcctatttgtgtaactgttcctctccagtctcagtagatttttcttccttagcccctttttatgtgttgatatttgctgtgattcttgtttgcttctaattttgttcaacttctctaggtaatctgactccatggctcaaagcctctgaagtctgaatctttagttcagacagctctctaagctaaactttctactaaatattcccactgggataactctcagacacc

SEQ ID NO: 136255 - DNA, 462 bp, Homo sapiens
tgcatatgagctgttttaatttttgttgcaaaggatttctggggagtcaaggggtatgtcagaaattagagccctagggcagaacttacaaaaaccttttagctacttccttctccccggcctcggaaatgaaaaagccaaaaggtcacccagcgcatccgccacccagtcagccccaaggccagccgtcctcaccccagtccgggtcctcgccattggcctctccgctgcacacggccacctgttgatgccctcgcgcccacagccgagttgcaaacggccgctagagttcgttctaattccccagagcagagctgcccgggaagccccgacgcgacgcgcctgctaatctgcagggcgggcggggactccgcagagcctcccagccccaggctccctttgttttctcgctgcgctcgaagcttctaaactagcccccagaccgcatcccctcgtccccgc

SEQ ID NO: 136256 - DNA, 430 bp, Homo sapiens
tctattatatatcttttaggtgtctcaggagctgtcccacacaccgttgacaatgcaaacccaattcttaaaatgaagatatttccatttgtgtacagaggccatgcaattatcacaagtaattcacttaagcaaacacctactgccttgagtcatcttttcatctttacatatacttcacaccatacataatgtcaagggctccaggcctaataacaatgctcctagaagctaagtacttaataccaactcttctgggatgaatttggatagaggatgaatatttgatatcataatgatgtgaaaaggagaatctgaaactgggttcatttgagtgttatcctctcagtgggcaattaacatgaaatggtcttactttaatcacgtcaaggctaccaaactttttcttttcttgagacaaagtctcact

SEQ ID NO: 136257 - DNA, 441 bp, Homo sapiens
atatcgaagtctagaactggcacagcatcacttatgcctcattctactggtcaaaccgcatcataaggctaaattcaaggagagggaactagggatgctatttttgatgggaggagtgacattgagcattgagaggtgggaagaatttttggtgattggatttgtagaaactgtggttaaatagttgacggattatttgtatataagtctgtgtcccttccatggtagttccataatgttttctgcctggagcaactagtcttgaccgtatctgctatgcatagcacagtacctggtacacaaaaagatttcagtaattgattgttgaatgaattaataactgtcttgccattttcagtactttaattatttttccaaaaagtggatcaaatgttctttttttaaaaaaaaattacatgtttttttaattttcaaaaaata

SEQ ID NO: 136258 - DNA, 469 bp, Homo sapiens
tggaggataaaaggagtagttttatgagcaaagcttaggggatgcttatatcattttccctccacttcactgcctcagaaatatgccctgcttaaatgtagtacagctgtgtgcccagaaaggaagcatatggccagcccctgccacagttgacctcttataacctaatagtttcttaattgtgtttcttggatattaaaggcaactttatttacctaaatgtatttataacctaatttcactgtctgggacctggagtaaatgtggaacactatcagtgttggttataatttggtgtttcctgtcggtttctggtaagttttcccaaacaagttaaaatgtctaattctattaaatatgttttgacatcctttgaaataatcatgattctatcccccaatctattaatagtattgtgatagaattttttctatcatgaaacattattacatttttggaataaactcaa

SEQ ID NO: 136259 - DNA, 427 bp, Homo sapiens
gatgtgcgatgttctaggaacgtccggctgtgtttctgatcacggctgcacacgagaccgaaggccctgaatctcctgttatgtctaccccagcctgtgaggaagggcgctcccaaacatcagacgtgttaaaataccataagcgagttaaggtaaacatactctgggtagagtttctgcaagacacaagcacaaatccgattgaagttgcttctgataactgtgtctgctggaagaagaaaatccaacctggaaagggtggagccagggataagcacctggcccaggagcccagggcacagaaagaatcacggacactaatgctcactcacacatgcacgcacgcacatgaacacacaaacatgcacgtatacacactctctcacacacgcatgcatacacacacatacacatgcacgcatactca

SEQ ID NO: 136260 - DNA, 344 bp, Homo sapiens
ttttggggtagatgatagtattatctctattttgtgggtaagaaactgaagtgcatgtagaaaggttacagaacttgttagtgtcacacacgtagtgagtctgactccagagactccagtctgattattattgctttattattttgagctcattaaaagagggtgacaaatactgtaccttttgagaacttacaaatgaccgtggtatgtgtgcagaagatgtcctagacaaggaagacaaggagcaggtaggagggcgtgtggaacaattcatgaaattcctcaagacagtggtaaaaacatttttctggtttcttgtttccttgtcacgagagtccacatga

SEQ ID NO: 136261 - DNA, 272 bp, Homo sapiens
tgctcgacatccttccagttaaacccgccacttcatcaaggaaagaaagacattttcccggctagcactgatctgtgggcccttctttttcaaaatgggagatggcagaattttatacagaaacagtcgctagttccaaccagaaagcccagagacacaggggagccgctggtggccacacaggtgaagcatgaaaggctaagaaatggaaatgcagtgctgcacatggccgggagcccgggtccggctgtgggctgcagttccgtgatccc

SEQ ID NO: 136262 - DNA, 749 bp, Homo sapiens
gcagccccagccgtctggtggctccttcctggggccctgcgggctgagggattagccatgaccctggcaccagcagctggatcggctaggcctagggcccacccctctgtccttagagcagaccctgtgcagagcccgtgctggccggggctgagagggttttggcagctgcccccctgcactccctaccccagcccctaccagatcctcctgtcagggacctttttccccagaggagtcggggaccaggagcacaaaggcctgttgtttgcggagtatcacatggctccgtgtgtaggggcgcggctgggtgctgtgcagacccagttccatcccgggctcactcactgtccagcagtcactgaacctctcagcgcctcatcgtcctcatctgtgaaaggttgtatgctcacctcagatgtgcattgtgagggagacactaggtaactggtgtacgtgctcagaacagggcccggcttgtcacaactgcttgacaagaggcagccgttgtcatcagacaggctttgacccaaggcctcctgactcctgcgcccgagtcatctgcttccttcctcctcccgggtctttgtggaggatcctttaggatgtcagagggttgagcagcacacaacctcagcggcccccttccctggaccacagtgcgacaagtggtgtcacgctctcagaagttgtgcagtgcacagccagctcgatctcacatggcaggcccggtgaagggaggatctcca

SEQ ID NO: 136263 - DNA, 425 bp, Homo sapiens
cccctcattgtgctacaatcacaggagtaagtaacactcccaaggccatgtggctggtgactcggggggcccaggtccaggatcctgccccatctgcaggccagtggttccttgtctcctatttgcttcttggagcagcctcctcataagccaacagctccttcacctgagcccagtcactttgcgctcctccccagaaccaaagagcaagaccatctgccccaggtacagtcctggccatgccacactctctgtggcatcatgaccaaggtgagtggcagatactgaaatcatccagggccactgcaggccccattcccagtggactgttcatcaagggaccctgtctcaggccatctcagccaaccttgttgcccagcacaggtctggcacattggagatgatctgtgttggatggggaaggc

SEQ ID NO: 136264 - DNA, 429 bp, Homo sapiens
gcctggccaacatcgtgaaaccttgtctctactaaaaatagaaaaatcactcagacaaggtggtgcacacctgtaatcccagccaatcgtcttgtctcggcctcctgagtagctgggactacaggtgcccaccaccacacctggctaatttttgtatttttttgtagaaatggatttcaccatgttgcccaggctgttcttgacatcctgagctcaagcaatctgcccaccttagcctcccaaagtgctgggattacaggcgtgagccaccatgctgagcccacaaatatttgttttttaaaaacagcttcactgagatgtaattgacatagtacaattttataagtctgacaaatacatacacacataaatcatcaccacatcaatgtggtgaacatacccgtcattcccagcagttgccagaagtgc

SEQ ID NO: 136265 - DNA, 263 bp, Homo sapiens
acgatagtctcctcactgcttgctatggtctgaatgtcccccaaagtcatgtgttgaaacttaaatctccactgtggtagtagtgagagatggggtcttctggaaatcaagtcatgacagttccaccccgtgcccccgaatggactactgccttctaaaagggctagaggaaaccagcacaggcccctttatgtgcatctgccatgtgagaacagtttttgctgcctctggaggatgcagccacaaggcgccttttttttttt

SEQ ID NO: 136266 - DNA, 698 bp, Homo sapiens
cacacacccatttcaaaacactgcctctcatcttctaagcccaggggtcaggaaactcttcccataaagggccagaccgtaaatattttaggcttttgggaccagatggtctgtgtaccagctattcagctatgccatttcagtgcagaagcaaccttaagtactgtgtaaatgggcaatgctgtgttctaatagaactattttaggccaggcatggttgctcacacttgtaattacagcactttgggaggccagggcaggaggagcacttgaagccgggaattcaagactagactgggcaacattagcaagacaccgtctccacaaaaactttttaaattagccgggtgtggtggcacacctgtagtcatagctactcaggaggctaaggcaggaggattgcttgagcccaggagattaaggctgcagtgagctatgattatgtcacttcactccagtctgggtgacagagggagaccctttctcaaaaaacaaaatagtttattttaaaaagcaggtggtgggccatatttggcccatacaccgtagtttgccggccccttttctaagccatccagagtgttgagccagtgttgaaatgggaaagagaaactgtctagagtaccttctcctaggacagaccttcacaaatgtatttaatcctacttttttttctgattgtttctcatttctagctg

SEQ ID NO: 136267 - DNA, 852 bp, Homo sapiens
cagttcttttgtgcaggctttttgctctagagatcctgaacgttggccagcaatttcccctcacagtttaagtggggccttctattttttgaatgtttgctaggacaacctccttgtgactatccatcaaaacttccagttttgaggaagatctgactgctgaatgaattgttcatgtttgtagaactgcatgttcgtagaactgtgcatgttcttccttaaatcagttctgtaagttacatattctaagaaatctttaaactgaagtttcaagaaacatgacttttttataatactcttgttaatggttccaacatggctgttccccactcattcctgagtggctctttgtgccagcatctttctcacccccacccccctcagctttcttaatcagtcatagcagatgtgtgcttttattccggcaaaccactatcactgccagtgtccaacttagaaaaatgacagtctataaaaaccagtgatgtgaatagtttcaatgggtttgtctttttgaagaactgactttggctttgattctttctacagcgattttcttttgctaatttagctatggatgctttttgcctctcagtgtgtgtatgtgtgagcataaattagtgtcctgtaatttaagctaatttccctattccactatttagtgaaaaattctctccactgggaggaaaaaacaaaagctgctttccaggaagccctcggggcagtcccacaggagcagagctgcacgaggccaggtgctggccccactgcgcggctgttctcagtctcactgggcttccaggccgggttcagcatggttctgaggaatctcagttctcatctcgccccgtg

SEQ ID NO: 136268 - DNA, 1966 bp, Homo sapiens
cttcttctcacagtcgggccctttccaaacattcagagctccaagatttatggcacatgtgtttcaccttgaatccagaagagcccttggcagtgttggtgtgttgtgggctaggaaacttcaggagcaacagagcccagtgacgagtcctcgatcactggcgccttttttttttttaacctgagatgtaattaaaattcattcacttgaaaattcagtcgacgtgtgaactaattaaggatctaagcaccggcttccaagggcctgcctgtcacttcatgtgatgtcgccggccctcccgctgtgagatgcaaacgtctcgcctgctctgtgccctgctacgcttcacacaggggtccacgtgcagctcacgggagctaataccgccaccttccacccgctggcaaaatacagcagcatcctcttaaaagaaatcctgctaccatttcctctggggagaggggaaaaggtagaggaaagggaaagagaaaggaagaagccaccgcccccctgcccacccccacaccagctcctgcatgaggcgtccccaagtagacaggagcccagcagcctcctgtcaggaagggccagacatcccagccatgacccgagcaaaggcccgctggacttgggacagccatggctgcctgagggctgcagtcgggaagccctcaaatgccaggagtccattccacttggccatgaccctcgcggggtccccaggtctttattctgggtgagcagaaggcagagctgactatggacaccccttccttgggcaagacccctcatctctctgggtttcctcataagaggaagtaagatgggtgtgaggaagacaagtttgtcccgcctcaccagggtcacaggaccagctccccaccccccattcactcaccagacaccaaaagcatctgctgtttgccaggcagtcagctgagctccgaagaaaaggaggtagacccacaaggttcctgtcctcaagaggcctccactccaccagaaagatgtgcacatacacaagaactcaccctcagcacccccatggtaaacactgtcaaagctaaagatggaggccaggacactgttcaaacaggaaatgcagggaaagcctctctgacttttgcacagagagcaactgagatcaggtgtgtggaagggctttgcacagcatgcgcacctactccgaatgaaggctgacggtgagtggaggcagcacagaaacagaggcacggggactgcgttctgggcaccctgtggcccacggcacccaccagagaggctctgttgtcaactcatcttagagatggggaaactgaggcttggatgctgcgttgcccaaagtcatgcctcaggggcagagggggggccagagctaagtgacagagcccctgtgcataaagaccctcagagaacccgctgtgaaggctggcggcaaggactacgccggccagagcctccccagtcccccggggccgctcactccaatggtgccgcatcaccaccctgagctgtggcgggtgagtgaggggctcctctcctcgtgtcacagatcagagatgggatgagtcttactcaacacaaggagtgtggctggctctgggcccagatctctcctgagccctcaccaggaaccccctaaatgctgaaaatggcactggcttcccagggaacagaagcggcagtgtctctccacacagagacagagatgcgccccgggctcaggctacagtgagttatgatggcgccactgccccccagcctggccaacagagtgagaccctgtcggcctcccaaaaaaaggaggcaggtggccgggcacagtggctcacacctgtaattccagcactttgggaggccgaagtgggttgattacttgagctcaggagtttgagaccagcctggccaacatggcaaaacctcatctctacgtaacctcgccgattaaaacgcagggctgactagc

SEQ ID NO: 136269 - DNA, 167 bp, Homo sapiens
gccagaaatctctcaaccaaaatgtatcaatatttttcacttttttctttaattatggtagggtattcacattttagtcaaagtgtaaaacttttgtgaatcaaagcaaaaataccttcggatgaacttacttttaaataatttaaagttatctttactttttatac

SEQ ID NO: 136270 - DNA, 759 bp, Homo sapiens
gggttggagagcccccagagactggctggggtaactggttcgtagctgtctaccccggaataaatgccaccttcttttccgcggtgtctgcgggaccctctgttgggggttctaattcgttttggcctgggctccttacatttctgtccggccaggcgcttttggacagcttttcgcagcggtgtctaagcttgtgttcggtgtccttggaagggaggtcccagagctttacaataggctggatttggtttgacatcttttggtggactgtcaaaggggaaaggaaatttttggattacttcaagatcccccaccgcccccgcccaactgacgtttgcgaattgcggctttggaaattggagtgttgactagagtgtggagagagagttgctgatttcattgctttgagtactagtaaaaccatttaagtatcagccggaagggagacagctattgacatttacatcggttctgtttggacctttggggtacataaaatgtcgggttctctgaattttttatcgaatttagaatgtctgctacatttatttaacttctgcaaatgcttaaaatgaaaacattttggaaatgcgaggatttttatcaagtggattgttctcttcatatattaaatgtttacttcatatctttaatccgaaacattaaaatagcattgaagaggcatgattttcaagattaagtgagctatggaaaaggaatacgcttttaaagaacgatctgggaaatgctgttactatt

SEQ ID NO: 136271 - DNA, 354 bp, Homo sapiens
gccagggaagcccttctatggggccaagggtcattttccccttctagctggaccttttgaggtttggcagcttgattttagccataacattttatccacaaatttagaggatcttcacacaggactggagagagctgctgtggagagctttaacccaagacaccagcccagacctgtatacaaaagaatgcctatatttagtgtatgatagccattacaatgattgtcctagagatactggcaattgctgtgttatgcagaaccaggcaccagccttgtctgatttaatatccttttagtagttaaaatgaatttcacaaccttgtttctgtttatcctctgtccctgtgcctt

SEQ ID NO: 136272 - DNA, 294 bp, Homo sapiens
tcatgctgctcctattaatagtggatatcaagttttggcactattaaacatggcctttgcaaactcatagagacagaaagtataacgatggttgccaggaatggggaggggtggaatatgaggagtaattggcagggtcagtttgggatgacgaaaatgttatggacctgtatactgggaatataacaatgtgaatatactaaatgtcacaaaactatctacttaaaaatggttaaaatggtaaaaatttctgttatgcacattttaacactatggtttttttattatacttta

SEQ ID NO: 136273 - DNA, 205 bp, Homo sapiens
aaacatgtcataaggcaagttcagattcaagaggtaggaaaatagaggagtgtaaaatactttggccatgacttccaattcaccacaactctgggatgactgattaaatataaaaggactgttaccagtggaaagccttatgttttcaagtgagtttagatttattaaccacccaataccatcaccctctaaaaccattgaaagt

SEQ ID NO: 136274 - DNA, 969 bp, Homo sapiens
tactgtgtgtctagagctgcactgggcactttgatgaggaggaggagggggagaatggtaaacacctgatattaattgagcacctatggtgtgccaggctccagtactcaatgttttaccgtcacgatttcaatctcttcttccaactattccaaggatagatattattattatcatcctcattttatagatgagaaaatcaaggctcagaaaaggtaaaacaaatacttgcctgcagctacatctccagaaaatggttggtgagatgccaatcattccagttatcccacattctcagggggggtctcagaatctccccaagatacaaccaactcccgagccagccccttcctctctagccctgtgctctcagctgcttaaacaggcttagcagcagggcccttctcattcttggctaattcccaaatgggcttggttgctggtccccctgtccctctttctgtcccaaggaggtgcccagccctggggtagggaacctcgggatgaccttggtgagggtggcagatgatcaacaaagactcctgggttgtactgagccctggcacgtgtgtgaaccttgcatgcacacagcatccaggcagtctcagatgacagtccctgaggaaacctaatcccaccaagatagggacacctgaggacgggggcaggaagggcaggggcctgacacctgtcaaatgaggatgatcccagaaggctgactgcaccattaacaagacttccaccaaagcaagacagacttaggatagatggcaaaataagcgtctataaggaggcaggactggacttttcctcctcactaggagatgacaaagctgtgcttagaggaagcccgctcagagttggcggcatggctgagtcccaaaagatgccacatgtgcccacgacaagtgaccaagttcatccttccgaggtctgttaataattatttatttaactgccacaagttcc

SEQ ID NO: 136275 - DNA, 611 bp, Homo sapiens
gagagatctctctccttttgatgctgggtgcctggatggtattaattgattttagtgatttcttaatccatacagaatcagttaggatggtttgctcccatcttatggatgatgagacagtagtacagagcagtgggatgatttgtttggaaccctggagaccattaattccaagatccaaatcctatggcctgtgctcattttggcagcacatatgctaaagttgcaatgatacagagaagattggtgtggcccctaggcaaggatgacatgcgaagtggtgaagtgttccttatttatttatttattaaaacagggtcttgctctgtcactcaggctggagtgcagtggcatgaccatggctctctgcagccttgacttcctgggcttaagcgatcctcccacctcagcctccctgttagctgggactataggcatgcaccaccatgcccagcaaattttttctattttttgtagagatgaggtcttactatgttgcctaggctagtctcaaattcctgggctcaagtgatcctcctaccttgcctctcaaaatgttgggattacagatataaggcactgtacccagctgtgttctatattaaaaaaaa

SEQ ID NO: 136276 - DNA, 183 bp, Homo sapiens
acaatgaactagcttagactagggggttgggaggctaccccttctcccagtgagaggggctgcacccaagcacaacttcccacagcacctacagctgtcttctccaggtgtgtattatcccacaggtccctaagtttccaggtgttgggcagctggcattcccagacaacttccttttttttt

SEQ ID NO: 136277 - DNA, 569 bp, Homo sapiens
ccacatacaggagaatgaaactggatactcatctttcaccttatacaaaaaatcaacttaaatctaagacttgaaactataaaaattctagaagataacattgaagaaacccttctagacattggcttaagcaagtatttcatgatcaagaacccgaaagcaaatgcaataaaaacaaagataaatagttgggacccaattaaactaaacagcttttgcaaggcaaaaggaacagtcagcagagtaaacagacaacccactgagtgggagaaaatcttcacaatctatacatctgacaaaggactaatgtccagaatctacaacgaactcagacaaatcagtaagaacaaaagcaaacaatcccatcaaaaagtgggttaagaacatgaatagacaattctcaaaagaagatatacaaatgaccaacaaacaaatggaaaaatgctcaacatcactgaagatcagggaagtgcaaatcagaaccacaaggcaataccatcttactcctacaagaatggctataataaaaaaattaaaaaacagtagatgttggtgtggatgaggtgatc

SEQ ID NO: 136278 - DNA, 471 bp, Homo sapiens
caggcccagtcctcgggtcatccaactttctaagttttgccagactgcctggtgtaaagtggtatctcagcattgctttcgttttcattgttctgggtattcatgagttcaagcatctctacctgagcttgatagttttcggatttcttctcctgtgtattgcctgttcatatcctttgctccaacattgtttatagagcactccctccctactttggcatttggggtcccctaaactggcccccattgctaaagcttacttctcatgactgacctttgcccatgctgcatgtggtccaggaacaattcttctgtctttgtttttgctgtcccctcttgcctggattacatcatcttctccaaacccccaatctaaacatgtcccgaatcctaaatattctttagaaccaagctcagatatcacctcctcctggaagggttcctttatttgctcagctggccttggccttt

SEQ ID NO: 136279 - DNA, 355 bp, Homo sapiens
accctcgactcctgtgtgggctaggatgagggtcctctgacaggggcaaggatttgggcctttggagaaccgatccttacgcaggaggccgcaaatgggctttgcaggggcaatcaggagactggacaagggcaaaagaagagcagccttttcccctgggagcccctcctgaaggtggggatggctgggtgggtgcggaagctgaccaggcagcctcactctgcaaagggaatgtgccacccggtcctcagtgtggggctgagcctgtcaaaggccctgcctcagtgaatggggcaagagagacaataagggaaaaaattaataaatttttggcaggcaccatggcaggcaccaa

SEQ ID NO: 136280 - DNA, 568 bp, Homo sapiens
gaggaggcacctgttgtccccaccttgcggtgggtgtggggctggtgggggtaagagggtggacatgagcaggccctcattgtcctggactagggaggcagcaaggactccaactggcaacccccagccccagccctgcacttgtggaacctacattctagtgggtggaagtaactcaaagtaagggcctgcaacactgtggagtacatggtaggtgctcaagaaatgctagcctaggatacctgggacccagcaccacctctagcatcttagcacaagaagggctcccccaggttacctgctctcatcctcaacattgcctgatgcaacgattgtttcttactgataggaaagttcttctgcacggccttgactgactccgaggtttgcaaacatccactggcttcagtgaaggaggggtttgaccactggccctaccttgctcctgacctggggcctgtggggcagctgtctgcacagcacggctgaggcctgtgccagtcccctcctctctggtgagcagccttgagaaatacagaaaggactgggcggaatccacagcagcagc

SEQ ID NO: 136281 - DNA, 246 bp, Homo sapiens
ggatgttcaatccgtttctctcccatgacatattcatgtgaaaattataataataaatcaataatatttaattatctcttcatttttgaaacaaaatcttctgggagtttctttgcattatttcataaacagctagataaatttcatattacatttctgattttgatgttcatagttctgaaagtatcttatctcttccccttttgtattagttttatcggttttgcttttttttttttttttttt

SEQ ID NO: 136282 - DNA, 496 bp, Homo sapiens
aaaataaacaaaatggtgtaatagacctgacactcagcctcaacaactactcatcatgtgctatttctgcttcatctatacttcagctcattccccatccctttatttttttatttttataagataagatgtatgtgcattgacatgtataatctttattgtacctttttgacaaatcagtacacccatataactttttatcctcttaagaatagaataccggctgggcatggtggctcacacctgtaatcctagcactttgggaggctgaggtgggcagatcacttgaggccaggagttcgagaccagcctggccaacatggtgaatccttatctccactaaatacacaaaaattagctgggcgtggtggcacacacctgtaatcccagctactctggaggctgaggcaggagaatcacttgaacctgggaggcagaggttgcagtgagctaagattgtgccattgcacgccagcctgggtgacagagctagtaa

SEQ ID NO: 136283 - DNA, 385 bp, Homo sapiens
catgcaggtggcaagagagagaatgaaaaccaagggaaatgagtttccccttatcaaaccatcataggttgtgagacttactcactactacaaaaatagtacagggaaaaccgcccccatgattcaattttctcccacagcatccctcccacgacacgtgggaattatgggagtacaattcaagatgagatttggatggagacacagccaaactatatcaggagagaaaatagctctagaaagaaaatctctaaaattaaagaaaaaaaagaaaagaaaagaaaaaccttggaataatttagaacatgggaaaacaatataagccctcagtgttgtgtaaggagaaaaacattcaaatttgtccctaataatgttgcaatgagtt

SEQ ID NO: 136284 - DNA, 311 bp, Homo sapiens
ggcaactgactaaactcctcttgctggctttctggagcacttgtattgcccacatttctctggttgagaatacagaaacagcaactagctcccgttccctggaaacctgccccccagcaaggaactgtgggcatctgcagactgctgtgaactgtagacctcatcttaagttcgtcttttgtagaagcccatttcccaccatgacggtcacaagacatggcacactgttgacaactcagggctctgatcccaactagggctactaacttgctgtatgaccatcagcaatacacctgaaaactgaagggggt

SEQ ID NO: 136285 - DNA, 644 bp, Homo sapiens
gctggaattacaggcatgagcccaccacacccggccagatgaatcagatttaacaccagatatgtgtctttaaaggagacccaactcataatatcagcatatcctgactggattaactggtggaaatcagaaggaaagcagactcctcagtctttacttaaagacagaaaacaagcaaattcctggttaggggaacaaatgatgactggtacggacacagagggctaacattcaacactggctgcctccaacagggcacaattggatagtagttgagaactaccttctgaagtaccatttcctgggttcaaatcttagctacagggttgcaggttacatggccttgggcacattccataacctctctgtacttcagcttgcttatctggggagaataatagtacctaccccaggattgctgggaagacagctaatctaatatacttggaatactttttcccatctgattttgaaggttttgtttgtttgttattactcccccctgaacaactgaattaagtgtctttgtgaaaactgaaagcaaatggaaaatttcttcatgaaaattgaatacccttcacctacttgaaaaaggttaattattcaagcacttgattttaataaagccagtgcgtttgcttgtg

SEQ ID NO: 136286 - DNA, 262 bp, Homo sapiens
accggctggaggtctgcgcgctcagtctctctggtgggaagatgagcggaagatgctgaaggagatgtaaaagctgcaaggcccctgtgaaggccaggatacttccccaagatgtcatcctcaaattccgggactaatgtcacctcttcagagaggccagcccttagctgcttccccctcgtccctgcactctctctcacagcatttttcaccccccaggaattggcttctctgtatccaccctggaatttgagttccacag

SEQ ID NO: 136287 - DNA, 535 bp, Homo sapiens
tccaaaaccacacactgtgctatttacgaaggtgacactctggtcccggcagtgggagacacagaagccccagtcaggaggcccctggagaagcagcctttaccacggctcttaagtagtctcagctctggctgccaggctagagggcaaggaggccagcgccagaggcttacccaaatggtctcataatggggcgggcaggcgtagcaggtgcccggcgactgacctactgcagaggccagacccaggatcttcctcccagacaacttgactccacaagcataaagacactgaaacacctccctggaacctgtgtttccttgcaaaagtcaacctggttccacttaggtgtagaccagatgtctgagtaaaactggttcccaagccacaagcgcgccccctggtggttggagaacaagcccttcctctcctcgccaacagtcaactctctccgccgcccctaaaatcatggcccgctaggctcagacctggccaccctgagaggctcaagatcaaccatctggtgcccacctct

SEQ ID NO: 136288 - DNA, 628 bp, Homo sapiens
tggtagcatttcacatcaatgagaagaactgttcataaaggaggtggggcaacggactctcccattaaggaaaagaatgggctgagcatggtgggatcacgcctgtaatcccagcactttgtggggctgaggcaggagaatttcttgagtacaggagttcaggataagcctgggcaacatggcaaaacactgtctctacaaaaaaaaaaaaaaaaaaaaaaaaaaaacctttgttcggcgcgcgcgccttggcgccctttcagaaaagcgttttcttaacacccccttctcgtttgggcgcgcgcgcgcgggcccccttttggtgtatgtgtgaccccttggcgccaataagcgctgtgtttcccttaagggagaggatccctcggggtcctatgagacctacatggcgctgtggtgtttccctcccacccaattataagagaaacaccgccccgggggggagcaacacccagagcgctgttttcgtgagaaccaaattttccgagatattggagagtctctcaagagaggggctcaatacagcggggagattcatactacacccaaggagatctccagagcggagacctccaattattcaaatttacgcccggtctgtggtgtggct

SEQ ID NO: 136289 - DNA, 858 bp, Homo sapiens
tctaattaaccaatttgctaaagaactgcactatttcttcagtggcatctctgcttggaagtcctattcttagtctcagcttcagtacaccctcaagctatcttatttgcttctaaaaatctcttctagtacttctgtttcagtctttgtatagttcctatctgttctttggatattaattatgtatagtcacgtatatatactgtgcagacttatttagaggctttttgtcatattttgcttaaacctgctactgtgcaatcttacattccagttctttcattagtatggtctttttttttcctttctcctctcttctacacttctattctacttttccttcttggtccctttgcgtagcatcttttgcctggccatctcagttttatcttttaagtcctttttctttgttcatcccctgcttcagtgagcttttgcttctctgaactttgataacaagtattactgaaccatttatttctgggtgtagaattcatccaaactgagcttttgagggaaccttattggttatctaattcattctcctggccagtacagctgtcattctctgaaacatccatgacagtatctacttgaatgtttaatggacatctcaaatgtaacgtcagagactgaattccagaccttcctccagttgtctgttcttctcatagtcttcagtgacaactccattcttctgcttgctcaaatggaaagtctcaggatcatctttgactactgtttttgttttgtatccacatccagtttgccagaaaatcctttttggctccaccttcctaatatgtcctgggataatagcagggtgaggaagtcaggtaattcctttccacagaaatc

SEQ ID NO: 136290 - DNA, 401 bp, Homo sapiens
gtgacgtgtgcccatagtgccagctactagggaggctgaggtgggagaatcacttgagcccagaggttgagacttcagtgagtcactgcactccagcctgggtgacgcagttagaccttgtctggaaggaaggaaggaaggaaggaaggaaggaaggaaggaaggaagtaggggaagatgtagtctttattttagtcaaccctcagacttcttttatcaaggaaaatgtagaaaatgaatattgggttacacaattgtctctgtcatggggcttgagtcaataaatcacgtaaatttattcattcaaagagatattagtttccagttttattatcatgaggctaacagaaagaagttatctataaagccccaagaaagaggatatattgagtgaagttatt

SEQ ID NO: 136291 - DNA, 323 bp, Homo sapiens
tgggcaaccctttctttgaaccaaagacctgaccagattggccacaaccacactcacgcgcatttccaaggcttcagtgccagcatcctcgcaaacagcttctgaatgccattcacccaatgtggtcctgggcagcgccctcttgcctatcgcctcccaggctccttgcagcctgatgcaaaaggaacagggctcctgccatcctggcgtccatgctttgggtgcttgctggtggatgccatcaggggagcctgaatggggcatttccagaaccttgctgacctcttaatgaggtttagggtggggaggccagggtgactaac

SEQ ID NO: 136292 - DNA, 383 bp, Homo sapiens
tccaggaattttcaaaaaacttatcttttaatcagccataatagtatgcaaaaacagagaaatgaaggttaacagtcataatttatatattaaaattaaaatacttctagagataaagacgggaaaggagaaagaaatatacaaacaaatgaaaggcagcctggtgaacatggtgaaagcctgcctctactaaaattacaaaaattagcctggtgtggtggcttacacctgtaacctcagctactcaggaggcttaggcatgagtatcactgaacctgggaggcagagtttgcagtgagcagagatcacgccactgcactccagcatgggcgacagaatgagactccatctcaaacaaagcaaaacaaaaacaaaatcaaaat

SEQ ID NO: 136293 - DNA, 406 bp, Homo sapiens
ttttctgggtttttatttttttttctttgccagcagggaagccaaagaaacttgattctgaagtgcaatattgaatagaaatatgtaaatcaagtattatataattgaatattgatcaaatgcctttaagcagggccctatgcttagtgaagttcgcttgttcattccaagtgaacatactcattaagcacctgttaagtgctgtgcaccgccttacccaggtgagctgaaacaggtgtggtcactacccgcatggatcttgcagttcagagggggaggactggcacgtcagttggctgcacaagtggatgtgaaacagcaacttgacgaggactcagtggtaaagatagggagtcagaagtgggaaggctccagcaggacagcacgacactcctgggggatccac

SEQ ID NO: 136294 - DNA, 459 bp, Homo sapiens
aagcatagggcagctgctgccatccacatgttcattttgcctggcagaagggttgaccagaaagcctttcctccaaatggtataaagcaagtgaaaagcaagttacaaatacatgcacttttgaaaattaccatgtgggcacagaaaagaaaaagattctccttgttcttattttaagagaaaaatactcttcacatttcctttctgtgagaaagataaataagaaacattaagtagggaaaataggtggtgagacaaaaattattattttttccttagccaatgacctttgagaaattgaaatttcctttgaaggaattaaaaaggaaaaataagtaaaaactaaagcagccttctggctttctttgttaccctacacattgagcacaactgacagggtggctgctgcaggacaattcataggccttcattgttgagtcgtggtctcaggtggtgcat

SEQ ID NO: 136295 - DNA, 558 bp, Homo sapiens
ccaagacagttgtgggtagaggaaggcagatttattagagaaagtaggaaaataatggcgccagagagacaacagacagcctgcaaaagagaagcggactgccaggagacaaagacttgttgaagattttacagcatagtgttcatgctgcgtgttgaagagggccttgtgcagtatagataatgccaagttgcaatgagctaatttgcaggtgtctggtgatagttgggcacaggaagatggggagttgattgcacagaagggccgtgtcctggaccatgaagaaaggcagacttacagcttatctgctttttctttttgctttcccttgctcccgccagcctggcttccttcccctaattaggactccacacgttagtgggtttacatatagattggagtggttgttcttaggaggctgcctaaagcatcaactatgtgcaaggtgctattaggacccataagtaatggacaggacatgcaccccgcccttaagcagcacagtctggtagccccatagatgcataagtattctaaagctaagtagggagttctgtg

SEQ ID NO: 136296 - DNA, 561 bp, Homo sapiens
ttgggacttggctattgggtatgatgggccttccaggaagggctaaactaggatatggcccagaggataaggaggaggggcatacatggtatccattgcccaaaataactctaggtaacctgaggaattggagtcaggggttcagctggggtcacgtgcccggttctggctaggggatggaggtgaacaagagaggttgccagcctggttctctgggcaattggagggaggaggacgggctagaagagttatttttaatattatttagagcatcaaaagaggatttcccagtaggaaaaaaagggatttgatgtagggaacactgatactttcagggctcagggagacacacagggtatgggaggaggaggccagaagtggtgataaaaccttcttatatggacagtccttctggattgaactacaagcattcatatttgggtaactctagacagatggctgcctatttttaagcctcagttttccttcttctgactaaatgtgaggactcacccgatgtacagccctgtactaagccacgggtcaaccgggtaccgagct

SEQ ID NO: 136297 - DNA, 352 bp, Homo sapiens
ttctagacaacttgtagcctagattatcctttaagagccacttacactactggaaaacaactccacccaggttcttatttgagttacagggacaagaagcctttggattgcaggtttaaaaaaaaattttttttttattgctgagacttctattatgaactaccacagttgacaaactgttagtttccatagcaattttagactgtccttaggtgaagggtttcccttccagttgctatttaagatgtgtggaatccaagaagtcacaaaaggtatttcatgtgtcataccttggcaatgcgtgctactaattatttttttgttcctgtcgttaaatatagagccttctcat

SEQ ID NO: 136298 - DNA, 298 bp, Homo sapiens
tggcaggggataaagaagaaaatttgggtagcaagtcaacaccttcctccgcccttgctggctttgatagcgcatacatcccaagaagctttctgaagataacaacgctgccctagcaatctagccagctaggaacaggatttgcttattctactatcaaatacttgtctgcctgaaaatttacctctcattgcttgttaacaagtgactttctagtagacatcaatattcaaaaaattctgtttaagcatatcagattttccaggatctgatcagccctggataaccagaccactgg

SEQ ID NO: 136299 - DNA, 843 bp, Homo sapiens
acagatttctggcttttcctttcattatgtttctgctgagaatcagatatttcttattcatagctgcataacacaagcatatcatcttttcagtttgagagctttcatgtccctggatgacctcgcctcagaaagaaatcattttaattatttaatgcctgtctgagaaatagagaactccaccacggtatggcagtgctggccgagcactgtctcagtcactccctagaacacctgcagaaagtgtgtgcctccccttcggtccccaagttctgcatttcctgaaccttcatgattgctggtgaatgagggacatcctgaatatcaaattccacaaacatccagagcctagtgtgacttgcctcacatgcttggaaattttacacttgaaccagttaaaattctagcatctggatttccagtgagacatggtagatgggtcactaaagttagcataaagaaggggaaacacccccaaactctaataaagccacaaggagagaacagaagaggcaaaacaacactgaaaaaaaaacaaaaaaaaacgaaaaaaccctttttggggccccctagggcccctgaaaaaggcttgaacaacagctcaggtggggcaccggggccccaggaaggaaaaggtagcacctgcgcacaaagggaccccaaaagaaggacacccgggagcaagaaaaaagggcgacaggagacccatcaccagaagaaaaaaaagcgcccggggggaaacacaagaggggcttgagaacacaccccacgagtggagactcaaggagggaacaacggggatacacacaacggggagtcaaaggagcccaggagcaaattgcc

SEQ ID NO: 136300 - DNA, 83 bp, Homo sapiens
gggaggatcatatgaacccaggactcagaggttgcaatgaacaaagatggcaacattgtgctgcatcctgggaagactgagca

SEQ ID NO: 136301 - DNA, 1284 bp, Homo sapiens
tcagacctagatctttccagttaatcacacaacaaacttagctcatcgcaataaaaagcagctcagagccgactggctcttttaggcactgactccgaacaggattctttcacccaggcatctcctccagagggatccgccagcccgtccagcagcaccatgtgggtgaccaaactcctgccagccctgctgctgcagcatgtcctcctgcatctcctcctgctccccatcgccatcccctatgcagagggacaaaggaaaagaagaaatacaattcatgaattcaaaaaatcagcaaagactaccctaatcaaaatagatccagcactgaagataaaaaccaaaaaagtgaatactgcagaccaatgtgctaatagatgtactaggaataaaggacttccattcacttgcaaggcttttgtttttgataaagcaagaaaacaatgcctctggttccccttcaatagcatgtcaagtggagtgaaaaaagaatttggccatgaatttgacctctatgaaaacaaagactacattagaaactgcatcattggtaaaggacgcagctacaagggaacagtatctatcactaagagtggcatcaaatgtcagccctggagttccatgataccacacgaacacagctttttgccttcgagctatcggggtaaagacctacaggaaaactactgtcgaaatcctcgaggggaagaagggggaccctggtgtttcacaagcaatccagaggtacgctacgaagtctgtgacattcctcagtgttcagaagttgaatgcatgacctgcaatggggagagttatcgaggtctcatggatcatacagaatcaggcaagatttgtcagcgctgggatcatcagacaccacaccggcacaaattcttgcctgaaagatatcccgacaagggctttgatgataattattgccgcaatcccgatggccagccgaggccatggtgctatactcttgaccctcacacccgctgggagtactgtgcaattaaaacatgcgagacataacatgggctctcaactgatggtgaacttcttctggtgagtgacagaggctgcagtgaagaataatgagtctaatagaagtttatcacagatgtctctaatctctatagctgatccctacctctctcgctgtctttgtacccagcctgcattctgtttcgatctgtcttttagcagtccatacaatcatttttctacatgctggcccttacccagcttttctgaatttacaataaaaactattttttaacgtga

SEQ ID NO: 136302 - DNA, 2020 bp, Homo sapiens
tcagacctagatctttccagttaatcacacaacaaacttagctcatcgcaataaaaagcagctcagagccgactggctcttttaggcactgactccgaacaggattctttcacccaggcatctcctccagagggatccgccagcccgtccagcagcaccatgtgggtgaccaaactcctgccagccctgctgctgcagcatgtcctcctgcatctcctcctgctccccatcgccatcccctatgcagagggacaaaggaaaagaagaaatacaattcatgaattcaaaaaatcagcaaagactaccctaatcaaaatagatccagcactgaagataaaaaccaaaaaagtgaatactgcagaccaatgtgctaatagatgtactaggaataaaggacttccattcacttgcaaggcttttgtttttgataaagcaagaaaacaatgcctctggttccccttcaatagcatgtcaagtggagtgaaaaaagaatttggccatgaatttgacctctatgaaaacaaagactacattagaaactgcatcattggtaaaggacgcagctacaagggaacagtatctatcactaagagtggcatcaaatgtcagccctggagttccatgataccacacgaacacagctttttgccttcgagctatcggggtaaagacctacaggaaaactactgtcgaaatcctcgaggggaagaagggggaccctggtgtttcacaagcaatccagaggtacgctacgaagtctgtgacattcctcagtgttcagaaggtaaataaacctgaatgccatgtgggccattctattccccctatgtgtagaactgtaactcacattaaaggttaacagcaacgaatcaatcataacaaatatgttgttcgtgcaaatgcaactacaaataattatttaaacatttttatacaatgtttttaaaactgttggattatcaccagattaatgcaaaataacagagcgagttatcagtttgaatttcaacactgcctgagacatccctctggggaaagtgaaagagagggtttacttacctactgtcttgagctcacatacctcaaaatctactactgtgtggcacctgaaaggagttgaatgaagcttagcctttcattagcaatgttaattctattcaaccagcacctgcttccacagaaattctgtccaaactatcatgaagtggtgtgacaagggtatatggacccagaagataatacaatataagaagggatcactggaagcttgaccccatgcacattttggtgaaaatgtgcctagaatcaaatgtgacacgtaggctggaactgagtaccattcagaataggatctgaagagatcaaagcaatggagaccaccaaactgtcttgaaggcatgtctatggaccttaagtccatgtctatgttttcagctcttctcacagcataaaagggcattgtccttacttttgcagtggaaaactgaatggctgacaagatggaagagtaaccatttcagcattgtatgtggtttcatttttcttagttatctggctactgaatagccggatttttcagttctgtcagaaactctaaatttccaaaaatctaagtgaaacatggatgaaactctgttagaaaattattaggattttggagtatttggggagggggactactggaatgctgtccaagttttatactaagatatcttacctgtttgttattaaccaaatatttttaaaaatatttcctccataaatattcatttaatattaggttgatatttatcacataaaaagtaaaggctactgttagctaattgtcacagagaaggatttgttttctgttgttagtgaatttgaaatccttgactttatgtgctacagccagttccatctctgtttgtaaattcttactttccattccatatcatattctgttccctataacctcttcattgttttcttttcttttaaaaataataaacttttctatgatcacgttttgaacaagtct

SEQ ID NO: 136303 - DNA, 482 bp, Homo sapiens
taagaaacaggacttcattctctgtaaatgccatattaaacatgaacactacatttaatatgttaattttgtgttgaatccagttgagagtacttaccattgtattttgtgttttcaggcctgctgtcctggatgattttgttagtacgattgatttacctaattatggatgcacaattcctgaaaagaccagttgcagtgtttatggctggggctacactggatgtaagctagttttcaaaagatgaggccatatttattttattttaaaaagaacacatttgtctttgtttcttacttttctcaccttattgtatgttttttgcatcaatctagtgatcaactatgatggcctattacgagtggcacatctctatataatgggaaatgagaaatgcagccagcatcatcgagggaaggtgactctgaatgagtctgaaatatgtgctggggctgaaaagattggatcaggaccatgtgag

SEQ ID NO: 136304 - DNA, 470 bp, Homo sapiens
gaaaatactagtagaagctttaggcaagaaatttcaatgttatttgaaatagtttacaagagttaattacttacaggtttgaacggaatttttttcttaaatactgcatatgttttgcatagttgcaataattttatctactttcttcaatagactacattagaaactgcatcattggtaaaggacgcagctacaagggaacagtatctatcactaagagtggcatcaaatgtcagccctggagttccatgataccacacgaacacaggtaagaacagtatgaagaaaagagatgaagcctctgtcttttttacatgttaacagtctcatattagtccttcagaataattctacaatcctaaaataacttagccaacttgctgaattgtattacggcaaggtttatatgaattcatgactgatatttagcaaatgattaattaatatgttaataaaatgtagccaaaaca

SEQ ID NO: 136305 - DNA, 5918 bp, Homo sapiens
  misc_feature (2916)..(2916): n is a, c, g, or t
  misc_feature (2940)..(2940): n is a, c, g, or t
  misc_feature (2946)..(2946): n is a, c, g, or t
  misc_feature (2957)..(2957): n is a, c, g, or t
  misc_feature (3003)..(3003): n is a, c, g, or t
  misc_feature (3047)..(3047): n is a, c, g, or t
  misc_feature (3058)..(3058): n is a, c, g, or t
  misc_feature (3060)..(3060): n is a, c, g, or t
  misc_feature (3076)..(3076): n is a, c, g, or t
  misc_feature (3097)..(3097): n is a, c, g, or t
  misc_feature (3104)..(3104): n is a, c, g, or t
  misc_feature (3110)..(3110): n is a, c, g, or t
  misc_feature (3112)..(3112): n is a, c, g, or t
  misc_feature (3128)..(3128): n is a, c, g, or t
  misc_feature (3130)..(3130): n is a, c, g, or t
  misc_feature (3169)..(3169): n is a, c, g, or t
  misc_feature (3180)..(3180): n is a, c, g, or t
  misc_feature (3221)..(3221): n is a, c, g, or t
  misc_feature (3284)..(3285): n is a, c, g, or t
  misc_feature (3290)..(3290): n is a, c, g, or t
  misc_feature (3309)..(3309): n is a, c, g, or t
  misc_feature (3325)..(3325): n is a, c, g, or t
  misc_feature (3340)..(3340): n is a, c, g, or t
  misc_feature (3347)..(3347): n is a, c, g, or t
  misc_feature (3350)..(3350): n is a, c, g, or t
  misc_feature (3366)..(3366): n is a, c, g, or t
  misc_feature (3370)..(3370): n is a, c, g, or t
  misc_feature (3384)..(3384): n is a, c, g, or t
  misc_feature (3391)..(3391): n is a, c, g, or t
  misc_feature (3408)..(3408): n is a, c, g, or t
  misc_feature (3457)..(3457): n is a, c, g, or t
  misc_feature (3460)..(3460): n is a, c, g, or t
  misc_feature (3518)..(3518): n is a, c, g, or t
  misc_feature (3565)..(3565): n is a, c, g, or t
  misc_feature (3583)..(3583): n is a, c, g, or t
  misc_feature (3594)..(3594): n is a, c, g, or t
  misc_feature (3615)..(3615): n is a, c, g, or t
  misc_feature (3632)..(3632): n is a, c, g, or t
  misc_feature (3649)..(3649): n is a, c, g, or t
  misc_feature (3687)..(3687): n is a, c, g, or t
  misc_feature (3717)..(3717): n is a, c, g, or t
  misc_feature (3725)..(3725): n is a, c, g, or t
  misc_feature (3740)..(3740): n is a, c, g, or t
  misc_feature (4471)..(4471): n is a, c, g, or t
  misc_feature (4497)..(4497): n is a, c, g, or t
  misc_feature (4499)..(4499): n is a, c, g, or t
  misc_feature (4559)..(4559): n is a, c, g, or t
  misc_feature (4567)..(4567): n is a, c, g, or t
  misc_feature (4575)..(4575): n is a, c, g, or t
  misc_feature (4594)..(4594): n is a, c, g, or t
  misc_feature (4630)..(4630): n is a, c, g, or t
  misc_feature (4648)..(4648): n is a, c, g, or t
  misc_feature (4662)..(4662): n is a, c, g, or t
  misc_feature (4695)..(4695): n is a, c, g, or t
  misc_feature (4698)..(4698): n is a, c, g, or t
tcagacctagatctttccagttaatcacacaacaaacttagctcatcgcaataaaaagcagctcagagccgactggctcttttaggcactgactccgaacaggattctttcacccaggcatctcctccagagggatccgccagcccgtccagcagcaccatgtgggtgaccaaactcctgccagccctgctgctgcagcatgtcctcctgcatctcctcctgctccccatcgccatcccctatgcagagggacaaaggaaaagaagaaatacaattcatgaattcaaaaaatcagcaaagactaccctaatcaaaatagatccagcactgaagataaaaaccaaaaaagtgaatactgcagaccaatgtgctaatagatgtactaggaataaaggacttccattcacttgcaaggcttttgtttttgataaagcaagaaaacaatgcctctggttccccttcaatagcatgtcaagtggagtgaaaaaagaatttggccatgaatttgacctctatgaaaacaaagactacattagaaactgcatcattggtaaaggacgcagctacaagggaacagtatctatcactaagagtggcatcaaatgtcagccctggagttccatgataccacacgaacacagctttttgccttcgagctatcggggtaaagacctacaggaaaactactgtcgaaatcctcgaggggaagaagggggaccctggtgtttcacaagcaatccagaggtacgctacgaagtctgtgacattcctcagtgttcagaagttgaatgcatgacctgcaatggggagagttatcgaggtctcatggatcatacagaatcaggcaagatttgtcagcgctgggatcatcagacaccacaccggcacaaattcttgcctgaaagatatcccgacaagggctttgatgataattattgccgcaatcccgatggccagccgaggccatggtgctatactcttgaccctcacacccgctgggagtactgtgcaattaaaacatgcgctgacaatactatgaatgacactgatgttcctttggaaacaactgaatgcatccaaggtcaaggagaaggctacaggggcactgtcaataccatttggaatggaattccatgtcagcgttgggattctcagtatcctcacgagcatgacatgactcctgaaaatttcaagtgcaaggacctacgagaaaattactgccgaaatccagatgggtctgaatcaccctggtgttttaccactgatccaaacatccgagttggctactgctcccaaattccaaactgtgatatgtcacatggacaagattgttatcgtgggaatggcaaaaattatatgggcaacttatcccaaacaagatctggactaacatgttcaatgtgggacaagaacatggaagacttacatcgtcatatcttctgggaaccagatgcaagtaagctgaatgagaattactgccgaaatccagatgatgatgctcatggaccctggtgctacacgggaaatccactcattccttgggattattgccctatttctcgttgtgaaggtgataccacacctacaatagtcaatttagaccatcccgtaatatcttgtgccaaaacgaaacaattgcgagttgtaaatgggattccaacacgaacaaacataggatggatggttagtttgagatacagaaataaacatatctgcggaggatcattgataaaggagagttgggttcttactgcacgacagtgtttcccttctcgagacttgaaagattatgaagcttggcttggaattcatgatgtccacggaagaggagatgagaaatgcaaacaggttctcaatgtttcccagctggtatatggccctgaaggatcagatctggttttaatgaagcttgccaggcctgctgtcctggatgattttgttagtacgattgatttacctaattatggatgcacaattcctgaaaagaccagttgcagtgtttatggctggggctacactggattgatcaactatgatggcctattacgagtggcacatctctatataatgggaaatgagaaatgcagccagcatcatcgagggaaggtgactctgaatgagtctgaaatatgtgctggggctgaaaagattggatcaggaccatgtgagggggattatggtggcccacttgtttgtgagcaacataaaatgagaatggttcttggtgtcattgttcctggtcgtggatgtgccattccaaatcgtcctggtatttttgtccgagtagcatattatgcaaaatggatacacaaaattattttaacatataaggtaccacagtcatagctgaagtaagtgtgtctgaagcacccaccaatacaactgtcttttacatgaagatttcagagaatgtggaatttaaaatgtcacttacaacaatcctaagacaactactggagagtcatgtttgttgaaattctcattaatgtttatgggtgttttctgttgttttgtttgtcagtgttattttgtcaatgttgaagtgaattaaggtacatgcaagtgtaataacatatctcctgaagatacttgaatggattaaaaaaacacacaggtatatttgctggatgataaagatttcatgggaaaaaaaatcaattaatctgtctaagctgctttctgatgttggtttcttaataatgagtaaaccacaaattaaatgttattttaacctcaccaaaacaatttataccttgtgtccctaaattgtagccctatattaaattatattacatttcatatgctatatgttatagttcattcatttctcttcaccatgtatcctgcaatactggtacacgaacacactttttacaaaaccacatacccatgtacacatgcctaggtacacatgtncatgcactacagtttaaattatgntgtacntaatgtaaccnctaaatattttagaagtatgtacctatagttttacctcaaaaaaanagaaatctctaaagaccagtagaaatattaaaaaatgatgcaanatcaaaatgantngctaattctccatacntaatctgcagatgatcttctntggttgncatttnangtgtggccatcacccngngttaaataacacctaatctaggtgtttacatgtattcantatcctagttntttcatgtagtttctaattcttaaaggaaagagggtaatanttctatttgtgtaatttgtttcctccaaacttaaggccacttatttacacaagatatttgtanntctantttcctaaagcatttcttnagtgctcagatcagtntctaattgaagaagnttaaaantgntttggtcattaaaaangtanttaaataggttaantctaagncttgctgctgtgattgncttctagctcactgcctttaaattttaaaaaatttaagaggaaaatttncangtctccaaagttttataaatacccttcatcaagtcatgcattaaagtatatattaganaaaaaaaaatacttttctcaacctggaagattttagcctaataaagnttttttgaagtaaaaganaacttgtaaanggaaagaaactagtttgtctnaactctgtattcatttnttttttttttgaagtanagtggaatctgttgaatcagatattttatcaagatatntttattttttcttatttcattttacaaagntcactccnaatgccatatgtaanagacatttaaattttgtgttctgtataacagccaaattatcatatttatcattgtatttgtcatgcttagctaaagatcatgtatttgttgagaaatagaataacaaaaagtaataggataggctttgaatttttgcagaaatcttcctgtacaaaacacctttaaaaataattttttgaatggtgtgaatccagtagtcccatttctctgacttagttttcttgagtgatttttatcaaggccaagtccccaaacaattccctaccagctctttagagtactgttcaatctggactaaaatggttttaagtttatggagagcttagtccacagaatatagggcggcgagtccagaaatgcttatacaatttttttttcataataagatatgtgctggcatcaagaaacttaaagtggaagcaaaaagacatccaactagttgctggtctctatcatcttatctgatggtatttctattttccttatataatacaccattttagtaagaactcctagaaatttcaagagcatattgccaaaatataaagtatatttcatagtttcttctggctgaaccagtgaaattttattattgcatattaatgatatttgtaaaacttttataaaaattgtcataattttaaatactcacattttaaaaatacttctttaatgactcttcctctaaatttcctggaaatacagataaagattagctagatacaagatncagctaagtatttagacattttgagncnagtatttttcattttattaaaggctaaaaacaataccaccaataaatcatcaaacaaacngtacaaantaattctntctttgggaggctcctttngtgatagagggacatgggtggaattgacaatgaaanttagatgaacaaggtccntgttattttaggtngtagaacagggtagagtcatgtcattatttgcnggnggaagacactatttaccaggtgttctttgctgaataaatcattaaacatttttaaaaatccaacaatccactttattttgtgtcattgacaaaaggatcttttaaatcagaaggtttcaatgcaatttttggtttggctgtttgaataatggttatgtactgttataattgtagacattttctcacgtctaccaggaattgaagtgtaaaactaaaatatttttcataatgcctctgccgtgcagaaggaatgataatccttttgtatacttctttaattttattgtaaaatgtgtaatgacttttacctatatgctgtgggcaggtcctcagtaaaatctattgagtcaatttctagtattaacaggcttttgcttgctatctaagtgtttcaaattatgggaagtgtgagacactggaaggcaagaaaattaacaataatggcatgtgatagcaaaattgtatttcacttattcctgtgaatatttcttgttggtaccaatggtactgtacaaagtgaatgttatagccacaacattctcttgaaaagaacactgtcaagaagtgggaaattgctgtcaggcatttcattgttgtttttaaacttttttaaaagaaatactggttttgcaatatagagatcatgtggtaaagaattttaataagatcttatactaaaaagccttaaatcaatttattgagattcaaaaaatactattataattaattacatcccatacatataggcaaactcatttaaaaaataaaactaattttggtaaaagtacatggcctttgtttttaaaatacataattttaaaataaatcacttgtcatgataaagtccaaaaagaagttatcattcaacattcaactaaggttggagctaagaatttactaatacaaaaaaagttaaaattttttggaccatatatatcttgacagtgtaacttttaagtaggttcatttccatttgcacagaaagtttctgtctttaggaaactgaaaatgaaatactgtggatgctatgactgtttgtcttgtatgtaaataggaaaataataagctgcctattgagtggtatagctgtatgcttacccaaaaaagggaacactgtggttatgacttgtattataaactttctgtagttaataaagttgttatttttataaccatgattatattattattattaataaaatattttatcaaaatgctta

SEQ ID NO: 136306 - DNA, 996 bp, Homo sapiens
  misc_feature (22)..(22): n is a, c, g, or t
  misc_feature (71)..(71): n is a, c, g, or t
  misc_feature (97)..(97): n is a, c, g, or t
  misc_feature (181)..(181): n is a, c, g, or t
  misc_feature (202)..(202): n is a, c, g, or t
  misc_feature (215)..(215): n is a, c, g, or t
  misc_feature (234)..(234): n is a, c, g, or t
ggcaccgcgcgcgcgcgcgccncccgccacgcctgcggcagaggatcacgtcaacgcaagctcctatcaanagtcagcctgagaaaaccagaagganactgcagacaaggctatagagactagataagactcatcactgcagctttgtttgataagcagaacatgccctgtccctcatgcntgcagtgagtgaaaaaaggantttggccatgaantttgacctctatgaagacnaaagactacattagaaactgcatcattggtaaaggacgcagctacaagggaacagtatctatcactaagagtggcatcaaatgtcagccctggagttccatgataccacacgaacacagctttttgccttcgagctatcggggtaaagacctacaggaaaactactgtcgaaatcctcgaggggaagaagggggaccctggtgtttcacaagcaatccagaggtacgctacgaagtctgtgacattcctcagtgttcagaagttgaatgcatgacctgcaatggggagagttatcgaggtctcatggatcatacagaatcaggcaagatttgtcagcgctgggatcatcagacaccacaccggcacaaattcttgcctgaaagatatcccgacaagggctttgatgataattattgccgcaatcccgatggccagccgaggccatggtgctatactcttgaccctcacacccgctgggagtactgtgcaattaaaacatgcgagacataacatgggctctcaactgatggtgaacttcttctggtgagtgacagaggctgcagtgaagaataatgagtctaatagaagtttatcacagatgtctctaatctctatagctgatccctacctctctcgctgtctttgtacccagcctgcattctgtttcgatctgtcttttagcagtccatacaatcatttttctacatgctggcccttacccagcttttctgaatttacaataaaaactattttttaacgtga

SEQ ID NO: 136307 - DNA, 625 bp, Homo sapiens
aatgcattcaacatgtgggagccatattctactcagatcgttactaggttatctaccggctcagccatggaaaggggattagacacaggtgaggatagaagtcagctgtgggagtcccactggggagaccaagaggggtgaaatggaaagaaacagcgggccaggggggttggacttcctcatgggctgaagaaggccatggaggggaacctctcagaaaccacccagaactacgcggtgaatggccagcctgcactgctagatacacagtgccatgccaacactgccatggaactgctttcatcattcagaaagaggaggctgctttttccccctcttctaatatttttaagtgactatgtttgcctgctggtagtccctaagtatgatgggataaatatcccatggaaaggaactgaggaacatgggcctaaaactcgtgaggtggtgtgagggggaggagaggagaaagaaggggcaaaatgccaagcaaagtaaaagctgttatggcacttcagggccaccaatctcgtctctaacttcatctcctggtctcctccctccctctgtccagccacgctggcctcctcgctatgcgttgaacacctcacctgtgtcccagtgc

SEQ ID NO: 136308 - DNA, 574 bp, Homo sapiens
gggtcagtggcaaagtggtgtcatgaataggaacttcaaggaagtgaacgaggaagatctgctggagcacaggaagtgaaatagacaagatgaatggggaccccaggacaaatatgctggcagtggatataagcagatggataaaccatgtgggtgccctcaaggtgcgtgcaaccatggaatggaagactggaggaacccatggtggccaaccatgggcccggtccctctggtatgggccatgagccagctgagcctgagtgcaaaaatggacagaaggcgaactggagtcatgatgacatcaacccctataacctgggggacactcgagaaaaccatgcaggaagctgagaaactactggagcgtcaaggccagaaaaaacccctgattccatgttcttggccatgttagctataatgccctgtgtggtaggttttcccttgcagagtcaaaaacatattgggcataggttcccaatcctccagcagtacaacctgtactttggagtgacactcctcctgagatctatcgtgatcagggagcatgggctccaggacccctatgtccggctcc

SEQ ID NO: 136309 - DNA, 292 bp, Homo sapiens
agcaagctgggcctgaaatcccagctacttgggaggctgagatggaaggatcgtttgaggccaggagttcgaggttacaatgagctgtgatcataaccctgcactccagcctcttcttcttcccccttttcctccccatttatctctccttctctttaaaaataacctttattgggccaggtgtggtggctcacgcctgtaatcccagcactttgggaggcctaggtggtggatcacttgaggtcaggagttcaagaccagcctggtcaagataaaaaccccatctctacta

SEQ ID NO: 136310 - DNA, 628 bp, Homo sapiens
caaataaggaaacgagccaggtgcagtgactcactgcaaagtgcagtaatcccagcactttgggaggccgaggcaggcagatcatttcagtccaggagttcaggaccagcctagccaacatggtgaaattccatctgagtgtggtggcacacgcctgtagtcccagctacttgggagattgaggtgagagaatcgcatgagcctgggaagcagaggctgcagtggaccgagactgcgccactgcactccatcctgggcaacagagcaagaccctgtctcaaaatcataatgaaaacaataaagcaaaaacaaaaagccaatgactaaagggaggcattaattcagaagtggcaattgagtcctctgtctctagccatggatcagaatgcagaaagcagacaactgcttctgaaattttctgtgagttctaagttctgatctctgatatcaagattgtgctaagctataacttaattctcataatttagtattttatgtatttatacatagatttccagggtggcttggctggagatgacagtatgaaaaatacagcactaaattctctgagaagacatcatctctgttttgagtgacgatatcctaagacttggatactgatagaaaa

SEQ ID NO: 136311 - DNA, 701 bp, Homo sapiens
ttaaactttaaaatgaagagctgaacatactgatacattgattctttggagaggatctcagaactcattgtacttaacaatttacaggctaaaacctttgaagaagaatttattatatcctacaaacctgggaggcagaggttgcagtgagccaagattgggccatcgcactccagcctgggcaataagaatgaaactctgtctcaaaaaaaacaaaagttggccagggctgggcgtggtggctcacacctgtaatcccagcactttgggaggctaaagcaggtggatcacctgaggtcagaagtacgagaccatcgtggctaatatggtgaaaccccatctctactcaaaatacgaaaaaagaaaaaaaaaattagccaagcacggtggtgcacgcctgttatcccagctgcttaggaagctgaggcaggagaattgcctgatcccagaggcagaggttgcagtgaactgggattgtgccactgcactccagcctaggcgacagagcaagattctgtctcaaaaataaatacataaataaagttttagagcaggaatgaaaggaagtaaagtacacttggaagagctgtgttggcaactggagagatccgagtgcctcatctgacccttgacttgggattaatacattggcatgagatgtgagcagtgactcaaagttgctcagaaaaaaatcttccccc

SEQ ID NO: 136312 - DNA, 616 bp, Homo sapiens
cgtatgcctaagctggagtgcagtggcgcaatcttggctcactgcagcctcggccttccaggtttgtagggggaatgagatgaggcagtggagccatgtgacagggactgagggtagattactggagctccctgcgtagaatgaatgttcaatcaaaacctgctggagggagagctggagccataggggagtgggtaaagtgggcagggctgattccacaattccctgcatgctcccccaactccacacacatccccaacctcaaacagggcacaagaccaaagggctgaggagccaggctatagcttaaagaggctgggggagaaaagcttggctgagacaacccatagggagctagaggtttttaatatatcctattctgaataagagacgaattcattcagatcagtggtttcaaaccgtgctctgggcaactcaattgctaagggttccacaaacaggataaagtttcttatatacaaaaaaaatgaaggtttcaaattacaccataaaacccctcattgcttatgtctacttggcaggtaaaattccatttcaaaagttaaatgtacttaaaaaattacctaagactgggtaaattaaaaaaattaaatgt

SEQ ID NO: 136313 - DNA, 360 bp, Homo sapiens
catctgcccaactttgcccccaggacttcacatacaattgaggtcttagctccaatatcacctccttagaaaagtcttccctggtagtgcggtggctcatgcctgtaatcccagcactttgggaggccgaggcgggtagatcacgaggtcaggagattgagaccagcctggccaacatggtgaaatcccatctgtactgaaaaatacaaaaattagctgggtgtggtggcgcgtgcctgtagtcccagctacttgggaggctgaggcaggagaatcgcctgaacccaggaggtggaggttgtagtgagccgagatcgcaccactgcactccagcctggtgacagagggagaatcagtcta

SEQ ID NO: 136314 - DNA, 297 bp, Homo sapiens
catctgcccaactttgcccccaggacttcacatacaattgaggtcttagctccaatatcacctccttagaaaagttcttccctggtcactcaatctaaagttgttttctgtgtcttctcatatcttccctctcacttagtcattcttgttcattgccttattttcctcaagtacttatcactcttaagctttaatttctttatttattgtcttattacagattagaggagaaaaatacaggtggtaccttgtttgttgtctatcttcctccttagaaagtaagcttataaagagcag

SEQ ID NO: 136315 - DNA, 1249 bp, Homo sapiens
caggcagccacaggcctgtcagaccaggacccttaccctctagacatggcctcggtcccctgcaaaccccagccccgtagccctgcgaggttacagacagcctaaacgccaccaccacagggcctgtgccgtgcccctgacccgggcacagaaggccactggcccggaggccatggagacggtgcccccagcagtggacctggtgctgggtgcttctgcctgctgcctggcctgtgtcttcaccaaccccctggaggtggtgaagacgcggctgcagctgcagggggagctgcaggcccggggcacctacccacggccctaccatggcttcatagcctctgtcgctgctgtggcccgagcagacgggctgtggggcctgcagaaggggctggctgccggccttctgtaccaaggcctcatgaatggcgttcgtttctactgctacagcctggcgtgccaggctggcctcacgcagcaaccaggtggcaccgtggttgcgggagccgtggcgggggcactgggagccttcgtggggagccctgcttacctgatcaaaacgcagctgcaagctcagacagtggccgcagtggccgtgggacaccagcacaatcaccagactgtcctgggtgccttggagaccatctggcggcagcaagggctcttggggctgtggcagggcgttggtggggctgtgccccgagtcatggtgggctcagctgcccagctggccaccttcgcctctgccaaggcctgggtacagaagcaacagtggctccctgaggacagctggctggtggccctggctgggggcatgatcagcagcatagccgtggttgtcgtcatgactcccttcgatgtggtcagcacgcggctatacaatcagccggtggacacagctggcaggggccagctctatgggggcctcaccgactgcatggtgaagatctggcggcaggagggccccctggcactctacaagggcctgggccccgcctacctgcgcctgggcccccacaccatcctcagcatgctcttctgggacgagcttcggaaactggctgggcgggcccagcacaagggcacctagacgacggccctcacccccacgtcctgacacggccggcacttggccggaagtgagagcctgctccaggacaactggctgtcccggggcgggccatgggcccaggccctgccagaggtcccgggagagtgtggacagctctggtccatccagccccttggccca

SEQ ID NO: 136316 - DNA, 734 bp, Homo sapiens
ccggaccgcttatctgtgggggtggtgaggggtcttccctctctgggtggggagggagtcagacgcccagtgccccaacttccatgcacacacactctcacacactcacactcacacatgcacagccagagacacgcagacacaggccaggtatgcaaacacattaactgggcttgtttgctgagcccccgggtcccaggcacaggctaagcactttcacatctggattttattccatccttataatcacattcatcttcctgatgaggaagctgaggctcagacagatcaactgacttgcatgagttcccccagctggtaaggggaggagccagaactggaattcaggcctgaccccacagccttcccatggcgccgcagcctcacagggccagctctatgggggcctcaccgactgcatggtgaagatctggcggcaggagggccccctggcactctacaagggcctgggccccgcctacctgcgcctgggcccccacaccatcctcagcatgctcttctgggacgagcttcggaaactggctgggcgggcccagcacaagggcacctagacgacggccctcacccccacgtcctgacacggccggcacttggccggaagtgagagcctgctccaggacaactggctgtcccggggcgggccatgggcccaggccctgccagaggtcccgggagagtgtggacagctctggtccatccagccccttggccca

SEQ ID NO: 136317 - DNA, 281 bp, Homo sapiens
ccaatcacagctcactgcagccttgacttcctgggctcagatgattctcccaactcagcctcgcaagtagctgggactaaaggtgcaatgccaccatgcctggctagttttgttttactttttttgtagagatgaggcctcagtatgttccccaggctggtctcaaacccctgggctcaaatgatctgcccgccttggcctcaaatgatctgcccgccttggcctcccaaagtgctgggattacagaagtgagctaccatacctggcctaaattatgatac

SEQ ID NO: 136318 - DNA, 511 bp, Homo sapiens
tcctgattttccacaggcttcccttcccagatgattactcctttctttcaatagcgaagtcttataatttacaacctattcattggcaaatacctaatggtgtttaacatgtataattagaaagcacatcatatatatttcagccttactgaaaagacatctggcctctcactgatgttaggagctcttggggaaaagggcccatgttagactttgtgtccttctaaagttctagtcctgtttctggcacatggtaggtattcagtaaaaatcctctcacatatatccaactctgtctgtctgtctgtctatctatctatctatctatccatctatctcaaacaaataagaggtctatccttaaattctcaccaggaatcatggaaaaaaaacctacctcttgtatacaagtagtatttgtttgaaaggactttatgtcatgatgtcacataccctcacttctatgtagaatgacatcctatgtttcaataaattttcccctgtggaagta

SEQ ID NO: 136319 - DNA, 897 bp, Homo sapiens
tggatcaggccaacaggggtacttcacctatacctcagaatatgatacattaagcacctgggaatggttaacagaagccttgactcattgcaggccaacagctaatgagacagctatgctagactccccttgcagattctagagggaggataaatgggaatgcagagaggacccagggtggcggaccctgctcagccacctcctgaaaatctccaggagggccaagaagtctttttcttccctaagcctaaatgtatttgcaagggggaatacaaactggaagtagcaagcacccttgatgccttcatagatatacgattatcagaggtgagagagaaaaatcctgcaagagttcatatgcctactacatcagtgcagtttcaaatggaaaagaagagttgtatccagaactgcccactacagagaaacagacacacacttggtggatccctctggattttgggggaaaatatatttaggtggaacttctggttctgccaagatggggtaggccccattcttcccaggtcttcccccctccacctgaaacactctggacaaaatacaacaaataagcacaggcaagctttgaaagggagaaccaaggcagacagcctagggacagtgggacttgaggaacaacgcagtgctggcacgttccctgggtaccttattgccctctatatcttaaataggatgctgtagaagcctccaatccagaatcagtaacaggcacagatgcaattggctccaagtaaagcccatgcccccaagccaaaggccagagacaggaaaatctacagagacagaaagtagataagcctagggctaggtatgatggggacagagggacaggggcaagagctaaatgttcagggtttccgtatgggtgagaaa

SEQ ID NO: 136320 - DNA, 182 bp, Homo sapiens
gcattctgaaatgtacaactttttatgtacaaaaatgtctgttttagcattatgaggaaatgaatgcctatacagtggtctccccttatctatgttcttgtgttccacagtttagttacctgcagtctgaaaatattaagtggaaaattccaaaaataaactacttataggttttaaactgc

SEQ ID NO: 136321 - DNA, 436 bp, Homo sapiens
gataaatatttgagaggatggatatgctaacaatgctgatttgatcatttcacaaggtatgcatgtattgaaacatcgcatcgtacccacaatatgtacaatcatatgtcaattaaaaataaaaataaacaaaaaagcacacagagaataatttatgtggaagcactttgtagaatgcagcagaatttatgaggtagtgattattatgttaagtgcaagaactgaagaataaataaggtttcaagatcccctacaatccttatagagaagctgagttttgctttcttgaccaatgtctgtgccaacatatatgtctggaagaaagaactgggcaatttgaagctttctacaaaagttggcaggacttggggtgagcagaaaattcatagaaaaactggccaactgcagttacttttgattcacaaagccatggatg

SEQ ID NO: 136322 - DNA, 383 bp, Homo sapiens
tgccctgatcctggtttctaactaccattcctcactaaaaggaaacagggctcattagggaaacagctgattctagtgctgggaaggggaaagttcaaaatgaggctggtgcaatttattgtgcaagacagtgctcaaaaatgatgggacatgttaaaaaaaaaaagacgtaagagtcagtttgaaaagcctgggacaacttgagcattacaaatgatagtgacacaatattttgggcatgagataaaaatccgaggccacattgatatcaacaaataaataaagagggaagatgaaaaatttctgtcttacagtggaatgcaactaatacagaataaatgatggaattagtagatcatgtttgacaactatcatggtaattt

SEQ ID NO: 136323 - DNA, 344 bp, Homo sapiens
ctggcattgaactccttggctcaatgatcctcccgccttggcctcccaaagtgttgggattacaggcatgcaccactgtccccggccagctttattctttttaacaactgaacagtattcctttgaaagctctcattattcaagctgtcactttttggcagggttgaccttcccctccattttggcttggctaactcctacttgccctctgagattcagctcacatgagctcacctcctgacctgctcctccgggttacaggggatgcctcttcgttgtgctcccatacacctcatgcttccctctcccttggtcttatcattctgtattgtcagcatctgtct

SEQ ID NO: 136324 - DNA, 161 bp, Homo sapiens
aggtcgatcagaggatcccagtgctactccacaaacagcattgtcttttgagacccactcagaagtccctcagtaaaagtgcatcgagtgtgcacaagtgaatttaagtgtggttgcacctgtgtgaggatcacagaatcctgtgggtgttgacgggagca

SEQ ID NO: 136325 - DNA, 209 bp, Homo sapiens
tgagacagggtctcactatgttgcccaggctggtctcgaactcctgggctcaagcaatccgcccgcctcggcctcccaaagtgctaggattataggtgtgagccaccatgcccagctgaacattatcttcttgcacattcctcatgcttatgtttctgaagttgagactccctcccctccctgctattttgtgcttccttaatactttg

SEQ ID NO: 136326 - DNA, 410 bp, Homo sapiens
ctaactaaggggcctcggcctctccaatcttaaaccttctctctctgtgaagtggggactccatcctgaccacaacttgtctccagataagaagtaggtgggaagcagggtttggaaatcggcaaagctcctccatgaccctgaaaagagttggccttggtacaggttgcttggcccttcagaatatgaagcattttgtagatttgtggtacacttgtgcctcaaatgtctattggggcccactctttcaggccatggagtgagcacagaggaccagcataactcagccgcggcctctgaggactgaaagatgaacttgctgaggtgggtcgggttgctggcataccacctacccaccgtttgttttagacagaaaatggggcggatgaagagaagctgacttccctggg

SEQ ID NO: 136327 - DNA, 197 bp, Homo sapiens
tggaagctctgagaacatgagtggggcttgtcaactaccggtttcccaaagagagtgatctagctaaattctttgtttagcaaacctctgaaatcaatatcttttggtctttcttctttgtctagtgaagttctcctgaaaaaacttcttacagtttcctacctggagagtaaaggtctggctgccagctttctagg

SEQ ID NO: 136328 - DNA, 190 bp, Homo sapiens
ctgccttggccttccaaagtgctgggattacaggcgtgagccactgtgcctggccaaaatttgtttcttatacattcagcagatattttctgtgaacatgtaatttgggatcactgacctttttatttatttatttatttatttttttttgtgatggagtctcgctctatcccaccatgcctggctaatt

SEQ ID NO: 136329 - DNA, 259 bp, Homo sapiens
attgctcatatagcttacaggagactcatgaaaaatgtttctatttattccatagggttttcaaatttgtttccttttggttcaagcgggtgggtcaagaagatgtttgtgccctagaataatgggctgtgaacatatttttttgagaatcattgttctaaagtaggggtttacaatctggggacccaagccacggtcaacccacaagccacggtcaacccacaagccacggtcaacccacaagccacggtcaacccac

SEQ ID NO: 136330 - DNA, 248 bp, Homo sapiens
tcacacacaagaaaatttaactctaaaatttaactttaaatttaactttaaaaggttaatcaaagggctgcaaattagtaagagaccaattctaaaacccaagttttctgaatcctaatctagtcatccattatcaactatatcacattgcccccccatatttgtgaaataaaccagcccattttatagaattactaagtgacattttatttgtattggcttttgaggattgcacatgagcagatttt

SEQ ID NO: 136331 - DNA, 199 bp, Homo sapiens
tctctaactcctgacctcaggtgatccacctgcctcagcctcccaaagtgctggaattacaggcatgagccattgtgcccggccccacctgtagtttttgactgctctgtgatgcttctgcttccctggagggtctaagatgtgggcgatgagatcataggttgccctctgacccctgtgttgctttggaccatggggt

SEQ ID NO: 136332 - DNA, 647 bp, Homo sapiens
atactatccccttttttgttccttcaaagtaaatacaccacagagctggagatgtcccagacacagggggaagctgtttggatttttcccactgcctgtaatgaagcaagatagggaggaagaacttgggaacttgcgtggcaaatggtcaagtaaagaaaaagaaaagctttttctttacttgaccatttgtcacatgtgctttcaaatcctgaactgagtcacatctgaaataaatcacttccttgtcatttccatgaaaggggcagtacaagaaattccttgcacatccctggtgagccccttgttactctcagattcagctattgccttcaggaaaaaaagaaaaaaaaaaaaaaattttgggcggctgtgggcccctcgaaaaaagtttttttaacaccatcgtatgggcagcgcggggccaacgtgaggttaaaggtgaacactgggtccataggcttgttccccttacgaacatcggtggtcatgcacacgtgctgggttctcgtccaacaatttaaaacagcccgggggcgccacccgaacgtttcgtatcacgatctcccgaagggagttcggagcatcatacggggatcttttcaacagtgttccaaggaagtcgaattcaaaattcagcccgcggg

SEQ ID NO: 136333 - DNA, 753 bp, Homo sapiens
ggacaaagtcatgctctgtcacccaggctggagtgcagtgaagtgcaatcatggttcattgcagcctcaacctcgcaggctcaagctatcctcccacctcagccttttgaatagctgagactccaggtatgtgccaccatgcccagctaattttttttatttttcatagagatgagggtctcactataagttacctaggctggttttgaactcctgggcccaagtgatccttctgcctcagcctcccaaagcactgggattataggtgtgagccaccatgtctggctgaatttatatagataatgagattgctacagaaagaggtacttctcagaacttgcttaaggcaggctgacaatcacaaaaaatttgttggtgctggttttagacgaggttgcttttggctagatggatcggtattagtttgaaaggactgccataataaaacaccgcagactgggtggctttatgcaacagaaatttactttctcagagtctgggaagctagaagtccaagatcaaggtgttggcaggtttggtttcttcggaggcctctcaccttggcttgtagatggcttttcctctgtgtgtgaacatccctggtatttctctgtgcccacatttcctcttccttataaggataccagtcaaattggattagggcccagcctaatgccctccttttaactgaatcacatctttatttatttactttttgagacagagtctctcgctgttgcccaggctggagtg

SEQ ID NO: 136334 - DNA, 342 bp, Homo sapiens
gactgataggtaagccaaggtataaagtgttaatctgtcacacacagcatcaccaagtgaacaaggcagagtcagcgagcacagtggcccagtgcctgggctgtttcttagtctaaactaatctgctagagacaaaccagaaatgtggagtttgggcttcgacacgaaacagacccatgttcaaatacagctctaccacttgccagctaagaaaccttggcagttacttatcctctgtgtgcctcaactgtgttttgtgtaaaatggagaaaacaagacataccttgcagggttgttgtgaatgagacaataaatactaaagctcctagcatatgggaagag

SEQ ID NO: 136335 - DNA, 322 bp, Homo sapiens
atacagtaacaaatgtgtattgtttaaaaataatggaggtaagtttttaatgctatttattgtgaaactgcaagcccctcatccctttttgaagtagtacatacatatttttaaaggacccaaacacatacctttagaaatcagcaaaaccaaactgctatgaagtatgaacagaagcaaaagtcaatttctaccctaaggacagggcacaaattacactaaaaatcaatattcttcctttgaaagccatgagtcctttctaatcacattttaacttcaccctcaccccacacatacacaagaaaaagcagagatgtgggtg

SEQ ID NO: 136336 - DNA, 557 bp, Homo sapiens
tctgtattcaataatgctgagaaatcaatgaggtcagggaaggctgggcttagcaacatggaacttcagggacatggaagaaacagagatcagactggagtatgctgaggagtgagtaggaggtgacaaatggaaataaagagtaaaaccaattcctttgagaagctttgttgcaaggatgtgggggatagttaggaatagaaaaaaagctggcaataatgtgcaatcaagaggaaattttttaaaagtggtctctcatttccttgttaacaactgactcaggtaaaatttaagattaaaggtttttgttgttgtttgcttgtttttaagtctgacagagagaagatgcgtaaacgtggaaaaggcctggaagagaatgagcccaaagagtcaggaaatggagggttcactgatggagcaagtccctggaaacctggaaggggatgggatctgggacacatgtagagaaattagcctctggtgagagggtaaggacccaagtcaagtcagtgattgtgtatttataaggacttagtatctataaagcttacttctac

SEQ ID NO: 136337 - DNA, 324 bp, Homo sapiens
caggagcccaccaccacgcccagctaatttttgtatttttagtagagacagggtttcaccatgttgtccagactggtctcgaactgctgacctcaggtgatccactcgcctcggcctcccaaagtgttggaattacaggcgtgagccaccgcgcccggcctgggccacataatctaaatactttggatactagatagtttacagagaagtttcaacaatttgagatttgagattaaaaataggtggtagttatacttggaccaaagaatgttaaaagattgactagctctcttttaagaatgagggggttatgtaatgaaaatt

SEQ ID NO: 136338 - DNA, 546 bp, Homo sapiens
gtgagtatattaagaatgtatttattaggtaagtctcttttttacttcttgtgctattcagggtctcccagacaatgagtagtaagacagttgagagagtaaagaaaaaataagagcagagagttccagagtcatttgtggtgtgtgaatatagacacgttgctagctgtgtactctacccctcccactaccatcccaccccatcaagggcccaggaaaatgctgcatgtttacagtgtcatccaggcacaaactacctttttctgtagtagtcaaatttcaaaagacatttgtaggtcctactttatttagttagaaacattcttctatactagaagcccttaaatttggatcaaagagtaagttttatacaaaataataagtaatcactccgaaattatatgcgatacattgtgtttatatttttttttcctgtggagaccatcagttggtttttattaattgttcagcgatagtgatgacagaaaaagttgtctaaaatggttttacaaatttagaatagatgtgattaaaatgaagattttg

SEQ ID NO: 136339 - DNA, 356 bp, Homo sapiens
agcagggatcagcttatgcacctcattctcatcttcattatttgaactgtctgcagctttagaagagctttcgaatgtcatcaagatcttaaagctttctccatccttcccttgcaatgtgcccctttatattggttctttctcatttttactacttcttcattgccttatggtgctgggcacagtataaaactcactaaacgacattctatcaaggaggagatggtcaccaaagatccgaagtattcagtgaaatatttcccatttggaatgtaagatcctgggcagagataagtggaattgtatttccaaggacatactaaggtaccataggccttgattcttatcttagacaa

SEQ ID NO: 136340 - DNA, 399 bp, Homo sapiens
cacgggaagttcgtgccatgtgcagttggggaggagcctggcctcttcagttcttgtgtgtagcctggaatcagtctgggggtgggggtgctgttggcaggaactcttcttgctttgctgagagattttttttttcttcttttcctttttcacccaataaattctgttcccctcacccttcaatgcgtctgcgttcctagcttttcctgcttgtgtgacaagaacctggttttagggtttaaggaacaaagttctgcatcaataagattcaaaagaaatcattctattgaaatatgattctaggcacaggctagttgggggtctctgagccccagatcccacagctgtgctgagatgcctgcccacaagctcaaggagcatgtctaggagtccacggag

SEQ ID NO: 136341 - DNA, 303 bp, Homo sapiens
cttaactcattccagcatttactcaaatatccaaagcccacagtctcttcttagacaaggctgcagtctcttctgccctgagactctgaaatacacagcaaattaactacttccaaggtacaatgattgtacaggcattggtgaagcattcccagccaaaaagaagaaatttgccagaaagaagcacaaaacacagatgggacttataaaccccctgcaagtcaaaagcccagcaggccagtcatccatcctacacaaccaaatcatctttttggaatctatgtccacatccagagcacaggg

SEQ ID NO: 136342 - DNA, 489 bp, Homo sapiens
  misc_feature (6)..(6): n is a, c, g, or t
ccccanaatggatcccaaatggaatccccaaatgaatcctacccagaggataacaatctccaaatgtgattatgaaacctgtttctggtaatggagctcagaggactaggtggaacgaactacaaaaccctgtcagagtggtgtgaggatagagaaaaacagaaattttccactcaaaatgagcaaacttaattctaaaacagaagaaaaaagtctaatgctaagaaagtcagccaacaaaattaacagttagagcagggattctttccaaatgaaaatctttttacagagcaattaagacaaagacatttaaataagtacgctaaaaacattcaaagagataaatgaagatacagcttttaaaagaatgataaaacaatgccaggaagaaatgaaacaaatctaatagattataaaaaagaataaattagactggtcattgacatttttaaaaaaccaataaataagaaaaactgtagactggataca

SEQ ID NO: 136343 - DNA, 318 bp, Homo sapiens
agacggtgtctgctggggaggagcggcagctcgggggacagcaaagtggaacccatggggggtgggagtggacatggaggaaagcgtgggtcgcgtgacaccccaggagtgaaaggcctcccctcatcggggtcccgagcgccggatctcggcgtgcccgcgtgttcccccgctgcccccgcgctgtcctatcacagcccgagcaggatccagaagtgaaactgcccgggtcacagcccagcgccgctgctgcaccccgccccgcccttccgggcactgccgctgcgcaggatctcccggcgctcgggcgcctgcggg

SEQ ID NO: 136344 - DNA, 419 bp, Homo sapiens
cactatgttgcccaggtcggtctcgaattcctgggcccaagtgattctctcaccttggcctcaaactgttgggattacaggcgtgagccaccatgcccagctgagactaccttctggatctgatgaagtattagaaaggagcgggtggcttctcctttgtctctggtttggcaatcggagctttcagggcacagtgtttgtctccagatgttgatggaagtgggcactccttggtggcctccaacaggaaaagcgtgttctttcattgtttcctatacacacagacaaccgtttttccaggaaggcagccccatctttagtcattgactgcgggcctatcatcagtcatgacgaagaccgagtgaggtgtgtgcaggcccagaactagcacatcacagccccagagtgtgctccaaacc

SEQ ID NO: 136345 - DNA, 269 bp, Homo sapiens
aaacattctgagggccagatttgaccaaaagtacttagtttgccaacctcagatttaggactgtgtcagtaagccctataggtatctattctctcaggactatgtgattacagtcaacaataaaataacttatatccataatagtgacttttaaacactaagaaaatggataaattatggttctctatgccctatttaagaaggcttgcaagtattacatcttagattttcatcaaaaaaataaaaataaggttttggtgtttataatg

SEQ ID NO: 136346 - DNA, 624 bp, Homo sapiens
gtcccagctactcgggaggctgaggcaggagaatcgcttgaacccgggagggggaggttgcagtgagctgagatcgcgccactgtactccagcctggcaacaaagcgagactccatctcaaaacaaacaaacaaaaaaaaccgtggaattccatgccacttacctcctcctctttgccccttttttaaaaatctttttatagagacgggttgtagggggtggcgtctcactatattgccagggctggtctagaactcctgggcttaagcgatcctcctgcccccacctttgtgctgagattacaggctgtgagccaccgtgccccgccctcccagcaccttccttgatgctgacccctgctcagcccctcaattaaggtgctgcactgcacctcattcgcagggggcctcttcgccggaactcgctttcaggtgggtctacaattagttgggaaacaacgggttgcaaggctgacctggtctgggacatgagaaggggtgaactacaagggtttcaaggttggaggacgttaggtcgggcctccgggggtgtgggattgaggctgtgttcttccacaaattgcatcccaattttgcacaacttagcaagaaaacccccctcagc

SEQ ID NO: 136347 - DNA, 600 bp, Homo sapiens
gtcccagctactcgggaggctgaggcaggagaatcgcttgaacccgggagggggaggttgcagtgagctgagatcgcgccactgtactccagcctggcaacaaagcgagactccatctcaaaacaaacaaacaaaaaaaaccgtggaattccatgccacttacctcctcctctttgccccttttttaaaaatctttttatagagacgggttgtagggggtggcgtctcactatattgccagggctggtctagaactcctgggcttaagcgatcctcctgcccccacctttgtgctgagattacaggctgtgagccaccgtgccccgccctcccagcaccttccttgatgctgacccctgctcagcccctcaattaaggtgctgcactgcacctcattcgcagggggcctcttcgccggaactcgctttcaggtgggtctacaattagttgggaaacaacgggttgcaaggctgacctggtctgggacatgagaaggggtgaactacaagggtttcaaggttggaggacgttaggtcgggcctccgggggtgtgggattgaggctgtgttcttccgagtcgcccttaagtcgggccaggca

SEQ ID NO: 136348 - DNA, 384 bp, Homo sapiens
aaaaaggtcaaagtagactcactatttaatcatattttccaggacaccgacatgcctcccatagatctaaagccccagctttatgccatgttgctgtatggacagcagtagtccccaaattaatctcacacatttcctcctgtagcctgaacatggaattcccaacctccccatgtctgaccatcaaagcgttaaccaccttgaaagcccaagctcagatgccacctgccctaggaagattttttgaatctcctaaactggaatgtcagaactgtgtgagtcctgtttgcctcagctccacacagctacagggacaaaacactcacaaagtaaatcggagcaggagacattttggcctgccttgttccaaggcatcttcccagg

SEQ ID NO: 136349 - DNA, 433 bp, Homo sapiens
ctgctgtccctgaagtttgcctcacatttctgcaccaacagacttgttttactggtctgcatttgagtgctctgtgcacttctgtgtaccatttattcatttagactgcacatgctctgagggagtggcccctccttccatttggtcttacagccctgtgactgtgcacttacagttcccggttctctacagagaacagtccattacggatcactgatttgctcagaagcaggcccttgagattcatctctctaaagggatttctctaacgtaatgatatgtgtaagccaggaacttcggagcccagacagtgcacctcaagagcctggtcagcactggtcagaagaccccccataaaacccgaaatcttgacatttccaaaacctgtctgcatatgtgcctttacttctttttttcttttttcttttttttt

SEQ ID NO: 136350 - DNA, 203 bp, Homo sapiens
gagacacattagatgactctttctttctgttcatcactaacactaagctagaggggaagaacaatttaatttgtttctgatgattttgtggtatggaatgtaaactggaaacctctgctttaggatgaaaggaccagctaggaatacagcaaggatgatgcagtaatgcaagtgaaaagagctggcatataaatactcatcca

SEQ ID NO: 136351 - DNA, 307 bp, Homo sapiens
acaaaatactgagattacaggagagagccactgcaccccaccaaggctttctgttaatcatgagtttaatcacttaacaacagactttacagcatcaaaaaaaacccaaaaaacttcaaggccaaataaagccatcaacggtatcagttaattgtaaccagagaaaaacaatcaaatgcctaagagatgtcctcaaagctattctgaaatgtgatgataatatcaatacctcttaaaatagtgatgccaacttcccccatacacaagttctgcaaatgagatggacaggagcatgacgcagtctctg

SEQ ID NO: 136352 - DNA, 329 bp, Homo sapiens
agtggtgtgtattgttcttttagcattgctcaagctacttagcttgctggaggcaaaggggatggcccttttacaagaaggtagatttatggatgcatcatgttgcatgcataaacacagtaatggcatgttttaaagtagtaagccctaagtataatgtatagcttaaaaatcttgttaaaatcatatatgggggattatagttttatacttaagtatagttttgtacttacagttttaacctatatagttgaaaactgaagctagatgccagaacctatggcaatcaccaataagatgtggaaaaaggaagaagacattccaaattg

SEQ ID NO: 136353 - DNA, 306 bp, Homo sapiens
aacctggtttatgcatcatgcattagtttgtggaactgaaaggttaatgctggaaaaaaagatcagagatctctttggttctttgccccgacttagttaagattgtgtaacttgtgcaaatataaccatttcctgtccgctgaacaaagcaattagtggactgggtacagtttctgagacaatttaagggaagaaatcaatctggccatgtctcactgtagttcattttaaagaaagaaacaaaagagacaggaaaatatagaatatcactattttgttgaatagaagtcattcttgctttatata

SEQ ID NO: 136354 - DNA, 412 bp, Homo sapiens
catggggttaggcagtggtaacaaagaaataagccctattctcatggagcttactttgggagtggtgatactcaacagactgtaatttgaagtagaagcaattaactttgtcgataggttcttggagatacaactttaaacaaaatgagtatattgcagcctcttttttcatcaatgttataatgaaaccatgttgaaagcagtggcattatttgaggacctgctgtctgtcgtttcacttaaagttagttttaaagaatgtattgaccacattaagtgaggatctactgtaatctagggatggcccctggagaaggaaggtagcatttaggttgaagtttgtggggatggggataggtaggatttggaaagagagaggggcagagagtgcgcaggggagcacttaggatgg

SEQ ID NO: 136355 - DNA, 1499 bp, Homo sapiens
tacattttattggctaattaggtttctacctgcagagacacacatacaaaaaaaaccgtagtagcaacatcttactgggttttcttaaatccaacaggtggcttcttcttggatatctgaatggtggtgagatcaacctctgggccagccaagtatggaactcaatccaaaacaacggacttcttttgtttcgtgtcagttcagcttcctacaaacaaaattaaagcagcattggtttagtaattggaaatgcatatcaaagaaaagaagcttaactcaaaacagattttcctaaccatcttcaatgtacatgtgtaggagaaatgcattctttatttgtagcagtgcaaatgtcagtgattacaaacatgtgtgtgactgtttgccagcaatttgttcttgcccttggatgatcagaccctaacggaatctaggcagactgtggaacttccattggcttccactggctttggtgtgaaatatagagatatgagtagtggtgacaagaggggacacgggaaaggcccgtgggaataggcctttgaggggaagcacgctgatctcttgttctgcagcgcatgcttgggatggtatgcgcatgccttctctcactaagactaggactgcttacagaatgcgaatataagtatccttatttgggagaaaagtacattttcaagggctggtaaaatgacgtggaggaagggaggatccagggagccttctgaagagtattgtcaggatgtctcttctctttcagccacctggatatgtttcacattttgtttcccaaacaaggactagattggatcccagaagggaatggtttccttagtatacattccgaattcctttgtaagggaaaaatccacttcatctggtctaagaatacataagaacaaatgaaaatgttgtggctggagatgttcctgagttaatatcaggatgtttgcctgctggtttctgttttaccaaacaaaacatagctgccaattcatccatctgtaaaagtgctccttgtggaccccctcaagagaagtactggttattttatttgcagaaaacgttttattgggagttgtttactttctgtgactgaagtggggaacatgagggtccctttaccgagccctcatattccatgtgtactctgtattttattgaggctgtttcccagtcagaacagcgtctctctttgtttgtcattccaaatctttcagtgtctttagggctctgagggccctggagagcctcacccaacctctcatccttccatggctgtccccacctctgtgcacttatgagtcaatgttgccgcacttcattacatgctgttcatattacagcattataagattttttcttttaaaagcctatcttcttcaatcgggtagtaagaccattgtgggttgaggcatgtttcatacttcccacataatcactccagacttaaaacagaaccggaaatacatgaaataaaaaattatttttctgttctc

SEQ ID NO: 136356 - DNA, 1483 bp, Homo sapiens
tacattttattggctaattaggtttctacctgcagagacacacatacaaaaaaaaccgtagtagcaacatcttactgggttttcttaacttcttggatatctgaatggtggtgagatcaacctctgggccagccaagtatggaactcaatccaaaacaacggacttcttttgtttcgtgtcagttcagcttcctacaaacaaaattaaagcagcattggtttagtaattggaaatgcatatcaaagaaaagaagcttaactcaaaacagattttcctaaccatcttcaatgtacatgtgtaggagaaatgcattctttatttgtagcagtgcaaatgtcagtgattacaaacatgtgtgtgactgtttgccagcaatttgttcttgcccttggatgatcagaccctaacggaatctaggcagactgtggaacttccattggcttccactggctttggtgtgaaatatagagatatgagtagtggtgacaagaggggacacgggaaaggcccgtgggaataggcctttgaggggaagcacgctgatctcttgttctgcagcgcatgcttgggatggtatgcgcatgccttctctcactaagactaggactgcttacagaatgcgaatataagtatccttatttgggagaaaagtacattttcaagggctggtaaaatgacgtggaggaagggaggatccagggagccttctgaagagtattgtcaggatgtctcttctctttcagccacctggatatgtttcacattttgtttcccaaacaaggactagattggatcccagaagggaatggtttccttagtatacattccgaattcctttgtaagggaaaaatccacttcatctggtctaagaatacataagaacaaatgaaaatgttgtggctggagatgttcctgagttaatatcaggatgtttgcctgctggtttctgttttaccaaacaaaacatagctgccaattcatccatctgtaaaagtgctccttgtggaccccctcaagagaagtactggttattttatttgcagaaaacgttttattgggagttgtttactttctgtgactgaagtggggaacatgagggtccctttaccgagccctcatattccatgtgtactctgtattttattgaggctgtttcccagtcagaacagcgtctctctttgtttgtcattccaaatctttcagtgtctttagggctctgagggccctggagagcctcacccaacctctcatccttccatggctgtccccacctctgtgcacttatgagtcaatgttgccgcacttcattacatgctgttcatattacagcattataagattttttcttttaaaagcctatcttcttcaatcgggtagtaagaccattgtgggttgaggcatgtttcatacttcccacataatcactccagacttaaaacagaaccggaaatacatgaaataaaaaattatttttctgttctc

SEQ ID NO: 136357 - DNA, 751 bp, Homo sapiens
taatttattatatatttcgaaatagctagtgggggttaggggaaaaaaatagctagaggaattttaatgtccccaacacaaagaaaagataaatgtttgaggcaatggatatcccagttgtcctgatttgatcattacacattttgtatgcatgtatcaaaatatcacatgttccccataaaaatgtatcactatgatacatcaattaaaaatacaaaaataagtaaataaatgagatgaaggtcgaaattactccttgatccatgggctgcagaatgaatgttgtgttagcaggcatgaaagcaacattaatcttcttgtacatctccatcagagctcttgggtgaccaggtgcattgtcaatgagcagtaatattttaaaaggaatctctttttcagagcagtaggtctcaacagtgggcttaaaatattcaagaaactatgccgtaaaacagatgtgctgtcatctagtcttttttgtttcacttatagaacacagtagatttagcataattctcaagggccctgggattttcaggatggtaaatgagtattggcttgaacttaaaggcacaagctgcattagctgctaccaagaaagtcagtctgtcctttgaagctttgaagccaggcattgacctctctctagctataaaagccctaggtggcatcttctgaaataagactgtttcatctacatggaaaatctgttgcttattgtagccccttcatcaatgatcttagcttatcc

SEQ ID NO: 136358 - DNA, 322 bp, Homo sapiens
aaaggtgtatcttagggtgggggaagcatgaggaagagcattctaggcagagggaacagtgtgaacagcatgcttccaggttccggggagcgtggctccctccagagcagggggaaggcctgggaggctgaggccagggaggagggggcccgtcgaggcatgaaggttcagcaaggcctgatggtcaatggaggaaccgtgcctttaattctgagctcacccgggtgtggggttctgctctgtttccttccatgccctgatttctctgtggccaagtacacttggccgtcattccatatgaccaaggagaggccaagaatgt

SEQ ID NO: 136359 - DNA, 556 bp, Homo sapiens
acctggttcatcctttgtggatgggaagtatgagtcagacttgagcaatcgacagctacactttgatgtcccatgccattctccacccattccagcactccctgaccaaaagaacgttccaaagtgggcttcgttatgccaactctggttcccttcagcatctatgatattaaactgtgacgtagagagaaaacattctttctgaatttaggtggaaacaatttagttatacaaacacacaggtccacaagcatgtctgcccccgctctgccatacagatgcacatatctccagaagaaaagcactaattgtgcataagcgcacagccttagtcagagagcttcagctgggatatgcacagagcactgctaatagacaaaataattttgtgtggtatgacaaacattctaattttaatagtatatttattttagtttggaaataatataacaggatatttatggtgaacatacagaaggatcattggtggagggatcattggtgggtgattgagagagagctcacagaaaatccacagatactgagatcttggaga

SEQ ID NO: 136360 - DNA, 397 bp, Homo sapiens
tggaattaaaattgatatgagatgaaaattatttttagtgctaatataaaagtaatttggcttttttgttcctgtttcctgagatgctactagagatattccttagtaacattttttattttttttgcttgaaaagaataatgtcagatatagtttatatttctaaagaaataagaataatctatttattctaacaattgccaattccatttgtcagtatatctctacgcttttagtgagagatggaacacagaaaccttataataaatcttaatcctgtcctacaacaccaggttgactgagtatatgtcctcattaaacatgtttccatagtcagttataaatattaatagcatttaacatagaaaatttagcagtttttatttctctgtaaaac

SEQ ID NO: 136361 - DNA, 563 bp, Homo sapiens
atgcttaaatgttggctctcaatgaatataaatactaggctagatttgggctccatttaacgtatacgcccagtgacttaacattggagccgctgccatttccccacgaatctcgcagatagaatggcttctgttttcattcccacttggcaatgattccctgcccatttcatatggtttgtatgaaatgggggagaagttctagtttagactatggagctcaaattaaggttcatctcttagctacctatttgtgaaaagttttaggtttgtagtgttgtagttgtgatattttactgttatatatgtaactttttaaagattataggcagtactcccttgattaatttttagagggcaaagaattcttgaattgtaaccaactcagaaataatccaggcatatagaagtatgcaaacactatttgttgaataaaaggaaagaaagctaatttctctgcagtgaacattaaataatctgttggctggatgacgactctcttctttacaatcaaggaaacagaagtgcagtacaggtgcatggctgaagactttgtattgtat

SEQ ID NO: 136362 - DNA, 1036 bp, Homo sapiens
actccatctcaaaaaaaaaaaaaatgtatagaagtaaattattaaatttttatttatatattttagtttacattatacattttcctaataaaaattattttgacaggctgggcatggtggctcatgcctgtaatcccagcactttgggaggccaaggcaggcggatcacctcaggtcaggagttcgagaccagcctggccaacatggtgaaaccccatctctactaaaaatacaaaattagcctggcgtggtggcgcatgcctgtagtctcagctgcttgggagactgaggcaagagaatcgcttgaacccaggaggcggaggttgcagtgagccgagatcacgccactgcactgcagcctgggcaacaagagcaaaactccatctcaaaaaaaaaattattttgacttcttaatctttagattataatctgatagttttagtatttgaagagttggacttgttagagataaagtcttgcagaactaccagttcctttgtggtttttcatgtaaatactaacttaggcccttctagtcattgatttatcatttgatgtttcaatatgtgtctatttgtaatagtattaaattttaaatgagtgatttcagctgaagtagagtgttgctgccagcccagtattttgatctaatttccccaagaatttcatgaaattagaaatccttaccagcttacaaaaaaaatgttacatagaaaaattttcagtaaattcaaagaagtaagatcattttggggatctttaaattcctggtcaattcctgactttttttttactgtatggactgtcttgggccactctttatggtcctagattaccttcatctagtttgactgacttagttttggaaatcttcctcaacttcaaacctgtaaatttaaagaataaaaactgattttgctctcaggtaaaagaaaatgtaatcaggactgtgaccctgatatccttcaagtctgtaatgtattcaaaagccagataaataaacttgaatgatgtttaatcatctgaatttcctgaa

SEQ ID NO: 136363 - DNA, 216 bp, Homo sapiens
tggaaacttgtctgagaactagtagcagagcagaataatctgctttcccagcaagacagcttctttctcctttgtgaaggtatagaagggacaggtttggtgtgttctctgatgtacaaatccaagaccttcaggtgaggagaccgacactgacgtgctgcctgttatggtaatgacacactcagggcaccatctccaaatgatacccaggccgat

SEQ ID NO: 136364 - DNA, 345 bp, Homo sapiens
taaatagataaaaagaatcactgtagtaaaatagcagaacctgaagaataaaaatacatttttcaatatgactgttaacaaagagaggtaatattgacaattttacattaatgttacttagaaaaggaatattttctaagttaagagaaaaagtaactacaatatgcaattatttgttccactaagctgacaataagtagaaaaataacaatacctttttaagtacataaaacaattttattatcaaatggatttttctaaaacaactcctaaagaattcagtttgcctagaagagaaatacaaatagaagtagtgaagttgataccagaagcaagatttggaaa

SEQ ID NO: 136365 - DNA, 392 bp, Homo sapiens
agctgggactacaggtacatgccatcatgcccagctaatttttgtattttcagtagaaatgggatttcaccatgttgcccaggatggtcttaaactcctgagctcaagtaatccaccctctttggcctcccaaagtgctgggattataggtgtgagccaccacgcccggccagactaatatattaatcccacttctgtaacaaccacaactgcctccattaccttctacagaacaaaattgagagccattgacatgtgttttaggatattgaagaataggtatccattctatggtttccagtcttatttgccattgctctattacatgtgctttatgctctagtctagctggactactttaatgttgccagaacactcatcatgctttaccc

SEQ ID NO: 136366 - DNA, 370 bp, Homo sapiens
agctgggactacaggtacatgccatcatgcccagctaatttttgtattttcagtagaaatgggatttcaccatgttgcccaggatggtcttaaactcctgagctcaagtaatccaccctctttggcctcccaaagtgctgggattataggtgtgagccaccacgcccggccagactaatatattaatcccacttctgtaacaaccacaactgcctccattaccttctacagaacaaaattgagagccattgacatgtgttttaggatattgaagaataggtatccattctatggtttccagtcttatttgccattgctctattacatgtgcggtaagagctcgccactcatggccgtggttgtgagcgat

SEQ ID NO: 136367 - DNA, 355 bp, Homo sapiens
tctctgcattccaactttcacattttcagttcccaggagagagaatctgattggcctggttggggtcctgtgcccacttctggctgtcacctgtggctttcttccctcagttgtagaccacactctggatacctgggacccctgaaatctcctgcccagacaaccccaagcttctcaggactttttgtgggctgcttccctgttctgcctgtgcagtgcaggccttgtcacaatgtctgaatgcttaggccagagacgtgggggtttggtgagaaaggatgagctgggtagctacactcaagtgcagagccaccagtattgtgggacagagccaggcatgggaagagaagtgggc

SEQ ID NO: 136368 - DNA, 367 bp, Homo sapiens
aaaatcagagactcagagacgtgtacaccaatgttcatagcagcattttcacagtatccaaaaggtagaagcaatccaagcgtccatccacagacaaatggataaacaaactgtgatatctacatacaatggaatattattcacgtataaaaaggaatgaagttgatacgtgctacaacatgaataaaccttgaaaacatactaagtgaaagaagccagacataaagggacaaatattacttgattccacttataataaagtatctagagaataggcaaatgcatagaagaaaaagtaggttagactttactaggggctgggagaagcaagaaatgggaagtgattgcttaatgggtacagagttcc

SEQ ID NO: 136369 - DNA, 594 bp, Homo sapiens
agtaccacatttaatgtcaagtcacagagcagacagggtcagcccctcagccctggctctagctgatggactcagtgaccacacccacagccacgaggcatgaaagggcaatgactgtgagtcgggcaatctgagtcctcctccctgcccagccacctgcttgcttggtgaccttgagcaaccttctgggcctcagattcttcactgtgaaacaaggtggctggacgcacagcacctgcagctctgactggctccagcctcaccagcatagacatgaggtcctggtcaggctctctgctctgtgccttaggacccctgcccgcatcgggaccccaactgcctgttggtgcctccatgtccctgcaaggctgcatgccacatgaggggagcacctgtgtctttatctctgtgtccttagtgccgagtccgccagcatgcagcgctccagtgctattcagttgtaaggaatgaatgaatgtgttccagttgaatcagtaggatcagtagaacaaatacttggtgaagaagttccaacactagaccggtgctgtctgatagaaacagaacaggactcacgcctgtaatcccaggact

SEQ ID NO: 136370 - DNA, 360 bp, Homo sapiens
attttgaggtatacagtagattattatctgtactcatcatgatgtagtcatcagacttgtatctcctaacagtatttgcttttgttaattaaaaattttaaatagaaaccatttagaagaaatttattttagttttctagttaagtcaatttgtagaatattctgtttccaggtcttttcattaaagacatttatttggattggtaatttatcattggttaagttaggctatgctgatcattatcacaaagtatacatcgtatgtgatgctttacaatttccctttagaagaagctaaatattcttagttaagtaaataaatatctaacttccagcttttttcttgcttaatatcagttt

SEQ ID NO: 136371 - DNA, 441 bp, Homo sapiens
ccctgagcccccaagtagtgccaaatcatagggcatccgagagagaatcagatcagcccatctcatcagattctcctgaatatccacatccattcaaaatagattaactggacagcatgggaatgacttaccctcttgaaacctcaatttcattgtctgtaaaatggggataataataggaccaaacacggggctcttctagatttgaatgccttatgtacttgaaacatttagcacaatgcccagcatggagaaagtcatccagttattcatttcacaaatacgctaagtacaattttaactggggaagcggatgatggtataggaagacctagtgagggtccattagcccttctgggggtgggtttccaggcaggtttttgagaggttaaactgtgaataaaggacaaatggggactagtcacagaaaaggcagctctg

SEQ ID NO: 136372 - DNA, 243 bp, Homo sapiens
cttctttgaatgtctggtagaattctgctgtgaatccagatgcaagtccttagtcaggtaggtagtttgcaaatattgtctcctagcctgtagcatgtcttttcatcttcttaacagtgtctttgaaagggcaaaaatttttaattttgatcaagttcaactttttgatttttgtcctttatggattatgttttagtgtcaagtctaagaactttttgccaagctctaattttcaaagatttt

SEQ ID NO: 136373 - DNA, 316 bp, Homo sapiens
ggtgggcacaataacacctggctaatttctgtatttttggtagagacagggtttcacccatgttggccaggctggtctgaaactcctgacctcaagtgatctacccgcttcagcctcccaaagtgctagcattacaggcttcagccaccgcacctggccagtaccacagtcttttaaattaccataataagaatttgctttttaccatggggatgggaccaagccattcataaggaatccactgccattacccaaacacctcccactaggccctatctccaacattaagggtcacatgttaacatgagacttggag

SEQ ID NO: 136374 - DNA, 438 bp, Homo sapiens
agcatctaggaccacaggtgtgcagcactaggcccagctaatttttaaattttttttgtagagatggggtctccttatgttgtccaggctagtcttgtattcctgtcttggcctcccaatgtgctgggattacaggtgtgagccactctgcctggccccataagaggtctcttaatttattcagcagacattgtgtattactgtgtgccagatgttgggcatacagtagtcaataaatagtcaagaatgactgccctcgtggagcttaagtactaatggagaaagatagatgatcaaaataaatagaattttaagcagtagtaagtgctatggtggaagaaaagcagggatgggagatagggaatatggttgaagtgaagtttcaaaaagagcatagtcagcaaatgtcttattgagaaagtatctgaatagacacca

SEQ ID NO: 136375 - DNA, 232 bp, Homo sapiens
cagtctttttcattgtaggcattctgttgggtgtatgatgacgtctcgttgtggttttaatttgcctgtggtgctccaatatgacattttccttggtccctaagtcccctttgatctcagaggcattatctctgtacttagggaatgtgtgggaatagctagtcaaaatcttatggggctataaaactttctgcagcttttttttcccccttttaagttctgtatggcagga

SEQ ID NO: 136376 - DNA, 421 bp, Homo sapiens
gagtgccttatcaaagggctggggcatgaggacatggcaaccaggccctgtcttggaagcagggaagggcccttgtcggacgccaagcctgcaggtgccttgatcttggactctccagcctccagaactgtgagaagtgaacatatcatttcataaattaccatgcctggtgctgttacagcaacacacacagactaacacagtcgccctgaggctggggctgcagtgatgcagccacacgcccaggacaactggagccaccagaagctagaagaggcagggagcgtcccaccaagcctccagaggaagctgactcatgagatgcctggacgctgggcttctggtctccaggatgatgggggaatgcgtccctgttgtgttaaccccggactgtgtcaattgtcagaagcctctggacaca

SEQ ID NO: 136377 - DNA, 668 bp, Homo sapiens
gccatgagatgtcattacactcctagcagaatagttaaaataaaaaatacaggatgtggaaaaactggatctcctatacattgctgatgaaaatgtaaaatggatcggtcagcctggaaaattttatcagtttcttaaaaattaaacatcacttatcataggaaccagcaactgcactcttggacatttcaacagatagaaaaagtccatttgaagcactgatcactaaaagcttagtgtttgccagagtttaggaatagtgagagttaggtggggatggtaaaggcggatgtttaaaatggtatcatgagggataactttgtggtgatgaactggttttgtgtctttactgtgttggttatagaactctacatgtgatggattgacagagaaatacacacctccttaaacaaacatgctccaccaatgccaattcgccagggagctttgatatttttctgtaattttgtaaggtataaccatttgggcaaactagataaagagtagaggggtaatctcagtacactctactgcaacttcctgtgaatctataattatttttaaatgtttaaaaattttaagttttaatgttctgtgaaataaaagtcattaggaaaaactgcacactgtagtttagctttaagaatcaaacatatattattatatta

SEQ ID NO: 136378 - DNA, 285 bp, Homo sapiens
tgctctaaaaatattctgaatcactactccacataaaggaaaaaaacttttaatgcaattctcaagggtcatcttaaatgaatagaaatatgtttctttacagttaaattttctaaagatcaatttccaaataaaagttatgataatataggtaaagagaaatttttttctagttaactctgcactttgaaactattaaatgctgattacatttaacacattataattgaaaattctgactatctcaaattatatttttatttattgtgcatttagaagttacag

SEQ ID NO: 136379 - DNA, 205 bp, Homo sapiens
  misc_feature (40)..(40): n is a, c, g, or t
cctactttccacagggcacagggggcagcttgagtctccnggctagggtcgttgacgcaacaaaggaaaaaagaatttacaggaccattcagaatgtattagtggaagtcaggagtgaggttaagggtatatattctggagttgggagtcaccaggatccgggatggaagtaatagtaaatgagggctgtgagagacagtaaaga

SEQ ID NO: 136380 - DNA, 599 bp, Homo sapiens
ttcactccaaagtgcagagactttaatagggccccttgccttggcaggtcctgtattcaaataattgttccctagcccaacaaggctgttgaaagccttctcagccttttagacattcatccacctcttccaaattggcagacaactccaggaaaaagtagtttgaaatgctgggctcacctctccagattttttgttcttctcccaggctgtagcctcatcattcttcactacctcctcaacattacaatggcttaagattttaaaaaatacatttgaccagctttcctatcttactcactgagtgggttggttggagatacttaatgtgccattatagggagtggaggtcttagtagacattttcttttcttttttgagacagggtctctctctgtcacccaggctggagtgcaatggtgcgattatagctcactgcagcctcaacctcccgggctcaagcgatctgcccaccatggcctcccaaagtgctgggattacaggcaagagccactgctttcggccttacagaatcgtatcgtataggggcattcagaagtctgacataaaaattaacttgagacttttatgttcattct

SEQ ID NO: 136381 - DNA, 356 bp, Homo sapiens
cattatttaccctatctaaaattgtcttatttactcatttatttactgttgccataggagagtgtagagctatatgatttaatatttgactttctctggcttttaagagttattctaacttaccattaaaataactaggagggtcaggcgcagtggctcatgtctttaatcccagcactttgggaggctaaggtgagaggactgcttgagcccaggagtttgagactagcctgggcagcatagttagccctcatctctataaaataaaaataaaatagcaggagagaggtaatactccttctacaatcctaagatgggtctccctgaaaaaggtagtgaagatagtaattgatatg

SEQ ID NO: 136382 - DNA, 697 bp, Homo sapiens
cacttaaagtctcaatttccaagaactaattaacaatattaattgaggacttactgtatttatttgttaggtttgtgaactatttgcagtaggttcattatgtgcaaaaggcataggaacatttcccagttgtctttctgtattactaatgctgtgtaatcaccacaacattttacatcaccacaacatgtctatgtgttactgtgcattctccaaattggtgtagttcctcttgcttgttgcttatcaattccttgaattatttcatgattttttatattggcctaatgaccttatatgaagatatgttcagtaatgttagtaagttgttaacatttactatttctctttttcattctcagctacttctcagttttacttttataaattgaggaagtacataattgtcaagctctgaaaattgtgtttagctaaaattttaaaagttatgtgagagtaatagtttactaagtaaagtagaaacaaaaatgacaaattcaaaactattcagaaggttgaaataataaattacatttatgttactagacagtaatgttattgtcttaatctgatcattgaattttgcacctaaattaatgaaaaatatgcaaacctttattttcagtattgtttttgaattctcctcacacaaagcagctcatcattaataagcatcctcctgatacattttgtatat

SEQ ID NO: 136383 - DNA, 337 bp, Homo sapiens
ttaagaggccatgcagaggccaggcatggtgacgtcacgacctgttatcccaacacttttggaggcccaggcagttggatcccttgagctcaggagttcgagaccagcctgagcaacatggcaaaactccacctctacaaaaaattttaaaattaccaaagtgctgggatttttgaaagccgtcagaagcatccctgagggggtggatacaaaaggagcaagagcagagactcagtgactagaaggggaaagacggcacctttccaaggtggaaatgtttgaaattgcagcaggaaattagtcaggagacctgaacttgctatcttcagttcttcag

SEQ ID NO: 136384 - DNA, 486 bp, Homo sapiens
gaggagagggcaatgtgaagaaagacatagagattgaagtgatgtaaccacaagccaagaaatgccggcagcaactagaagctggaagaggcaaggaaaggattctcctggagagccttctcaggaggatacggtcctctttaatatcttggtgggcttttggtctcccaaactgtgagataataaatttcttttctttcaagccacctagtttgtggtaatttgttataacgcctacaggaaactaatatacatattatcttttcataatttaaacataattatctccattctaagagcagcagaggagcaggcagataacagacaataggtgacaaactccaagcaattatacccataaccacaaaccactgtaaccagcatttttttaaaagggaaagccaggcacagtggtgtgcacctgtagtcccagctactcagaagactgagaagggaggatcatttgagcccacaagtttgagtcca

SEQ ID NO: 136385 - DNA, 311 bp, Homo sapiens
cttaaggggaccttggttaaaagaatctcaggaacacagttaaaaaaaataaggagaaggcataaatttattaccagaaaggttaaatgatgtcacacttaatcactgttatagcaaaagatgcagcaagctgggttcaatatagccatctttcaaggcttgaaaatctttctttgagatggtctagactcgctcatggtctagactacatcgtgaagtccagtggttaggtcagttagcacaatcaggacaatagtctaacctgagttaatccaaggagtggcaactaattaggttgtattaaaagcctg

SEQ ID NO: 136386 - DNA, 1266 bp, Homo sapiens
aaattctgtagtgtgctaaaatgctcaagttggcacataaacccattccaagattttatagttcttgtagataacacagggatgtagataagttgaaacaaaaccagtgtcctctaagtctctatcatatacttattcctaaactgataattcttacttctggatttaaaatcaaaaataacacacttgtacagatacaatctaagggctttatcacacacgtgttaacgaatgtatctcagcttggttcttcttgtgtgctcattatggatctctctgtcttaggaattgcctcaggcattttttttttttacacattaactaaagggctattcgaaatcttgactcaggggttcttaacctacatttcatgcaaaaaatatatatatttcaatgtattttttattttagtcctatttgtattattttatgcatttaaaaacacaatcctgagagggatggaccagactgccacagcagctcatagcacaaaaaaaggttaagaagtcctagttgactttgtatatatataaagaaatctattacaataaaaatataacataatctattcatctatttatatgcaaacataaaaatgtaaatattgaaacaagattgcttcaatatgcttattgttttcaaaccaacaaactctcttaaggttcaatatgtaataaaaaacataacacaaataattattctatatgaatattatggttcataaattataatgtataatctatacattataatgtaatatataaactaaaatttatggcacaaaagataaatatggctttgaaattaaagatattccactcaacagacaatatttcatatttgatattacaatcatttattttatgtcctattataataaaaggtgaggactccttgtaaaaaaggaaatgttccacagagtcaatctaatatatcagatattggagattctatcttggtttctcttcctttacttagcctataaaactagttaaaaatggaatttcttttagcaattcagtttagtacaggagtgacattaactaatgacaataaattaaacaaagcctacattagttcaatttaagcctattcaacagaaatatagaaatatagtagctaaaaaaatactctggggaaggtaccacaaacattatctaccagggaacatagcataaattagtctgaaatttcctgagagtgactttgtcttagaacttaggtggtagtcatgaagagataatgtttttaggcagttaaaatact

SEQ ID NO: 136387 - DNA, 728 bp, Homo sapiens
aaattctgtagtgtgctaaaatgctcaagttggcacataaacccattccaagattttatagttcttgtagataacacagggatgtagataagttgaaacaaaaccagtgtcctctaagtctctatcatatacttattcctaaactgataattcttacttctggatttaaaatcaaaaataacacacttgtacagatacaatctaagggctttatcacacacgtgttaacgaatgtatctcagcttggttcttcttgtgtgctcattatggatctctctgtcttaggaattgcctcaggcattttttttttttacacattaactaaagggctattcgaaatcttgactcaggggttcttaacctacatttcatgcaaaaaatatatatatttcaatgtattttttattttagtcctatttgtattattttatgcatttaaaaacacaatcctgagagggatggaccagactgccacagcagctcatagcacaaaaaaaggttaagaagtcctagttgactttgtatatatataaagaaatctattacaataaaaatataacataatctattcatctatttatatgcaaaccttaaatggtgaatttgggaccaagatggttcggttatgggtttcaaccaggaaatccctaaggttcacctgtctaccttccccattatatccatggattttgggcacaatctatgttaactatcttaaggtatttttg

SEQ ID NO: 136388 - DNA, 862 bp, Homo sapiens
gtagagattgtcagagtctgccttgctagtctagaggtaggaccatggatttaagaacgttgcctccaagtttttgaattgtgaatttttgatcatatttgaacaaaaccccacctacagtctgcatggtcattgttctcacaagggtttgtgtgatgcactgacaagaacagaggctttggaggtgactcctgggtttgaatcaccatttgccactagctaattctaaccttaggtaagtcagtgtctctgggtctcaacctcttcctctgtgaggggtaggaaatagcacataacttgtagcattgttataagggctcgtgataatgtttttaaaacacctggctcaagcactcaggaaaatgttttattatgaagaccaagtgtctctgaaaagtgtttccttagtgtctggagagactacagcagcaaggcttttctgatcctactctgactctcaagataatggtgcttgaagtgaaatcacagaagagatgactggggcaggaaaagcaagatggaaaagataaagttgtggaagggactgaaagtccatgaagtgctgggctggggacagaaagggtttaatagggcagggtcttgaggaacaggaacagagaccttggttctgggttgccatctgattcccagaagagtaaaggaaatggggcaggaggatgtctgtggaggacacagtgtggctgagtggagagaacacaagcttctggccagtgaacctaagtgagaatgtcagtggactttgcacaggctgggtgcctttgggggtgttcatctcgctatgcttcggtcccctcatttaaaaaaattgatacataatattttacatatttatagggtacat

SEQ ID NO: 136389 - DNA, 501 bp, Homo sapiens
taacaaaacagaggctgagctggcagaagcaagataaatcaaatcattcttctccagacatctaataatccacttagtgacattttaaattggcttatactctctgactcttgcccaccaccaaaaccatatcttaaatatttttttgatcacattattttacatgtttacctttttaaaaggttgtggactttgacagaagccttttaaaataccataaaaatgtatcatcattctgcgttgttgttgaaaaatgatagaaggctaaaaatccacacacacaataagtaacagctctttatatgcatctttatacatatatatcattttatttctattaactgggatatacccatataaaaatttttgctaataagatgcatgcatatatttcctattcaagtgacaattccaccctgaataaatggaggggagtgccgttcttcaccatctgccatcttccagctgctcacctgaatcacagatatcctaggagatata

SEQ ID NO: 136390 - DNA, 347 bp, Homo sapiens
gggagaattgctgatctcttctgctgctaggaagcttcctccaaccagcttgactctggattccagatactcccattcactttttttgatagagtcctttttttgtttgtaggggaacaccacagtaaggtgtcttcaattacttagggcctatgtgatacaaatatttcatttgtccacactgcctcacagcatattcaaaagcagtgctcatttctacaggcacattcagtttctaagtgacccactatgccatgttcacttatggagatttctctttcatactccatagtccaattcctattgtctggtactatatctcattcccactccgcatttcatagaag

SEQ ID NO: 136391 - DNA, 381 bp, Homo sapiens
gagggacaattttttttggtttttcgggttttgtttttgttttgttttgttttttgagatggagtcttgctctgtcacccaggctggagtgcagtggtgtgatcgctgctcactgcagcctccacctcccgggttcaagcaattctcctgcctcagcctctcgagtagctgcgattacaggctcccgccatcatgcccagctaatttttgtatttttagtagggttttgccatgttggccaagctggtcctgaactcctgacctcaagtgatccgcccacctccgcctcccagagtgttgggattacaggcgtgagccactgcacccagccaagggacaattgtttttaatgtaagagacattagtatatttgtaactgga

SEQ ID NO: 136392 - DNA, 500 bp, Homo sapiens
aactgtccctttgaggttgtaaaaaagagagtaataacaattagcaggtcaaccaacaaataggaccttggtatctcacatttcagaggattcttccttaggtctccctactttctttcctgtcttagggatctgggataaacaattagcttggtaaatcagtgatattcttagctccagtcatagcagtgatactttgtgcaaggcagacaatgctcagatccctttggctaatggacttgactctcacagtatcacaagtagtagaagaacgaaagcaaatgaagggaaaaaagaaacatgggacacagcagaagaagactctggaactgatagtgaatatgatgagagtggcaagagtaggggagaaatgcagtacatgtatttcaaagctgaaccttatgctgcagatgaaggttctggggaaggacataaatggttgatggtgcatgttgataaaagaattactctggcagctttcaaacaacatttagagccct

SEQ ID NO: 136393 - DNA, 462 bp, Homo sapiens
taatatctggagcagctctcctattttgttaagtcttctttcaacatctcctccttccactttgaatccatctgtcttgctggtttttgttttttgagacagggtctcattcttgtcatgcaggctggagtcgagtggtgttggaacaggaattaaaagaaattaaaaaatgttaagcagaaactcagttgtatgtaagaaaacccaattccccctgaaaaagagaaagagctggagttctttaaaaattaactgcctgtttttctgtggctagtgagccttgtctctcctcctttcccaagcattgtgaagaccctgtttctctatctgtgcagctgaaagttcactagacagataaactcaagctgtaaaacatgtttttccttggaaagtaagaaatgatttaatgcatgtctcaattaattaaataactgtctttgtttctcgcttctgtaatatgct

SEQ ID NO: 136394 - DNA, 181 bp, Homo sapiens
cttgtcctacccatgtgtgcagataatcacaactgatatttcacaaaaataaaaataaaaaacagaaaaaaacgtaattatatttatacgcatttaacaccagcacaatatggcatacatcacttctcaatacatttgatgtagataaaagtaatctcagcactgtgggaggccaaggcag

SEQ ID NO: 136395 - DNA, 402 bp, Homo sapiens
gggaggctgaggcaggagaatcgcttgaatccagatggcagaggttgcggtgagccgacgtcgcgccagtgcactccagcctgcgccacagagcgagaccccagcaggacgtgatgaaggtcaatggggttttgtccaacttgcctcagttggagcaacgtaccagtgcgcccctgccgtgtggccgtggggcttatccctgggagtggaatttgggggaaggagccggggccagggcccagctacagcggaggcggctgagcgccttccagagggttgggaatgtcccgctcgcaatcccgccgggagcgtgtggggcccgcgcttgctgcgtactcttaattctgcccaagtagccctaagatacagtctcttgcctccatacgcttatttagttgggta

SEQ ID NO: 136396 - DNA, 397 bp, Homo sapiens
ccctagaatgtttataataggattggtggagtagaagaaaagaatagttggggtggggagcagcctgtaatcccagcactttgtgatactgaggtgggaggatcgcttgagcctgggagtttgagaccagcctgggcaacggcaagaccccatctctacaaaaatttaaaaactagctgagtgtggtggcatgtgagtgtggtcccagctatttgggaggcttaggtgggaagatctctcgagccccagaggtggaagccgcagtgagacttagtcgcatcactgcactccaacctgcatgacagagtaagactttgtctcaaaaatacaaagataattggattttatgaaaatcacagtatcataattttatcatcttaaaataaggatatgctat

SEQ ID NO: 136397 - DNA, 259 bp, Homo sapiens
catgcatggtagtaagggctactgttgctccagttaaggaatcggacaagactttacttgagctggatcttgaggacagtctaaggtgtcaagaagggcagggtggctgggaaggcatccttggaggagggaactgccaaagcattatggggtataagagtgggagttttcagccaaggccccaggagatgccagatctcacattccaaaggatgggccagaccgcaggcaacattcaccaaagaggtgtccggaaact

SEQ ID NO: 136398 - DNA, 298 bp, Homo sapiens
aaacaaaagcatatgttggctttaatcttccttgtttgttcacatcaggaaactgagcctttgttcaaattgcttggccaaagtcagctatgttgggactagacctgggtctctctgactttaggcttattcctaattcactgccccacacttctcctggaggagaaaccctgtcccgaactgaacagagagtggcacgacctgccacttagagaggtgggcaaagtcttcccaagaacaaaggtatgaaggctgaagtatgcttttggagaaaaaacaaaggaattaagtgcaaacg

SEQ ID NO: 136399 - DNA, 505 bp, Homo sapiens
tttcctcttttcagtctagtttttatccaattacagaaaacctcttcctttccttttgttaaaaatagtaaagctctaatcacagcttttaagtttagtgtacaaaacacacacaccccaaatcttccactcaagtttttaagccagccacataaggagttcagctgtaatgtaaactgtgagttgctggttaacagaatgcaagatcgtcaacgacaaggatttgggattttgtctgttttgttcagatactggcatgaaatgggggcctttgcacacagaaggcactcagtgaacataagaattggctggagggttacagactaaatactattagactgttctgaattctttacttctcagtgggttggtagctcagagtaaataaaagcagaaagcctcccaaagctcaacaaaatctcctatataatcttaacatttggagtgctttgaattaattatgttcccccacccccacttttgttttttttgagacggagtctca

SEQ ID NO: 136400 - DNA, 186 bp, Homo sapiens
gattaccttcagaaacagagagcccactgtgttagttttttattgttgctataatacattaacacatatttcatggctgaaagcaacacaaatacattatcttacagttttgtagttgagaggtctgtaaagggtctcagtgggctaaaatcaaggtgttggcagaactacatttctttctgaagg

SEQ ID NO: 136401 - DNA, 214 bp, Homo sapiens
tttccaatcaaggctcaggtttctttagggttgtcaaacgtctcggacgagaaaaagctgcccaaggttgccgagattgaaaagccactgttgggagttcttacttattctctaggcctctctctgttaggaggtgttttcattgaggccagtcgagttttaccccacgccatgactcgtggaagacttaaatttgtaaattcctacggcatca

SEQ ID NO: 136402 - DNA, 360 bp, Homo sapiens
gtatgccatgagcttttttaaggacacattttaacatagattaaatctttgaggaattagcttgaattatttataggtaactgccaaaacatgctaatatccatgtgtgtgaaatataaatatgtttatcaatagctgagagtaattgtttgtatcatgatgttaggaatgatatagctatatttcatgcagtttttaaagcccagttgatgtagtttgtgtatttccctggctaacattgttggcacacagtaaatttctaacaatgatgattactctgcctccgtacagtattcactttaactagaaaaaaatttactactatgctaatgtggtacaatttttgaagtatgttaagat

SEQ ID NO: 136403 - DNA, 403 bp, Homo sapiens
cggattagagggggctttggaggactcggaattttattctaagaatcacagggagccattggagttttaaagcaggaaagtaatgtggtctgatttattttttaaaaatgtaactttgtccaggcgcggtggctcacacctgtaatcccagcactttgagaggctgaggcgggcggatcacctgaggtcaggagttcgagaccagcctggccaacacggtgaaaccccatctctactaaaaacacaaaaattagctgggcatggtagtgtgcgcctgtaatcccagctactggggaggctgaggcaggagaattgcttgagcccaggaggcagaggttgcagtgagccgagatcgtgccactgcattccagcctgggtgacagagtgagaccccgtctcaaaa

SEQ ID NO: 136404 - DNA, 223 bp, Homo sapiens
agcccaagttgttgatagagttttgttccttcttgtaggatggaagctctcagcttctaaagactactcttcatgagaggcatcttacaacagagctgtctattttaccaaggccagcaggagaaggcctcttgtgcttggattctgctttcaaggccttgccctattagggcaggctcacctaggatcatttttttgtttggtttttgttctgagacaaggt

SEQ ID NO: 136405 - DNA, 431 bp, Homo sapiens
tcacctttctatatctaaacccttccactgcaactcaggtctatttccacatagtctatccttgaagctcatggagaattggcaggtcagcattcgcttaacaaaagcctttattactgttaacaaagaatcttcagctacaagacagaatctttggttctcaatccaaatctgtttctcttgtaatctaaaacaactgggatttcctagcttcaggaagaaaggagcagtacctgctgggtcatcaaagattcttagagccacagagtttcatccccagcccaatggctcttccctactcctcctttctcttggttccaaaggaaaacccatcattgcctggtcaagggagaggagtaaagcgcatcaacataaagtgctagaggacatatggacagacaggaaaagaaggaaagggatgaagacaccag

SEQ ID NO: 136406 - DNA, 272 bp, Homo sapiens
ttacatgtgactatgaatagaaaggtttccatggatcttggaatcacggtggaggaaggtgatggtactttccttgagggtaggtgacaggtgaggtgggctgttggcagaggaacgacttggctgtaacaggaattgaagagagaccaactctttcttttttagttgcttgaagttgaaagatgtagaatgagtggcttctggaaaaaaaaagaggggacatctttaagggtaaaaggcaagtctctccattcatccagatgatggtagtg

SEQ ID NO: 136407 - DNA, 168 bp, Homo sapiens
tatatacacaaaggtatgatataggattttagggaccataattaaatattttttcagataatttttttgagattataaactacctacaactaaattcttaactaattctgaataataaactaaaaaaattaaagctatatatacatatatatacacacacccacatac

SEQ ID NO: 136408 - DNA, 304 bp, Homo sapiens
ctggaccccagaggtcatgacaaggggtcagaacctagagcaggctgcagatgtcagaggaggtgacatcacataggtgggaggggttccccaggacccccagaagtgccactgaggagcttggggaccacaggggccacctctctttccttcactccctggctgtgtccttccagagccactggcatgatacattccaagtccattctttctagaactggttgcaagaccagcttaacagcctatttccatgcttttatgcaacactcaggtatatacatgcacacgcacctgcgcaccctcc

SEQ ID NO: 136409 - DNA, 280 bp, Homo sapiens
caccaacgctctgccaatcagagccttccaggctgccctgggagacccagctggaaggaagcccactgggccacctcttatcagcagggacaggtggggacatggctccagctccacttccatcccccccctctctggctcacaatcctgcctgggtgaggtgcaccaccccatctgcacattggcagccatggacatggccacaacagcctgtggtccacggtcctcctctgactgctggcatggacacgcaacctacccaggtagaacgggaggggta

SEQ ID NO: 136410 - DNA, 201 bp, Homo sapiens
gcttttttggggcatggaggacgagatctcttctgatgttttaaagaaaaccttgggttttacatggctagtacaaagctggagaaggggtactcggaggaggaaagacgggtgggagagaagagagactgcccagaagcgcctctcatcacattcaaccaacaaaacaagtattttttagaaaaggtttcagcagcattg

SEQ ID NO: 136411 - DNA, 266 bp, Homo sapiens
ggctttctaaaaacatttacactgggatgttgcatacctgaatattattatgtcagtaggtacttcaaaaatagagataagaagactgaattctgggatgttgctgctggacactcttgaatttatatcttagtttggaaatctcaaaatagttcctttttaaaatttcacaattattctacttttccattaaacaaaaatctagttttccttgatgagcaaattctgccaatagtcttatttttgtttaatgtccttatactttt

SEQ ID NO: 136412 - DNA, 247 bp, Homo sapiens
tgctgggattacaggcatgaaccaccacaccggccaattttttgtggttttcgtagagacaggatttcattacgttggccaaattggtctcaaactcctgtcctcgtgatccacccgcctcggctctccaaagtgctgggggattacaggcgtgagccaatgcgccaggccaataatcactgctggcattcttgagtgcccatatgtgccacacactgtttttgcaaaaattataactgaagaaatt

SEQ ID NO: 136413 - DNA, 363 bp, Homo sapiens
ggcagctgggaaccgagtgagggctgtggtctgcaggcctaggcacagctcctccatgtggcttgggccttctcacagcatggcatctggatcaaaaaggcaggaagtggaagctgacagcctcttagccctgagcttagaagcgggcacagcaccatatgcctcactctatgggtcagagaagtcatagagctcacctagattccaggggatgggacagagaccccacctctcaaggtgagctctctaactgggaaatccgtgaccatgactttgaagtgaggttggatccaggagtccaagcaaggtcctgaactttccctccccgtctctggcctctgcagggctctgttgggctccagc

SEQ ID NO: 136414 - DNA, 378 bp, Homo sapiens
gcccctttatccagattttatacaaatgtaatctttatataccagagaatagcaatagactgtgaaaatgactctgagtttcatggagaagctagtgagcactataaggatatatttctagctagaaactaatagcatacaaccttgaaaaaaaaaaggcgagagagggtacatccaagagagaaaaattagaatgaagagaaatgtattgcatgataaagaatgtcacactagaaaggaaagacagaattttaacatcaccttttgctagcccatggttactctgttgttagtttatccccatcttgagtgcttgtgattctaatgtcctttttcaaacttctaagtggcctgagttgtccactgaaactgtacaaa

SEQ ID NO: 136415 - DNA, 124 bp, Homo sapiens
gttctcaccctgggcatgattcacaaaatagagtaagaccacagataaaagtcacatagaatcacaggcaatgaagaaaacttctaaaaacaaatatcccccagtgtccagtatcatccatccc

SEQ ID NO: 136416 - DNA, 129 bp, Homo sapiens
aataattaaaagggctgcttcagctatccctgtggccaggctggcccattccctctccctggggtggcttcttccttgcatttcctctgctcagaatagtcaagattttgccatttttaaacaaccagt

SEQ ID NO: 136417 - DNA, 411 bp, Homo sapiens
tgccggtcacactagagaaccccccgttatagcaccatggtattttaagtttttaacttttagccattttgttggttttgtagtggtatcacacggttttattttgcattcttatgactaacaaggttgagcacttttcacaggtgtttattggtcatttggaaaccttcttttgagggatggctacttgagccttgctcatttttctattgtgttgcctgtcttccttattgatgtgatgagttctttattcaggacaggagtgctttgtctaatctgtttgcaattttttttctcagattgaggtttgccttttcattcttataatggggtcttctgatgtacagtgttcctgattttaatgtaaattccaaatttacacatataaatttacaaaagtataaatttacc

SEQ ID NO: 136418 - DNA, 398 bp, Homo sapiens
agggtctaaagcaagtgactaacgtgaatattgtgtacagtaaaaaatgacccttgaattatgttgagcatagagatactaaagagacagtatctttgtgtcaccactaaacagtgggacaccatttcactgttcactgcagggcaggtgcttattgagaaaaaggcaacatttgaattgctaatagtttctctctcttttatttcttaacttggcacatacatatttagcaagttaaatgggttctatgcaatgaaatgaaattaatttcacttaaaaagtaaaataccgaccaataaaaattactgtctaatgaactgtacacagatgcatagggattcagtcaattaaagacctaagtaaggtggagtgaagaagaaaaagctcactgtctgaag

SEQ ID NO: 136419 - DNA, 366 bp, Homo sapiens
ttgttctaatgaagagacagggcccattaccagatacttagtgtaaggaatgatgtagtaataatataaacaaatatcaaggggtacataggacctggtctgtctccacacgtatcctatattgttgcataatattgggcaaatcatttcatttcataatatcggcaaatcatttcatttcatttcttgcaaatcatttcatttcttttgattttttcatccctgttgcactgaatgctggctggaagaaaatgcaaaacgtctcaaattttgtgtttagctgagcgagaaacttatctcccttctgaactgtaaggcgtgggtgtagaatgaagtcatcaaaaccagtacccacaacactcgtcg

SEQ ID NO: 136420 - DNA, 313 bp, Homo sapiens
ctttgctttaccttgagtatgcaaatgcatgtttgcttgggtacttaagaacacacctacatgtgcacatgcaggctctactacagccccaggtgggacacatcaggccctgatgcctgattgagagtaaaagtgaagatgtaagacttcaacttgggcctgagaatctccacaaactgaggcttatccagtgctttggagggaagctaagaattctgttgaaaatgtccacaattctggtgtgactaagatcatggaacacaatgcctcctactccacacatccacgtgtggctctaaggctccccctttat

SEQ ID NO: 136421 - DNA, 254 bp, Homo sapiens
agctggacttctggacacctatcctcttgctgagaggaaagttccacctctcttgcaaaacagaaagaaaaggctcagccctcctttctgatccctgagctattgtgaagtaaaatgtaaactgcttttaagtcatccaaagacagcatgcggaaggtaaagcttttagaaatcaataagatgcatatgatatgaatataacttgcagtaatagatactatttttaactgacaactgtgtgccaggtcactatg

SEQ ID NO: 136422 - DNA, 266 bp, Homo sapiens
ccaatagtagacggatgattgaaccaattatgctatgtcgttataacaggttatacatattttaaatcattactttagttgtacaatataaacttttccatatgtcaccagatgttatagtaaaacattaaggaaaaatagttaatactaatgaagggaaatcttaatctaatatttaatactttatcacttaataggattttgaggaacacctttcttatttctttgttcctttttatttagaatcacagagattttgtgtaacc

SEQ ID NO: 136423 - DNA, 182 bp, Homo sapiens
taggctagattgctgagcccacccccagcaaagcatctagagagaacacatgacggaccggccccaagttcaggagtgacaccacagcaaccccagagcagcaaatctcaccatcagccactggagagagaacacatggtctgtgctcggtgctcaagaaggatctcctactcgctgccatg

SEQ ID NO: 136424 - DNA, 415 bp, Homo sapiens
aaggaggggaggatacaagaggaatgataaatggcaaggaaaaccactcactcttaatgctttttgtcatactcatgtcctcttgtcccgtcaaacataccttttctgcaatgaattcaactcatgttatgtgacattgtcattttacaagggaagactagccagagaatttctgatggatgccaaagacatggagtggtactttacattttgtaggtgattgataggtttagtgtcttgtatctagaaagtggacacatagagtagagcagcttattcgagactcttctccctccgtccatagccaaggaaattataggaagcattctagtttgttgaatggttcataaatatgtgacagttttttttgttggttggttggcttttgttgtttgatactaatggaccaagaaga

SEQ ID NO: 136425 - DNA, 431 bp, Homo sapiens
ggaacgcatcacccacatgtattcccaggtgcttttctgggtttcacatcatcacacataagaatccttttcctgtaagatccatcttcgcatgtctccctaacatggccttgccccaagctcagtaaccatgaccaccccacagaggcagaaaaatctggtctgcctcctatgtcctatctgtccctggttagccactcattctacatggaaatggcatatctcaaaccagctggaaacactcaaaagccgccaccatatcacacacataataatgtattaatagtaaccatcatcttccaactactcacaccaagtgagtatttatggtgtggatagtcaccttggggtgctaaaggaagaaacggacttctttgcagcccagtttccaattctttttttttttttttgagacagagtctcactatgtc

SEQ ID NO: 136426 - DNA, 199 bp, Homo sapiens
catgccactgtattctagcctaggcaaagagtgagaccctgtctcaaaaataaaataaaaataagacttgaataaaaggacaggaagacacaacatgataaaatgtcaaaacttccttacatttcatggatttccattaaaattttaataaaaatgtttgaactttctagcattgttaggagaaaataaacaccaaaaa

SEQ ID NO: 136427 - DNA, 330 bp, Homo sapiens
tcaggctcttctgcggtgatgttcccccagcagggcctgtgccggcacagacgcgtcctccggccctccccacgttggcagcacgttgactgtgtctgaagcttaatcccgatgtcacagattcttgtctttgcacctaacgttacgtgtctcatccagcccagggcacccgatcacgtcgctcactaaccgatccttcctcctcccgagtgttcctctagcagtctgctgtgggccttgctgtgaaaccttctgggcacctccacgagtgggagaacactgctgtgtcttcgtgcgtggacggtagccaggctgcacgcagagctccag

SEQ ID NO: 136428 - DNA, 201 bp, Homo sapiens
catactattctgggtgcttgggatgtaccagtgaataaagcaaaggccctgtccttaaggagtttacctttcagtgcatactgggcaaactagcatactatatatagtaaatacatatagtatgttgagtgtttattaatgcatggagaaaaataaagagggttagggcatgtggagagagaggacagagtaaggatgttg

SEQ ID NO: 136429 - DNA, 748 bp, Homo sapiens
atgttgagggaagcagatgtggtaactgccctcagggagattctcttctactggagagaccagtagaagggaatcaaataagcaagtaactcaaactaaaatacacttacataaacacattgggaaaagggtgttaaggaataaacggtgctgtgatagataaaaatgttactgggagacagtcctaggctgggaaaccatgaagagggaattggaagaataaggaaccagacacgcaaagagagctgcggcactgaaggtagctccgaggtgggcatgatccagaaactggtagcaggacagtgaggctggaggagtggacaccactggagaaggggaaggagggaaaggagatgccataggcgaggttggcaggggccctgtcatgccgcctttcataagccggggcaagtgctttggagtttgcacaaaagtaatgggaagcccttgataggctttaagcagagggtgacttaatctctgtgatttatgctttgaaaagttcattctaacagctgcagaaaaaatggtttagaggcacctaaagaggatgtggagaaactgttagacaactgctcacaggccagggccccgaacagtggcagtggcagtaggggtagaaagaagtggacgggattcagaactcactcatgtttaactcgacaatctgaaacgtggagaaatgacagttggagaacacgcctttcagtttatattccctactgtgcttcctccctttctctaatgc

SEQ ID NO: 136430 - DNA, 523 bp, Homo sapiens
cagggttgccacagtatgtaaaatgcaatatctgcacagcacaataaagccaagtgcagtaaaatggatatgcctgtacttctgtattctaaataaaatgcttatgctgtgatttttagaaaaatatgcaaactgcagacatttgctcttaattcctgttaaaatagatgaggatttactctgcttatagtcccctcccttcctttctctctccttccttccttcctccttccttctctccctccttccttgttacgttactacagtatataacaatatttattttttaaaatttagttttttaatcagattgtttatgtagatagtttaaaactgaaataattctataaatcttattatgaaaatctgcagttgcttctgtagccactcacccccaccactcccaaccattgcctgcatcctagagacaagcatttcacactgcaggctgtttcttttgatatttaaatcatatcactagataacaaatttttggatctacttcttgattttctgttttgtg

SEQ ID NO: 136431 - DNA, 906 bp, Homo sapiens
ctaaatctgcagatgacaaggtgaggtggagagaggatggctgacagactggggcggcctcctgatggccacgtgtgtggtgactgacttttgttaccgagacctaggggagggacgtggtggtcacggcaccaactttgagatgcctaagatctagttagtagtactagaatgcatgggattgggaactttaaatgagttgtaaaaaataagtgttattagagttccaaaaagaaagaaacgagttgggccgctgagatatttagaggaacataatatcaccacgttcaactgataaattaaattttaagaaagattgatatttgccaaaagatatgaagttagagtaaaagaggctcggtggcttgaccagggtgtggttttcactctttcattcactgacaagtagtgttggggggcccggccgcgccgaagcctgcttgagtcaccgagccagggcgctgcggctccccactgctggcggagtcttattgttgtgtctctcgctttgcctttcacagttctggcatggcagggcttaatgaatgtcaggctcagagggaagagaatggaacctgcgagcactttctgccactcacagagcggggtcacctcgccctgctcccccagctgcctacaggcctgccgtgcccttcccatctccgcagcctcagcctggcttcccttgaggaccaccaccgcccttagcccatctcccacacccatcttgctgagagtgcaggtgagcccggcccacccgaagccacgttgcctcccatcacccttcagtgctctggggccacaggggaaagcctgtgaccggcgtctgcctctgcctgccttggtctcttcatcgtcatatgccctggactccaattgcttagggtgtcccagacacactgtgct

SEQ ID NO: 136432 - DNA, 265 bp, Homo sapiens
cctcctttagagtctggggttggacatgtgacttcctttggccaccagaatgttgccaagaaaagcacaactctgaagtaagtcacctaaggccacgcagctaggagataaatgaatcaacattgaaacccaattttgttgcttagtatcccacattctcaaactatattatctgtccttattgtgaataaaaagtgttcttattaacactacattcttggctcagtgctaagctctgtggcccattgtccagcacttgaccagg

SEQ ID NO: 136433 - DNA, 367 bp, Homo sapiens
aataggtcttcagacaaatttgatccctctaaggcagtttgaccaaaccaccaagccaagaaacagtccctctcccttgctctcaggcagggacataataagggctaaggaagtgacctcctttcaggaagtaggtggacatatgacctaaaattcaacccttctcttcttggaaggaacttatcatctaaaggagaaaagctttaaaatgtgctcccttttcagtgcagaaggaaagaaggagtgggagaaagaatttactgtcctgcagtagtatttagaatatagaggaaaaatattttctaaaaatggacaacctgagtgaagagtttgtagctttaaagatacctttccctggaagttttag

SEQ ID NO: 136434 - DNA, 438 bp, Homo sapiens
ttttcttggagcctctcctaggagtcgtgttttgtgaaaaacacttaggcagtgcttctctgctttttgctactgctgtcctaggtgattgctagtgaaaggatttctataggataaattatatttacctgagtatcaatttggtattaaaactgaataggaaattgtttttgcaaactttgacttagacatacagatctattttgaggtattgtgactttctaagcagtttcctctttagggtctttttaaaaaacttagagaaattcttttcagtgggactgctgaatcaatgtttatatgtattttgaattttgataggctattagctatacattttaatgcgtaggaaagtagtcaataagaaaagtaattggttataaaaaaatttgtttcattagtattcttctgttctctatattgagacatgtaacatga

SEQ ID NO: 136435 - DNA, 1834 bp, Homo sapiens
caacatatggcagcaaggaaatgcaaagcaaacatctacaaatatttgaatccacctgtccctcacctaccaacttccccctctactactcataaagtggtaggactcctaatgccccgcttccttccacctgagaaccaaccagcaccctgatatttcaaagccagacctaaagaaccatggttgccaataacctcaatgccaaaccaaacaatcctaatcacatttttacttttcaaatccagtctcagagcagagctgtagattaagggacaaaaagtcattgtggaatcttttcaaatagctcttgtaaaagcatcagttgggaaagagtttatgagttcctctttgtcctctcctctggagaaaagacagaacatgcaagaacactagatacaccaagctatgggtgttgaaatagactagctggtgacctggatttgcaaataccctagggacatgaaaacattttttctttttctttttcttttttgtaacctccacccagaatttcaggaaaggtggggccacatgcccaggatatatggtattctactgcttgctttcttatcaccagaatactagtcaatctgatttcttagttccatgtcttttcttccaaggaggtagggcatggggttgggggacactttccgccttccttgcatctcactgtccactcttaaatttttattaagaaacctctgaaagattcaaaattcagttcagtttcaataatcccaaagaagttgggataatttgttttcacttgcttcaaacttgccacggctgcaggaggagtctcaggacctcagaggaatggggcagatgtgtgaagtctgggagtctgcctcccacccagatgccaggagctgcatactcagctctgcctcacttccctgatggtctgctttcatccaggttaccatgacagagagggtctatcctctaaagaaagctgagttacaggctggcccctggggttgttcctgtagcctctctttgaccacattcctgaagatgtttagctgaatgcctcctcaaacctttgcttcttccataacccaatcctacacatatgtgataaagctttcttcaacaatactgggtcatttggacactaccagtccagatgagaactcacagaccaaatgaaaactttcaaaagcaagcagggaaagtaactcctatatgctttaagatgatgtattggtgtagattcaggtccaatttgaaaaaatgtctctggttctttctaattgtatccactctggatttgtttatgccagttctacattcatcaagccttgagaaacaggtggaaagaagaaaaatataaaattaagaagaagctgatggatcattggagattcaaaacaagccttctaccggtggcaccacactgaaaggcagagacaaggcaggagcggccatgggagaggaagcagcattggcttctcacgttctggcctccagcctcccaccagagcttctgccattcacccacttaacttgaggagaaactaaggcaccaaggcctgtcactgcaccgaaaaccagaagcagaaggactttctttctttgctcaaccagttctgcctggatctgacttttgcgtcaccagtagtcacaagcctgatttgtcatctccagcattctgtttatttttttaaggtcaatctttgcctgaaacatgacttcattgcacctgcagcacttcattgtccaaatgtccttggcaaacctcacagtctttggacagtgttgcattttctccaaaggggaaatcctctctccttcctcaagcttaataaggctcttgcagtgcatccaa

SEQ ID NO: 136436 - DNA, 1812 bp, Homo sapiens
caacatatggcagcaaggaaatgcaaagcaaacatctacaaatatttgaatccacctgtccctcacctaccaacttccccctctactactcataaagtggtaggactcctaatgccccgcttccttccacctgagaaccaaccagcaccctgatatttcaaagccagacctaaagaaccatggttgccaataacctcaatgccaaaccaaacaatcctaatcacatttttacttttcaaatccagtctcagagcagagctgtagattaagggacaaaaagtcattgtggaatcttttcaattgggaaagagtttatgagttcctctttgtcctctcctctggagaaaagacagaacatgcaagaacactagatacaccaagctatgggtgttgaaatagactagctggtgacctggatttgcaaataccctagggacatgaaaacattttttctttttctttttcttttttgtaacctccacccagaatttcaggaaaggtggggccacatgcccaggatatatggtattctactgcttgctttcttatcaccagaatactagtcaatctgatttcttagttccatgtcttttcttccaaggaggtagggcatggggttgggggacactttccgccttccttgcatctcactgtccactcttaaatttttattaagaaacctctgaaagattcaaaattcagttcagtttcaataatcccaaagaagttgggataatttgttttcacttgcttcaaacttgccacggctgcaggaggagtctcaggacctcagaggaatggggcagatgtgtgaagtctgggagtctgcctcccacccagatgccaggagctgcatactcagctctgcctcacttccctgatggtctgctttcatccaggttaccatgacagagagggtctatcctctaaagaaagctgagttacaggctggcccctggggttgttcctgtagcctctctttgaccacattcctgaagatgtttagctgaatgcctcctcaaacctttgcttcttccataacccaatcctacacatatgtgataaagctttcttcaacaatactgggtcatttggacactaccagtccagatgagaactcacagaccaaatgaaaactttcaaaagcaagcagggaaagtaactcctatatgctttaagatgatgtattggtgtagattcaggtccaatttgaaaaaatgtctctggttctttctaattgtatccactctggatttgtttatgccagttctacattcatcaagccttgagaaacaggtggaaagaagaaaaatataaaattaagaagaagctgatggatcattggagattcaaaacaagccttctaccggtggcaccacactgaaaggcagagacaaggcaggagcggccatgggagaggaagcagcattggcttctcacgttctggcctccagcctcccaccagagcttctgccattcacccacttaacttgaggagaaactaaggcaccaaggcctgtcactgcaccgaaaaccagaagcagaaggactttctttctttgctcaaccagttctgcctggatctgacttttgcgtcaccagtagtcacaagcctgatttgtcatctccagcattctgtttatttttttaaggtcaatctttgcctgaaacatgacttcattgcacctgcagcacttcattgtccaaatgtccttggcaaacctcacagtctttggacagtgttgcattttctccaaaggggaaatcctctctccttcctcaagcttaataaggctcttgcagtgcatccaa

SEQ ID NO: 136437 - DNA, 754 bp, Homo sapiens
cagaaaagatcatgccgagtgagaggctgaactctttttgtccataaaaacagagaccaggtacctgggtggtgccagcacgcccacttcatcaaggaagttgaaatggaaaaagattatgtgttgtcaattcaggtgaaagtcaagaaacatcagtggaaacaaaaatcttccttttattgaaaccattctacactatggaacatttttataaatagtaccagcggcattgcatagctttattttgaagcaagaaagagacttcaaagatcagcttattcaaccctctataaaaggatttatagattccttttatttaatagggtgattttctcatgagttttcaccatgtttaaaagacactgtgccccactctcatcccaaggtctatggtcaacttgactcaatgctcataactttcctcgctgattcctgcttatcctgctcctccaagcacaactgcatttcccaaaggtagatccagtaagcaatactctcaaagcacccaccctatgcacaccagtttccctcaagggactcaaaaggaatcgaggtagacccttctcagaggctgtttaactacagacacatcaggatatgtactaatacccaaaaccaaaaccaccagcaatgactgcaatagattcactgtctagacccaaggtccaggcagtttcccttttttgcatttccccaacatataaagataatttccaacatatcagatgcacattcaccagggttatttctggaa

SEQ ID NO: 136438 - DNA, 122 bp, Homo sapiens
tacaaacaagtctcaggatgatcaaactgacctgcaagtaacttaactgcctgcccaaacttaaataagacaacaaaatccagttaaagctcatgatgtctaaaattcaataggaaattact

SEQ ID NO: 136439 - DNA, 723 bp, Homo sapiens
ccgcctccagggttcaagcaattctcgtgcctcagcctcatgagtagctgggattacgggcacccgccaccatgcctggttgattttttgtatttcagtagagatggggtttcaccatgttgcccagggtggtgttgaactcctgatctcaggctatccacctgtcttggcctcccaaaatgctaggattacaagcatgagcccccgcgcctggccagaacaaggaatattatcaggactaaaaaaagagattctgtaataattaaaaggtcatttcatccagaagacagaatgatcctaaatgtgtatgtgcctggtaacagtttcaaaatacgcaaagccaaagctgacacacaggtagagatttcattttcctttctcagtggtttacagaaaaatgataggtaagaatgtagatttggccaacatgattaatcaactttgcctaatttaaatttgtagacacttcacccaataatagcaggatacatattcctttcaagtgtgcatgatgcatttacaaaaatagactataacctggaccataaatatttatttattgtctcaatacacattagatgattgtaattaatattatcactaaccaaacataattaaattatgtatcactaacacagtggcctgaagctcttcaaatatttgaaataaaaaacatactatttttttaaattcatgagtcaaagaagaaatcagaaaagattg

SEQ ID NO: 136440 - DNA, 345 bp, Homo sapiens
tatcattgggtctaaattattaaagtgatataaactaccagttattggaattaaacaccctcccctttctctaaaactgttagcttcaatgagtacccacgtctcagaagctatgaccataactacactgaaaccataaattagtgagattggaattcccccacaaaggagggggaagattcaataccttttctcatagctgtagcaggcaatactctcttggtttctcagaaccactaagtacggcagtctcctctgcccaatgtaaagtcagctgccaggctatctgtaaccaaaccgtagaacctagtttccctttctgaaaaggtaaataatccttctggc

SEQ ID NO: 136441 - DNA, 731 bp, Homo sapiens
ttgaatttatttttattttaattaacaactttttattgaaatacaactcacataccataaaattttttttttttgagacacagtcttgctttgtcacccaggctacagtgcagtggcacaatctcggctcactgtaacctccccttcttaagttcaagcaattctcctaccttagcctcccaagtagccgggactacaggtgggcaccaccacgcctggctaacatttgtatttttagtagagaggaggtttcaccgtgttggcagggctggtctcaaactcctgacctcaagttagctgcccgccttggcctccctaagtgctgggactacaggcgtgagccaccatgtcctgccaaaattcactttttttttcttttctttcttttttttttgagacagtctcactctgtcacccagcctggagtgcagtggtgcaatctcagctcactgcaacctccacttctcgggttcaagtgattttcctgcctcagcctccccagtagctaggattacaggcatgcaccaccacgccaggattatttttatatttttagtagagacggggtttgactctgttggtcaggccggcctcaaactcctgacctccacccacctcggcctcccaaagtgctgggattacaggcgtgaaccaccatgcccagccaaaattcacttcttaaaagtacataatttacaaagttgtgcaaccatctcatcggtttttttttt

SEQ ID NO: 136442 - DNA, 1101 bp, Homo sapiens
agacacactttaccttataaaataaggcaaatggaaaaaaatcaccatagagatgatgatttttctttagaagcaaataattccaaatatgaatgtgcttacataggtaataacttttgttgtcataagctcatctacattattccaacatctaggactttaaccagtttttatgttcagctgattctaatgaatctattcctggcatagtcctttactccattataggcacagctctgaaccaattctaggattcaattcagaacagttacatatttagtgtattatgtaaaaagctttataggattgggttcaatattgacaatattcctatttctaagaatattagacattatttctgtaatttctattccttttgatattgttttaacaaggcagtactcctcttacaatattgtgataaattcagatttttataagacttgttcttttttcctcccaattttaaaattatttcttgaaaactattatttttcatagctatttgcctctagaagcaattgttcataatggaggcatattttcctttgtagaaattcacagctgtgaagagaaagtttcccagtgagttaataagttggcatttgtcagaattctctcgggtcaaagactgagttttttgttcttagtgctaatagaaccaaatcacctgcatttgagtatttaacacgttggaaagccaacccaacttaaggtcttcttttttgtaatgagtaatttgaaagtgaaagcttcttgaagcatgcagtcaaaataaaacgcatgggcgtttatttagtaaagctaaatcgtgtagctttactcagtctgttgaactggcaaatgttaactcccctttattgttatactttcttattaatcatcctattcataaaaatcccatgactggggaaaatgaacccgttagggaaactcactgctatcagtctaatccaagccactatcaataactttcttactggtatccctgcttccacctcgtctagctattatgtgtaccatgaagataactgaagccaacctgcctgggtttaaatcctagctctgcaatagctgtattgccagttccttaaaaaaaaa

SEQ ID NO: 136443 - DNA, 219 bp, Homo sapiens
acaaacaaatgatggtgaattaagcaacaagcctatctttcccaccggacacacaggggattttataatcctctaattctccaaaaaacttttgaactctgagggaagaaaagcgccatgttttataagggctatcctggttccatccataataaaaaagactgagatcattttctctctcagcatgctagattatcccgactgtaatcagaatagata

SEQ ID NO: 136444 - DNA, 166 bp, Homo sapiens
tataccataaatatatacaatgttttcaaattaaaccttaattaagctgagggaaaaatgtacacctgccacctgtcacctccaacacacacttcctattgacctgaaccttctaatttttctccatctttactcatcgccccccaagcatgccacatagtttatt

SEQ ID NO: 136445 - DNA, 303 bp, Homo sapiens
gaatcgagctcggtaccatccagaaggactaaaagacctgtgactagtgagctctaggctgtagaaatttaaaaactacaatgtgattaactcgagcctttagttttcatcccctagttttagaagtttcaatagcacctgttcttgaatgacatcagcattctccaagtcacctttgactcttccctcttagtgatccccacaacagttagttgcctggacctgttgatttatatcctaaacatctgttggctctgtctctcaattcccattgctacaaacttcactactaccgtattaatt

SEQ ID NO: 136446 - DNA, 265 bp, Homo sapiens
cccctcagggtggaagattaagatgaagacgtgatatagcatgattcaacctgtgcccagactgacctccctacatgtcacttctgccatgtcccctccttgctccagagctggcagggactccccagggctgccaccacatgtccaggcgcctctggctacccctggcagctgtcactcctccagccctgccccacactcctgccagcctctgcacctgcctgcatgtcctccgcccttccccggcacccaccctgagatggag

SEQ ID NO: 136447 - DNA, 205 bp, Homo sapiens
atgtaatcagtaatctggaaaataaagaaaaattaaaatgcttatcaaatctaccaccagaatgtaattagtgttaacatttgggtatattttcgtttagttttgttttttttttttaaaggcagtctcactctgttgcccaggctggagtgcagtagtgcgatctcggctcactgcaacctctgcctcccgacttcaagcgatt

SEQ ID NO: 136448 - DNA, 301 bp, Homo sapiens
tcatcgagctcgccccctgttttgctcaggtctgtaggtcaactgtggctgcactaggctagctgggctcaactgtacttggcccagctgtactgtgagttaggttccagtctactccaggtgtctctcattccaggacccaagctgaagaagcagcatatccctagggcatgctcttctcagatggatggcacacgcaatagaaaccaagcacacaccatacaattactacaacgcctcagctaagattactgcttacttcatgtctgttcacaccccattggccaaggcaagtcacatg

SEQ ID NO: 136449 - DNA, 396 bp, Homo sapiens
gaaatagcaaaccctcaaattgaaaaaaaatatgaggtttgatgataagaattaaaaggggcgagtatttaggttttgaaataactctcacacattggttgaaggagcctaagttggtacagccattttgaaggtattatcaattaaattaaacatacttatactgcttagcccagtaattttaatttttgatatctatcctatataccctatacaaaaatcagttgagatggattatgaacctaaatgtgaaaggttaagcaataaaacttttagaagaaaaaatagacatctttttgacctggtgacttaaataggactttaaaaagcactaactattgtcttcccatgttttcaatgtattattatgtatcacatattttattagttgtttaa

SEQ ID NO: 136450 - DNA, 368 bp, Homo sapiens
taaagtgcaaagcatttaaacactgagggcacagagggaatggccttggaacagagaagctgtgatgaaggaagaggaaaggatgtttgctgggaggggtggatttggttaaatcctgcaccagcgatctcggctcactgcaacctccccctcccgggttcaagtgattctcctgcctcagcctcctgagtagctgggattacaggcatgcaccaccatgcctggctaacttttgtatttttagtagagatgggttttcaccatgttggccaggctggtctcaaagtcctgacttcaggtgatccgcccacctcaacctcccaaagtgctaggattacaggcatgaaacactgtgcccagcctaattc

SEQ ID NO: 136451 - DNA, 639 bp, Homo sapiens
gaacctgggaggcagaggttgcagtgagccgagatcatgccactgtactccagtctgggctacagagcgagacttcttctcagaaaaaaagaaagaaagatgacaatgtcaatgcagtttttaatgttcctctagttctccattaaaacacataaagagactaaaaatggcaaataggaaaaaccagattaacacttacaaccaaactaggtcatgaagtatccctacaaaccccaaactgtgaataagtgggaacaaaccactgacaactaaaagatctgtgcactaccagcatttttgctagaggaggcagtaaaaagcgataaggcatctgatatacctggataagtccaaagtaaccaacaggttggttgaaaacttagcaagcaaatttgactacagcagctcaaactgggagaagatggcatactctaattgtagatatgtttgagtggtccatggtaagaccagaaggagctatagcagtctggactctaatatctttccaaagagctaaccagtcaaagtgcgcccccagtacagaactatatactgaggaaaactgctggaaatagaatccaaattgagcagtacagagacaatagaaacaaaggaaaaagatgtccccgataaaattgg

SEQ ID NO: 136452 - DNA, 423 bp, Homo sapiens
ctgccacgcccggctaatttttttgtatttttattagagacggggtttcaccgtgttagccaggatggtctcgatctcctgacctcgtgatccgcccggctaatttttttgtatttttagtagagacggggtttcaccgtgttagccaggatggtctcgatctcctgacctcgtgatccgcccgcctgggcctcccaaagtgctgggattacaggcgtgagccaccgtgccccgcccacttttcttaatacagatgcaattatgatggggttacatcccaataagcctgtcataagtcagaaatgcatttaaggccaggcttatgtctgtaatcctagcattttgggaggccaaggtgggagaatcacttgagcccaggagttccagaccagcctgggcaaaatggggagaccctgtctctac

SEQ ID NO: 136453 - DNA, 120 bp, Homo sapiens
cagaggttttccatgagcctcttggaaaggctactgcctggacacccaggcttttctctacatcctctggagtccagacaagaggctccaaagcctctagtctcttgctctcttcacctg

SEQ ID NO: 136454 - DNA, 507 bp, Homo sapiens
ggctttcacttgggagctggggaaaaacattggattgcatatgaaatcacattactgggatattttttgcttcttcaatcatcgtgggctgaaataaaatgcttttctggtctcaggtttgttatggtgctaggtttaaaggccctataagaaggaaaggcacttacttactctgtttcccaatagttttgtcatgaaggaaagtgaggctgttagcttccatctatctactctatctctgctgccttcaaacactatacagtctggtctgccacattcagacccctcgattttccttggtacctttacccctcagttttggggctgttcactagttcctggtcatagcaccagaaggtacccaaagacaaccaactggggggcacatctgggtatgttttcatccctttgaaattcaaattcagctggtaaaatagaagaattaaaactgtgtataattaacatgagttttcaaagatatgcatatgaattttaattattaccctc

SEQ ID NO: 136455 - DNA, 464 bp, Homo sapiens
gatgcctgttttcagcaacaggcccacaagactcagaggcttttctgcttgaaacaactaaagcgaatttttacatggatcttatgtgtgtacatgcatgtatatgtatgtgtatgtgcatgtatgtgtgtttgtgtttggatggacatgtgcatgtgtgtatacatgtatgcatgtggggggttgtgtgtctgcacgtgcgtatgcgtgcatctctatcggtttacgggttcatatgggtgtgtctgtgtgtacacatgagtgtatgggtgtatctgtgtgtgtgggtgtgttcgttcctgtggatgtgtgtatgcatgtgtctgtgtgtatgggtttatgggttcgtatgggtgtgtttgtgtgtgtgtgtgtgagggggtttgtgtgggtgtgtttgttcctgtacgtgtgtatgcgtgtgtctgtgtgtataggtttgtatgggtgtgtatgtatgggta

SEQ ID NO: 136456 - DNA, 320 bp, Homo sapiens
catctccttaagtctattgggaagtgacctgtattacccctcacacctaggagggtcactcccccttcccgtcgcagttgctctttgagattgacctgaggcacattttctctttctagaagccgctgcgtaagtgacggacccatccacggggggagattcctgctgatagttgcccctcctcccactccccagtccacggtcactgcaaaatgaacctttccactccccttgcacggggtcctcgtctacctcctcccctcccaccagtaatgcagtcattaatcctctctgatctttccttcctctcccctccccct

SEQ ID NO: 136457 - DNA, 194 bp, Homo sapiens
aagaactagaatatatataattttattatattatctcctttttacattgtttttttttcctttggatctgatttttcaaaactttagtctaataatgtatcactctgtaaagtaacattccttgtaagatttttaaagtagaaaatcttttcacatgaagatatatatgtactatatacatatatgtatatatt

SEQ ID NO: 136458 - DNA, 229 bp, Homo sapiens
  misc_feature (201)..(201): n is a, c, g, or t
ggctccccgcttgcctcagctgcagcagcgggaagctcggtggcaagcccttgtagtcctgtgcgatggcgtctcgatatgacagggcgatcactgtcttctccccagacggacacctttttcaagttgaatatgcccaggaagcggtgaagaaaggatccaccgcggtcggaattcgaggacttacttctgatgctagantagtaataaacagagcccgtttggaagt

SEQ ID NO: 136459 - DNA, 448 bp, Homo sapiens
ctgttacccttctaagggactaggagagttacctgaaagttagtttatgcaattgaccttagagtcagatgctattaccaaatgggagaaataccaagaccggaacttactgagacattacagcaacctccaccctagggtacagaataactcagatgtccaaacattttcagaataaagttcacaaaggttcattttagctttctatcccccagagaacaaagatttactcagtcatctaaaacaaaaatgtacacatctggtagagtgtgtacactttttctacaatgataggcattattagtcttaaaaagaaaaattaaaagatcttcacaaacccagtggaatattccaccaggaagcagctttgaagctggaaaatttctctagtgttcttacaacagtgcaaagcaagagactgcaatcacaaccagtgttcgggattcat

SEQ ID NO: 136460 - DNA, 161 bp, Homo sapiens
catatttgtccactgagtgttgaaaatttcatgtgaggtccttgttacaatgactatatgatggagttgtgttgggcaggggggcaggtcactggatttcactgagcttacagaattggtcttctgactctttttcgtgccagcttactaataaacatttg

SEQ ID NO: 136461 - DNA, 534 bp, Homo sapiens
atttacaaatgagttcaaggttgcaggatacaagatcaaggtaccaaatcaaccatatttctatatattagcaatgaacaattcagatgtaaaatctagaaaaacaattttacaatagcatcagaaagaataagattcttattctttgcccaaaatgtattgaataacaaaaagtgcaggccagaggccggatacagtggctcatgcctgtaatctcagcactctgggaggccaaggcaggtggatcacctgaggttgggagttcgagaccagcctggccaacatggaaaaacctgtctctactaaaaatataaaaattagcaaggtgtggtggcgcatgcctgtaatcatcccagctactctggaggctgaggcaggagaactgcttgaacctgggaggtggatgttgcggtgagccaagatcgtgccactgcactccagcctgggcaacaggaaggagggaatggagggacgggagggacaggagggacaagaggagcgctcgaacctggaaggcagaagtcatgccactgt

SEQ ID NO: 136462 - DNA, 180 bp, Homo sapiens
cctcactttcacatatgtatctctattatagtacttatcaccaatctgccttatatgtttatcacccacagagactataaattcctgggaggtaaggaacatgtcttatccatgtttgtattttctacctgtagtgataaattacttaggaaataataaatgatagttaagtaaaatgaa

SEQ ID NO: 136463 - DNA, 406 bp, Homo sapiens
atgagatcctacaatatgtgtccttttgtgactggcttcttcaattagtgtaacattttcaatgttcatccatactataacatgtattagtacttccttattattgctgaatactccattattccagcgtaatagctgacattttatccatccattcatcagctaatgaacatctgcattgtttccactttttgacaattatgaataaataatagtgttaggaacactgtgtacattttttgtgtgcacattttcatttctctgggctatatttatacacacacacacatatacaatttttggtactgttccttgtggaacagggctaccctataggcagggtgtccagagtagccttgggtatatatctaggggtacaatccctgggtcacatggtaattctatg

SEQ ID NO: 136464 - DNA, 308 bp, Homo sapiens
atgcaatgtgtctggtctccaagcagaatatttgaatagtgggaacctggtatccagtttggtccccagctgacagataccagttggaaatgaaagaatggaaaaagccattgtggcagtagtctgcatcctgcaagagcagattctgaccggcatcacttccgcagtgaaaggtaacaaaatctgacagagaaaaattcagtctccttttctacttgtaattgtcacatcagcccaagtggaagtatgttatatgagagatacagcaaagaatgcaagcaaatatcactggccacagaaaggcccct

SEQ ID NO: 136465 - DNA, 343 bp, Homo sapiens
aaccacagggagatcagaccagacatatgctagaggctggatgaaaacgctgagggaggatgagaggagagaccccaaacctgcgcagcaaggggagctggaaagagaccctgtgcgcaaagtcggcagccaagaaggtctgtttcatttgcaaacttggactcaaaacgctcatgccagggatgcaggaatgtggcctggaaggaggatgctgggaaatcggaacatgaaggcttccttgtgtggaggtgtggggttcaaatgagtattacctgtgaaacacaagaaacctcaagcctcaaagggagatattaactttaaaacttcaagcagtgcttcagca

SEQ ID NO: 136466 - DNA, 249 bp, Homo sapiens
agactgcaacattgtgagccattctgcaacatatccatcttttaaaatattttctaatgttcaatcttagctatggatttttaaatgtgtcccacattttcactgtgacttaaaaaccactttttccatttgatttaacaaaacctctaatctcatttttcttaagtagactgcctataatcaaaacatggcttttttttttgagacactctcgctctgtcgcccaggctggagcacagtggcgcgacc

SEQ ID NO: 136467 - DNA, 397 bp, Homo sapiens
acagaaacaaggcaaatgtgcactatcttcactgctgttcaacattataatggaggtattaaccaatatagttagatacatcgatttaaggcataagaatgggtaaagaagaaagactatctctgcagattatatgataacgggttgagcatccctaatctgaaaggctccaaaattcaaaactttttaagcagtcacacgatgcacaaagtaaatgcttattgaagcacttcagattttggattaagggtgactgatgaaaggtacagtagtttcttgttggaataatgaaaatgttctaaaatttattgtgatggctacacaactgtatgaatatactaaaagccactgaacaagacactgaatgaatttaaatggatgaatgtatgctatataa

SEQ ID NO: 136468 - DNA, 494 bp, Homo sapiens
tctgtccagcaattgcctgtccaatatcagaggctcatcgcccttgttattgatctttagaaccaaagacaattatttcaaaacaattatgtaatcctcatttttttcctttaaaaatgtttgtcttcctttacctctctgaatatgcacacagcttaccatgacatgcatattcccattgtaatgttctattctctaaaacaaataatatcttccttttaaagagcccctcactgttatttaggttgacagtgataatttcactcttcgattccccacaaagaaaatgtttaatcacctccactctattcaaaccactgatcctctttaaccatcacccctgcaatttgtaccatcaagcagatggccttttcctctttatgaaaaaaagacacatcacacagtgactccttcaaacttcctgatgcctgatttacatacagagcacctctggactcatctaaaaccgcccctataaactttataaaattaat

SEQ ID NO: 136469 - DNA, 407 bp, Homo sapiens
ctagtatttaatactgaatgcttatcatactttctaggaactcaattaaaaaatggacagatagacagatggagctatgaatcaaccagccctgaatgtgcagtctattgcaggttataaaggacacaaggtatgtccccaggcctgtcagttaactgctcacaatctacttggagaggatatcctcccaggaagaagacagtgtcaaagacaatatacttctatttacaggtatacaggtattgcaatataggctctatttacagcgtacaaaccatcagcataaaccatgaaacaatctgtgagctggaaccatccacaaaggattcctgcacacggtgagaattttatcatacaaaatggaaaaaccttggctccaggaaagctcttaggaatcagttagtcaa

SEQ ID NO: 136470 - DNA, 807 bp, Homo sapiens
ggccatgttcttaacactatacacaaaattagattagtataagtgtttcaactagtgtctatcagtgtgaaattcacatcagcaggctcaagggagctggcaatggggttttcatgctgacagttatatctggaggactaaataagaagaggaaaaggaaacctgaatgattatgggaaagtcaaatagttgagaagtgggaaggaaaagaaataatagagagggttagactagaaaagctaagtaacagtgccccggtggagcaggattggaggtaagagcaccctaaagactatgtcacaacttcaagaactcagcactcaatactttgtttcatcccaacccacatctctcttctaagttccagactatcaccctcattggtttgcaagaaattccatgtggttgtcccacaggcaaaataaattcaatgtatctaacgtggaacttatactacccaattcctgttatttggttctcaacttttgttaatggtgccattatagactcgggattctgattcaagtgtccattattaccaagtcatatttaactttcctcttaaatctctcccttccttatgagttttcttccctttttttgttttatgtctttattcttgtattaaatagctactgtcaggtactaattctgctcagttctggggatataaagagaagtaagagaataaccttgttctcagagagttcgtatctagaaggagagtgtggtaggcagaagtctaagatggctcccaagattcccaatcccacatgatttcatttcctctccttgagtgtggttggg

SEQ ID NO: 136471 - DNA, 452 bp, Homo sapiens
tgaacagggattccagaaatcaaaaagcaaagatcttcaaagattatgttaaaagaggtgaaagtaaataactgccaaactagaactgtgtacctcacaaaagcatccttcaaaaatacagaatataggacatcagaaatatgagtgactagagatcctcggctctcattttcctcacacaagaaaggaccaagacgatgaataaacagttaagatttgactggagtgctgaagggagggtgctggagtacagtgggaaagtggaaattcacctgtggtgatcagaagccaggaagacaatgtggaggcacccagatcctacaatcctgcctctcccatccagatcaaatctacccagagtcaagagagacttcctgttgcagagaatagttaatcagaagaccctcaccagcccccattgtcactgtaaacacttacggttcctatagtgc

SEQ ID NO: 136472 - DNA, 696 bp, Homo sapiens
gtgcaggagcctggtgagttcaaaatgtagaaagaatgatcaccaaattgttagcattacttatccttggtggaattggtgatgttttcttctttgcacttaaaaaatttttggaatattttacaatgatcagcatgatttatataacaactaacctattctggtttaaatataaaataattatgctcattgtataaattcaagctacacagaatttttgaagtagcagatgaaaattttctctcctttactacagcttcagtgttctgtgtatgttccttcacacttttaagtggttttatatacatataactgcatatgtaattagttttgcttgtgtgctcatgcgtgtgtgtgtgtgtgtgtgtgtgtgtgtgtgattatgtgatcacgttacacgttttaggagatgtcattcacatggtgcctgaatggtgagtcttaatatcctcatgttataggaaaggatatttagagaggtctgataaccaggtgaacattaaagagaactacctaatttatttaccaaagttcatgttcttccaaccataacaagttgtttctcaatgataggaaacttggaacgcttaaaaccagatttataattagaaatactaaaagaaatcagcaacattgataaatggtaaaatgctgatggaaagaaaactttaaaaaatgagaaggttgcatgttaac

SEQ ID NO: 136473 - DNA, 265 bp, Homo sapiens
ggtggatttgagctagggaaggggtgaacctggaggcagtggcaggaatgaacttcacacgagcagcttggggcctggaagaaggcactcaggctgctggaggagtgtcctggttaaaagaccctttgaggggcccctgtccacgggtccctgtccacgtggcctgggctctcctggctatatttctcagaataatgcacatgtcttcttctctcgccctcttcccagagcctcccagcacaatgcacccccgcctggggccccg

SEQ ID NO: 136474 - DNA, 365 bp, Homo sapiens
catcttactctgccagatggtaaaacttaagatgacagcatctaggttctaggggcttattagtgccagtgcattggtgaacataagtcctcagttgtcatccattcaccctggcatctgccaaggcatccatcagtctgtctctggccttatatccatggcttgctgagtaattatctcccacttcagtccaagaggacccagctcaaatgaccactttagagcccctctctaaacacaaaaaaattattactccacctcagaaccatagagggctgtgaccacacctattaggaggtcacaggctgctttttaagaattttttccaatatttttggtttttgatatgttttgatattgttggg

SEQ ID NO: 136475 - DNA, 169 bp, Homo sapiens
taagccgtcaaggcattaatattttagggctccaaagttgatttgagggaattttaatcttattttctttgttttccaatgtgactaccctaaacctctcttttcatgttggaaaataaaaaatgacagatatgactaaaactgacaataaaaacatacacaattatac

SEQ ID NO: 136476 - DNA, 482 bp, Homo sapiens
tgattagcagggattatctgcaaggattacctctgtgaattctcccattattcgctggagtaaatattatgagcattttatggttaagcaacacagctggtaaatgatgaagtcagaattcaaactcagttattctgactccacagtctccaattacttataataatctcttctcctatcaggctttaacaaaaagcccacatatttatattctctcaatgactccctagaatggaaagttagtggaagcttttatatacaataaagaaagaataaaggcaagattaatatgtattatcatggtaggtagagtggagaaaagtatattatgtcttttttttttcttccctctcctactcccactgtattttccaggtttcaccacattctagaaaacatttattcagttgaataacccatcacctttgaagacatttaacttgctccaatagaccccaagctagagtctaccctgtggaaaa

SEQ ID NO: 136477 - DNA, 192 bp, Homo sapiens
ccggtctgcagtgcaggaagaggtgtggacagggctgcggaggaagccccggactccaaggagagaagacagcctgtgaggacccccttgcaccctgggccacgtcagggcacctcggggctccactgtgagcttctgtggctctcacctgccagcatccctgccctgtcctggcagctgcaccatgggccc

SEQ ID NO: 136478 - DNA, 409 bp, Homo sapiens
cagcgtcagcgtcagggttcaggtttgcagggctctgcagcagttactgacatcctttgctggtcgtatcttctcctccacttggagcctatgttagtttctgggtaaaatgcaccaccctttctcctggtaaaacagtaacatagaacgtaataggaaatgcctcctgcagcttggggaaatttagagaagaccgtttctgtaatattcaccccaattagaggatgtactgcccttggcatctgcagttcattttgcagttttgtgctgctcgccccactgctgaaaatggaaccctctcccttgtcctccccctaccttgaactcacctctcctcacactgtcttgtagcactcactcttcctcacacccaccctatgtcctctcatctggctctctagagaggccc

SEQ ID NO: 136479 - DNA, 418 bp, Homo sapiens
aaacaagagcaggacaaccatgagaacaaaaaaaaaagccacgtacttggcaccctgcctggccacggaaacactcgtgtgtgacccagggtcccctagccttggcgctgctaacactgtggtcattctctgtggtggggctgtcctgtgtgtcaggcaatgtttagcagtgtccctggcctctagaccctgtagcacccccagcttctgtgaccaaaaatacttccagacattgccaactgtccctggagggcagggtcaccaggtaaaatgcgggccttccatcgcatttgaatctcaggttaacaaatagtttttttagtagaggcatgtcccatgcaatgcttgggacatgcttctacttgacagtattccttatctgaaattcatatataactgggcatcctgtttttatgtt

SEQ ID NO: 136480 - DNA, 407 bp, Homo sapiens
gggaaagaaaacctctcagagaagagtaagtagcaatggagagctctctcgggaggaaacgtgtgggctttctagggtgaaacaagaactgctaatacttactctggtcaacagatgctgacatagttctggactcaaacagggcatattttaaacatgtattttttagttcttcaatgtcataatcctgatgtaaaatgggttcttcaagcattatggccataccctgggtatggtctttgatgtatgccgtttggatgtctatgccaagtgttttggtgttttgtatcatctgcattttttaagaagaaaaaaagtacagatgtctgaggtacgtgtttcttcccatgagccctgttggagtacctcttctgacactaagtaactgtgtgaccttgggaaaatta

SEQ ID NO: 136481 - DNA, 486 bp, Homo sapiens
agtccgttcgactgagccacaaactgaaagaaataagagcctaaatcaaacagtgctaccataaggagcactatcaaaatcttagttaatgggccgggcgcagtggctcacgcctgtaatcccagcactttgggaagttggaggattgattgagcctgggaggttgaggctgcagtgagccgtgatcttgctactgcaccctagcctggccaacagagcaagaccctgtctaaaacaaacaaacaaacgaacaaactaacaaaaaacccaaagaggataagtaacttggccgaggttgctcagtaagcaagtgatgaccctgacttagaacccacctctgttaactccagagcccacgtgcaggacatcccacattgctcctgctggttcacagataacatagtacatggaaaaaagtcttagtgctctaggggtctggaggaaatggcattcaagttaaactgtggagctcagtcgaacggactg

SEQ ID NO: 136482 - DNA, 673 bp, Homo sapiens
ttaaatcaggcttaatgtttcaaggggaaaaagtggtttaatggctcttgttctcaagtgaaaactgctatgctcagttttttagaaaaacgaatgttaaattgattctagattcaatgacttctgtttgggaggagtgaaaaaacaaatcagaaattgagaaaatcattgagaagtgaataacgaagcaggctgcaaatggtaagtttttttccagttattcattttaggagacagtggtttgcagagtcactggctatagttttaggatcattaaaagacagagaaagtcctggaggattgcgaaagaaaaaaacatgtataattcatttatttttaaaaggaacaaagggagatcttaacaattaaagattagtttacacagctccaaccctgaggtggaggttgttgatcaaatcctcaaaaaaaaaaaaaaaatctatggtatagacatctagaggcacacaggatcctggagaggaacagtgtggctttatgaaactcagtatgtatcagacaattttaatttccttccatgacaggatgacaggacttgtagcttggaggcaaacagtagaggccattaatctgtcttttactcaagttttcaattctatcatacatgtgatgcccagcagccagctaggaaaataagttgagcaccatgtttctc

SEQ ID NO: 136483 - DNA, 145 bp, Homo sapiens
cttcataggtgggtacattgccacatccagaaatacagggattccattcaccaaaaaaggaggaaatgaggaaaaaaggaggcaaccaggagtccatgctacagaatcctattctgtcactcccttgctgtgtgaccttgaggag

SEQ ID NO: 136484 - DNA, 311 bp, Homo sapiens
ttgtattttagtagagatgggttttcgccatgttggtcaggctggtcttgaactcctgacctcaggtgatctgcccacctcagcctcccaaagtgctgtgattacaggtgtgagccactgctcctggcttgaaacagataattctttatattcaacctgttgtcaaaatttttagaaacattttcccagttccttgtataagtatactttgtataacttctggcaaaccataattatgaactcacattactatagtactataatactgcagtaagggatcttgcgtttcagtaatgtcactcatccagttt

SEQ ID NO: 136485 - DNA, 431 bp, Homo sapiens
cttttcatatatctctacatcaagtctcacctatcacttcaaaggggtaaaaatactcttctgctcaaactgtattcagtctctcgtgtcaatggaaaatggtgtgttacagatagaaaattctaaagaagatctcacatttcaaaattaatacctaattttactcagtaattacattttatttcaaacatatgcccttacaattagtcttgaatttgaatctaagtttcataacttctgggtaagatgaccatttagtaaactgcctaccaattttagtttacttatctgttaagcaccatagtatttatgatctatataagattgtaatgaaaactacatttttgtaaaacaccatacatagtgctcagtatgttcttccctcctgccatttcttatatttcttgattaatacctttaaataactcgag

SEQ ID NO: 136486 - DNA, 306 bp, Homo sapiens
tgctgagattacaggcgtgagccaccatgtctggcctggtgagcattttttcataagtgctcattaagggttagctactaactgctgcttagtttcattaaggtataggtgacttttactctattaggaatatgggggtcctgggtataatatctccccctgactacaactctctttttactctcccaagtatgttaggtttcattttatacgctcatggaatcttcatcaaagcttttcaaactaaaggcttaggaatagctttccctacttgtgctatcctagcagcaatctacttgaatctga

SEQ ID NO: 136487 - DNA, 300 bp, Homo sapiens
aacatgccaatcatctcactcagtggcatcccctgagaaaagtgactgaagacaaagaagtctctttcatttaacttaaaagatttctgagagttcaaatttgattattttctctttcctctgaaaatgaaaggggttggttaaactaaagggattctatggtccctccactgctctagatcagcagaaccacagccaacattatgaaaatgacacctggaaaatctaagtgtttttgaaaagtatttcaagattcacagaaaattaaacacagcaagtgaagacattcttttttttttt

SEQ ID NO: 136488 - DNA, 590 bp, Homo sapiens
gaattgcaagaacgtctcactggttcacctgcctctttgtctcctgaaggacactagggttcggagagccaatggtccaatcaagtggccaggcctgtgtcctctcttccttacccctcagtgggcacactgccctctcttccttaaccttcagtgggcacactgccttctcttccttacccctcagtgggcacacagcctctgcctcgggatgctccttctgctttggcttcctttgctttggcttctgctgattctgtcctttttctccagcttctgctgcagtggtcaggtctgttgttctgctgcagtggtttggtctgctgtcctgctgcagtggtcaggtctgctgtcctgctgcagtggtcaggtctgctgttctgtgttctgctgcagtggtttggtctgctgtcctgctgcagtggttgggtctgctgtcctgctgcagtggttgggtctgctgttctgctgcagtggtcggatctgctgttctgtgtcctgctgcagtggtcaggtctgctgttctgtgttctgctgcagtggtcgggtctgctgttctgctgcagtggtcaggtctgctgttctgctct

SEQ ID NO: 136489 - DNA, 623 bp, Homo sapiens
ctaacacagttaaaccccgtctctactaaaaatacaaaaaattagctggaagtggtggcgggcacctgtagtcccagctactcaggaggctgaggcaggagaatggcctgaacccaggaggtggagcttgcagtgagccgagattgtgccactgcactccagccggggtgacagagcaagactctatctcaagaaagaaaatgaacaaaaacgaacacttcttaatttcaaaatttaatacaatactatagcaatcaaaatagtgtagtagtaacataaagacagacatacggaccaataaaagagaacacagaatcaagacaaaaactcttgtgtgatttttgacgagactgccaagaccattgagcaggagaaaggtcagtcttctgaacaaatgggattggaaaaacgagatatttacatgcaaaaaaccaaagttggttctttatcttggatcacatacaaaattaacttgaaatagatcagagactcaaacgtaagagttaaaactataaaattgtgagaacaagagaaaatgctgtgacatggtattcggccatgatttcttaaacttcaaaagaatgtgtcaacaaagtaagtaaataaactggacttcacaaaaa

SEQ ID NO: 136490 - DNA, 542 bp, Homo sapiens
gtaagggttcaatgagaaactttggtaaattaagaaaaaaaattaaaaccccaaagaaatatcaacaaagaatgataaaaggaaactcacaaaaaacatgagtaacaaaccccccaaaaaacatactcggtctaatattcaagcaaatgtaaatgtaaatattgagttatgttttgtctattgaattggcaaacattttaaaatacctaggatcctagggtgcagaaaaattctgatgtgcagctggtagaagcataaactgtactttaaaaaggtatttgaaaataatgtatcaaaaggctttaaaatgtacatatgcttcaccttaacaattccaacttctaggaattgaacctaaggcaataaataaaaaacaaacaaaaaacacgataatagtatccacttaaacattgttcatgaactaattagcaaaaatggggaaccgttaaacattaactaattcgcagaatactgattagtcatttaaaagtacatatagaagaatattgatgctgacgacgggatcctctgaacgaatcaca

SEQ ID NO: 136491 - DNA, 306 bp, Homo sapiens
atataaaggatgacaaacctgcagtattatgtaataatttatttgatactacctcggtgctgcaaatacacatctttagagaagaagcataatggtatcaatctcaagacctgtggggcagggccactgatcctttgcagactgtaaaggaggtaatttagagtcccacttcagtgcatcaaaatccatctgctgccgccctcttcttgtcagatgcaacttgttctgtgctctttcactgacacattgttttgcacgtttatgtctaagaccatctggattgtctggtctacccaatatcctcac

SEQ ID NO: 136492 - DNA, 815 bp, Homo sapiens
atccaaccgtaaacctgatccaatcctgtttaaactcttgcgtgtttcccattgtccttgctggaatcccgagtcctaaaggcagggctcaggcccctcttggtctggttcctgtttgtgtttctatccttctggtccttcctctcctcccagacctcagttgcctcctccacactcttcatattctaatcgtacaaatactttgtttttggctttctgattcctcaaggtgttctgtgtgtttttccttcttcctcctcactttctctggctattttctgcccagccctttggctcttggctggtacagctctccctcagtaaccttctttcccatcctagccaaggcagggctccaggttcacacttctgtagcaccctcactttctatagcatagaccccgtgacactgtgttgaagctgattttacattatatatagccctgctggtctatagctttgagaagatttggatcctcagggcttggtcagagtatgagccatagtaaactctcaatgaatgctagttgaatgagcaaataagtgtattcagaggtactggagtgccaagctttgtatatatgcacgcactcagatatacatatggatgctcctggactctacttacacatatatgtatatgtgtatatacatgtatataaatatatatgttaaatatgtatatatggtccatgtatatgtgtgtacatatatatgtatatacatatttaaaccacattattgaggtatgattgatatgtcaaaagctgcacatatttaatgtatacaacttgatgagtttggggctatgtata

SEQ ID NO: 136493 - DNA, 263 bp, Homo sapiens
caaaaaccttcctaaaaggaactgggggacatgttgaaaaattaggtagctttagaatgataactagaagctgcctgctttacctagtctgacgttttcagaggagaggatgttggcagatggttttctcctcaaagaaacgcccactgctttacccagcctactgcaaatgaatagaaatcagggatcataacaccctagacaatcctagaaagaatggaatagcatggcatatgggaaaggaccacaaacatagtcagccg

SEQ ID NO: 136494 - DNA, 630 bp, Homo sapiens
aattataatggaatgtttgaaataaacaacacttcactttaagaagtgcatttaaaaataagggcttctgaattaggctcacccagggacgtctattgatgtgcagaagcttctaaaaagattttaatattcatattgcttcttttaaaagactcttccaaaaggcaaagaaaagcttaagtaattaatcgataagaaaaattgtatctgctaactttttgccttagttattaaaccctcctgcccccacccaccgggaaaataaaactggataaaatatttataaaaaagtaggctctttgataaagtaagctttcttttttttccacagtggctaatactaagtccaggcagaggaaatgctttctttgccctattccttaaaaggtcctgcctagaacgcagtagtttttgttaaacaacaaaagctaaatttaaaaatgccttatattaaacttaattggtcaccaaaacatacctttctggcacttaactagctatcttgaaacccttttgtaaatgcagtttacatctatgaaggtaatctccttttgtgaggatgtctgcctttgtgcacctggaagagagggagcactgggtcactagaaacttatataatggaaaaaaata

SEQ ID NO: 136495 - DNA, 458 bp, Homo sapiens
ctgctcctgaaatcagagactattgctacatcatattccatttcataattatagaaagtcactcttctaagcatcttcttttttaaagtaactagaattagaaatgtcatgtcagttttttaaaatgaatccagtttagatctcatacaactattaagaataaaagtttgccggggcggtggctcactcccataatcccagcactttgggattccgaggcaggtgaatcatgtggtcaagagatcaagaccatcctggccaacatggtgaaaccccatctctactaaaaatacaaaaattagctgggcatggtggcgggtacctctaatcccagctacccaggaggctgaggcaggagaatcgcttgaacccaggaggcagaggttgcagtgagctgagatcgtgccactgcactccagcctgggtgacagagcaagactccatctcaaaaagaaaaa

SEQ ID NO: 136496 - DNA, 430 bp, Homo sapiens
gagagacacagacaagtaaaatgagctaaaaatataaaagaacaaaatgtcacagaggcaaccaacattaaacgtgaaagattaattaggttaacatggcatttttacctgggtcttaaaagatgtgggagttcaaatgtgctaagagaaaccatcctgtagacaatggaggctctcagattgttttattaacataattttgatttgattatgaagcacaaattagagtctggcagaaaatttaccacaacattctagagagcagggcctgacataaggcagaaggtgaagagaaggaggcaaatatgagggagttgtctaagctagaatcatgggtctcaaggacactgatttcagatgagagaggacagctggaaggtgaagaggggaagctagaaagttcctagcttgataattaaatagatgataa

SEQ ID NO: 136497 - DNA, 727 bp, Homo sapiens
gtttttgtttttctttaaaggaataatgctaaacccagttggttttcttttttttcccttccttccttccttccttccttccttccttccttccttccttccttctttccttccttccttcgagacaggatctcattctgtagcccaggatgaagagcagtggcataatcatagcccacttcagctttgacctctcagtctcaagtgatagtccccccacagcctcctgagtagctgggaccacaggcatgcaccaccatacccagtaaaagttacattaagtgtgtctggctctcctgcctccccctccacatcctccacctcttccgcctctgccacccctgagacagcaagaccaacccctcttcctgctcagcctactcaacttgaagaggacacggatgaagacctttatgataatccacttccacttaatgaaagttaatatattttctcttccttgtgattttcttattaaaattttcttttctctagcttactttactgtaagaatacagtatataatacatctaacacaaaatatgtgttaatcagctgtttatgttatcagtaaggcttccagtcaacagtaggctattagtaaagtgtttggggagtcgaaagttacactcagatttttgactgcaagggtgtcagcacctctgacccttgtgttgttcaagagtcaacttttttttttaatcagcctactttcctatctggattt

SEQ ID NO: 136498 - DNA, 305 bp, Homo sapiens
tacagggttgaccgtgtcttagcaggacaggaaccagggtcttagcaagtcctggtaacctacttctgccctgtgaccctcatgctctatccctgcacttcagggctatccccaacagagtgcctaggagactcctagagagcgcaagatacattttaataagggtaagagcatgtggcacaaacactgcttcataattgtcaattgctttttttaattgatgtacttttttttagagcagttttaaggttcacagcaaaactaggcagaagccacggtcaacccacaagccacggtcaacccac

SEQ ID NO: 136499 - DNA, 412 bp, Homo sapiens
aattcttgatccagaagtgacggtggtacccattctagcatgtaatgatgagaagtagctgcagtggtttcctcattggactagttctgcagtgtaactttgtgctttattctggaagtttagccttaagcctatttttccaaccttcaccaaattttgtgagcccccaatattctttcagtacattgattttcactagactcagattttaaattgattttcaccagactcagagtctgatgcttacatctaagaatcctttgagtcagaggtcatcagactacagcctgtggggcaaatctggccccattgcctgtttttgtaaataaagttttgttgaaacatagctacacacattcatttacatattgtcagtggctgcttttgtgctacaaaggcagagttgagttat

SEQ ID NO: 136500 - DNA, 168 bp, Homo sapiens
caggtggcatccttgcagatgaagtgggttggaagcagccaatgaatctgaggtttggaaaaatgagtctgaaactccattttttcttggttttactgtaatatttccattacccaagactttcaggaaaaactggctacaagaaaaagagctatacaaataaaaaaa

SEQ ID NO: 136501 - DNA, 136 bp, Homo sapiens
caaaactgggcacaggaatgaaaatggattgggaggaaattagcccgaggagagtctacaagctaagaggcaaaggaccatcccacccagcagaccctccttctcagttagcctcagggactttttcaaagccctg

SEQ ID NO: 136502 - DNA, 406 bp, Homo sapiens
ttcctttttctatgctaagcagttacaatccagtttatcttacctcagagcacctctgaactcccaccagccacatctcaagtgctcctcagcttctgtgtccaggggctttggcgcagaacaggctgctgtggcctctcagtcgtcagtgggtgaatattgggagttgttagccatttggaggtgtgggaagcatgaggaggtgatgaaagggcctaacagacagaggtggagggtcaggcctgagcctgtgtactgggctgccagtgacaccacgtgtctctcccaagtgtgagtgctggatgcaaggctgccgtcctggcaaagggatgtctcactggggcctctcgtggaaatggaggggaggtcctgggcagggctctgcagagcacaggcatccgagctc

SEQ ID NO: 136503 - DNA, 306 bp, Homo sapiens
gagaatatagtattggctaacagtcatcatagcttgatagagaataaagtctgtcagacttatctaacagggtgaaaagcctagtcaattgaggaaggaacaatggatataatgtagtttttaaatattttgcttcttactgaaaaatgcacttctcactgtcctggaaaaatatagactgggctgctggtgataaaggatggcagttataaagtggtagacaatttcaatctgagataagatataatatatgggaataagatgaactttattattttaatcagtgatccaaattattatatgttc

SEQ ID NO: 136504 - DNA, 381 bp, Homo sapiens
aagctgatgaacgatataaacaaaactcaggaaattttgggtgaattacggagaggcactcaagaggtctcaaagctgattactgacacaggagtgttcagttttaatgccatttaaactgtacatacacatcttaatcattcttttgtatgtttcacaataaaaaataccaagaaaaactggggtaagagtcttgattcagcacttattaggtgtgatctaatgtggactcaagtaaccctcctagctcacacacctttgtgggggccctatgccataacgtatatgaaagtgctttgcatacggtaaaatgttttccaagttgaggcctcctggggcaatgcctttatccttcagggctgactgttcagctttttgagg

SEQ ID NO: 136505 - DNA, 449 bp, Homo sapiens
acttacagttttctttcaattctaccctattttacccaattcttgcttggttttcatcctgattttttttttccatttctttcacgtctttctgctcctgtgtcatgaaaggcatgtctacttgctgcctatttcaggagccaaatattaaatatcttcttttagccatgacagtaatttattttcctatgtgtccttaggataatttccttattctgtatttttttttcaaaattctcacatataggatagactgacatactcagtatttccaattaacaggatatgtgattggcctcagagctctcacttatttcagtgttgatcgtggcagattctcctagccccctgtccagtgtctaggtagcattcaactggagtagttatgctagattggtgtgatatcttttattctcaatatctggttctttgatccataaatttgaatg

SEQ ID NO: 136506 - DNA, 660 bp, Homo sapiens
ccaagtctttgctattgtgaatagtgccgcaataaacatacatgtgcatgtgtctttatagcagcatgctttataatcctttgggtatatacccaataatgggatggctgagtcaaatggtatttctagttctagatccctgaggaatcgccacactgacttccacaatggttgaactagtttacagaaccaccaacaaactaccatcagagtgaagaggcaacctacaaaatgggagaaaatttttgcaatctactcatgtaatgaagggctaatatccagaatctacaatgaactcaaacaaatttacaagaaaaaacaaacaactccatcaacaagtgggcgaaggttatgaacagacacttctgaaaggaaggcatttatgcagccaaaagacacatgaaaaaatgctcatcatcactggccgtcagagagatgcaaatcaaaaccacaatgagataccatctcacaccagttagaatggcgatcattaaaaagtcaggaaacaacaggtgctggagaggatgtgaagaaataggagcacttttacataatccctattttcaatgagaagttgaggcttgtggagttgcttaacatgtccaggatcacctaatgctccaacataagtttgattaactttaatacttttaatatata

SEQ ID NO: 136507 - DNA, 881 bp, Homo sapiens
ggtgccacctgcacttggataggcccttgaggctctgtctccctggggctgggttgggtgctcccagtcaaggaattgatgaatggataccctgtgggctgcagccacttggcctgtggttgggaaccagtaaacataatggtgtcaggatccacggaccatgtgtgcctgaggcatcctgagcatagttgggagcagtgaggagaggttgggatggtgggcccactccttaaggctcactactcttcctgctagcccctctccccagaccattctccaggttggaggaaagattctgcttatcaagctgagggcactagtgaggggccgtgtctgcccagagaatggttgtagttgactaatttgcacaaaggcacctcatggggtagttgaattctggcctataccccctttcccatcctctcctccttgggaaaggagagggacagaggagcttgagaagtgttggctcagctgggtgcccccaagcctcatcctcaggctgctctaagctttgtgggaggggaagctggataggaaaggaggagagcagggtcatgtggaagataccgactaggaaccgggctaatggccaagcgtggtggctcgtgcctgtaatcccagcactttgcgaggatgaggtgggtgaatcacctgaggtcagaagtttgagacaagcctggccaacatggtgaaaccccatctctactaaaaatacaaaaaattagccacgcttggtaacgggcacctgtaatcccagctactcggaggctgaagcaggagaatgtcttgaactcgggaggcaggttcagcagttgcagtgagctgaaatcacgccactgcactgcagtctgggcgacagagtgagactccatctccga

SEQ ID NO: 136508 - DNA, 168 bp, Homo sapiens
taattttaatattattgtgggttgttggtttattacttgggtgtcacaaaagtagaagattttactggcattttccatgtcagtagagtaatttttgcagggtcagattatttttgattaattgatttccatattggttaggataatttgtggagtggctaattagaa

SEQ ID NO: 136509 - DNA, 428 bp, Homo sapiens
caccacatccagcttatttttgtattagtagagacagagtttcgccatgttggccaggctggtcttgaactccggacctcatgatcctcccggcctccgtctcccgaatagcggtcttactcattttctacgtgtgtgttgagtgcaccatttgagagtaagtcacagtgttagtccattttgtgttgctctaaagaaatagctgagactaggtaatttataaagagaagaggtttaattggctcatggttctgcaggctttataggaagtgtggtgccagtatctggttggtttcttgtgaggcctcagggagcttttactcatggcagaaagtgaagtgggagtaggcatgtcacatggggagagagaagaggaggacccaggctccgttaaataaccagcattcctagctctcaagtgagctgac

SEQ ID NO: 136510 - DNA, 770 bp, Homo sapiens
catcctggctaacacggtgaaaccccatctctactaaaaatacaaaaaaattagctgggtgtggtggcgggcacctgtagtaccagctactcgggaggctgaggcagtagaatggcgtgaacccaggaggcggagcttgcagtgagccgagatcatgccactgcactccagcctgggtgacagagagagactctgtctcaaaaataaataaataagtaagtaagtaagtaaataaagagctgccatttaaaaagtttctactctatgctgcattctttacctctatccccaggaatccccaccttaatccttctgactccatcttgaatgctcatcttcagagttgtgctgactctgagtaacagcacctctctgtgtgctggtgggaggtgaacttggctccgttatttaggctccttcccttgatttttgcatgagctaaataacttttaagaattagctgggcacagtggttcacgcctgtaataccagcactttggtaggctgaggcgggagcatcacctgaggtgaggagtttgagaccagcctggccaacatggtgaaatctcgtctctactaaaaatacaaaaaattagctgggtgtggtggctggcgcctgtaatcccagctactcaggaggctgaagcaggagaattgcttgaacccgggaggtggaggttgcagtgagccaagatcacaccattttactccagcctgggggacaagagcaagacttcatctcaaaaataaataagtaatgataataataa

SEQ ID NO: 136511 - DNA, 347 bp, Homo sapiens
tacatggaaccgtcgtaagtcaggaccatctgtaattagtaattttttctctatacctaaatctacatattttcatctggttctaaaacttcatgtaaacaactgcaaacatataggtcaagacattatgattgagaccaaaaaggttttttctctttacttatttaatgttaacatggaggatcatgtgagtgcctattttccctgtagtaattatagctgattttaaataacactacataggagctttgcagtaatactggtactactgcattgtaattcatattagtttaccagcaaggattaaaaatgatttagtgattaaactttccttacaatgttctcct

SEQ ID NO: 136512 - DNA, 394 bp, Homo sapiens
aatcagacccagtggttaatggagaaagacggtctgcatgattaaagattattggcttcctaatgatccagtggtaaacaagaatatccctaagactgtgatagtaagcaagagtaatgattgtccacttgcagcaatatttagaagattttatatctggtctttctgttttctgctggtagttacagcctagtcatcctgtcttcaaggtaggaaaaataattggtttaatttctcatcacatcgaaaggtctgatgataatatgatatataggatattcggatagaaactacaatagccatgctaatctttacagtttctctgctagtattgatgttttgagatttaaagtggaatatttcacttctgtgtcttctgaaatcttgaatttgt

SEQ ID NO: 136513 - DNA, 211 bp, Homo sapiens
gcaaattaggaagtaattagctgaaagagaatgcaagggagtagaaaaaataaagtaggaaataatcatctagaaggaaaaagtccatcaactgagagagagataacggagaggggagaaggtatgaagtaatcatctaggtgagagggagagtgaatggacctgagagacagagagagagagaggctcactcaagttgtatagtgatcaa

SEQ ID NO: 136514 - DNA, 721 bp, Homo sapiens
ccaaggcaggcagatcacctgaggtcaggagttcgagaccagcctcaccaccatggagaaaacctgtctctactaaaaatacaaaattagccgggcgtggtggcacctgcctttaatcccagctacttgagaggctgaggcaggagaatcgcttgcacctgggaggcagaggttgcggtgagcctagatcatgccactgcactctagcctgggcaacaagagcaagactccatctcaaagaaaaggaaaggaaaaaaaccacccacaatcctactagcttgagaaaaccacaattattgttgttttgattccttttttccattcagatatttttacagaggtataatcataatgtacctacagtattgtatcctgcttttttttactccatgtcatatattgatagttctcaaaagcattttttatggctatgtgatattccattaaatagatatactatatttactttacttagccctagttattggctgcttaggttgtttactttttttgtcattataaattcattcaacaaatattgagtagtcatatattaccattagataccagagccactgaggatacagctcccagataatatttattagtgccacacatttttatgaaggtaggttttttccccatgttttaggctccttccttatgatcaagtctgaattgatgagtgactgagtcaaagaagtcatgaaaaataaattct

SEQ ID NO: 136515 - DNA, 375 bp, Homo sapiens
tattcccaaggcatagatgatccactccatgctttaaaaacttaagtgcagaaagattaagtgactgacttatttaaagtcagacaataaatcggagcatgagtcacgatataggagataagagcacatgaaactcttatttgcaaaaggacttaatcattatttttaaaagcctcctccttaattcggaagaataatactgtccttccacccacagtacatggtgggggtggattccaaagctgaaaaccagccaacagggagtgcagcggtgcaggctgggactcggggtcccagggctgagtcgcctcgccagtttccctcctgcagcgtccggaggtgctgctctgggtaccttctcaagtcccttcgacc

SEQ ID NO: 136516 - DNA, 1367 bp, Homo sapiens
gaaactttcctaagagaaaaatttgaacacattcaacacatcgtcattgacgaagctcagaatttccgtactgaagatggggactggtataggaaggcaaaaaccatcactcagagagaaaaggattgtccaggagttctctggatctttctggactactttcagaccagtcacttgggtcacagtggccttccccctctctcagcacagtatccaagagaagagctcaccagagtagttcgcaatgcagatgaaatagccgagtacatacaacaagaaatgcaactaattatagaaaatcctccaattaatatcccccatgggtatctggcaattctcagtgaagctaaatgggttccaggtgttccaggcaacacaaagattattaaaaactttactttggagcaaatagtgacctatgtggcagacacctgcaggtgcttctttgaaaggggctattctccaaaggatgttgctgtgcttgtcagcaccgtgacagaagtggagcagtatcagtctaagctcttgaaagcaatgaggaagaaaatggtggtgcagctcagtgatgcatgtgatatgttgggtgtgcacattgtgttggacagtgtccggcgattctcaggcctggaaaggagcatagtgtttgggatccatccaaggacagctgacccagctatcttacccaatattctgatctgtctggcttccagggcaaaacagcacctatatatttttctgtgaagtgactattaggaagaactccaaaccaaaatactgtgtaaatgtctatgggtgacagtctgctgatggtagaaacctttctttttagttcacaagtcagttagagatttggacagagctgacacaaagagtttggagctcccccatttctggctctcctttcaggggttcctcccccaactcttttcagcagtggtggctgccccccattctgacccctgactcttgcagccagaaagatggtggttttctaaaggaactttagctgtgctgcacaatgcagacctgtgtcttgctctctgggtaaaagccataaaaataagaaactcagcctgtggcctttcttccaaggctggagttctcgagttctcttttatgtgacttcgtgtagtttgttgctttaaaaaatttgtccagaattgttttctgcagaagcatggtctgttaggagcttacaggccataggagaagcagttgtttcctgaatttatctttgctgtattcatttagggcttgggagagtcccaagataattcagtcactgtcagattaatcatttcggcagaacaaacaatattgttatgattatttaatccttaaaattgtgatctccagagtttgttatc

SEQ ID NO: 136517 - DNA, 427 bp, Homo sapiens
ccagccaaaagattgttgttttaagccacctagctttggagttgcttgttatacaccaagagctaaccaatacagtctctctgtggaggaggcctgggttttatgaagtaagcaggtgaggaaggggaagggcttgcaaatctgctttagtgtgcaagtcgggcaatggagccaaacagatcacagtttctagcttctcaataaggctacaagacaaggtagtcccagcccagcactcagagttccaagatcagaatgtgcatcctggcccttattagttgtgtgactgtagaagaaaatgatactaaagagacttactgaagacctcacaaatggtaggtgacaaaaccaggaatccagctccggagtgtctcattctaaagtccattcatctctgcctagtattccatgtatggttctctctcca

SEQ ID NO: 136518 - DNA, 459 bp, Homo sapiens
acgacgcgcgcgtacatcgtggtaagagcattgtcaccccgtgttaccaccccgtggaagggcagggctttccgtgtctgcggatggcacactcacctgtggatccgcgctgtcattgctcgagagaaagcgggtttccacaggctttgttcctgttctcatgtcagatttcagtgctgagcgcccttgctgacatagatgagtaaatgggaacaagagtagtgttgtagctttgttgcttaagtccttaaactttgagaccattctgtggtttgggcacatattttcaggatttattttaaagctctatcagtaagtgacaggtggactgggtccctgagttgtgcaggggcccggtgctggcttgttacatttgttcacttccccagggtgacaccagggttcaagctttgccattgattagtgctggaggtctcgtgcctggggcagtgtgccatt

SEQ ID NO: 136519 - DNA, 274 bp, Homo sapiens
gatcgtgccactgccctccagcctgggtgagagcaagaccctgtctcagaaagaaaaataaaaggagggatagtaatagtgcctcatgaggctgctgtgaatggtaaacacagggaaagcagtgaggctgtaagtagctcaccatgggccatgccctactctaagcattacatcacaattaattctaacaactccaagaggcaggccttagtattatctccattttatagatgtggacattgaggtacagagaagtgaagtaacatacccaagg

SEQ ID NO: 136520 - DNA, 557 bp, Homo sapiens
ttgcagtgtctcacttatgtgttatgttccaggctattaatgattttattgaagacacttccagaacatattagtcaaactagttctctctgcctgcttatagaatgggctgaacacctccagaatgtcaccaaaatcagtgggaaacagaattggaaggtgctgcagatagtaaacacaatggcagttcatgcattaaaacccagtgtgacgggtcagggaccgtattggtttgttgtgctgtggatcatcttctctgaatgctaatcaagagaatctgaaatgcccactaatggagaactaatccaggggcgtataaccttctgattcaagaccttacagaggccacgttacaacacagcaccctgaaaatccaggggccctacattcccaccaggccacaccaaacgtccaggctttcctgggagatattttggtggactggcggccaaagttaagtagcttctgatctaaaaatgactctggctttcccatgaaaataggacagcatcgtcatcatcactgacttcttgtctgatggtgcaggcaacagtctg

SEQ ID NO: 136521 - DNA, 466 bp, Homo sapiens
  misc_feature (22)..(22): n is a, c, g, or t
  misc_feature (47)..(47): n is a, c, g, or t
gttagaagtttcaatagcaaantcggcaacctgaaggaaatcttcangaaacccctacgttttatttatttatttaattttaattaagtgtggtagtttttaaacaaactgtagaactcttcattgtcagcaaagtgaagagccacataatcaatgaaagttcaaaagccttctgtacttaaacatgatttgcaacgttccattttttgtatgtttagaatgctgaaatgtttttgaagttaaataaacagtattacattaaaaagtaaaggagggagggatataaaactacatattgagtacaaagtacactactcgggtgataagtgcactaaaatctcagacttcaccactatgtgattcatccatgtaatccaaaatctcttgtacctttaaatgacctttgagttcattgattttttattatgcacaattgactctgccattgaatctctcttattgtatt

SEQ ID NO: 136522 - DNA, 376 bp, Homo sapiens
gtttctttagccctcccaatgttctataagccatttagtatattgtaataaatccctttctgcttaagttagccagattgaattcttttctttgcagtaaaaccctgacccccacagcttgccaatgtggggctgaatcaaactttctgagttaggtattagagggtttccctccccagttactattgccttggttttagacaattatttgcaaaactgctgatgtgttacttttgattcctgaattccagctattgtgttttttccactatagtctagtaagtggtaagcaattagaaattcacgattttgcattttattatgtttaataacatgttgaacctgtaacatattaaattctatgttcagaaaactg

SEQ ID NO: 136523 - DNA, 334 bp, Homo sapiens
ctcccaggttcaagtgattcttgtgtctcagcctcccgagtagctgggattacaggcacccaccaccatgcttggctaatttttgtatttttagtagagaggggatttcaccatgttggccaggctgtctcaaactcctggcctcaagtgatccgttcaccttggcctcccaaagtgctgagattacaggtgtaagccaccacacccgacccaacatgacattttcatgtcacttgttttgagcgtatattcttggcccaacccttggtgtagcagggaaaacagacacgtgactaagaactcaggaaaacctttgaagttcggaggtatgaag

SEQ ID NO: 136524 - DNA, 364 bp, Homo sapiens
atccggatttgtatcctggttctgccactttcatggagtatcacactatataaggtgcttggtgcctctttgggctccaaatcctttccaatttcctattctaatgtaatatgcaatcacattgaatgttccttcacacatacatttcacaatgtcaggttttgtctatgccatactacaccatcagtattaatatgcttcctgtcattccgccatagcctcttcaaacgtcaactcttacattgatcattctgtcttttctattctttagatttttttttctttttctttttctgttttctttttaaattatactttaggttctagggtacatgtgcacaatgtgcaggtttgttacataggt

SEQ ID NO: 136525 - DNA, 405 bp, Homo sapiens
gagcctaatgcttttttccatccacagcatggctgaactacaatatgagataaagtttactttaacagcaacacgaggccgggcatggtggcgcatgcctgtaacctcagcactttgtgaggccaaggcaggcagatgacttgagagtccaggagtttgagaccagcctgggtgacatggtgaaaccccgtctctacaaaaaatacaaatattagctaggcgtggtggcatgcacctgcagtcccagctactcaggaggctgaggcaggaggattgcttgagcctgggaggtggaggttgcggtgagccaagatcgcaccactgtactatgaactaggttaggcctccttcatattcagtgagggtgcaagtccacaggttactttgttcaagcacagaatgcct

SEQ ID NO: 136526 - DNA, 385 bp, Homo sapiens
cgaagatttgagctctgattaaaggctgaccacattcaataaattatgggatttctctcctgagcaaattcggtgatgtagaataagatgaggattctgaggaaaggctttcctgcagtctttacattcaaaggatttctcttctaacatgaagtctctagtaaggctaaattatagctaaatatttacctgcactccttactttttttttttttttcccttgaaaacagagttaagcctcttttggcccgggggggaagttagctctaatgtgcccaggggggaagttagctctaagtggcccaggtgggagttagctctattggcccaggagtggagtagctataatggccaaggcgtggattagatataatggccaaggcgg

SEQ ID NO: 136527 - DNA, 446 bp, Homo sapiens
ctgcatcagcattccccccaaggccccccatccccagcagctgggattatagagattaaaggcacacaccaccacaactggctaactttttttgtatttttgtagaaacactgttttgtcatgttgcccaggctcatcttgaactcctgggatcaagtgatccgctctccttggtctcccaaagtgctgggattacaagtgtgagccattgcatctggcctgccttctgagaattctgtatcctgaaggagctataacaaatttttctgggtcttaccaggcgaggatgacaccttctaaaatcaacctctcttgcaacattatcaattacaattatgcagacaagttaattataattgggtgcatgagtatagattttatttggctcctatatcttaattctatgctttatcagtttcttaatataaattatgtcccctccaaga

SEQ ID NO: 136528 - DNA, 440 bp, Homo sapiens
gtgcgcgaggcctgcaggcgcctgcgccctccgctgccttccctcagggctctgatgggtttgccatttcctagcacgtggacgggaaagggcccgtgggctgggggtgaccggacggcggggggtcaggacagcgcctgtgggggtggccttccggctcgactcagccgagacgccagcgcagggccagggccggggctgctgccggccggacacccgtgctgtacggcgctcctcgccccggggcttcatctgcccttgccggagccttcccggctcgctggtttgtggccggcttaatcccacactaattagatttctgcgctggtgatgaaagggctccgtgcgtgccagcctgctggccggcccagcccactgcttgttttgcacagaattttaattgtttccaaattaatcctcagaatcgagtgagctcagcg

SEQ ID NO: 136529 - DNA, 237 bp, Homo sapiens
gcttgggggagaaaaggcaatcttctgttatcctatgaaagatgtattatggggaaatgaatgtaaaatcctatgaatttaaaaaataaaactgggatttcagacattattggctgccttccaataaataagtggttggaaatagtccattctttgctgccattggggatagcttaataatggagccatttggaaagcattgttataggcgatgggaagccatggatttagctccat

SEQ ID NO: 136530 - DNA, 176 bp, Homo sapiens
acgtcagggaggaaccagggtctgttctaaagactcctgaggagggcgtgaactctcacacaggcccaaggcttgccctttctggctgtccttaagcaggaccaggaggtgccaggctggagaaggaatgaggggcagagaagacaggtggtttgcagtccagggggaggaaggag

SEQ ID NO: 136531 - DNA, 552 bp, Homo sapiens
attgagagttgctgtgaagaacaactttcatacttgttgctttagagaggattaaaataaggtttataatgtatgggccagctgtggggggaaaaaaaaaaccccaaaacaaaaacactttctgtcatggcccattcattaattcctcaacattttttttaatgacttattatgtgccaggcacatgccagtttctgagcttccaaccatgaatacggtgggtgtaatgtgtgcctgcatggggtttactagtaaatgcagaccggcagaaaggcacttctccatacagtgtgggaaagctttgattggaagtatgtggttctgtgactgcacatagcgggatcgcccaacctaaatttggttggggttggggttctattgtgaagatttttcagtgcaaaggaaacttaagctaaaagagacagacctacagatgattagaggtaagccaaaggagggttaggagtggtggagaaagaacataggccaggaggaggtacggcacagttgaagaactgaggaaagactgattggatttgagagtaaagtgct

SEQ ID NO: 136532 - DNA, 131 bp, Homo sapiens
ctgggatacatgtgcagaatgtgcaggtttgttacatacgtatacatgtgccatggtggattcattttgcagaagaaagttgattttttaaatagggaagaatgtccttcagtagatatctgaaatatctg

SEQ ID NO: 136533 - DNA, 523 bp, Homo sapiens
cacacttctttttctacaacgtgcatttatcctgtgtacacccactgctttgagaggagggtgtaaaagatacgtcacgccttttatgacacacctctccctacaaagtttcctactgtgctctgatggtcgccgacagtcagtaaacagtaatttaaaataatttccaaatggcacagtctccctctccagggagatgcacttctgcctgggagtatgtaaccagacttctgaacgaacaggtaatgttccttatataaaagttattagcactcattttgggaaagggggaaaaacagaagggcaatgccatcactattccttaagccaaagaaaacatgaactaatgtatacagtggtgtcccggacgggggctctaaagagtgtttgtcgcttgggagagtcccactgccgcccaagccagcaacctccgagaaaggtcactcccaaagtggttccagctctaaatataaaggtgtgtttgtgcagaggactaatttggtagttctgatgtgtttactgg

SEQ ID NO: 136534 - DNA, 262 bp, Homo sapiens
cattttatgcttgtatcgcatctcgattcacaccagccacttctgaaataaatgctctcaggccacgtgtggcttgtggctgccgtactgagcagtgtgtgaggtgtgactctgctgggaagagactctcaggacgtgcacctggtctgctccggactctgccccgtgcacatttcccatttgctgagtttgcttttttctttctttttttttgtttttgagatggagtcttgctgtcttgctctgtcgcccaggctggagt

SEQ ID NO: 136535 - DNA, 284 bp, Homo sapiens
tgctgctaccaacattaaaatccattagggctctatggggatatataggctacacacatgaggcaacaattggaggagtttgaattgctagtgaatttgaatttgggaattatttttattgctattcacattgtttggtacagtcattacaaactacatgcagtaccttgtgctctgtagatcaggttatgtccaaatggagacagagtctcctgctgaagaacgagttggatgctcctctcagttaaaaagtgagctgaagatggctcgaggatggaagagag

SEQ ID NO: 136536 - DNA, 366 bp, Homo sapiens
tcttatatgctggtatgacgctatttgctctcccagccgctagatacttccagttctgccctggtaggtcgttctccgatgtaggcataccacgtggtgctcggctgcatatttcacccagctgctgctttgttcgtgtggctcttttctttctatatatatgcacggcgtgtacgagtaacgcattttgatgattccccatcttctttacctgcatgctagactgatctccaatttgcaatccatcccttcttctgtttctccctctttacctccctctcagccaaagatctctctttagaaaccatcacccaaggtagaggaatgaatctctatgctttgacacctccttctattcctcttttc

SEQ ID NO: 136537 - DNA, 214 bp, Homo sapiens
aagtatataagcgcattacagggatgtacccaatcaacctgcagaggtgaagccaattctacataggagttgtttgaataccttttaaagtttgtctggaaactttccttatttaattctgagtggtttttttcagatggcgaacaatactgtactatcgattgagcaatatccctcacttttcttttacttcctccccgcttatatcacgtta

SEQ ID NO: 136538 - DNA, 412 bp, Homo sapiens
cagcctgcggaactctaagacaattaaacctcttttctttataaattacccagtctcaggtagttctttatagcaatgcaggaatgtactaatacaccttccttttatactggtgaatgatcctggttgttggaaacacataatgcccttagtttaaattgaaaattaaccactagacagtcttttctcaattatccttcaagtatgtatagtccttcaattatattttgaaatgaatttgaggtaaaagcattctgaagttaggatttcaaattctcttagtttaagcaaaatgactttagtcaagtctgaattgtcaagtaaattatataagcaaaaccttctaatagaattgtctccagccagtactctccaagtctgaaaggagtcggggaagggagtgattaatctg

SEQ ID NO: 136539 - DNA, 282 bp, Homo sapiens
tgctactcacatgggcttcctctctgttcctgcaagaccagcccagtgccacctcagaacattgcatttgttactatatacgtggtgcttccacattgcctggtacctgaaaggtacttaatatttgttaaatgtgtgagaaaacagccttctcttgagagaactgtggggagagggagtttcaagttaatgccaggagattgaggttgcaggagagtttaattatggaaaatgagttccccaggatacaagggaaggctttaaatgtaaaagaggagtgtg

SEQ ID NO: 136540 - DNA, 770 bp, Homo sapiens
cccccaaattcctatgttgaaatcctttcctccaaggtgatggtattaggcagtggggactttgggatgtgctgaggtcataagggtggagccctcatgaatgggattagtgcccttataaaaaagacccaagagggaggctctctctttttctccaacgaggacacagcaagaagtcattgtctatgagccagaaagtgggccctcaccagacaccaaacctgccagtgccctgaccttggacttcccagactccagaactaggagaaataaagctctattgtttataagccacctgggtctgtggtattttgctatagcaacctgaacagactaagacatacactcaactctcacgggtatcttttctgaccagagacttcttactgttttatatccagtaaaatgcctggtcaaccacaggcactgaagaagtagacaaaagtgaacccatgctagctgtatcctaggaacatcaaccagggaggtcttctcatgagcaaaacaggcaaaagtgctacagaaatctagactgcattttaagattaaaaagtagaaatcaaaggtttagaaaacatctgagctctacaggtcaaagcaatcttgtccctggagttcttttatgaactccacaaaataaaccaccataatgaagggggagaggagaggggagacgagaaggcaggaacggagaggaggaggaaccgagaggacggcaagagagacgacgaaaggcagcggaagaaatagagagagagagacgaggcacg

SEQ ID NO: 136541 - DNA, 302 bp, Homo sapiens
cattctctcctcactctcatcagcattgcttcatttaatttcacatacttttgttagtcacttcaattcttttgggaacatgatgggctataaataaccaagcgcgcacctcatctgtagggtggctgttaactccatcacacagatcgtcgtggggtgactcatgcagtgcacgccgcacccgaccgcttcctcctcagattcaggccccccggttagcactcagaacagcgggtgagagcccatcgcgggaggcccactccccaccaggcacctggcccaggccaagcacgcagggagaa

SEQ ID NO: 136542 - DNA, 765 bp, Homo sapiens
gtacttagcatgaaaatttctactattgtaaaaattttgtagaggttttttattgttgttttttttttttcaatttaatatattctatgtctacttatttccatcccattacgccagtcacaggacagtctttaaaatgtaattttggtgccagcaatctgcaggtataaaatgtgtatttttccatcaacgtagctctagccacagtgagaagtcataaagaaaaattacattcaaaggtaacccagaaatgtcaatttagccaatcatcttatatcacttaatatgaaagatactaagtagcaaaattgtcaaatttaattttcaccttctgtttcttaccaccttttggtggagctgctaataagcagtgaaaaggataaacggcaggcatatgtggacagaagaaggcaaaatgaaatatttcacagctgtaattattagcctgtgaataagtgactgaaatggtggctgaaattgcaatcaagaatatgttaatgacatctgcatacaagtgatctgtgtttgcatgaaataatattttaacattttttcagtgagcaatttattgaccctgagacttttttctcccatatctcattttacacacacagcacaccactcatggacacatacacatacatatgcacacacaaaaaaatatacatatggacatagggatcagtaagactcatgagtatccctaataaaataatgtacaaaaatatatgagaggacaatgattattccccatatggggtgaaa

SEQ ID NO: 136543 - DNA, 184 bp, Homo sapiens
catctgtcttgtaaccttacactgtgttttatcctctgtctgcaaagtcacccattaaagaaagcctctcaagagtctcctgtttcaacccggaaaggagccctcacttctgcctgccacacatgaagctttcttatgtcacagagtaccaccggaacctggaggtaggtgcaagcaatgagtg

SEQ ID NO: 136544 - DNA, 431 bp, Homo sapiens
tactgccttcagacctttacatatgcagctgtcacttctggctaaaagcccattccctctttgccagcatattggcctcctacttacatcttatgacctagttcaaccaatccctcctctactccagaaaagtattactccttctatagcactaagtataccaacctcactaataagataacaagttctctaaggcaggaaccgtattatgtaatattatattcatctttgttcacctaatattcaagacatttgccaaaataggtgtttaattaaattttcccttttgcctcaaatatattaggtccttggaattatgtataaagtcctcaaaaggtatacacaaggccatataccagaaactgcagcttatctcatttaaggttcacaataaccctattacatagctacttttcctattgtaatagatg

SEQ ID NO: 136545 - DNA, 412 bp, Homo sapiens
taatctctgaaaattgacattctcctcactccccacctggtgcagctggcagctggtgcctcagggagctgatccctccctttgccagcaccccactccccatgctgggctgggtgtccacaggagtggacgggcccaggaatcatggctgggaggcctgggttccagccttgctttagctaccaactcaccgcgtgaccttggccaagtcccttgacttctctgggcctcggttttcctctctgtaaaatggggatggccacaccctccttctggggggatcagaagcttagctgagtttaaaaggaacatgactgacatcaaaggagcccggtaaaccaatgggatcctgagttgatttccttccctgtaacgagtggcagggcctccttctcctcatgtggtttgggga

SEQ ID NO: 136546 - DNA, 351 bp, Homo sapiens
agaggatcctcccgactagcccgacagcgtgaaaacgaactaatatagtaaatggtaccagtagagtggggtgttgctgaaaagacacctgaaaatgtggaagcgactttagaactgggtaacaggcagaggttggaacagtttagagggctaagacaggaaaatgtggaaatgtttggaacctcctagagacttgttgaatggctttgacaaaaatgctgatagtgatatgaacaataaggttgaggctgaggtgggaggatcacttgaatccgggaggcggaggtttcagtgaacagagatcgcaccggtgcctggacaacaaagtgagaccctgtcataaaataaaat

SEQ ID NO: 136547 - DNA, 360 bp, Homo sapiens
tgacaaccaaaagcttatgttattaaataagctttggattaacgggatcaatgaatgaagagtttaaagatagcaaaaaaaagttcacagaagtacctgccaaatgtgccaactgactactatgaactaatttacttttgagaaacatgctatttcttatatgctactgacagtacctataaaaatggtgcacattaactggctgttttattttctccccaatcttaatatctaatatccacagactgagattagagcaccaacgtatacaatgtaacttcatactagagttagaaggggatacaaagtgtagaaatcataatcttctccataaagttcctgtcaccttggaattaacct

SEQ ID NO: 136548 - DNA, 226 bp, Homo sapiens
tggccatgtctgtgtgtcaaatgccagccagtcctccaagacgctcagacatctttcccttattgaattcttttcacccctgccctgggagcctaaacttttctttgcacccctatctcagtttgtaccttatcacttgctcttttacagttttcacagatctcatggcaactctttctcatatgtctgtctgatgaagagtgaagcctctttggtgcaggactgt

SEQ ID NO: 136549 - DNA, 264 bp, Homo sapiens
ggagcctgcctcagctctgctccctagctgggtggtcttgggcaactttgttaccctctctgaggctgagttctcatctgcaaatgagactggtcctgatctcacagagttgctacgaggatgaaatcagataaaactgagttcaattaacttttaccctcttcctttctgtttcttccctgaaactgctgctaggctcccctttccaataaagcacctgggagaccaaagccatcaataacagggaccacttgtgggccgaga

SEQ ID NO: 136550 - DNA, 366 bp, Homo sapiens
agccctgaatacccaggccatatccagtgctgtcaggggctggagaggcctccaagcctggatattgggactggtgtttgccgccagtcagggcagctcctgtgggtttttcttctttgcatgtttgtccagaaatggggtttctgttaataatggtggctctgactatgtgaattgaaatctctgctcgtttcctttcctgctatggtccagaagtgaaatttaacccttctagaagctggaggaaaagctggctttggccacaatcatgaggacatttccctcatatttggtggtggtaaatccctcctgggacacggggaaatgaccagaggctggcggcccacctggcaggaacagatgcca

SEQ ID NO: 136551 - DNA, 740 bp, Homo sapiens
cagtgttgtgctggtagatgttgaacaaccagccccgcaggacaggagccttggttggaaatgtttgtcggttccacagtgtgaatacttccactgcagcccatctccagttaccaatgcggggtactgtgcatggagctggagagaggtaagtacaatcgcttctccaccgggcccgggcttctctcaggtttgaggctggaggtgagtgagctccccctgggaagaggctgggctgccgggggaggagctgtctgggggcgaagaggggcccactgagcccaggactctgcagccagcctggctcgctggcacagccgggaagatttccctaagactcaccactctgtgtggggctctcagtaaatgtttattgagtgatgcatgatggatgttaagacattgaatcaaatcttgctctgacctttgagtcagtctgttgggtgtgaaagaactagcttttctgctctgtttgctggaagcgtctgaacccctcctggggcctcctgctctcaccctcctcccattctctgggaccgtcctcagggaaggcctctgggcttggcgtttcacacagcctctttcccacctaatctcaggcgttcttgcaacagcccgtggaggtaaacagctgtgtctctcagttccaccactggccacaggcagggccttgggtgaggttttcatcctccctgggtagtggtttcctctctccaaaaatagagggagtaacaatatct

SEQ ID NO: 136552 - DNA, 108 bp, Homo sapiens
agataagaagctttcttagaatagtactgagagacgctggtggtgtaagaacagagaaaattaagttaatatgctactgatcctctttcaggacattaaactcagtgg

SEQ ID NO: 136553 - DNA, 542 bp, Homo sapiens
gggctgccggccattgtattctcacgatttgcctggtgactccgggtgaggaagtggggtggattctgaattgtgctttatttttactttgagttcatggccttagttggatttatccacaagataatggaaacagttctctttgagttgcctctcaggcattgctggggagattgttctccttggagaattttcactaggaatgacaatgtgacttgatactgccttttacccaagacatctcaaaatattttaatacgtatttgaatgaaaactattctcttaaagctccccacagtagctgcattggcagtgactcttggaacttgagctctgactggggctggggtcaggatgcgagggcagctgtgggcagggccagctctcctattcagtggagtctttgtcggccggaaccctttgttctggaagtcctgggagttacagaccagatcacctggagttctcccggggcctcgttctttctgaaccggacttcaggaagtggttttcccgggctgttttggtagttatcagatact

SEQ ID NO: 136554 - DNA, 402 bp, Homo sapiens
atgaagagctttttgctgttcagctgagtttaacttgaattactttttttaatgaaaggtaaaatagcacaaaattagcagcaaaaagatgttcattaacaagaagcacagtggcttggtgttcagttaaattgaattttcaaccatgttttcgacccgcaaaggcatccttccctgtctttttagtaatgaaagggtttcttctcttccaccactgcagtcaggagcagcagagctaacatggttgtcttacagacgtttaatgtactgtggtcataattaaactaaaggattcttaggggagaattggccctcagttgaattttcctcttccctaatgtgtgtggaatgaacaagatgattgggaaatagctattttcacacttactacgttacaagatg

SEQ ID NO: 136555 - DNA, 368 bp, Homo sapiens
tttacttgggtatcccctccataaatggatgtcaaacttcaatgtatgtaagtgtcaattgccagttatatctattaggaaatacagattggctgggcgcggtggctcacgcctgttatcccagcactttgggaggccaaggcgggcggatcacgaggtcaggagatcgagaccattctggctaacatggtgaaaccccacctctactaaaaatacaaaaaataagccaggcgcagtggtgggtgcctgtagtcccagctactcgggaggctgaggcaggagaatggcgtgaacccgggaggtggagcttgcagtgagcagagacagcgctactcactctggcctgggcaaaagagcaagattctgtc

SEQ ID NO: 136556 - DNA, 284 bp, Homo sapiens
ctggaaccccagaccagactcctgcagtttcaagcagcctcctccttctatcccggtgtaccttccatatctcagtaccaccacggggaacctcaaagactcgacaacccatttcaaaagcctggctatggaaagaagaggaaagggaggagccgcaagtttgggagaaagtgtatttgggatgctggagtgggagcctgtttgtaggagccatagggcaggcttgaagatgaatgggaaagaagatgagaggaagaggaggtgagactgagagcttcaaaagc

SEQ ID NO: 136557 - DNA, 415 bp, Homo sapiens
tgagtctacactgccccgtggtccttctggagtttttgagagccatgggagtggtcagtgcccatcccggcaggtccctttcccaggtttctggcagcctcttccctcattcctctccctgtgcacacaagacagccccactggaggagtccattgggacccaggggtgacttttgttaaaacctggaaaattgtgtcccataccaggaccacgttcctgggagggggtcaagaaaagtgagctccacatggatccctacctgcagacagtcactgggagggtcctggatgtttgcgcctgttactttcttacagaaggcccaccttcagctatcacttttctttttttttttttttttttgagacggagtctcactctgtcgcccaggctggagtgcaatggcatgatcttggc

SEQ ID NO: 136558 - DNA, 147 bp, Homo sapiens
tggattatagactcaaagtttaagagccagactgagcttcagataatcccatccactcactcatgttacacatgaactcccatgccagcagatacttcccccaggttgtatggctaattagtgatttagactgggcctaaatctctt

SEQ ID NO: 136559 - DNA, 492 bp, Homo sapiens
gattctgagagttgtgagagttaaataagattatccacataaagtgcttagtacgatgtctcacatgcagaccttcaataaatgactcattattatacaattatcactaattctattactgtctctacactcctcatagcctaaagaaagtgtgagtgctgtttcccagagcgcatactgcactgcccagggagtggccagagcagtgagagaatctggctgaacaggttttttcaaagcagtggaaaataaatcaaaggtgataacccaaattcggaaaaagaatgtactcctttgtttgttctttcctagttgtgaaagaaccttcaaaatgcaatttatgctgaaataaatcagaagcaacatggctgactctctctggtctgtgttcttcctgaccccatgaggatagacagtggtaactctgagtttctgctggatgtggtgatagctgaccatgttctgtgatgatgtctacaccagtgagtggac

SEQ ID NO: 136560 - DNA, 284 bp, Homo sapiens
gagatatggtcccattgtgaaccatagtgaacaacattgggctttggaactagaaggtactgggtactagcttttaaaatgttttataaccttggccgtatacttaacctcattacacttctatggtatgtgactttaggcagatttcttaactgttctgaatctcagtttcctaatcctaaaaattatgataaatatacatattaaggatgaaatagaattcagacattttatttaaataatatctgtaaatgacttgctgtgtccaacacacaagtttggaa

SEQ ID NO: 136561 - DNA, 522 bp, Homo sapiens
taatcctttaaatatgctgttgattttggtttgctagtattttttagaatttttccatcaatattcatcagtaatatgtgtctgtggcatttttttcttgtagttctttatctggcttttgtatcagcataatgctgtcctcatctaatgagcctgaaaatgccccctcctcttcagttttttgggaagactttcagaaaaactagtatgttggtgcttccttaaatgtttgctagaattggccgggcgcggtggctcacgcctgtaatcctagcactttgggaggccgaggtgggcggatcacgaggtcaggagatcgagaccatccttgctaacacggtgagaccccatctctactaaaaatacaaaaaattagccgggcgtagtggcagacgcctgtagtcccagctactcaggaggctaaggcaggagaattgcgtgaacccgggaggcagagctttcagtgagccgagattgcaccacttcactccagcctgggtgacagggcgagactccgtctca

SEQ ID NO: 136562 - DNA, 162 bp, Homo sapiens
ttcgaagatcatcatcagacttttctgctctctcttgacacaacagcctcaagcccccacacgtcactggctgctactgaaacatgctcacaagaaatcctgaaccatgctttgagccagagttaccaaaatggacgaggtatttctcaggagaaactgtcg

SEQ ID NO: 136563 - DNA, 408 bp, Homo sapiens
gtggccacaggtctggaagacaaggtcctagccaaaatcctgccgtcttactattttctccagagattggtaatgatcgtatgtgggatataaaaatattttttacaaaagaaaagataaatattttttccagggaaactgtaagaggcagatttgaaaaggacaaaaaccctaggtgtttcaggtagattctatgatagaattgtagattctagattatttcagttgcagttgtcaaacaacaggcacaaactggctttctgcaacagaaaaaaatccataaaagcttcaggtatagttggatccaggattcaattgatgccatcaagaaagtgtcgggccaggcatggtggcttacgcctgtaatcccagcactttgggaggctgaggcaggcagattgtgaggtc

SEQ ID NO: 136564 - DNA, 221 bp, Homo sapiens
gtgttcagctcatgattatgtattcttagagataaacacagtgtagttaaaaattgtgttctgttttttacacaagaaaattgtgctctttttacagtgattactgtgcacatttgctacatattggaccattggaatgatgtattatgttcttttaatgtccctgcattaaacatcgacattgtttctctttttttttttttttttttttttttttttcc

SEQ ID NO: 136565 - DNA, 172 bp, Homo sapiens
ttggagacagcagggaaactgggcaggaggcacaggtatagccatggtgcaggcatttaatttcaagatacctaagacctggggcaatgagtttgggggaagggctccagtcaaaatcccagtgtctctctttctatatatcctgtcaccatcacccatttcctactcacag

SEQ ID NO: 136566 - DNA, 200 bp, Homo sapiens
caaatggctacggtgcagagttaatgtcgtcattgggcactgcgaaaaggagactgaagaactgacagccattcctcagatggcgtcgaggtgcagggttgactctggatgttgtaatcagaaagagtgttggttgcctgcagcaatcagctggttgcctgcagaagtgagcctcttctggtcagggggcatactttttt

SEQ ID NO: 136567 - DNA, 281 bp, Homo sapiens
acaaacaaacaggaaatcaaaaaaagaagtggattgggaaggaggtggataaggataaggtgaaatttgatggcccaactttagacattgagtttgatataaaatagcagttaatatatattgctagttcagcaaaaggaactaaatctagtggaggcccatatcaaggaagagggaagaggaagttgagacagtcaccagaaaagaggaagcccaagccactgtcccatcacttactctaggggtcaacagagggaggtattcaaggacaaagggaatgt

SEQ ID NO: 136568 - DNA, 421 bp, Homo sapiens
ctgttacgctgaaaagtcctccataccagtcacctctccaaagggagccaaatggctgagtgacatccttgctaacaagacaacacagaacggagaaactgcaaggaatttggggaaggcatttgagtttcctcagcttcatgaaaaataagtgcagaacaaaaggtcagagcaacagctacaagcacatgtacattttagtgaacgtgaggggatgtggtccttgccggccacacttctgccctcaaatgcagaggtacttgaaacaccagttggctgtatgaacgaacaaaggcatgacaaggcttctgcaatcagtccaggtgctggttacacggctttggacgggtcacttaaccttgattttctcatctgtaaaacagagacactaatatctacttcacagagttatgagaactaa

SEQ ID NO: 136569 - DNA, 325 bp, Homo sapiens
cttgtctgcagtagtgatcatatgaatctctatgtgataacatacacatacacacaaatgaatgcatgtaaaacaggtgaaatttgaatatttgcacacccatgttcactgtggcattatttacaacaaccaagaggtagaagcagcctaaatgtccttagacaatgtatcaaagtcaatttcctagtacaaaagttatgcaagttgttatcattgagggaaactgggtgaaggaaacataagatctattacttcttaccactgcaagtgaatctacaatggtctcaagtaaagacttttttaaaaagagagattttcagattgg

SEQ ID NO: 136570 - DNA, 558 bp, Homo sapiens
tatacacatacagggctggggggagtggggatataaatgtagaaaaattgtaacaattagagtgtctgaagaccataagggtgttcattatactattctattttcctgttactttggcatttttaaaggaaataaataaaacaaaatttaatttctcaaatggagttgaaaatgcattgctggattgttaacattattagttttaagtatttttggcaacctacaaactcatgcaggtttatctctctctccaaaatttatcatagttaatctgtaaacaaaaagcactcaagaaatgttgattgaactaaattgaattggttttaattccaaacatttttcccaacagtctttttagtactgaattctcgttaatgccaatatttttgttgtgtttgatctactctccatgaagcactgcagaattcctaatcccccaatatattacattcccatcagtttaatcattttccctcattaaaatgcattaaattttggtaataatttaaattgtcaacaagtatttaaatctagtctaataatccctgtggaaaagta

SEQ ID NO: 136571 - DNA, 1582 bp, Homo sapiens
tctgggaatttatccaaaagaattgaaatcaggatatagaagagatatttgcactcttgtgttcattgcagcactattcacaatagccaaatgtgggaacaacccaaattctatctgcagatgaacagataaagaaaatatggtatatacatacaatggactattattcaacctttaaaaagaaagaaatagctgtcatatgcaacaacagagacaaaacttgaagacattatgctaagtgaaataagctagtcacagaaggacaaatactgcatgattttacttacataaagtacctaaatagttaaaactcatagaaacagaatgtgagcatggattgggcgtgaaccagagggatttttgttttttgggtttttttttgtaaagaacagtattgggataattggcaacatgtgaataaggtctgaatattagattgtaattctgtatcaatgttaatttcctggttttgataattatactgtggttatgttagagaatggccttgtttttaggaaacatttaggagtaaaggagtattgtatctgcaaacttaactctaatggttcaggcaaaaagtactgctgtgtatatatattgagagagaatatggaaaatgtcaagggtcacagaatctgagtgaagcatatatagggcatctttgtactattatttcatagtagaaactacaaaaaaaaattgaaaggaattgttccaatatgacagttactgtttcaaggtgcttttatcatgggtagttttctttaccagattttctataatatagccttgtgtatattttttggagaaacaccatatgtaatcttacagttatgccagacatatacctcagacagtgtactttaattgtggtagttgtttttggactcgatccagggtatagtattatagtgtcatggcttggatttttaattatgattccagccaagacatcgacataaatataccaaagggaaggaccctgagagtgtgatgcagagaccagtggtgtgatgttatacaaggtcttatttcctacattgttggttctcactgctggcttcatgaccctccatcataatccaagttatctcaagacgtataactcttaccaacccagtttttaaaaaatgtattctcagtgacattcttagaaggatggagcacatattcaagcatataatagaatgccgtataactttagaaagtttggtagttacagctcaaagctatctggagatgaaattaaatatgtgaagagaaattataaataaaactgccaacagtgactacatctggagggtggaactagcgggggaatcagggactttctcatgtctatttaaaattattttgaataaagattatatttatctgatataaaattattaagatataaaatagtataccatggaaagtgtcccttctcgctctgtcccccagatactctgtttccctccccagaggcaaccatgattaactgtttctggcataactcccaagatactggatgcatgtaaaagcaaatgcttattttttcctgtttttctacacaaaaggttgtccattattgtcactttta

SEQ ID NO: 136572 - DNA, 487 bp, Homo sapiens
cagggaacgcgggaccggggtggaggcacgaaccgtgtgtggggaggaaaatgtaaaccactcttttggaaaggaagtaataacgtccaatttggccgggcactggggcttgtgcctgtaatcccggcatgctgggaggctgcggcaggcagatccctttagcccaggactttgagaccagcctgggcaacacagggagatcctcttacttttagtttttttaatgtccaatttgcaggatttagaacggacaggaccaaactccagataagagtacgtgaactgggaaaagagcaggcagagccaacaggctcaaaagtctccgcgtcattctagaaggtcaaggccaggcacaggggctcatgcctgcaaccccaggatggggagaggccaaggcaggcgggtcactcgcgcctgcaaccccaggacggggggaggccgagcgggtcacttgaaccctctgaaatccaagagtttgagacctacc

SEQ ID NO: 136573 - DNA, 277 bp, Homo sapiens
ctttcctgcagtctaggcgtggacgggggcgggagagtgggcggagggtgtggggccccactccacagccccaggtttgctgctgcgctgtctgcttggagattaaaatgaaacgtgacttctaggtgagacgaatctgtgtgtctttgcattcctgagaccctcataaatcgattctgcagcttctccggtggatgagtcgtgcccagccacaccctagcaaaataccgtgggtcacacaccacctgcatttctgagttccggttaccatctcact

SEQ ID NO: 136574 - DNA, 403 bp, Homo sapiens
caccatctaccttctcaccgccagcctgtaagagccttgtgggcaggaacccttgagggagacagtgagggaggtttaccacttcaacaaatatctgagcagcaactgcatgctaggagtgaataggaggaggtgtgagattcggaaccaggagttccgcgttctgtctgagccttcctcatcccctgctgctgggtctcacacaactccgtctctctccattcttcagtccctctccacatctgtacaacagggacagtcctgaagaagaggctgtcagagccatgagatgagatgggagaagtggaatgttttgaaatttcagggaatcctccttctctttctcctcctttgtaaatgctttgtccctgagggtccctaaaagctgacagtagatcacgcc

SEQ ID NO: 136575 - DNA, 370 bp, Homo sapiens
gttagaggaatctttccataaggctccgtctttggtttaacttttctgttcatttccttctgggcctgaaagatgtaagttgatgaccctgattgccattttatcctcaccctttcagacagacccaggaaaaatcattaggagggatgctagctgtaccagtctgagggccaaggacgcatgggattgcaggctgtgatgtctacaggtctctgaagaagagctgagtccacttctcaggataccagcccattccatggcttccctcaactcaaggacattcttcttctggtcattttcttcctcaaaattttcttttctccttcattttattaaagccaagtcaaactccaaagaaatgcagaggacc

SEQ ID NO: 136576 - DNA, 364 bp, Homo sapiens
gagtgcagtggtacaatccagctcactgcaacctccacctcctgggttcaagtgattctcctgtcttagcctcctgagtagctgggactacaggtgcccaccaccacggccagctaatttttgtatttttagtaaagaggaggtttcactatgttggccaggctggtctcgaactcctgacctcacgtgatccaccctccttggcctcccgaagtgttgggattactagtgtgaactaccctacccagcctttagtggtaattcttggaattccattataaaaattcctttataaaatattattgaccagaccttaaaatccaacttctaccaccaattttcgattaagtagtattgggtaggg

SEQ ID NO: 136577 - DNA, 323 bp, Homo sapiens
tcaacatagtcttggaagttctagtcaggtcaataaggcaaaaaggaactaaaaagcacacacatcaggaacgaggatatacactatttctatttgcagcaaatcttaaaaacaaatctacagggccgagcgtgttgtctcacacctgtaatcccagcactttgggaggccgagacaggcagatcacatggtcaggagtttgaaaccagcctagccaacatagtgaaactccgtctctactaaaaatacagaaaaattagctgggcatggtggtgggcgcctgtaatcccagctactggggaggctgaggcaggagaatcact

SEQ ID NO: 136578 - DNA, 260 bp, Homo sapiens
aaggacctttatataatttcaacaaattcaaaattctaaatctccatagaaacacctttatgaggaatataaggtaagaaatatttctgcagtttatatggatttaaacattttaaggtcaaatcattgtaaaatgtcatgtaggaagggaaggcctgaagtctcaatctgggtttcaggcagggaacctgaaaacctcacaaagccacacataacactattagctcaaggaaatgtttctcactgtaacaggaaaaggg

SEQ ID NO: 136579 - DNA, 500 bp, Homo sapiens
gcccatgaaacccttagcgtagtgcacaacacatgctgtgtcttctaattacggttctgactagatcctgcgttactgaagtcccccatgctccaggctttgagatcataccctctggaactttggaacttcagtccaaccactttccctttctgggtctctgtgtttctgcctgaaaaggagacctgtatcttgccaaagaagttctgaaatctctgctcaccctgacaatgactccaaaaatctggggctcccagacttggctctctgcctaaaactccactcttgcagacatgccgtttggggctttggtgcctttggagactctcctttaaacacaagcgccccaggatcggatcacaagttgttatcagtcattcacaccttagcaggaaagactttaaagctggcttctccatcccactgtgcttctcactcctaggaggcacttcttgacttgctgaatgaattagagacctgtctagctcccaagtaccaag

SEQ ID NO: 136580 - DNA, 596 bp, Homo sapiens
tgtgatttccctattttaatgaatggtaggaagcaccatatcatccaggttttacacactggaatcattgattccgtactcccctggttgtctaatctagtgaagccacatagtctgctagttctccatgtgcagcctgcctcctttccttgctctcaccacggtcaccatcactgaccatcagaccttgttgtcatactagaggctatggtggtctccaggctttttgtctgcagcctttgccttctctgttctcttatctgggcttgctggacctcccggtctacttttatatctaccttttggtgttgggtcattttttagggtcccttctctgaccttggaaaatcctaccagtatttccaatatggctctgtcctcttctctgcttactttgcccttttatttaggtaattttattcactctgagtagatgaatctcagggttttttttctactagcccagacccttcctctgagaccattgtatgtcctcatttgccttgaatgtctcatagatacttaaactcaacaggtcccaaaatgacatagtccccccacaagcctgcttagtgattcctatctgaggaaatgcc

SEQ ID NO: 136581 - DNA, 546 bp, Homo sapiens
agagaaaaagagagaaggtctcagtaaataaaatcagaaattaaaaaggagaccctgcaatgcaaggctggttcaacatacacaaatcaataaatgtaatccagcatataaacagaaccaaagacaaaaaccacatgattatctcaatagatgcacaaaaggcctttgacaaaattcaacagcacttcatgctaaaaactctcaataaattcggtattgatgggacgtatctcaaaataataaaagctatttatgacaaacccacagccaatatcatactgaatgggcaaaaactggaagcattccctttgaaaactggcacaaggcagggatgcccactctcaccactcctattcaacatagtgttggaagttctggccagggaaatcaggcaggagaaggaaatgaagggtattcagttaggaaaagaggaagtcaaattgtccctgtttgcagataacatgattgtatatttagaaaaccccattgtctcagcccaaaatctccttaagctgataagcaacttcagcaaagtctcaggataca

SEQ ID NO: 136582 - DNA, 479 bp, Homo sapiens
aattccatgtttgcacagctcccatctccctggaaagaggaactgatgtttgaggggacagatgtgggtcactttccctggcagtgccctctagccttgctgccttggctttctgaccccttccaggcttcaggggcctgggagatctcatgcctcagcccaggaaacatttaatagggaaagcagagacatgtcatgtcagccccacagacaagaatttctagagcacttgtcctgttgttccttgccccgacattactcagtctgggccatggaatccatccaataaacacagcaacaccctatgctactgaccaagcaaagcttgcccctggtaccaaagagctaaatcatgaccaaagtgtgacatgaatgtaactgaaatgcgggttagttgctcaatgtatgcaaagtcccacggacaagagtaaagtctgataccaataaagtgaatgtattccaaagctaaaaaagaggag

SEQ ID NO: 136583 - DNA, 549 bp, Homo sapiens
tgccaattatccctacctttatttaacattatttcagaagttacacttaaggcagtatgacttgaaaccaaagcaaaaagtacagtcatggtgtctggctcggggcaaaactgtcattatttagagatgatatgattttctacttagaaactcagtcgaatcaactaaacaacatcagaactaaaaagagcatttagtaaagcagtcaagtacagtctacaggttttctttgaagcagaagtcaccctaactaccattttatctctagcaacacaataaagaaaaatgggtggcaaatgtgaaacttacccattttagttaccactctaaatttctaaaactctttagttgtcctcttttctctctccttcttattgcctgtaattgggctgtgctctctgctagaacattttcagtgttaatctaagcagtagaagcgccaaaagttttattttaaagaagtttatgagctatctagttggaagtttgggcatgggtaaggaccttttcttaaaactgtctgcttagagctttccataggttgaaaaa

SEQ ID NO: 136584 - DNA, 359 bp, Homo sapiens
aaaattctatctactgggtccaccctcagaagatccatgaaggcagtggccaaaagtctttatttttgctcagcagtgtatctttggtgcccagcatgtagtaagtgccttataaatatttgtcaaatgaatgaaaccaatgaatgaatatttggtagacaattgagtgctagttacagcttaagctcctaaaccggtaatttcacattgagaaacagtctagttcttttggcattatttatattcttcagtttaggtaaaactagtaaacattttgacccaagatcttaaagtaaaacgtaaaattgtttattttcacaagtgtcagtcaaatctattatgtcagagagacaacaccc

SEQ ID NO: 136585 - DNA, 139 bp, Homo sapiens
ccccacctcagcctcctgagtaactcagcctacaggcacatgcccccacactcagctaatttttatttttgttgagacaggatgtagctatttgctcaggctggtctggaattcctggcctcaagtgatcctcgcgtca

SEQ ID NO: 136586 - DNA, 293 bp, Homo sapiens
tcagcgtcctccactgctgccagggtcacgtcaagctccttagtctggcattgaggccccttcacagtctgccctgcctgcctgtccatcttgtctctgctcccttttgatttttaagtttgtactgaaacaaaaaattgcatatgtcatgtctatttttatgaattttcaccaagtgagcacacccatgaaaccagcacccagatccagaaatagagcattaccaggaccccagaaatcctcctcatgtcctacttccaatcgctatcctcctcctcgtcaggggaacagct

SEQ ID NO: 136587 - DNA, 269 bp, Homo sapiens
agatagtctgatttaataaaaatgtattactttgtactttcaaagggtaggtatggacataaggaaactatttctgtcccatttggtatttattgctttgaacagacactgaattttaatttatagtaattctaggaagggaagataagttctgtagaaattacataaataaagtggcctcattggcctttctcattttggtcattatttaggatcactcacatatagtaaaatgctgactaaatcctcttgacccacaaaaaaaaatt

SEQ ID NO: 136588 - DNA, 320 bp, Homo sapiens
ggggttcgtgtgtcttcagcccacttcatccaagaaggcaactcttgatagtcaggctcctctccacctttctcaagtcttagcattcggacataaggaatggactggggccgctctgcatccagtaaattgccttcatcctcacctattctgggtactgtatgtgacaatctcaaagtattttaagatgtagggtttactgctattcaggtacggtgaggccaacagttaaaagacaattgccactgaaaaagtctgttactcacagtccccaagaagaggtagtgcaccatgccaaggggccacacggagaagaacca

SEQ ID NO: 136589 - DNA, 368 bp, Homo sapiens
gggcagggtgcaggtagaaaaggcatcacatcttttatgtaatggatgcagatatatgtcacaagaacccctgtggacagggctgaggtgtttggcccagtgaaatgtcacaataaccaaaatatgtggttgttagacagaagagtcacatcacctaagttctggttccagtgatatgtcacaatctttccttttgacagggatcagagaggagtcacatcggttaggtgatgaacaaaaataaatgtctcaataaccccatgctacctgcctgacaagcgcctatagcactcgattaattcttgtcaccctaacaggtgaacctcagttacgcacccttactaacattaacgaaaatgacctcaccc

SEQ ID NO: 136590 - DNA, 314 bp, Homo sapiens
tgatgtgaggaggggagagccctgtcccagagggaggcagtggccgagggcagggcacggccgtgagctgagactccagtgtcctcagcctgtgtcttccagcccctcctcggcccggggccctgaggccacccagcatttcctccccggcggccactgagcatgtggtcgtccagagcatcaggcctcaaaggcacagccgtgcccacagcactgtggcccagggccaccctgccaagctctccaacctgtcactggcaagctgggagtgccagtgtaaggtaccaggtcctccctgaggggtccacagggca

SEQ ID NO: 136591 - DNA, 281 bp, Homo sapiens
ggcctcccaaagtgctgggattacaggtgtgagcaactgcgcctggcctacttaccctcttaaagcaagtaaaatatcaggcaaaacatgaaataactatttttaagacagtgggcctcaggcattgaattgtgttgattcatgagagactggaaacaaatgaatgctacagttctaccagtttactgcctagagagtttccagactgcagagcatggagcccagtggtcttcttgagttgaggaaatggagttaggaatctaaagaagccaagacagcta

SEQ ID NO: 136592 - DNA, 277 bp, Homo sapiens
ctgataaatcaggaaatatggtcatactactttgaatgtagttatctattaaatgtgtctcttgtcattcaactgtaaagctgtgttaagtttgagccttatttctcttagcttcctttgttgcctggaattgtgtctggcacgttgtggtggcagaagaaatgttagtgcccctttaaaaatgttcatttatttaaacattatactatattgatgtagaactcataccatcccatttggggccttttatgagccattttctcagtattacaaatgt

SEQ ID NO: 136593 - DNA, 688 bp, Homo sapiens
ggaacttcacatttcaatccagggctctgacctggtcttggcatgctgccaacttcttgcgacaatctggctgcccaccgaggtagaaaccacatctctttcagccttggtctgtggcatatggtagtaggaacagacaagagaaaccaatttattgagggcttgctttatgccagttttgtgctggacactttgcatattctcttccaagtcttcacaatgatgccgtgtgattattgtatctgatttatgtgtgagaaaacccaggctgagaagagttaagggacttgtagtcaagtggcaggctgagatttgaagtcaggaccacctgaccacatttcttctgctttttctgctgcactgacctgtggtggaaatatttcttggtaatgtgccttccctcagctattaaaatagttttccggaagcatctgttggatgaccattgtggatacttgtagttacttccagttgcctcttaggtcagcaccttccggcccaagctgaggtcagtgcttcctgctggaggttggctcctggccttatttaacaccactgtttcctgtcactccacagcttggtcatctactctgccaaggaaatgggccagtcttcattctctgcacttagccaactgggggcttcctgggtcttggctcaccctggagctgttaacacccattttcaa

SEQ ID NO: 136594 - DNA, 255 bp, Homo sapiens
acggtgacagcttctgagtagctgggattataggcacccgccacacaccatctaattttcttttcttttttaaatttttttgtagaggtgaggtcttgctatgttgcccaggctgccttagcttcaagcgatccttctgccttggcctcccgaagtactgggattacaagcatgagccactgtacctggccaggcagttctttaacataaacaacgtgtgctgtgggtctggattttttttatgctaacattctg

SEQ ID NO: 136595 - DNA, 704 bp, Homo sapiens
acttacctacacagagagataacaaagaagtttgtttgtttgtttacttatttattgaagactgagtcttgccctgttgcccaggccggagtgcagtggtgcaatcttggctcactgcaacctctgcctcctgggttcaagcagttctctgcttcagcctcccgagtagctgggattacaggcatctaccaccacacccgtctaatttttgtatttttagtagatacagggtttcactatcttggccaggctggtcttaaactcctgaccttgtgatccactcgccttggcttcccaaagtgctgggattacagacatgagccatggcgcccagccaaagtttgttgatttttatcttcagctctagaaagagggaaaaaaagtcttccatataaattttcaactgcagttttttgttttcaattttcatcatgttttgaggtatgaatttatacttctcccaaactgggaaattaacataacagccacacctgggcttctggttctggtaaaggtcgaggagctgtattgggcttaccctcttgccaataataataataaaagatctggatggaatataaaaacaaaaataggtagaaactggaggcaacacactacttgaaacaagggaagtgacctggctgagctgtacatttaactggtttatcctgcagatgtgctaggttcacaccaagggaatagag

SEQ ID NO: 136596 - DNA, 376 bp, Homo sapiens
tgaggggaaaggtatgtgtttgcatcttctgttagcgatttctgggattctgaatcttcactgtcacttagttctgtgcagttgtgggagatatacccagaagacacaggcaaatacaacctgggtaactagctaggggtttgttcccaagtccctatcttatatgtcctggcgagctgccctaaactacgtgtgaggaataaagactgtgttctttcagctcagacctgtgattcttgagtgttttaagagtcttttaaaatctatgaaccctctttccagcaagtcgtaaatgtacagaatagttttgtgtaggttttcagggaattcatgaataccactaaagctgttccagtagactgtattgggagtctta

SEQ ID NO: 136597 - DNA, 428 bp, Homo sapiens
gtcgaccatccagatacacctaaggtattagtaaagcggtgcattaagctgaaatatctggcttgtgcaaacttggggcatttgtaccttatgtagaattccaaaatctgcttaggattttccctgtccactggactgccactggcagggtctgcttccctgttcctgggttgagggagcagcattggagcatccctcaattcctgaatgaggaagttagttaaaagggcaatgtgagctgtagggccacactcatctaacaggtgagcttaagtttccattgatggcagacctatcagatgtttcctcccattctcactacttgtattctgtcattttgctcttatcctcccaaaatcatgctaagatttttttttttttttataagacagagtctcactctgtcccaggttggagtgcagtgatgc

SEQ ID NO: 136598 - DNA, 509 bp, Homo sapiens
ctggatctttatttagtcacctccagccttgctgggacagggatctggggctaagctgctgtggtctcggcaccctctgtccccacttcccctcgaggacggctgtttgaatattgtctagtgtgggccatttacccccgtgggcaggaggaaggtaggagggacttcaaaggagacttcaagggcccccccactgcccttctaaccttgcagattcccctctcgggcctgtttcctcttctctcaaccagcgatgccaggctgaggctgtaggttcgagaatcacgtaggtaatgggcctggcacatagtaggctctcaagaaaaggttggagcctcttgaggagtctgcctgtgatggatgcggagcgcagacccagcgcagtgcggcgattcgcccaaggtcacacagccgccccccccaattcggaccccgggcggcctgactccgggggccggggcttgtcgggagccagcgtgggggcgagcagtgtttggaagagcggccgc

SEQ ID NO: 136599 - DNA, 305 bp, Homo sapiens
ttgtgctgaacccagggtacaactcatggcaatgaccaacaaacagggtctctttctatgcacacagaaacgtctctccttacacagtttgtttctttattcactgagaagacatggatgtgcgcagatatatcttattttttcttagagctgctagaacatttatttagcagatactttcttgtgagtggcagcagtcttcaacagtctaggtatccattgtgaacaaggtgagagccctgtacccatagagttcatatattcatcagcaagacataataaagcaatcagtgggtcgggcctag

SEQ ID NO: 136600 - DNA, 287 bp, Homo sapiens
ggaaactgaggcaggggtggggtgctgacttggccaggtcgccccacccccagcagtcctgaccccagacccccagctctcccagcgcacctgccgctcactccatggaggttatggcccgggtggggtacaggtaacatgaccaccaaaatcagcggtgacctggcctccaccctctggaagctagcgctccagaacccccagcccctccctgggtttcaaatcctgccttgccccttccaggcttccgtctgtgaagccaagtgactcttcccactctgtctaca

SEQ ID NO: 136601 - DNA, 393 bp, Homo sapiens
agacagggccaccgagtgaagaggagtgtcatttctgcatgggatgcaccaccccagacaggaccaccgagcacacacattgggcggttgctcagggtcacccaccgaggggcagaatagagcctggagccgctgtttgctcccagccacagacaccgggcaatgccgcctctcacactgtcctgaaagtggatgggtggctgtcagacttcagtggatctatcctcccactccccgacataagcaaaacttcctcccctccatgcttcctcagctctaacagttctcagcatcctctcagctgtgcaaactgaaaactgcttgtcattctcaggttaaaatgcatccaccattcctgtgacacctgccgccaatattctaggtcatcgtctc

SEQ ID NO: 136602 - DNA, 121 bp, Homo sapiens
aaatgaaaagctttcagaaagactccagcaaagcaaataaacatgattataagctcaaaaaaggctttatttcagatttaaagcatgctggctgtccttggagcttgtctttagacctttc

SEQ ID NO: 136603 - DNA, 453 bp, Homo sapiens
ctcatctgtaatatatggcaggacaaaaacgtctcttaaaaggggggtgaagagaatgaaatgaggtggctggcgtgaagtgcttccccagcacactgtctagcccagggcagacaaagagttcatccgagttcccttcccaatacaagcaggcaaccagctagaggtcaccaccccagcccactctcaaggagctcttccctcatgccaggcattaccacacacttgacacggattttccaattcaatctttacaatccctagtttttcaaatgaagtcaaagctcacaggggttaagtcacttttccaaggacccagggaactgggatttgaaccctgaccacctgcctctcaagactacattcctgaccctctctgccaaggtgtacattaaaggacgcatcttcctccacactggacgcagagcccagcttccggctaaggagtgtggg

SEQ ID NO: 136604 - DNA, 335 bp, Homo sapiens
caccatgttgcccaggctggtctcgaactcctgacctcaagtgatctgcccacctcggcctcccaaagtgctgggattacaggcgtgagccaccatgcctggcctgaaattcgctttaaattacctcaggcaaatacagaaatgtccatggcttgataagaggatgctgaggcagcaagatgctgagatctcaggatctgggtgataggcggctggaagggctctgtgctatcctttcttcctgtggttgaaaatgttcataatttaaagaaggatgttaaggttcggagtgtaggacttccgaaaacattgcatctccagtgggcattatggag

SEQ ID NO: 136605 - DNA, 343 bp, Homo sapiens
agtactgtgatcctcacgtggtggtgacggggaggcagacattgagaactgaagggctccctttgatcattagccttacataggatgcctttaatgttgagctagattggaagcccaagtgactgctgaagtgcaccaaattaactcagaagtcaccaatttcactccatttatggaagggtattaacagggggttgagaaacaatttaaggaaatgttaaataatgtattatttccaaatcactgcatcatataattaacatcctacctgttgttagcaattatttataggtcatacagtataccaaaatcagccaaagcaataaatcacccagaataaggc

SEQ ID NO: 136606 - DNA, 217 bp, Homo sapiens
gatcctcccgcctcaacctcccaaagtgttaggattacaggcgtgagtcactgcatctggccaattggatacattcctgcagccaaattttaaattcttcctattgtgctatagtatggatgtgccttaatgtatttgacccaccccttattattgggcttattattgaacttatttccagcttaagtgatagaaacagtgctgtacatcctcctag

SEQ ID NO: 136607 - DNA, 578 bp, Homo sapiens
caaggctgcagtgaactatgattgtgccactgtactccagcctggccaacagagcaagacactgtctctaaacaaacaaaagaaacaaaagctcatctagagcttctacaatttcttatgcacaatggcattcaatcaaaaattgccaggtatacccagagtcagaagaaaaaagtggacaatagaagcaggcccacaggcctttcagatataaaagctatgaatcatggattctaaaataattgaataatatggtcaaggaaatatataacattcataagaaaatgtgaattattttcaataatcatttatgcttatttaaaaattttcctggagtttattttcttgtttgtctagggtctcaaatataccatctaatttatggaacttcccttttctttggcattacaattctggatagttattaactttgaggggtgggactggattagagaaaaggtactggctccatagcaagctagaaacttctctatagaaaagttatctgcagaggatgatattgctttgcttctgatatgctttggctgtgtccccacccaaatctcacctcaaattgt

SEQ ID NO: 136608 - DNA, 679 bp, Homo sapiens
gatgattttccaaatataagtacatactgcttcactctagcaattatcttaaggtaatttgaaagcaaacagtacatatgcaatcgctggacggcggctaacaaagaggcctctaaattgtttaaaaaggattaaaggcttttctacacactcacaaaacaattattgatgacgaaaactttagggtagagggactgtttggcagaagactgcatttaactttgaataatatcctgcaatgaatcaatacatttaactcccggctagtccacctcttcgttttccccccttgccttcccaccaacataaaactattcaataagaacacttgagcccggaaagttcaaatgctgcgtagacctacaaatacctttcgaatacaagacaggctttaaaaatagattttcactaagtttgtgcagaaattaagctctgctcaaatcaaatgcaaaagccaatcccttcagcaaacccatctacatacatcacatttcttacgtgcatcttcaacctgatcaaatatcttgtcttacaatttttttaggccaagtaacaaacggtagattaattcccgctaattttatcctctctttaagaagaatccattctatatagcattgtgtaaaaatgcagagcagacgaagcagtcctgttaaggacaggtttatatatatatacg

SEQ ID NO: 136609 - DNA, 417 bp, Homo sapiens
tttttgtagagatgggatctcacagtgttgtccaggctggtctcaaactcctggactcaagtgatcctcccaccttgacctcccaaagtgctgggattacagatgtaaactacagtgtctggcctttttttttcctttttaaagctactggccaccaaagcctgtctgtggtccctaggtcccagtttttccttgcactattggcagagaaggctgtccttgagagtgggcactcccacacatgctgctagtggtgccacagtgaggcctaggcctgcagctcccgggaccacttagctcccacggtggctcccgcagtcttcagggccctgcacagcctctcacagtggccatcctggcttccccaccactcccatttgtcattgttatgccataactatggtctatccactctac

SEQ ID NO: 136610 - DNA, 749 bp, Homo sapiens
agtgtagttgagtgttttgtagacgcaattgaatgtgaaaacacaaaacacaatatccaaaaaatgctgacaacacagtacactatagaatattggttaattaccctcatgatcgcatagctcactgggagctgggacttattaatacctccatgctcagcatcagaagagagtattgtaccacatattactagcctgggaaaatatcaaatatcagaattccaagtatggttcctactgaatgcatatcacttttgcagcattgtaaagttgaaaaatcctaaattgaacctttgtaagtcagggactatctgtatatttttaaaggcattttaagattagcaggtggtaaaattaaaactgcaaaaacaaaaacacaatcaaaaacaaaacaacaaaactttgtcgcggggcgcgccctgggcccctccagagaaatctttctctaacacccttcgcgttgtgggcggcgcgcgggcgcccccgtgtggtctcactgcgcaacccgtgtggccatatcagacttgtgtttccccaagagagaagaccctgtgggaccatacaactatcgggtgcttggattttctctccccattaaaaaagagccgcccgggggggaaacccagacgttgtcccttggaaaaacattcccacaattggaggcctccaggaggggctacatcacgggggacttctttcacacacgggggggctctcgaggcaaccctcatattatcaatttacgccag

SEQ ID NO: 136611 - DNA, 526 bp, Homo sapiens
ttaattctcaactgggatgaagacatcttaatgttaggatacatgggtggttgtccatattccttgcagtatatgctcctcttaactagaatccttagtgtattctttccaccaaagtagtggaggtatgttcacataatctgctattgaactgcaaaaacttttacagtttcagagtttgagggaacccaaataggaaaattgatggagtcattttcctctgctggtgttcaagtcagatttgaaactcagacactctcagatctgttcaacagtcagtaaaaagtgcatttttacatagtgtttccctttagttttgcctaccctcttgattttgtacaatctagaatgtatgtaactcatgcgtaggtgatggaggcgctttttttcttagaatacttacaattatatatttggttttgctttgactagcaataggaaaatagacaaatacaagtgtaaaaatgagaaattttaaactcaaattataatttgtgttttatagtcgtttcataagtctgttgct

SEQ ID NO: 136612 - DNA, 512 bp, Homo sapiens
gtctttggacatgctgtcttgtgtggctgagacgtagatcaagagaaatttgtaagaaagacaataaggtacaaaaatcgccgaagctaatgtcaagatggagataaatagatctatatttgccatatatggtagtaaaagaaaagtctgtgcaaatttgctcgacatttatggacttctatgattcatctaccagggccagcagctccagccaagagatatagaatgtcttcaactgtatttctttcctaaattgtttcattacaaagaagccatgttgtgtattcagaagaaaattccaggaccgcatgaaagtcactatttgggaacaggcctgagaaagcttgcttagaggaattccaaaagtattcaaaaggcagttattgaccaaacacataataattctctaagcatcaacaattttccatagatccaagctcacatatacagcgtattttctgtggctagtcactccagaaatagagggttctctgctttcttgactgattgac

SEQ ID NO: 136613 - DNA, 874 bp, Homo sapiens
cttcctatattgtttgacctcatggatacagttttctcttacttagttgtatgtgagggatcagagaagttcagaggtagaagggactcacttaatagcacgctctattttgcagttagggaagtcgagtccagagagaagatgatgttcatggagagaaccgaagccagaaggggaaccagagcgcgtgccttagtgcctccctggcgttcttcccagcattgcttgttgcctcctggacagataagcacctccgtcttcattgatgacttgggggccaggcacggtgctggactgtagtgctaccaaaaaggactgatgagctatagtccgtgggcttggccctgccctgctcctggttttgtatgacctgcaagctcagaatggattttacatttcctgattttggaaaaagaaaaaaatcgggaggaatatttactaacgtgaaaatataagaaattaagatttctgtgttcacacataaagttttcttggaacacagctaaccatccattactatgaatgaatggagctatccattcatttacttccaccaccaatcccggctaatttttgtatttttagtagagacagggtttcaccacgttggccaggctggtctcaaactcctgacctcaagtgatccacctgccttggcctcatgcctggataatttagaaaaaaacaaaaaaaagaaaaaaaaaacgtgttggggacggcattagggccctagaggaggttgtagaacacactcgtggggccggggccaaggaggatagtgacacggtgcaaacgggtccaaggaaacaccggcagagcacagggcgggatctcagcaataaaaaagccgggggcacgacgctcggagacaagc

SEQ ID NO: 136614 - DNA, 529 bp, Homo sapiens
aagaatcggcgtcaagaacacaggtcgatagcctcttgctagctgatactatcactctgctattcaatacaattattggtataatgcatagttatgagatcttattttacatttacttaaaagtgtccttcactgctcctaggtctacttttcagtattatttaattctaagctttgatgaaagggtgtggttagcactgacgtaaagttttgttgagaactatgttcctcaaatatgagtatacttaagaagtcttctcttaaaccattacatcactaaactacaaatacttataagcagtcatcatccaattcaggatggcaatttatagtatagttctgtcagctacacccacttaccacaggcagagagcacaaatgaattattaatcagtttgtatcttgatgcactgtgcaaaataatcttaccatacaaacgtgccttttcccaagcctctttgctaggatttctcaggtctaaattagcatcagcaaatttcctctctgagggccaaggctatcaattcaa

SEQ ID NO: 136615 - DNA, 799 bp, Homo sapiens
tgtcaaagaaccacgtagaaaaatctaaaactagaaactacaggaccacaacattacatactcattagaaattcactgaaaattcattaaagacagtgagtcaaccatagctagtgagatgattaagagccaggttatatatataggtatgtggttctatacctatatataggtatagaatataggtatagctatattctatatagctatagatagatatagatatagctatagcatatattctacatacctatagaatatagattctatattctaggaaattacctcaaatacagcaaagagggttaaagagatggcaaatatgagaaattcagatggaaaatagagttagaaggcccaatatacatttctggaatgagaattgcagaaagaaagattcaagggaatagaaaagatgcagtctccagagagaaaatgagtaggaattttaaaagtggatgaaagatatgaatcctcatactgaagaaacgtaccaaattccaagctgcataaactcagataaaaacctcatctagacacgtcgaggtaaaactatggaatataaagcacaaaaagaaaaatctcaaaaggtaaaaagacagattgcctttgaaaaattaagataggaaaaaaactttttcacaaggagaaatttgtaatggtcactgtatctttgttatagcagaaaatgaaaacctcttaaatgtatacatatatgagattgactaaataaactgtaatttatgtttatatagtgggatatatagcagttaatatgaatgaacgaactatgcatata

SEQ ID NO: 136616 - DNA, 415 bp, Homo sapiens
tctgcccagtaggaaggagtctatgatatcatcatcaagagatgtttcttcaaaggctgcagctcttccaaaaacacctagactgtaagatccatgagagaagggaagactgtagctatattattcattgctacatctccaattcctagcatagcacctggtacatagcaggccctcaataaatatctgtgataaatttccccaccttgcagaggtcctttttctgcatgtaacaatgcttagattagaatgttccactcccagatcttcccacaactggtgccttctcatctttctggttatcaggctcaactgtcacctcccaaaagaggcctcttctgatccccctgtctactacagtggccactcccaccctctctttcacactgttttatttccttcacagcatgaatca

SEQ ID NO: 136617 - DNA, 225 bp, Homo sapiens
ccccgaaattacaaccatttgccaaaaataccaaaattgtgaccattttgctacattgcccccctccaactgaggcatctgagagtttcttataaacatcatggcactggagccctaaactcgcccacagacacctgagagcacagccgtcttcctcagtcccccccgggcagggtgcgctgccgtcctcccagtccgcccccaccgggcagggtgcgctgccgt

SEQ ID NO: 136618 - DNA, 458 bp, Homo sapiens
ggaggtacctatgggcttggccttgccccatgcatgaaggtgagacagcagattagcaatgattccacaccaagtgtcactgtactaactgctctttcacactctggaacttccttctctttacctacaccaccttcatacatgatctgaccatccctgcggttttagacgccacctaagtgttaatgactccctggtccaccagcaccttccttgccctgaattttctacaatatatgttgataggctggagcttgaaagacacagacatgaagagtcagccactagcaccccactcctcaccacaaacagatgaggctaatagatgatagaaacctctccctatcagctggggtgaagcctcatagtgttttcagagcactctagacagttacaaccaaccaatcataattgacacatgagctgaattatatttgctatccctagaggaataggta

SEQ ID NO: 136619 - DNA, 424 bp, Homo sapiens
actcctggccaaagtattgggattacaggtgtgagccaccacacccagccagggtatcattattaagtgtagtaagattgatggtgccagcactggctggtgttgacttgaagactcactgaaagactgggactggcagccatgatgcataagggcagaatagcctgggggttgtactgcccagtgatacttggggaaaggttcaagatctggatttgactcttgtgccaagcttccaagaaacctaggttcagaggtaagagcacctttcctatcagctgcctctgtggggacatctgacactttcaacatccacccccttgaaatactcttccctttgattctgtgacaattatctcccaggttttcttcttcttcactcgctgttccttttcaaagattctccaagagctctttttctact

SEQ ID NO: 136620 - DNA, 148 bp, Homo sapiens
tgcggttagcgactctgaggatcccgggttcctttgtctgaatatataaccagagactacttaaacaagaagaacctaaaatgtagtgaattaagaaatttattttcccatgagcagagtgagagcccattagaggtcaagggaaata

SEQ ID NO: 136621 - DNA, 193 bp, Homo sapiens
aagtgctgagattataggcttgaaccactgtgtctggcctaaaaaaattttgttttaaattatttttgtctcctatggtcttgtctgaaatcaatactatgagttgaatttgtggagaaaaacttactctagaaaagtatagcataggtgacatcagggttacaaataagtattagaatatcagttctagtca

SEQ ID NO: 136622 - DNA, 750 bp, Homo sapiens
tactatctttacaacactgataggaatcaggaaatatttcctttattaaaaactcacagatgggactattagctagtctgtcctgcttatttcacagatggggatttcagggaccagaacaaggaagcttctttactcttgctataccataaaactgataccaattatgtttatgtgatataaaagtagtacatgttaattctaaacattttgacaagttcaaacatacataaaggagccaacaaccacatgaaaagataacttgaagaatcattaaatgtaaatcaaaaccacaatgaggtattacctcaaacgtatgaggacagctaatataaagcaaagcagaaaccagaaactaccaaacggtgagtatgtggagaaactggaacccttgtgtgctgttagcgggcttgtaaaatggtgcaactgctatggaataatatgacagttcttccaaaaattaaaaatagaatcacggcatgatctagtcattttacttctgggtatatatccaagagaattgaaagcagggtctggaagaggtatctgcatgcccttgtttatagacgcaaaacccaaatgtccatcagggtattaatggacaaacaaaataagaaatggaatcttacccaatcttaaaacaggaaggtaatctgtcacattctacaacatggatgaacctcgaggacattatttttagtaaaacattccagtcacaaaaaatcaaatgctgtatgatttcactaatat

SEQ ID NO: 136623 - DNA, 413 bp, Homo sapiens
ttagtggctcatgcctgtaatcctaacactttgggaggccaagaagggaagattgcttgagcctaggcatatgagactagcctgggcaatgtagtgagaccccgtgtttacaagaaataaaaataaacctggcactagcgtgaacctgtagtcccagctacacaggtggcggaggcaggaggatcccttgatcctaggaggttgaggctgtaatgagccgtgttcacaccactgcaattcagcctggatgacagagtgagaccatctcaaaaataaataaataaataaaaagaaaatccaagatgagtggtttcgaactatgccagattctatgtgtgcgtgtgagtggttccctgatcttctgttccttgtagctttgggaattaattgtggatctgtgcctgggctttcag

SEQ ID NO: 136624 - DNA, 237 bp, Homo sapiens
aaaaaaaacagaaaaacaaccaataatcactcttgcacacactcacacagaagctgacctgagtcttgtccagaatgattcatttgtgaaaagcttatcaaagaagtaacataccaacactgcccattccctagccatccatgtgaagggacgctgacaaaaatctaacacaggagttcttaaacttcagtgtgctggagattttaagatccaaccacggagattttgattttgatg

SEQ ID NO: 136625 - DNA, 1006 bp, Homo sapiens
aaaaaaaaagaaaagaaaagaaaagaaaaggaaaaaaaatgaaaaagaagccattgaataccctattgaccataagaaaaagcagggcaaagctggtcaacggcaacccagacactgaaggaaaaagaacatggagaatgacaaaagcccagagggaggagtaaaaggacacaaacaccattctcagggaccaggactgggcgccgttttcagggaccaggactgggcactaatcacagaactgtaacaggcgccccatgggaatgaccaactgttagacggggcctgcagggcagcacttccctcttgcctcccaccaaagcttctaaagggaaatgtcgactgttttcacagcagtcccctcactgcggctgagtttgtgggctcagatgatagctcacaacaacctgattcagtccccactgtggctgtgtgtggggggtcagatgacaggccaccacaacctgattcagtcctcactgcagctgagtgtgtgtgggtgcagatgacaagccaccacaacctgattcaggattcagttgggctactagccagtgccataaggaaaaccattctggggctcttgagaggggcaaagcataatttgcatgtgggagaaacgttaatagtttgtggccagaggacaagctgtggtttattaaagactgctgcaggttcctactatgcttctcatcaagaggtggaatctaatcacctttcccccttgaatcatggctggtctcagtgatgagtacaactggacagtgtggcaggagagatgctctgggacttctgagggatgatcatgagagaccttacagcttctgcctgggcctcttggacacacaccctgggagaagccagacaaacctgactacctgatgctaccagactggaaggaagtccgtgctggccacaaagagagggctgggtgcctgctccgtgtccccagccactagagtccttctgggtgcctgcttcacgtccccagccactagagtccttc

SEQ ID NO: 136626 - DNA, 330 bp, Homo sapiens
gcaagaccccctcttcccatagcctcctgatcagggtagtggctctgaacttggcattgaactgaactgaagaggaggaaaagacggatctcccagaactgtctgagaagcagcgaggtgcagtgggcagagtcctgggccagggcaggagtgaggcagggtagcctgtttcaccccattttacagaggaggaaacctgaggcttagagagctagcacccagcatcacatcacagtgctgcttcctgtttctcatgcatgtggcctgagcaaggtgcctccctcctggtgcccttgtttcttcctccgtgaaatcagggtgaaaattctt

SEQ ID NO: 136627 - DNA, 265 bp, Homo sapiens
ggcggccattcctttcttttctcaaaatgttactctacttagtgaagtataggactatgataacagcagagacaagatgccgggtagaaacttttttaatttttttgaatggtaatcatgggtccgataactgttatagttgtttcttaatttttttctctgttgtatctccattctgctattgagttcacccattgagttttttacttagttattgtaatttctagttctaaaattacaatgtagttcttccgtatatcttcaa

SEQ ID NO: 136628 - DNA, 823 bp, Homo sapiens
ggtttcatcatattggccagaatggtctctaactcctgacctcagatgatccacccgccttggcctcccaaagtgctgggattacaggcatgagccactgctcccagcctggttttcattatgcaaatacctgctaggtcagaccttaccctggcaggcacagtagctttttcagttatttcaaaatttaatatttattattttccctgaaaaatcagttttctaaaatttgggtcacaagttgttatttgagttcatgactaattggtagtcaatatgaagtcaaaacaaaattttactaactagactacatagaaaatacaaaaagtttacatctgagcacttttcagcagggggaaaccattactttgtcacatctggatattctaagctagccaaattgaagtgggaatttcctgccagatgttagttctttgagcaacctgtgaacatctaagtaagtgaggggttatgagtccttgtttggtagagctatacccactctggaggcttgctcctaacaggcagcagacattttatatgtactaccaccagtcaggaggttgtgcaacctatttgaagtcaatatgatgtgctcttgttaaatgtcaaaacatccaaggcctcattttgaatgtacaacatcagtcttacagatattatatccagggtgaacattgcattgaaatgtcctcccaaatgtagatgacaaaaattttgtttcattaatagaaagaaggtaagactgaaacaccacaggtattccagataacttggatagggccattttgtaaagtcagtgtagaccaaaatatgtctctaa

SEQ ID NO: 136629 - DNA, 376 bp, Homo sapiens
gtcccgccccggggctgggtggcatttcctattgtagaagctgatgggatgtgacctgggtgctcacttggctctgcaacctgtgactgggagcccgcaggcctgtgacctcagtttccccatctcaatcctaaaagcctcctcatcctcttttcccctttaaatggggcttcccacagcgataggattttaggtagtgggtgtctcagtccccgtaatttggaagtagagctaaaatgaggtatgtgtctgtgagacaaaggcaagatggggtttgggcagaaggagggagtgggcactgctgcctctgagaggaaggtggttggtgctacagccagagcaagacctagagaacttggtctcctgcctcacttca

SEQ ID NO: 136630 - DNA, 708 bp, Homo sapiens
tggtaacttgaaatctgggtcattctcgttttgtgaagtatggagtagataaccaaatgactttaaaaaataatactcattaaaactcaaagagggtctatggaccacctggtaattttctttccatctcactgtatgaaatttatcatctgtagccaagttaatttttaggatttgggggctcaatattgaaatatttttgaaggttataggaagtaatggcttgtatagcttactcttttaaaaattttgatattaaattattactttaaaaaaggtattgtctgagccctgtttgttaaacttcgctgtggtataaatctcttgaaacaaaagatatacattatgtattttgaaatgggaggtacatccatagtttacaaataatttgctaaatcaaaactgctttgagctaatgacagatttcctatgttgattgaaaggtaaaatgtttatttaagaaatctattgtacaacaaggttactgtagttaatgatacaatgtattcttgaaaaatgcaaagggtggatgttaatgttctcaccacagtgataactgaggtaatacgtttgttaattggttgaatttaaacattggacagtgtatatatgtcaaaacatcgtgttgcacatggtaatgtacactattatctgtcactttttaaaaagttaaaaaaaattaatgttatagatcctgtaaggtaacag

SEQ ID NO: 136631 - DNA, 383 bp, Homo sapiens
ctgattctgattctgtggactgtaatgaagatatgtaatggtcccagtgttttgagtcagtagaatatttatgaacagtttataggtgaagctgaagcctctatagcttggcctgtcttcgtaggaaaccctggcatcatatctcagcaaggctagaggggactctcagcttcgccttgccctcctctttcctcactggtgtaatgcgtatattaatttgtcttcaggtaaaactggactaagaggggaaatgactaagaggggaaatgacatagaggtcttggagtgaggagagagaaaaaaaaggtctttgtaaaaaaatttcctgttgatttttaatgacctccaaacctagaattttaaacttgtgttcctttggaaaa

SEQ ID NO: 136632 - DNA, 331 bp, Homo sapiens
gattttcagggacaatgtaagatcaacagagggcaaatataagccttagaggcacaaacatttagaagataagaagaagaggaatcctaaaaaacaaaggtgagaagatgtagaaaggagaagaaaatcaaggggaggacacagtttttaacaatgttgaattttgcagagatgaagtaaataaagactgaataacactaattggatttagcaactagtatgatgctggtggctgctactgggaccatttataatttcttcctgggaattatatttttcttttttttttcctcaatatttcttctgtgacttcatatactctatgcctata

SEQ ID NO: 136633 - DNA, 157 bp, Homo sapiens
cagggagatgggtttttcctttcacatgctaatcacctgctcctggtgatatttctctccttgactgcagtcttggaattgaataatttatggaatgaattttgttgtaaatttactgtgtcacaagcaggttgtaatttcactaacagttcactta

SEQ ID NO: 136634 - DNA, 556 bp, Homo sapiens
atctcaggatcccttcagccaatcagaacaacaattaattggtctaccttcatccaatttattgcaagacttattaggcttggctccacatctcttactttggtgttaatcaaaagtgtcactctgagcccacgattaacaggaagtcttcttttgaaaggaccatttagaaaagaaaaccaaatggttgggcatgattgctcacccctgtaatcccagcactttgggaggccaaggcgggcagatcacatgaaccggggaggttgtagggagctgagatcacaccactgcactccagcctgggcaacagagcgagactctgtctcagtaaacaaacaaacaaacaaacaaacaaacaaacaaaggcatatttagaagaaatgtgacaaggagtacaggccagacctctggatctgtagcaaggtacaacatgggtatgtttttactatttgtgtggcaccttagtgctctgtggtaggttgtaagtgctcagtaaatgtttatggtggctattatcattactagtattatttagaattcaatgggaaaggttagt

SEQ ID NO: 136635 - DNA, 140 bp, Homo sapiens
aagggagggggtgaagaatcagagatgagtaaggcctagagtctgagagagtagaatatagaaaaatacattaaacaggaaaaagagaatgttgtagaaggtgatagcaggttctgttttaagcatttgagttaagattg

SEQ ID NO: 136636 - DNA, 366 bp, Homo sapiens
gtttcgcttttgttgcccaggctggagtgcaatggcgcaatctctggctcactgcaacctctgccacctgggttcaagcgattctcctgcctcagcctcctgagtagctggaattacaggcatccactaccatgcccagctaatttttgtatttttagtagagacggggtttcaccatgttggtcaggctggtcttgaactcccaacctcaggtgatctgcccaccttggcctcccaatgtgctgggattacaggcgtgagccactgtgcccagccacactatgattttaataccacattggtagacctgcaatcccccagagaaggaacatcctgggatgtacttagagacctgagcaagccagg

SEQ ID NO: 136637 - DNA, 359 bp, Homo sapiens
atgtttgtagcctagaagtagcaagttaagggaagtgttgtcatgtagcttctgttttctcattaagctaggaagcaaatctgttaaggttgagtggaatttggcttggtagatggtttaggaagacagtgaagattttcactcgtgaaggaaatggagaaagatgcttgttagagatatgttggattgctaggcagaaatgaacttcaactgaggttgaagaccaataattagtagtgatgtgtgtgtgtgtgtgtgtgtgtgtgtgtgtggggcagaaaaagacggaacacttgcgcttgtgtgtagactgataataagtaattgctataattggaggacacagtagagagagcgcc

SEQ ID NO: 136638 - DNA, 965 bp, Homo sapiens
cttaagatcatctttaattcactcactaatgactgagggtctttctgctctccaagtaatcgggtgatgtatgagccgatagtacaccttgtggcagaggtgaaaatcattcaggcaatgcaaatattgtcacgggaacaaatgttttccctgttaataaaaattaatgaattctacccaggagctagttaaggaagctgtggcgaaggaaatccaaacacaaataacttcttactgttaaaaatcacttatgtattttttctagatatagaaaaagaccatcattgctgcatatttccataagagatgaaataatgacaaactatagaaatgcactatgttgtttttaaattatctttttcaggttcttgagtttatttaaaattgtgaactttggcatcttatttgttttaaccttggttaaactacaggcttcccatactgtactagcctaatgaatacattcctcttttcatagcctagttaggaccaagaattatagtggtcagggtttataactataaaatgatgtaatgaagtttaaatttgagaaactccttgtaacacatcataaaagattgatgaaacagactggagattaataagtggttcaaatagttttgagagaaaaaacaacaaaaacatttaacactatcattatatttattgaattctttaaaaataaaaacatctcctctcttaaaaatttgcctcacatcattaaagctttttccttactacatctacctcaaccccagttcattttgtaagacaataaatgtacaatgttgtgaggtgtgcctgctctttatgtacagacacttgctatagaaataaatctgctgtctttttgtttcattttgatagtccatgattctttcttctaatgaccaaaattcattgtctcaatggaataaatatttctgaaatagctcccagtccttcccctatcatttacatcttag

SEQ ID NO: 136639 - DNA, 614 bp, Homo sapiens
acattacctccaccccctcagcaaccccccaagagaggagactgggaggggtatacaaagcccagctccctaaatcccaaattcaggagaaaatgggctggtgctgatggtttacaaacggggaaaccgaggctaaggactctacataaggtcactgtgtttgtggcaaagccaagaggaactggatccgtgctcagtgcaacacctcagggctcaacatcccctcccgactccccctatcagtcatcccccagccttctccgctccgcctgggataagcatatctctcccgagactgaagagagcctccaagccaggtaccccggcatggcccagagcctactcagacctgcacgccacgatggggttcagggatagggcgtcctgggctcgtctgggttaagccaggcgagcagagctggctcccgccccgagaaacgcggccagctctggggcacaggccccagaacggcaggaacagccgccatcacctcgggcctggagcgggcagcgggcctggagcgggcagtgggcggcgcgggaggtagccgggcctaattagtcggcctgggacccgggcgggcgccggggcggcagacgcggccgcagagccg

SEQ ID NO: 136640 - DNA, 539 bp, Homo sapiens
tgaaggtgctgacagtgctgaatctatgtatagtatattcaaatctttttaactatagaggttaagatgcatccattctaaagtgaggaagacaaattttccaacttgtctaatcatggaaatcttgctcaggaggtggaactacattattaaatcagagaatgtggatgggacagtagcaggagatagggtagtctgtgagaataaatttgtaaactggtcatcaaaagtttcctgaacactgcttcttggtcaggacttcatacatagcagagcaacttcactgctttctttggttcgttcgtatttatttatctagagataaggtctcactctgtcgccaggctggagtccaggtgcgtgatctttgctcactgcaacctctgcctcctgggctcaagcgatcctcccacctcagcctcctaagtagctaggactacaggcgtgtaccagcacacctggctgatttttaaatttttttgtacagatggggtttcgccatgttgccaaggccgatctgggactcctgggctcaaatg

SEQ ID NO: 136641 - DNA, 418 bp, Homo sapiens
gcaatttttaatagggattacattgaatctataaattgctttgggttgtatggtcattttgacaatattaactgttctaatccatgagcatggcatgtcttttgatttttatgccctcttcaatttttttcatcagtgttttgcagttttaattgtagagattatttacctccttggttaaatttattcctaagtattttattattttatttaagctattataaatgggatttccttctccagttccttttcagctagcttgtttttggtaaataggaatgctactgatttttttgtatgttaatttttatatcctgcaactttattaaactcatttcttagtcataagagttttttgtgaagtcttcaggtttttctatatgtaagattatctcatttacaaggagggataagttga

SEQ ID NO: 136642 - DNA, 591 bp, Homo sapiens
gcgcttatgaaattatatgagcagagacactgccagtttgaactgtagtggatggaaacaggatgaaaggaaggagagaggctgttggacttcttagctttgaccagctgggatgatggagctgtttggccactaacatgcactattcttcaagaagaaagaaaaataaccttgaaagtgattcagagatcattaggtccacctcctcagtttcagcaggccagatggcctttgcacagagccttgtgggcagagccatgggggcaggatccctgccagagttaggagggtgatgctgacaccccagtaggcctggaggacaggatatcaaaccaaagaagactccactcaagcctcaaaattcaatggaattttctttgcgagatttgggatttgcttggaacctgtcaccactttcgtacttccagtgtctcctttttggaatgggaatgtctattctatgcctgtcccacaattgtattttggaagcacataacttctctagtttcacaggttcacagctggagagcagttttgcttcaggatgaattgtacctcaggtcccatccatactggatttaggtgacaatt

SEQ ID NO: 136643 - DNA, 998 bp, Homo sapiens
cggcaagggcggccctcgcgcacctggctgccagcccgcagggggctcgcacgcagacctgcccttgccacctcagcgctcgggtgcgggctgggggcggtggagccacgaaaggtggtgccgagagcggagcgcaggacagcgcaggagccccggcgcatcgcggcgcgcacagacccaggatttgtgaagaggtgacccaaatttcaagacaatgttggatgcaaacggatttgccagcaattgcatcactgtcaaaaccagctctgcccgtgtcttccgaagataccaagtgaaatacatgtagatgggatttacatctgaaaaaccaaggcaagaggccatgggaagggacggaggtggaacaggactggacagaagctgataaatggttgttgctgagtactgggcagataggggttggttatcctattgtctttactttcatatattttattttttctgtaataaaacaaattaaaatcacctgtcgtgacctcacaggggccagtgtgggttgtggcgtgaggcaggaagctctgcagagttccttggtcaaaaggattaattacagaagaactccacgaacaccgagaagaagagaagggaatcctggcatttaaagccacaaagaaacttgatatggtcttgtctccttctctcaattgacagtgagaaactgaagaccagagagggtgagtggtttacccagtttggcacaactgaccccaacctagccctccatgaggactgagcgcatgagagatcctgagccacagccgcccagccctgctcctctcgaatttctgacctacaggaactgcaagaagtaatgaaagactgctgtttaaagccactgcattttggcatgatttgttatgcagtcgtagataaccagaaaacatcggatttacattttaaggaaacagagaagcaaagaagttagcaagcttgttttggcagaagaaaaaacacaaaatacccaaccacagatcctc

SEQ ID NO: 136644 - DNA, 659 bp, Homo sapiens
cggcaagggcggccctcgcgcacctggctgccagcccgcagggggctcgcacgcagacctgcccttgccacctcagcgctcgggtgcgggctgggggcggtggagccacgaaaggtggtgccgagagcggagcgcaggacagcgcaggagccccggcgcatcgcggcgcgcacagacccaggatttgtgaagaggtgacccaaatttcaagacaatgttggatgcaaacggatttgccagcaattgcatcactgtcaaaaccagctctgcccgtgtcttccgaagataccaagtgaaatacatgtagatgggatttacatctgaaaaaccaagtgagaaactgaagaccagagagggtgagtggtttacccagtttggcacaactgaccccaacctagccctccatgaggactgagcgcatgagagatcctgagccacagccgcccagccctgctcctctcgaatttctgacctacaggaactgcaagaagtaatgaaagactgctgtttaaagccactgcattttggcatgatttgttatgcagtcgtagataaccagaaaacatcggatttacattttaaggaaacagagaagcaaagaagttagcaagcttgttttggcagaagaaaaaacacaaaatacccaaccacagatcctc

SEQ ID NO: 136645 - DNA, 131 bp, Homo sapiens
gagggggtgctgctgaaatagggtgagtgacacccactcggacatggctaccatttacacagaaatggagcagtttctgggtgtaagtttcttaagagaggctgcctggtaccagcccctgcagactagtt

SEQ ID NO: 136646 - DNA, 298 bp, Homo sapiens
agctgggattacaggcatgtgccagcatgcccagctaatttttgtatttttagtagagatgggatttcaccatcttggccaggctggtcttgaactcctgacctcaagtgatcagcctgcctcggcctcccaaagtggtggaattacaggcatgagccactgcgtccagccaagaagttcttagattactaaatttaagtaaaatgatttttactttaaaacaattttaatggctgataaggggaccttgtagaatttctgaggttatcaatggcattggagttctttgtgtcaggaa

SEQ ID NO: 136647 - DNA, 187 bp, Homo sapiens
tgagatcccatctctaaaaataatttaaagaccagcttaggccaggtacagtggcacacacctgtaatcccagctactcgggaggccaaggcaaaggaattgcttgagcctgggaggttgcagggagccaagactgcgccactgcattccacattccagcctgggcaacagagggagactctctctc

SEQ ID NO: 136648 - DNA, 489 bp, Homo sapiens
cgtcgctctgaggatcccctgtctcagtttcgggacgagagtaagaacaggaggccgattgtagatgccacagcatgggggtacatttcccaaggctgactggctgagaccacgtgaagcatgtctgagttgtgcaggctgcagacccttcttccttcactgcacatctctcccctggcatgaaagttttccttttcttccaggggccgttgtctttttgcattggaggttgtgggccttagccccagttgttgaggactttaggaggctttggtgctttccaagcctttgcttagggaaaggcagcttcctcacggcccttcctcatggcattccctctccctctccctcttcctccctaccttttcctcctccctcctctcctttgaccttgatcccctgagctttgtgtcaaggaggtcttcattaccgagttttcccctgagcgaggtttcaacagttctcattctggttggtctgtgatgtcaa

SEQ ID NO: 136649 - DNA, 744 bp, Homo sapiens
tgtttcattctataaaaatgatcagagttgatgggaaacccatgaaggtgaaacagatgtgtgtctttgcagaagacacagtgaaacagatgtgtgtctttgcagaagacacagtgaaacagatgtgtgtctttgcagacgaaagggagggcctgggggaacttggggtaaatacttttggtcacagagggcatcaccttgcccactgttgtgtcacaagacctaaatagaactacccaggtcagcaggcagcatggttcccctccctgctggcttgggaagcagtttgagcagagtaagaacaggaggccgattgtagatgccacagcatgggggtacatttcccaaggctgactggctgagaccacgtgaagcatgtctgagttgtgcaggctgcagacccttcttccttcactgcacatctctcccctggcatgaaagttttccttttcttccaggggccgttgtctttttgcattggaggttgtgggccttagccccagttgttgaggactttaggaggctttggtgctttccaagcctttgcttagggaaaggcagcttcctcacggcccttcctcatggcattccctctccctctccctcttcctccctaccttttcctcctccctcctctcctttgaccttgatcccctgagctttgtgtcaaggaggtcttcattaccgagttttcccctgagcgaggtttcaacagttctcattctggttggtctgtgatgtcaa

SEQ ID NO: 136650 - DNA, 150 bp, Homo sapiens
tctttgatctttaaaagagttggtcaatatgacgaagaaaaatatcaagaatattcctcaggataaggataaaaagaatggtgttgcagaagtggaagtgatcaaataacagagaaaggaagacaaatgaaccagctttgcctaagcagg

SEQ ID NO: 136651 - DNA, 316 bp, Homo sapiens
cgctcggtaccggtgtttatctgatgcactgtacgagtgtggggcacccccatgctcatttcaagcctcaggattgggacccgcagcccaccagctgaggcctgagcagggctgacccttttcaggcatggacttcagccctaacctgggaaggccccatggcaggtcacttgggcctcccagctgaaatcacatgcttcacgtgtaagcacaaggaggtgggctggtgggaaggcgggaaggcgagtggttcctgcaccgcccccaaccccccaacatccctcttctcaagggctcgccactccttggtgagcct

SEQ ID NO: 136652 - DNA, 539 bp, Homo sapiens
aacaaagttaatgagatgcctatgacattgcaatagtaggcacaatacaaacttcctacggattaattcaaagtgtttaaatttgattgtctcaaaatttagcatgaaactgccacaaaggaatccattttttttaagaggaacaagactcccattctaagaagctaatacttttcttaaacatttttcattactgtaatacagttgatatttctaaacttcatgagagtctagtctagttagaggactaaaggaattgataataaagacttctgactagaatgaaagcacaaaagaaaggatgagagaatgaagacaatggtagcctctcagaaaaagaagaaaaagagaggtgtacctaggacacagtaggcctgatcttagggactgagactcccagggcagaaaccagaaccagatcaagcacctggccttaacagcaatagaccagctgagaaacatcaccaagggggcccagctccttctatgaggggtcaggttcacactctgtatatgcggccgctaaagactgaatttga

SEQ ID NO: 136653 - DNA, 179 bp, Homo sapiens
ttggccaggctggtctcgaactcctgacctcaagtgatctgacctccttggccacccgaagtgctgggattacagctgactgagtgtctaccctgtccctggcactgtgcggggtgcaggagatacagtagtgtgtgggtcacagtccaggaggtaacatttaggcagagctctaaaag

SEQ ID NO: 136654 - DNA, 355 bp, Homo sapiens
gtgtgcctatagtctcagctactcagaaggatcacttgagcctgggaggtgaaggctgcagtgaaccaagatagcaccactgcactccagcctgggtgacaaagtgagaccctgtctcaaaaacaaaaacaaacaaaaacatgagactgggtagtttgtaaagaaaagaggtttaggccgggtgcagtggctcacgcctgtaatcccaacactctgggaggccaaattaggcaggcggatcacaaggtcaagagatcaagaccatcctggccaacatggtgaaaccacatctctactaaaaatacaaaaattagctgggcatggtggtgtgtggctgtagtcccagctactctgg

SEQ ID NO: 136655 - DNA, 303 bp, Homo sapiens
aaaaggccaatgaccttggtcctctctgaccaggccccaggtgagaactatgtcctaaggggcagtggccacaggatgtggtatttggctggaatgatgtaacctctgccctttgacatcgtcatgtaactgggttgtcagctagagccctaaataataaaatgcaaataaaaccctcatttcttgtaaaatgggaccccagccaacttcccaatctcaatgaggattcttgtaagtcagatatttccctgggtctcctcacattctgattttccgcttccactgaatcctggctctttctcc

SEQ ID NO: 136656 - DNA, 210 bp, Homo sapiens
ttattatttgttctcaatggcgggtgtctggcggggagtccagtcgcctgacgttgaatgcagtcatttcctaggtgtgggtcaagattctgatgtccacaggcaataatgtccgtgaacgtgtgtatgtaccttgatggacattactgactgtggactccagaacattggacattgtatatattgatggacatcatatatatatataca

SEQ ID NO: 136657 - DNA, 118 bp, Homo sapiens
tcacccaccagggatgtaccacattcagcttttacttttgcttttaggcactcaccttttagttacaaaatgtcagtcaactctcctctctctctggccctgctgtcaggacaagaca

SEQ ID NO: 136658 - DNA, 510 bp, Homo sapiens
aataaagttaggaactgtagggacatgttttctgctgtgtgaattggagaagccctagtctacagagagagagaagagtgaagatgaaggagggtcaaataaggcaatgtgatggctaattttatgtgtcaacttgattgggccattggatgcccagatatctggttaaacattatttctgggtgtgtctgtgagggtctttctggaaaaaattagtatttgagttggtggactgaataaagcagatggcactccccagtgtggatgggcatcatctaatccattgagggcccaaatagaacaaaacggtgaagaaagattgaattcacactgggtggctgcttgagctggaacatcagtcctctcctgcccttggtgctcctggttctcaggccttcagaccaaggctggaatctatacccttgactctctggctctcagtcctttgaactacacccagctttcctggatcttcagctaaaataaaaagaggagagaataaatagaaat

SEQ ID NO: 136659 - DNA, 282 bp, Homo sapiens
ggggcaagcccgccctctcttaggggcctttggtagcaacctatgtgagcctggccagagctcgagccctaaccctttcatgggaccccaggagggccccagcctgatcgccaaaaacagttcactattcctccctcgaattattctggcggccaaggtgctggaactgcttcagctcatttgcaagacatttgaccccatctgtttaaaaacctctgctttctctgtgggtttaagtggtcctgaccaggggtccccctccactcacccacagacacactt

SEQ ID NO: 136660 - DNA, 402 bp, Homo sapiens
cgtgagatacagtcggcgctgaaatgacaggcggctcatgtgttaatgccaagcaggttccatggatgtccccccatcatggtgttgggcgagaggcatgtggagaggccctgccaggcgacatttacatggcactggtcaagacctgtgcaaaactggtcactggggcaatggctggaacaagaggtgaggccgcgggcatctgaaatggcacacaggatacgccccctatggacagggatagctacagctctcgcctcataggttactgagaagactaaatgatttaatgtatgtgtttggaggagtgcccagctcttagcagtgaccatctacatggtggtaaccctgccctgacatcccgtctgcctagtggacacctcggaggcctgtcatgttcaa

SEQ ID NO: 136661 - DNA, 703 bp, Homo sapiens
gcaatcctcccacttcagcctcctgagtagctgggactacaggcacataccatcacacctagctaataattttttgtgtttttttaatagagacagtatttctccacattacccaggctagtctcaaattcctgggctcaagcaatctacctgcatcagccttccaaagttctgggattacagacatgagccactgtgcccagccacagttcattgttgaatcagaaagcataattggcagaaagacaaccttgttagttcttgtacctagaaaaacagtatagaaatggccagtcccaagaatgaccttatttagagaaaaggtctttgtaggtataattaaaaatctcaagataagaacatcctggatatctaggtgggtcctaatccaatgacaaatttcctcataagagacagaaaaagggaagacatagacatggaggagaaggccttgtgaagacagagacaatgattggagtaaagcagacacaagccagggaatgccaggagccaccagaaaaaacacaaaaaaaaaaaaaaaaaaattttgggcgccgacatgggaccgtcggaaagaggctcttgaacacaaagcgttgtggcgccggggggcccaggagggcagtagacaaggggcacagcagggcaccaaggagaacacggcgcacacaaaaagcgagaggagatccacacaaaaaaaaag

SEQ ID NO: 136662 - DNA, 297 bp, Homo sapiens
atgctgtgctaagaagttttaataccgtcttgaggccatgatagcacaaaggtgtgataatctacgtacccagagagatcaaagttagctttccacagaagctaagtttgaacagtaagtataggttggcccagcggatgacagtggaggagtacaccaagaagaacaagggaggtatatataaacagcaagttatggtcaagggatttcaggttttgtgcagtgtaactcaatcataaaaattgcagaagagatatgtgctggtccactggctcttagagtggtagtggtggggaa

SEQ ID NO: 136663 - DNA, 190 bp, Homo sapiens
tgttgaaattagataatcataaaaccactgaatttttctaaccacttgctcttctcccaaatctaaacccatcagttttctaactggaataaacattgatttaaaatactgtcctcaagccgggcacagtggctcactgtaatcccacctgggtaaagagtgaggctgtctgaaaaaataaaaataaaaa

SEQ ID NO: 136664 - DNA, 375 bp, Homo sapiens
aaagagaagcctcagggggaaaaactagctgggagagccccaggaaagcaacccaatacatttttatgaactacagggctcactcctggactacacatgtatggccttgatcctaagtagcacagatcactaccaaggtcacagattgaccactaggtggcgtgcacacacaggacagatctgaatactaccgcaaaggaaaatgaactaatgttaaaaccacaatgcacaggcagtggtttggaacttcagcttgaacctaaccaggtcaactgtctgctaaaaaatatcaacatccttcataggatttaaataagatccacagtctcaaatagtgtattttaataatacactattcaaaatgtccagatgcag

SEQ ID NO: 136665 - DNA, 462 bp, Homo sapiens
gatatcacatgaggaatatatcatgagagctctcttgtaatctgtgaggagtatggaaacaggatttgtcagtgtcgggctgtggatccataactaactgtcctttgtattgattgggctcactcttgccaagcctcatgctttgtttttgtagcagtgatagattcctgttaatctatccttgttttcttacctgatcccatgggtgaccacttgttaggcaagatttatttggcttaatcatactatctgtgtcctgaaaatagggcagtgcttcctggtttgggcagaaaccaaggcccagttgaactgctctagggaattttgctctaagctgatgccaccagtagtttaactgcacataacttcaaattgttttatcctagacattaattatatttcataattttatggtagattataaagtaaatcctaccatgagaataacttcatatttttatt

SEQ ID NO: 136666 - DNA, 407 bp, Homo sapiens
gtgagtactctaaggatcccgtgtcatccccctttgtgtgctctccccaagagcttcacagctagaaggggtggggcttgccccctgacaaatcctctgtggcacacacactcgggcaaagctcccttgggcacctgctccggtgccagcatccctggccctggcctcggtgagggcacagagggaagccccaagtaccactccccgatgtgagtgaatcctggtctaactctgagcaccaggcttgtgccaggtgccgtcacacccttcctcaccttcagtgcctaccttaacccgggaagtgactgctgctctcaccagggcgagggaggtaacacacttcacccaaggccacccacccacagctagttagtggcagagcctggatttgaacccaggtagtctga

SEQ ID NO: 136667 - DNA, 182 bp, Homo sapiens
gtgtaacaccaagctaggttcttggggtatattacttggcttaataatgcattcatttattcaggcagaaaacttatacttatcaaggactatgtgtcaggcccaggactgtaggcaggggttttgagggctgtcctcctcgactctgtcttcagcctctccttttccaatccaacctatgc

SEQ ID NO: 136668 - DNA, 262 bp, Homo sapiens
gcaccaaatggctcaggatgctctggtttcaaagcttataaaacagagggtgattcccttgggactcactcagctcggctccgaaaagcaaaggccagaaggcagcagtgagcctgggtccctgctgtgtagggagactcaggggctgggaagaaggatggaatcagaaatgctgaaggtttacgtgagctttgcaccgagcgcctccgaaccactgcctctgggctcaacagaacacaggggtaagtctccatgaacttct

SEQ ID NO: 136669 - DNA, 305 bp, Homo sapiens
gaaacttactgactacatttgtttgggacagggtataagagttagatgcatttgacatgataacaagaacgtctgtggagtggaaagctcaatggccttgaagtcaggaaacaaggttcatatcttggctctaccttgtgaagccacttaacctttctgggactcagtttcactaccacatgtaaaatgggtcaacacctaccacgcacagtgttattttataatgtatggaaacagttcctgactcatggtaggtaaacaatattaactaagtctgaatttcagaaaataattttctcttaaaa

SEQ ID NO: 136670 - DNA, 246 bp, Homo sapiens
ttgaggagcctgatcatggcccagaggccaaatcacgaggctgtgagcactgcctgaggagcctgacctttcccctgaaagctgctagggcttgatgccatctcaacacaggccactgattcttcctgatcctttctttctgctccatcttggctcttgacacatgcttctgtctcttctcctggtttccaactccacactatctaatctgctgcagcttcttgaaactttgtgtttcctttgaca

SEQ ID NO: 136671 - DNA, 627 bp, Homo sapiens
gtgggtgcagtgcaccagcatggcacatgtatacatatgtaagtaacctgcagaatgtgtacatgtaccctaaaacttaaagtttaattaaaaaaaaaaagtctaacagttcaaaaaaaaaaaagtaaaaaaggattggtttacataaatgaacactcatataaaatgtacactaattcaaccaaatgccttcaatttcacacaactttagtaaattcttaataaataagctggtttaaaaattattagtaaaataaaaatagagatatctttaaattgtcagcatatatttttgcctgggtttactgatcaaacattcttatatatgtctctcctagatgtcttaagatatcaatgtttgtcacaaagtttataaaactataaaaccaacctaaaatagaatgactctatttgtgcaactctttaataagtaagactaagttaatattattggtttaataaaaatacctctatcttctgagttaaatttgaggctcttacttaggtgaacacctgatactcataagctataaaaattgttgacacagaaataatttgaaaagattctagctttgtctaatatttcagtttgtatactcaattgatgaattgcctaaaataaataaa

SEQ ID NO: 136672 - DNA, 767 bp, Homo sapiens
acctggatgagttccccatcaacctgccccgctccctccgggagctgcacctgcaggacaacaatgtgcgcaccattgccagggactcgctggcccgcatcccgctgctggagaagctgcacctggatgacaactccgtgtccaccgtcagcattgaggaggacgccttcgccgacagcaaacagctcaagctgctcttcctgagccggaaccacctgagcagcatcccctcggggctgccgcacacgctggaggagctgcggctggatgacaaccgcatctccaccatcccgctgcatgccttcaagggcctcaacagcctgcggcgcctggtgctggacggtaacctgctggccaaccagcgcatcgccgacgacaccttcagccgcctacagaacctcacagagctctcgctggtgcgcaattcgctggccgcgccacccctcaacctgcccagcgcccacctgcagaagctctacctgcaggacaatgccatcagccacatcccctacaacacgctggccaagatgcgtgagctggagcggctggacctgtccaacaacaacctgaccacgctgccccgcggcctgttcgacgacctggggaacctggcccagctgctgctcaggaacaacccttggttttgtggctgcaacctcatgtggctgcgggactgggtgaaggcacgggcggccgtggtcaacgtgcggggcctcatgtgccagggccctgagaaggtccggggcatggccatcaaggacattacc

SEQ ID NO: 136673 - DNA, 1272 bp, Homo sapiens
ggggtaaaagccacgcagaggcccttcagaagaggtggcgggctgcagacaaaagggcaagagttgaaaagggctgtggaggtagcaagcagcagaggccaccctgctcagggctgggtgccaggccacagggcatgcccgacgaacagggagtcggaaccccctcaggccaccctcgggagtcctggggtccagaggggtgtccctgtaccccttgcacacaggaccctcactctgcagggataagccagctgcgcctgcagcctagggtgccaaggaggctgctgattgtggcccacagcctcatctgaacgccaggagaccaggataccgaggcaccggatcccctctctgtgccctggggagccccagtgctgcccagtcaccccagggctgaggtctgcgtccctagtggtgcaaggcctggtaggaccacggggcaggtaatgtgagcgccatctgagctcacggtgtcctgagtcgcggcttcgtgactttggcaggggcctccggaccagtgaccccagtcaaacccagagggtcttgggcggcagcgacgaaggaggtattcaggctccaggccaggtggggccggacgcccccagccatccaccatggtggtggcacaccccaccgccactgccaccaccacgcccactgccactgtcacggccaccgttgtgatgaccacggccaccatggacctgcgggactggctgttcctctgctacgggctcatcgccttcctgacggaggtcatcgacagcaccacctgcccctcggtgtgccgctgcgacaacggcttcatctactgcaacgaccggggactcacatccatccccgcagatatccctgatgatgccacagcctctacctgcagaacaaccagatcaacaacgccggcatcccccaggacctcaagaccaaggtcaacgtgcaggtcatctacctatacgagaatgacctggatgagttccccatcaacctgccccgctccctccgggagctgcacctgcaggacaacaatgtgcgcaccattgccagggactcgttcgtgcctcattttccccatgtgggagaatagccccacctcaccagctggtgtgaaggtcaatggagaggggtcctcaactctgagccccgctgcaggaagacctgggtccccgccccctccttggactaggggtagtgctgccaggcagagctggactgacggctttgcgacaggtccacaatagctcaggtccacgatagctccgcaggtcccaagat

SEQ ID NO: 136674 - DNA, 315 bp, Homo sapiens
ctgagctcaaaggtggcttaacctcatcctctgctcattgagggaaagggatgtgggaaatgtttttatttcatagccagaaggaatctgtaggagagtactcatgctgcttcccatcttggcaaaaaccagcctgtgtaccccataatatgtcaattacctaacattacacatatacgtgaaaactcccaattgcccccagaagctagtatcttgggactctctattaaaactcttaactatcagaaagatcctagattcctgggtcagatgtggtgctttctgtgcaagtccttttaccaccctgaactcaac

SEQ ID NO: 136675 - DNA, 522 bp, Homo sapiens
tggagtcttcctgtaacaatgacattcataagacttgtctctatttatcttaactctgtgcttgcccagtgcaaacagtcttattcccaggaaatttgttgaaaaaaatcagtggcaattgtttaatactgtaacttaatgaaatggcaaccacttggggcagatgaaacattggccataaaacttcaaactcaaacttgaagaatgaggtgtccacggagggctttggataactctgacatattcccgagactatagaagactactcacaagtgcacaggtgtatgcgtgtcctggaaagaccttaggaggctgtaatctctcaccatgggctgacttgaggagtttcacacaagaaattaaggttaaagaattgcaaactgctggagcactgaaggcatgccccagcatccacacagagccccttaacaagggctagtgacttactcggtcaagaaatttaaaaacgttattgtctaaccattatatgacaactaatataacaattagaaaaaaaaggaa

SEQ ID NO: 136676 - DNA, 505 bp, Homo sapiens
agtccgttcgattgagctatttgtaagagaaaagtgcactaaacgaataacagaagtatcaagtggaattgacgtgggatgacacagctgcaaactccacccaactgggagcagccaggaggtgatcctggacttaacacacaaagttctttctttcaataaatggcctttgtgtactccccagttctgttcttttcatcatgagtgtattttttttctgccttagaaaatttgaaatcattatgtattcaactctgtcaacctttcccttttactgcttctcttttcgttcatatgcataaaaaaagtcacctcaataccagataacaaatcacttaatacctagaaggataagccttcagaacttgccaagtaacaagcagagattaatatacagtaaggtaaatgtctatgtaagatgaataactgaaattcaaataggtggatcaaactggtgctagagaagtcagaagaggcctggaatcaccctgaaacggttagataa

SEQ ID NO: 136677 - DNA, 348 bp, Homo sapiens
tagagacaggtatgggcctcccattcctcaggagtatcatctccaggaggttggaggtgtaatgagagtagtcagcacagcttctccaggtcagacggaggtcggcaggactcctgatctggagccaggtgggctgctccagacctccgcctgagggagcatgacagctgcacctgggctccccagggcatgctttgcttcagatttggagctcatcttaattagatcttgtatcttttcttcagggagctgctgggatttaatgattcttggctaattgcagaaagagggctgttacttaagtagatgtgtgtctgtgtgtgtggtttgactatatttgagcccgag

SEQ ID NO: 136678 - DNA, 163 bp, Homo sapiens
agcggaagttttccactttgaggaagtcccgtttatcaatgatttctttcatacattgtgcctttgaggttgtctttaaagagtcatcaccgaatccaaggtcacctagattttctcctgcgttaccttctaggagttgtacagttctgtgttttacacgtag

SEQ ID NO: 136679 - DNA, 236 bp, Homo sapiens
gcagcaagtagaggacgggttgaatccaaggctaagggttgggccactcggccaggaaggcagctaacctcattgcatatggcccaccttgtgtcaggtagccctgcaggagaaggttgaccagcacttcctcttcctgcctttggctctgggttgctctaatgtgacttgtgttaggactgtggttacatagcagtaacacaacagaacacgtttccctgtcagtggtgctcgtc

SEQ ID NO: 136680 - DNA, 391 bp, Homo sapiens
tcatgctacttgattacttataattgttatctctaatcttttctaaatgaaatacaaatacttcagggattaaactcaaggtcctttattagcagtcatcacttaacccacttttactttttttccttctacttcctcagttcatcaggacactctgctaatacatatatactgtcttaaagttaatttttttcattgttgtatatctccaccgagaataccgtctatattcgtttttaccaataagaagttttgtcttttggtttaatttaaacagaaaccctgtgtttgtttgaatactacttggtttagtttaaacagaaaacctgtgtttgtttgaatgctacttaccagctgtgtgatttggacaagttaattagcctcactgagc

SEQ ID NO: 136681 - DNA, 166 bp, Homo sapiens
gtcctttcttgcagaggaatgtgattctctgttcccataactggtcttgacagcagcttaacccttagctgtggtctgtggaggagggagctctccaccactggggacctgctgcgctgtgcctcgggcttcagctgtctcagtatgagagagccccgcttgtcct

SEQ ID NO: 136682 - DNA, 311 bp, Homo sapiens
acagtgcattagcaaaggagtggaagccttccaggagaatgagggagagccccagggaagtggtttgttgcttgttacagagggaccaacccctgtaggaagcctaaagggctgggaaagatatgcatgaaggaggccttggagaagcagctttctgagccctggtgggtgatggtgttagagagcaggcctccaacacttcacacccccatttcagaaaagatgagtcaagagtaataagaggaatgattttaacattttagaaacatgggccttcggctaggataaggggcccaggcagaggagtgagg

SEQ ID NO: 136683 - DNA, 189 bp, Homo sapiens
ggcagtcctgatcataaatctaattgcatttgcacaaaacagtagagttaacctatcccttcctgccttaaatcatgctcacttctcttactaattgatgtcttttgtggctcttttttttttaacttttaggttcaagggtacttgtgtgcaggtttgttatataggtattttgtgtgtcataggggt

SEQ ID NO: 136684 - DNA, 185 bp, Homo sapiens
agaggatcccagttcgacggagatctcttggataaatattgtaaatatcaactgaactatactctttatctttatatttttctgtgattacttaaaacctgacaccaaactctggttatttgctttatatatagcctatctacttggaaacaatcttgctaaggaaagagatatattcctatgaa

SEQ ID NO: 136685 - DNA, 218 bp, Homo sapiens
gctacagttatgggaaagaaaagcctgctgaacttaaggtggtctcatggaacagagtcagaatgggaaggaaggtaacttgaggaacttcaaaatacagcctgtcagaagctagaaccattcctctcgagaactgaaacaaaacaaggatgcttactctcaccacgcttattcaacatagtactggaagtcctagcctgagcagtcaggcaagagaa

SEQ ID NO: 136686 - DNA, 211 bp, Homo sapiens
ttgatgaattaatcacgtgtcccaggtagaccaccaaagaccaaagttacaattcacatttgattgcatgttaagccattggctgaaagtgacttttggctccatgtctttccattcagtggactgagtttatgagcacagtacatgacatcaagataatgctcctttgaactgtgaatgttcttgcatctatagcaccatgactatcaga

SEQ ID NO: 136687 - DNA, 436 bp, Homo sapiens
aagaccagcctgaccaacatggagaaaccccatctctactaaaaatacaaaattagccaggcttggtggcgcatgcctgtaatcccagccactcaggaagctgaggtaggagcattgcttgaacccgggaagcggaggttgtggcgagccaagatcgtgccactgtactccagcctgggcaacgagagcgaaactccatctcaaaacgaaaagaaaagaaaggtgcaagttaaaccgcagtgaactattgctagaattgttgctaggttggttaaaatgaaagagactgatgttactcagtgatggtacgtggagccatagtaactctcatcccctgctagtggtagtgtgatttgctggaaccactttagaaaaccgtccgaccttactggctaaagccaaaaatagaaacacccacttcctcaacaattgtatt

SEQ ID NO: 136688 - DNA, 435 bp, Homo sapiens
cttgcccatgcacccaagccatttcctccaaatccttacatgtgattaggattttccccagcatgccctaagtccattggtcatctacttgctgctctgattttagtgcaaaatgcagcttcctagaattgtggcaaatagattgcatagtcgttcaacaaatatttactgagctcttaccatatccctataactgggaggaagagggtgccactgggaaaatgcaagatgcatatcccattccaattccagcctcattccatattttatttctaaagcttaatgagtagaaatacatacacacatacatatacacatacactactccagttggcagttaaaatgtcctcatttaacgtaagctgcacatgaccccagtgggatgctggtgtcacagcctcagcacaaatgcgacagctgtgtcatgctagacca

SEQ ID NO: 136689 - DNA, 397 bp, Homo sapiens
ttttccccatccccagaatctctagttattcttactttgtagaaaatcactactaagtcactttgaaaaatgtatttatgtatgtatgtaaagtacctagtaccatgccggtatttattaggtgctcaaacaatagtatgctattagcagatactcagtcgtatgacattaaatgctattagagagatttatttttgtgtgttaaaaatgttcaatctagtggagctatttttgttttttttaataatctctacctgacaaattatttggtaacatacagttagagacaatttggcatatgaatttgtgttttaaaaagtctggccaggcgcaggtggctcacgcctgtaatcccagcactttgggaggccgaggcgggtggattacctgaggtcag

SEQ ID NO: 136690 - DNA, 682 bp, Homo sapiens
aaaagctcctcaaagtttgtatgttccttccagtctctcgtttctccctcttacccttttaaaatacccaggagaagtgctgtcttttggggaaaatattgctataggaaatatagcaaacatttgctataggaaaatatctcagacttggcagtttagacataatatgtgtttctcaccgctcttgatactgggaagtccaaggtcaaggcatgatacagaagcacagctggcggcattgcttcgggatctcaccctcctccttccaggtggaccagctcctgcagccctgccctcctgtctccatgctccccagccagtagcccacgtggaaaggtttggagtttggggctggaagatttcagttcaaattctgcatagtcttccctgtgcatctgtgagccttgcttcctgatatgagctggcggtgtcataattcctatctcagatggcttttggaaggttggaggatgcctcctgaagtgaaaaatactgcacagtgtcgctgcaaagaggctaacacatggtttcagggactctgaggggtagagtccaagaggcatggtctccaggtgtgtcagaatacacaggggccaagcacaggaagaccagagaggaagcaggtgcttagtgacatcagtgagggaagacagtcccaaagggcaattgtccacctaagccc

SEQ ID NO: 136691 - DNA, 450 bp, Homo sapiens
gggattatgggtgtgcacaaccacgccctgctaattttttgtatttttagtagagacagggtttcaccacgttggccagactggtcttgaactcctgacctcaggtgagtacctgtggatttgtatcttaggaagacaaaaaccagctggtattagccccttgtctccccatccacaggaaggagggggaagtactcggaccttaaaggggttcactctggagtggggcaggtgggacagagggaagttctgagagctcctcactggctcgggagggaggcagagctgtgggcccagtgcctgcctcaggtgcctggcaggtggcagatgaccctcaggatgtggcccctggcacctggttcctcactgtggccaggatcctgcaagggtgcctgggcccagcccaggagctgaggaactgcaggtgcccatgtgggcacaactgggccc

SEQ ID NO: 136692 - DNA, 589 bp, Homo sapiens
actccaaggagcaaagattaaatcctggtgtttgctgcaaccagagcttctaagctgatcacttagaagatatgatttggggatgtctgaggggccaaaaagaccttgcaaataatcacatgagataacatgctggaaatcactgtgaaaggtttaatatagcaatcatcatattcgcatgacaatatatatgggatacgttataacacccataacaaatgtgattcaacttggttgtaccagtgactttcaaaaggtgagcatctttgtgcctttgttttacgtatcttaaattttctatatttaaaggtcattggttccaagatgctcctttaaattttgataaataaatgttctgaagatcatctatggggaattcttccccctcacataataaggttggatgcgaagcgcagttttacgccctgtagcagacttttttttttaaatgcccgctctgttttagctgcttccaagtcccagcctgggatcggcaggttgtgggacaaggataaagagtgtggtgagtatcgggctacagttctcaatgctcgagggataagatttcttatgaaaactggcagctttt

SEQ ID NO: 136693 - DNA, 537 bp, Homo sapiens
tctttttcccagagcataagttttaaattttgatgaagtctgatttaccacattttttcttttacacatttggtgttcatctaacaactttacctaacccagaccttgccagactttttctgtaaaaggtcagatagtaaatatttcagccttgctgtccctgttgcagctctgccattgtagcaatgaaagcagccatagacaatatgtaaatgaataatagctgttccaataaaactttatgaacactgcagtttgaatttcacataatttacaaattatcaattatattgttttgattattacaaaaacaggtagtggattggccatggtttgctgattcctggcctgacaaacccaagttcacaaagagtttcctctttgattttgttgtggtcgttgttccacaccttcttttttcactgtttccttaaggtagagtgtacatatttataagggtacatgtaatattttgatagattcatacagtgtgtaatgatcaaatcaggttaattagggtatccatcatctcagatg

SEQ ID NO: 136694 - DNA, 415 bp, Homo sapiens
ccttctgctgactcctctcagcgcccaaggcagccacccagtgcttgccctggcctgttcaagtcctactcctgtccttcactaatgcttgcttaattcgtggatatacctactctacgaatctttatgagaagatactgtagggtgacccacagtcctgatttgcccaggagtgagctgaggggtttcctgagatgcgagactgagactgtcccaggaaaattgggatggctgacgaccctcatgtactgcatgcctggtccctgggctgggtgccaaggacacatttatctaccaaacatagtcactgccctcaagaaacttccagtcggagagtggctgccactcaatgagaaaccactgtcaaaggcacctgttcagcccctcacacacatgatccatcaccaccctatga

SEQ ID NO: 136695 - DNA, 518 bp, Homo sapiens
ggtatgacatgatacgcatcgatactcggacggtgtttatcgatgccaccaaaatatattttggtggcctgcaacgcctgagaaacttgagtatgaaagcaagtagatatatatgacagccttggaaccagaagaatctacactgaaggctgtttaggatttaaagaaaattctgtaatttcatctttttagagcaggtaatttaatctgccctaaacaggagactttactggttaacagtgtggaccatggaattaagtcatacctgaattcgaacgctggggtctgcatggacataatgtcaacatttgaaacataaaaactgttttcttgctgctgtatatagaagtaccttgtccacagaagagtgctttcacacagtaggcattccactaatattggggaataaatgcatcagttagataagttataaaacttatccaagcctgtctcctcatctataaaattatacttgacctacctcaggggattgttgtaaagattatgcgaagtaaaca

SEQ ID NO: 136696 - DNA, 289 bp, Homo sapiens
ccatcgcttcttcctcatcgggtgcagtcttggggcccagtccattaaggcttcctgccctcccttagacactgacctaaactgagctcatcagaccctctgtcctggaccctgagccaggaacagacagcaacagggacaagcaccccatccccaaagagagagaagcaaacagcaaagagcagtcattccagccctggaccgacgaggccatcgagtagctccagcttcccaggcttgggagctgctgcagttcctgcccattttcaggtcctcgttttcagatccc

SEQ ID NO: 136697 - DNA, 459 bp, Homo sapiens
gtcattacctttatcacaccaacttcaaaaagggagttggagtgaattcttggacttaattgctcttatgaagattcaagtcagtagactcactttcctccaacaatatctctacaaaaggtagggaaattaaatgctaaattgtgagtttaaacatattaacaaaggctactttcatttttttttcattcttgaatctcagaaggtttctaagagaaaaaaattctaagtttgaacatggaaacaagaatgtacattaccaattaagtcaggggaattttgtggggtttttcctgtttgttttgtttttgttttaaaaaggcttcctggtcataccaaacattgctagtaagcaatgccagcaagtgacagaagaacagaagaatgtattacgaaaaacagggatcactatctaattatcatctgatttgtgaagagctcccctgaaaggggagaggg

SEQ ID NO: 136698 - DNA, 301 bp, Homo sapiens
atatgccaagcactattcaaaatagtttacaaatatgacctgacttattcctcataacaaccctatgatggagttaccattgttattcctatttaacagagtaattgcagcatagagaggttaaataacttgaacaaaggttgcgtaattaataagtatatgatccaggactccagtctagacagtatggttccagagtgtgtgctcctaaccactatgctatgtgtctcctcatactttaatggcctggtagtagtttatcctatggatgtgttatagtttattccccagttccctatag

SEQ ID NO: 136699 - DNA, 299 bp, Homo sapiens
gtgattctcattattgtaggcttttcagagctgtgaaatacacacgaatattttcacaagctcattctcattaaatttaggactataatgtttttatttaatcttctatctgtatcttattttctcactgaaaattctggttcctagtgacacaaaataatgattcatttgctttatttcaaaaaaggaatacaaagcagtctcagaataactataaccactactaccagtgatacagttggtgacaattttacactgagctcttactattttgagggtatatccactagatacaagtt

SEQ ID NO: 136700 - DNA, 191 bp, Homo sapiens
gcctcagtaggtctgatgccaccagcctttactcagaatgtgcttaatccaattagagcattctatcacattagagagttcacattgattctctccctctgaagtcgggccgcatacacagagaaaccatctgggactcagccatgttcagtgaagaatgtggatggcatgggcatccttcccatttgggg

SEQ ID NO: 136701 - DNA, 301 bp, Homo sapiens
tgacacaatgaccctccaggtatcactggccagtctcctctgcaaagggtggaaggagcagatgaaacacaattggccagaagaccccagacaggtggcatggtcctgtccttaaccctgcccagggaccagcaccactagcacaggttccagatttggccacactcttacagttcacctgccaggcactagcagcacaaatgcccacactgcagccaccagaccccctctccagaccccctcccttcacatgttcacctatgtctctgtaacttgcttctcctaaacccttgcctgcaat

SEQ ID NO: 136702 - DNA, 492 bp, Homo sapiens
agcttcccgctgagccgtgtggggctttggtcacccgggtggagccgaagcgcggagaaaagtcctgacgtttcactcctcctgtctcctgcttcccatcctttccaggagatcatttcacttcattgttttgcaaatcttttctcccatctgagcgctgcttctttattgtcttaaatgagtgtttcacaaagagcacggattgggttttgtactttttctgtgtggttggtttttgtgtgtctgtgggtgatgaaatcgggtcggagtcgctctaaagtcatttttgtctcttgcgcgcctcagggaggatattaaaggcttttgtggatttcaaccgctaaagcctttcctcaaagttcattgcgaggggtttcagttccgcccggcagcatccctcagggttctgcgcgctcccgtggcaccgtctgcgcccgagctccggtcccgtcccgattgcctgatgccccgcagggagcgcccagcggccgc

SEQ ID NO: 136703 - DNA, 494 bp, Homo sapiens
aatttttgtatttttagtagagatggggtttcaccatgttggccaggctggtctcgaactcctgacctcaggtgatccacccacctcggcctcccaaagtgctgggattacaggtgtgagctgctgcacccagccttttgtctgacttcttacgttattttgagattcatctatgttgtagctgtaaattgttaattctttcttattgctgagtagtagtacaggttgagtattccatatatgaaattcgggatatttttggatttggggatattcgcattatatgcttactggttgagcatcctaaatccaaaaatccaaaagctgaaatggctccaatgaacatttcttttgagtgtcatgtaggtgctcagaaacattcagattttgaagcatttctgagtttggatttttggatttgggatgcaaatcatttatccatttgcttgttggcaaacgtttggattgtttccagttttcttctattacaaatg

SEQ ID NO: 136704 - DNA, 242 bp, Homo sapiens
agtgtgagccgccatgcctggcccagagctacttttttccttttggcagctgttggagttccatggcctctgaccatttacaggaatgctgtagccagtgtacttgttgagctatttctgtaggatactttcctaaaagtggagtggttagttctggattgtggtcagaggtgggcaaccaaggcagaaatgggcgtacgcatggaggaagaatggagagagtatgtgcattctcggctgac

SEQ ID NO: 136705 - DNA, 427 bp, Homo sapiens
tgcacggggttcccggggaccctggaatggggtggcccgtgagcctcactccatctccaccagtcatggcctctgctaccttgggctagccatcgcgtgagccgggcccggtcccgcagccaccgccctgcacggcaccacagcaccaacagcagcccacagcccaggacagatagggcacaggacgccccgtgcagagggcacgagtggcctcacagttctcaacggtttgaaaggccgggaaaccagtttccaggggtctgaaacaaaatctcaaaacataattcgtccaatcactgcagttatctactgagcacctactcatgccaggcaccacgctgagggctgcacacaccaacaggcccaacagacccacagaaccactcagacgcagcgggagacggccagtgaaccaactgatactgca

SEQ ID NO: 136706 - DNA, 739 bp, Homo sapiens
catgagattacagctaatgaaagttttcttctttggtttatctgcaatgtacacttttttaataaaaatatttctgtttatgaaaaaaaaaaaaaaaaaaaaaaaaaaaaaaaaaaaaaaaaaaaaaaaaaaaaaaaaaaaaaaaaaaaaaaaaaaaaaaaaaaaaaaaaaaaaaaaaaaaaaaaagaagaaaaagaaaaaaaaacgaaaagaaataaactaaaaaacagagcgcgaaccgccaagaaagagagcagaataaagactgacagggcggtaagagcgagaatataaaataacacaagacatcacggcgaaacaatgccacacaccataccctcacggagcaagcacaccacagacgatcagagagaaacacagacaacacatcacccacccacattacgacacaaacgtctaagtatacagaccacacagaggtacttataaaactacagaatctattctcctggcacagaagtatgagaaagagctaccaaacatacatacaggctataggtcagagtgatgaacagctagacgacaaatacgacgtaatgatatataatcaaatgagattcgagagagtacaataaatactcaacatacaagaacgcctagacacattctacacgtaacacctacaaatctccaatgcatggcaaccacagacatagtaaacataccaccacagttaacatcaatccaaatacatcaacatcagacaggcgctgacgcc

SEQ ID NO: 136707 - DNA, 808 bp, Homo sapiens
gagctggctggacagtttggcatgccggtactgtatcggagaaatggtatgttgagaggacaagtttcttctgttgttgctattgattattttgtgtttggacagtcaaagaaatattttatacaaaagcaaattaccaaaaaaagaggaattcagaaaccctttatgttcaggattctgtttacccgttggaagctcattcacagataaaatggaaatgtgctcagctcagctggttacattaagagggtgtttccgtgttcaacaacttttatgatgggcacaggctttcttatttttaagcctcttgctgttgccatctccagatattttttcccagctctttgcttattttcagagctgtttagcagctatttactaccttaggtcaacagcctataaaatatgttcttagttttaaattatagatcatattgcttttacattttctcaaaactacttgatttccttaatgaaaattatttcaattgttatgtgaatagtttattctgtaaggaaaacaagaaagcttccaaacgtgggtaagataattctgtgtacagcaagagtcagctgaaatgccattggtccaaggttaagtcaactgtggaaatctcaggaaggttgaatatttaaagcaaaatgttgcatatgttcctccttgtttaccaggatttataccctatatcctccaagagaggttcaaatagagattagggtgcagagaaaaagtaataattacatgaaaaggcaatgaaatgttgaaaaacagttctctaaccttccttttaaaacacctatgcttata

SEQ ID NO: 136708 - DNA, 447 bp, Homo sapiens
agagatcaggccgggcccgatggctcacacctgaatcccagcactttggggggctgaggcaggcggatcacctgaggccaggagttcgagaccagcctggccaagatggtgaaaccccatctccactaaacatacaaagaaattagctgggtgtggtggcacgtgcttgtaatcccagctacttgggaggctgaggcaggagaatcgcttgacttgaacctgggaggtggaggttgcagtgagccgagattttgtcactgcacttcaccctgggcaacacagcagaactccgtctcaaaaaaaaaaaaaaaaagatcaaaacaagtacacataagatgaagttcaaattagaattgatcgtaaaaatgaaagaaagacttaaaatattcttataattcataatctcaggtgtggggaaagaaaatagtatatcacttaaaaaaaaag

SEQ ID NO: 136709 - DNA, 318 bp, Homo sapiens
ctctgacaccgggcggtgtggagtccttggagcccttacctcttccgaggctatgctgtccgcgggctccctgcagcccctccccagtcgcgctggaggggaggttcttatcatggggtcgtctaaggactgaggggtgccagacctcaggttcttcaaaaccccgactccagatccccggaacacagaccccagatcctcaaaacccagaccctaaattccctggagcccagactccatttctttaaaacttagacctgagatctcctcgaatcagaccccctgaaactcagatttccccaaacccacattccagaa

SEQ ID NO: 136710 - DNA, 249 bp, Homo sapiens
ctgcaggtgtgtgatattataacatttctgatatctttggtcagctagctggtcgtctagccttatatttctttccattcgtgtctatgaatgagataatatgaggcaaaaagaatgcatcatatgtgagtttccattttcactttttaaaatgcaaatatttattgtgtaccaactctgcaggaggcactatgatatgtgccagggattcactatgttatgtgccggtggagtacaacgtgccggtgg

SEQ ID NO: 136711 - DNA, 391 bp, Homo sapiens
tcttagtccacccaactccttccctctcggctccttgaccgctcgtctctttccctgcgttacacttctgccacccactgtcaagccttagaccttgtcattaccagtaactgttgcctccgaagcctcagtttcaagcatcgcacctgataaccaccaccacctcctatctgtccagctcacttccttaaattgcctcccttcagcagctccaatcaacgcagcctgagaacaatggtgatgatgaaaataacagcactgccgcaacacttaccccatgccaggcactgtcctaaatgctttagaacagtattcaaaattgaacaagtgttcggtcacttgttcaatcctcacaacagccctaggaagtagccttattcttatccccatt

SEQ ID NO: 136712 - DNA, 226 bp, Homo sapiens
attcataacagttccgagtgcctgcttccaaagcttcagttgattctgtggcattgctgctagatcaagccttctgaatgtggccttttgctgaggagttcccttctgataaggattgttttgatcagggtaggggtggtatgagatccagagcttagggtgaactctcatccccttgacctctgcccctatttgagtttatactgacttggtagggactccctat

SEQ ID NO: 136713 - DNA, 507 bp, Homo sapiens
ttcctaaggggcagataagaaagcaagtacaaagcaaacttaacactttggcagaatgtaatgtatctgactttctaaaattctgtatgccagaataactggctgtttcccattccttgctcttgatatacagccaacagcctagccaggagccatgtcgaaaaggaggggaggcactcagggcagtggtttttcatggcctcattctttatagtacaatagttagtgtcccactattgtacttgtggaatgactctgaaattgtcacaccatttatgtgtaagaattgctacttctctttatttctccaattcaagcttaagttttcctgaagtttccccaccttctggagtggcaggaaatttagcaatttccttttctcataatggagctatatatggttccccagctagccacgacagaaaaacgtcgggatgaggatggttcttcagtcatggtggagacatattttctgtgggtcttttggctgtagtgctttgggccatg

SEQ ID NO: 136714 - DNA, 178 bp, Homo sapiens
agtgagccaaaattacgccactgcactccagcctgggcaaccaaatgagactccatctcaaaaaaaaaaaaaagtatgtgactgtttcaagagtgatatgaaactcaaattccagtttccaaacacttccagttttaccagcacacaaccacccccacttgtttacgtattgcccgtg

SEQ ID NO: 136715 - DNA, 622 bp, Homo sapiens
agaaaaaccaacaaagtaaacagagaaaaagtcatcagaaagctaagagaaacatcaggagagtgggtttcataggaactaagattccgggtttcaagaaggaaagttctgtcaatattgtcaaatactacagagacagcaagccatcaaggagggtccaagttcattggatttgatgattaaggaaatcactgatgactttaaacaattggccaatgaatataagaagaggaggtataaaaagcagtagaattgaaaggcttgttgatttgtttagggaggtggggaatggggttccttaggagcaggggaaaaaaataaaagacaagattaagctgcaaaacaggacaaatttatgaagcaagattttggagaatctaagcagtgatgagatcaagaaatggaggaagagtaacatcaagaataagcattataattctaacaaatattgttcaattacaagtaactttttaatgtctatcatcatgttttcttgcccaatggcctggtttcttttcacctttagccctaaaataacttcataatctaaaaaatagtattagaacttcaacttagtaatatttcctaatgttgcttttaaatcctctttttataaacaggt

SEQ ID NO: 136716 - DNA, 740 bp, Homo sapiens
cctgaggtcaccgctgtccatctgcagggcttgggagggtgagctggatacacagcagtgcagactggcttgacatccagcccaggcatcccttttcctgtgctctcccctccaggcaggccagagatggtggaggttcctctaggccagagtggctatgggagttggtccagtttataggagcattcaacttgcaacattccatctcccgggggtctgtgagagcccctacatgtccatctgtcctgcctcctcaccagaccatgaggaagcaggcctggaaaggggaaaccaattgctcagggacattgtcacccgcaccagaaatccagtgatcccaacttcccattcaaccctgcttcacaaaccccaagcaggaaaggacttcacatgtaactgttggaatgtttaaattttagacttcagaacccgtggagggaggttagaattacagggttctgctgggaggtggggtgagaagtttccgtttgcccacaagagtgtgtgttggtggggctttgtggaaggaacagctttctataaggtggtctggccactgaagcgtgtcgggaatgtcggggggcccggggttacagctgcagcagaaatcctctcccacgcctcggctcttctctgttgcacagaatgttttctgcagcctttcagacctaaagttctagggttctggcacgtgtgttgggagggggtggggggttgctttgttttaacccctgcccttc

SEQ ID NO: 136717 - DNA, 576 bp, Homo sapiens
  misc_feature (21)..(21): n is a, c, g, or t
  misc_feature (23)..(23): n is a, c, g, or t
  misc_feature (102)..(103): n is a, c, g, or t
ctctagttgagccccgcgtgncntccttgcagattgagctgtctcttcaaagaggccaaatatcaagttcttgttcttcatcccctgctggaagaccgaatnnctcctggtcttacagatgaccaagtcggcccactgcacccggccaggaagcagtactttccactggtcttcaggggcaagggtttgggaaagagggtttgtgtggagatttaacatttcttatgagtctatggcaggctaggcaccatgctaggctgaggatgcagagatgaatagacaacagtgcctgcttgcagaaagccctggtctagagggaatatgctaagacagccagctctctgagggaacacagatttattttaatcgagtcttagagacctaggcttctggcagacttcttttaaaaacttcttattttgggataattttagattcacacgcggttgtaagaaaaggcacagagagatcccatatacccttcactcagtttcccccagtggtgacatcttgcatcactctagtgcaatctggcagaattttaagtctgtttaggcgtgttttctctgcaccgtc

SEQ ID NO: 136718 - DNA, 318 bp, Homo sapiens
agctgcctgacaggagcctgaacttggcagtcacgaccagctgaagggatgaaaccaaacaccgaatagtgtcagggtgtttacccaaaccaaagacttctttcttcatttaaatttgtcttgttggaaacatttcaaaaaaggacagggtgtagtggctcacgcctgtaaccccagcactttaggaggcctaaatgggaggattgcttgagaccaggagtttgagaccagtctagtcaacatagggagatcccatctctacaaaactaaagaaagttagcctggtacagtgtcttgtgcctgcagtcccaactactc

SEQ ID NO: 136719 - DNA, 865 bp, Homo sapiens
ggtcaggaccatccacatcacaagtgactgtccctcatcactttcaaatgtcctgctcaatgtttatgtccatgaaaacttgtttatacataggtggatctagcatccaaccccattttatatataaacacacaggatttattttttgcagttttaaaatacactgaatttttcaggaatgcagcatagagtgaagatggtacatatttgttcaggactttatgaagattgttcaccattttggaaaatcatgttacaaatggcaatggtaatcacagtgtttgagccatactaaaaacacatgtgactctgtgtgcatttaaatctattgcattcatggcgactctacacataggtgcagacatctaactacttagtaggatttccagtgtagtcatgtacaagattttttagatactgaaatacttatttttctataaaatgcttttctttctttcttgattataacccagtgagtgtattccattttttttttatattatgaattttgggaggaaattttatgtgtaggtagatatattatctatgggtttcatttgagcataacaaaaggagagttacaagttatgtgttgttggtttgttttcatttgtttgttttttctgagacggagtcttgtgttataagaagggacactgagtctgatgtggcagagagccactatttcaactgaactagtgcctgtgaagaacacgcatctgtctgttgggctgagcctggccccaagggacctgtggaccctggatcctgaagacactggatccttgagaatcgcttgaaccccggaggcagaggttgcagtgagctgagatcatgccactatatgacagagcaagattctgcc

SEQ ID NO: 136720 - DNA, 258 bp, Homo sapiens
tgccattgccagcaggtgccttgcgcgggtacctggctgcgcttattcatccattatggtcgctctgtcactggtgccattatgtgctcacatgcccactccctcaggtttagaagtcgcgttgcccggcaacagaacaatctgctggcttagcctttggccaagttggcagctggacgaggacgctcagagcccagctcttgagagttcaagtatccgacagttccccactgctcccaggagcggtatatctccgct

SEQ ID NO: 136721 - DNA, 460 bp, Homo sapiens
tatgaagtgggagacaaagagagccacaagtcttgtcacttgcagatggcggaggggcgccctccggcccttcctgacctaccctctctcccgctatggcggttgtcccaagcactcagtgatgggcacggggctgggcaccgccactctagggacatcagccaggggctggggtgtgagttgcaggaggggatgcagggctggagggggattagcaattccgagcactggctgcataattaaaaaatcattacggcaggcgggcagagctgagtgtgagctcacgcttagagcgggcggggacactgccatggcgctccccctcccactgcttccccgaggaaaaatcccacctgctaatataattatggaaaaacacaagcacagaaatttggtttcagcaaacaacgtgcctcagtgcccagggcctgcctggccctcagcacagcgagcaggctgg

SEQ ID NO: 136722 - DNA, 799 bp, Homo sapiens
ggaatgacatggctctggcttaaacacagatatgtcaaaatatgttagctataaatagggtatgtgcaatactcaaaataaattcctgtttgaaaaagaaatcgcatcattctccttcatctactctctgctttctcttcatgtctcctttccagacttggcctagtcactaatttaaaggtcaagtcatgattaacctctaagtttccctgtctggtagccttgtcattcccccggccctgcctcaccacctcagctgaaatacagtttcactttttacccagtgttctatgtgcgtttgtcttgcgtactcatctccctttgtgcatggatagagtttttaaacatctctatacaggtatgtgaatatcatttggtttcaaaaagttgaatttcactcttcagtgaatttgctctataatgatgacatgagcaatagagaatatgaaaaatcaagaaggaactctctaggtaacatggacaataaataatcacagtcgactattttgttaatatcttttatcttacatttccaaggctaaaatatattacccagcagaggtaggttcccttctcccttacttcctgaccaattcttttagcttttagataacccctaatgatttaatttttaaagaaaggttgtagtggaatggtggatgaaaatattaccatagctgcttctctctgtgggtctggagcatatcatcactctgctttggatctctctctgcctctgctgattctaccaacttaaagtgtggttgggattatccaaggcagagtatactctgtgatt

SEQ ID NO: 136723 - DNA, 241 bp, Homo sapiens
taacataggcctcatatttacactatatgttcgctttataattccgaagttgttatttgctaaatctccaatggttgcaatcaaaccccacaatgctgaaaacagagattgattttgatgttaagaacaaaagaagtatggaaacttccaggctcaaacatgtcccccgtgccacaaggcaaactgcgatgagctcacagtccaggtctcttgctgtgtgtcctgcagggagtggccaact

SEQ ID NO: 136724 - DNA, 361 bp, Homo sapiens
aagtcgaagacgccagaggggtctctcaggtgaggtctacagagagaggtcagggaataatagtacattgtgacttggcagctgttggttctgacaatccatattcccaacagctctccttgatctctatccatttatgtgggaagttttgctgtatgaaagggggaagaaatgtctggaagtagatggaagtacttgtgccccctactcactccttcagactcgacataagcactctataaagagagggacttagagcaagaataagctgatggaacaattcaagatgggacttcccaaaattcagggccaggcagagctgcttgagagcccaggcaagctggtgtagctcagagggagc

SEQ ID NO: 136725 - DNA, 155 bp, Homo sapiens
ttagaaaaaatcctgtgaggccacaacaaacactctgaacgtgtgtggagatccaagcaaagagactttttgttattgggggttgagggggttgcaccccttgtcctcagcaactctttgacttgtttcggacacaaacagctttctaagttgca

SEQ ID NO: 136726 - DNA, 707 bp, Homo sapiens
cctctggcagtggaaaggcaaagcagcttgcttgctgttgatgttttttccagtgccaatacgggtgtttatggctaaggcagctgctcccggcaacatgccgaggcctctggagaaactctgctatgcagtggaaaactgggaacagagcaagaaacccaagaaagagtgaaccttgattcaactggattaaatctaaaagaaaaatgctgatctctggatagaaaaataaatccaagacaaagactcttttatggccttaaaaataacacatttagggttagggctagggaaaaaaaaaataacacatttgcagccattcgcttttaggagaggtctctcttttgttttcttcttatttaatataaaacaatttcactatttaaataaaagttatacagcttccaactattcaagcagttttcatattttttcatcactaaaggaaatatgctccactgaaaattcaataactagttggaaagaatgatatattttatgcacaattagctttagattatcatctattgtattattgagaagctgttctctgagggcattattctttaaacaacagatatagaaagtcttccaaataatataggcaaaaaaagaaaaaaaagaattcttttttggaagtctattaggttaactacagttaataaaggctaccatttactgagtgcagaacaccgtgctaaactcat

SEQ ID NO: 136727 - DNA, 124 bp, Homo sapiens
actctagaggatcttttggaggcaggccactgcaccccaccccactctcaagactttgggcagtcctggccagcaccagaaacacactcctgggaacttccttccccggaaggaaagaggctcc

SEQ ID NO: 136728 - DNA, 407 bp, Homo sapiens
gaacattagaaatagttttaactcattaaatacacatgttttatgggaaggttttatatatatatttatatgtaatgaatgtgaacaaacaagggtcagatatacactctgcttccctccagaccagttccggctgctctgctgcacatttcaggagtcttattagaattagccacattctgcccacttgcccttacttctcatatttcacaactcctcctggtggggacttaaggagacattcaaactaggccttgaaagatgagaatttttccaagtggaaaaagaggagtggcagcaagtaaggtaaaggtacagagtcatggaattcccaggaaacgtaaagttgtcatgtgttataggaaaacaacttgtgtgaggggtgttgggagaaatgagagataata

SEQ ID NO: 136729 - DNA, 327 bp, Homo sapiens
ttgattttctaaccttagttttcatattgcctcttagtgtacccatgatctaaatctaagggcttaaacattattattgttgttgtattagcatcaatgggccatttccattcagtttctataaatgggatctcataccacctctctgccccgaattctctctctctctctgcgtgtgtgtgtctctctgtcacacacacacacatccaacacactagtgaaaactgcagtgtcatttgctgcaccctggagattactttgtctttgagagtccaaagaaaagcccatcagctgtcaagggttttaattatttatttttaatcacaa

SEQ ID NO: 136730 - DNA, 268 bp, Homo sapiens
gtgataaataacagtgccttctgggttctgtttttttaaaggagtctttgctaagccattaatattgaggtgaagagagaggagaagaaatggattatgcctgaccgctggagattagcagcctgctcaggtgaagggtggccacacttattaatgcactaatgagcaagcagggtcattctgatgattagtaattttggcaacataacttctgccccagatttgattaagccttcatacagacttcctcttccaggagattatcttt

SEQ ID NO: 136731 - DNA, 449 bp, Homo sapiens
tctggaagtctgccttgcctgatattaacagaagcacttcaactttctttctttttttcttttaaacaactgctattctgttaataaaatagttgcttgaaacatctgcagtggtgactttaaccttgaatctcagctcagtacagatggacgtaatctgcttagcaatctcgggaggaccatccaggtcagtgagtcacttgcggatcctcatctggaaacgatcccttgtcctagaaccttcatcacgaggcgtttttcttatagtgattctcagagtcttgataggcatctgaactgatccttcactttgagattcttttcctttgcacctctgatcaagtcagcacacaccttctccagagatttgatgttgcggcaggctagggtaattctgatttaataaattgccacctctagttccacggatggctttgaaagccatagct

SEQ ID NO: 136732 - DNA, 268 bp, Homo sapiens
actgcacacacctccagaggattccgatgctcccaaagtttgagaatcgtccttctttttctaccactgttcccaaggtccttaaattctttcaatccctttgtaccacccactaagtcatctcctgcagcctcccttttacaggttgtgttgtctgtagtaagtcattgcagaaattctctactggaaccatatgctaactgtgggtaggagaagaacaacatatgctcaggtggtagagtaactaaaagcaccccaagattttcct

SEQ ID NO: 136733 - DNA, 567 bp, Homo sapiens
aacaatccagggctgacagtgacgttcataaaaagtgattttctccccctgctgctaagcttagcatgtggttctgtatatggtgggaagacgagggatctggattcagggtttaaaatgcatttcagctggagccttgatgccttagtgtccgtgtggggtgagaaacacaagggatgacagacttccctggttcaagagagcatggggaaaccgcaagccagaatgtgtccaccgcccagactggcctacgtgggcctcggctctcagaccctcccatctcaccagccaggcctttgaggcctctcctgcaagcatctccccaaggtcccacagaggtccaagagcccagcatggcagcgatgcttacgtgaaatcacacttattacatgatctgccacagatctcttcctaggaggctacaaacttctacagacatgagctctggtatatcatcctagggatacaggaagccagccagccacagccctctatttcctgagcactgaaaggtaacccaactgcacacagcccgcttctgaacaagggctatcctaagcccccaaa

SEQ ID NO: 136734 - DNA, 216 bp, Homo sapiens
tccaaacttctcagacctataaatcaggaaatcattgttggctaaactatttatcttttagattcatcaagttcatgtttataatctgtttagaccacccatgatgaggaacaaagaaagcaaatttcttcaaattatatattcttattcggtaactcaagtttatgccatttttctaccaaacttgtaacttttttttttttttttttttttttg

SEQ ID NO: 136735 - DNA, 716 bp, Homo sapiens
cccaaaatcattaatccttcacattccattaattttcttctacaatgaaagctgttaccacaaaataatcactactatttttcagctacatttacagtgtgtcaagagctgtgctttacatattatcccgttcaatcaaatcctcacaacagttctttcaggtaggcattattatgcttgttttacaaatgaattaaaccaaagtttaaggctcatccaaggtcagagagagagctggttagtgggagactaaggatttaatatcaggcactcttttaaccaatataaaagtaacctgccttggctggtcatggtggctcatgcctgtaaccccagcactttgggaggccaaggtgggcggatccaaggtggccaggagtttgagaccagctggccaacatggcaaaaccccgtctctatcaaaaatacaaaaattaaccaggcatggtggcacacgcccgtaatctcacctacaagggaggctgaggcatgagaatcacttgaacccgggaggcgaaggttgcactgagtcgagatcatgccactgcgctccagtatgggcaatagagcaaggcgctgtctcaaaacaaacaaaaacccctgcctcattagagaatgctttctaaaaattgagggaagggagagaaacaggtataatttgaacactctaataactaagttacaaattcattatttaacatatagtttcagtcaag

SEQ ID NO: 136736 - DNA, 229 bp, Homo sapiens
attcagtggtgccatacctggggcccacatctgttgatttcaagtcaaatactgtttccatgttactgtggaaatacacttccataaatctactgttattttttaaacgttaactttaaaaagcactaaatcccaagattacaagatcacatcactaaagcacaagtcttccagctttataaattttcttgatgacttgtttcttaaattacagaataaaatgcagcag

SEQ ID NO: 136737 - DNA, 574 bp, Homo sapiens
tttttttttgagacagagtcttgctttgttgcccaggctggagtacagtggcaccatctcagctcactgcaacctctgcctctctggttcaatcgattcttgtgcctcagcctcccgagtacctgggactacaggcgcatgccaccacgcccagctaatttttgtatttttagtagagatggagttttgccatgttggctaggctggtcttgaactcctggcctcaagcaatccacctgcctcggcctctcaaagtgctgggttacaggtgtgagccactatgcctggctcagatgatgtttgtctcatgcattcaaatcttcagtgatttccctttacctagagtggtctttcccaaagtacagcatctggacccctgctggcacacatgataatttttacatgatacataatagttctttttatttttattttttattttttgagatggaatttcactcttgtagcccaggctggagtgcagtggcacaatcttggctcactgcaacctccacctcctgggttcaagcgattctcatacctaagcctcccgagtagctgggactacaggcgc

SEQ ID NO: 136738 - DNA, 407 bp, Homo sapiens
tggatgttattgtaagtggaactgttttctaattttcttttcagattgttctttgttagtgtatagaaacatattagctgatttttctgtgttgattttgcatcctgatactttgctaaatttattatttgtaacaattatttttgtggaatttttagggggttctatgtataatattatattatctgtgaacatagataattttattccattcgcaatttaaataaatttaatttctcatttctaatttatctggctaatattttcaatattgtgttgaatagaaatggcaaaagcaggcatccttgtgttttttcttatcttaaaggaacagctttcatacttataccattgagaatgatgttatctgtgtgtttgtttgttttcataatggcttctattatgtt

SEQ ID NO: 136739 - DNA, 927 bp, Homo sapiens
gttttttttactttcacctgttaaagatgttgttccgccgtcttctacaagaggttcttctccatggtttctgatgcaaagtctgcaatcattcagtcatttttatttagagtgtgaataatgtaaataatttctctggctgctttaagattctcaccttgtctttggctttgagcagaattgactataatgtccctatataattttttaaatacttatctttttggggattcacaggcttcttgaatctataaatttatgtccttcacctaattggggaattccttgggtaccattttttcaagtattttttatgactcattttctctgtcttctttgactctaattttccccccttctgagactctcgttcacgttatgttagaccttttgatccttaatactctctgttctactttttaaaatctttttttctctcttctttggattggatatgttctcttggcatgtcttcaaattcactaataattagctctgtcatatccatgctgatgttaagcccagctgatgcatttctaacaattccatataattctttttaaaatttccttgggatttcctgtcttttattcattataagcctattttcctttacctagttgggtattgttacagtagctgttttttaaagtccttctctgataattccaacatctgggtcatctctgggtttgctaaataagtttgagttgtatcccaaatttcgtgaatgttatgctttggcaactctggattatattacattcctttgatgggtgttaatgtttttgttttagctgataatgagtttggttaaactcaaattgcaacctttgtctgccctgcagtggcagcagctcaaatttcagccttatcatagcaagcctatttgagtcttccttacacacacagctcagctcagacatc

SEQ ID NO: 136740 - DNA, 289 bp, Homo sapiens
agctgggactacaggcgtgccccaccacacccagctaatttttgtattttttagtagagacagggtttcactatatgttgtccaggctagtctcaaaactcctaacctcaggctgtctgcctgctttggcctcccaaagtgctgggattataggtgtgagacactgcacccggccaagaaagattagttctaaatcttacaaactgaaggtactgacatgtcggatgcttaatgaaaagtcccttgcttcaaattaaaatgggcttgtgaaattaaaaaatctttcatg

SEQ ID NO: 136741 - DNA, 409 bp, Homo sapiens
gcccaggatgtgggtgatggtatttgttgcccctggtgatggagcagatttgatctgcctatgtgggaagggtttaactcagcgggtgtggattgctcaaaccctgcacgttcccaggaggggcccttggctggctcctgggagctgagctcctgcagtgttctgactgatgagagagactggagccatgttgcactactttgcctggtagttgaccaacaagtgatggatggcaaacacctgctttcgctgtgggtggctggaacttccctgactgacccccaggttcaggagagcctccctggtccgcaccacggcactagctgtcccagcttcttgctggaggaatccggtgcaccctgtgtgactccgctgggagggactctggaagcgcctggcttccctggca

SEQ ID NO: 136742 - DNA, 421 bp, Homo sapiens
aaaatgaatgggcccaatcaggtaatttgtgtgtctcacaataactaccaggaggtatctaccaaaatggagcatgtcaacatgtgtgttgtctaatatcaacaatgaggtgaataggatactttattctatggctgtcagccagccttccacttgggccaccacagagttgacgtagtgagcccataatagagtggccaaggtgcttcctctcaccaatgttgaaaagctattgtaaatgcgtaaactgccaatgaaagagactgatgacaaccactcaatatgacatcattactcaaggaaaccgatcacttggcataagattacatgggagtggggaggtagagggagtaaaagagttggtggcagggtggcaatgatttgtctttacagaattaatacctaatctgaacatggattt

SEQ ID NO: 136743 - DNA, 769 bp, Homo sapiens
ggaaaatgttggtcaaagggtacaaaagttcagttaaacaggaggaataagttctggatatctattgtactatgtaatgactgtagttaataatactgtgttgcatattcaaaaattgctatgtgtcgattttaaatgttctcaccaccaaaatataaatatctgaggtgaaggagatattaattagtttgatttaatcatttcacaatgcaaatattaagttgcacactgtaaatatatacaatttttaattgtcaattaaatataattgaaaaatagaacataataaaatattggattattaactctatcaggaaatgaagctttgagtaacattttactgtttatatttatggttttagccaccaagcaaacatggtggtcaagaacttggactcacattcaggttgccatagtccaaattcaggcttccctactcactaatgtgttcttaagcaagaaataaacttattttggcttcctttggtaaaatgggattaataattgttcctatcctacattttattgtgaagattgaattaatgaaatatacacgtaaaacacttaagacaattcctggccttagtaagatttcaacaaaaatggtcattattatgatgctttattctgttacatttatggattattagacagataaaattggacctcatatgtgaccattctattttcctttattcaaatggaaaaagaatgtcaattcaacatagggaaatactatatatgtataaattattacttaaatttatgt

SEQ ID NO: 136744 - DNA, 470 bp, Homo sapiens
cctgactaagattcatcaaatgctaacttgagatcagcaatttcactgtatggtaattttaagcaaaaaaactcagaagtgtaaacagatcttaaactctagctaatgatttacttggaagtgggtgcatgaaagaatactaatatatttcgaaggaagtttcagatatcaaaaaaactaggttcagtggctcaggcctgtaatcccagtattttgggattacaggcatgagccaccacacccagccaggatacagtattttttaaaaagcacgcccagccttgaatggaaaaccactggacgagagtatgccaccttatcgggctctgtaaatgccttatatctgcacaaggctggaactttgagtggagtccttggctaaagctttcattactgcctggtgacctctcttccctctgctgctaaagcttgtgtttcagaatttagacccggatgcatccatgttgaaa

SEQ ID NO: 136745 - DNA, 200 bp, Homo sapiens
cctgctttgctgcctgccacaacagcatgctattcttcctttcatcttcacatgagggtcttcaactaaaaataaaaactaatactaagtaatagcattaatcagtatctatagatattttttcttcttttctgtgctaattatccacttaagaaatagcttcttaattcaccttcttattttaaatataagctttctgt

SEQ ID NO: 136746 - DNA, 484 bp, Homo sapiens
attgtgttggtgacagtagggatgaagaagaagtgattaatttgagatatatttaggaggtagaaatcaatataacttcttaacagactagtatagaaattaaagataaccaaaacttttagtttggtaaataaatggtataacattaactgaaaaaggaaaagatggtttgagaagatgataattattataactaacactaagcactattctaaatcctttaaagcactaactcatttagtcttcacaacaaccgtataaggtccctaaatctacagatgaaaaaattcatagccatattcttcttgtgagccctaggtctgttttccaaatgcaaattaaacacaactcccttgatgtccctcagacatgagagatgtttaactggttgtgtaccgtacagtgtaatgtggtagttgagagtgtgtctgagatcacatctgggttctgccatttctggctgtgtgaccttgggcaactttat

SEQ ID NO: 136747 - DNA, 369 bp, Homo sapiens
actttacaaactttattatttaattaaaacacacaccaatgctttacgtattattttccccaactttatgaaaatacaaatattcatattcaaagcacacgagcactgatgtccaacttcaatggaatcaaagtgtaccagcctaggcaaacctggatgttgactcattgaacgtcttcacttaagagcctgacactcacaaactaatggctaaaaaacaagtactttctaacagtgaatatggaagtcccaaatcaatgtacacctcttcttagagccttcaaacattttggggctgggtgcagtggctcatgcctataataatcccacagcactttcgggggctgaggcaggcagatcacttaagcc

SEQ ID NO: 136748 - DNA, 604 bp, Homo sapiens
ggtagaaccgggagtggatgcgaagtcttgattttcaagggttgtgtgctcagtggaattacaggctttagagccaagttctaagatgagttagtatttactcaaggaatggcctttgcagttaaaacttacctgtagaatgtgtgattagtgggaaacatgaaatattgggtggaaaatgcttatcatattgcctgacacttggtaaatgcttctaaatggatgtcatcattactgcattttactgaatttaagcaactcacgactctaagatgcatcattactttatgtgcctctaagaaagaaagaaaaactactgccagttaaactatgacactatttgcttgcgaagtgcatccagatttcagagatgtcagtacgtgaaagaatgggcagtgtggtatttcacttctcttttctcaactctatgaagattcttactttactgaattagacacttaacagtacatgaaaattcctgaaggagaagtatacttagtgtgtttgaggaacaacaaggaggccagtgtggctgatggggaaagtggggtaaggacaaggtccaagacagccaggggatgtctgattccatgtcttcactatt

SEQ ID NO: 136749 - DNA, 249 bp, Homo sapiens
tgagattggatgtatgtttgtgtccatgagaaactgccagactttttcccaaaatacttacactattttatactcccatcatcagcatatgtgactcccagttgttctgcatccttgtcagtatttggtgttgtgagtctttaattttagccattctagtaggtatattttgatttcttgttattaatatagtttgcatttccctgatgactaatgatattgagcactttgtgtgtgtttattggctat

SEQ ID NO: 136750 - DNA, 352 bp, Homo sapiens
tggtccaaaataaaatttcccaatacattaataagagttaccataagtatagatataatcaagatctattatttcacctcaactaggtgagttattcatgaataatctgaagtggactgctttaaacgaaactgtgatatgtattaataccatgattcctttaagttttttgcaattttgatttttacaacacatttctcttagaatctttcaagatacagaaactacgttttctgattgtgtattttcctacctcttcctaaaagaagtcttgcctacagtcaattgtctactactaagttagtatgaagaggggcaatatattgaagtaagccaacacaacttactgaga

SEQ ID NO: 136751 - DNA, 540 bp, Homo sapiens
  misc_feature (42)..(42): n is a, c, g, or t
  misc_feature (54)..(55): n is a, c, g, or t
  misc_feature (57)..(57): n is a, c, g, or t
  misc_feature (111)..(111): n is a, c, g, or t
acttgattcagcagccgctatgttatataatgaatttttttnctttgaaggcanngnataatatttgtttccccattcccaaaaacagaatgattttttcttccaaatggnaaaaaagattccttcacagtagccttttaattctatcaaatggatttcttaaatatccaccagttggtaatatgatgtggcacacacatagacttccaatgtgtatgggccacacacgtggtgggccgtcggctagactcattgacacagcggtctcacccctgtggctgcactcttgtgggaaggctggggttggctctgtgaccagtcaggtgggcctaacaccagtgggcagggaaccagagacctttccctgtgtgggaaccctgctcacagggtctcacaaaccgcgctgtccacacgcagcatcgacgccaagggcccccagaaggaaatttgtgattttttgaaaaccgccctataaggcttatggaaatacaatttggaatccattagcttcaggtgtttctccttttggtgatagggaaa

SEQ ID NO: 136752 - DNA, 287 bp, Homo sapiens
agacagggcttttatgatgcgttgagtgcctccttgttaggcttaaattgtgtgctttcaggaagccaaaacagcaatgaagactgtgatttgcaaacattgcatcattgggttacaaattcagagcttttctggagagatcaaaactatacattttcaccacctgatggggtctgactgttgggaaatgacattcctgttcttgcattatttctggtcatttggtgagtgatctcagagtgcagggctgtctttgttcagaacccagctatcaggagtgagatgaa

SEQ ID NO: 136753 - DNA, 297 bp, Homo sapiens
tttgtaactaacctggcattataaaatcactcccacatagtagctgggacaactttatatgtctgcagatttggcacttattccttcaaaaggtagattttaatcgttttatccttgaatatggcctcatttctaacaagtagaatgtggcaaaagtgatggtgtgggacttccaaagctgggttataaaaagcactgcagcaggacaggggagagagaatatcaggaagaagagctaatggatgctgggcttaatagctaggtgatgggatgatctgtgcagcaaactaccatggt

SEQ ID NO: 136754 - DNA, 108 bp, Homo sapiens
aatctagcttttacctagtgcagctgaaaatctctctatataatgcaaaacttcaaaccaccttaccaaagagaggacagcactgagacctagttatctcttaggaaa

SEQ ID NO: 136755 - DNA, 469 bp, Homo sapiens
aaataacgtcatattcatggatactggggataaggacttccatatcttttggggagatacaattcaactcataacaccaattatattggaaccctatttgccatctgtgcacctctgcctgcgtccggcagcttctcaggagaagtccctctgcctggtctgccattcttgtttgccatgcagatttcagcgaagaagtcacctgctggagaggccttccctggccaccctcaatatagagtgattgaatgagtgaaatagattgcagagtaaaattaaaatgtgattgagaattatgctgagcataatttacccttaaaagtgtgagagaactcctctccaccccacatcaatgttacttgtaacttttttgtatatgttggctgtgtccccatcacagatgctatttaaatatcattttgtgcctgtgaattgagatgtcgggcaccttctgaatgtcatgatgttt

SEQ ID NO: 136756 - DNA, 393 bp, Homo sapiens
ctatctaatattaccatagagatctcagatcttccacatctgcagggaaagagaaggggtgtgataattagcttttgtatgaggggtgttgagtagtctttcctgagatgatatctgtaaatacggcttgaagttgatgatgtattaggttggtgcaaaagtaattgcggttcttaccatcacctttgatggcaaaaccacaattacttttggatcaccctaataggaaaggagcagagtaggataggcatgttgggagaagtggaggacagggacgcatagaatgtctgctgtgagatgaccagtgacattcagccatttccagttgctcgaatggtgcagcagtgactttgaagtgtccagatgggagtggagtgagtgtctccacttgca

SEQ ID NO: 136757 - DNA, 443 bp, Homo sapiens
ttcactgggagaaaagaggtttatagcttttgccacatgatgccaattactttccacacatatggaaccaattcacagtgccagcagcaagaccctggtgtgtccgttgctctgtgctctgccaaatgtcttactcattgtgtatatttatttttgctagtttaataggtgtgtgacagtacttgcaagctgtttgaatttgaatttctgtaattgccagtgatgttgtgtatgtttccatgccatgatttactgccagtgttttcttatatgtaaattaactgttcattctctcaaatttttacttgctggaatctgtgagcactgtgacagccagggcaaaggtctggccatcactgctgggtcccaagcatctggcaggagatcgataaactttggctaaattaaattcgatcatcagctgacatggagttgcaccaatg

SEQ ID NO: 136758 - DNA, 315 bp, Homo sapiens
cttttgcttcattagagatacactaagacaggtcccttcctaatccattatggcagattccctaaagaatgttagttagagattttgcatatattgttcattacttcgcagtgcagatatgcaaaaatgcagatgacctgccattaacttgcttaaagaccaggaaggggtgtcctcttcctgactgatctggctggcttctgttgcagagacctctgtcttggaactgcccatggcaagatatgtgcctgctgacgggaagcctggtagtaataccatcaagccttatgtccagaagagcacaaaatgtttctc

SEQ ID NO: 136759 - DNA, 219 bp, Homo sapiens
tctcccacagagggtattgccaaacctttgggctcttgccaactaaagagttggaaaatgcagccaggcgtggtggctcacgcctgtaatcccagcactttgggaggccaaggtgggcggatcacaaggtcagcagatcgagaccatcctggctaacatgctgaaaccccgcctctactaaaaatacaaaaaattagccgggtgtgatggcaggcgcct

SEQ ID NO: 136760 - DNA, 184 bp, Homo sapiens
tctcaacaaactagtccctttgactcccattatagccttctattatacaaatagaggcacgtgtggtttgtggttgaggaaaagaatgctcatcgctagttcttacttgcagtgacttatctgtgaatttctaaagtgcctaaaccccttctgaaggatataatgaaccacggaaatggaaaca

SEQ ID NO: 136761 - DNA, 359 bp, Homo sapiens
caagatgttgccctcttcttcagctttatgctgaagccacacaaattactaggcaagaagcaggtagggaagattctagataagggctgctgtgaaatacaagaaaacaacaagaacaacaaacctggcattacagtacagttttcattcccaatgcatgctttttattttattttttgaatctagaatgctaaagtgaaaatcggttatctcgtctcctcactttgcagactgcttaaggcccagagaggttatctgctcttcctgagctcacacgctaggattacaccaaaagtagaacaacctgtcacttaagttctttatctttcattatatactatcccaggaacagaagatgt

SEQ ID NO: 136762 - DNA, 317 bp, Homo sapiens
tagtgagagaaaggagacctaggggaggaaaacacagagtgcgctaatcttatgatacaagtcatatgagtcctctacctgctatctctccccaccaggtttctgctccctttgcagaacactagtaatgcccataaatgtcgatttaaaaaaaattcactggataacatcttgctataacaaatataactttagattacacacattcagtagaggatagctgagtgtagtctgtcaaatactgtgatttcaacctcaagcttgaatcagtcttaaaccaaagataatacatttgcataaagttgtagcaggtaggg

SEQ ID NO: 136763 - DNA, 314 bp, Homo sapiens
tgttgggattacaggcgtaagccactgcacctggcctaatatttggattaagtccccctgttgaaggtctatgtaccattggagagtttggtaaaaggtcttcttgagggggaaaaagggtttttgagccattatttacattttaactctgggaatagaaggcctttgcttttaagatgtcattctttaatagctttagctgttagaaacaagttttgggggatgtgcacaattgaagattttccgcccttttttggcctaatttactaataaagagctaatcttattgcccagctattctttattaaggccag

SEQ ID NO: 136764 - DNA, 581 bp, Homo sapiens
cagcattaaaaagaaaattctgacacatgccaaaacacagatgaaccttgagacataatacaaagtgaagctagtcacaaaaaagataaatactgtatgatttcccttatatgaggtaccaaagtagtcaaactcacagacacaagaaaatagaatggtagttgctaggggctgagagaaaggagaaatagggcgctgttgtttaatgggtatagagtttcagttctgcaagatgaaaatgttctggagactggctgcacaacaatgtgaccacacaacattactaaactgtgcacttaaaaatggttaagatagtaaattttatgttatgtgtctttttttaaaaaaatttaattaaaaaattccctacactcaagtcagtattattcaatattgtagactgtattcagtaatatttttgggtcatgttttgaattttctgactacaggattcttcatctattaaaaagccttgtgggtgaactacacgtttacctaacattaccaactggtattgtgagcctgcattaattaaatgttctgagaaatccactttgacttcttttaatcctttatcaaaa

SEQ ID NO: 136765 - DNA, 455 bp, Homo sapiens
ttacagtcaacctatttagacatttggcaaaagattcttgctgtcagtatataaaatgtgcttgtcattcataccaactgacctttcccaaaatcaggcagtactgagttaggacttgtttaaatctattcccatgccagaatcttatcgatacataagaaatttaggaagattaggtgccaaaacacccagcaccatacttgtatgtttttagcaccatacagagctaaaatctcaggaactatgaacactctagaccttatgtggtttattccttcagtcatttcaaacattgaaagtagggcttacatggtgatttgtctgctcactttatgtttacgtctcccacattcatactagtatacatcaggtttgcttagccattgatatttttttaaccaagccttacagtgattatttcatgtgtttctataaatctcactttgtgcttttat

SEQ ID NO: 136766 - DNA, 483 bp, Homo sapiens
agttttcataagtatcacagggctaagggatgagcaagtgatactaggttaaccaggactccctgaagacattgttagattatatgctttaggagtgattgtgtttttgatgattttcaattccttcaaatatgccactatattctagtatttcactgtttttatttcatagcagagtccccttctgaatcatggtgtatattcatgatgtatgttcctaggctagtattttacccaaaataggaaagttttagagatcattttgtatctgaaaagtattcccttatttataatgttgatatctaatataagtaatgtgataatttcttttaatttttgtatttctgattttttcagcatttcttattggtcttctgaattgtataaagaacaggtttttaaaaatacattcaccagcctccctaagaattgcatgagagtacctcttaccactgttaaataaataactcctgctccctttgt

SEQ ID NO: 136767 - DNA, 496 bp, Homo sapiens
actgctctggagattgattagataaccgtggcaaagtgctttgaagacaagggatgtaggaaatgttctgtgtgggtggattcccagggcgcttcagacgagattaaggcccacgaatgggtctgctcggctggccgggatgctttgtgtggaaaaggagtctttcccaaaacatttctcctagaggggctgccaaaatccgcccagctctgctccacacccaagcgtgtcttccttcagcgtggctgtcacatgacgaaaaggaaacttctacactcagttcaattgtggactggtccatgtgatgttgacatgcacttagatatcaaagtgtgtctttgatgagaaacaactactgaatgttttatttgtgcctgtattttttaaagtattttatttgtagaaaaaaataaatagagattaggagtggtggctcacgcctgtaatctcagcactttgggaggccgaggcaggctgatcacgatgtcaggagttc

SEQ ID NO: 136768 - DNA, 427 bp, Homo sapiens
gtagagtactggattattctctatccattcatcaggacccaaatgtaccaattcttaccaagaaaatgtaacagaaatgtccaaatgagctatcaatagttaaaaacatttatttgaaaaatgaggcccctcaattacaatatttaaaacccaatttaaattttaaaaaattagggtgtggtagggcacatctgtagtcccagttactttggaggttgagatgggaggactgcctgaacccaggaggtagaggctgtggtgagctgtgatcacaccactgcctgggctccagggtgagactccatctcaaataaatcaataaatgaataaataaatccaattaaaaaaactacagtgaacagcagctgaataaaacccaatttaaaagtgaatgactagtatgcacagtggctcacgcctataatcc

SEQ ID NO: 136769 - DNA, 938 bp, Homo sapiens
ctcttgaataactccagtgtcttgaaatctactatcttcaccctcatgaaaacgtcaagagtttgaggaccacctctttctacatctactagcctaaacattttccctccctttagctagtcctccttgacatagtgtggactcctggcatcaccttgtctactctctggatgagctcaaatgtgtcagtgtgcctgtctaactttggtccagatgtggcctcaccaagccaaatagaactaaaccattacctgcttgcttgtagacctggaccgtaggagagcccaaggcccccttaggttttctttactacttatgctactgactcatatcaaactgacacctaagctggacatggtggtgcacacttgtagtcttagctgctctagaggctgaggcagaaggtagcttgagctccaagagtttgaaaccggcctgggcaacatagcaagatgcccatctgacaactgacaaaaacctacaggtgttattttcggggtaaggtagggttgttttgatttcataataataaattaatgcattaattttatacaacatataacattaaaaaccttcattcaaaaaaaaaacaaaactacaggttggacatggtggctcacgcctgtagtcctagcactttaggaggccaaggtgagcggattgcctgagcttaggagtttgagaccagcctgggcaacatggtgaaaccccatctctactaaaatacaaaaaattagctgggcatggtgtactcctatagtcccagctactcggcaggctgaggcgggagaatggcttgaacccaggaggtggaggttgcagtgagccgagatcatgctactgcacttcagcctggatgacagagcaagactccaactcaaaaacaaaaaacaacaacaacaaaaaaagccggtcgcatggcacatgtatacatatgt

SEQ ID NO: 136770 - DNA, 930 bp, Homo sapiens
ggagggaaaatccccatctgagccacagatccaaaccagaaggaactgaatgagatgctccgagggataaggcctgtcttagagacatcctcgcatctaggagagggggcggcagatgggcagccgtggagcccagccctgaccagctgctgtttgcaggggagagctgcctgtgtgcccctgtggtgagtgcgtggtgacagtgggattaagtgtacccagcaacctcagggaccactgggtggaggagacgcacggcgggcccttctgcctggcccttcccgcaactctgagtcctggatgcttggggcttgctaatctccatccccacggcagcgggatgcgacacaaccattactaaggccatggaatctcccacctctcgatggccaggcggttcacccagcaagtgtctcctaatctgaagagctgggagagcgaaagattttataagttatcagagaaccccctgtaacctcccttctagaaaggaagatgtaaaccaggacaatgggcctgtagctggcacctgaagtcagtgatctctctcctcccctcctctaaattctccttcttccgtgttttctacatcccccgtgatttgagtctgctgatttcatttgttatgtctgccttctgtttcctgcctcatttcacaaagaattagatgctgctctcaacaatacattcaaaataatacaaccataaagtaaatatttgagtaatttggagccagaggaatatatggtaacaccctgaggtggatgaaatgccgggatttcttagtgaccccttttcagaatactgcttctggaaccattctagtgtgtctcagaatgacatgtgggacatattatctttttttttatgttatataagcaatttattcaatgcatgtttattaaagcacctatgttttgaaaagaaaaa

SEQ ID NO: 136771 - DNA, 588 bp, Homo sapiens
agacagcagtttgaagtgtcaggcaggatgcccctttcccaagtatgccgccctgggatcctgtccggggttggggaggcatgctgtcagcacatgtgagggccttcgcaaagggaatttcacctctgcaagaggcctgacaggccacgtctccctgggaaccaacctcctggggtacgaggtgaggagctgcagatgtgcggtggttagcccctgccctttgcgtgtcatccctatcaagtgtgagaaaggacaggcaggctgcagctaactagtgttcctgaggaaaggggtcagagaaacaatgcagatgctcaagacctaaggctacgtgggagctgcacatagatggatatacttgcaagtgtggggacaatggctgtgcaccccaccatgcctgggtgagggcgtgcagtggcccagattccttggggagtgggacctgtgggcccccataggaaggctggaaaagtcaggccctgctgtctgcacagactctagcctgggaggacacagagtgagggaacatgatggggcctaggggctcctccagcacgtgcctgccctgccctgggcttgcaattgtga

SEQ ID NO: 136772 - DNA, 954 bp, Homo sapiens
atagtgctatacttccactaagactttgactatgttctagcaacagagcccaagtatgtagtcctgaccatggcagagttatatggaacagttacactgtcagtttcttaatgtacattttatgttccttatgcaaaaataataataacctatttgtcttttattagccataatctctttctatttttagaagatagcaaaatgacttgctcatctcaaattagcagaaaattgttttacatattttcttcaaagaaacaagaacgaaaacaaacttagctgtaaattatctcccatgagctgtcttcatttgttcaaagggtagagaaggaaatgacagtgagaaagctagcatgtatgaagcatttattatgtgccagcgactgtgttaggtaattagtattcaaagtggttcctttcagggtcaccacatctcatataacagtgctccagacaaattctacaatatcacatactgtggattaaaagagtgagcttcataaacttttttttgtgctaagaactcttaaaatctgctctcagcatttttcaagaatataatatattgttattaactatagtctctgttgtacaatagatctcttgaacttattcctcttaaaagaaacaataggcttcacaggatcaagagaagagggctttcagattcccagtctgggctttgtccccagatagaggcgggctggagctcaggccccctcattgatatgtggtgtgtttattcattccctagacgtaccctgtctcttcctcttgttctgtcttcctgtaggataagcatgataaagcatactgtctgaggaggggtatgtaggcttctgggacccagataatctggattcagtgctgtaggtttagaggagttatgtgagaaaatcaactgcctagtaccagtggatcatggtaactgtattattatatttaaaaccttgc

SEQ ID NO: 136773 - DNA, 801 bp, Homo sapiens
actcagttaaacttccctaatagatgacatcttccatgtgttatggtaatttattgctgaaagaattaagcacatcctgggtgactccatggggagaagactcttagaaatttgtttggtttcctccaaactttgcccatgcgcaactttcagctttgcttattttgctttgtgttttttcgctgcaataaattttagttatgaagcagactgcatgctgagtcccatgagtcctcctagcaaatcactgaacctaggggtggtcttgggggacactgacacagggagttgattgtttggcaacacaagttgtttcagagcaaatgaattctttttccacaagctagcatattagtaaactatcagggagcataaaatcagttgactgagttctgtcgggaaacaaagggaaaatttttcttcaaaaagacatgatatcctccctgttaagcaaagcagtactttccctgtggataagtgtattcagttggaatgtgcttggctgcaagaaactgaaaactattatattacaatgctttaaagaggctagtgacttgtttctgagggaaagatatctaggagtggtacagtcactcagtgatgattttttctttttgctccaccatccttagtgtatagtttttgtcttcatggtcacaaggcagctgctacagtgccatgtattgtttgatgtccaagtgatcaggaataggagaatgtgaagggcaaaacccaactctgccctctctagggacttcaatttctatataattgactagcactgtcccacaggagctgaaa

SEQ ID NO: 136774 - DNA, 1303 bp, Homo sapiens
cactttctgtacttctgaaccaaaatttggatgcatgtttttctttatcatgagtcacacctgattaggatttccttagcttttgttggggtcagacaggattgtgaccaaaggcaagatttctctgtcatctcttttgacagaatttccacaatcatggattttgtaatagtcctggacattcatcagaaagtaacctgtagtggggctgcctacataggattcttcctttgaaaagccttaaacatttttctaatggttggtctctcttaactaacaataaaaaacagcaacaatgcagctgggcacagtggcttttgcctgtaatcccagcactttgggaggcccaggcaggtggatcaactgaggtcaggagtttaagaccagcctggccaacatgtgaaaccctgtctctacgaaaaatacaaaaattagccggatgttgtgttgcacacccgtagtcccacctactggggaggctgaggcaggagaattgcttaaacccaggaggcagagcttgcattgagctgaaatcgtaccacagcactccagcctgggcaacagagtgagactccatatccaaaaaaaaaaaaaaaaaaacaaaaacaaacaaacaaacaaaaaaaccagcaacagggatagtcagcataactaatttaaccagcacatccatttcgtaaaagacatcacacattgtcatttgtaagcctgggactttaactatttctcaacttttttagctgaataatttttctttttaaaacaaaactgaaatctgttgtatccattttagaatttatctcagtagtttgtatattcatatatatgtggtgagtttaagaagacgtatttagaacatttttatcttgttagcaatttgacatagaaaaatgaaacattaatgtttttattgtgagtcatgtcactggcacagttttcctctagtatcatgtgtggtgttaccttctatgtaaatttgccaatgaataaatgtttagtaaacaaacattttgtatttcattgtttcactcctctacaagatactgactagtttacttagtttgtaggtcactagttaactagttgaagatagaggaaagtttacctatcagaaataaattgaagccttctcaagtcatagaaggtttcacatttatgatgtaccaactactagcaaacataattaagggatcattgtattgtctaggtgcagcttagtagaatatgtaaagttttttagctgtccattaccctggtataatcttggagccataacccaaaactatattcctggcaagcatgt

SEQ ID NO: 136775 - DNA, 220 bp, Homo sapiens
accgctgaagcggcagcttctccttccaacagttctaaaaagggcaggaattgagtccctgtgagcaagctgggcacagccccccacctttccgcagcggagctgtggctgggagacacagtgcctgggtgtgggcctggccagacgccaccctggatttgggaggctcttgagacaaggcaggcagagctttgagccacccccgtgatgggtgtgctgg

SEQ ID NO: 136776 - DNA, 314 bp, Homo sapiens
tggtgtagggcagccgttcctggtaatgagagaggcagagaaagcgggtatcttgcctgggactggtctgttgccacttcctagaaaacgagggtagagtaagcaaggaagaagggaagacgggtgtcgggtgtctgccagtgccctagagcgcagagaccgtacattaattttttcaaaatttccagaatcggaaggctctaatgattttgtgttgtagccttccagtcttttttctatgcacgtatgtttttacttttttcagacattgtaacatactttaattattgttattaatctctttttgcacttga

SEQ ID NO: 136777 - DNA, 435 bp, Homo sapiens
ggatcaggagggagcattctgggttttctgcccaggtaggcactttcccagatattttcctccaactacacttgaggccagagaaagtctatgataaacctcttcccagaccctctgagtatttgagacactgcttttgtctctagcctccatcctctgaccctgacctgttccttatctactttccaaaatctctggatggccccagaggcctgaatggatttggcatgtgttgcatcttagacagggttggggaatcagatatagacaaagaaaggagcatttgaaaggtcaagggaacaaagaggacatgagacatgtggggtgggcatgaggaaatatctgtggcttgagtgtgggtagtagggtgcttatggagaagaggtaggaaatggagttgaccagaaaagcagggtccagattctgaaagaccat

SEQ ID NO: 136778 - DNA, 514 bp, Homo sapiens
accatttcaatgctgtagacgtttgacatgacctttgttttaaaagctttctcctttggcttttgtgtcacttctctctggaatccctcatacctttcaacattttttcctgtaggtttctcctcttctttaaatgttagatttatatctttagtccagtcctctttgaacatcttactctcataatttcaaatatgacatatatggctaacatgtaaaactcctttctttcatgcttggtaatccagttgcccactggacacacttctattgtatgtcccacccataagtacttctaacacagactctctctctctcaccccccacatatgtgtgtgtatgtgtgtgtgtgtgtgtatttgtatgtgagatgtcttaaacattttatttatttaatgaaaaaactgataactgttgagctcagaaaccaataccccaacatacagtactttgacatactgaactgaagaaacctcaagatctcttctggctccatcatgtccccacctccccc

SEQ ID NO: 136779 - DNA, 1102 bp, Homo sapiens
taaagataatgacatggggaaatgcttactatctatgaaaaaagtaaaatatgaaactgcatatattgtctcagtcttatatgtttggagctattttaaatagtgttgctttgaacattcttatacatgtcttgtggtaagcatatatatgcctttctgttggggaaatatctaggaaaggaattgctgggtcgtatagatacacatttgtccagccttagtagctattgccaattagttttctagttttaccagtttgcccattcctagcgcatgaactcccattgctgcatatcattatcgatgcttgacatgtctgttttgtgttttcattttagccattctggtggatggcagagacactctttgtggttataatttgcatttccctgacaagtaattaacttgaacacttttctatatgtttattggttatttgactgtcttctttggtaaaatgctttgaagaggaacattttcaattatcagaagaaaaacattttatttttctaataacattccaaacaattatgatgacgctattctaaggaccatactttgagtagtgaggctttattgtagaagagctaagtgaaatgatatttgaaagaacctgcagaatttgattgtggcgtagcttttggcagtcttagagggtttgaggtgagtaggagaaatctcaaaaaaaaaaaaaaagacagtgaagagattttggtaacttaaactttttattatataaatatcagatatattcaatagtagaaaagtagtaaaaataaaccctgcaggtatttgtttatccagctttcataattgtcaactgaacatttgccaattctgtttcttctgtactcccacttacactcccctcccttcaccccattgcaataactaatttttctttagtttacaaactagagattgcagagggtaataccaatactaatgtaaacagaataactctttttttaatgtggcgtgtttctgggtatgaaatttaaggaaataggacagaaagttaaaaggtatatataaatgaagacattcataattgttgatacttgtgaaaaacagtttaaagcaaataaaaatatctaataaa

SEQ ID NO: 136780 - DNA, 545 bp, Homo sapiens
ggagaatttacatggccctaaaacaataatttgctaccttggccacacattagaatcatctggggaactttaaaaaatccacatgctcaaccaagttgcatcccagaccaattaagttggaatctcatagggtgggattcaatagttggtataacttaaagctccctgtgattccactttgcagcaaggctgagaaagactggtttaaagcaagaaggaatgcttacctgggtacttttggcctggtttatccacttaggtatcatactcattatattcatagttagaataattcactgttctataagtataaccactattatacttaagtataaatatacttaaattgcacttacactgtttgtctacacaggcacttaaagggtcctgcttactagggttcaattcacatcatcaaagactgaaacttctataaagttttagtccccctaatttaacaaaccagtgtagaatagcaagacattcatcctaaagagacttgtacattgaagtcgatgtagatttgggactcaattcaatgaact

SEQ ID NO: 136781 - DNA, 256 bp, Homo sapiens
tagctgggattacaggtgcccaccactatgccagctaattttttgtatttttagtagaactggggtttcaccatgttggtcaggctggtcttgaactcctgacctcaagtgatccacttacctcagcctcccaaagtgctgggattacaggtgtgagcctccttgcctagactaaggcacataatttgcaaaagaaattgaggctcttatgcacaaatccagtccaccattgagactgacccctgtacttagaccc

SEQ ID NO: 136782 - DNA, 100 bp, Homo sapiens
attggcgcagtccctgcttactgtagccttgacctccagctcatgtgatcctcctacctcaaactcctgagtagcctatagtcccagccaatcaggaggt

SEQ ID NO: 136783 - DNA, 316 bp, Homo sapiens
agaattacatcatttctggtcacagctgtctaagcgggctatgattttgcttcataaagtcttattgattttgattattcttaccttaaatgttttttgtagagatggagtcttgctgtgttgtcagggctggtctggaactcctgggctcaaatgatcctactgtgttagcttccctagtagctgggattacaggcatgcaccatcacacctagttcagattgggaaatctttacagagaaaattaagttctgttttcttaggaaagtagcatatttatattctttgtgggtcatgtgatgagatctcaaatacc

SEQ ID NO: 136784 - DNA, 1182 bp, Homo sapiens
ggtcttgctctgttgcccaggctggagtgcagtggcatgatcactgctcactgcagccttgatctcctgggctcagaggatcctcccacctcagcctcccaaatagctaggactagaggtgcccaccagcatgctcagcagatttttaaatctttttgtagagatgaggttttgctatgttgcccaggctggtctcgaactcctggcctcgagcgatcctcccaccttggcctcccaaagcactgggattacagacgtgagccactgcgcccagcagatttctctttaacacctagatttcagcctgagccaggcaggcattcctgaatgaaccagtagtactgctcccagaagaagaggtcctcctccgtgtgacacagtccccacttggcccttgcagggattggatctgggatccctggatttaaactcagggccatcctcataacagcctcacaaggctgggattagcttcccagttcacaagggaagaaaccaagacttgagaaggtcaaggtctggccagacccacacatcttggaccctcataccgcctcgaggccccatgctgccctctgcctgctccagatgtgaatactgctggccctggctggccccggctggccccgagggtcctagggatgaacagcccagcccagggagagctcagccccttgtgcctctgccccttcccacctcctgtggaggccagtcgactcacccacaaagggccaggcactgtggggatagatcagctaacaaaacagttgatgcttcctgcccttctgggccttacattttggctggaagaagaggggagaggcagactgtaagcaataagcgcaataagtaggttgcctggaagtaatgttagatcacgttacggaaaacaggaaagagcagagcgacaagtgctggggtgcgtggtgcagggaaggcagctggctgctgctggtgtggtcagagtgggccctcatggagaagactgcattcgagcagaaacttgaagggggtgaggggtgagcctagagatatctggggcagagcagtccaggcagaggggacagccggtgtcaagcccaggacaggagtgtgcctggtgtgccagtttcaggcaagaggccagtgtgcagaggcaaggtgagaacgcaagggagagcagtggcggagacgggtgggaac

SEQ ID NO: 136785 - DNA, 286 bp, Homo sapiens
atgatggagaatttcatagggagctatattgtctggagattagggctgatgggatcttcttgatctgcctcttctgttttgctgagtaaggatgttggaaacagatatctttagctgctgtgaaaaaaataggttgtattttttgtcttcttaagtttatttgggataaatgcagaaaaataatatcttgcaggttagggtttccaaaaacagtacttgtggcaaaaatctcatttggttaaagttattcttcagaaccctttaaagcactcacagagtatagtga

SEQ ID NO: 136786 - DNA, 404 bp, Homo sapiens
acctctctaccactctcaaccagagtcgtctggccaagcacaacgaacacagagaagatatgccacaggaatctgtttgggacagaagtagaacctggaagcactcctggcctggctccagcagtcacacagatggaacacaacagacctacctactcaattttttaaagttctctggttgaatctggtgtgcatcaggtttggaaatcacagacctaaaacctaggtcttagaagatctaagactgttcttcaactcttccagcagagatcagaggctcacccctgtaaacccagcactttgggaaactgaggtgggcagatcacttgggtccaggagctcaagaccagcctgggaaacatggcaaaaccctatcgctataaaaaacacaaacgaattagcca

SEQ ID NO: 136787 - DNA, 150 bp, Homo sapiens
taccagttaacttgaatgacctaagctctggttttagtttttggactgctgtacagtgtgctgtttatcagcttagagccaactactgccttagcaacaagatatatataggaagagcttctatcctgtgtcacctattattcctgaccc

SEQ ID NO: 136788 - DNA, 146 bp, Homo sapiens
ttattcccttttacaaaaggttggagctacaacagagattacaggttattcagttgagtgtcctcatttatagatgcagtcagcatgcctaggatctagcctaaaggtcacactgttagtcatcattcttttttttttaaacattg

SEQ ID NO: 136789 - DNA, 903 bp, Homo sapiens
gtaattgctgtttcattttaatgtctctctgggcctgttaattaaaatagcttgcattcctcagatgaaagttattttcttctctcatttcccccttttgatcaaaaatctttcttcttaacagcattgatgatcaaaatttgagtttcaaggtgtccatcatcaggaaggctcattcccaagtagttctgtcaaagtcattgatttatggctgctgttgcttgttgaatcgtagctagacttcagagtatcgtcaatttagtttcatcagaagaaggaaaacaacaagagatagtggaaatataatccatgtaaggattataactaaaaataaaatttgaatgccagaacagcaacaaagacagaactattccattaggcagtcaactaaaaatatcatgaagaaaattaaatccaggttcttctttagagactcatagctgggaagtaattcaagatttaatccaaattgtaggcaaataataaaactcaaaaacaatggacaagactagaatctaataaccggcatactatagtttttttctgaaacattttttctttatccagttctccatttttaccaaagacaaatcttagttgaaccaatttatttgcaaaataagttttagtgttatgatgctttgcctacttatttgcataaagtgcaagaagaatagtgaatggccatatagtctcttttaagttggctttaccgggacttccacagtagctttagattcagcttttaaaagccccaaggccagccaatccaaggatttgccctcagactgtctgcagtacttgtaaaaaatgggtgaactctgctcttcttgagatcccaaaataacctgagttcctggtcctgtcagaaagtgacattctttagttaccatgaggacagaa

SEQ ID NO: 136790 - DNA, 163 bp, Homo sapiens
tgtctaacaatattttctatagtttgtataattaaaacattccaaataccaaatgctcaaaacagaaactcactcctagattctaatactgtccagcccatcagtacccccaaaccccagactccaggttaataatcacgtgctaagtgatgaaaagaagaga

SEQ ID NO: 136791 - DNA, 542 bp, Homo sapiens
ttatgatgaaagtcgtagaaatagtgtaagactgttggaaatttcagaaagttgccaggaagtaggaaaagtcactacccctgccaccactcaaagataaccactgcaatgttttcatgaatcccttagtctcttttctgtatacatttagcataattgagatactattatacataaattctatactctactattgttaactagtattaaaataggcaacttatcatgtttctgctttgttactctaatggctgcaaaatatttcaacatatagaatatacatacatatatgtaccacaacttatgttgactcagtcttaaaattatcccaaactttgctgttgaaaatgatcatgaagggtgaggggcaaggggaatgagagcattaggacaaatacttaatgcatgaggggcctaaaacctagatgacaggttgataggtgcagcaaatcaccatggcatatgtgtatctatgtaacaaacctgcacgttctgcacctgtatcccagaacttaaagtaaaatttgaaaaaattttaaaaa

SEQ ID NO: 136792 - DNA, 141 bp, Homo sapiens
aggcctgtccctccctgctccaccccacactgtgacataggaaaatagccagacgccttgcagcagacacccatatgaactcccatctgctcacaggggacccagacgcctaaccccactcacccctgcacacacacacac

SEQ ID NO: 136793 - DNA, 622 bp, Homo sapiens
aaacaactttaatcaaaacttcattttttaaaaaagatactattagagcagttaaaactttgtgttgatcatcttaacatttttaaaggtagtacaattattcttagtccgtatttgtgtactctagtttcctagccctgtttctcagtgctgttttgctaatatctctaatagtcttacttaatcttgttgaaagtagcacttttgaggttaataaggtttaaattaataacccccattgactgtagtctataatactataattttttaaatggcaaaatgccctctgggagctaaggtgtcttaaaagcttagagcaaatcctgttaaatgggacaaagtctcaattcttttttaataagacaaaaacactttatgtagtctcttttctttttcagtgtttctcgaaatttcaattttattccatgctgctacagaatacaaacttacccaataaaaatagcagctccattgaaagagctttcccacaaattgaaatatttaaagcacagttacaggcttgtgtactgttggtgcatacattgtttgatttgttcagttcctcagttttgcagggaaagatgtcaacattatctgatttttcaagctatctattcaatga

SEQ ID NO: 136794 - DNA, 197 bp, Homo sapiens
cctgagcttcttggtgggtctgtgaagtaaagggctgtaccacaagtcatctgtatttattttcataacacacctcttcaaattgacttgcttttatcatttaatttgtcccaagctataataattgatgtgatattttttgtaatattcattaaaataactccataattatggcacttgaaaaaagttatatgaaa

SEQ ID NO: 136795 - DNA, 805 bp, Homo sapiens
acaaaaacaaattgcttatttcttatatccatgctggaagattatctggctgaccttatcagctgtgatgtcaggaatgtcagccagttatcctgtggtgcattcagctgggtcattgtaccccatcagtgaggcaattgcaaagttccatctggacagaggtagaaaaaattatattcactttgagttttggatttttttctcttaattttcaaagataaagacaattgcttttggcttttaagagacacatctggtatgccttgggctggatgccagatatttctgctgttgagtttttataacattatataggcctcaatattttagaactagtatacatttgataaaagtgacttttctaaagttttagggagaatcttttgcttaggtgcagctgagtatttttagttcagtactacagatggcataccaaatttaagaggagttgagtgactgcttcaaggttgcacagctagttcttggtagatctggaaaaggaccaacatctcttggccctttgtcagatattctttctttgatttcacactgtttttaaagatgcttaatacattttaaattaaaatggttatttgaatctgcttaaactagacaatactaattgtcaaacatccattacctgctttttctctagtaacagattggtgcaaaaagaattgcggtttttgccattacttttaatggcattaattacttttaatggcaaaaaccttagttccttttgcaccagcctaataataaaacccctaattttaacttggcacgtggccaaccagaatagaaa

SEQ ID NO: 136796 - DNA, 356 bp, Homo sapiens
tatattgctttaaataatatctatatactggtgcttggcaaattattatctccaactccaatctcttccttgagactaacatatccaactggctaactgacatctccttttgtgtatcaacttatttcaagctcagtatgtccaaaatcaaactcttaattcctcccccatccaaatcaatcctttcccagtcttttccatgtcagtaaatggtaccaccattcatccagttggtctctcatcccacatctaatctaccatcaagacttcttggcttatatacaaaaagtattcttaatctaaccaatttttcccacttgttactgctcttgtccaagccacggtcataattcatc

SEQ ID NO: 136797 - DNA, 532 bp, Homo sapiens
tgatgtcaaatttatcaaagccatttcaacaacctgcatacccaattatactgataggaatctgcccacgatatttgtttacctggaaggagatatcaaggctcagtttattggtcctctgagtgtttggcggcatgaacctgacaagagatgagttggaatggaaactgtctgaatctggagcaattacgacagacctggaggaaaaccctaagaagccgattgaagacgtgttgctctcctcagtgcggcgctctgtcctcatgaagagggacagcgattccaagggtgactgaggctacagctgctatcccatgccgaactttcttgtgacaaattgtctggattttttaaaaaaggaaaaagcaagaatgaatccttgtggtttttagttttgtataaattatgtttcaaatctttacattttggaaataatcattgctggagattctgttaaatattttggaactcttttttttttaaattatagtatttcctctaaaaaaaattaaaaccagccatttgtatggca

SEQ ID NO: 136798 - DNA, 348 bp, Homo sapiens
cagagagagaaggtttagactaaagggacggaggagaataaaggcagaacatctcagaaagccaagttgacatatttttgagccctagacacaaccaatagaagggagctctgtgaagtttgaaaggcttttcacacctctttcagaaaattcagaaaccttcacatctctttctgaaagttcagaaaaactaacgacataaaaaataaaagtccttcctactacacatagaaatctttggaaacaaaacaataaacaagcatagcaaaactctgaaaagatacatggaagaagatgggctgtccagagacatcaagagttgatgaactgcagggtgatgagttctct

SEQ ID NO: 136799 - DNA, 235 bp, Homo sapiens
gtacaactattcctatttgacatgtgagaaaactgaggctgagaaaggtgtataaactcatccaaaaacagatctgatcccaatttccagagtctttctatttgccctatacaacattgctccatcactacttctcacaaggctatccacatggttgtctaaaatttccagtttctccagtgggaaatgccttcttcttcttaccaaatatcatgaaatgagaaatactccaaat

SEQ ID NO: 136800 - DNA, 202 bp, Homo sapiens
aattgataacagagtttatatacctcctgtccccatctgtacacttaaaaatgtatgtgctgttctaatgctacttattattattcccttcctttgtagaatgtatcaacactaaaagtgtttaatcctgactataacaattatttgttaactattaaaggggtaattatactctaagcttccagttttcagttaaaacaaa

SEQ ID NO: 136801 - DNA, 189 bp, Homo sapiens
tctttctactatgcttttgcttatagtcactcagcaggtatttgttaaaaagaaaagtcagttaacactattcccttcccttctctaccataaaacatatttaaggccgggtgcggtggctcatgcctgtaatcccagcagtttgggaggctgaggcaggcaaatcacctgaagtcgggagttcaagac

SEQ ID NO: 136802 - DNA, 287 bp, Homo sapiens
gaagtaaaagtctaagctgagaccttaagtgtgaaaaggagttagctggaagaagggtgtggagtgtggagcggtaaggaaaaggagaagattctaggcaggggaactctataggtgaaggctctgtaaagaaagaaggtatgatgtatctggagggcaaaagtattactgtctggcgggaccacagcaggttggggagatgaagctggagaaataggcaggggcctgagatgatggacttgttcctgaatctgtctggaatatcagcacccttggctatcagaatg

SEQ ID NO: 136803 - DNA, 268 bp, Homo sapiens
taagaaacttagcaatccaatgagggcttctaactctaaccttgatggccacatttcacactaaggccgtcaatgtacttccccagtcttcatctatcatgagagaaaaagacctaaattctcagaagacgctcagtcttactaaatactccagacccaagtctttaactacctagagacagaatacagaaacaattagtgcttctaggaggagattgagaccaatttttatctctctcagttgctggaattttaatagtgaacatcc

SEQ ID NO: 136804 - DNA, 386 bp, Homo sapiens
cacagcgatgggattaggagcccagactctagattcaaactgtccaagattgcatccggactctcccactttctaactgtgtgaccttagcaagttgcttaccctctcagaacattggtttcctcttctataaaatgagagaataatactatccatttcattggcttgtggggaaaattaaatgaattaataatacaaagcacttacatcagtgtctggcatccagagcagactctgtaagcatgatctgttattattaccatcgtcttcattgtgtgacctcctcctctctgcctgtctctttccctctagaatgaaggtccttgagacaaaagacctgtcctcttaggttctgcattgctggcacctcccgcttgcctgttatg

SEQ ID NO: 136805 - DNA, 388 bp, Homo sapiens
tagatgacagagatggcacaaggaaataaacatgcaaagacgcaacactggttttaaaagtgtgataaaacacattgtttcttcaactactctaaatatctacagagtaatatgtatagtatacaaggtggcaggagaggccagaccagatttaagtatactctgttgccataaaggaatcctcattctctctctccctctctctcccataggctaatatttttaaaaagtcagaatagcttacattggagaaccacactaatgaaagatcaaatgcaagtaggcctgagatggatgaagtggaacgtttccagccgctgctggatggattaaaaagtggaaccactattgcactgaaggtgaatgcctacagctgatcaatgctctc

SEQ ID NO: 136806 - DNA, 540 bp, Homo sapiens
gtagtagtcttgttggggacatccacagtatgtcaatgaatcaaagacttaagaagaatctcaaagaaagaataatatctctctctcaacccttatacacataatagacttatttacccttattgaaaaagtccttctagaattttaaatttacactttattcatataaaaatgaaagcaatattgaaattaattcataaattcacacgtatcttggtattctgattatgattgttctgaattaggtgttgacactttttcaaagtgatgattgatatagttggatgaatatccaccatgcttgttactatcttttagtttttgcgctgcctctgtttccatttttgtcttccattcattttcctttttttgtggtttttattcagcatttaaaaaattcaatcttctttcttagcatctcagactttttaatacttttttattggtttctcaagataataaaaacttttaatttccatattcttaattgatcttacatataacagcttatttaaaataattatattcaatagcagacag

SEQ ID NO: 136807 - DNA, 419 bp, Homo sapiens
agccattatctggaggttcacctgtcacaatggcaggggaaatggagaatgtggcaaaggtggctgttcatgtctctacctggaagggtcacatcatactgatcacatctcattggccaaagcaagtcacattatcaagccatcaggaagtcagggacatatgttcctatgtgcctcacatagagagagaaaaaggacatgttagtgaacagtaacattatcgaccacaaacactatgatgaaggcaagatttttaaattgataaaaatccatgtcattactttctccaaccctaagacaaaccttacatgaaaaggaacagaagatgggtcagatggacaactatcgcggacgcatccacgaccacggtttatatagacctgaagagcctgtctcagattgggattaacataaaagag

SEQ ID NO: 136808 - DNA, 568 bp, Homo sapiens
caaagcggtgaggtaaagagaatactgaatgaggctcgggatcctgagttttagtttttaggctgctacaaactagctctgcaatcttgagaaaaatcacttcagctctctgtaccttggtttcccatctgtagaaggaaagagcagaattccactccctcttgcttttacttgtgttgctttctctgctaagccagcaactccagttcccttcctttgcctatccccaccttattttcacctactgcaagctggaaaatgagatgcctcagtttgttagacctgggtggggtgtgatgcagaactggaggggttcctttctaattgctgtcctctggggttcttatccatttttgttatttaggggctttctttgctttctggctcaccactgagatggttgaaattgccacataaatgacccctggctcaagctagcacattgtccaccaggcatggtggctcacacctgtaatcccagcattttgggaggctgaggcaggcggatcgcttgagctcaggagtttgagccagcctgggcaacatggagagaccctgtctctacttg

SEQ ID NO: 136809 - DNA, 943 bp, Homo sapiens
ctgagagtatcttggtttatttactttatcttgttaacaactgcaatgataacactgcgggttagggagcaactttcatgtttagtctcaaacgttttctcaagagtcggtgccggggcctcccagcattgcagtgagctcgggacattcttagctgcttcaaacaagaagatatagcctgtttaacttgccaggattcatgtaacagaggcctggtcccatctgggcatgtacaagacttgcttcatttacctggaaattgcaggtatctcttcctcataatgaggtttctgaaatattccttgtttttcagagactcaagctattagccaagtaggagctagcaatagctcttaaccaatggcaaaagggtcagatatttcctgtgctgtttttactgtttatagcagggctgacacaatttgctgtgggaagaaagacttgaactgtcattatagattttctctccttgtgtgtgacttagcaggacactgacattgggtcctccctgaaggtcatcttgaaccgaatatgcgcccctaactttccttccaaccaggcaacaacggcacaatttcttggctatatcttgtttgcttttcagcaacggcaagccaaaagccatcccagcacagaaataactgggatgccttttgtttctttggcaactgttatatcactcttgcctttccttatttgatgagaaggtagtagagaaaaaaatgatagtgataatctcacacaatatgtaggtatttttacaaaccagtcttatacttgaaaataattttataatacatcaggaaaatatcaaagaaaaatataaggaaaagggaagaataggattattgttagaaaatataaaataccatacttgcctttagagaaaaatttacagtgtaattaaatgagccaatatcaaggtgttttaataatctaaaat

SEQ ID NO: 136810 - DNA, 302 bp, Homo sapiens
tgtacaaaagacaggaaacactatttgagggccctggagtgcatcaacacggggtggattctgggagctacaattcttgaaagaaaagaaggctatgcattgagcatcacattcattctggaatttttctgagggcatttcccacatcatctgcacataggtcaatttcaacaagaagctgaaatttatcaagaagaatcaaacaaatcccaggtaagataaacacaaagaaaaccacacctaagcacgtcatagacaagatgctaaaaaccaaaggtaaagggaaaatcagctagaggggg

SEQ ID NO: 136811 - DNA, 260 bp, Homo sapiens
actcaccacctctagccacagtgaactgcctccagcatacacacacgctgctattttgttgcatctgagtgggctggctccacacgggatctgtagtttccttttgatattttctttcaatgtgccagatgctaccactgagtaatctagattttgctgccaaactctacccccgttagcacagagggaagacagtatgccagtgctcttgctgagtgtgcgtgactggcagaaagcagtcatgggtgtgatggttggaa

SEQ ID NO: 136812 - DNA, 455 bp, Homo sapiens
gaatgggaagcaaggcagttgaagaagctgaagtagacaactctttcaagtttagttttgaagggaagcagaaaagtgaaatgagagctggaggaaactattactgaagaggagataccagagaatatttgtgcattgatgggaatgctctagtatagacaaaaagatcgatgattccgggaaagagggaccgtcaattaagaagtcaaagagaggagcatagtatattaggatgttctcaaaagaatgtgacaccgactcacaccagtcagaatggctactattccccccaccccaccccaccctgagacggagtcttgctctgtcgcccaggctggagtgcagtggcatgatctcggctcacggcaacctccgcctcctgggttcaagcgattctcttgcctcagcctcccaagtagcgggattatagatgcctgccaccacgccttgctaat

SEQ ID NO: 136813 - DNA, 156 bp, Homo sapiens
cacttttactaatcattcattttgaataatctcacttatttactcagtaaatatatgttgcttgcttaccatatatttatttcagtaagtatatgtcgcttgctgggtcctggtaatgacagtggtgagtttccttcccttgttagtgggatctac

SEQ ID NO: 136814 - DNA, 333 bp, Homo sapiens
gcatgtccccgcacagccccggtcttcccttctccactcttcgggcccgggggtcggggcccgcggtgggcacctggagaggggcgaggcaggatgaggccggcgggcggatagttcggggcgcgcggggagccggaccgcagacctgcctccagccgccgcgcccgggagccaggagatcctgctatagatagtaacagggaagcggctgtttacagcaacacagcgccgccagggccgtctccaggcaacgccgcgcggccgggcgcgccgtcggcctggcgaggccaccctccctcccagctcccctgggccgcggcctccccggcccgg

SEQ ID NO: 136815 - DNA, 945 bp, Homo sapiens
caaagcgacctggttcgaatctctactcagctgtgctatcttgggcaacttaatctctctgagtctgttatatctttaaaatgaaggtactacctcaaaggagttttctgaaggattaaatgagataatatatctgaaggacttagcacagtatctagcctgtagtaaatgctcaatacctggttattactatgattcccatatggaatggtaaagttcaacaggagcaattaactatccaatgactgaagataatgccctgcctttttctggctgacatacaaatacatgatttcaaggaagcaccactcaaagttcatgtcctcctaatgatgggatagcagtatcattcttcatacatggaaggacagcatacctttgtgaaaattatcagtgaaaatgcacatagtgcaaattgtgtaaccttcatgcttttataacaccaatcttttccaactctatgcaacaggcagtttttccagtttcatattttctattaagcaactaacaacatgttcaagtttattttaattaccagggattttaagagtatagtatttcctaggatgttgacatggacaagtgattgttttttaagatgattaaagttagctaccttcacgttattgtacttgcatatatttttaccttatagattcagaataattccagtacattcttaattcagtaaacaatttgattgaagccaacacacggaggcactgttccagtcacagattcagcagcaaatgagacaaactctctgccttgtgaagcttatattctactgggagcatagacagtaaacatgaaaaataaaacatggtatattagtaaaagtactcaggaaaaaaataacgcaagtaagggatagaaagtgtggggagtacaattttaaaagaagttggctggagaaatgcctcactgagaaggtgttctttgagt

SEQ ID NO: 136816 - DNA, 241 bp, Homo sapiens
agggttgacggcaaaggggcccaccatggggcatcatcgggggaattcagggagaagatggggagccagaatagatgccctccgcaccagagattccaccgctttacctctgaaactgactctcatatttcaaagaggaagatagaaaagcgtcacaccggcaatttccacaaatctagggcatagtcgtaggcatgcaaaagctctgaggccccggtcaggcgccatgaaggggaacgag

SEQ ID NO: 136817 - DNA, 267 bp, Homo sapiens
cagtgattctgtatcagcccgttcccctaaattactcagaaagttttctgcactctgaagctccaagtgtgcacactcagcatttccccgggtaataaagtttcacaggcaggagtagcaccgatgaactgattatgcaaggggccgtgacaaactcgcagatcccaagaacagaaccagggcagcctttggactccttgtgaatttctgcagcatcagctcctgcatgctcagttcttgacaaatgtaagacgcggcagagtgtca

SEQ ID NO: 136818 - DNA, 211 bp, Homo sapiens
tgtctgggtggggttgtctggcagttagttggatgtctgagcctaagtggaggtcagcactgggctagggtttggggagctgttagtttaacaggactgggcagaagagactggaggtggaaaggtgagagaaggttctaaaaacagaactttggggcatccttctgcagggaaccagtagggaaaagaggagccagtgaagatcgagaag

SEQ ID NO: 136819 - DNA, 314 bp, Homo sapiens
tcccatgggcttataccagcaaatctactaatctatttgtatctcttctcatatactctttcttcctggaagagagatgaggatgaactatctgtacttctataatacaaaccctcctagccgtacatggaatcctatgttctggacaattaacagcttctctcctgtaattttcttctctctcttctcaatcatcgattttccccattagtgtaaaaatacacttcaatatctcaactaaaaaaaaaaaaaactgcttatgtatgaccacagaccatgatccagtctcaaccctaacttccctgcttcctttt

SEQ ID NO: 136820 - DNA, 336 bp, Homo sapiens
tgttgctggtgttgggaggtggtctattgactgagaaggggcacacacaactttccggagctaagttctgtgtcttgatgtgctaagcgtttctcaagactgatcaaactgtacatgagatcagtgcatttcaccatactttttttcaagtactactcattgctgagaggataagccacaaattcaccataagggctaaactgttaacaccagatactgacaaggcatggaataactcacacatcattggctaagtgtttccacagtattactttggaaaaaatgcctagccatctctcaaaaaatgtacatctatcctgattcagcaattccaca

SEQ ID NO: 136821 - DNA, 411 bp, Homo sapiens
agaaccaactcataccataggcactttatgtttaatcccatggaggacagaggacagttctccacctgtcactggtattctagtctttgaagatttttctatcctaagggctctcagaaaggatcaggagccctataagtgagaaatatctcttctgtcatcaatctcatggagtactaccatgaggtccccctataaggacttcacataactgcttcattatgtgtatctgagcctgcctggagtgatctgcccaagaccacgcaggcagctggtgcccccaatattttcccctgcatcgctaagtggtcagcatcagcagactcttacccactttgaattcatcagaagtttgtatttttgagaggtacctgggtctaaccaggtggttctggaataggccctcacttt

SEQ ID NO: 136822 - DNA, 324 bp, Homo sapiens
catgccaaggagcttgggctttatcctgcaggggaggtgaaagggagtcactgaaagttttaagcgagggatgaacacagtgagttaaaggctctaactccactggctgctgtgctgatctagtggtcagcagtctggagtcaggcggcgcctttcaaaggctattgcaagatttgagtgagaggggatggcggcagtagcggtagggatgcagaggagggatggattacaaagagatgtttagggttttttttttttttaaaggccccacctatcacatcttccagatttctggttagagcctgtaacaccccccaacccaaa

SEQ ID NO: 136823 - DNA, 498 bp, Homo sapiens
gagggcataagcagatacctgggaaaagtctctcacaggctcacagtggatgatggggcagtcgggcaagggagcaccacagcctgtgacggtgcggggaggggcaaaggcggtctgcacctgccaggcggagcaggggcgccccagagggtgaagagcacgcaggacacgaccactctgctccctctggctccctaagaggccttcttattcaggcacgctatgaacagacagtccagttgggcctgtgctaacgtctgacgcttccaaagcaaagactttccaaaccagtttggtatgagttagaagaaaaacaaaagtcatttcattgtcttaaagagttccgtccttgcagaatttataaaccaggcttttatctgctgccccatattgtcactgatatcagtggcatccaacactcaaaaacactcctcatgaatcccaaatttttcatgttgatgacagcttttaaaaataaaattactttaggccgggcac

SEQ ID NO: 136824 - DNA, 538 bp, Homo sapiens
ctggtggtatgagtggcatgtgatcgagctctcacgtcttggggactagaagttgtctgcaggatgtacattcaagtgtcaacccaagtgtctactgatttgtgtgacaaaatcattaaggagatgaaaatcagggtgacagcaatatgtcaaaatatttcaagatgccagagtttgaagtatgagcagcagcagctcatgtggaatgacaaagatgaggtcagggcagtagcaatcaggcacctgctgaaccttatgtcaacagtgtgatggaagcatctcatttcctcttctgaggtacaagcctttgtttctggtgatggcagcccttggggagcatatgcttgttgaaaatttatcctgccctaaggggctgtacatcatactttagaggccattttctgggcagttggcctcttgcttaattttaagcctacatcgcacaacactgtgatgatgtgtcacattttgcactggtctgagcagcaggtgaacatctggagtctccagcaggctgagttcagagacgacaaatgct

SEQ ID NO: 136825 - DNA, 294 bp, Homo sapiens
tcccccctggcttgccaggtctgtagcgatggggtttcgcctggcttgctcaggtctggggtgaaaccccttttctggtaagagtactgttacatgggatccacactatgggctcagagttggtccctttccagcgttaatccagaaacactctaaaacaaggagtttcttactcaaaagagggcaaaagaccagtcagggatggattggcagaggaagaacggaaggaaatgctgatcttcctgtaggtacaaaacttgtcactgcagccaagccaagtttcaggagggttga

SEQ ID NO: 136826 - DNA, 259 bp, Homo sapiens
agttttataaccttaggcaagttgatccatcttctacatctttaaaatgaggatcataattcctaccttatagggtttctgtgagaattaaaataattcatatatgtaaagcactttggaaaacgatctgcatatactctgcacataataaatgttattatgattattaaggaagaagggagatagatgatagctagaggaagagttggagttgatttgtttattgtttggttgtttggttttgggggcaagaaggaat

SEQ ID NO: 136827 - DNA, 395 bp, Homo sapiens
tttgatggcctcacccccatcggaacccaatgagctagacatctccagagatgctaagactttgcagatagattttctagccttatagggaagacattctggttaattgactcaaattatgacgcacaaaaagccattgtgggtgcccagggaagggcgtgactactgagctgcgcctgggagtgttcagtaggagttggacagctggaaaggggagaagacagtgttctatggaaagaggacagtattatcatcacattggcaagggcaatgcaaacacagtaacaaataactggccataaaggacaaaatgtgataaatgtcaaatgagtgtctcacttggtaagtgccagaaaatttggagaagaacgcctgtttgaattggggtgatcagg

SEQ ID NO: 136828 - DNA, 288 bp, Homo sapiens
ctgaagtgcagccctccatttcctaatgtcagaaatcttcagagcaggctttcttctgacccagatacataaaatatttttaacaggcattttttttattgctaaacacaagaatgtgcactcagccaagattaaatcaacaaatttgttgctgcagtgaatgttgttgttgtaacctctgcaatgatttttttggggagttgcagtcttccaaaaataatgtgaatttttctgtacagtttagtttgacctttaattttgtatagataattcttatgttatatatta

SEQ ID NO: 136829 - DNA, 592 bp, Homo sapiens
gcgttgaattcatcaacaactgatactctccttgtgctcagaagctccttgggctgctttagaagacataaaaaggtctatgatgctgttcattgcctttgaagatcttataatctagctgtgggtacatgactaacaatcttaaagccttagagagcagtggaatgctgagctctgtgctacttacatcatatttctgagaagggagagctcagaataaaagctagagtagcttgaaaagttctcttcatgagtcttaagctgggttttgagcaaaggcaatgatgaggatgacgtctagactgtatgagaagagaattgcttaactgagatgtattgtcagtaatagaaaatcaaattaggcaaatgggatgaagtcaaaatgagggtcttgaatgccagatcgagttttgatatcttcctatcaataatggaaaaccatggtacattttcaaaagatatctcttttctattgtcggggtaaaatatacataacataaaatttaccgctttaacaattttcaaccacttttaaccattttaattttatcattgtacatttttaagtgtacaattctgtcgcattaagtac

SEQ ID NO: 136830 - DNA, 273 bp, Homo sapiens
ccactccacagtctcctatactgaatgctgcccaaaaaggacttacttatcatctccccgaggatctgttctttcttcctcattcccagcaactcatgccaacaccatctccccacctacccaagacagaaaccaggaagtcatcctagactcctgcttttccctcatccagtcagccaccaggtcaggttgattctaccttctctttttttttaagatggagtttcgctcttgtcggtcaggctggagtgcagtggtgcgatctcagctcac

SEQ ID NO: 136831 - DNA, 368 bp, Homo sapiens
agcctggtagagaagatctaggaaagactcagactcattaaatactagagctggaaagaaacttagagagtatctaagggatttcctttatcagatagaaagttggacaaaatgacctctgaggctttagcggtctgcaaaattctttttctatttgcagttctgattgatagaaaaggaaattcttgttcaatttttttgcattctcaactgtgaataatagtctagttcagaatctcaaacctcagatactacatttctatgtcttttacaaaaccatagcttaaaaaagcattgtccatcctgttcatatttcttgtccattcagtattcataaattcatcaaacaaaatccagatagacttggg

SEQ ID NO: 136832 - DNA, 311 bp, Homo sapiens
cccctttccggccctgcctgggtccctggatccctgctaggtgcccctggacaagtccagtgctcctccatggggacaggaacaagcacagggcagtggtcaggctcagtatcctctgccccagcagctcctccaccaagtggagcagctcacaggcaagtgagggactctcgctgagttgccgagtctctgaaaggactgtaggcagcaatgcacaggtgcccagacagtgcctgacgtgtgctgggggctggccctgccttctccccatccgctcaccactgaactaccccagtgcagtcaatggtctc

SEQ ID NO: 136833 - DNA, 673 bp, Homo sapiens
gagcccaaggcaggaggattgcttgagcccaggaatttgagaccagcctggccaacatagcaagaccctatctctacaaaaaaaattttaaaaatcagccaagtgctgcctgcagtcccagctacttgggaggctgaggtgggaggatcccttgagcccagtaatcgaaggctgcagtgagctatgactgcacaactgactgcaatccagcctgagctcagagcaagactctgtctcaaacaaaaaagtaagtaaataaataaataaaaagtatccgcttttaatggacagatttgttctttctaatttacttcctgccactttgttaatcaatttggtagtctgaaaaaaatttttttaatcttgtctttatcaatgagaagagaaaatagcttttatccaaggaaggtgagtcctttaaaattatcagacccagagagactttttttgagacactcttgctctgtcacccaggctggagtacagtggtgtgatcttggctcactgcaacctctgcctcctggatgtaagcgattctcctgtctcagcctcccgagtagctgggattacagggatgccaccatgcctggataatttttgtatttttagtagagatggggttttgccatgttggccaggctggtctcacactcctgacctcaggtgatccgcc

SEQ ID NO: 136834 - DNA, 160 bp, Homo sapiens
agaggggttttattcaaataaataacttttggattacagcttggggtcagtttagtttctcgaagctgatctttataatgatgatctccagctttagaaaaaatagtgcgctgctttctaaatcaaagattcactcaagggttgggcacagtggctcaaa

SEQ ID NO: 136835 - DNA, 721 bp, Homo sapiens
caacgggatttgttaaatcatcgtgcctcaatagggaatttgttaaacaaattgtggtgcatacattatagaatgctaaactaagcagcaaatttaaaaagtagatctacggtatataaagtaatatagaaccgtgcctttgaaatactgtcaagcttttaaaaaaatcatatctcagaataatatgtgtactgtgatctcaagtatttgaaaaggaaaacaaactaaatacatatgtaatttattttaaaatttaattgaaaacataattgagattgtattgtataatctattctgtaactttttcaaattagtggttcatcatggacttccattcatgccagtacatatagatctacttcatcttttttgaaagatctgtaaatattaatattacatttgttttaaaatttgtgtatatataatgtatagatgagtaaaaattgaggaaggatatatgtataactgttaacaaaggttatatttggggaggaagaggaatttctttatattagtatattacttaacttttcaactgtaggtatatacttagtaaaaacaataaaaatatttctatttgaggatggaaacataatttttaaaaaatttatgtttgtagaaattataatcctgaaaaatacctcaaaacatcttcaaaacttgaaaaatcaatggctgttgaaattactttaactaaaatgaacaaaagcattggagaaga

SEQ ID NO: 136836 - DNA, 207 bp, Homo sapiens
taggagccaagtgaaggacatatttcaaggagaagggagtattcagctctgttagatgctgctaagtcaagtaagatgtggagtgaggattggccattggcttcagcaaagtgcaggtctttggtgatcttggcaagaacagttcattgggatggtgggggtgaaatgcttgattggagtggtttcaagaatgagcaggaagtgagg

SEQ ID NO: 136837 - DNA, 431 bp, Homo sapiens
ttctaacggggtaaggcgtcacttgacatactgataaatcttttacattctatatagtggaattagacaattttctgaaccttccgtcccaaccttccatcccttaccctggttcttgctactttgttgtttagatcatggtctgttagcggaaatatgactccatgtggtccatgatatgggcaccttacaagttattctaaataatggcacttaggttcaaagggcttgttaataatagtgccattgaggaaaatcatttgggccatcacccccttctcatgttgaaaatagcgttaagtgttcaagagtgtgatcggtgaaacacagcttaattcagctctacaggtgtgagtatttagccctggaaaggaaggaatgattattgcagggttagaaggttcaggagaacagtgcctccctcctagtca

SEQ ID NO: 136838 - DNA, 233 bp, Homo sapiens
gagtgtttacagcaggccatgtactagggattaacataaaaacaacaataacaaatctcatgaaaatttcacaaatggaagtgaaacaatatcacctctattatacagatgtgaaaagagaggcccgatgaggtctagcaacttgccctaaatcatatccctagcagagcagatggagaggcaggattcaaatccagaattccttttttttttttctttgagacagagtcttg

SEQ ID NO: 136839 - DNA, 318 bp, Homo sapiens
gaggttggagagagtcagagaggcgtgtggcgactcagagctgcctgggccctggcctcaggttaggaggggagtgccacagcctttatttgactgcagacgttgctcaggcattcctgcctggcacccccggggactcaggagtcaatatcgatagcgtgtcagcctctgcctgctggccttatctcccatccctccagggagggtgttccagggccttggctatgtggtgggaaccagtgttccagcagcagcccaaggctggtagaccagactgtggagtcagaggtcagctctgcatgggggcaactttgcaag

SEQ ID NO: 136840 - DNA, 178 bp, Homo sapiens
gggactccctggtgcagatgatacatctggcctggccctccctgaggtcttggacaggaatggggagggtggtgagagatattaatgcaaataatgctccaaccaattaattaagactgtggaggccgggtgcaatgactcatgcctgtaatcccagcactatggaaggccaaggcag

SEQ ID NO: 136841 - DNA, 233 bp, Homo sapiens
taggtattcaagaccagcccaggcagcatggcaaaaccccgtctctacagaaaacaaaaaaaaaataaagtagctgggggtggtaacatgcacctgtggtcccagctattgggagggtgaggtaggaggacttattgagcctgggaggtggaggctgcagtgagctgagatggttccactgcactccaacctgggcaatggagcgagactctgtttcagaaaaagagagagga

SEQ ID NO: 136842 - DNA, 744 bp, Homo sapiens
taattgggagccatttgaaacggcaaaattgccaacaaaaagtacaaaaatgcaaaaatcatggcactaaatagactgtgaaaaggatacttgcagtatgagagctgaaagaaggaggcatagcataccttgcttaatttcagctgggaatatgcatgtcaagtgactcaagtttttcaccactctgcacatgtcaccaatgaccaagaaagcattgctagtattgatttgggggttacaaataaattttaggaagtagatgaatttgcaaatgtggaatccgtgattaacgaggttcaactaattatattagagggcttgctatgatggccctcctcttccaccacactgtttttttttcataatgcagatgtttgatatttataaaataaaaacccaaaaaaaaaaaaaaaaaaaaaaaaaaaaaatttggggggggctgtgggacctcgagaaaagagcctttcgagaacaccttcgcgtgggggggcggggggggaccaagaggggatcagtgggacacggggtacaatgaggggttcccaagagaaaaactcgggggcagaacaacaagagggggcgtggggattctccacccactatataaaaagcggcccgggggggggacaaccaggacggcgttctcggaacacaaattccaagaggggaacacggaaggagcaaatagcgagacctcatcaaagggggatgaccaaggagaggttccaaaatcaaattacgccg

SEQ ID NO: 136843 - DNA, 1016 bp, Homo sapiens
ttgggagcccagcccagggcaccctcctcggagcgggtacgggatgctcactcgactccatgttcacttggtgctggtctttggcttgctctgttggtttgtccttagtcaacactgattacttcaagagtgactttcctcatattcaccttttatgagtctcttaaggtaaaagcttgaaataaaaataagacccaatctaccacctatttcttgacttcaaaaccttcctttctctctgtaaagacaaattcagacccagcacctgctcttgcatcacccctccccttggagctctccagaatgttcatgcccagacacccactgagggctgtggtgtggccacagcttcccggctggccctctgacaaactcctctgtggcccgttgctctctctcctcaccgcccactggagtcttctccctgtggagggcctgtctctccacgcctgttcataagggacagctggtggctcctcaccttcccgtgtcagctaaccccacaggatgaccccagcctgcagtcttatgtcaaattcgtttttggaacccaaactgttgggatcctgaggacttcagagatcatctggtgttcacagcgtttaaaatgggaagataaatgggaaaacccaagcctgctcctgttgacaaagcctcctagtctgaggaaatatactttgtagtcctgctgtccaaagagggcttttctgtctgactctgctgtctgcagtccccattctaaaaccaaggtcctcttctaaagttccagaaataaaactataggtccaagtctccttttcctttctctatgttttcagccagagaccagtccatgacagctcagcaggggtgagcagtgaggggctggtgtggagtcagggcaggaagaggaggagtccatgttcatgggaatctgcagtccatgtgcatggggtcccttgtgcattcctgggttgctgacatgcattttctcctgtaatcaccatgttcccctgcagggtaggtcagtggattgt

SEQ ID NO: 136844 - DNA, 276 bp, Homo sapiens
aggtggaaggacagcttgagcccaggagttcaaggccgcagagagctatgatttcatcactgcactccagcctgggtgacagaccaagcccctatcttgaaaaagccaaacagaaaaaaacaaaaactgggggtggtgagaataaataagttaattggggcatggcaattaaaataatacaattagagatactcagcatgaataaatctcagacacatctagcaaagacagccaggtgcagagtaatacccacaatgtaatgccatttaaacgaaa

SEQ ID NO: 136845 - DNA, 214 bp, Homo sapiens
caacaagagtgaaactctgtcaaagaaaaaaaaagctttaatgtaataggcagacttcatgaagatacatttcatgaaggtattgagttgggggagtgtactgatttatatatttaccttcaaagcattcttttgaattattctgtcagcatagaagactacgtacatccacctcacctctacagatgggagcagccacacagccaactgaaca

SEQ ID NO: 136846 - DNA, 481 bp, Homo sapiens
gacttactgtaagcgccgagggagaagctgtaaagtactacctaattcagatctctctccagttcccttgggtattaattatgcagccacagaagccagtgcataatgggaaggtgacacacttcattccccaagtacagagacagggagtgtggcttgctccaatgtgggctgggccaacacagcaggaaagaggacagaggacacccatgagcccctaacagagcacaattttgagcagaacaggccatcaccccaaagccaggagtaggaggcccatgtgggacagtctaaagcactaaccaaccacagtccccaggcttaatatccattccttcatcaaaaggccccaatcttcagagaactccattattaaaaacgagatgtgtgaatcaccactttccctttctgcagattggggttggggtcacctgtgaagctatgttctacagcttccgctgaggtcccccaggcaatgccc

SEQ ID NO: 136847 - DNA, 446 bp, Homo sapiens
atctgcggcagccttgcctctcacctggacgactgccactgcctcctacaggggttccccatttccgttcttgtcccccattgttcattctacccagcaggtggatgtttctttaaatgtaaaccagatcaagtcacccttgctcaccatcttccagtggttccccctcacatttaaattaacgtcaaagtcccatataatctaactactggcaacctctcccatcctcatcttctaacaccctcacacttgctccctacactccagccacaatgattttcctctcgttcctcaatcatattcctgacacaaaacatctgcacttgccattcctgggcctcgaatgttttatctcccaatcatcacttcatggcacgctttctttcatctctttcaaatgtcacctccccagagaggccttctccaatcactgcagctaaaataac

SEQ ID NO: 136848 - DNA, 209 bp, Homo sapiens
gttgcctaggctggtttcaaactcctggcctccagtgatactctcgcttcagcttcccaaagtgctgggatgacaggcccgagccaccatgacccgccaagttgtgtttttagagaaaatatattctctttagaataaggattctaggctgggcgcggtggctcacgcctgtaatcccagaactttgggaggccgaggcgggcggatca

SEQ ID NO: 136849 - DNA, 344 bp, Homo sapiens
ttttaattaatcattatttctaggcacatatagttttaatcactgggacaaactgatgatttctgcctgcttttttttcctctgctttaggtgaactgattgacaggtgattgtttcaggcaaggaacattaaattaaacatgtagaagtgtgcaaatatttgttattttgaattagaatgcttgtgtattctttttcacatttatacttgcttttgactaccaatataggtagaagagctttgtaaattgtaaagtaatatgtcaatattaatttttgcaactttagttgtgacatggaaagaatcttgatcatcttaagaaatattaattttctaaaatact

SEQ ID NO: 136850 - DNA, 265 bp, Homo sapiens
aaaaaacaaaatgggtaatgcattcaaggtgacagggttaatgttggcattactttgttatgttgttgatgggcagaaacccaaggtggggttttgttgagcataaacacaagaagcaattatttgtggcactagacttaacccaaaggacagacccctacatgtatatagtagagaaatcctgtcttttagcactatctcacaggggaagctgaggaatcacattatctttaatataaataaatgaaatgcagcactgtataat

SEQ ID NO: 136851 - DNA, 274 bp, Homo sapiens
aaatgcaaattctcagaccgaaccaggactgaatcggaagatctggggtagggtccctccaggactgaaaacggaaggtctggggtggggtaccccaggactgaatcggaaggtctggggtggggtccccccaggactgaatcggaaggtctggacgagggtccccccaggactgaatcagaagatctggggtagggtctccccaggactgaatcggaaggtctggggtggggtccccccaggactgaattggaaggtctggactagggccccc

SEQ ID NO: 136852 - DNA, 373 bp, Homo sapiens
tgaagaaatcccatcgaaaactcagagaatttaactgagatgttaaaaagaccacattttagaattaaggatcattgcctgaagtaagggcaactctacacccaccctaaaaaggcataaaaccaagcctcagtaggatcaagatgatctgctagtagcttaagtgcgtgctaaaataaaactccatgctcttcaaaggaaaatatagtctaagcgctccaattcagctggtccagtgtataataaaaaattactagatatgaaaaaagctagaaaatgtaattcataatcaggaaaaaaattgtcaatataaatagtcccagagatgacatggatgtaggagttagcagacaaagactttaaaacaactatt

SEQ ID NO: 136853 - DNA, 236 bp, Homo sapiens
cagccttcttaccccttttcttcaagagcccatctcacaggctgcctctcactaagatgagctagttcttaggcactgatttttcccttgggaaaaaaagcagtggagttcagtataaatctttgctgtaaacccacactgtatataacacactgcagggtctttgcacgatacaagaacaacttagtcccggtcctcatcttttgaggatactagggaggcaagcaaatatatct

SEQ ID NO: 136854 - DNA, 123 bp, Homo sapiens
ccccgctcctctccgcgacggccgggcggagggagctgttgaagggcacgcaggcggctgcgggggcggagggagctgaggccccgtgaggacacgcgcggtggtggcggtggcggcgggcgc

SEQ ID NO: 136855 - DNA, 356 bp, Homo sapiens
aagtaaaagataatgaaaaaatatatccctgcataatatgcatagaaaaaattggaaggatgtgccaaatgattaacataaattagctctgggtagatgtattttggccaatttttattttcttctcatacattttttcctaaatgagtatatattactttttaacaatttttttaattttagaaacacggtttcaccttattgcctaggctagtctggaactcctgacctcaagtcatctgcctgcctcggcctcccaaagtgctgggattacaggcgtaagccactgcgcctatccttcgtctatccttttcactctgaggcggtggagtccttcattgcgcaagacgccctgt

SEQ ID NO: 136856 - DNA, 691 bp, Homo sapiens
gggcttgatcttctaaatgcctcagtgtcatagttgtaaaatgtgctctgcccagtgtcccagacttgaccaaacttgacctagaacactccttcccattgtaggtcatggtgagagaaagacttgacccagaagtcacacccagaaggaactgccttcaatcttcagacagtttaaacatttaaggcatttcattttcttgcttgcatagcatgaaaatttctgcctgcaatactgacgactgcctttgtttggatgctcctagagagctcacactgcatctatttaacttatcctgtctatccagccatccccgaaaataagagcttcaaagctgtctttgataatgatgacatgattccctccactcacaatggtctctccacttcttccctgccaatccagcctgcctatcctttcctttccaacccaagccttgcctctttcttgaagttttcctgggttattctggtcccgacttattcctacttggagaactcttggtaacacctaatcaaacacacaatgctttgcattgttctctaatgctttcatcctgcaagtctagggtgcctaattgaattgcaagctccttgaaggcaaaggggttttacacttcttgtgaatgccatctcccattttctacttccttctccactctccattccccaaacccagcacagacacaaag

SEQ ID NO: 136857 - DNA, 416 bp, Homo sapiens
attcttttctatggtctcctagccactctttttctttacagttatctctgccaaaataatctttctaaaacaccaaagtaatctttccaaaacacaaatctcattatggtatggccctatttaaaatccagtttaattactccttaacttggcatgccatagtcagtatttctcgactgatgcactactggcatttcaagacaatttttcgtggttcatcaccgttttataggtctttttggcatccctggcttcccagcagcactctgcactcactgggacaatcaaaaggtcccctcacatttcctcactgccatagggtgttggtattatcccttgctgacgatagttggatatggcctatgcttcatatctcaccagtacctttactgtcactttccttttttttttttttt

SEQ ID NO: 136858 - DNA, 143 bp, Homo sapiens
gtcttcataatacaggaatctcaccatgctggaaatgattcgaggtttttaaataatactaatttttcagacaaggtggtccccctaaagcaaagcccactacttacttggagcttcacagtagaatcagccatcatttccag

SEQ ID NO: 136859 - DNA, 306 bp, Homo sapiens
tatatgatgcctaggcattgttctaggcatttcctgtgtttactcatctaactctcacaactgtagcagatggtatttccaaagacatctgcagcaatgtctcccatcctacaccctcttcttacaaagtgatgctgacaccagtcccatggagagaagtggcgtctctgtccccccacttgaatctgagaaggcttgggagtaatggctgaggtgacactacggcactttcagggacaggtcattgagtgtgaagcagcttctgcctccttcaccaggacactcctactagagccctgcaccacc

SEQ ID NO: 136860 - DNA, 179 bp, Homo sapiens
catatgctgagtgagaataatggagtacatttaagtgaaaatcctttgtgtcttttttgtgttatttcattaccactttacttggcagacagctgatgttccccattttatttggatggctggtactatgcagtgtgctgcagtagaatttaaattaaataaaaggaaataaaaaataa

SEQ ID NO: 136861 - DNA, 225 bp, Homo sapiens
cagactttaagatcatacattaaagcatgagggaaaaatatgtaaacaaataagtaaggaaagcctgttctggagtgagtgcacaatttcttactgttggggacatgtaatcagcaaatttgggagacctctggtttaaagatgtaaccttgcaaattgagtttttagcttttttgcatgctgggcaaagaacaacaatttgagatgttgaaatgtatagtattt

SEQ ID NO: 136862 - DNA, 434 bp, Homo sapiens
tcaaggacagggaaaaacaactccttcaaggaactttgctgtaaacaggagcagagagagcaatgtagggtcaatagagaattcttgatatgtgaaatgtaatagtgtttgctgaagggaataagaattagaaaggaaaaattgatgacatagtccagtggagactaagctggagctccctctcttctgaaacaaagcacttcattcatttcattaaaagatgcagagcattgtgccagataccatggacaccaagatgactatgacacaccccttgctgtggagaagtgaagaagctcctgggctgtgatggtcgaagaagatggacttgcttggaagggaaactaaaatttattaagcagctactataaagcatctttacatctgttatttcatttgatccctgtaatatccctgggaaaagtatattatta

SEQ ID NO: 136863 - DNA, 812 bp, Homo sapiens
caagttattccttcatgtatctgttcaaggaaactaaaatagttaacttttttgtcagatttttctataaaattaacaactaattgactagctgtttcatctgaatgattttgttagttttcctttttggattagattttttttcccatttactttggattttggattctaggttcatcttgagcagtattttccctccatagacctctgtactgtcccttccatatctacatacatacgatatttataatgccagtttgggggttctgttctggcgatgttgggatactgcagatctcgtggataggtagtgagattcagcatctaaggagtcaggctatttctttgtctttcagctttcttaagcctacagatttctataatgccataaactcaatcagtgattctgcaacagctttattttgtttgtttggttatttgcggcagggtctcactcccattgcccaggctggaatacagtggcatgatcatgactcactgcagccttgatctcctggactcaggtgattctcccacctcagcctcttgagtagctgggatgacaggcatgcaccaccaggcctggctaattttttgtatttgtagtagaaacagggttcttccatgttgctcaggctggtcttaaacacctgggctcaagcgatctgcttgcctcagcctcccaaagtgctgggattacaggcatgagccactgctccaggcctgcaacagctttattcagtctctttttattggggagatggagagcctaacctcagaactggattcgaccagcaacaagcctggttata

SEQ ID NO: 136864 - DNA, 341 bp, Homo sapiens
cctcattctgagtgggaggcctgagcccctcttcctcctcactcgggcttgatggctccttctcagccaccttggccagtggtgaccaggaggggtgggcgtggcctgcccacgcccttgcgtgctgtttctccagatttatactcttgctaatgaaagccttgacaagacagtattcattcgttcactcgtttactgatgtgtgcaaattgttatgtttagtttgtttgtttttttggtagagacagggtctcactgtgttttctaggctggtctttaaactcctggcctcaaagcctcccaccttggccgcccaaagtgctggtattacaggcatgagc

SEQ ID NO: 136865 - DNA, 291 bp, Homo sapiens
ttcaagcgggattaggggcggcgtgggaacctagagtgggagagattaagctgaatggaagatcttgtggtaaggggtgatattgtggggttgttagaagaaacatttgtcgtgtagaatgattggtgatggcctggatatgttttgtatgaattgaaaaactaaatggaaaaggtctaagaattgggaggacctaggacatctgattagagtgcctaaggagattcagcatagtcctgccagcaaagattatttatttacttcaagagttaagagtggcagtttggggat

SEQ ID NO: 136866 - DNA, 295 bp, Homo sapiens
aacagcagacctcagacatgctggttgctcccaaaaccagggccagcagcttcttgcaaagtcagaggcacacttgttggcttgtcgataacccttctcatctgctattttgcaaagcacttaaactgccatcatggtctcagtcttacaatgccatcagggaggaagagagaagatggtgtttcctcctctgggaatgtccttctcctcttacctgcctgaggcactcccacttctcttttggaacccaggactagtggttttctttcttggaagacttctcagtcagaattcc

SEQ ID NO: 136867 - DNA, 384 bp, Homo sapiens
gtccccgggcttatgtattgagtggcatgtgggtgggagctaaaggggctgtaacacttttctggttggctcaccgagctgcaggcaagtgacactctcccagactgtgggagtgaagagtgacaacccttctggggttccagacctcaggatttcccaagccagagctgtaaccctatagccttcctgtcttctgccggcactgggcagctgccccacacaatgggaagcagtggtggggctgggccagtccaggagccgcaggctggagcagagtggcagcactgaaagagctgttaacacaaatgggctgaaacatgcccctcaactccccaagctgtgggtgacaagaaggagaaaagagctgtggcccttctgggagcc

SEQ ID NO: 136868 - DNA, 468 bp, Homo sapiens
gctcttaaacccaggaggcggaggttgcagtgagctgagatcacaccattgcactccagcctgggcaacaagatgcaagcagcctggcccggcgcagtggctcatgcctgtaatcccagcactttgggaggcccaggcggacagatcacttgaggtcaggggttcgagtgcaagctgggtaacatggtgaaaatgcgtctctactaaaaatacaaaaattagccaagtatggtggtgcacgcctgtgatcccagctactcaggaggttgaggcacaagaatcgcttgaaaccaggaggcaaaggctgcagtgagctaagatcacaccactacagtccagtctgggcaacagagcaagactccatcacacacacacacacacacacacacacacacacacacacacaaaattggcattcgttacctgttcatcatttaaccctttgaatgacctgaagaagtggatgct

SEQ ID NO: 136869 - DNA, 258 bp, Homo sapiens
aacaaatctgtatccctaaaaagagatggggggaaatcctatttaaggattagcatttccttctaaatgcttaacaatgattccagagaaattcagtcaaatgatgcctgctcccgaatgatgctgaataacagctgtactgggcttatggcttgctttctttggttgtggaaaaatatatttcatcctcttctttgctgttgttgatatggttcatattactcaaagatgtctaattctcatgtcttaaattgagac

SEQ ID NO: 136870 - DNA, 537 bp, Homo sapiens
tcaaaaccgtatcagaacatagtaggtgaaatgttagctattattacaaagatgtgcagtactgtgtaaaatatgctgaggtgcccagtgccagtgcacagcaagtctctgctgaccaccagctgtcactcctgagattgccattgcccaggctggcctcccgtctgctggacaacctcccaactctaacactaactctctgcttcttcaggaaggcgctggccccagcattcagctccagctgcaggaggtgaagacgggcaaggcaagccagttctttgggctgatggggaagcgagtgggaggtgagtgacaatgacaatggagcccagcaagcaggggttctgagtgggttctgcaacataaagcagaggccctaagtcaaagcccagtaactggggtcaggtactccagtccagtaggggtcgctcatgagatggggtggcacagactgtccataggaattatcatccaggctggggggcagtggctcatgtctgtaatcccagcactttggcaggccgaggtgggtacatc

SEQ ID NO: 136871 - DNA, 128 bp, Homo sapiens
tggagtgcagtggtgcaaacatggttcagtgcagcctcaacctcctgggctcaaacaatcctctctccattgcttcttgaatagctggcactacaggtgcatgccactacacctggctaattgtttta

SEQ ID NO: 136872 - DNA, 764 bp, Homo sapiens
ctaagcactggctgtgtcaagcagcaggaaacagatatgtaagcctcctaccttcaaagcactcagcctaaatgacaggtatgtaactaagtagcacatgggagctacttagaaatgctaagacccgggggatgggggactagggggaggtggcagggcttacgcctgtaatcctaatattttgggaagccaaggtgggcagatcacctgaggtcaggagtgcaaaaccagcctggccaacatagtgaaagcccatctcgactaaaaatacaaaaaactagccaggcgtggtggcacgctcctgtaatcccagctacttgggaggctgaggcaggagaatcgcttgaacgtgggaggcagaggttgcagtgagccgagatcgcactgctacactccagcctgggtgacagagcgagaccctgtcttcaataaaaccccacaaaactttagttaccatctgaccctgaccacaatgagaccattccgattaaggggtccagactcaagaaatcacaactagcagacatatgggccacagaaccccctcagtgcacctggccctccatgttgctgcttaggtgagtcccttcacaaggctcatctcactcgaggtgtccactttacttgctggagagtatctgcagcagccagtctaccagctctttctactgctttcttctgaccagtagattctgatttgaccctttgaaatgagcttggtagaggtccctctgaggcttatattttcaatctcagatacatgg

SEQ ID NO: 136873 - DNA, 495 bp, Homo sapiens
ttagtgttttaaattctaagaatttttcggccagaaaatgatcctgcagagcatcccttccccccacctcaccactatttctcaactcctaaaaaaaaaaaaaatcactgaaatcagtgggaaaaacagtcctgcttttgatgcaacagccgtgaagactgctattcttggttcatggcaggagccagtgagtatcatggcacaagggaccagacagtcagggctttcagagtccactttgaggatgatgagtccagcacatgtgagcttaatctctgtactgttaccaggtatctctcatcatctccctttaccagtcccttccttcagtttgaacccagtgagagatgcaacaataaatttaatttaaatgggcaactactgtgactgttgactggctattggcagcctactgtatgtaactttatgcctccctgaaattctgcaaaataaatctctctcaagaaccaatgcaaagctgggcgcggtggctca

SEQ ID NO: 136874 - DNA, 415 bp, Homo sapiens
ggtggctccaacttctatgatacgcccttagaaagaagaggtatactcttttactatttcctgttctcaaatgtatcatggcaggagctggaactaccaccttaggccatgaaatagaagccacatattcacatattgagtagatcagattaaaaagctaaaagtagcttgagtacctaatatccagagctgctctatcagtcctgaaccgattatccttggactatgagagaaaaagaaatttacatcttatgtcattactattttgacctgagagcaagcaaacctataatcccaagtaatatgtgtttttcacattccctcgtatatatatgttcatgtatatatatacatttacaaatataaatatccatatgtgcacacacaaatatgtaaacatctctataggtattgg

SEQ ID NO: 136875 - DNA, 469 bp, Homo sapiens
gttgcaatgagctgagatcgtgccactgcactccagcctgggcaacagagcaaaactccgtctctaaataaataaattaattaaataatacgggaaactagctggcctgcacagggaagactggagtggcctgctctatcagggggtgccatctctcagagtaaagtgggaatgaaatcaggaaagatctcaagagctgtgcattccgaggatttttgctttgcaagcactgcatcagttcagaaacccaagaaccaagtggtaaggagtgatggaacagggtgctctcatagaagaatggaaacatacacgtgacaacctgctggaagccagaaattagactagagcataaaaatactttataagctctagagtttggaagtggatttaccataacagagtgtacagatagtaagaccaagatccaccctttcacttaatctccatgtgggaattgagtctggatggg

SEQ ID NO: 136876 - DNA, 440 bp, Homo sapiens
agtccgtacgactgacgcggaacgctgttaaacaggattatgagctgagcggaaggccgtggaatggattatctatgagctgagcagaagtccgtgtggaatggattatctatgagctgagcggaaggcctgtggaacggattatctatgagttgagcggaaggcctgtggaatggattatctatgagctaagcagaagtcctgatggaatggattatctatgagctgagcggaaggcctgtggacacggattatctatgaattgagcggaaggcctgtggaatggattatctacaaactgagcagaaggcctgtggaacagattcatctatgagctgagcggaaggcctgtggaatggattatctatgagctgagcggaaggcctgtggaatggattatctatgagttgggggagggctctgtggaacgtactgctcca

SEQ ID NO: 136877 - DNA, 345 bp, Homo sapiens
acaggcgtgagccaccaggcctggctgagcattttgctttttacactattttgggactggtttctgccctgcccattagaccaagcttcttaagggtaagtgctttatcttcttatctctgatgcattccatgtttgagcctatagtttttattatgcccaagagggtactttttaagaagaaagagattaaacaatcctttcctctaccccctagccagagaaacctttctgagacatagatgtgatcatatctgtctctagtttaaaacccttcactgcctcccaggacccttgggatcaagtccaaactcctttacgtggctcgcctaatctttcatgatca

SEQ ID NO: 136878 - DNA, 692 bp, Homo sapiens
aagtgttttacatacaatatcacattgacaccctctacaaggtagatgtactagatttaatagtgtcccccaaaatccatgtcagtcgggaaccccagatccttatttgcaaatagggtctttacagatgtaatcaggttaagatggtcagacaggattaggtgggccctaaagccaatgaatagtgctctttataaggagagaaatatttcaagacacagagaagatacagggaagaaggccatgggaagatggaggcagaaattgcagttatgctgtcataagccaaggaattccaaggattgctggtaactgccagaagctatttggttggtacaaaagtaattgctgttttacttttaatggcaaaactagaatctagacacatgagtgtgtttagggatgagggaagacgataacaatacagctcatcgtcctttgattcctctttcacctgggatcgatcctcttcccaaacatgaagagggttttccttgggttatatttgccctcaaatttcctcattcaaaaataatctgtttgctgggtgcagtggctcacgcctgtaatcccagcactttgggaggccgaggcgggtggatcacgaggtcaggagttcaagaccagcctagacaacacggtgaaaccccgtctctacgcaaaaaaatacaaaaattagctgggtgtggtgg

SEQ ID NO: 136879 - DNA, 493 bp, Homo sapiens
cgagagaaggagtctgtggaaaactgcctctgaaattccataagaaatttctcaagaaacctgattctccttttagaaacattaatggtaacttagcattttagcttctactctggctctctctccgcccttggtcctaccaccaccccctcctgaagtctgaccaggtctcctctagttggtaatggcagcagtcagcatgcctctcacctgtccatcagtgatgaggggtgattactccccttgtccctgcaggctcctcagcactaccctgcaaccagccatacccagggacacacaggagggaagggagttaactggctccatccagctaagtgagggcgggtgggggtctgggcagcaggctgtgagaagttcacagtttgtccatgagctttacgcttcctgagaagagaatgcaattaagcaggtaggtgcatttggctttttaacacttctgtagttaatcgctctttctctgccttctttcttc

SEQ ID NO: 136880 - DNA, 1432 bp, Homo sapiens
gaagatcccaggcagctggcactcctaggtgatgttcactaaactggctacatgggcgatgggattgccagaaagcaaaagatcagaaatttgagcctgaatttctgggcaaatgcttgcctcagttgccttcgatgttgagcagagaggaagtggcttgtccacccccagagagggatggcttgaatgaacaaacagaaggcacttctgtagtcagatgtcatgttcgtgtttaaaaatctgtcgccaggaggccctggcctcggcatccaccctcctgggattagggagcaggggcagggccagcgtgattaggacgcttggtttcgccagcgtcatctgcccgccccactcacattcctgtgtgtatgaaagtcgtctgggggggctttagcagcccggagtcatccctcctaggctaaggaaggctgagctctgagtgctggaggctgcccaggcaccctggctgctgagccatccagcccagagccaggccaccagcaacaacagggaggctccattcctgctgggctgtaactggatgccagcatgcagggatgcagaccgaaatatccaagtaacgatagcaactgggatccgtgcgagtggatgcatctcagcaacctaagcaaaaagtgcagcaaggacttctcaatgagacaacctcctccgcctttttggaatgttacaggatctggacccttcaacgaggtctccatgcagtgccctcgtggtctccagggcaactgtaccaccccttctctctcctaaccctccctcagcagacaaccgttttttgtttttgtatttttttgagacggagttttgcgcttgacacccaggctggagtgcagtggcatgatctcggctcactgcagcctctgcctcctgggttcaagtgattctcctgcctcagcctcccaggtagctgggattacaggtgtgtgccactatgccggctaattttgtatttttagtagatacggggtttcgccatgttggtcaggctggtcttaaactcctgacctcaagtgatctgcccgccttggcctcccaaagtgctgggattacaggcgtgagccaccacacctggcccagagaactgttaagaactgttattctaaccacaggcttcctcctcccaattctctctcctgaactgaggaccgggaaccccactttgacagttcctgatctcaagttgaggaatgtgctggcgtcaggaggcagcatctgggctgtggtttctgttttgtcgagtgaataccaaaacagatataatcccaaatacaaaatatgtgcagctggaggataaagattaaaacccaagagccaaaagaacttctttctcaagttccgattctcccagcatgtaggtctgtagacagaagcgggggaatgaggaggcctaatggagggatgccagttctca

SEQ ID NO: 136881 - DNA, 342 bp, Homo sapiens
ccagagccattatgacgccctatttctctctctctcattccttttgtactgtcatcatatcttactactatatgcattacaccttataatgttgtttctgttctaaaaaatcaaccgtctatcatggaaattaagactaaggctttgttccagcattataatttactccaagatgtttttcgtcactcacacttttacagtcttcctatatctctaaaacctctgatggattttgtaattttttttctttacttctttagtgaagtagttccattttgttgctaaaagccgtctttgaaagagggttcaaattccacattgtgtcaagcgagcatccatgtg

SEQ ID NO: 136882 - DNA, 280 bp, Homo sapiens
tgggtgacatgagcgagactccacctcaaaaaaatatttgttctcattttctagaagagatagattcagaaaggttaaatgagtcagggccacatggaggagttagaatttgaacgcaaaactttatgattccaaagcgttgcatatactaaattacctccctcaagaatgaaaacttcttgattttcttggatcactacttttctccagcctttctagttttcctaataatcttttcctcttctcatgtcatgcttttcttcctgggtggttttttttt

SEQ ID NO: 136883 - DNA, 490 bp, Homo sapiens
gggaacgagaattcctccccctacttttctctccctgagtaagcaatgtggctggagtagggagggtggtgcctacagcagcccctatacctcattcacccccatcctgcccgacccatccactccccaccacaagctggcaggtaaggcagtctgggaggttagcagaaccggaaattcaacccagagaggttaggggatgccccagtatgacccagcaagtccccaccctaggactccagggtccacatgcagatgagatatatgggaccccactgctgagccagagtgaggaaggcagggttctgggggcagccagcccctccccaggcaggaacaagccactgccccatctccaggcccctctgtaatccaggcccctctgtaacccaaccccccacacggattgtgcaataattacaggtacagctcattcctccaattccttcttccttattatctcatcgcctctgctcaagctgggcccttc

SEQ ID NO: 136884 - DNA, 816 bp, Homo sapiens
caattgctgtgctctctctcctccggcacacagaaatgctctctgcatcatgctgcttctgtcaggggtggtgccagcaattcaagaccttttttttctgtctcttcagtgcctctttcagtgatatgaagttaaaacgaggtactatactatgagtgctcacctgatttttggttctcatgaaggtgctttttttgtgtagatacttgttaaatttgtgtccttcttgttgtgaagatcggtagagccttctattctaccatcttgctctgcctcctgattctgaagcttgattcctttttctctttgtaacttcaaaaatattgaactttcctcagggctcaattctgggccccttctacctcttctataaacaatcttcccaaggacttcttacacactcatggctttaaacagccctttttttttgccaacaactcttatcggggatcctaccccattattcgtgtaggttctttctattttccctaagcgttggccagcttgagaaataaagggacagagtacaaaagagagaaattttaaagctgggcatccgggggagacatcacatgtcggtaggttctgtgatgtcccacaagccacaaaaaccagcaagtttttattagggagtttcaaaaggggagggagtgtgcgaataggtgtgggtcagacatcaagtactttacaaggtaatagaatatcacaaggcaagtggaggcagggcgagatcacaggaccacaggactgaggcaaaattaaaattgctaatgaagtttcgggcaccattgtcattgataacatcttatcaggaga

SEQ ID NO: 136885 - DNA, 533 bp, Homo sapiens
ggcgttcaggaggatccctcaagacgtatcagaacataaacaactctttttacttcgaggcccaactctaatatcaaggtctcttgccaggctgggcacagtggctcatgcctgtaatcccagcactttgggaggctgaggtgggtggatcacttgaggtcaggagttcaagaccaggctggccaacatggcaaaaccctgtctatactaaaaatacagaaatcagtggggcatggggcgggtgctctgtggtctcagctgctcaggaggctgaggcaggagaatggcttgaatccaggagacggaggttgcagtgagttgagactgtgccactacactccagcctgggcggcagagtgagacgctgtctcaaataaatacatacatacaacataaagtaagatgttaaagtaaattttaattttagataaacaatggataattttttagcaaaaggatgttccacatttaactggacattatctctgtctctctccctccttacctgcctcctatcctctcttcccaccccc

SEQ ID NO: 136886 - DNA, 795 bp, Homo sapiens
gggaaaagttgaaagtatcccctctgcaaactggaacaggacaaggatgcccattcttatcactcctcttcaacatagcactggaagtcctagcaagagcaatcagacaggaaaaagaaataaacggcatccaaatcaataaagaggaagtaaaaaaagtcactgtttgctgacaatatgatcatttaccttgaaaatcctaaagactcctccagtttgctgataaaagaattcagcaaagtttctggatacaagattaatgaacacaaatcagtagctcttctatataccaacagcgaccaagcagagaatcagatcaagaactcaaacctttttacaatagctgcaaaaataaaataaaataaaatacttaggaatatacctaaccaaggagtcaaaagacctctacaaggtaaactacaaaacactgttaaaagaaatcacagatgacacaaacaaatggaaatacatcccatgctcatggatgggtagaatcaatattgtgaaaatgaccatactgacaaaagcaatctacaaattcaatgcaatctccatcaaaacaccactatcattcttcacagaattagaaaaaatcaattctaaaattcatatggaaccaaaaaagagcccatatagccaaagcaagactaagcaaaaagaacaaatctgaagacatcacactacctgatttcacactgcactataaggccatagtcaccaaaacaacgtggtactagtataaaaataggcacatagaccaatggaacagaatagagaacgcagaaataaacccaa

SEQ ID NO: 136887 - DNA, 207 bp, Homo sapiens
cgtcacactatgtgcagaggattaatttccaactgtagggtaatagttgttttgccagttttagtggacactttttaggatgtctgccaagcctactttttacaaactttttttgccctgacataagagtttgccagttacccctgtacccacctttcaccagagctgacccaaacagaaccaatgagattcttgcctggcaatctg

SEQ ID NO: 136888 - DNA, 1128 bp, Homo sapiens
cgtgggtaggagagttatgctataccaataaacgaatcaggtgcctcgaaagtgacatatattgttcctttaagcattttttttaaaacagctctcagcatgttctgtagatacttattattttccagcccaataattatactttttcattgattatgcttatacaacaaaaatggatagagtgttctggagacaaggccagtggtgaaatgccaaaatacttcattttacagaatgttaagcatctggtcatttttctataagtttcttgtaaaatgtttcatcaaagtggaggggtagccacaaagggaggaatttcattttggtaaccagaaccagcttatcccatcctactcacttcatcatcactaccctggctttgtaaaacctgttttgccagcttaggagggggcttcatactgggcaaggaaagcagagtcccttgcagtgggttttcaccatccaccagattgaagcacattctgcaggctgtctgcatatcataagtatggttataatgactcacaatttaaaattctattcaccactcaatcctccggcaccatgtagcatcttgcctttgtccatttggcactgatacttgtaattaacaaaaggacccatgtaaaccatgtgttttttatcatatgcctttgaccagaaaactcaaaacagacagcatccaatctgtttgcaacattagggttgggaaggaagagtgttcattctgttctctctgtttcaaagatgcagtgagatgggctagaggggacttaatagacacatgtgcaagaggctaaaggtgaagccaaaagtggacagagatatcccaattcctgttggcccagctcttctcttctatggaccatgtcctcttaactgggatccaacaaagggtcctcttctcatcccttcctcccttatactttttaaggcataatgggtgattgagaagaaatagaaaagttaatacattatattcattaggatagtagctcaatttagctttatgtttattttttgagacagagtgtcaccctgtttcccaagctggagtacagtggcatgaagatggctcactgcagcctcgacttcctgggcaatgtagtgagacctgtctctaccaaa

SEQ ID NO: 136889 - DNA, 693 bp, Homo sapiens
ggacttaatagacacatgtgcaagaggctaaaggtgaagccaaaagtggacagagatatcccaattcctgttggcccagctcttctcttctatggaccatgtcctcttaactgggatccaacaaagggtcctcttctcatcccttcctcccttatactttttaaggcataatgggtgattgagaagaaatagaaaagttaatacattatattcattaggatagtagctcaatttagctttatgtttattttttgagacagagtgtcaccctgtttcccaagctggagtacagtggcatgaagatggctcactgcagcctcgacttcctgggctcgagtaatcctcccacctcagcctcccaagtagctgagactacaagggcgtaccaccacacctggctaatttttatgtttttaattttttgtagggacaagatttcaatacattgcccaggctggtctccaactcctgagctcaagccatcctcccacttcagcctcccaaagtgctaggattacaggcatgagccaatcgatttatcttttaaagttgtaatagactgggtgtggtggctgaggcttatgcctgtaatcccagcattttgggaggcgaagatgggaggatcacttgagcccaggagtttgaggccagcctgggcaatgtagtgagacctgtctctaccaaaaaaaaaaa

SEQ ID NO: 136890 - DNA, 231 bp, Homo sapiens
aaacagtgggagaccgaacatcacaaactgtgaaggagactgacagtgagaagaggaccacagtctgacttgggcattgttcttaaccttgatagagaatggcattcagtggagtcaattgctgggattggagcatgaatcaggttataagagagtgaacaaaagatgaagaactttaaacatgatttgtagacttctcttacccagaatttggcaagaaacaaaaggatt

SEQ ID NO: 136891 - DNA, 365 bp, Homo sapiens
gttacaagcttcaagccccacaaaacctggatctgtctctgtcttggatccaagacttgctgcctcatgttggttttcctgttgtcacttcatattacacagatggggaaattaaagccaagagaggggaagctaaccttacttggcaaaactgggacaggatccagttcttccaattcccagtttaatgagtgctctttccccctattctgtaaagttttttggtaacttgtctgtaaatatcggtcatggtacattgtccactgggtggcactcaagagattgaaatttgagttccttctctttgagtagttgggtagtcttgaactagtccctttccctcctgggacagattttcccagttt

SEQ ID NO: 136892 - DNA, 416 bp, Homo sapiens
ctttcgcttgtctcctgtctgcagtttccttcccattctgctctgtgtgtatttagatcttaccagtctatttcgtagtctctcccatggagtgtattttctaatttgtatctctccatctgtatgtctttgaggaagtttatttaagctctctgtgcttttttagattactcttaaggtgtgtcttgataaccaaggttattggagagtgatgctcttggttaaaaaaaaaaaagcaggaggtagtaaagtgaaagtaagcttcttttatgcttgtactcctcagaggcaaccactatttactatttttaagaaccaatttaaaaagaagtttgtgtagttacagtctcattttaaaaacatcctgtgagattatactgtattactactgttcaacttgctttaaaggttgaaac

SEQ ID NO: 136893 - DNA, 629 bp, Homo sapiens
acttcagggacatctgcggccacctgtcatcatgatgttgccattttggcatcaggaagtggtggtgagctttgaggagctttgtgtgtgtttgtaggaagtagtttagcccagtcttagccccagggtgtgcattctgcccaacagctgcctagatttgggttgtaggcaagctaagcaaaggcaacattgggttccaaggcatgacctcattggcattggcttaaccagccaagctaaccggctagccaaccagccgggtggacgttacaggactacaagcatccttctttcatgaccttcccagggagccctgctcagctcagctgaatcacccttcagtgctgacagcagttctagtctgtgtccactgttggctctcgctggagaagcctatagagagccaactggttccctattgggacagctttgttttccctgctgaacacaaaatcccctgttcactgggagagctgacaaggagaccccatggggctggcccggtgggagcagataccaatgaatgcagcgcccgaatggcttcagcttattaaaggcgaatacacaggataactctgcccgccgagtgggagatagaatggagggcacagagctgttacagcggatta

SEQ ID NO: 136894 - DNA, 172 bp, Homo sapiens
cattctgtgtgctggggcacacagaaaatgaagcagacaggctccctgccccaacgggctcacccacacaaatgcccacagggcctaggaagatccagcctggagggaagccagccaggtagtgagcctggagaactggagaagactgctgccctggtggtggacatcctcc

SEQ ID NO: 136895 - DNA, 461 bp, Homo sapiens
gggaatgatgctaccacagacactgtctgtccagctcttgctaaagacatgtaattggaaaggtttttttaaaaggaaaactataacaaaagaaatagatacatgcaaaaaaaaagataaatagtagtgaaatatttagaactacattatttctggagaaaatgagtttactggctaaactattggcccttgcccttcttctgggtttactgagaaggcatttggtgcctagatacagacttagccaaatatctctcccacttttggtaaaccctctgctggtgaatgatgtgggaaactctctcggaattccacaccttgctttagtttgtcttcattcccttgctccacttctatgcttggagcaacagcatgctgcctccccttcctgccctcttgtacctttcatgcaggtgctgatggtgagtcaggctagaggtaagggaggacctggaactcca

SEQ ID NO: 136896 - DNA, 205 bp, Homo sapiens
atggcctggcccagggcacaagccctctgcatcgtcagggcggatgatacacaggtctttggtgtttcatttttacccacttaaccaccctaacaaattcagaatcctgccagcgatctggctaccttgggagacctgagtaaaccaaagcccccactgtgtgcaggtgttgacattcatcatttcggggacaggtactgggtgt

SEQ ID NO: 136897 - DNA, 433 bp, Homo sapiens
tgagtccaccacacagtaaatgatgacattttggtatgtttggtatattaaactcactgctatgtatttttaaaaataaaaatataaaattccttgtgaagactattataaaatattatcatctggattgtatcgtatgtctatactataagctacctcctccattctgagcttgttcttccccattttgtctattattccaacaatgctgcaataaacacctttgcatataaataattctcttaatttcccatatcaccagaagttctagaaacactgttactgagtttaagggtaagaattttaagtcctttcatgcatagctccacaatactgacagatcataaactgagataattttcacagaacatattgaacatgctgccatcttaccaagggcttgtcagcaccagctgttatctgacacaacttt

SEQ ID NO: 136898 - DNA, 685 bp, Homo sapiens
acacccggctaattttgtatttttagtagagacagggtttctccatgttggccaggctggtctcgaactcccgacctcagatgatccacctgtctcggcctcccaaagtgctgggattacaggcgtgagccactacacccagccttttttttttttttatggacgagttcctacctgggacttctggtacttgccttcctgagtcacatacttagtggggcagggaacaatagagtgagcattaactgtgtcaaaatgttatatttccctaaagttattaaaatgcaaagaataataatttactgttcagaatggtccaaggccatttcatacccaggctgctgtgggaagcagtaggttggtaagagccagcatggataagtttctcactttaatgcagcctttgaggcaaggtttgaaaatcgcttttcagactctggtcacagcaagcagtatcattactgtgtcttctagccagcaggcattggatcatcattaacaactatttcctacgtttttcctccatgctaggcttgggctggatacaggacattcagagctggcctgatggtctgtctaatgggaaagacggttcataattgactctggcggtttgtgttctcactaaaatcttttttttttttttttgagacacagtctcactctgttgcccaggctggagtgc

SEQ ID NO: 136899 - DNA, 503 bp, Homo sapiens
cccataatgggtgagacacacatgaatagctgccctcaccaagcccagccaaaatggaatatttgtgagcaaaagaattattactttatttttaagccactaggttttagggtaatttataatgatacaatagatagctgaaacaaacacagcttgaaagataggcaaactagaactgaaactcagttttactaataccttattcaaaattctttcaacattatcatttttcttcctcctcccccaccagttgtagtagaggaaaatgaaagaatagatatcctatccttaagaatgtaggaagagaaaaatatgactagtgattcaattacttcattctaacagtttgtcacaaatatttttaaagtcactatggtggaactgttggaattctgagtcctgttttagagatgtttaataattgactttcttttctgattagaaatttgtatgtaatgcacaaaacatttggaagccaagtcattggtattgttatgtgctta

SEQ ID NO: 136900 - DNA, 337 bp, Homo sapiens
cgggtggatcacgaggtcaggagttcgagatcagactgaccaacatggtgaaaccccgtctctactaaaaatacaaaaattagttgggcgtggtggtgggtgcctgtaatctcagctactcaggaggtcccagatactcaggaggctgaggcaggagaattgcttgaacccaggaggcagaggttgcagtgagccgagatcgcgccattgtactccagcctgggtgacagagtgagactctgtcccaaacaaacaaacaaaaccacatagcagggggagcccaactagatataaaaagcaaatgcttaccctagcagtaacggggcaggagcccatg

SEQ ID NO: 136901 - DNA, 229 bp, Homo sapiens
gcaagatatttaactcaacattctttactgaaagtgggaagaataatagtacctacctcatggcagtattgagaggattaaatgagatgatgtgtgtaaagcattaataatgcttatacttggtccatgtaagtgctcagttattaatgattattgttattcaaaagtaaaggtagtcaatgaacaaatgtactcagcctctgcacctagcacctatttatgctttttt

SEQ ID NO: 136902 - DNA, 138 bp, Homo sapiens
tatatatatttttaaatcattgaattccatccgtgaaggttaaaataaagatcattcaataaacagtaccaacctcaacctttatgtttaaatttctgtctgcttttgcaaatgcatcagcacagtatctttttttat

SEQ ID NO: 136903 - DNA, 404 bp, Homo sapiens
tgcatcctaaaattcatacagaatctcaagggaccccaaatagccaaaataatcttgaaaaggaagaagacagttagaggtctcacatttccttatttcaaaacatattacaaagctatagtattcaaaatagtctggtactggcataaagacagacacacagagcagttaaacagaataaagtgtccagaaataaacccttgcatatatagccaattaattttcatacaaggacacaaagactactcagtgaagaaaggacagcctcttcaacaaatggaactggagaaactggatatccacatgcaaaagaatagagttataccctttatcttacaccataaataaaagttaactcaaaatgggttaaagaccgaaacataagacccaaaactataaaatgc

SEQ ID NO: 136904 - DNA, 366 bp, Homo sapiens
attcatgtatactgatatcacgagtaggcttcttctcaacattttaatgctcttttataattactatgtgtgttatgctgtgtttactaggtttctctatttggtatgttttgcttattgttaacttcttttggagtttagaaagatttgtattttttgttctaatattaccttttcattcatgctctttatggagctcatttaaatatttactctctggtttgtcagttttaagtgctaaactttgactctgctaccagttatttctactatagacaattgactgattttactttcctcatatcttcgttttcttccagtttttgtttcgtctattgtactttgtcagaacatgtaacatctcca

SEQ ID NO: 136905 - DNA, 440 bp, Homo sapiens
gtttttatgatgaaaacaggcaaaagttttcaaaagtagtgcagagctttatagaaaattagaaaatgcagacagttaaattaaaaatcacttaaaaataaaaaaaatagttgaactacctagagactatcatgtcaatcctttagtgaaaactcactctgatttttttctacacctaggtatagatatttgtattttttcctcagcctgcaattgtatttactcacatcgcttttcaacctactctttttagtggatgatttctacccatttattttagtaaatgttttatcttatatatagatcatactcaaattttccaaaatggttatagcttgtgtgtccaaatcacagttgagttcaatactacacatattatccagttgttccatccttgagtctcttttaatctagcacactcccctttctataatggcata

SEQ ID NO: 136906 - DNA, 357 bp, Homo sapiens
tacattgactgcctggaacgcagaattataaagtaaaagacagtgttagacaatatttccaaggctctccagtttgtaaagatttgttaatggatctcccagttcccttcctgtttctttctcttgctgccttccttttctgattctctttttctctttcttttttatttccacaaataatgcagcatactggaaagggcaggtcaggacagcctaggttcagaatctggctttcacatactacttgtatgacctcgaactgatatgtttaactctttgaccaaacctccatttgccagtctgtaaaatcgcaagactaatacctaccctaatgaggttattgggaaaaatgagaaa

SEQ ID NO: 136907 - DNA, 327 bp, Homo sapiens
tctgaagttccagctggatatgaattttggagacactcttcagcctaagtgatggagccccgagcacagggcccacgctggccagcatctggttccacacaggaaagccaagtccctgtcctggaggactcaggactccattcggggtttcaggctggccactcacaaccacacccaccgtgggtcagggggttcagaaagtgacctggctcttgcaagacggatggagaggagcctcgctccagggagaggtgcctccaggaagggctgaaacgggttgaggtccgttccaaagtctctagttgacctggcaggacccctggcttg

SEQ ID NO: 136908 - DNA, 281 bp, Homo sapiens
tctagttgctctcaatttttttcttacagtaagccttcctcttaggtaatactattatcacatcaacatgattataaataagaatggagaatcaatccaagaaagacacagcgtgactacctccaaagccacttaatttggagatagaaatgaagaggtgtacagttcatcctcagtagggttgcctatgctttgtgccttcctgaaacttttaatcactggaggctgtcataatcttccacatccacaccgtccataaagcatttgttacatattgactt

SEQ ID NO: 136909 - DNA, 281 bp, Homo sapiens
aagaaaagaacagtcatgtagggctgtacagactactgtcaggatttgggctttgactctgagtgaaatcaagagctctgtagaattttaagcaaaacagtgccaaggtctgacttatgtttcaaaagaattccctacgctgctctgtacaggaccaacgatgggtgcaggaaagcctgaaggagtctctactgatgaaaagtaatggtggcttggagcagagtgagaccagaatttacgctgtgtgtttcctcatgtgtctcacgctgtttgcctatgta

SEQ ID NO: 136910 - DNA, 399 bp, Homo sapiens
accttgttggttccctgaaaagattttgtgggacccttgtagtccttagactatgctttgagaactgctggccttagcaattgaacgtaagtacagtaggagacattggtagaaatgcttttgaatttacagtagagtctgggcatcaatattagatgtctattgatcttttattaaaagactaagagtttgagaatttaaaggctaaaacattataggtcctgctgatcagacttttcatagccagatagttctgtaggcttaaggccctttaaatccagataatgtccaagtaagtggcaaggcagcaatttggattccatagctgctaaaaagttttttacggcatttgtacatagatcattaagaagagaggaattatttctcacaaccaatttt

SEQ ID NO: 136911 - DNA, 529 bp, Homo sapiens
tcgtgcctgggaaagactggcgcctcactgagatcaggctggagtgtgtctctcgtctggctcttgttatacactagtacaaataacagaggtcaagtgtaccgaggtggcaccacaaccctgggagtccccattcctgggctacgtgcaaatcaaatgacaactagattggctgtgcatatccttcaagaacgatgtctgtttcattttactaccaatcacatagaatctctctctaagggccaaacacaaatcacacctgcagtagcagtgctttgggatgctgaggtgggaggattgcttgaggccaggagttcagggccagcctgggcaacagagcaagaccctgtccctacaaaacgttaaaaaaaaacacaaaaacccaaaacaaagagtctcactgttgcctaggctggactgcagtggtgcattcttggctccctgaaacctctgcctcccgagttcaagcgattttcctgacttggcctcgctagtagctaggattgcaggcatgcgccaccgtgactgg

SEQ ID NO: 136912 - DNA, 372 bp, Homo sapiens
tactatttcactggtactgaaatgaaattatgatgctccttcttcggcttcatgaagcagatgtaggtggccaatgctttatcttgggtggaggtgttttattcccattcatttgatgactttgtgaataattccttttccatcagctcaacagtgacattgaaaccattgaatcatttggttacaacctgcaattgactttacaagggaagctgaggccactggctggtgccaaaaggcttcctggtgtcctgagcagcaccctgcctctcagtggtcaaatcactttccctccatattactttgatgttcattcaagtgaaatgacctcagtactagcttttgctgctatttttttttttttaactagca

SEQ ID NO: 136913 - DNA, 354 bp, Homo sapiens
agcttagctctagagtgcttcagaagaacagcaacgctgaaacctctggctttcagtagtgtgtataaatgatggaattctttctaatgtgcttcctgtagctttagctaccaggcattcgttgatgtcaaatctctagacttctctgctgggctcagacccatacccatattgccatctggtgtttggacattctcatctggctttttcattattaaattcagcaggtctaagcttcaacttatttctgtcttccccaaagttcctttggttcctgtcttaaacctaggttaaatggtaccacctaattgtgtgagctggaaatcccaatgtttttctttccgcttttcagtt

SEQ ID NO: 136914 - DNA, 200 bp, Homo sapiens
ggaagggatgacccgttcaatatatggtgctgactcagttggatattcacaggtaatatacatcttgatccctatttccacaacttgaaaaaaaccaagtccatatagattgcataataaagatgaaagtgtaaaaaagtaaatattatggttaaaaaaaggaaagtgtcttcatttacttgaagtaggtaaagatttaa

SEQ ID NO: 136915 - DNA, 432 bp, Homo sapiens
  misc_feature (75)..(75): n is a, c, g, or t
  misc_feature (118)..(118): n is a, c, g, or t
tgtctcagtttcgggacggagtccggctctgtcacccaggctagagtgcagtggcaccatctcagctcattgcancctccgcctcccagattcaaaagattctcctgcctcatcctgncaagtagctgggattacaggcacgtgccaccatgcctggctaattttcgtatttttagtagagacagggtttccccatgttggccaggctggtctcaaactcctgacctcaagtgatctgcccacttcagcctcccaaagtgctgggattacaggcatgagccaccatacccagctggaaataatatttgaatgaactctaaaggaggaaaggagttaactgattgaaaatgaaaggaaaacccttctaggtaaagcagccagcaactgcaaaggccctaaaaggggaacattgtgcgtcccgaaactgagaca

SEQ ID NO: 136916 - DNA, 479 bp, Homo sapiens
ccagctagcggctgtgcctctcgacttcacagctatcttctggctctccactgcttcactgtggccttgtggtgtggcctctccccactgttgcctccagcactgctctttgccagagtcacctggttgctgcatgcactcactggtcacttaatccccatcctccttgaccacactgtggcattacaggccattgcctaaacccttctctgagctggtagcaccactctttcctggcttttctctggtttctttgaactcaattctatccctttcactattacttccatcctctgcccatgagtcatttaaacacacgtttccccaggttccctgactgacctgcttctcctctcatttcactctcactgctagagtgactcatccactgctatggcttcaatatattctgaagcctctcaagtctcctgttcttggcccaaactcaccttgactatatacaccaagctctgcctcac

SEQ ID NO: 136917 - DNA, 413 bp, Homo sapiens
ctgaaagtagaatgggggttaccagaggcttggaggtatgggtaagcagggagacaaagggtacaacacttcagatgcaagaaatgagttctggtaagccactgcacagcatggtgactacagttcataaaaacgtgagacacagtggcatgcatccatagtcccagctgagaggctaagggcaagaagatcacttaagcccaggagttcaagtccagcctgagcaacatagggagaccctgtgtctactagatatacaaaaattagctggagatggtggcaggctcctgtagtcccagctacacaggaggctgaggcaggagaatcgcttgaacctgggaggcagaggttgcagtgagctaagatcgtgccattgcactttagtctgggcaacaagagcaagactccgtctc

SEQ ID NO: 136918 - DNA, 490 bp, Homo sapiens
accttaatacgtggctgttagacaacctctcttcagctgctctgaaagaagacagatcccttcagacaggcttcagaaagacgggaaggaaagctggtgtacacccagtaccccactgggagacgtcctcagcaagcagccagagaagaggcacagcgcgggaacttctgctctaggggtaggaatgtggtgggacccatctctctccttggaagaatgtgggactctcgcctgctcactaaaaccaacacctgccgatgtgctaagagtcctcttgaagtcccaacaatagacatcaaagctgatgtttggaagttcagataacaaggaaagggagtttaaaaaaaaaaaaaaaaaaaaaggaggaaggagggaggaaaacaacaccaacaaaaagtctgtctcacctttgacctctggagaggcaacagaccaaacactttaaactatgctggaggacatacaccgtccctgctcacctataaaagca

SEQ ID NO: 136919 - DNA, 348 bp, Homo sapiens
catatccagggaaattaaacaaaaatataaactaatgtgatctggaaaatgggatttcggtctcctgtctaatcatatttccaaggattccagagcaccgtggaaaaaaagaaaagggatatacaagccaatgcatatataatttcacataatttggattgcacatacaatccaaattaagtgaaaaaattaagctctaaaagaataaagcataaatgattgaaccattatgtattcctattgataatgccataattatgcaactacatttcagatgttaattctctttagaaaattatctgacttcattaaactacttcagagctaagtcaagctgatctattacag

SEQ ID NO: 136920 - DNA, 367 bp, Homo sapiens
ttacaaaatgaaaatctgagaaatgccccacctacatcactacatcaaaaaagcagctgaaagacaaagagcccaagccttctcgcctttccacaacaaatgtagcttcctttgtaaacaaaaaataagttgttttcaacaacattgaagcccttcatttcacccagctttctttcatgcagagtgtgtcctcacatcaggggaaacaggagagggaaagaaaaaagtctggaggccaggacacaggagtgttagagaaaactcaagctgcaactggtctccctacagcttgcagaggaggagactagcacacagacatcaacacttcggtaaagctgaagcataagccactttttttttttttttt

SEQ ID NO: 136921 - DNA, 284 bp, Homo sapiens
gctgggattacaggcatcttaatagacccatgtccctactgccgccaccaccagaaaaaagggctataagtccatgtcctgaagcccaaggcctcctttggctgatggtcaccatgacacatcaccacgtcatcaggtgcctgggcctcagttttagcctcagctcctggtgcgagtgccatcaggagaggaagttctagcagtatgttgtgcgaggggtcaggatatttggttttactcaacaatatttttgtcttggctcagttggtcacagctgtacacct

SEQ ID NO: 136922 - DNA, 418 bp, Homo sapiens
agcaaggatcccagtcgacggagactctccaaatatgatatctaacccttgttctgactccaaacagagttgttttcgtttttgatttttgtctcaaactttgcagtttttatagaagtttggttagatatcatatttggagagataacaatgataattattttgctaccttttagtagctctgctgtaaaataattttagctaaaagactgtaatattttatgaaaataacaggtttgagtttaaatgtgcagattcaaggtcttattattatctttgaccctccccttaagtgagagagggccataaaattacattcagttattgactttacaggtaatcattgagcacctgccatgtactaggtgctttcagatactggagatagagttgtgaacaacacagagagtctccgtcg

SEQ ID NO: 136923 - DNA, 260 bp, Homo sapiens
taactgccttccttctctacattgctttacggtataattcctcagggctgtccatgcttgctgtctccaatctctctcctccattctctctctgcaacccatgccaatcacgctgcacccactccacggaaacagctcccttcaagtacaccaatgacttccacattgttaaatcccaaagccaatcctcagtccttgtcttaccagatagcaatatctgacactgctaatcccctccttactcagcttctggggagtca

SEQ ID NO: 136924 - DNA, 772 bp, Homo sapiens
caccgtgcctgaccatagccctgtctctttaagtaatcccagaaattcaagaacagagagctctggacatcccagttctttttaccacaaaactcttggatccactaactacctaactcttaatctccagcttctcctacaacaacaagcttcatccttgtccaatatcacctctaaacttagaaatttgcccctcactattcatcccattggatctgaaatggacttggcttttttggtttggcctcctgttgccccctggctctatccattctgggtacctactccaggagatcaagcctacactcacaagacccaacctgtgattagcaagatgcacaaggccaccactgagatcatctgtggttcctgttggagagaactgaagaaactgggcatgctacaatcatcatgagtgcagtcagaaggaggacataattctgccaagccacctgctgcttctcctaccaccagcagcagcagccccttcccctggatgttcattcacctctcaggtaagcaagaaggaatagtccgacttggctcaccaccacctgaagcaacatttgatttatcagggaaagcaaaaatgaattgaggaatcaagacatgaaagtagaaaagactgaaagctccctgaaggcaagcattatgtgtgtcttattcataattgcatcttcaggtcatgccagtgtctaacctgttagtaggttctcaataaatttgtggaaataattagaaatagaatgtctgtcttttatctccatcatac

SEQ ID NO: 136925 - DNA, 1374 bp, Homo sapiens
taatacactcccaccagaaacaagaggcaaggcaggccctgggggcctcacaaaggcggtcttatgcaagggtgagaaagcagagttatcagggaggtgggactattgctttatgaacgtgatgattggaagcaaaaacgtggggctttttcctattgaatacaaagtaaaataatgaatgctggtgtcagtggttgggaataacaacatttgcaggctcatgagagctgcctgacaaaaagcgtgtaaacaacagtgattgctcctgtggccctgtgattcagcaggtttatggagcagttaagaatcgcagatgtcaaatggccaacacagaatctaacgacatgcttaatacaaattattattagtagaaatgctgaattgcttcatttctgcaatttctgctgcttcttaagatgcttttaatgaataaaatctgccttaaaatttgatacctggtaacttctctctgtgagttttgaattggctgatgtaaccaaaatgccagctcttgccatctaactaccattaaaaggaacttctaaagctccgaagtggtcaacagtttcacttccaacttttttaaaagatacacaattttctaaaaaatttttctttatgggcgattgaatagttgggctttggctaattcctcattagcaatagaattatgtatattttgcaaactctaatacagaacacttaatgtatcagacaaccatgattatgatgtatatacctggtataaacaatcttttttgcatattgaattctgcatttttttcttccttgatacgtatgagattcaccagtaccagtttttctcttgtggtggcatatagttgattgtcatttgcattatctattaaaaacctgtggcagctcatggtattattgaccatatgttctagtgtcttcttgcagatttaaatattttattgcagtgtaaagtttaatatttagatgtgtgatacatctttggataatctgtaattaaattgatcttttgtaatggtgatagtgattagcacacactgaaaatccagcaaagcaattatttttctctttttaactggaaatcatattcgtaagttgtggtagatattatcatcagtgtattcatgattcgatttatattttgtgttatctggttataaattttatatagcattcaatttgacaaaatataaatctatttgatttgaattaatggtgtgtgtgtgtgtgtgtgtgtgtgtgtgtacttccttgaactttaggaaattctacaaatcttatacagatatgaatgtatcaggcttatattttttgcaaggctatatatacatttcttctgtttattaaaatactggaattggtgttatgtagatatag

SEQ ID NO: 136926 - DNA, 344 bp, Homo sapiens
aagccttttccatccatatttatcaacttcctaagttctcttttgagtggattctctggtgttgaataaggaatgaacgttaaagagaaattttactatactgattacactgaaagggtttctttccaacatggattctgatatgatgaaaaagctgaattctgactgtgaactttaccacacttgttacactggtagtaacatatctccctggtgtgaagcctctggtgctggttgaggactgaccactggccaaaggctttgttgcacttgtcacatttattatagggtctctctccagtatggattctcttaacgatgaatgagtccagtgtttgcactga

SEQ ID NO: 136927 - DNA, 562 bp, Homo sapiens
ttaccatttgtatttgttgatatgtaatttacattttattcattgaattagtatttataatcttggtttgtgtatggagtatatatgaatctgcatgactatgtctaggattataagatttaaagcaccataaaaaacagacatataatgggacactttttctgctgttgacaactttacttaatatatggtggtaactagtttcaaaagcagttttcttcatctacagtttgaatttgctttcagttgccttttcaatttatttctgttcaagaaacatttttgagcttctaacatgtataactctttgtgctaagagctggcagaataaataattaggaaggtagaattactcaaaaataaatggaatcatttcatgacctcaagaagaaatgtcaaaatctagatggaatgatagataagtattaatatacgattaactgtaatacaaaacagattgtgctaagtccagggtgagtagagaattttaatgttaggtattgataaacattctaataggtacaaatgaagtacaaggggatattagtgggaatagtgatta

SEQ ID NO: 136928 - DNA, 498 bp, Homo sapiens
gtaaaaagcataggcagttgcaggaactaaatgttgtcattaactgagtgtactgaaaatagttttattctttttaatttgtataaaggttgaatggttttcatttttaaacaatatttatcacaatacagtaaaattgcactgaaaaacaaaagaatgttgaaaagcatttcaaatcctttatgttatgactttatttgctttttatctaaaaagaaatttctctcctgtagtgtcacccgcacattaggtgatgacagtactaaaactgtatttagtggcaattaactgctatttcccacttgctgtttttattccattttaaactttcttttaaatctcaagtttatttaaaagccgaaatagatatataacaccaagatgattttgagaaaaataatcttctattaatatcatgagaagcatttttcaccattcatttcagttcaagaataaaaatgactgtctccacaaaatcatgctgcttccaattatttg

SEQ ID NO: 136929 - DNA, 462 bp, Homo sapiens
tgcatgctctcccatgcccagtgccctttcacaatgaaaggagccagggccctttctcatgtggaaacaaatggcattttagattaaaaggaccaaactttgtcataacccttttctaaattgcataaactttaaactaaagcagtgcaagtgggcacattaccttgtatgtaaaaccaccatccatacaaccgaaacagagaagaattggatgtgtttgtgccctacaaagattctgtttagtctgtaattttgttccttcctcatctcacacacagctgaaactagtcaggtttcaaagaaggtagcattgtattgtgcatcaacacttgtctttagtggaaaaaattacaatgattgtgtgcaaaatttttgtagttcatattcttttctgaaagattagagtcgttctttattactttatacaaattatgagaacacagtgtcattaaaacacagaca

SEQ ID NO: 136930 - DNA, 231 bp, Homo sapiens
gtgggtgctgtgaggcactggggtctttggtatcctggcatggctggcccatgtggacaccccccacctccaccacagttgtgggtggctgtgtgttaagaggctgcgctctgccctctggcacactgcctccaacctggcgctgtcccctcactgtgtgtggtcaatgctgttgtttccacagtggctgggtgagtcacactggctttcatctgtagtgtggaaaatgcc

SEQ ID NO: 136931 - DNA, 373 bp, Homo sapiens
cttttcttccctaaaactttatttcaaagttattcacctcaccgttaataaggtgtatgattaatgctctgtgccagtattaccaggcctgcccattgccagcaatggtctttgagataacccatttcctagcacccaaaagttaaattactcttttcaaaacataccgacctccccaacacttgcaaaagtattacatgcgccattttgtcaccattctttaaatcagaacttacaatattagtctacatcggtacatgttaaaatgaagtcattttaatgaattatgactgtacaaatccaaatactactagttagtattagaccagagtatcttacaaacatattacatattaccttgcaatctgaaaca

SEQ ID NO: 136932 - DNA, 569 bp, Homo sapiens
cattatgtcattgttctaagactcagttttctcatctataaaatgggtcaattatataacatgtcatgtttaggattgctgagggggtaaatgacattatccacataaactgcctgtgctgtaagtgtttgggaattcttaactataatgttgttatcattattgtgttgttattgttgacaactaaattcagacattactgaattgtctgaacacaaaagccttcaacacagttcttaggaggagagaaaggtaagagcacacagttaaatcaataggaaatttattaaatgcatattataattcaatcttctgctaggtactgggaaaaagaaaatgaacgaaagacaaaaacacaccataggccctaaagaagtttacaacctcactgaggagataaagtagatacatgacacatttcaacagtgtcgagtgcataacaacattcaaggtccttcactggtgccactcttgggagaagagaaagcccttccaggaataacatgctgtggtatttaggtattcaacaggcacgtgtctggtgtcagccagtcttggcctcagatccc

SEQ ID NO: 136933 - DNA, 402 bp, Homo sapiens
aattacgaggtaggtatcatctccattttacagatgagaaatggtgagtcagagaggtcatgtagctgagaaattgcaccagcagaattcaaacttaccacctaacttcagtccggtaccttttctactaagcttatgactaggagtacttgctctatctgtgcatttacttaagtagttttctctatctggtatgttctctctccttctgtccttcccattccctcctgtcagaatccttcaaggaagggcccaaagcttcctctcctcctcccgctctcatccaggttatctccaccttttctgcacacccatggccactcttctggcattgagactctttcatcttattgcatggttattgctttaccgctaaactccaacctttctgagagcaagact

SEQ ID NO: 136934 - DNA, 185 bp, Homo sapiens
attttaaatgtagttgtacaagaattttatgacattttatttttattttgtaggtagtttccttttcttctatctggtaactattcagttagctgagattgaaagagtgctctgcgctagcaaggtcatgaccatatgtgtgatatcatgggcgtgctaggctgactccatctgttctgtggtca

SEQ ID NO: 136935 - DNA, 360 bp, Homo sapiens
gcaaacactcccatccagtctgtcctcacgttttgcccagactcctgcaagaacttccagaatggtcttctctgtgcccctgcccctgtccctcccatgtcctggaccatgctccacactgggccaggttgggctttaacaatatagtttctttttttttttcagatactctcactctgttgcaaggctggcaaaccgtggcacaatcatggctcaccacatcttggacctcccggcctcaaactatccttccaccttgactccctgagcaattgggaccatccgtgtgtaccccaatgcctcgttaatttttgtatttttttttttttttgtagagacagggtttccctatcttgccca

SEQ ID NO: 136936 - DNA, 405 bp, Homo sapiens
ttcatgatgacatgtagcctttaaaaatggctgaatctaaaacatatttatgatgcccattattttatctagtggaaattttcaaaagcaaaaaccaggaaatgatgaaggctattgacacattcagaaaatattctgagcagtttgtgggtctccattgtaaagctacagttgaatcatttttacaagtgggtatgaataattacaattttatattttgtcctgtggtaattaaaaagcaaatagagccaaattatcattaagcgtaactaacagaaaagtaatattgatagatttacatgtttaaaaatataagccaacccatgcattcagtattttatcctcaaacaaggtgttccagctttagttgacactcagataaaaagcaaactagtggctgggcat

SEQ ID NO: 136937 - DNA, 580 bp, Homo sapiens
agcatccctgctctccatgtatccattcaattgtttatttgtatcactataggctcatgcatgttgatttaaaactgttacaattgtataacagtttttcttatagaaaagcatacattcctaacgatctttcataagcaaaatggtgtaacaaaattgtttataacagtatataaagccattttataaaaacagaaacaactcagagagatgccagtgactctagcctggcagtctctgtatcgtacagaagaatgatagttgcccctaaggatgcccttcccaatgatgaagtgtaaacagagaaaaactgctaactttaatcatctgtaatctattatttcttctaagccctatgtgaccttgcttataattttcttgtagttcagtcatacagattttctatgtgttatttagtttatatatgtatatgatttatagatagatatgagcctagcctaaatctgtattctgagaagtatttgttctaaatacttgcaaagtatttgtgatgaggatgacaacacccccgccccctggtccagttgtcttgtggcctgtttaaatccatcctccttat

SEQ ID NO: 136938 - DNA, 507 bp, Homo sapiens
agctatgacatgatcgaagttagctcggtaccggtgtttatcgatgccacgtgtatatcaaaactcagtgaattcatacttaaaatgagtgaaagttattgtaaattatactttaataagttaataaaaaacaagaagtgggttggggagacgttgctcaaagggtacaaactttcagtgaggaggaataagttcaagagatctactgtacaacatggtgaccatagtcaataacaatgtattatattcttgcaaattggccaggtgaggtggctcacacctgtaatctcaacactttgggaggcaggaggaacacttaagcctaggacttcaagaccagcctggttttggaggtggcccagcatttggtgagtttgccaagaaactatgaacgataagactgtggagcgtagagcacaagtcaagccttaaatgctttcaaatacagatattttaagatattctgtcaggcaaaaacaacagtataggcagattttaggcctgaag

SEQ ID NO: 136939 - DNA, 320 bp, Homo sapiens
gttcagggccagggatggcagaccgcagtccccggccagatccactgcctgttcttgtaaatagagtctccctgggctgcagttccgtctgctgttttcatgctacagcggcagagtggggtcgagtgcgtggtgtcgcctgcacagcgggcagtgcctactcttggccctttacagggagtctggagggaggagggagacaggtgagaggagggagggaggacaggtcttgagggagggaggagggagggaggtggcaggagcttttgcgtctgtccccagtgagttgccttgattccatcttgaggcctgtactgtga

SEQ ID NO: 136940 - DNA, 101 bp, Homo sapiens
ctcactcctaccctataatcccaaccaggtaatacttcctatctactcttccagtctcctatacctttagctcaaatttatagcttgaagaaacagaccag

SEQ ID NO: 136941 - DNA, 751 bp, Homo sapiens
aatcagaattcatttgtaaggaagagctatctcttctctgtcatgtattcattcattcacagacatgtggctatttcattctgtgtgctagaatctgatattatcattattttgctatgcaaatggttccagctgtggccattgggagcgctccctggttggttcctaggcccctttgatgtgcttccaccattttttcagcacttctttatttactgaaatgttaagatgctccaggtcctttttatattttatttatcccatgtctggaaatcaaccacttgtctaaggagccctgatttctttttattggcatatgatatttagcaatatctggaattgagaatccaatgactggggtgtcataagttctaggcactcagcagagtgagctaggatatgtatgtatttgtagtaacatgtaaacacacacatttattcatctacgtgtgaatatatatatataaatatatatgtaacttgagtttatattgatacctccaattccaatccaacattaattttggaagggttggtataaatttctacttgttcacatggtgttttgttttttaataagattttatgtttttttcttatataagttctgtacctttatttaaattactcctaaatgtgttatggtttttgtcagtatcacaaatgggatgtcccatttgtcccttcctcccacaccacatttctgtttgttacttctagaacagacagaagtggttacgttcaataaata

SEQ ID NO: 136942 - DNA, 989 bp, Homo sapiens
ttcccgagtagctgggattacaggcacccgccaccatgcgcagttaattttttgtatttttagtagagatggggtttcatcatgttggccaggctggtcttgaactcctgaccttaggtgttccgcctgcctcggcctcccaaagtgctgggattacaggcgtgagccactgcacccggccagggacatgcatggttttctacagagtggcttcagcttccacggttcatccctagacaattttgcctttttttttcaagacacggtcttgctctgttgcccaggctggatgacagtggcactgtcatggctcactgcagccttgacttcccagggtcaagcaatcctcccacctcggcctctggagtgccagcaggacgtgtgccaccacaccctgctaattttttattttatttttttagagatgggatctccctgtgttgcccgggctggtctcaaactcctggtcttaagtggtattcctgccttggcatcccaaagtgttggggttacaggcatgagccaccacttggggcctacttggctcttttttacaggtttttggttgacacttctctgcagaatagcacctggcacctctcaccaccactgaaaaggatggaattttatacacctctttttcctaggttctctctagcagttaccaagggaccatcggaggtacttattgtggctgtttacaaaagccttgcctccagtctgagtcacctcaccctactctctgcttcttccttttagctactctttttttcagtaaccctccctctttcctctgaaggcttgtgcttgcacacacaggcagacatactcatgcacgcgcacaccacacatgcttcctgtcctctggctctcccgtatcctatgtaaaacctcctactgtcatttaagtgaaacccttctagcacataagagttttcatctcagaagctcaattttacctttcacttttcagatagagaacacccaag

SEQ ID NO: 136943 - DNA, 533 bp, Homo sapiens
accaaagactgtaaaagagagccggtaggcacaagtggtggctcatgccggtaaccccaacactctggggatgccaaggcaggaataccacttaagaccaggtttttggttgacacttctctgcagaatagcacctggcacctctcaccaccactgaaaaggatggaattttatacacctctttttcctaggttctctctagcagttaccaagggaccatcggaggtacttattgtggctgtttacaaaagccttgcctccagtctgagtcacctcaccctactctctgcttcttccttttagctactctttttttcagtaaccctccctctttcctctgaaggcttgtgcttgcacacacaggcagacatactcatgcacgcgcacaccacacatgcttcctgtcctctggctctcccgtatcctatgtaaaacctcctactgtcatttaagtgaaacccttctagcacataagagttttcatctcagaagctcaattttacctttcacttttcagatagagaacacccaag

SEQ ID NO: 136944 - DNA, 180 bp, Homo sapiens
atgtcgaccaaaaagaaaggtggtctctatgtacagaaaccacaaaatttatctcccaaggaaacttgtttatgatgttaccacgttaacatgacaatttgatatactctgattcaaccgttttttaaaaacctgactacaatttcaaaaactaatgtttgaaaagaggtattcaaccca

SEQ ID NO: 136945 - DNA, 521 bp, Homo sapiens
tgtctcatcctggagaaagtacatccagatacctactggtctagacagctgttatccaaatttagaaaaacacgaagctacgtagcagtaacatcctctatgatggtcaattccttatttcatctccttagaagctactttctcctcctatgcttttctttataatttttaacagatgtgaattgttggagtttcacatactctgttagtgagttttggaaggactttatttgatgcacctctgttaggaaaatgcaggggatgttcaaaccagaaaatgcaggggacattcaaaccaggctccctaaaactgcttatttagtaagccacaaaagaggttccttcatattaatgagcaatcatattattaagtgtagtgcatctcacattttacttacttgaatatgcttgcttaccaaagtattttaatggcatatctcattttttacaagcttctgcttttctcaatatactatttaaaaggaattagacatatagagttttagtttctccagggacag

SEQ ID NO: 136946 - DNA, 280 bp, Homo sapiens
ccgggtactgcactgacccagaggctaacttacatgctataaacggacttactctgaaaatgctagaactggaaaaaaaaagagtactacctattgagctcttatctaataagcactttatgggcatgatatcaggtaacagtagtaccagttggtactactatgtagcctcactttgcagatgatgaaactgaggttcagggagggtaagtgacttgcccttatcacacattaataaggatggaggcagtgtggctctaaagccagtgttgtgaccact

SEQ ID NO: 136947 - DNA, 334 bp, Homo sapiens
ctgccttagagaatgtgtaataaatgcttgctgaagaaacagactgggtatctttcaagttcttcctttttctccgggcactgtcagtgggcacaagagggacataggtgggacactcctgcctcccctggacgctcttcctgacacagccgctgggcatctccgagcacacagaggccccatgcctacacactcctggggccctgcatcactggctttaggcctgggcctaggagctcttgtctttcttggagggtgtgggtgaagctgagctctggcttcaggaacagataagccatcttaattacagaacgagcatatgggacagcctcag

SEQ ID NO: 136948 - DNA, 281 bp, Homo sapiens
gtgaccgcatctcactgctgacccatcctgagcagatggacatccaaaatgcctaaaacttttttctgtgtgctcttgctattaagttctgtctctcctgccccattctatgctgttgcagttgtgtttttaacccaggtgcagaatcttactttatttatacctgtggaattttgctcgagagggtggggcatgcatgcgagtgtatgctggtgtgtttattcatgctttctgctgcaccaaagccaagtcctaggtccccacgcagcgatcctaaggct

SEQ ID NO: 136949 - DNA, 757 bp, Homo sapiens
gaactgggcattctacgccacttcttgcacctgggggttgaacaattggaggtttttaaattattggctataattagagattatttagtacagtagctctcactttagtacacaccagaatcaccttgagaacttgttaaaatacagatttctggggccctcttacagagattctgattgagcaagtctagggtggggtccacaggcttatatttataacaagttcccacatgagactgatgctgctgggaccccacattgaaaatcactgatttataggtggcaattgagtgaggtcagagttattatttcctatacttacctgataagatttacctggagtgattgttaaatataaattgctgagtcccatcttagatgtaatgaatcaaaatctcttgggaagggacctggggcagctgtacaagatacctcaggtgattctttatcatcagtaatgattaggaaacactgatctaggaaattaggtttttcttgctccaatcttatttcctaataagtcttccatctgcttgcccttgttctcactaagcttaatttggggcaaaaaaaacttggcttttcaaatcatacaaagttccaaattacccacgtctctttccactgggatttcacaaaaccagtgagtaaacaagcaaagttttattttcttctttcactgttttcaagtaggcccatttcaacaatggagatgttatgcttgatcttggcctaagaagcacagatctgagggcca

SEQ ID NO: 136950 - DNA, 311 bp, Homo sapiens
ctgacagataatttagatggaattactaatgtccaggtttaagcagtcactcagatttcaggtaggtatatgaaaagtctttaattaaggtttagggccttaccacaaagaatgatactttaaatgacaactctgacctaattgttgcaaaatctaaagtccttccaacattcaggaactaagatttcatttcactcattctgacaacttcatttaacactgtcatcgtagaaaacaccaaaaaaacacttaacccatcatctcagcatatttataggatcttttcttttcctttttttttttttttttga

SEQ ID NO: 136951 - DNA, 146 bp, Homo sapiens
gaacctcaatgaagatggggaagaattacactgagaagatattatatgcagtgaaaatggttgacagtgcttcagaaatttccagaacaattgggtaagagtggtcagcttcgtatttgtcatttttgttatagataattagttca

SEQ ID NO: 136952 - DNA, 624 bp, Homo sapiens
atcacgcaagcaaatgaatagcagaccctcaataacacttactgatgattattgccatgtataagttgggatactcttgagtacctttctaagtctgcatttagggaaatacagaacacaaaatgaaatgtttgattggttgcttagtttccacagtgacttttcaaaatgtataggagcatggtaacaaaactattttaaatactacaatcttaagtatgcctttattattcttacccacaataatgcattgctttaaaaaattgtttatcagtgtcagaccatacctttctgagtctctactatgtaagatgtgaaagttaatattcttcaattccagctacttttcttttcctgccttctgtcaactcctgtattccatatcattacttcttattgctaaatttataatatttatattctggtttgcatctatagttaattctcttgtgcttcatttctcagtgctaattgaaaaagaaaacacatcacttacaatgccatgattgtaataaataaaattcactgtaacacctagcagtatggttgaacatgtagaaaaggaaaaagtgatcctgtgacactaaaatttagcttgttctaaggatgctactttaagcatta

SEQ ID NO: 136953 - DNA, 449 bp, Homo sapiens
agattacaggtgtgagccactgtgctcagccaattgtccccatttaagaaccactaccctggaaaccagcagtaaccagaccctggtgggtgctgagaaaatgttgaattattcagatagttgattcacattgaattgtatacatcaaatgtaagaattatgaattacatttcaataaaacttttttaaaaaaagtattggtttactattagttattattagtggcattattatgaggtggtttccatttgttttcctcagtggccaccagtgcaactgattttgtcatatactgtactcattgatgccaaatatatatatcttatttaatgctgacttcaaacctgggaagttgatttgtttatctcttcttaactttttggaaatgcagacacaaaaagattcagcaaattgcttaaaatcgaggtaactagcaagcatatatcaag

SEQ ID NO: 136954 - DNA, 515 bp, Homo sapiens
ctctccagtttccctctgcaatacagacagatgctaatagataatttcttcgtgattgagaatattttaccaaaatttaaaaaactaaaataatggtaaggaatgcagtttcaaaagagtaactataatactttatttttgtgtatcaccttacagtttgccaagtaaccttggatatattatcttatttgagtctcacaatcattctgcagagtagacaagcccagcatgagctctttttacattaaggaaatgaagatcagagagattaaatcacttactgatgattcccacagccatggggcaccacgaaactaagcctgccattctgcctctcacctgacagagaaagggaggggacaaaattcctgaagtgtatatatacttttgaaatattttgtgcttttataagctgtcttggttcactaaaactttggaatacaaagccagtggtgatttgcagcaatatactaatccactaacccaccccaccagtccttttcctcctcctcctt

SEQ ID NO: 136955 - DNA, 758 bp, Homo sapiens
taccgttccacattccatatgctgttagataatatgctggctagaccgtcaacagttaccccaggaagggggaatttggattggaaagaaatcaaaggaattggaggtaacataatggactgcagttaaacagtaatagggtggtctggacaactggacgaaggccagtttctaaattgcaggcaatcccctctgcccttttagaacaaggcaaggtccactgaatggagaagaaggcaggccatcagccttcttagggtttaattcagacacgggctctgagctttgtcttttgttctctttaaaggaacaaagccattgaatccagccagaaaaacctgtgcgtatccatcataaacatccacaaactcttctttaatctcccttgttattctccctaagaagtaaggctccaacataagttcttggttgcatctgacaagtgtcagctgatgtccatgaccccttcgtttcctgtgtcccttctacttgatgcaatgactggcataacgtatttgttggaatgaatgaatgaatggcattggtggctgggcacagtggctcatgcctctaatcccagcactttgggagtccgaggtggctagatcagttgaggtgaggagtttgagaccagcctggccaacatggtgaaatgctgtctctactaaaatttcaaaaattagctaggcatggtggctaatgcctgtaatcccagctacttgggaggctgaggtcggaggatcacttgaacccaggag

SEQ ID NO: 136956 - DNA, 150 bp, Homo sapiens
ttcagatgggctaggatcactccacctaacaagctgtctctaagatcaccagtgacctctgtgtataacgttctggtgcctgtctctataagcgttctggtgcctgtcttcattgacctttcagcagcctttgacactgtggaccacacc

SEQ ID NO: 136957 - DNA, 395 bp, Homo sapiens
agggtgggtcaggacaggaacaaattgacccaaaagtaagcctcaatgtcattcctacagcaactccctgtgataatttacagtctgcaatcaaaataaaataatctcttcaaaaatctcgttcttttatggttcattctacaaattgattctcattttcatttcatatttcatcgatttaactttctttcgcttcacccaggtaaagaaatcacatgcctcgaatgatagatgcacctaaactctaaatatgttttggtatttgagttacagcaagtacagggaatatctaagttgcccaagttactttcaatgttgttttaactttgtgaaaatatttaatgacaatttttaaaaactgcgcatgaaaaagaacattctccagtttgaagctc

SEQ ID NO: 136958 - DNA, 982 bp, Homo sapiens
gacataaatatgaatagatttaaaaccttgagaatcttctttggtaccttggaaaagcaatttgcaaatccccatttgggataatgtgttagcctcttctctactagggctcccaagacaattctggtctattcagagaaagggaatttatatgagggaaactggatcttatgacagggaagtaaaggtatggccataggaagctgttctaagaaagtcctaaaacagtggttctcaactctcttgcatactagaatcacttaggagattttttaaaatcttgatacccgggcccaactctagacccatcatcagcatctctcagggtggggccaggcatcagattttctttcttttttctttttttttttttttttttttttttatataaacctcccaaggataattccacgggtggggaacccaaaaagcaagagaaaacctctgaaggggtgagtggtacaccgcttataagaggggggttttacaagaagattatattctgggaggccgtggaaatgggatagggagataatttgtgtaagagagaacaagagaagtgttgaaagagataagtgtgagaaaactcaaaacaacttggtgtgcacagaggagaaaaaaaattctcaacaaggggggaacaaacaaggactcactacaaagagggggagaactacacaagaggagacagacaaccataataaaaagagaggagagaacaaaaggaggggataagagagagagagagagggggggagataataaacaaccccacctaaaaatggggcccccaaaggggtgaacaacaagagaccacaagaggcgcgaagacaaaatagtggagcgacaacaccagggaagaaacccaccacaacacgaccacgcgagggaaaaacaacacaaaaataattataaggggacgaaaagaacgacgccacagaaggataggaggaggaaataacagggggcccccgaaaaaaga

SEQ ID NO: 136959 - DNA, 468 bp, Homo sapiens
ggagttgtcacctggtcagtgattgggtttcagagtctggataggaactgggggctcaggaaggaagtggcaaagatgtggaattttcaggtcatcatcaggcctgaacaagacctgatcaccacccagtctcggtcctcaaacagctgcttgtgaaagttaagttctgtaaccaacttcatgcacaggctatgcctagaattggtgttctactaggtcagtcaggaagtgacaggggatttgagaaatgtttttagagcctttgtgctctgaaatgtaccctcctccctaacccaactagcctagcctggatgcttgaaattccataaagaccaagccctggatttgattggagagttgggggaatgtgttgcagcccctctcccaacccagaaagaaggcatgtaatgtgctaacgccgttaggagtgtttatggcatatgggttatgatattgaatttgtccaat

SEQ ID NO: 136960 - DNA, 261 bp, Homo sapiens
catgattcccataatctggccttcatatagaagtacactaagacaattgatgattctggttaggaatgattcattttggtgtacagggaggcacccagtgagtcaaagacttttttttttaacagctccacccttcatgattattctagcgtgtttcttttttctccatcagtctagtgaaaacaccccgttagccaaatctgaaaaagattctaacctagtcaccaactcctggcaaccacctctttctccttcccaata

SEQ ID NO: 136961 - DNA, 333 bp, Homo sapiens
gtatatacactcaatggagctgaaattaccatctcataaagctataagtactcccatgtttattgtaatgttattcataatagccaagatatggagccaacataagcgattatcaacaagcaatttgataaaaaaaacctctctctatatatagataaatagatggatggatggataaatagatagacataataaaatcctattcagccttgaaaaagaagccaattttgccatttgccacaacatagatgggcctagggggcattatgctaagtaaaataagccagaacagaaagaaatacattgcatgatcttacttatatgtggaatctt

SEQ ID NO: 136962 - DNA, 331 bp, Homo sapiens
ttttaaatcactaattaaatttcttttatggtgacaaaattaaaaagattttcaacttcttttcaagtcagttttggtaagatttgcttagttatttttaaaaagtgctttccctattaaagctatcttttcatagctcactaaattgtctaatatttaattctgtgtagttaccatgtaaatcctatcagaaagtatcaaatacccatttgaagccataatccattaaatgaaacatctacaaacgagacagattacaatcataagaatttgcaccaaagcagcagttgcattaccacagttctatcttcaccttcacaatgtttccctt

SEQ ID NO: 136963 - DNA, 341 bp, Homo sapiens
gaggtcaaagctgcagtgtactgtgattacactgaagcaggatatttccctgacccctttgtgggacttgagacaggggtaccttgtttactcagcctgccactctcaactccttgctggaaggaacgcctgagcaaatgagcatgggaactggggtgagtgagtgctggaaccagctggctgctttggcacgggcaggagtgaactctgtgcaggctctgcagcagcatccaggcgggggtgcctgcaactcccaaagccccctgagggcatgttacagtgcgctttgatgtctgccgtccacggttggcttaaatgttaacagctcagtgggccctttg

SEQ ID NO: 136964 - DNA, 381 bp, Homo sapiens
accagttacttatgcatcgattactgtagctttatattaaacgtggaaatcaggtagggcaaatcctccaaatactttttaaaattattttggctattctagctcctttgcctttctgtataaattttagaataattttgtcaacttttatcttccttccctcaaagaaaataaaactgctgggattttattgggattgcatttgaatctacaaatcattggggataattaacattttaacaatattgaatattccaaactatgaatataatgttatctcctcattgttttatttctttaatgtattgtagtttttggcaaatagatcctgcacacatttttgttaggtttatagttaaatatctcatgtttcttggcgct

SEQ ID NO: 136965 - DNA, 416 bp, Homo sapiens
ccagtggaccactgtgagttaatttcttcctgttcaaaaaaatccaaagatctcagtaaaggatagctttgccaacattttacttgattatataaacttttctacaaatgtctatgcatttgtgtcctcatttattccttcattcaacaaatatttattgagctacctattatgtatgagttcctgtattaatctgagaactcagcaattaacaaaacagagccctcatccacatggaaataacattctaataaggaatgacatacaataaataaataagcagacgcctattacaggatttatggcaacttagagataaagtattatagacccaaaaggacccccctagacaccagcgatggggaggaagaatgaaaagttttttctagtaactaaaaaaaaaaccctcagctaaa

SEQ ID NO: 136966 - DNA, 287 bp, Homo sapiens
agttaattacaacatgatagcatcagatcataggtgctttttatattccccttataggttttgtatttttctagtggttatggattactgttacaattttgtaaaaacaacattatgtgtatctaaaggagaaatggtaatctattgtggtgctgtttttgcttgcatttagaaacagataaaacataggagatttgtggctaaattttagaaaggatccagggtctggtctctgacttctgctctctgcctaaaatgataaactttctatatatcttcacctgaat

SEQ ID NO: 136967 - DNA, 451 bp, Homo sapiens
aactcccacagaggagaaaatacttttctaagaccacatgtcctcttaggagcagacagaacatctgagtcctcaaccagcatgatttctgggaatggcatcttgcatccgtctttgtcatcttacaaattgttctaggaaagcatttggagtcctggttccatttttctatattaaaagataaagggatagctttcagaagaaaaacccaatcttccctaagacagcttctctagaggctacttcatgcccccttgaaataatgagtttctatttctgacccatcgtaatgaaattggctttgctaaatcacctgcgggtggcttgaagtgtccacctctgaggctgcacgaaatccaggtgggggagcactctgcagcatggagctgcctagattttggtggagtctctgggtagatgcaaggggcttttctcaggagctgtagcccct

SEQ ID NO: 136968 - DNA, 349 bp, Homo sapiens
ggaggacagcactcacctgtggcctctaattgttcatattcagtatggtctcatactgggaataatctagtgtttgtcttatgatctttctatagaaacaaatatggaatgtgtctataagtaccattagttgatgacacactagtgactttaattctcttacagtaaaaagttttgcaatagcaaggactttggctaggggagtgactctatgtgtggtgaaactgtcctcacccatttttcatttgaggaaaagagataatcttttgattacacccaacacaggtaacatctgtactttgaacagttaagtatagcagctgatgtttaactgcaggtaggggggaga

SEQ ID NO: 136969 - DNA, 614 bp, Homo sapiens
gaaatgtatgcttacatgtgcaagtcttataggaataatatatgtaaggttccttggctatagttttttccagtatacatttacaatattgtctgtctagtgatattaaatgagccaaatttgaacactctcaagtccaagaatgttgaactgtgggaaacaaaggtgtcataagaagaaaatgactatttgtgtgcttgtctattcaccaaatgaaacttcccacatttcaaaataggaaagatttggttttagttcttggcttctaggggatcaatattcttggcctaacccttcacaaccaaagaaagagccctcataatcggccattcattaaagaaaggcaatgtggcattgctgttattaaccagccttcacacctcttgcctgaatctggttgagcttttaacaaagtaaattttcaagccattttcattcatatgtaccaaaatgtaaatttgcttttaatttcctcatatcttgtgtttgaattgatagaggtatatttttattcttgctcagttttgtcctaaagattaaaaaaatcccagcatataggaaatggaatagtctgtgtgagtgaatagtgaaggaaacataaattgaaagagaat

SEQ ID NO: 136970 - DNA, 427 bp, Homo sapiens
tagcatttaacacactgacattgatctcttggttcttcaaacttgtatatcagcagcagtctcgacttgattttgaagcagagcattaaaaatgttatccttgatggtgatatctcataatttccatctattatgctaggatttttgaatcaagtttccaatctttaagcttcattccaaaaatactattaatcttaaagtttttgataagcttaatgttagaaaatgtcttagttatgaagaaacagtgaagtagataataaaatacaaatctaaaagctaaagtaactaatcggttccagcctgacaaatacttaaagaaaccatttgaataagaatgtccacaacacttattattttgttttgaggacttgggtagtcctcatgtcttcaattactttcccaagattatgggaatatttccaag

SEQ ID NO: 136971 - DNA, 769 bp, Homo sapiens
ggaatccctcacatggagtccctgagtgacccagcacttggagcataggaaatgaaagaacaatgactttgcaataatttaaagtgttacatgagcaatgacaacatacttgcggatatttgagctatttctttagaggaaaaaagaacagtttggagaaacctaactcttgtcatatggtttatttaatgatgatactaatttagagtaggttcccgctaatgaaaagctgtagcaaattatactaacgaatccttgctgtaaaattctttcttgtaattctttacgggaacacagggcagttttcaaatgaagatgtgatggacattcgttcttgagtttttaactgcccccaaaagggaactctgaattactgggacacatcgagggggagggatatcgtttatataataatcaggactgctttcattcagagtacagaaagcccaactcaaattagcatcaagagggacttcattgggtcttctaactgaatagtgtgaggatagatctcaagtatggctggattcagaagtcaacccactttcctctgtgccggcttcatttacaaaagattctctccgcatggaggtgtggtcccccagattgagaaccagcaggaaaggaagtactgctttctcctggtggttcccaggaaattctgcaagtcttatttttcagaattggctcaggaacccatccctggaccactccttggggccagggggatgacgtgctccaaaaaagctttggggcttgcgtggcatgc

SEQ ID NO: 136972 - DNA, 202 bp, Homo sapiens
agtccaaagcaatgggtgagggggaaggagggttgtgtggctcagatgccgggggacaacatgtgctatgggactagacagagaaggattcacaaagtaagtgaatctaaagaaattacctggggttataatgtccagttctggccaggatgcccaaataaataatcatcacaagggtacttgatgaatatctccagagctt

SEQ ID NO: 136973 - DNA, 313 bp, Homo sapiens
cttgatccctggctgctgctgctatctcagtcacctgataatgtctcagtctttctctcattctcttccctcttcccctctctctgcccctctagctgcctggcggtcctcaactcagattctcagacctcacagtgagattttggagctaacccactccattagaaacaaacaaaataaattgtttccattccccaaaggaatgtgctaaagcctttttcctctttaacatggatgcaatttaagtttggcaagagctgaacacaatatacctcactaggaggagaaagatttctgagaccctgatagaaag

SEQ ID NO: 136974 - DNA, 505 bp, Homo sapiens
tagtagagacgaggtttcaccacgttggccaggctggtctcgaactcctgacctcaggtgatccacctgcctcggcctcccaaagtgctgaggcgtgagctaccatgcccggcctctagcatcacttctccttggccctttcttcctcctttgatggcctgaccccaccttcagtcagaccagagccattttttgaaagtctactatatcctcacaggcaaaaaaaggaaaggccccaccctcagaaaaatggtaatttgtaagttgcatctcgcctcttgccgactttccatcacctcaggttctcctctgccccaggggccttcatttctgtatcttctctcctcagtccagtgaaatcaactgacctcagttttggtgcaggccctgaccctgtcaccttgagcagatcactgtgcttctctggacttcagtttcgtcctctctgccagatcctctctggctccttcctgctctccgtggtgcctctgtggctgtgctgact

SEQ ID NO: 136975 - DNA, 199 bp, Homo sapiens
caagatactatttccagagagaaagttgtaactttacagtggagaaattttgctgacaggattgtaaccatgtgattaaagttttatcaccagtaaagggacaagttgacaagtgtctcctgatatagagcactgagaagacaccatcacttttgtgttattcctgccaaaaatctaaaacctgaatctaatcatgaga

SEQ ID NO: 136976 - DNA, 366 bp, Homo sapiens
actgaggttctcaaaattagcggttccctgctatctaatgacttaagtagggtccatgttatagtaaaaggaaataacttttaagtcatgtccatgtaatagagttttgactatatatattttaggaaaatctactacaaatactgacttcaaaagagaaaaaataagggatatttactatacaagtaaaggtatcaggatacatttagaatgggatagaaatttttagttttctctccaatgttgaatatagtctcaaataataagtagtagtacttgggaaaaatgtgttatctttcttgcttgaaaaactggtattttccttttattagctattgagatttatatcatccgtcatgtttccct

SEQ ID NO: 136977 - DNA, 205 bp, Homo sapiens
ctcttggtattcccattatacatatgtttcaaccttgactaactgacccagttcttaggtattttgttcctttttcctctttacttttcagtttgagaattttctgttgctatcacttcatactcagatttttcctggctatgtctagtctactaatgagcccaaaggcattgttcatttctgttataattttttggatttctag

SEQ ID NO: 136978 - DNA, 312 bp, Homo sapiens
gctgatctggaggataattctcctcctcctcacatgcccctcggcccaatcacatgtctgttaaaacctaaagcatctcagcagaaaggaaaaaaaagcaaggggtaaaaaaaacagtacggataggcgcagtggctcacacctgtaatcccagcacttggggaggccaaggtgagtggatcacttgaggtcaggggttcatgagaccagcctggccaacatggtgaaaccccatctctactaaaaatacaaaattagctggtcgtgatggcgcatgcctgtaatctcagctactcaggaggaggaggaatg

SEQ ID NO: 136979 - DNA, 1121 bp, Homo sapiens
gggagggtgggggccacagggcagctgatgcaggagcagggctctggcacagttcagccatcaccaattctgggactgcaaattcagtttcttcatctggaaaattgaactggtaataccaatacctcttttcccggtttactagacagagacaatgcagtgaggcacaaacatgcaactgtttgattttcctcccacccatgctccctgctcagtgacgtgtgattttcctttcccatccataaactgcgcatttggcaaactccaaacttttgagtcacttttgggtaacaaagtcaggtttaagatttccatcgcctgcttaattgaatgctcacctgtcctcttcccccatgctgtgaggaccttcatcactcctcttctgggtccctctctcctctaggtgttggggcagggtggggaggaaagggaccaatgtgtctttcctggtgatgctacagccctctcttgctgaccttgcttcctgggccatcagtgccccctgcacagaactctccaaacatcagtccacacctttgtaaaaacagtctctccgctaagctatcccaaaatgacctgattagagtgtgcaacgtctttcctgctgggactctgactgataccctggtctccctgagtgattttcctgcacaccctgctggggatgtggaagcctgtccccctcccaccccacaccccacacttggctgagatctcacagtggcaaagatgtctttgaatccatggtgcccagggttcagcgtgtagagtgaggtggggtgtgtagagagctggggcaaggaaccctgagaagatgtcttaccccagttgtttccaggtttctttagaaagcgggctattttaccccatgtgtcctcagatttatgtcctggaaccaaattccaaatcagcagccacatgaaaagtcccctcctctctggcgtggaattaaactgttagacctgcctttgtgaccaaagcaattgtaaaatgtgggggaggaaattaaaagcctgccaccttagtccacacagtgtgtgctgtctctgtgtgtgtgcacgtgtgtttatgtgtgtgttgaatgatcacatgttccagggaggatggtgaggggcgagggg

SEQ ID NO: 136980 - DNA, 928 bp, Homo sapiens
cgcccccgggcaaactcctctgctttcactgagtggactcttctcttcagttgctatttggtaaattgcccttcatgtttccctttatgttcggctcctaggaagctcaggccacagggaaaagtcaaggcttgatagaattaatctttgtcttaatgatgactaactgttgagagatcataggtttaagactcgactctggtagaaagatagctatagccaatttccttgtcaaaatgcttctactccaaatttttatgcagtgtctaaggagctcatgcctagatctatctggcaatctatattatccctcctagtctcagttcacatagtagactgctggaatgactgagggtgatgtttggcctgtaaacaaaaagtgttaaagaaggccaggtacagtggctcatgcctataatcccacctacttgggaagctgaggcaggagaactgcttgaacctgggaggcagaggttgcagtgagctgagatcatgccactgcattccagcctgggtgacagagcaagactcagtttcaaaaaaacaggagagagagagagagaaatgtatctatctctctgaaatttgtttataaatatagggttaccatgcaatactggcatatatctagactaaaaaaattacttgtttatctgaaattcaaatttaactggtatcttgtatttttttctggcaaacctgttaataaactcccatggaccccagttacagatcctctcctataaatagtttcttttttgtttttagaattagataattccaaattaaaattaggcaattcttcatctgacctgtgaataaatatgttcatgttataagttgcagaagtagatcagacacaaataaaaaacaaaattagtgaataaatgctgttagcaattgattggaaaaaattgtatcaaccact

SEQ ID NO: 136981 - DNA, 552 bp, Homo sapiens
tgaggaagaaggggacggctggccacaggaggtctggactgagatgtcgtaggaggggacagaagaaaattgtaggtggaagaagagttcaagggatcagagggcagaatgaggatacttgatggagaaagtaaagggatctgggtgtgagacagaaaggaaaagaggaagcaacatcatagtaaagggaggttgagcagagaagacagaggagatggaaaagagaggaaatggaaagtagtggggcgcaagacttgctatagtaactgattaccattttctcttcacttcctttggatcaagtgcaggagaaagcaaaatgtgactaatgatggaataatgtctatagagcgttaatttgttctgtgagtgttaatggatgttaagggaattggtgacttttggaaatgatgtggtcaggaaaatatggttcacctctttactaccatctcctgagaagcaagacttctcagtattttaaatccttcggtttgaatgtttaacagcttctcagccaaggaaatgaacttacattctacctgcctccctgta

SEQ ID NO: 136982 - DNA, 188 bp, Homo sapiens
aaattattggatacaggtaacaatcagaattgttgtcccagacctgtcataaagaggttttaatatggtaggggcacagcaagatgtatgccgaagtcaaagcttaagtccacatatagcagaaaagttgagtctgagattgagtatataagcacctaatcaaaataggctggaagagaataatgagg

SEQ ID NO: 136983 - DNA, 204 bp, Homo sapiens
tctatcacccccttggccctgggtatagtctggatgagcagaggcacgcgtgtggccccaagagtcccaccctctggctctctcctcccaagacattctggagccatgacatgtctcccaggaagggagaattatttttgtctgtggcataaataaagccaggaatgagttccaataatcacaagcacatgccagcatgtggag

SEQ ID NO: 136984 - DNA, 342 bp, Homo sapiens
aggttagcgtttggagagggcaagtgagacagaaacaggattatttgtgttcaggtaagaacatgttatcataggatgttcatgcacacaggacaaatagaaatgtcgataccctattttatttattatattgttttcatatgatataatattgccttgtctaaaggcagtatcttacctgatggtaaaaccagtctagacttgtttagtctttgtgttaaagggacagtaagcttacagatgctttagtcataggccagtacagctcaccagggttgtaggccagaactacacaattctataggattaaacatctatttgagagttgcaggtagtcagtgc

SEQ ID NO: 136985 - DNA, 215 bp, Homo sapiens
gtttcttatagattctgagtattagattttgtcaggtttataggttgtgaatatttttgccattctgccagctttggggttagtttgtttttgtttttctagtttctctaagtgtgatgttaaattgttagtttgagatcattctaacttcttgatgcaggtatttagcactctcaactttcctcttaacagagcttttcctacaacccagacat

SEQ ID NO: 136986 - DNA, 151 bp, Homo sapiens
tgtttttaatgctgtgtaaagttagcaattagagtaagagaaacgtatgggataatgattgagtaaaatctcagctccttttgagtcaattttgtagaaaaagatattctggggtttagtaacagagaatttttctttccttactgcgatt

SEQ ID NO: 136987 - DNA, 381 bp, Homo sapiens
agtagatgcagagatcctgcttaccacatggaatcagggaaaggttatttactgtcgggacatagaagactcactgggtagccactatttacttttcacagacagaacatcaactcaagtccatacactcataaaatgaagtactcttaagtttcttttctcttttttttttttgaaacagggtcttgctctgtcacccaggctggaaggcagtggcacgatctaggcttatagcaacattcgcctcccaggctcaagggacactccacctcagccctggaggagctgggaccacagacatgtaccaccacgtccagctaatttttgtgttcttttttttttctagagatgggatctcgctatgttgcccaggctagtctt

SEQ ID NO: 136988 - DNA, 411 bp, Homo sapiens
tcccactggccacgcaaacccactttaccctctccttcctctgaacttttatagacctttttgacaatatttgacggttctatattgcttatctttttatgtactgatctcctcatctgtattgtgagctctcgtatacagactatgtactcttaagtcttcagagaccagccttgaacctcaaatgttttaatatatcctggaggatatattttaaagacctgcaacaacattagttttgtatttttattacaaattttccattcctgatttatttgtccttctcttcttccttcctcatggataagtaaaacaaagaacatctgtgcataatagtaattacctgtccttcctgtcactacattagatagcataattggtaaagaagggagaggagctacgaaataaaat

SEQ ID NO: 136989 - DNA, 420 bp, Homo sapiens
ttacctggatgtaagcaaatgtcaaaactcactgaactgaatacccgtatattttattgtgtattagttacagttcaatttaaaaagtacataaagaagagtctcctctccttttagcctcaaataatgtgttctgacacagaggggagaaccatcctgagcattttttaaatccccaccatttgtcagatctttgatgcaattccctgtcttaccaccaggatcaagctactatgggtaaaaccactcatttcttactgttttgattttcttcctaccaagcaacaaatacctagaatggagctggggccctaacttaggctgttatcactgcagaggctttaagtaaaggatgtccccgatttccatatccagaggtaaacaggctttgaataaaacatgttagagaaaaatctaaag

SEQ ID NO: 136990 - DNA, 106 bp, Homo sapiens
agcgggaaacatcactctaaagacatcactgggcgcgaacactggagggcaggagtgtgatgaggtacacacagtcccagagtctaaagtgtctctcagaaaccat

SEQ ID NO: 136991 - DNA, 145 bp, Homo sapiens
tcccagcctcagtgacagagcaagaccctgtctctaaaaatacattaattaattaattaaacagaaatgtacattgtttataggggacatatataaaacataaggacacaaaaaggtgaaatttaaaaagatggaaaagcatgat

SEQ ID NO: 136992 - DNA, 410 bp, Homo sapiens
cttgtagaataaggccctcagttattatactgtcttctctgcagtctcttaaaacagttttcagacacaaaaggtttaaaccatcttcaaaaataacaaaagcattattgatcccttcaggtaacaaagtgctgagaataacgaatatacttttaaaaatacctttgagctaccaaaattatcactgtcttaaagccacataatgcaagcctttaccctgaacttaaggtacacaagtctagaaagtagttttgcaactcaatgcatattaaaagctgggggaggagggtgtagctcacagtgcctaaacaccaagacgcccaccaatcagagcaaggagagaacacatgcactgcacaaagcaattaagttctataaaaagcaggccatttaggagtatccaatagcca

SEQ ID NO: 136993 - DNA, 106 bp, Homo sapiens
accataaaggtctacactgtgctggtgtgaacccaaacagaggggagccaaggtgggaagcagggacatatagacgtggtcccctccctcacagagctcagggttt

SEQ ID NO: 136994 - DNA, 402 bp, Homo sapiens
agtccttctgtccatgagccactgaattatatataaagcaagtttactacttccaaggtgcaatgattgtacaggcgttgggtaagcattcccagacaaaaggaaaaaatttgccagaaacaagcacaaaacacagacgggacttacagaccccatgcaagtcaaaaacccagcaggccagtcattgaatcctacaggtcccaaatcatcttttctgaatctgtatcccacatctggagcacaggagtggatggctgggctcccaaggccttgggcagctcagcatctgtggctgtgctgggtctatcccccacaggtgccctcatgggctgggctggtgttgggtgcctgtggcttttccacactgagggtgccagcagttggtgggtccatgaatctggg

SEQ ID NO: 136995 - DNA, 464 bp, Homo sapiens
tctaacttataacaaagagaatctgaaatttaagctggtatttgccatgctctgagtactcagcagcatgccattttgtgaaattattgctgagaaaatgtacccaaatcttgagtacagagtgttcctgcatctgattggaaggggcacatgaattgtttctaaggtattgcagacccaaggctgcacaaattaaggtggagacttgggggagggatccagtcagggaagggaagcttcctagacattacagctctgtccagaggccaaatgggagataaatcaccactggccacctctcttattattgaaatggtacagccctggggtttaactgaaggactgacagggttttgaagtgcaaatagaatggtgaagagtaaacccttttagggtttcattttgatggatttttttttcctgtgtggatttctggtacagactgtgatctggaaggggccctt

SEQ ID NO: 136996 - DNA, 295 bp, Homo sapiens
tatcactccatttctccttaggaaaggagtctctgaaggaagtagaaggataaaaagcaaaagaaatgaacgggaataaaagtgacagtgataaagtaggaacttgatgggataaaaatgaatatagggtcatgaaagagaatgacatttgaaaaggagaagcacaaagttaagagtctttagtatcattttaataataattcataatggttaaacaaagacctgtgtgccaggcactgttctcaaacacctcatgtgtattatttcatttaaatttcatgacagtgtatgaaga

SEQ ID NO: 136997 - DNA, 234 bp, Homo sapiens
cctgactttttctatagcatttaggagtattacaggactcactaataatatcaaaaatgaatatagggtcatgaaagagaatgacatttgaaaaggagaagcacaaagttaagagtctttagtatcattttaataataattcataatggttaaacaaagacctgtgtgccaggcactgttctcaaacacctcatgtgtattatttcatttaaatttcatgacagtgtatgaaga

SEQ ID NO: 136998 - DNA, 186 bp, Homo sapiens
taggagtaaggcacaatgctgaatactagtaaaacacactactcttgttggaaagcaaagcttaaaatgtgcccaagagtaaatgcagtacttagcacatccaaagtctaactatattaatacaaactaaatgtgatttgactagaagccagcaaactccttaagtctggggtcttagcacaattg

SEQ ID NO: 136999 - DNA, 459 bp, Homo sapiens
attcagagggtggtacagagaccccaggtaagaaggcagaaactcagagaagggaggagacagaggagacccagggggacagagattcagaaagagagaaggatagagacccaggaaacacacacccagagggaggaataaagaccaaatatggggacagagacccagagaaaagggaggacagaaagccagcaggagaggagggtgagatgtagcgtgtgtgtatgagagtggacacaggaggggacagagatggggggtaggggggttggacaaaggcccaaaagtgtagacagagatgcagaaggagacacagagaaaaggaagaaacacagagagccccatcgtatgcagatggaggggaggcatgagacagaaaccagagagactgtcagggagatgcagagagagcagctagacgcagaaggtgctgacatgggctgaaaatctgctatgggc

SEQ ID NO: 137000 - DNA, 120 bp, Homo sapiens
cagaagtgtcatatagctattctctccggtattcaattaagaaaaataaccttgactagcacattatatgcatcttattgtagttgattcagtagacatgtattgaatacttaccacaca

SEQ ID NO: 137001 - DNA, 377 bp, Homo sapiens
gtgcttttgtttctatgtgtaaggaagttatagggaaaccacagatcactggtttctaggcatgtaccactagggtggtatgaagggttgattacagagaaacaggacaagggtatttaggagtgacagaagtatgacggtgggtggatacatgatttgtgtccttataagtcaaagtttcttttgttttttctcctgtttttcattcacctggtttttattgagtgctttcattacctagtttttattgagtgctagacatcacaaagaaaagttataaggtttcagtccttggataacattatacaaaatccaataaagatttaagtttgctatggcaagcagtcttgaatcaccataatccaaatttttgaaat

SEQ ID NO: 137002 - DNA, 213 bp, Homo sapiens
ggtatcatgcgattacgtagtttatttggtgtcacctggaggttttttacaacccagtgtcttttatctttagggtttaactttttaccaagtactcacagacagagaaaaaccccaagaacctaaaatttaaaacagaaaacaaggatatgagtgacatacataaataaaagccttgacatacacacaaactgcacaatactgccgttttaa

SEQ ID NO: 137003 - DNA, 249 bp, Homo sapiens
ctttagagttccttggatttggctttttccttcaggaaaggacttcaaagcctagcagatttggtgctagttctgaagatagtaaaatctttgttccagagagcaaatattttctcaataatttcttactgcaatggattacgggtatatactattgttccaattgtgtggatgacaaaataggacaacgttgttgaggaaattctgtgatggatcaagttctgacccctcagccagttctataccagc

SEQ ID NO: 137004 - DNA, 471 bp, Homo sapiens
gtgtagctgttctagaggatccctcataggttcgcagatgggggatggggtgggaggcaggtgagatgagagctccagagttcagcctggggcacggtcattgggttcaagatgccttcagatgttggggcttgacagtgacagtggctgcagatacccaggacccagcagagggcctggcacagcggggcccagggacacgtctgtgagtcaggctggcactcaagtgtgaatctggacaaagaaggtggcattgttggcattgaatgctcaggggctgggtgaagtcagctagggagaggggctctcaaggcaccaggactgactccgtgggtgagggcggaggaggagacggcagaggctgagagaatagccagagacaggaggaaggtcagcagagccatgcacagaagcctggagaagatttgaggaaaggaagggctgggtggtcgtcattccctgcagctagga

SEQ ID NO: 137005 - DNA, 268 bp, Homo sapiens
aacccctacccttccaagagatggccctaattcattaattgtcctgaaattctgttgtagtgagtattacctggggaaaatgtgttatttaatgggatttgaagttgtttgatacagcgttttctttccttctttttttcaaacagagtcttgctctgttgcccaggctggagtgcagtggtgcaatctcggctcactgtaacctccacctcctgggttcaagtgattctcctgcctcagcctacagagtaactgggattacacacgt

SEQ ID NO: 137006 - DNA, 504 bp, Homo sapiens
gggcttgggggtgcttgggttgacggtggcttggggttgggaaggaccatgccacaccatctggggcatcatttcatggggcagaatgaggcatgcttttcttctccccaccctgcccctcaactggtgcccacctagataggataatgcagcagcacgaaacttagggtttctgtgggatctaccactcctttaacattgtggctgatagtgccaggaaaggtctctcaccctgattcccttccttaactgcagggctttgtaaagcaagggaacaaggcacaggtatttgctttctgagttgctagtccctttcttccaagaaggtggtctttgtttagcatgggctcacctctccgtgccaacttctcgatctttgtcctttagccagctcctctcagccttatacttatcccacctctttcagaggcaggtgctaaggttccttgccctctcctacagaccaacaagcatcttcaggtaggcaagccacggtcaacccac

SEQ ID NO: 137007 - DNA, 444 bp, Homo sapiens
ctagatgagtgtacactggggcactatgatgacgctagctcagtgcacactgggacactatgatgaggccgggtgagtgcacactgggacactatgatgaggccaggtgagcgcacactgggacactatgatgaggctaggtgaggggacactagggcactatgttgaggctaggtgagcgcacactgggacactatgatgaggccggttgagtgcacactggggcactatgctgaggctaggtgagtgctcactggggcactatgatgaggccaggtgattgcacactgggacactatgatgaggccgtatgcgtgcacactggaacactatgatgaggctaggtgagcgcacactggaacactatgatgaggctaggtgagcgcacactgggacactatgatgaggctaggtgaacacacactgggacactataatgaggct

SEQ ID NO: 137008 - DNA, 367 bp, Homo sapiens
gccggttgagtgcacactggggcactatgctgaggctaggtgagtgctcactggggcactatgatgaggccaggtgattgcacactgggacactatgatgaggccgtatgcgtgcacactggaacactatgatgaggctaggtgagcgcacactggaacactatgatgaggctaggtgagcgcacactgggacactatgatgaggctaggtgaacacacactgggacactcatcatagtgccctagtgtgcgctcacctagcctcatcatagtgtcccagtgtgcactcgtccggcctcatcatattgtcccagtgtgcgctcaccttgcctcatcttagtgtcccagtgtgcacacattctggcgc

SEQ ID NO: 137009 - DNA, 363 bp, Homo sapiens
ctactagacaaagacttcaatatgagtgtcttacagaggctcaaagaactgaaaggaaaaatagagaaaaacaagaaaatgatgtatggacaaaatggaaatagcaataaagagatagaaaaaataaaaaggaaccaaaagaaattctggagctaaaaagaataattgaaaagaaaaatttactagagggattcgaaagcagaattgaaaggcagaagaaggaatctgagaacttaaagataagacaattaaaacaatatcaagctgaggagcagaaagaataaggagatttaaagggttacagcctattttcctctcttttatttttcccccttttcccttttgggagccagacattcaaaa

SEQ ID NO: 137010 - DNA, 164 bp, Homo sapiens
cgcccactgtatctgtacttgcaaaaaaccattctgagagagggcaagaaaagaaccaggatgttctttctccttcagggccagtgggccccagtgagatgtttaggctgctctagatccttatcagaactctgattattaatttctagtccccttgaaagtta

SEQ ID NO: 137011 - DNA, 498 bp, Homo sapiens
tgtgtgaaaatcccctgcttccatagctaattcccaaatatctgcactaaagtgaagagaaagtagagcgccacaaaattgtttccatttgaattagatatgtagtttggttcttacttttgaatttcaatgtctgtgaaacttttcataatttgaaatgtgcagattcagtccgtgagaggatcattcactgactacccaaaagagttacagtgacacaaccagaccaaaaagcccatattttgccccacatccagataaagtcagttttatttactgttatttatttattctatttaagttatactttatttatccaagtataactttttaagaatagcaaaacttagcagcagccaactgctatctttactattttattttatttttactatttttaaagctttttttaaaaaaagtctacaaaataaatgcttagggcacaatgtcaaacctttgtcagcaattcttaaccattctgatgttggagcggccgca

SEQ ID NO: 137012 - DNA, 399 bp, Homo sapiens
aaatatattttttccacagaatgaggataataagtattgaacttaaaaagtgtgatctagtttatttgttgtggtagacaactcctaaaattcaaagaaatataaaaacacttatcttttccagacaacagccttcaaatgttctcaagcattaaacctgaaagttggaacaaggggtgccgctctggcagacccaacgtgccttacatgacaggggtgcctgacagagatgtgtgtgcgcatgtggctcagtgggaggacagggactctgaaatgacagataatcagattaccgaaacacaacaacttggaaacgatgaggaagaaagcttcactgagaaagcgaaaataaagaagaataatattaagttcaacaaagaggctaggcgtggtggccca

SEQ ID NO: 137013 - DNA, 231 bp, Homo sapiens
ctcacatcaccattcctggtgacttgagcctggagcttcctcatggttcttttaggcatatgggcctccttttctgctgcagccccctctgttcattctaggctcctttttcctctgctctatttataagcatactttgatcaggtttctgttactcagttttttgttgaaatccattaactgccagtgggcccctatttgttgtagatttatactttttaaactttttta

SEQ ID NO: 137014 - DNA, 308 bp, Homo sapiens
ctggtgcatttatatcccggctctggactcggtgcctctctccacctacccctcggcacacccctcccgtcctcttccctccaacgaccttaaaagacatccaccgacataagactcactcttgtcacttgtccaagttgattttgatcagtgtcccgttttgtacccaggagcaaatcccatccaggtcgggctgcgtggtagcgtttaactccttggaatcttgatctggagtccgaaggtccctttgtcctgccgcctgccgcctgcaggatgaagcctctgagacccctaggcagccagctcta

SEQ ID NO: 137015 - DNA, 239 bp, Homo sapiens
ttcctgtgtttatgggcaacttccagaactcattgccctgttttaaaatattgcaatatcttgtttacagacctgttgtctcattctttacccgcagctgagtaaaaattaactacaaatttaaacatactcttttcattaaccctgaaagcctgaattttataggtcttaattatgttgtattgatgacagttgtccaaaaatgagtttttctctccgcttccacatatacttatcag

SEQ ID NO: 137016 - DNA, 541 bp, Homo sapiens
tgctgggattacaggcatgagccaccgcacccggcctcaaacagagaattgtaaaagacaaggagctaataagaatttttcctcttatgcttcccttattatcacctctgcattcttctctcatcccacagtttttcctcagtaattcatcaaatttcaggatatgtatacctgcatatttctgctcctcaggacagtattccagttgaaagacagttttcaggattttgaaaatcttttccttgaaaaattgtcccttaaaccttgagcatacctgctggcttggtggtgacaaggatgttgctatggcaactggaagactgattctacacgtccatcaccagctttcatgtcacccacacttgaatgaaaattttaactcattacagtaagtgaaagtgtacaaaacaatgactgtcaaatccacccactcagctaaaggaaaacttcagggtgtagggggaacactcatttcagaaaggattttgactaatctcttgtttctaatttaaatattctcatttattgtgccatgccagca

SEQ ID NO: 137017 - DNA, 336 bp, Homo sapiens
ccaggagtttgagaccagcctgggcaacacagtgagaccatgtgtctacaaaagataaaaacattaaccaggcatggtggcatgtgcctgtggtcccagctactcaggagtccgaggtgggaggattacttgaacccaggaggttgaggctgcagtgagctgtgactgtaccactgtactctagcctggacaacagagtgaaactctatgtcaaaaacaaaaacaaacaaacaaaaaaagcttctcattcctcccatgtcaagtattcccactggcttctctttaatttatcccctgaatgacataaaaaatttactaccaaatcttgttcctacc

SEQ ID NO: 137018 - DNA, 272 bp, Homo sapiens
agtacagacggggtttcaccatgttggccaggctggtctcgaaccccacctcggcctcccagagtgctgggattataggcatgaaccactgcgcccagccaaaacatgcagatttttaaatgagtttttgacacatgtatgtaatatcccttgggcaacccaatcaatatgtaacattttgtcactccagaaagttccctcatgtcctcttcagtcatttccccaactctcctcccaaaaagcctttacattttaaatttatcataggattt

SEQ ID NO: 137019 - DNA, 534 bp, Homo sapiens
ctctgttctttgcctgtgccagaacccatttcagtggcaccaggctgtcaactggatgggctagacgggtccttttggaattcctcctttccgtcagttagcatttgatactaatgctattagtattatttggatattatttaggctttcaagatacataccctttggatgctggaagatattccaaatagtttttccaaataacattccaaataattattccaattagtattttccagcttccaaagggtattttgaaagacttaaatcaattattcttaacctttttagggtcatggacacttttaagactccgatggaagttatggacactcttcccgctgcctcctaaaagtttgtatacacacaaaactagacggtgtcagaaatttcacaaactgtccccccacctaaattcagactatagtttccaaattaaaaaccctagtactggccaggcgtggtggctcacacctgtaatctcagcattttgggaggtgaggcaggtggatcacttgaagtcaggagttcgag

SEQ ID NO: 137020 - DNA, 508 bp, Homo sapiens
catgccatgttccacagccctgaacccctaaccccagctattcaacccccgactctggcttcggggagctcactctgtctagtggagccaggacacaaaccaggagtgagactagaagggtctcccctccaagaaatgctggggtaggggacacatgagaggctaggcccaacactgccccagtgccttggacagcaccagtcaccccagaccttgtgggcctggccttcagatccccctcggcagcctgcggagccagcaggccctgacctgtccagcaagatacttcaggaacttaaccgaagtccaaagtgcttctacctcccgggcgtagggcaggagtggcagaaaggaataagagcatactacaggggtgaggctcacaccgaggaggtctagcaaaccagactacctttcctgccccttccctcagacaggacccactgggccgcaggcctgcacccaaccaaaagttcatcatagggtggggtcggggaagacattacca

SEQ ID NO: 137021 - DNA, 543 bp, Homo sapiens
ggcttttcctgtccccactctgtggggagcaatccccaagccttactcctaatgcttccccctagttatattaccttcagcaaaccctagaccaggacttccagggacttggattgcgcaagtagctcctccctcatcacatcatacttcttttctccaccttgatttcctcacctgtctaatgaacgacactcactgggtctcggacactgcacaatgctcaagcagaaatctatgggaatacctctcacagccgcatctctagtcagcattattcccaacaagccagcagcctgcaggacattaactgttggctgtaccacctttaactctactcgtcaagtctaagtagtaattaattcactgctgaatcagatcaacctccttttctattcccattaatggcactgtattttggggtgttaccaagttatctattacggcacattttctatcatatgttttccatgtcacagcactgtcaatttgcctcccatcttgctctcacattaacttcttcccttgggttctcatttccacagc

SEQ ID NO: 137022 - DNA, 308 bp, Homo sapiens
gctgggattacaggcgtgagccaccgcgcccggcctgatgtaagctatatcttaataaagctgattttaatagcagataaaccaaagcaaaaaaaaacctgaatcatttaaagaggtaaaaaattggcaaaggtataataggaacatgaatgaacaaatgtatttgggacgtttcaaaattcaaacataatttgatccatgaaactgctgaattccacaaaggagacttttttaaaaaaaatagtacagtacaactagaagttaacaaaagtttataatttacaaactacttgggaatttatcccata

SEQ ID NO: 137023 - DNA, 266 bp, Homo sapiens
acttcgcgtcaaagtaacataatgaattggtgctaaaatctttaagttacaggtgtgttcaaaagaattgttgaatgaaggttaataaatgtggaagaatagccgtcctctctatatctcttggctgataataaagatcaaacaaggataatgtatacaaaagtgcaggttccattaaaaaaaattagtcacactttgtaccttcctgttaatagggacagaaatataggattaaacctagcatcattttgggttactttgacgct

SEQ ID NO: 137024 - DNA, 414 bp, Homo sapiens
cctggaagcttgtcttgaatttcaagcaccctctctcaaattaaattacatgtttatttagtgtgcctgggaggctgaaggagagcaccatggacctgagtcccaccctcagccacttctttgcacctatattcataagagagatgagtgtcaaagtgtcactaactagctttatggccttagggaagtcatttaacttctctgggcctcaattttctcatctgaaaactgagatgactgaactaagtaaactaattccttccaactccaatatcccatgagtgcctgtgaaccataggcttggtaacattcactgagaattgaatgctggctcacctggctgtgttcatcatctctgcctggtttgtgagtaaaataaatattcagtgactcggccagaaactctaaaatgca

SEQ ID NO: 137025 - DNA, 443 bp, Homo sapiens
ttttatgatggtccccagagttttatttaaagattttcaatagagacttaagatttgttgtcaaagccaaaaccataaccagcctcccctgcatcttgcatttggctgccatttcagtttgggtaccaaccattccatacggaaagaccataatggccacgcagagtgagtggagagggttggattgcaatctggacaccttgattccatgttcagctgtctggcccttgcccctgagacctgggtgtgtctctgtgaatccaggaaggagaggcagacaggccctgtggagccttttttgacttggcattgcaaagtccacatggtgaccttcctgtcagcctgttgctgggctgactgtcatgcttatccaaagactcctacccaaaggccactgtactttgcaagacgaccaccggaaacaatattgggacgagaactga

SEQ ID NO: 137026 - DNA, 300 bp, Homo sapiens
agataattccagaggcttctcttactatgtcagcggctgctaggaaaggatgcagagtgctggtgaagaacccttgtcctccataaatgccagttttaaaggacgcatcttattcatctttgtgatcaaccgggatttccattactcatctttccttccaagataactgacatttttgaagggcaccctttttgttaaactttatttccttctactaaagaagtctttttaatcttctggaattaaggagttcatttccacccacaaagttctttttgttaacttcctcagtctgattat

SEQ ID NO: 137027 - DNA, 121 bp, Homo sapiens
ttcttccaggggctttttacaatctgcttgacaggtaagaggtcgatagtacgaattcaaccactattagcaaattaatacaagcaacaacagtttatctagaaataagagtactcaaatg

SEQ ID NO: 137028 - DNA, 536 bp, Homo sapiens
agttcgacggagactctcatcattcacatcatcattgcagctgttttcctagtggctctccatggaggttctccaggctggcagcaacagaagcatctttagatttacaaacaaaatctaaatcctcctttggaaggagggcatgaagtaccatgctgtattaggaatcgggcaacctgtgagccatggagccctggaaaggtttggatctggtagctcagtctcctcacctccaaaagagaatttttttttcttttttttttttttttttttttttttttttggaaaaggtccccttttttaacccaggtgtggtgtgtcgggggcacaattccgggtccctgggaaccccgcgcccccaaatttgaacgagatcctcgtgtttcagctccccaagaagcgggtgtatcacggggcggtgtgccccgccccccggttttttttggttttttgagaagaggggggtgttgcccctgtttgcgccgggcgtgtgtctcgaactccgggcctcgatgtgtccggcccccttgtggctt

SEQ ID NO: 137029 - DNA, 397 bp, Homo sapiens
aagaaatgcaccttacatatagaaagacatatttacgttgagagtgaaatgacagaaaaaagatatactgtgcaaattatgagagagctaaaggggcaacattaatatcaaagttgacaccaagagaagtactattactaggaataaggaaaaaaaactgtaatgataaaaatgtcaattcttcaagaaaacataaaaaaatctaaaatgtctaggcacctaataacagagcttcaaaatatataaaggaaaaacatctgaaaaagaaaaacagaaatccaaaattataattggagacttcaataggcctcctctcagcaatagaacaagtagacataaaattaataaggatataaaaaacatgaacactatcaaccaaaataaccaaattgacatt

SEQ ID NO: 137030 - DNA, 578 bp, Homo sapiens
gaacaggttattttaaaaaagatttattttgaaaggggatgatcagttgatttagtatgaaatggagagctgagctagcagagatatactgataacttctggtcagtacaagatgcctctctccttgagtgatgaccaacctttgctgcttagcctgccccacgacccatctgttaggttctctggattctcactgcaatcaggagcctcatccaggagctttcttttttttttttccccaaggacctttgatgtttgattcttatgctattatagttctcaatattaataattcagagtcaattgtttttaataacctaactataaataattagtgaagagaattaaaggaatggatatactcattgatattttcataatccttatcctgccctgtggcattgtctgttactgataaaacttgatattgttaaaattttatatgatgaaattcaaatcagaggggagcaaaaggattacaactgctttgaaaaataaaatgaagagcacaaaaaggaattactagggcctttctaaaccaaaaagaaaaattaacgaataaaagatttggaaaaaaa

SEQ ID NO: 137031 - DNA, 346 bp, Homo sapiens
tgtgtaaattgcctcaatccccttcctttgtcttgagaggccagagagtttggctaaaggtgggataatcttcaatgactcttctggtactgagtcacctgtgctttttcaggactaactgatagacaagaagaccacaagtaaaattacactagagactggggacaaagaggtatgaaacatgaccggtgatctcaaggaactaacaagctatttactgcttaaaattttttaaagtccaacactgatgaattctctgtccggagaacttcaatgactccatgttggctgtaggtagaatgaatgatcatttcatttattatccaaatcaaaatgttttgatagt

SEQ ID NO: 137032 - DNA, 353 bp, Homo sapiens
ttagggattagtactgttactattcctactttacaggtgaggaaactgagccttagggagggaaataacttgtccacttttgcacagctagctaaatggtggagttgggatttgaacgaagcagtctgattccaaatcctgagttgttagaggtctatcttgatctctgttttctcccttaataacttaagataaagaaaatcaaagtgcccctgggctaaccaggcagggacttagttatctcaaagaacggggaaaaacatgaaaccactatcccttccagagagtaactatttaataaagaaaacattattaatacccccaggggagtaattaaaaagtactcatgaaac

SEQ ID NO: 137033 - DNA, 304 bp, Homo sapiens
cttgaaatgtagtgatactaaagatctaaccatcagcacagtgagaacttcttgttcttgatcatgataatcaaaaccaaccttgccaaggcttcttaaagtaaaaagggctggataaaatgccattgtctgattcttttgttttatagggtaatatgcaaaatcttcagcttttcctaagcagtatataaatgtcctcaaaattctaccctttagcataatggaatattttgatgcttttatagtgttttgttttgtttgttcatttttgttttttgcattcagtactatttacaacttttac

SEQ ID NO: 137034 - DNA, 171 bp, Homo sapiens
gtcagttagagcaagcagaaaaagccctgagcacggaacacaaaaagccgagagaatttccctgcaggccactgcagtcaatttggtgggtggaactgtagcacccagaggcccccaaatcaatcctcttcaggatgcttagctcagcagaatggtcagtggggaagactc

SEQ ID NO: 137035 - DNA, 574 bp, Homo sapiens
caagaagcccttgatggaggtgaagagaccaatctgcagagcagcaacaggttatcaggaaggggagtcttgtcttgagaagggaggttgtttcacaggaccgcagagagcttttctagagatcatcttcaccatgattcccagtggggagattcctaaaaataggcaattaccacatcttgtatgtgataattatattacgataaaacagctcatagtatgacagctactgcctgtgagtaagaaatcgtgttgcctctgagatcacagcttcaagaaggggttgacctgtgtcaaaatcccctgacaggctttatttgtcaagtcagttctcacagcactcagccttgcccccagctctgagacaatggggctctgtgtaggagcagaggccaaaatctggaaggacactggcacgcctcttctacccccacgaggtgtttattattttgcttgcaaacaggctgggtccagtgttttactttcttcccccttcttccctttgctaattttatctcaatttcaaattagtatttttcaagagataatttacttaattcccagcccctcctac

SEQ ID NO: 137036 - DNA, 378 bp, Homo sapiens
cctggctctgaacttaggcctggctctgaacttaggccctggctctgaacttaggcctgcctctgagatcacagcttcaagaaggggttgacctgtgtcaaaatcccctgacaggctttatttgtcaagtcagttctcacagcactcagccttgcccccagctctgagacaatggggctctgtgtaggagcagaggccaaaatctggaaggacactggcacgcctcttctacccccacgaggtgtttattattttgcttgcaaacaggctgggtccagtgttttactttcttcccccttcttccctttgctaattttatctcaatttcaaattagtatttttcaagagataatttacttaattcccagcccctcctac

SEQ ID NO: 137037 - DNA, 827 bp, Homo sapiens
cccacgagactatggactgctagtgagcagcctggatgagcatgtggccactgtgacccaggaccgggccttccctctggtagtggctgaggccgaggggtcaggggagctgcttcgcgcagagctaaccatcgctgagagctgccagaaaaccaaacgcaagagtgtgctcgccacgacccctgtgggcctgcgggtgcactttgggagggacgaggaggaccccacttatgactacccgggccccagccaaccagggcccggcgggggcgaggacgaggcccggggagctggcccgccgggctctgcgctacccgcaccggaggctccaggcccgggcaccgccagccccgtcgtgccacccacagaagacttcctgccgctgcccaccggcttcctgcaggtgccacggggtctgacagacctggagatcggcatgtacgcgctgctgggcgtcttctgcctcgccatcctcgtcttcctcatcaactgcatcgtttttgtgctgcgctaccggcacaagcgcatcccgcccgagggccagaccagcatggaccactctcaccactgggtgttcctgggcaacgggcagccgctgcgggtgcaaggagagctgtcgccgccagcaggcaacccgctggaaaccgtgcccgccttctgccacggcgaccaccacagcagcggcagctcgcagaccagcgtccagagccaggtgcacggcaggggcgacggctcctcgggcggctcagcccgagaccaagccgaggaccccgccagctcgcccacctccaagcgcaagcgggtcaagttcaccaccttcaccacgc

SEQ ID NO: 137038 - DNA, 212 bp, Homo sapiens
gaaatgagatgaggcagaaaataagaagccattcccaatcctcagatggaatgaagatattcttggcagagatgagcaaggaaccaggacaggggtcaagggggtgggtttccaatgcacagagatctgggttcaattctgcagccctgcctttatgaggtatgtgcccttggacaacttccttaacttctccgagcctgtttccttggctg

SEQ ID NO: 137039 - DNA, 1071 bp, Homo sapiens
ataatttgtattctgatgtatcattgggtggcatgctttatatatatatgttagggccagttcatttgtagtgtcattcaagtcttctctttccttgctgatcttctgtctaatttttctatctgcgattgaaaggtgggatattgagctccccaactattattgtggtttttgttttgttttattttgtctgagacagagtctcactctgttgcccaggctagaataccatggcacaatcatggctcactgcaccctcaactgcctgagctcaagtgatcctcccacctcacttttctgagcatctgggattactggtgtgccttaccataaccagctaattttttatatttttgtagagatgggtttttgccatgttgcccaggctggtctcgaactcctggtctcaagagatccacctgcctcagcttcccaaagtgcagggattacaggcatgagatactgtgcctggcctattattgttgaattgtctatttctcccttcaaatctgtcagtttttgcttcatatgctttggaacactgttgtttggcttgtttataattgttatatcttgatgaatcgactgtttcatgagtatataatgtcctcctttttccttgtctcttgtaacggtttttaacttaaactctatattgtatgatactcatataggcactccagctttcttttggttattgtttgcatggaatatttttctatccttttactttcagctgatttgtgtctttattttatttttttagagacagggtctcactcagtcgtccaggctggagtgcattgctgcaatcgtagctcactgtaaccttgaactcctgggctgatgggatcctcccaactcagtctcccaagtagctaggactacaggagagcaccatcatgcctgactaatttttaaagtactatttgtgtcttttaatctacagtgagtctcttgtagacagcatacagtggatattttaaaaaaaaaagtttgttctcacaatttctgccttttaattagagagtttaactcatttacctttaatgtcattatttctaatttgat

SEQ ID NO: 137040 - DNA, 684 bp, Homo sapiens
gtcgtggcttgttgagatgagcttcttcactgcaccctcagcttcccaaagtgcagggattacaggcatgagatactgtgcctggcctattattgttgaattgtctatttctcccttcaaatctgtcagtttttgcttcatatgctttggaacactgttgtttggcttgtttataattgttatatcttgatgaatcgactgtttcatgagtatataatgtcctcctttttccttgtctcttgtaacggtttttaacttaaactctatattgtatgatactcatataggcactccagctttcttttggttattgtttgcatggaatatttttctatccttttactttcagctgatttgtgtctttattttatttttttagagacagggtctcactcagtcgtccaggctggagtgcattgctgcaatcgtagctcactgtaaccttgaactcctgggctgatgggatcctcccaactcagtctcccaagtagctaggactacaggagagcaccatcatgcctgactaatttttaaagtactatttgtgtcttttaatctacagtgagtctcttgtagacagcatacagtggatattttaaaaaaaaaagtttgttctcacaatttctgccttttaattagagagtttaactcatttacctttaatgtcattatttctaatttgat

SEQ ID NO: 137041 - DNA, 321 bp, Homo sapiens
atttcctatgcatttttaaataaatgagaaagttttataaactaaaaatcttagtgtatattaaacattaatatttgtgtcattaagtatttttaatagatacatattttgttagattgatacaccatggtttattaaaccactctcccactgctgaatattcagattgtttcctctgtatagatactctagtgaatatgcataaatctgtgatttcatatctgattatctccttcaaattggttcctgttagtgcaactactgtgtcaaagaattggacatttttaagaccccagaaaggtaatagataagactgaaagt

SEQ ID NO: 137042 - DNA, 401 bp, Homo sapiens
atttaccataccaacaggcaatgttgggccataaatgcaactttcaaacgtggtccaggtgcctttcatgaatgaggcatcgtccctctgaggatttctctgcatcctgaactgcagggtgctggcatttagggctgacaggtggtgctgttgctgcttcacctaaggagccccacagccctgggaggcacagatgaagaagcccactctctggaggaaattcgaagactctgagagtttaagtagcttggctaaggctgcagaggaggaccctgggacagatctggagcacaggtctgaaatgatgagccctggggaggggacaatcaccgagcgtgtcactgctctcccccaacaccctcctctcaggaaggagtcggcaaacctcacatggcctctcc

SEQ ID NO: 137043 - DNA, 368 bp, Homo sapiens
agacttggagcttctcgactgaggggagatcgggtccctttggggaagaaagaagccttcaatgttgtcacaagtgtatcctggaaatcttcctctaagccttcctagagggacctgataacatgacttatgatacagtgaccccaaattcagggtgttcttgtctactgtcaagaatgcaatatcttattcctctgaattgaacgtagtaccaatatttgtgtgtagctatgcaccttaatagaccatagctaattagatgaggaacggtagacccaattcaaccatacaggcatcaaccatatcagcatacaggcatccctctcccaccgtttccttcttgtccccactccaaagccttctccatt

SEQ ID NO: 137044 - DNA, 176 bp, Homo sapiens
ctccagtaacactttattagctatttattacatatttgaataccctcaatgtttatgggtcagaaagtaaacgaaccaacaacatagtctctagtaaaactgcaaggtgtaactactttctccaaccaagacagtaattcttgttttagtgaatggcccagattaacaacaagctg

SEQ ID NO: 137045 - DNA, 144 bp, Homo sapiens
acagcacagaggaggtggacagtacagatgaggaagttgaggctcaccaagatggggctccccgagtcacttggtggcctctcctcgtcaccagcctcatccaccccccggctttccagggaggctcttcctgggagccacctc

SEQ ID NO: 137046 - DNA, 335 bp, Homo sapiens
atttacctaatcgcctagcgaagaatgtatgaatgggttccaatttcttactattacaaacaagctacaatgaagaatatccttttgcatatgtgagtatatctgtacctaaattcgaacaaatggaactgctcggtcaaatggtatgtgcatttataactttgacagacaaaccggctattttcttctttttcttttttaacttaccgtacttgtaagtaatacttgttatgaaaaattatttattgttaatgcccctagatgtcactatacctcaccaaataaatattatcaaaaaattatgaatcaagtagcccttcgcgattagggttagt

SEQ ID NO: 137047 - DNA, 445 bp, Homo sapiens
gtgatataggctcgtctaagataaaaatgccctagcccacttcttaccacaaggcacacctacaccccttatccccatactagttattatcgaaaccatcagcctactcattcaaccaatagcccttgtcgtcgaaggggcatttccatcatcacagaaaattctattggatagtgctgataaccctcattttacaaatgaggaaactggcatggaaaactcagcaacttgctcaaggctaaggtgagagagctgggattcaaatccagttagtttggcaccagaaatgttgcccttaagccctatgttgcacatcccaatggaaggtgaaatagttggctcttaaaggaagaggaatttgatgtgactactgaggcaagcactggtggtgcctattcagcagccaagcttttctcccttgctagcaaagtctggatttcacaca

SEQ ID NO: 137048 - DNA, 311 bp, Homo sapiens
tggaggtggaatagaccctcaggaacaggctgccaagagagaaagggccaggaggtgggaccgtgtatctgtggcagttcagagagcgatgggcagttgtgggcagctggatgaccagtgccatccagcagggcagtaactggcttgtcactgagattgacccatcctttcttggtccagccacccttgtgagatcatgttggggagaggggagtgctgaggaagtgggtggagaagaaggttggtttccacatagtctgtgggtgtctgagcagagcatgtgacaggtgatccctgcagctctggggaga

SEQ ID NO: 137049 - DNA, 440 bp, Homo sapiens
tgccggatgttctctagaaggcaaatttacccctggttgaggaccactggtttattacatgtatttctcattactttgggccctggcttatagttgataaaatttttagagactcctccactggtaatatagaatcagtgaaagtgataatacttaccataacagtgaagtgatattcttgttttaatatcttcagattttttttttttttgagacagggtctcactctgttacccaggctggagtgcagtggcactaacatggctcactgcagcctcagctgccgctgctcaagtgatcttcccacctcggcctcctgaggagttgggactacaggctcaagccacatgcccagctaatttttgtattttttgtagaaatggggtctcattatgttgcccaggctggtctggaactcctgggctcaagcaatccaccca

SEQ ID NO: 137050 - DNA, 398 bp, Homo sapiens
gtcttatttctttgccttgcctttatctcagcctggcttcccctccaggcagctctgagtggctcttggtccaggcttgtctccatctctccttcctcttcccaactccctaaactcaggacccagtcactcctgctccttacatacacacacactcacactaacacacgcacgcactcactctcttctcccccacacacagtcacacacactcccaccctaccttaggaaacaggtttccttccaagaacctttattaagacctgtggggaatgaccaggatctgggcccccagtgtgtctgtgagccagcttgcgtgtgtgcaaaggtgtgagtgtgtgagcatccatgtggctgtggaaattagaaagcatgtgtgtacacacgcgagtgtgaca

SEQ ID NO: 137051 - DNA, 290 bp, Homo sapiens
attcaggaagaacttggcacctaattgtcaattctgctttgagaagattagagaattatgtaacacactgctcattggaattttatcagagaaggaatagagcatccctctggcaattttccccctaaactttatggactttattttctttgcacagaaattggttgaaagcactgccatcccaagtcatttaagtaatgattacctacttagtgtgttgggcagcctcctgttccatctctgaggtttatgtgacacacacgccccccaacccccagccaaagaaaaaa

SEQ ID NO: 137052 - DNA, 165 bp, Homo sapiens
ggtgacaagtcccatggtgcagaggcccactgccctttctgcctcggtcttctgtgtcttgctttgccttgtaagatagcgtggtcatattcccgtttgactgtgcgtacttttctaaaagagtttggttgtagtacagagttgccccctgagagccgggcttcc

SEQ ID NO: 137053 - DNA, 225 bp, Homo sapiens
ctatgtttaccccagctataaaatggaggtgttggattggctgccacaagtgtccttccacctccacaataccgtgactggagcgggttttcactcctttttcttgttagcataactgttggagctatagagggtttggagtggggctgtttttctcccttcctctaaaacatcaacaattttgagaattttgaaggtcttcttgcttgaagttgcttaaggagt

SEQ ID NO: 137054 - DNA, 279 bp, Homo sapiens
aagaggcagtgcctgactcaaccctaaaggaccaagaggaattagctaagcagaggcgacagggagtggcagaatctttgtattctagatggaggaagcagcacacgcacagcatgaaggcataagagaacaggcctacttgacagatgaaaagatggttgtcgcattcaccaagatagacaattcaagaaaagaaacaggttagagagtgaggagtaaagggaagacttcgggcctggcacggtggctcacatctgtaatcccggctgaggcgggtgg

SEQ ID NO: 137055 - DNA, 532 bp, Homo sapiens
ttatcagcaaggtcttcatgacctgtatcttgtgcgacctcctatctcatcctgggactaagaatgcctaacctcctgggaatgcagcccggcaggtctcagcctcactttacccagcccccattcaagatggagctgctctggttcacatgtctctgacaagttgacctgggttgagtgttccatagcgtgtggttgttggagcttttcttaggagtaagaagtattgttagtaggaaacaggcctctattggccctggggctggcactctgccccagtatgtcagtctcattttagtggtgaccaaactggggctcagagaaatcaactccctcaccccgaacccccagactgtgagtggtgggctggggtttgaatgtggggcttgaagacccaccgtttcctctggtcccccatgctctgctgcccgagaggaacaggatcccaggatccaggcccctgatggcaccagccagggtgggtggaaatggggaggcacagtcccaaagcccccaggactctgaggcaggt

SEQ ID NO: 137056 - DNA, 174 bp, Homo sapiens
cgctgacattacagatgtgaactttagcgcctggcctatgtatttttgtatgtgttcttcctgcatagtctgtttcctctaagctgctttttttgttgttgtttttttgctttcgctttaactcctgtgtaacatgttacatgtttttcttggatttttggtgatcctctgcgg

SEQ ID NO: 137057 - DNA, 449 bp, Homo sapiens
agcaggccattcatttccttatgtaacttatagggccccagtgggataatgaagaatcatatagtcttcaaacagaacttggtactacccgattcttcaccagtttatccaagactgatccaggagagagtgtgtcaatacacaagatccaacaacacagggaaaatctattaaacctgaactgatgagtaatttggacctttcggtagctgctatttcctgccccttgttcacctgggaaactatgtatcgctgtgagataaggataacctgtggtatttggggtgggggtgccgtgggaggggtaggcaaaggcaattaagtctcatcaacttccagcaggaataaacactgaggaatgggtttaaacttcttgctctcggatgtttgcatgtcacaaacacacacctttttgtactagagtcctagtgttaggtaaaagtccacct

SEQ ID NO: 137058 - DNA, 628 bp, Homo sapiens
agtggctgtgtggctggggtggtggccctgctgaaggggatctgacctggcagccgtttgggcaggagcagttttcagatgtgagcacacgttcaaacttgcagcagcaaagctgctcaaggtcccaggaagcccaggcttctctctcgtttttgtggctgccttggtaacgtgtgggtgtaagagcgtgtgtatgtgcaggagagagacggagagaaagaaagacctgtgcattccagaacacccttcttccttgaacatccgattacccagagcctaattttaaaaccgaagtcgatgccttcttaagtctgcgatggcccagctggcctccttaagtctgtgatggcccagttctgttcttgctccaagtctacgaagccagcttcccctgctggggcttgaaagggacccctggccaggagcaagcagggcagcaagcaaagctgttgggggcactgtggggactcccccaggtggccaggcttctgtgtgcccgtgccacccctcctcaggaccttgtttccagttccggttgggcaggggctggcactggagagaggcttatgtgtcaacaccataaagcagccagcaagccctaatgaccacgctctgcaagaccacacag

SEQ ID NO: 137059 - DNA, 456 bp, Homo sapiens
taaaacatgtttctagaatgtgaacagttttgaaacatctgtattccaatcaccaatccagaatcttgggagctaaagaaagtgtgggttttcccccaaaacaaacactcagcggaggacacaggagaatgaccaaggtgtaaatgaaagaagaatctggcctggggcatcctatggcgagcgccatcccctttaggggtaagagggacatctaagaccaagcggagctgagtcaggcctcctgggtgggatgatacagtatgaaagagaggtccaggaaagggtctcattcaggctgacatgtcccatcatgatcagtcaagtttaggacggagactaataagactcaacatatgcggccggtcgcagtggctcacgcctgtaatcccagcactttgggaggccgagacgggcggatcacgaggtcagaggttgagaccagcctggccaagagac

SEQ ID NO: 137060 - DNA, 236 bp, Homo sapiens
cactaatgttattcattagaactctggaagtagttggcttccaactcagagcaaaaaaatggaatcttgaataatggaataatgggaagatgtagctgtggccattgacaaaatatgacacatctaggaagcactgtgcccattttacagagttactagatttttctcttccttgagtggctgttgaaagctcctcttgtgcgatgttggcgttcaaaattgaactcctttttttc

SEQ ID NO: 137061 - DNA, 450 bp, Homo sapiens
ttgctccaactagaatataaattccaacagattgggaacaatgtcattcttacattcttatatggcatagtttgcgttagaacagtgtttggaagacagtaagcattcagcaattatgttaactcagtgaatggaattctcaggaattcacaggaagctccctgtgtcctaagcaagaccacctcttaatctcctcaattcttaatttccatccagaattattccacccagagcccagaagagtgtaatgactttaattcctccccaggaaagcagtatagctgactacttctttcagcactgccttgcataaccattatttctgtactaagatttgttttgcctcccttttcccaattttctttttcttacctcatattaacatctttgacaaaattctcttattcaattcacataacaacctgggcaagtattattacatcttttttt

SEQ ID NO: 137062 - DNA, 407 bp, Homo sapiens
gctgggcctttttcaatacctttaaaatgggcttattcatttctatgtcatgtaagagtcatgaagtttggatgaggttagagtttatgactctagccagggacacagtaaatactcagggaacagtcgttgcttctggatctatccagcttctttagaggcctgatgtctctatcaggatgtgccttgtgattgcccaggcactcatgcctgtttagattgaggtcccaaccctcctgacttcattggctctgcccagtggtgcactcccttgacctcctctattcttgccgtcacttccaggcacctgtgtctggcttttctcttcagtgaataattcaaatcctatcatcctctgactattcctcctcttctcctccaacctctgtctcttctacttggtacag

SEQ ID NO: 137063 - DNA, 248 bp, Homo sapiens
gaactcaaaatctggatgtgtaagctactttgagtatagctacccaaaatctggatgtaaaagcacttttattcagatgttcatatttcagcttattggatgaaacatgaattctttgctttatgcaccatagcaagtaatgaagttaacacccaaataattgcaattttgctttgttatttgtggtttaaagatttagaagagtgttttatttatgaatttgcttttagatagaagtaacttgttag

SEQ ID NO: 137064 - DNA, 195 bp, Homo sapiens
acgagccggcccgggttcgagtagcatattcagaagcctaccatcttttcctaatgcaagctgaaaaaaagtagagatctatatgtaccctataaacatgtatgaatattacatatcagtgaatgtagagatctacaaaattgtggctagcataaatagcatatcctcaactttaactaaagtagaaacacacac

SEQ ID NO: 137065 - DNA, 196 bp, Homo sapiens
tgtacgagtaaggtgtgtgtttctactttagttaaagttgaggatatgctattcatgctagccacaattttgtagagatctatatgtaccctataaacatgtatgaatattacatatcagtgaatgtagagatctacaaaattgtggctagcataaatagcatatcctcaactttaactaaagtagaaacacacac

SEQ ID NO: 137066 - DNA, 105 bp, Homo sapiens
gagagtcttcggtggaagaaaatgaaaaacagcaaaatgcctctgaaagcaaactggaattgagaaataattcaaatacttgtaatatagagaatgagcttgaag

SEQ ID NO: 137067 - DNA, 271 bp, Homo sapiens
gtgattccaccttcctctgaatgtctgtagcctgaactgcctgtaccacatatttatctttgggttgtgatcttttcagttgtctgcatcttaacccacttacaaatctttgcaagttaaagactataggtttataggttaagcctttatagcttaaagattctataggcaaagtctgtggttctatgtcattgatctctaaactccagtttttaaaaatattcataaatttgtaaaaatctataagattttataaagaaattttagccct

SEQ ID NO: 137068 - DNA, 117 bp, Homo sapiens
agatagccatcttccatcttaaagctgcgccatctgaatttatttttatttattttattttatttcatttattttttatttatttatttttttgagatggagtctccctgtgtcgcc

SEQ ID NO: 137069 - DNA, 112 bp, Homo sapiens
gcatgaggtaagaggtctggagaaaaattaagtaatccatgcagtaattaaaatatagcgttttttaaactagttctacctaataaaaagtgatccaaatctatggtgatac

SEQ ID NO: 137070 - DNA, 409 bp, Homo sapiens
taagacaatcataaacaaaaataaaaacttgaagaatttatttgtaccatgtatgtcacaaggataatatctttataagtttttaacaggtaataagaaataagctaactctccattagaaaactgggcaagagtgctcagaagataagcaaatgaaataagcatataaaaaatgtttaatttccctagtagtgataagcaaaatgttttacctgtcactttggcagacttttgtttaaaaagaaaacccatgacggagagagtgctgctaaatgcctgcttttaatgtattacaagtaaataatgtattacaagtaaatgtatgggagtgtaaattggcacagccttcctgaaaaagcacatcttttgacccactaaatcctcttcaaagaatttatcctaaggatgt

SEQ ID NO: 137071 - DNA, 800 bp, Homo sapiens
aagagcctggacaaaccaccatgtatgttgtaaggaggttggcagaggaacaagagtaggacctgggggcccaggttgaccctgagatggtgcctcttgtctggtcctctaattgtttcctcctctgccacctgctcatcactgaccccagtagagggttcttggcagaaagcattaaacgggctgacccagggcttcctggacagtgatagccgcatcctgttgtcttataggacagagtgtgtgactggagtgggacattcttctttgtaaggatgcagggaactcaactacatttttcacttgactagccaagagtgattgtaaaacaaaactagtacactactcatactcctctctggaagactctgctgagctcccagagaaaataaaaccccagggaagggccatggcagtgtggggccacctttccccgtatggttccgggtcagggatctggatgcacaggggctgggttggctgggatggggagcttccaatgtgtccctttgaaaatctgattctgcaaagcagggcggcctcatccgtcactactctgacgggaacctctccccatctccacacctctcactgcttcctccaccccctgcctgcacacatcaggatcacgctcgcacatgctcaaacgcacactcacccatcctggtttctccccagatgtaacctgaggatttcctttttggacaccagagtgtccttgctcatcctctccatttcattcctctttatataccccttgtgattattttccttctttttcctttatgctgacacttgta

SEQ ID NO: 137072 - DNA, 527 bp, Homo sapiens
gatggtgttctagaggatccctcaaaccgtatcagaacagagtatgtgatcaacttgacgtttccaatagctccagtgagatgaaaactgaggtctgaccaccggatttaacaacatggaaatcactggtgacttttacagtgcaattttgggggagtggtgggaacaaaaaccagattagaatcagttcaagagagaattgggtatggaatgttacctaagtaaattcttgcccagaatgtttaacctgaatcaaatcttaaagaaataattaggccgggcgcagtggctcacacctgtaatcccagcactttgggaggccgaggcgggcggatcgtgaggtcaagagatcgagaccctcctggccaacatggtgaaaccttgtctctactaaaaatacaaaaattagctgggcgtggtggcacgggcctgtagtcccagctactcaggaggctgaggcaggagaattgcttgaacccgggagggttctgatacggttttgagggatcctctagatcaccacacaa

SEQ ID NO: 137073 - DNA, 509 bp, Homo sapiens
  misc_feature (493)..(493): n is a, c, g, or t
gatggtgttctagaggatccctcaaaccgtatcagaacagagtatgtgatcaacttgacgtttccaatagctccagtgagatgaaaactgaggtctgaccaccggatttaacaacatggaaatcactggtgacttttacagtgcaattttgggggagtggtgggaacaaaaaccagattagaatcagttcaagagagaattgggtatggaatgttacctaagtaaattcttgcccagaatgtttaacctgaatcaaatcttaaagaaataattaggccgggcgcagtggctcacacctgtaatcccagcactttgggaggccgaggcgggcggatcgtgaggtcaagagatcgagaccctcctggccaacatggtgaaaccttgtctctactaaaaatacaaaaattagctgggcgtggtggcacgggcctgtagtcccagctactcaggaggctgaggcaggagaattgcttgaacccgggaggtctatacngtttaaggaccgctat

SEQ ID NO: 137074 - DNA, 527 bp, Homo sapiens
cgtatcagaacagagtatgtgatcaacttgacgtttccaatagctccagtgagatgaaaactgaggtctgaccaccggatttaacaacatggaaatcactggtgacttttacagtgcaattttgggggagtggtgggaacaaaaaccagattagaatcagttcaagagagaattgggtatggaatgttacctaagtaaattcttgcccagaatgtttaacctgaatcaaatcttaaagaaataattaggccgggcgcagtggctcacacctgtaatcccagcactttgggaggccgaggcgggcggatcgtgaggtcaagagatcgagaccctcctggccaacatggtgaaaccttgtctctactaaaaatacaaaaattagctgggcgtggtggcacgggcctgtagtcccagctactcaggaggctgaggcaggagaattgcttgaacccgggaggtggaggttacagtgggccaagatcacgccactgcactccagcctgggtgacagagcaagaccccatctc

SEQ ID NO: 137075 - DNA, 486 bp, Homo sapiens
ctgaaaaacctgtctttctgttaggctttctgttattttgagctatggtccaccaatgcgaagcaaattatttttaaagctcttattttaaatattcatcttcttcaagtaggtcacttttttatgagcctcagcttctcttatatctcccctaatagaaagatgtaatgcattcaaaatgtgaaatcaaattccagttaattttattgatttctttcagagactccttgcttcttatgcaaattcatgtttatttcaaaaagagaaaacaaaacaggcttcttagagaagatgacttcaaaaatccacaaagagccaccacaattttattcaattataaatgagctatacaatatttaaatcactggctggaaataagacgggttttaattcatttcagagctcagcaatcgtctttagataacctcatctttaaaagtgaatgaatgactgacagcaggataaaataagtaccttgtcacatgc

SEQ ID NO: 137076 - DNA, 291 bp, Homo sapiens
agctgggattacaggcatgtgccaacatgccagctaatttttgtatttttagtagagatggggtttcaccatgttggccaggttggtctcgaactcctgacctcgtgatccacccacctcggtctcccaaagtactgggattacaggcatgagccaccgtgcctggccacctagaggacactttttatatgtgctaacatacagtctctgtttgaaccctcctaacaatcaaaggagctcaatatgattatccctattgtataaatgcagagactgaggttctgagaagtt

SEQ ID NO: 137077 - DNA, 119 bp, Homo sapiens
gatatattctcagaattgcatcactaggcgattttgtcatgtgaacaccatactgtaatgcacgaacctagatggtacagcccactgcacacctaggctgtatagtagagcctactgct

SEQ ID NO: 137078 - DNA, 281 bp, Homo sapiens
ggcatagaaaggtactcaaagcaaccagtaattgagagaattatttaggtgtttgtatacattcaacaatgtatacaatggggaggtgattaaaaaactgtgactttacctttagtctacatccatggcctttcattaattaatacatttttaaaatttcaacttctattttatattcacggggtacatgtcaatgttcttttacctggttgtattgcatggtgcttagatttggagtacgaatgatcctgtcacccaggtactgagcatagcacccaaca

SEQ ID NO: 137079 - DNA, 185 bp, Homo sapiens
ttattcgttggtattctgtaaagcagaggtttcacttttccccactcacctccaccattttaaagtttatttttgttagtgtcagtatgaattaacaaattttttttttttagagacagggtctcaatctatcatccaggctagattgcaatggcacaatcatagtttactataacctcaaactc

SEQ ID NO: 137080 - DNA, 611 bp, Homo sapiens
taaaagtacatttaaagaatgtaataaacccaattggaatgtcatcaaaatagataaaacttgtaaaaatggacaacgaaatgttataggatataatggtaaggggttcaggctagaactctggtatctaaattctagcactcacctctttttccactggagtcttatcaaggaaattatatacaaataatagtagccaaaggggaaacctagcatcattttattaataaccgaacaagaaccactaatgtggtgctgctccctggtgaactaagtggggaaaatgcagtttggccttgaagcctcagtgaaactttctgcttttctacctctgactcaaggacagacccaatctgacctctcctacccagttgtaggttcagagaaactggagcggaggatggtcaggcccattctgaggaggccaatttgcctgtccatgtaggagcaggataagccagagccagagagccatgggacatgtctgactgtagagtggtcaggcccatgcacctgtctcgggcttcagccaatcacttcagcaattcttcccccaccggaggagctagtgagtggtggggacagaagagcagaactcccacgctcagtat

SEQ ID NO: 137081 - DNA, 465 bp, Homo sapiens
tctaaggagaaagaatttgacactgcattacccatgctacctagtttctatttgaagtggaaaatgtatttggactcttgatatcactttcacagaatttggagtggggaaaggtaaaactggaggaaggctttatgtgcattctttcattctgtcatctatcctcttcaattatcaaaactattttagttgcctcagtctcagcaataaagtgagagaaaaaaataatttttagagcagcttcatacataattatagctcatttattgccaacagtcttaatatgaccattacaaaaaatgtcttcataaaactaccgcaagatcacattcataagaatttaaatatatgaatgactgatctactcaaaaaaacacagaatagtacaggtgtataccaaatggaatttggcagatagccttattttccagtagtcattttcttagagtttgtgatagagaaaca

SEQ ID NO: 137082 - DNA, 589 bp, Homo sapiens
ctttttctaatcactgtttcctgctaaaaaaaataactgtttggcaaactttctgtaactctctatcttttcctggtttatgtctgttgtcccaggcattctgattacatatcccaatcacaatccttttatatgttagtatctaatgtgatgtggaagaatttgtatggtttacttgaaaattgcctattgtttattaaattccgacagcaagactcttctgcataaatgtttttgggtcttaagatcagatttcaagctggtagtacttcatttccccttaagggaaaggatgtgtaagatatttataaattcaagcatgcttaaggaatttatttaaatggctgctaattctactgcattagaagcatgccattgatatgtactgaattaaatttaaggatatatcatctcaaagtatattctagtaatctttaattagttaaaagtatcttttaatattgttaagtaaaactcattaattgtagaaatgcttagagatgagtttaggctacctaccgatttttaaattaaaacttaattttttaatcactataaataaattagtaaaccttttaaaatataaagt

SEQ ID NO: 137083 - DNA, 541 bp, Homo sapiens
tcgactactactataaatttgccggccgcgtcgacaccacacttgtcttctctacctggaagttgtattccccatacccacatggctcacttcttcacttcattcaagtctctgctcagatattaacctcttcagagagcccttccttcacacactgtcttgcatagcagcctcccctacaagttgtcttctttctccttaacttttgtgatggttaattttaggtgtcagcttgactggattaaagaatacctagagaactggaaaggcattatttgttagtgtgtctgtgagggtatttccagaagagattgatatatgactgaatggactaagagggaaccatccgccctcaatgtgcaggtggcttgaaacaaaaacggaagaaaggcaaattggtcttactctcttggagctggaatacacgcttccattcctgcccttagaaccccagcggtgacggaaaggctgatgtaggtcctggagtcctgagacccaacagcctgggatcctgaaatccaaggtcgacgcggccgcgaat

SEQ ID NO: 137084 - DNA, 973 bp, Homo sapiens
tcgactactactataaatttgccggccgcgtcgacaccacacttgtcttctctacctggaagttgtattccccatacccacatggctcacttcttcacttcattcaagtctctgctcagatattaacctcttcagagagcccttccttcacacactgtcttgcatagcagcctcccctacaagttgtcttctttctccttaacttttgtgatggttaattttaggtgtcagcttgactggattaaagaatacctagagaactggaaaggcattatttgttagtgtgtctgtgagggtatttccagaagagattgatatatgactgaatggactaagagggaaccatccgccctcaatgtgcaggtggcttgaaacaaaaacggaagaaaggcaaattggtcttactctcttggagctggaatacacgcttccattcctgcccttggatttcaggatcccaggctgttgggtctcaggactccaggacctacatcagcctttccgtcaccgctggggttctaaggcctttgggctaagaattatatcatcagctttcctgattctgaggctttgggacttggactgagccatgctaccagtatccctgggtctccagcttgcagacaatctgctgtgggacttctcagcctctgtaatcatgtgagccctttctaactcataaaccctcttttatatatctatgtatccgattggctgtgtctctttggcgaaccctgactacgtatacttttgtttgaattcaaagtatttatccctacctgatattacatcctatatctgtttgttttctgtttcttccattagaatacaagtttcatgaggacagggactttatccatttgtttactgctgtatcttaggctcaaagttggcactcaataaatattggttaaataagtgaattacaagcaggttggattattaggtaatatggttcgcagtgtgggactcc

SEQ ID NO: 137085 - DNA, 319 bp, Homo sapiens
ccacccttctctgtcacatggcttctttgctgaccctgatacacaccacacttgtcttctctacctggaagttgtattccccatacccacatggctcacttcttcacttcattcaagtctctgctcagatattaacctcttcagagagcccttccttcacacactgtcttgcatagcagcctcccctacaagttgtcttctttctccttaacttttgtgatggttaattttaggtgtcagcttgactggattaaagaatacctagagaactggaaaggcattatttgttagtgtgtctgtgagggtatttccagaagag

SEQ ID NO: 137086 - DNA, 293 bp, Homo sapiens
gaactgcagggctttggccatagcttatgaaaaaggagtaaattggagaaaacataggtgttctcacttctcatacgctgcaaattattcagtctctttgggtgaaaaatgttatgctaattgaaaggctggcttgtattcggtaccaaatcatggcaaatccatcaacttgtctcaaatgtgttcttttttctcctttcccccttccctctatctctcttccggttctttttggtctaaactgcttaaccagtttttattgagcctccattgtgtgccaagcacagttcttt

SEQ ID NO: 137087 - DNA, 2100 bp, Homo sapiens
ccctctacgccccgaggggaatcccagggaaggttcccagaaatactacagtgaggagatcgcgggttggaagtcccagcacctgagaacacggtgctggcgctgggctcaagatttggctttcccatctggaaaaggggaatgactgccccgccactcagggctgcggcgctcacccagcgggaagccgcacggcggtccccgcaggtcccgattcaaggtgagccccagacctgctgcgtgcggccggcagactccgccgcgggctcggcgaggggagcggtgcaggcgccgagctgcggagcccgggctcagggcaggaccgcgagccctccccacctgaggcccagcgagcggccgctgtccgcgcagtgtcgcagtggaccccgagccccgtgctgaactccttaggcgtcttaggaacatactcagttcgcacgcagctatgggaggaatttggcagatgtggacaccggcctcagtgtcctagccctcgggaatctcggggtgttaatgatgacagccccgtgtgagagactctaacagttatcctgggggtgaggggctggggcgctgggcctgggcgtgcatgtgtgaggaaagagaaatctgcgcgggtgtggaagatggagaagcctgtctttctgcaggactcagaactttcttaggaagtttggagggagtgggagctgacgggtaggggaggaggaaaatggctcaggcccctgacaccggaatccagactatagagtttaagaaactaaatgcctccaaatcctgccctcacagcccgcctggcctgggctggttttctcagcattccagacataaagactcctctagtgcaactcaaaatcaaaacccagacgacaggaagccgaattccccactgagaccctcccgtttcctctctgacgctctttttttttttttttttcatttttctctctccttttttttagttatttatctagcacagttttagctgagcacttctagtgcaaaactagaatatcgttttgcacccaagtaactcacaccaccttctttatttttctcatctacaagtaatcagaggagacgtaaacaatgacacatgaagcactgaggatctgagatgtgttaagcttgctttgagtgttagttaaatggagggatgggtgagtgggtggatgaaggcatcaatgaattcacacaaaaaggagaaaaaattgatttcagcccaacagatgttccgttaccatagtgcaaaggaaagaatgataggtactctgtattttaactgatgtgatcaaataatgtgaataattaaggccacaagtagaattttgggggtctgaaatatcccgagtaaccctctacacaagctaaatgactgctatgttatcactatcaaatatgccctctgatttgtgctgtgtagagcaaataccacgtctggtctactgaattggcaagcctcctggctcaggcaccactggactccaatgttcatctggaatccttctggatactgactgttgggccccttgtagtttctggaatttacccgcttctaggagccacctctctcctctgcacacaggagctcatctgcactaaaggattagaagcaaatagaatctaccctacgatccaagctcaaaggatctggcctgcttgctggtgtcttcccctggcctccgctgggtggtgtttgcctgcccaggtcactgagaccagcagatccttctaggctttgctgaacctggctggtaataactatctgacccttcaattcttccatacactgaactcgttgctccagtgaatccctttcccagcccaccttgttttgtctctgcctttctgtctctcccactttctcaccctttcatgtaattcagcaactattttaaaacaaatagctttatatgaacaaaaggactagatcatgaactacactggttatttggaagtctaggttctttctggtcctgctacccctttaacttgagttatttacaagtctgtttaaaagtttctagacatacactggtttgttttttgtttggctatcgttttgtttttcatttctaattgtattgcattgtggtgaga

SEQ ID NO: 137088 - DNA, 234 bp, Homo sapiens
cgctgccatcagttaaattcacagccagtgtttcccaacccaggtcccataaatgttcttctcaatcctgccgtgggatgggtgaccttccttctctttcatggccttttgttttccttggggcttacagttgatgttttttacccatccaccaccctcatgggcttactcttccccacatcagggcttctattggggtctcatttttttccctggataaagattcaccccaag

SEQ ID NO: 137089 - DNA, 521 bp, Homo sapiens
ccattctctaaatatcatcaagcccatagcgtccctccctacagagaccgtgtctgcttagtagatgagacatttgtggttgttcattgactcctttttttctagaaagttctagtcctctagagactcattgtaatacctttgtccctctgaattcttggtatttaactatacctcctcctgttatatgcacccagggtaatatgcctctggcacatggtaggcacttaatgaatttatgtggaataattcagcaacttacttttatagatacatacagactatccctcttctatgaactcattctttctcagtgtatcaaactaccaatctgctgagctcattcacaacattttggtgcttcttaatgttctcagagaataactttcactctagtgctggcttcttccatccactggtaggggtttggatcagataaaagggagaacatcccaggctgggtgcataatgtttggaaagggttaaggaaggccaagtgaatagttcttgactgaaactaa

SEQ ID NO: 137090 - DNA, 410 bp, Homo sapiens
tgtgaccataggtcactgcagcctcaaactcctggcctcaagcaagcctcccgctcaggcctcccaaagcgctgggatgacaggcatgagccaccacatccagccctcactttctaattatttattatgattttgtcggttgactggggccagccaattcttctgctggtgacagttccttcagcccctctgacctctggcctaacatggaagtggggataatccatgtacccagaattctcccagaattgatgagataagactccaggtcatggaatagttaacgaggaggagtttctctttagaagtaatccagctaataaatgaagacaggatgatagaattagaatattaccatttctgggccaggcacagtggctcacgtcagtaatcctagcactttgggaggc

SEQ ID NO: 137091 - DNA, 451 bp, Homo sapiens
  misc_feature (171)..(171): n is a, c, g, or t
ccacctcagcctcccgagtagctgggattacaggcatgcgtcaccacgccaggcttattttgtatttttagtagagacagggtttctccatgttggtcagactggtctcaaacttctgaactcaggtgatctgcctgcctcggcctcccaaagtgctgggattacaggcangagctaccgcatctggcctcattttccaattttttattgtgttaaaatccacataacagaatttgccatcttaaccataacataaaatttaccattttaacagaattaaccctcttaacagttcagtggtattaaatacatttatgatgtcatgcagccatcaccaccaatccttctccataattattttcattttgtaaaactgagaaattttgtactcataaaacaataattccccattctcctctccccctttcccccagccctggcaagtaccatt

SEQ ID NO: 137092 - DNA, 475 bp, Homo sapiens
ttttccacagggtggccatccactacacagggcagatgtttgccattgttttctttatcacaacagtgttagaaggaggtacttgcccagacatgggttaaaatcttgactctttcatttattatttttattatattaagtttcagatgatgaataaagagtgaggaatgtagattgataaagaatagcaaaagtgggtatggtgggcagaataatagtccctgaagatgtccacaccctattcttcagaacctgtgaatatgttagcttacgtggcaaaagcaactttgcacgtgagattaaagcgaggaccttaagatgaggaaatgtgttaccctaggttatacaagtgggctcaatctattatcatgggttcttaaaatcagagaacctttcctgttggagttcccagccagagagagatgtgactgtggaagaatggccagacagttgcaacattactggttttgaagtt

SEQ ID NO: 137093 - DNA, 318 bp, Homo sapiens
gtggggctgtgcacccggcatgtcagcctgttctttaatggctcacgagctaagaatgatttcatatctttttaaaggtgaaaaaaaaagaacatgcccacaaagtctgaaataacaaccctcgctcttcatcccagtctgtgggcctggggaggctggcagcatgggccatgctggcggggcccctgggtacaggggaagggcctgggcggagggacagactgtcaccacctggggatcccacaccaccttttagatagaatatatacagcgccctctctctaccaagttaggggagggagaagtgttaccaattag

SEQ ID NO: 137094 - DNA, 380 bp, Homo sapiens
ttctacatggggagctgcttggagcttgggggggtttcttaagaaaagatataacaagaccttctaagagtctattatgatagtgtggtggggagagggtagatattgatagcttgggctaaggtaatgttggagaggtgtggatggaagatgttttcactcctttgcttcgttgtcagggaatcagtgtgtctgtgagtatgtgtgggaaaggagtgacagccttgtaaatttaaggatctatattctttagatggattctaggtctacagttgtgtgaaggctgcaagtgctattgtaagccttctttgggggcttatttggcctccctaatgaggtgagagatagatctacttgaaagtaagatcagcctcccctgc

SEQ ID NO: 137095 - DNA, 229 bp, Homo sapiens
acacaaaagaggaaaaaaaaaaaagaaagaacaggaaatttgataaaataccaagtttgagctttctcccccaagctaagtgggtgatattattttcagctccttttaacattttttttttggtctttaaaaatcatgcattatattttataagaatagtgaaactttttcgagtcacccttctggcctttcactagaaaaaggcattcatgtacacataatactgggc

SEQ ID NO: 137096 - DNA, 839 bp, Homo sapiens
gggctcaagcaatcctcccacctcagcctcctgagttgggatcacaagtgtgagacaccacacctggctaattgtgacatttggacaagccaacataactataatcagatctcttgtcaatacataaaatgaattatgcagtaccaaggctgttgtaaaaactgctacaaaggtggcactgaaattttatgctaatagaaagttacagtatagttatgaagatcatgcagaaataggtgtatgctaatttctaaaattatcattggaataaagacacagaggtatcttatagagaaaagtcacagatccccaagaatatatatatatttaggcttggcatgagaaaaactgatgttatgtcatagaaatgaaatggtttaaagttttaaaacaaaatgaaatgcttgaatgaacaggcattcatttaatgctgctttagtctcttttttttgagacagggtctcgttctgttacccagggtggaatgcagtggtgcaatcatggctcactgcaaccttgacttcctgggctctagtgatcctcccatctcagcttcccaagtaactgggaccacaggcacataacactatgcccggctagtttttgcatttttggttagagatgggatttcaccatgttgcccaggctggtctcaaactcctgagctcaagtaatccacatgccttggcctcccaaagtgttggggttacaggtgtgagccacttttttgagaccaagtctcattctgtcgcccaggctggagtgcaatggcgcgatcttggctcactgcaacctctgcctcctgggttcaagcaattatcctgcctcggcctcttgag

SEQ ID NO: 137097 - DNA, 846 bp, Homo sapiens
attggtcttgccagccccagcctctgcctgcttcatgtccactcccagcagaagccacgcagaaagtggggaatccaaagggcctccttccctccatgctggccgcacgtcagcccagagccatctggcaggtgtcctttctgccccacccccgtgcctcaaactaagtatactgggctggtttagaccaaactgcctgctgattttttgaacgaagcaggtgtctatgtgctgcctcatttgctgttgcaacaaagatctgaagaattgctttaataaaaaactccaggccgggcacagtggcttacgcctctaatctcagcactttgggaggccaaggcaggtggatcacctgaggttgggagttcgagaccagcctgaccaacatggagaaaccctgtctctactaaagtaatacaaaattagccgggcatggtggcgcatgcctgtaatcccggctactcagaaggctgaggcaggagaatcgcttgaacccgggaggcagagtttgtggtgagccgagatcgtgccattgtactccagcctgggcaataagagcgaaactccgcctcaaaagaaagaaaagaaaactccagcttgtgtccaggacgtccaaggcattggagaccctgtgcgtccagggtgtcacaccctcagattgtttccatgtatatacactatcgtctcctgcattttcagggtgccatatcctcagattgtaccctcatactaatctctgtgtctggaagttttagctacagtgctacaaaatccagcctgggcgacagagtgagactctgtctcaaaacaaacaaacgaaaacacacacacacatttattatctca

SEQ ID NO: 137098 - DNA, 404 bp, Homo sapiens
acggccatccctgaggaaatggtcaattcccatgcagtgtttggggagggcagctcccaggagtgcaccctgcatgggggtcagggctggctgcgccaggcatggggggaactcagcctggatggagaactctccgctgtcagaagcacctccagctccccagcaagagggcacttccgtgcagtcaggcagaacagcctgggcactgttcacgaaagcctaggagagaaggctgggccatccctgtgcgacgttaagcatttgtgcaggacacaaggacatattccatttgaaccacaggaacaaacgggaaaacaaatttgacatttatctttgatcagacacatgtagaaagggctaagcctcatcctacacacgccctggacgtgtggggctaacgcctt

SEQ ID NO: 137099 - DNA, 318 bp, Homo sapiens
acacgaataataggaaactaataaacaatgaaaccgaagagggcgtgataggatttccatatgaatatgagaccatctgctcacatgtatattctgcattaacaagtgtagtcccatagcttacacagattctcaactttcacgcgtgtagttcttttattttaattaaaaacaacatcagacacacaggcaagagggagtattcaaccacgaaagaaaagttcattcaggcacagcagttcaacagatctgagcaagcagaagaaaggatcagctaacttgaagacaaccgaaattatccagtctgaggaccagaaa

SEQ ID NO: 137100 - DNA, 456 bp, Homo sapiens
aaaagattagtgtttccacaggggttaggagtcagcagagagaaaggaatgtggctataaagggatagcacctgggggccctgtggtgttgatacaattatgtactttgattgtggtgctgattacaaaaagctacacatgtaataaaattacatagaactacacacacacacacacacacacacacacacgagtacacacaagcaggagaaatctgaataagctctatagattgtaccagtgttcattttctagtattgacactgtaatatatatatatttgcaagatgttaacagtatgagagattgagtgaagtgtacacagggcctgcctatatatttcttttcagcatgtacctaactatatattgttataagaaatgacttcaaatacaaaggacatcaaatgatacaaataggttggaaataaaaggatggccaagaatatgccatgtg

SEQ ID NO: 137101 - DNA, 349 bp, Homo sapiens
gttcctgaatcagtgggatatgtaatccagtgaaatatgtgtcagtgggatatgcatatgaagggatttgcatattcagtgccctctgcctggggtgccctccccagactcctccatctgacatcctcaccattcagatctcaacactcatcacctctgccaggcagcccactttaagttgcctgactaggtcacttctcctctttatgagcttcaaagaagccatcaggccaggcacggtggctcacacatgtgatcccagcactttgggaggctgaggtctcaggatcaccagaggccaagagtttgagaccagcctgggcaacacagcaagacccccatctttact

SEQ ID NO: 137102 - DNA, 433 bp, Homo sapiens
gtagaattggttgaagtcacagcacaatagaattaagtggggcttaatgatcctctaccaaccagaggcgggtaaagggtaaccctgagagagacaagaagatgaaaccagaccagaaggtatcctgcagagggaggcaaggccagaaagtgtttttaatgtaggggaaagggagtgtttgagatttaagtgagtaatgagaaggggctgaatgtttaatttccctaattctattgttaatactttggaccatgttcttatgagtggatgagacagaataaaaaaggattgcataaacacataggtaaggaaaagaaattaaggacctttattatgttaaaaaaagtagataactcctgaaaaattaagagttgattgtagttcaaaatcaaataacatgcttagagtaatgtaaattaaccatgagctgcca

SEQ ID NO: 137103 - DNA, 405 bp, Homo sapiens
cctgagacagtgtgcaaaggagggaaggtctttctaaaggctctggacctcataggagattggacaaaactcatgccccagccccacctcttactagttatgtgaacttgggcaagtgacttaacttctctaagcctcagtttcttcatctatacaatggggatgactatcgcagtggggtgataagaggatgaaatgagtaaatatttcgaaagtacttgaaactatggcaccctgatagaatttatgcaagcgtgtgttaaatacataggtaaggtctgtcccaggtatccacccctactatacctacttctcagatgagaaaattgagttacagtgtggtgaaacttaacagtgaagacagttagtagtgaaactaggatttgaacctagacagtctggctc

SEQ ID NO: 137104 - DNA, 1137 bp, Homo sapiens
accaccagtgtatgaaagtcccagttccttaacttcactgacaattggtatgtcagggtttggtttcatttttattttgttgttaggatttcaaagggttatagcgggatttcattttggttttaatttacacttccctaatggccattgagcatctccactgctcgtttgctatccatttgcctattttcttttgtgaactatgttcaaatcttttgtccatttttttaaaacctggattgtttcttattgatttttgagagttctttatatgttctggatagatatctttgtcagttatgtgttttgcaaatattgtataccattatgtggcttgtgtttttattccattaacagtatttttcacacaagaaattttttttaatgaagttccttttttgtctttgatggattgtgcttttggtttcaaatataagaactctgcctaatccaaggtcacaaagattttctcccacttttttatcacaaattttatgttttcaggctttatatttaggtctatgatatatttgagttagtatttatataagatgtgaatctttatataagggaggtccactatttgcatatgagaatccaattctttcagtattgccatggcacctttgtgaatccattaaccatacatgtatgggtctttttctggcctcagtgcagtttcattgatttatgtgtctatcattttgccaaatattgcacatcttgacttttgtatctgtatataatgtcttgaaaccagatactgtgagtcttccaactcattattttattttggctatcaaatttgtcttgccataatttccagaatcagctttgtcatctgtaaaaataatttgctgggatttttattgagattgcaatgaatatatagatgagtttggggacaactgacattttagcaatactgagaatgttctaaaccatacacacagtatctgcctatttaggactcccttattacatcagtaatttgtagttttaacatatagattctgcacacactttattagatttatacctacatattccttttttagggttctaaattagtactgtttttcaaatttcaatttccaattgttctttttcaatatagttgattgttttatgttgacc

SEQ ID NO: 137105 - DNA, 347 bp, Homo sapiens
acacttgttacacacagggggcctgtggagctaagtagtgggcctaagcatctgtggtgtgttgtcaccatgcagccagtgaatggccacctttgtcctcggagagcttacagtttcactgagtcctgggggacccaggtctttgttaccttttccctttaactgaaggagagctagcaatcactaagcactgagccttatggttagaggacatcaaggatcctggcctcttgcagagcaagagatattgcctagttaaaggccacagacccctgggcctctgggccaccaatgaatgctcttggtccacagtggatccagtaagaatggcccaactctggcctgtc

SEQ ID NO: 137106 - DNA, 468 bp, Homo sapiens
gtatttaccacaaggctgcagttttcacgatgcatcagaattacctggagggctttttataacccagattcctgggtctctccctcagagtttctaactcaataggtctgggaatggggccaaagaatctgtatttctaataaatttctgggtgatactgatgttgctgatccagagaccacattgtgaggactgttgctatgaaggactgcatgggaataataaataccaaatactggatagtcgcttccctggtggggagagggagatgtggttagaaaaggtcacagaagagacttcaagatattggtaatgtcctatttattaaactgggtggtgggaacatggctgtttggcacaggtggtcttttaaaaatcattctttaaaatgtatgtatgcatagagtcacatttttataaatataatctattctataattttaaaatttactaaaaccaaaccaaaaa

SEQ ID NO: 137107 - DNA, 241 bp, Homo sapiens
gtggttcagctgttggtggtcatgagccatgattactgctgtgtgcccatgtggctgtgaagatggggctaggacccaggacagctctcagaggagggagcagagttggaggagagcttcttgggcccccggaggtgaggaggtacaggggaaagcttagacaacacccccaacacacacatagtgggggccaggcccttcctgtgcgtcttgaaccgcccgccaccctgccacacacaca

SEQ ID NO: 137108 - DNA, 394 bp, Homo sapiens
taatattgaaaactatcttcagtcaattgttttgtacaatgtttgtgcctttactgagctagtgttaaaatgcccctttgtacacacacgtacataaataatacaaagatatacatacatattgtttgtatataatggtattagagtattcttttttaaatttttatgggtagatagtagatgtatatatttatagggtacatgagatattttaatacccacgtacaatgagtaatatcaggatgaatggggtaaccatttatcctttctttgtgttacaaacaatccaattatgctcttttagttatttcaaaatgtacaataaattattgttagctgtaatcaccctgttgtgctattatcaaatactagatcttcttgattctatccaact

SEQ ID NO: 137109 - DNA, 355 bp, Homo sapiens
ggattatgatcgggtccctccccactctatctaatgttagcatgctgtagagaatttgggttttccaacctgcaagtctccaaattatttgactctcacccatcttggttgcagatcacagccaaaaaaaggcctctcttaacaaagccgtattttttccctctgtgcctctagtcagttttgagcctacatttatctctttcctgtggatcttactaaaagacacaagaaatagccaacacactgcaccattctaaatgcttttccagtgaatccattaatggtgtaccatgagtaggctcctgtctcagaccgaggagtcaataggtggcagcataactagctattttgttgt

SEQ ID NO: 137110 - DNA, 360 bp, Homo sapiens
cgatcagctcggacccgcgagaccccgactgacatggtcacactttgcagtgtttcatctgtttgttgccttttttattatctgtctcctccaccagccaataagttcctggagttccaagactatgttttttcttgtctgttgtacttttggcacctagcaaactggcactttctagaaaccaagtaaggccggtcgcagtggctaatgcctgtaatcccagcactttgggaggccgaggtgggcggatcacaaggtcaggagatggagaccatcctggctaccacggtgaaaccctgtctctactaaaaatacaaaaaatcagctgggtgtggtggcgggtgcctgtagtcccagcta

SEQ ID NO: 137111 - DNA, 243 bp, Homo sapiens
gttgttttcctctccaggactccaagtacatgtatgttggacctgcttgccatgtcccattatgtcccatacatgcccctctactaccacctgtattttccattcattttttcctctcattctttcagtgtggatattttctattgacctatctctgaattcactaatctttttatcagctgtgtctagtttgctattaaacccatctatttagttcttagttttaattattgtatttttcag

SEQ ID NO: 137112 - DNA, 284 bp, Homo sapiens
cttattatatagaccagactccatctgccatatattttttcacaaagcccccccagctcttcatttcatactgcatctgacttcttaatagacctaatgcagtagtagctctaataacaaacatcttaacatcaactttcaattaaaagcttcaccgaagtttatattcatttctctatacctttttcattgtttttgaaatggagttcctacttgttatactcctcttgggattatttaagaatcttggccaggcacagtggttcatacctataatctcagca

SEQ ID NO: 137113 - DNA, 143 bp, Homo sapiens
gtgacacaggcaagtggacaccaagaagaaggaccttccccttctgcctcccagcctgggcccccagtcttcctcagcatcccccagccttggccactaaacactgaccccaggaaggatgagggtctagtcccaagctgcag

SEQ ID NO: 137114 - DNA, 398 bp, Homo sapiens
caacaatcatgcaagggacgcgggctgcagtgaggatttccccccagtcactgccaagagacgcatccaaatgacagacaacgttaggcttttcctgggtcgggcgccatccctgtacaggcaaagggcccaacagcatcttcaacctgagcctgaagaccccagccccgacctggagatgagggggaggaagcgccgtcccagaggagcaagggtggaggccccctggtctctgggaggcgtggagagctggggccggtgcaggaagggaagctctggtgaggctgggaccttttgaggagggaagagcaagttacccggaaatacatcacaaatactgtgggatttaactgtaagtacaaaacagcttttccatcagaacttaacagctactatat

SEQ ID NO: 137115 - DNA, 478 bp, Homo sapiens
ggagtgatagtagtgccttactgttgagtgagtgattctgacccattcccagactgcaattcccagactgggaggcagagggctgagtctccggcagttaatgaatccggaaaaaatctcagctgtgtcagaggagccccagtgccaagttggcctggttttcatcccaagagagctgagaacatggtctggtgtcagacatccacgctgtgattggcacaaatgcctggtgctcctatgacccccctcgttagggctgggggagtgtgggagatgctcctggggctctgcccagagctgctgactgcctagatgtacccaccctgcagctgctgagcacggcggctcattgctagcagctgtgatcttctctggacctgcccatggcttttgggagccaccacaccttggagatgcttgggaggtgtcacctactcccaggggcagctaatgactgatgcaggggtaaaaagcccac

SEQ ID NO: 137116 - DNA, 439 bp, Homo sapiens
gtaactctttttcgttctgttgtttttaagctatatccacctaaaggttatttaaaccccaaactgaacacagttctctgggctagtctgaccactgtaaaatcaagtggaacttctataggtcctgatattaaacctcagtaatacattcagaatattttttataactcaggtgcagagccttaaatgtctacccattacattgtacattgttaaatttagtctattgcatctaccctcccttagcatataactccagaaaacactagaaatggctttctggagaccagctctccacccaggaataatgagcctgatgtcacctcaggctagccccagggacctctccagaaaagtctaaaaggggagatactgggtaaggagactcatggcttgcttcagccaaacatttacagcctctgcaaagctacaggaagga

SEQ ID NO: 137117 - DNA, 231 bp, Homo sapiens
ttccctggacctctacttcctcatctgtaaaatgggggtggtgatcattgccatctcatagggtggctgagtgggattaaaggagaacgtgtgttaagtttttaggaccttaccaggcatacattagcattctctattgcgagagaccctgcccggccacacaggatgggtgttgaagttcttctcggagagagttgctggctgggcgtgatcacacatgtagtcccagca

SEQ ID NO: 137118 - DNA, 269 bp, Homo sapiens
cgaggggtcacacctgtcatgacatgagcaggaagtcagtacgatgcccaaagaggatacgttgaagagttaggataacgctgttgtctaatgacagtgtaaagtggttgccggggaggagggtcagagaacgaaatctgtggctttcatcatcaggcctggtgttctgctcagcctctcttaaccatacattgctttgataacttttaaacatttttggttatctgtggtcctggttgttgtaggttgctaggtctaatgtcataact

SEQ ID NO: 137119 - DNA, 344 bp, Homo sapiens
agttgagacagtctcgctctgtcacccaggctggagtgcagtggtgcgatctcggctcactgcaacctccacctcctaggttcaagcaattctcccacctcagccccccgaatagctgggattacagggtgtgtctcaccacgcccatctaattttttttatttttagtagagacagggttttgccacgttggccaggctagtctcaaactcctgacctcaagtgatccgcccacctcagcctcccaaggtgctgggattacaggcatgagccaccatccccagcctcaggctcggctcttttcctcatttttgactaggggtggactgggtaggagggttttg

SEQ ID NO: 137120 - DNA, 551 bp, Homo sapiens
gggtgatctagaggatcccagtcgacggagactctgtatctgttgtcgcaagaagactcactctgctatttttatctagaagcactccgtttctccctaaaacacagatttatgacttaattctctttcatgtaggacacctgttacctctatttggatcttgtgcttccagtttctcactcgtttaatgaattctgtacacttagaaggcacacaaagcctgggctggggtacacgtggggatcacactgcaggctgtgaatgtagacaaaaatcctttgttgtgggtgtgatcactttaacaattagtgcatcaaaatctcttgtattcacaataagcaattgcatatttaaaaattttttatctccatttaaagatgtagccctcatgtatttagactttaccgtataaattttaattaagttcagttccactctcaagtccctagaattatggcaaaatgctttcaaagatagccgactttcttatagagttaaccagcctttttagtgaaatatgtgtccacaatctctcatctgcaattcaaaat

SEQ ID NO: 137121 - DNA, 371 bp, Homo sapiens
agcctatcacgtgaccatggacaaatcacttaatttccattttcatctacatacctgggataaagaattatcagaaccctagcagagagatgagggcatctgtgccagggaagagttaacttaacagtggggatgagaaattgaatacatacaggagaactgatggaataaatatgcccatgaagaatagtgaaagtagatttctcactgttggagaaatgagttacaaatttggaaaggaagaaagacgaaacaaactctgttgtgtttggactagaattgaatgtgtcagtgtaagttcatggtcttatttatggagaaaggtagataaatgaaatatacaggtaaatgtgtgtgtaacacacacactc

SEQ ID NO: 137122 - DNA, 278 bp, Homo sapiens
cgtactcctgcttggtgggactacaggggcaaggtttccgggctcacaggtgacagggacagcttgtcagccaccagcctcactctccagtcctgccatcagccacactccagggtcagaagaacaggatagcgaacccgaaagcccagcgccctttctacacagagcctcgcccgttccaggcttggatctcttcaaaaaccacagctttgtgttcaaggaggaacaaaaaagacatcaacaaaagcaacaaggagcttttggttttaccaaaagga

SEQ ID NO: 137123 - DNA, 378 bp, Homo sapiens
tctccgtatactggacagaagaaagttcccttgtctagtatcttctatgtcactcaacatttctgtctctcctttcagctcctggtcctttcctcccgtctctctgcatcctttacctggtcccctcataccttcttgcggacctggatttggcatggtttcctcactctcttgcaaacttcatgtcccccttctacagacctcctgcactcacttcctgatctcactccatccttgagagagatcatcacctcttttcttcatccttcactcacacaatctgcaaagcagacacgtgcacgcgtgcatccagctctttaccaccctctcttttctaataatgcttccccatcatccacctgattgaaacctcactct

SEQ ID NO: 137124 - DNA, 169 bp, Homo sapiens
atcagcaatcacttcatgcataagccattatcagaataacaaatcttttatacacatgcatacatgtacacttttattaaaaaacaaccagctgcaaatgctccagaaatgatggaccaagatatgcaattccagacacattcccagcaacaataattcccacataagt

SEQ ID NO: 137125 - DNA, 140 bp, Homo sapiens
ccgaggggagtgaaaatcggataaggcccccgacagccccaagcacaagtggcttaagccggccaagcagccacacggcctggctgggacatctgaaaatgtaagttgacactttttctactaaatcacaatttggtttt

SEQ ID NO: 137126 - DNA, 120 bp, Homo sapiens
ctgccccgctaagaagggccctctgagtgtggcggttatcacgtcacctcccttctctgccgtgctcactgcattccatgctctaggtgtgtggaactggagtccactagcctgactctg

SEQ ID NO: 137127 - DNA, 384 bp, Homo sapiens
aggaaggatggcccagaaaaagagaatttatgtctgaaatacagaatggattactatagagattacaatacaagaggtaacttcaaaggagagtagatttcataacaaaaatgcaagaacctgcatatccaaatgagaccactgcttccctttaccagggttcctctggaggcttggcacttactccaaagatgctgctgtctcaaaacatttatgtaactccttgttggaatgcagttacacagcaagtgacacattccttttaaatagctcatcctttagcaggtaaatttggtttttgctaacagtcgtatcctttgggaccaaatctggagcaacaatttgtattgggaagcataagttttaatcaaaggctacaacagc

SEQ ID NO: 137128 - DNA, 209 bp, Homo sapiens
ataaaatggggctttgctgttgattggatgctgtcaggaggcaggggtatatctttgattgagcatctcaataaatattattgagaagggaagagtagagaaaggctaaagctgaaactgataaggaagtaacaggatataggccaggatagagaaatgtttacggttttttgtggtttgtttgaactatgcttagataagtttatgga

SEQ ID NO: 137129 - DNA, 495 bp, Homo sapiens
tgatgttgtggggccttgagcttggggctccccagagggcaagagcctgagacagcaggtcaataaaaggtgagtggtcgacgggattggcagatcctggactcagcccttcactgggcaaatgtcaggcccagtggctgggcagcttgggggcatttccacctgaatgcagggacaagaccaccggccagtggcatcagactggcaaggtgaggaggtggccttttgtaatggagtcacctgtgtccagaacagctgtcctccccttgggccatgggaggacaaaggagagagccagaggaaaccagagccgaatgccacattgacttcagagtgctctcctggtggctggtggggctgggtggggtagtgtgagagtgaagccagcggcctgcaaggtttgtcctctgcctagttcacttggcctggagcctgaactgggagggaggattccggtctggctgtaagacttactggctgtgagcccttggagaa

SEQ ID NO: 137130 - DNA, 345 bp, Homo sapiens
gaaagggatgctttgcggcaaaggcgctgctgcctcaagcttgctttacatgcctctctagttcctctcgcactacagagtggtagcgaacaaaagcgttcgccctagaagcgacctgaatggaaaaatctgcacacgaactaatgggtttgtcacggaaagtagggaaccgggtctgcagcattccctggagacagactttctggttggttttcaagggtccaaggcagccatcagcccggctgtgccctcccaccctgcctcccacccagttgattctctctttgtgtaagtttagcccctctgaggtggtggagtgagagcatcccatcagatatatatacg

SEQ ID NO: 137131 - DNA, 474 bp, Homo sapiens
tgccctcactgtgtggggtgaggggaggctgttgaaggtgaggggtgccctcactgtgtggagggagaggctgttgaaggtgaggggtgccctcactgtgtgtgggggagatgctgttgaaggtgaggggtgccctcactgtgtgtgaccacagaggtttggggaggagttggagcctttgctgagctgacgtggactgctggcagcaggtgcacacattttgaggagctgtggtgagtgcgtcccacgaggcggtcggttccccattcatagccagggaaacggagacccgggggagatggacgaagacattggtgttgggactggatttgatcccaggccccaggctgcagcgtctgtgctttaccagccctgtggggtcctcaccgtcccgtaccaggagactcagagtaccaggggcttcaggtcgtcactgttgccacctctcccccctggtgagaaggacccacgtag

SEQ ID NO: 137132 - DNA, 344 bp, Homo sapiens
cagacttggccttaggaaaggtaagtaaagtggcaggattgggcaagttattacaccaggtgatggtaagatgaggatagaaagagaaccttatgggtcaggcgtggtggctcatgcttgtaatcccagcactttgggagggagaggcgggtggattacctgaggtcgtgagtttgagaccagcctgaccaacatggagaaaccccatctctactaacattacaaaattagctgggcatggtggtgcatgcctgtaatcccagctatttgggaggctgagggagaatctcttgaacccgggaggcggaggttgcagtgagccgagatggcgccattgcactcca

SEQ ID NO: 137133 - DNA, 408 bp, Homo sapiens
tgagaaattcatcaaggatgttttaaattcagaccataacgttttagaaataaaatgcagtttaccaaaacatttgtctcttttgttgttttagagaatggagagggagtgatatttattaccttttcatgttctaatggaaatatggagacataatatcttctatactatgtaaattcaacagtattggtaaaatatattacacataaaagcaaactattactatacaaattaactgatattatatttgttagaaatcaatagccttgggttaagaaagtcagaattgagacaaacaatcatttatatttaggtgctacagactgtttgtgtcgccccaaaattcatatgctgaaacctaatcctcactgtaatgatgttgggagatggagcctttgggaggtgatt

SEQ ID NO: 137134 - DNA, 410 bp, Homo sapiens
actagtccacggttggctgagtatggattttgattcatatactcaaccaaccgttttttttacagtaaaggtatactcatatgctgggccttagggggttataagttaatgtataactagaattggagctagcaaatgtcactgtttgtaaattaggaactcagaattataaaatgtatactctccttcaagataaatacaacaagtatattacgtacactgttattaatttaggtaagagccaaccgtggactagtgtggactagtagccaaccgtggactagtagccaaccgtggactagtagccaaccgtggactagtagccaaccgtggactagtagccaaccgtggactagtggccaaccgtggactagtagccaaccgtggactagtagccaaccggggtaccg

SEQ ID NO: 137135 - DNA, 334 bp, Homo sapiens
gttaactaatggccatgtgatgccctaccaagtttgaatatattctgggcctgaagatattgcatacgtgctctctgaaagttgaattttcttggggcagagctacccatctctgaatttacatttgaattacagggaataacatctcaggtgccatggtttgacttcatctaaatctttgagaaatgtttcatagtaatcaaagcttctctttctcttcttttttcccttccttcctttatgggtctagcactgacaacttgaccacattgacctaaatattaagacctttttttggtttctctgtacccactactcacatggccactcaata

SEQ ID NO: 137136 - DNA, 140 bp, Homo sapiens
tgctgggattacaggcatgagccatgatgcccagccagaatagtttttaaattgggattattttacatgaaaatctagatttctggcctccctcacttggaaaaaaccaaaaaacccacattcattcttgcatgacaaga

SEQ ID NO: 137137 - DNA, 201 bp, Homo sapiens
ccactggcatttccgggggctggagcatgctcaatgccctgcaggggaaggaggacgagactgggaggaggtgggaagaaaaacttctgtctggtgtggccaagagagcaaccttgcagcctttcttcccggggaccattttcagagcgaagacggagaatgcattaaaactcctggtgccgaatggtgtgaacccgggag

SEQ ID NO: 137138 - DNA, 122 bp, Homo sapiens
tcccagtcgcccacttgcccttccttgaatctattcttactttaaggacaagatctctgggtgaggcgtctctgaagccagtttctgtgtcctaagcaagtcagtgtcaaagtggctttctt

SEQ ID NO: 137139 - DNA, 194 bp, Homo sapiens
atataatattatgctgcctttttagtcaaaagtagaattaggacctaattcaaacatactgaatgtctattgggtacttggcgctttttgcatagtgagggagacattgaagtccactttttgtagaaaaggaaacacacattttttgatccgctcaagtgtttggctttgggcaagttaacctgcctacctgt

SEQ ID NO: 137140 - DNA, 556 bp, Homo sapiens
  misc_feature (17)..(17): n is a, c, g, or t
gagattaattacacagntgtcctggacatccacaggctctcagacaaagataacattatagaatggtaaggtgaaggggacatgtgtaagtcccaggtgccacagcagcacatttgaggggctcccaacccaggctgggtgatggtcagggagggtgaggcaaggtccagggaggcaccagaaaaaaaggaacaaagggctttgtgagagcttgggagagctatcatggaaagaatcagaatttttgtgtcctttccagttcttatttttgaacaggttgatcctatttgtatttgatttgcatttgggggccaccattattctcacccaactctgcctctcgaagttaatatttggaaagccttggaaccctccttctccctacctcacccctgcccatcctggcttgcacagagtttgttttttgttagttaagcaaagccaggaatgtgaatgaaaagtgaaactgaggggtaatttgatcagctctgcctgccccgcttgctttccattattttttttccctttacccattaagctgaaggccaaggtagct

SEQ ID NO: 137141 - DNA, 546 bp, Homo sapiens
ctcaagagttcattcctaaaatccaaatttccttctctggagataggaccagatcatagctcccaatcttttctccagtttttgttttacgacatttcggatttgagattctgtaagaagtgacctaatgtgagcatttcctgatatggaggagacgcaaaatagctcagggaaaaagttgatcattagaaaaatctgtggttgtcccactgtctcatcgtgccactgggagtttctggcctccgctggcatctctgatgaatgttctatgccaggacaaagaaggcgggcatgggccaggcagtccctccagtcagggaacggtggcctctcccagctgccttggtgtttaggaggccctgtaagggtatttgggatctcaagagcctctgggacttacgggcaaagggcagaccttaagagccagtccctcctcccccaaaatgtttagcaagccagaaattcccctttactgctaagtcaaaggaagatgttctttgactcttcagggagcataacgtaccatcctttgatggtcatacacat

SEQ ID NO: 137142 - DNA, 236 bp, Homo sapiens
agctggggctattaagatgaatacaatatcaccctcaagaagtaagagtatgatgggaaagatactagtttattcctcagtctgggataacatttttagagtaaaggaaagccatccaactcccaagatggttagaagcttcaaggaaccaattattatttttgagggaagaagggaattccaaacatgaaggatactttgaggatggctcactggttccccctggtggacattaa

SEQ ID NO: 137143 - DNA, 207 bp, Homo sapiens
tacttcacagggagagtacctacttcctaacccgcccggaacctcactttaccatgtcatcattgttgagtcaaagaaatctgagagagactcccaagatggttagaagcttcaaggaaccaattattatttttgagggaagaagggaattccaaacatgaaggatactttgaggatggctcactggttccccctggtggacattaa

SEQ ID NO: 137144 - DNA, 124 bp, Homo sapiens
tttattagaggacaagcaatcttacatcctcaattatttacttaaattgtttattaagcattggtattaagaaatacctttaaggatatgtgtccacaaacaattaatattttactaccttcct

SEQ ID NO: 137145 - DNA, 245 bp, Homo sapiens
tacctctttctcagatgcatagtttgtgcatattttctcccattctgtaggttgactgtttactctgttgatagtttcttttgctgtgcaaaacctgtttagtttaattaggtcccacttctcaatttccggtttgttgcaattgcttttgaagacttggtcataatgcctagtttcttgagggttattatcaggaggagacattggattttatcgaaagctttttccaggtctattgagatgat

SEQ ID NO: 137146 - DNA, 684 bp, Homo sapiens
ggagcaacatgctttgtttgggctcttgctcttttgaccatggaatttttggcaggcatggaatgtgtctacagacaagaagccagagtcaatgtatggtttcttcatttttatcccttctcttagtaatcaaagccctgtactgcctgtagtacaatgtctaaaaagaattgtcccatatattttgtccagttttctaattgtttgctatagaaatgaaagtctagtatccgttacttcatccgccgtgagacagaaaaccttcagccatagaccaggatccctaacccatgctcccacaagagttggaacctgctgctcagtaaatatataaattttatatcctgtggcaggttttatccagttaggcttttcaattaatactatagctgtttgggtctttaccctcttgtttctttgtttagtatggttaaaaatgtgactcatatttgctacattgtagtgagacttgtagtttttagaaaatatactttaaaagtagtttgaattatgtgtaacttttaaaacttttaatcaaaaatttttttatttgaatttttcatataaacatattttttcattcaaatcggttatatttaaaaaccattaagctaaaatgttgaatagaacttgtgaggtttcctatcacttaatatagtttaaactatgaacaaaggacaagaa

SEQ ID NO: 137147 - DNA, 429 bp, Homo sapiens
tccactagtgtaggcaggagcagaggcgatcataaggacacggttccttagggctttattaactcttgctattcatcaagaacagaaaacaagagaagcaggcaggagcagaggcgatcataaggacacggtgccttagtgctttattaattcacactattcatcaagaacagaaaacaagagaagcaggcaggagcagaggcgatcataaggacacggtgccttagtgctttattaattcacgctattcatcaagaacagaaaacaagagaagcaggcaggagcagaggcgatcataaggacacggtgccttagtgctttattaattcaccttcttttcctctccccctgcccacatcccccaggtggtcactgtggtgtttttcattcttgttataagagacagggtctcgctctgtcacccaggct

SEQ ID NO: 137148 - DNA, 477 bp, Homo sapiens
aatggagagtaatcagctaatggctcattatttatgtataaaatgaagatgtcctgcacgaaaatcaattcacattgagttcaaatgcacactcacattcatctctaagtaacttattcccccactacccccatggaggattttaacaaacccaagctgggaagatgaatttacaacccaatttgttcttttctccaaattgaaatatcaatgcatccaaagagagatttaaaatcaatgacacttctaaattcaacacagatacgctgtctagcatttcaagactagaacttattgttaaagtgagtactgtttatactgtttattctgtttcagagcaaaagctatacttaaaaaagttgagatccaattcattcatgtacaggaagctaccctgacaggtttcattgggttttaaaatcagagttgagtggtcgcttcaattttacagaaatggagtttataaaatgtaaaccc

SEQ ID NO: 137149 - DNA, 525 bp, Homo sapiens
agaagtagagacaccctttccatcccagagaggagtcctggggcccatctgccgagatcagagtaggatttggaacccaagcaccagggaaccaatgttaggctctggttttagatcctggcgggcagcactgtctagaaccacagcaggaggtgatctagattagactaggccatggtcttgggctggaatctaaatttatagtgggttggatttgttgctcatctaaaatggtcattctggaaagtaaaaattttagactttgtaagcattcagtctctgtcatgagtagtacttaactctgccattgcaccttgaaagcagtcatagacagtgcataagcgaatgagcatggctgtgttccaatcaaacttgaattataaaaacagacaacaggccatggaccatagtttgccaacctctgatctagaaccttattcctcctgaggggtgtgtagattttaaacctaattagacagtgatctaagcaaacaatgttgacatgtcaggctggaacctagatcc

SEQ ID NO: 137150 - DNA, 363 bp, Homo sapiens
aacagcaactcccctaggaagcctctctgatcaccctatctaaagcaggtcccccccatctctcccaaacacacacaccattgttctctatctcagcccaaagttttcattcatggcacttaacacaattataattcccacccccagctgttttttaagagacagagacttgctctgtcgcccaggctggaaagtagtggcgtgatcttggctcactgcagcctccactgcctggcctcaagtgattctcctgcctcagcctcctgagtagctgggattacagggccaccaccacaccgggctcaattatcattgtttacttagtagtttgtttaccgtttgaggtctctcttttccatgagg

SEQ ID NO: 137151 - DNA, 264 bp, Homo sapiens
tttacactgaagttgttgaatggatggattttaatccctgccatcctaaaatacactggcaacaagttgtccaaatgaagtcaagacaagggaaaaccaaactaatatggtttggctctgtgtccccatccaaatctcatcttgtagcttccataattcccatgtgttgtgggaaggacctggtgggagatgattgaatcatgggggcaggtctttcctgtgctggttcttgtgacagtgaatgggtctcatgagatctgatgg

SEQ ID NO: 137152 - DNA, 326 bp, Homo sapiens
tattcagttgatggaaatgagttgcttaatcaaacgttgaatatagactgtagaaatcattttgttactgacacgtttttcctcaactctatgtatttatgtagcacttattactatagtgtctagatatcttgacaaatgtgtcatgccaacataaaacactatagtctctggccaagcctatggaaatccatatggcacactgaactattcaaaagcaaacacaaaagtaaatcaccctgtgtgatcaggcattgaatattatccttagcttatcacggtatgaatttctctttgcatgcctgtcccaaacactcatggagtaa

SEQ ID NO: 137153 - DNA, 265 bp, Homo sapiens
aatcattcctgcatctctggtatgaaacccacttgatcatgatgtattatcttttgatatgtgattggatttagttagctagttttttgtttttgttttttaggatttttgcatctatgtctatcagggatactggtctgtagttttcttttgttaagtcgtctcctggttttggtatttggatgatactggcttcacagaatgacttagggaggattccctttttctccacttttggaatagtttcagtaggattggtaccaat

SEQ ID NO: 137154 - DNA, 240 bp, Homo sapiens
accaccatctgtctccagaacttttcatcttcccaaactgaaattccgtcctcagtaaagactaactccgttccgttccgttcccctgctccccagccccagcccttggcagcaccaagcctcattcagttttaaaatgcaaacattcaaagaccaagcctcattcacaccttcggtgtaagttactttcatctgcgaaactcccatcactcagaaaggaatgcccaggtaaagaccgtg

SEQ ID NO: 137155 - DNA, 517 bp, Homo sapiens
ttccttctttttatgcttgtgttcagaaatccctgtgacacctgtcacagactaacaggaaatgtgtacaggattcacaaggtgatgacacttgactacagataatctcaggcttggtttcattgtcttaaatagcaatggcagcataatgacagtgtggttagactcagttatgcgtggactgcaggttttcacatcctggccattgttccaggatccctagttgcattcatgggagccttttgatggcaagtgccggaaacaaatggtgctcacttaaggagaaaggggaaatgtgttttaaggatataggagcatcttgtggaatccaaggacagtagagcagttgggccaaaaagaaaactggaaattggaaagctgtccagacactttccctgctgcttccatctgtccctccctgaaaatcacttcctccttcccttcccagattgactctctcagttctctgagccttatgtttagagcactcaagctatatgttgttacaatatcatct

SEQ ID NO: 137156 - DNA, 337 bp, Homo sapiens
gactggcctcccctttggccatgctgatctgtgtcccaaccctcaacctggttccacttccagatctgcctgtcctcagctcacctttctaccttctgggcctttcaaacttggatctgtcagtcttgcccactccatcaggcttcctgttctctcggtctggcccactttcttggctggatcattcatgacctttctcttgccaggttcctggatgcctatgctgagcacaagttacagttctgggcagtgacagctgaaaatgagccttctgctgggctgttgagtggataccccttccagtgcctgggcttcacccctgaacatcagcgagact

SEQ ID NO: 137157 - DNA, 400 bp, Homo sapiens
tcaaacacacgcccagttcacctctctcagagcaacactttttctcctcgcagcagaggttcccccagacacagacacagacacagacacacaccccaagcagtagacagaaagagaagggagagagggggtgtcagaaaaacccggaaggaaggaagctggacagacagacagtagctgatcctagcttcattgctccagagagacaccctccagactcctagacttcaagggacactatccttctcagaaggagagagcagccctctgtctcttctgaaaccaaattccagcagccctggaataggacctaccccagcgcaacaagaagcctaagctcacttctcttcctacattcttccccgagggttcctttggatcaagacaggggccacctccc

SEQ ID NO: 137158 - DNA, 465 bp, Homo sapiens
gctagagatggtttaggttgtgctgctcggaggaataaatgtctggacaatgagataagacccttcgtaaatactgcaccttctctttcctttcttacttatttgcatgaacctgttttacagcatcctgcactgtcagccaaagacaataaaaaaataagtcacctcaccctgtatgtttttagcttggtaaaatgctgtcatatcttttacttaacttggtcacttggttagtaactaggtaagcaaacctatttatagccatgtgcctattaaaacacactttaccataaaagtgagatgcactttccactaaggatagagtttcatccaatagtcctcttgacaagcttcagaagttttctctttgccatcatctacatacctggaaaggcactctgtaccaaaatcagcatactgaactagcaaggacagacagagatgagaggaaaagagaccatggag

SEQ ID NO: 137159 - DNA, 450 bp, Homo sapiens
tggcttttcaccacaaggatctcaaaatataactttgcagttttctgaacaccaaaactcagttaaaatgcaaagatttaggcaaaaaagaaagaaagaaaagaaaagctttggggtaggaagatagtaaataagaagaaaaaaagaatttaacttctatatgattaaggaagaaaataactaatttttcattttattagagaaatgtacacatatctgtattctcataatatacccaggtgtattttactagttcatttgccaggtgggtccagtcttttgatcagaatcccagtctatgggtgggatcagacatagactgcatgccccaagtatttaatctggcataaagtgatagttaatagcccagtagatcacatgggctacagttccacccaccttattaactaaactgataacttggcactccacacatcccctaccctgttt

SEQ ID NO: 137160 - DNA, 379 bp, Homo sapiens
acatgaaaagagggagagaggggacagccacgtaagttacaaagagatgcctgagaaagacaaaaagggtatgacagaaagaagcgggggcaacaaaagccaagacacagaaaccaagaaggacaaaccccagacaggggagaagggaccagagagaatggcagagaggaacagtgagggtgacagagtacccaggctggggcagagacagaacaaagccagccccacacaggtgagagaagcacatggtgctcagggagagccgagcagggccccggcactcaggagggcgggggtgcaggctcagctgagggcctccttacccttctccttggccttctgggaaacactctcacccctccccaacttaccatggtgt

SEQ ID NO: 137161 - DNA, 328 bp, Homo sapiens
tgggatttggtcttgggacaaagtccagaaatagatgagaaggaaatatagcatttacaactttctagaattcataccaaacagaatattagaaaaaatttaggctatagatagtgtttcggttgaaatatcagctcatatacctgaattggcttggatttatacccaggtatgcaccaaggaccagctccatctggaaaactgatcaccaaacttcaactctggaatataatgctccattcagcactagcacagggttctcatttctcaggggttctcagcaaaaggatcacctggtgaaggtgcttgttaaaatgcagattctccg

SEQ ID NO: 137162 - DNA, 475 bp, Homo sapiens
gtttctagggttaattttttttcatcttcctctcattaatttaccacttttatctgactaagataccttaagtttctttattccttggattggtagtatagtgaaatgattagggcagggctttgaagccagagagtcctgggttcaaatcctggtgtggactctatctttttggggtaagaacctttaaattctctgactttccagtgtcttttaaatgggtgaaataacccttactttatggaatgttgcaaagatgagagaggatgtatgtaaaatgttaacctattacagagcttgatatggagtagacgaattctaaaattacattgagccattttgcctatagtggtgttagaatagaaaagtatactcatacattagaattgtgcacctagagctaagtgattccagccctgtggaacccgtcaatgccagaatggcatgtaggactagatagatgaatgtcacctga

SEQ ID NO: 137163 - DNA, 769 bp, Homo sapiens
tgatgttgtaggacaacatactactcatgcaaaactatggttaaaaaaaaaacaagcaaagcatcatggatgtacttctgaaaagtgtaacatttcctgcagatgagccccagacaggtgcttgaggaggtcttatagaagaaggcattgttatcacaggagaggacaactccatgtatgttattgcccctgaagaccttccagtaggacaaaatgtggaggtggaagaccacaatgttgttgatcccaaccctgtgtagggctaggccaacttgtgtacatttttgtataactgtacaaagtgtttgtgttttaagcatagtgttatcacaaaagtgtcaaaaagtttaaaaaattaaaaagttcataaagtaaaaaagttacagtaagctaaggttgatttattattaaaatataaaaaataaattgagtatagtctaaatgtatcatgtttataaactccacagtagtatatagcgatgtcctaggctctcacattcacttattacatattcactcacccagagcaactttcagtcctgcaagttccattcatggtaagttccctacacaggtgtaacccttttttatcttttatgtaatatttttgctgcatcttttctatgtttagctatgtttagctacaaaaatacttaccattgtgttatagttgcctatagtattcagtacagcaacatcctgtatgggcttgtagccttcggagcaataggctataccatagagcttagatgtatcgtaggccatgcca

SEQ ID NO: 137164 - DNA, 424 bp, Homo sapiens
agctgggattacaggcatgcgctaccacacttggccaattttgtatttttaatacaggaattttgtatttttaggagaaacctagctgtgacagaaggcaaaaagggatttagagtgtctcacggtgattaaaagcttgactaagaaatcatacatgtcacttaactcagaaatgcatttctatcacatgctgaaaggccagaactacacagaattaatcacctccacctcagggtttaaaagagtacatccacagcagcgttttacataactgaaatgcccaacataaaggggttaaagtttccaggcagccaaaatagatgtcatgaaattcaggcactaaagttgagaagcacatgggtagcaattaagatacacttgtaagcctgataacgagacatttggaatcataaaaactaaatat

SEQ ID NO: 137165 - DNA, 196 bp, Homo sapiens
cccacggcttgattagaaggtgaggttgtggaaatgctaggccatgttgtttatatgtgagcagcagaaacattcaaattgggaatgtttctgtttacctttttatggattacatcttgctaatgttaaaatctttccctgggtatagaaaaggcatgtagtggctaatattatgacttaaggttcctgatcaaga

SEQ ID NO: 137166 - DNA, 481 bp, Homo sapiens
gtctacatatcaagccagcttttttccacttaattaacatctcatattcattaaacaattattaataaaatacctaccatgggataggcattgttctaggtactaggaataaagtagcaaatgaagcagatatttaaaaactcagatatttcacatctgggaatctgaataaattacatgcgatacaaaaaattcttatactcaaataactccactgttatttataatggtgaaaacttgaaaatatactacataatagtgggaatacttcagtaaattatgacacatccactcaattgcatattatacagctattaaaaatacagcccataataagatataaaaatgtctgtgttgtaatgttgactgtaaaggagtaacataagatatggtaagaatgtagataaggtgagtcattacatgaacatgttaacaacattaatcctttgttaatgaatctatgggtggcagatttgtactc

SEQ ID NO: 137167 - DNA, 772 bp, Homo sapiens
ctgagaattcctcctcctgggactctcagaggatccagaactgcagccgtcctcgctttgctgtccctgtccctgtccatgtatctggtcacggtgctgaggaacctgctcagcatcctggctgtccgctctgactcccccctccacacccccatatacttcttcctctccaacctgtgctgggctgacatcggtttcacctcggccacagttcccaagatgattgtggacatgcagtcgcatagcagagtcatctctcatgcaggctgcctgacgcaaatgtctttcttggtcctttttgcatgtatagaaggcatgctcctgactgtgatggcctatgactgctttgtagccatctgtcaccctctgcactacccagtcatcgtgaatcctcacctctgtgtcttcttcgttttggtgtcctttttccttagcctgttggattcccagctgcacagttggattgtgttacaattcaccatcatcaagaatgtggaaatctctaattttgtctgtgacccctctcaacttctcaaatttgcctgttctgacagcatcatcaatagcatattcatatatttccatagtactatgtttggttttcttcccatttcagggatccttttgtcttactataaaatcatcccctccattctaaggatttcatcatcagatgggaagtataaagccttctccacctgtggctctcacctagcagttgtttgctgattttatggaacagacattggcatgtacctgacttcagctgtgt

SEQ ID NO: 137168 - DNA, 200 bp, Homo sapiens
gttctatcctgatgttctaattcttctccttagagtcaaaatcacccataatgtactgctgtagtccaaagccccaccagccattgtgccatgatgatagaaatctcatgccattttgactcttaataactgaaaagctggccgggcgcagtggctcacacctgtaatcccagcacttttgaaggccaacgcaggtaggt

SEQ ID NO: 137169 - DNA, 331 bp, Homo sapiens
acagtcagagggagataaccttgggacagactacaggttcctgtcaagtaaaacagaaggttgagacatttcctaaaagtattagtacatgtaactttgttttcagaattttgacatatataatctaacctgcagttaccccaaaataagtggagccaagtgtagagtacttgaaacatagagtttggaatacctcttttgcagacagcagcccacataacaaaaataatgtgccaggtctgggaaagtgactaataatcagaactcctaggactgggctctattttcctatagaatagctgttatcagtgtgtttagatctacaaaatag

SEQ ID NO: 137170 - DNA, 510 bp, Homo sapiens
tcagggaaggtgtcactgtgaagggcagaggctgagctgtgtgcatgtctggagagcagcattcttggtagagggcacagcaagtacaaaggcattggtgctttcctggcaaggaggccaggatgtctgcctggcagtgagagaggagttaggtggtagtgaggaccaacgggttggggggttggattgtgtcaagtctcgaaggcctctagaaagactttggcttcagtgagagcaacaggccatttgaagggtttgcaggagaggcatgggatgctgctgtcttagttgtgaagagtcacctggcccactggattaagaatcagttgcagggaggtaagatcagcagcatggaccagtcagggggctgttggaatagtccaagtgagagatgatgacggcttggaccctggaggtagcctacggtggagatggggagaagtggttggttctggatagaatttgaaggcatggtggaaaggactttcagatagatagagagcacagaat

SEQ ID NO: 137171 - DNA, 402 bp, Homo sapiens
caagtgggtggccatgaagagctaccaatggagactgaaggaaaaccaagaaggaccagagagagaatggagccaggaggctggaaggagagaggcgggttttgtgtcaggattgcccagagctccccggagaggagcatctctcctctccatggcagagcacagagggtggaacactgacgtcagatcttcttcaggccctgaacgtaagaattccttggtacctggtctgctttgagactgacatgctgtgtttgattagtttgacttcgggatgccagctaaatgctgtttgctcagcatatgcctgaactggaaatggttccatcacaaaacaaactgaatcaaatagaacgtgggggtggctcagtggggacacagagccagaggtgagtctccttc

SEQ ID NO: 137172 - DNA, 806 bp, Homo sapiens
ccaatacattacaacaactggcacatagagctatttttctgccacggtaattggtgcttcagtcattaacctagctgacaatcatacctctacacacaaaaatctggacaacctcttctggtctttcccatagggtcagctgagggaagaccaaaagaggggactgagaagaattaaaagtacatcttttcaccctcaagaaaggaaaagatcactctctggcctgagtcccaaggagtgaacaagtgcccagcgttaatgagagataacttcgcatcagtgcacatgctctgaaaatcagccaatccctgatagcctcacttgtgttgtgcttctgaaaaggagccagtcagcaacagcctcgctccagtaactacgcttctgaagatcagccaaccgatgacagctccagctcctgaaagtcagcctgtcagtgacagcccctcacttacagacaacagccaatctgccggtcttcaccccggtgacagtgcttctgaaagtcagctaactccagtgaccaggggcacagctgacgtgctgagtcccccacactctcacctctggaacccaccagcctctccaggatgggcttcttcaaacctcatccaagatcagctcaggcttgatttgggagagaccgttcctcccttacaatttcaactcttccttggaggaaaatgagaagttttcctccataacagatattgagtgtaattcatcattagcttacatatttgcaaccattgtgacagttcattcagcccctattcacagttcagacttgccaaagatggacattaaga

SEQ ID NO: 137173 - DNA, 819 bp, Homo sapiens
ctgcaaattatcctttcagacatatatagttaataagccaattttaaaacaaccttatttttaagctttttaaagaactctccagttcagctgaatggtaaatggtaacagagcctaggttattacaagccttttgaaaagaaatagtgctggtctcgaactcctgacctcaggcgatccatccgcctcggcctcctaaagtgctgggattacaggtgagagccactgagcccagccaaaagatcatttgattttaaaccagtttagttttatgaaactgtgggatgtcagtggagatatggaaaatatacctctaaattgaaaaatggtcaaagttggaaatttagatgtaggaaaaatcggcagaggggtgatagtgatcgtgtgttgtggttgtatccaccgggcatggttttaacactacaccattgtcatcaatgtatagatgcagttggtgggtattttgattatttgtaatttaaggtaatcagaataggtacacatatctacttatgaatatgttaaatgtgtgtatgttttttcaactactttgaaaattaggtataagccatggctgaacacagagatttggaagttggggggctgggcacatggtggctcacacctgtaatcccaacattttgggtagctgaggtgggcagatcatttgagctcaggagttcgagaccagcctgggcaacatttagtgagatcccatctcttaaaaaattataaaaataaaaataaatttaaaaatagagatttagaagttgaattataccttaactgacccttagtagagaaaggctttggaggaag

SEQ ID NO: 137174 - DNA, 329 bp, Homo sapiens
aaactgttaatgggagtgcttgcaaaggccttggtgcttttttttctgtttaataggagcaacatcactttggatcaattatttaatttccttatgtcagagttctttcaatttaaaggaaaatatttcctttcctcattcctttttctctgaggatgaaccagacattggaagttgtagcctgggattgtactggagctctcactgtggttgcattctttcttcacattcagcgtcctccttaaagcacacattttcacgtacatctattaaattacctgggagagagttctagacactatcagtcagtaaatccagttgtctcattt

SEQ ID NO: 137175 - DNA, 218 bp, Homo sapiens
tacctactgtgtgccaggtggtagaaaagtaaacacgattaggttgatgtcttgaaggagcctacagtctggggaaacatatgaacaaataagtataagaaatggtgagtcaggaatatgtatagactggggcttaaaggaggaatgtttggttataccagggaatatcgggaagggctttgtagaggaggtggcatttagtgggtcagaatatgaac

SEQ ID NO: 137176 - DNA, 559 bp, Homo sapiens
agctggaccgggtggagcattgtagacacagaaaggagggcagcagggtaaggatgactgtgaggaggaaaggagaaggctgagcagctggcagacgctgggctgtgcagggacttgagctaagctgtttagggaaaggtgtgacatgaccacaagctggtgccagagtgaccacagaagagtggcttcctgggcatctaagagggcacagtcagggcggtaagtggcttagaagcagggccgcgatcagtattgtgtacgttgtgtgatgactctggaggggactgaatctgggtatgcagctaaacattcaagttctcaaaagcgtgtttcaaatagcaaaactggagaagccctttaatggagtttgaaaaaggcacaggagagaagtctgacgtgtttcagtgcagggtaagggaagaagtggggagggattgggtttggagggtgtcacgaggcgacaggtgagccgaacaaataggacattgctaagcaaggctgggaagaaagggacgacgggcagaaggcacagcaaaggccgaggcggggtgtttggaac

SEQ ID NO: 137177 - DNA, 380 bp, Homo sapiens
ggtttttctccagaggctccccaagccctcctggaattctctgtttgagagtctgcggggggacagggagacaggaggcgggggagtcctagaggccttcctgacgggggcgtggaggggccacgtggggcaaggggaagcacagggacctcttgtgaccttgggcaagcccccttcctctctgaccttgaccagcgtcctcatttgtcaagggagcggctgggtgacctctaagaactcggaggccgaggccggagtcgcccgagtgctccgcccagcctcagtttccccctctgcctccccaagatttctaaaagcacttccggctctgaaaacaaaccaaccaccagcaggcggcctgggcttagggcaggcagcgc

SEQ ID NO: 137178 - DNA, 328 bp, Homo sapiens
caaatagtgtgtgaggaaactctgcaagtgggagaattctgtgggaaaaggaaagtttaatttttcacatctctgaatggacatctttctgaagggcgccagcccctccatacctgtgggtatttctcgtcaggtgggatgagaaactcagaaaagaaataagacacagagacaaagtttagagaaagaacagtgggcccatggggctagcacactcagcatgcgagaacctgcatcggtgccagtctcttgagttccctcagtatttattgatcattatttttactatcttagcaaggggagtgtagcagggcaacaggtggggaga

SEQ ID NO: 137179 - DNA, 274 bp, Homo sapiens
ccttacatttctttagttggattctcttataaacaattatgaaaatttttagatgagattggctacattaaagaactggctttagtattatagcatagtagttaacaaggcctaactcgttaatcatagtgctgtttcactgataaaattttgcgtaggcctcttatggcagctcatgcctataatcctagcactttgggaggctaagataggaggagtacttgaagccaggagtttgagaccagcctgggcaacaatacgaaaccgtatctac

SEQ ID NO: 137180 - DNA, 739 bp, Homo sapiens
taatatttttattgttcagcttcatcttcttaagtcttctgcatacttagttcaaagagaagtgatttacaacataggatctgaagaaacaaaagtatttttggttcaagttgctactctgtttaaaaggagaatccaaatagccactcacctgtagtcttagctactcaggaggtggaagtgggagcatagatcacttgagcccaagagttccaggctgcagtgagctttgatcttgccactgcaccccaacctgggtgacagagtgagactctgtttcaaaatgacaataataggctgggcatggtggtccacacctgtaatcctagcactttgggaggctgaggtgggaggatcacttgagcccaggagttccagaccagcctgggtatcatggagagaccccatctctacaaaaacgaaaattagccaggcatggtgttgcacacttctagttccaacgacttgaaggctgaggtgggaggatcacctgaacccagggaggttgaggctgcagtgagctgtgatcataccactgcactccagcctgtgtgacagagtgagaacctgtctcaataataatgataattaataataataatcataatagaaggagaatcaaaataaaacatgcagatggtcaacaggtacatgaaaaaatgctcaacaccactaatcatcagggaaatgcaaatcagaactacaatgaagccggcctggtggctcacgcctataatcc

SEQ ID NO: 137181 - DNA, 363 bp, Homo sapiens
atgggagaatgtgcccactcccacccccagcgtggagacactggccttccttaagccgaaggatggcccttccccaggggaccttggcctccacaggggacctcggcatccacagtgggctcattccctggaggggcaggcatggactcaggggaagggaccatacctgccccctctgcctgtgacgtttgggacttctgaccagacctgaaaagtcagattctgggaaggtgagggagtgacagtgggggacttgggcccaaagaactggtcctcgcatggcccagaggtgtgtgtgtccccaacctctgtgctgaggagagagacagcggaggtagctgggccagagccttggcttggttc

SEQ ID NO: 137182 - DNA, 547 bp, Homo sapiens
gtgaatcttttaaaaatgctgatgctcctaggttataaaataatctattattttgggcctaggcccaaagtactagactatgatgaagatcccacaaaagtgattgtttttctataattacatatacacatatatttattctgtagttacatgcatagatagaaaaaagacttggaatctaaaacaaaagcaaaaaaaaaaaaaacaaaaaaacaaaacttggtggcggccggcccgtgggcccttgggaaaagactcttccaacaaccacttcgcgtgggggcgccgcgggcccacaggtggggcatacgcggaacaccgtggccaaagcggggttccccagagagaaaccggggccatgagaaatgagtggcttgggtttttcctccacaccatttaaaaaaacgcccgcgggggggaacaccgcgatgtgtttctcggaacaaaatctcccaagaggggatttccgagaaggccctatcgcggggtcttctaacaacagcggggtgtcccaacgggaactcgtaattatcaaatttaccccccg

SEQ ID NO: 137183 - DNA, 592 bp, Homo sapiens
acataaaaggttctgagaagtcctacagtgagcagagttgtttacattttttaaccagtgtttcccaaacttatttggtcacagaattcttttcttcaggtagcgcaaaggaaccagtgttcctcataacaacttattttgggaaatgtacaataaattgccattgattagtattaaatgtgtaatttaatatgtacctgtcccaaaaaggtagccattggcagaatttgctgaagtcccaaaaatgagcccattgtattttatgtcagaaaaaaaaaatctaacatgcctagactagtacttatattatctttaacaagttgaatttatttccagaatatgtgtttcaacccttacagcctgtatgttatttaatcaaatccaaacacccagtttcttatacctgtgaaaagctaaaaaatgaatatgatcccccaagccattggttttttttctgggcttcactgtaagctgagaaaaccctgcagctgtgagctactgcataccttcaaatatgagaataccaaactcagttacagtattttattaactggtgctatgagcctgcatttatgcagttctacagtaaaat

SEQ ID NO: 137184 - DNA, 323 bp, Homo sapiens
aactatgtctgttctttctgctcataacttttcaacttttacataatgtttttatctaaacaaggagaaaactattgaactgtccatagcacttgcattagggcaccagtgtcacagaataaatcacttttaaatgtgctgtgcagaattcttataggattctgtgaacattttgagaaaaatcacaggcctttttataatttgatagtggttattttgtatcagtaacttctgcttacgtctgatagccacagcatcttcttaatgtcaggatcctgttttattgactcagtaatggtggctctcaagtcacaaaccagctg

SEQ ID NO: 137185 - DNA, 364 bp, Homo sapiens
aagatcaagaatctctcataattacattttagctcccaagcttttacattaaatggtagaaattatttaagtgtaagactaaaagcaagagattggagatattgtactctataaatgcttgcactgcatcaataaatatagtgaaaggagacggtgaaatcttaatttgtcatttttgttgtattgtcttacatggagtgtttacatccagaggtgaggttatgccagtgcaaaaccatgcatccttctggctgctggggccattatctcttctgcttggtcatgatgggcattctgattggtctttttgtgcagtgcaggttgctaaacactttgaataacacttttccttaactctgggatt

SEQ ID NO: 137186 - DNA, 406 bp, Homo sapiens
ctcttttatctcaaaaggactcaaggctactaataaaaaaaaattaatacaacagcataaaacaaaataaaaacaagtggagaagaaaagacagccatttatattatacactgctatgaactatgaaaactttagttagagtctattttaacaataaaactctacttggtcaatttgcctaaggcagaccttaaaagtggctattagagtgataaccagagaattaagcatttttaatttaaaggatgtttaaaacaaaaaagtacaaaaccaattttttcaaagatttgggtaaactgcaacaactgcaaaattctctagggagaacccaaatcacaagcttaaacaaattgactccttcccatagacaaaagaattcagtcccatagctcagtatagcacagcc

SEQ ID NO: 137187 - DNA, 530 bp, Homo sapiens
  misc_feature (402)..(402): n is a, c, g, or t
ctcaaaccgtatagaacaaaagatacaaaaatggctcagcccaaaatctccttaagctgataagcaacttcagcaaagtgtcaggatacaaaatcaagtgcaagaagcacaagcattcttatacaccaataacagacaaacagagagccaaatcatgagtgaactcccattcacaatggcttcaaagagaataaaatacctaggaatccaaattacaaggggccccaaaaagccagaacaatactgaaataaagaatacagttggaagactcacacttcccaatttcaaaacttactataaaacttaccatttgtttaaatcaaaacagtataggtgccgggcacagtggctcacatctgtaatcccagcacttcgggaggctgaggtgggtggatcacttngaggttgggagttcaagatcagcctggccaacatcacaaaaccccgtctctactaaaaatacaaaaattagccagacatggtggtaggcacctgtaatctcagctactcgagaggctgaggcaagaga

SEQ ID NO: 137188 - DNA, 428 bp, Homo sapiens
tgaagtgtaagttggctaaggaaagttcccatggtcgcatagctggcacgattaaaaccagacagcccatgcctagagtctggactatgcaacccacaataccactttcctccccaggggatgatggcttgaaagtgctttgtaaactcctgaagtgctccagagagtgaagatgcctgtgtgtgggagactcagggctgatactggatgaagtaccacagtctctggctatttttagccaaacagggtgccctgtttggaggtaatgttcagacactctgcatcttccaagtgcagtggaatttttattttttatttttattctttggtcccttccctcttttctcatctggggaagcttccgagcttggtgaaaataagcctttttctgccagaccctggcagcctaccttctgagtatcttgcct

SEQ ID NO: 137189 - DNA, 303 bp, Homo sapiens
cattccagcaccaactccaaaatctccagttcagagtttcatctaaatcagatataggtgagactgaaagtatgactcattctgaggtaaactgctctctagcagtgaaacaaacatgttctgtgcttccaaaatacaatggtgggatgggcataggatagatatttccattttaaaagggagaaataggaaagaagaaaacagtgactggtcccaagtaagtctgaaacccaacagaggaaacaacatgaaatgttacggcttgagaataatcattggctcaatgttctgccctccaggccc

SEQ ID NO: 137190 - DNA, 284 bp, Homo sapiens
agatgactcaaagttcatggctgtatttagtccatgctaagtgcccaggattctcaacctctctagtctcaatgctagaagaggatgatattaaacttaactcatcccatgatattcctcagctgcagatagtggttcccctcatctgacccagctctggtacctcaacccaatagaacctgaaattttcacatcactttactggaatcggaacatctaggttttcatcctgcatgcattctacatgatcttgccaaatagtctctagatatgaaaacacttcc

SEQ ID NO: 137191 - DNA, 182 bp, Homo sapiens
attgaaagccatttctgcatctgttgagatgttcatgtggtttattttagttctgtttaggagatgaatcatatttattggttttgtatacgttgaactaatcttgcatcccaggaataaagcctacctgattgctgtggattagctttttgatgttctgctggatttgatttgctagtatt

SEQ ID NO: 137192 - DNA, 312 bp, Homo sapiens
aaacctgtaccgaatccataaaccaggaacccagactagccaccttaacccttacatagatctggacagctgtggaaataaaccaggaccaaccaagcaagacaagcaaagtctgtgtattctcagcaagggtgttggctgccaccacttgcatttgggcagaaactcaaaggcaggcaaaggagtgggaaagcgtcacagtggataaaaggggaggctgcaggtgtgtcctgagtggagattgttgatctgggggatgctggaggtggctgactagaaatgggcctcccatgtgattggttagggggatgt

SEQ ID NO: 137193 - DNA, 212 bp, Homo sapiens
catgtgggcagactgaggacaggtggggtggtgaggtcagctgcttcaggagagtggcagagacagagcagaggtcacatccaaagtctgaagccactggattttggtgccccccctgcttaagctgcagaggcagcctgggaggcccaaggccagagtcctcagattaaaaaacaccaagaggtaccagcagtccctacccaccccgcccc

SEQ ID NO: 137194 - DNA, 310 bp, Homo sapiens
agccttcagttccaggacattgtgggaccccagaggctgtcctgtccacttgccttctgaggacatcagctcggtgtccccagcctccgtgctgtgggcacagctgtggtttgggtgctgagcaaaggatgctgtagtcttggccctgtggagcttggctgttgggacaggaggtacaaaggggagtggtgcctgtggacacaggactagaccccaggacatcagggcctcgggctcatggtcctatcaccctggatggtatacgcagctgcacacgtggaattgctcaaacaattcaggcccaactttt

SEQ ID NO: 137195 - DNA, 440 bp, Homo sapiens
aaccactgtaccatgatcactctcgtaacagaaaataaattgacaagaaaaattactcaagaataaggctgggtattgtggctcatgcctgtaatcccagcactttgggtgttcgaggcaggcggattgcctgaggtgaggagttcgagaccaggctgaccaacatgctaaaaccccgtctctactaaaaatacaaaaattagccaggcatggtggcgggtgcctgtaatcccagctactcaggaggctgaggcaggagaatcgcttcaacctcggaggtggaggttgcagtgagctgagactgggccattgcactccagcctgggcaacaagagcgaaactacgtctgaaaaaaataaaaaaagttggaattttgattggaaaaagtaacacttcataagggaacgttttagtttgtattgatttcaattttgccaact

SEQ ID NO: 137196 - DNA, 256 bp, Homo sapiens
tttgcccaggctggtcttgaactcctgacctcaagtgatcctcctgcttcagctttccaagtagctgcaattacaggctcaagtcaccacacctggctcagagaggtctttttatgtcttcatcaggagactattctgaatagctaatacattcatatgttaggaaattcaaaaggcacaagacagtatacagtggaatgccccttccctgcctgggccacacagtcttactctccagcagccaacactgcttgtt

SEQ ID NO: 137197 - DNA, 360 bp, Homo sapiens
atatgctcagtaaatacaaactggtcaatgctttggaaggaaagaacaagagatgacagtttagatttgaagctagaaaatgagacacatttatttagtgatagtcatatggttctcacttacacagggagagctaaatttctgtaacaccaaaaattttcttataaaaatctctattttcattaaaaccataatagaaaattctaaaaaattggaaaaggagaaaaaaatcaccacttgttttatttttcttttagttccctctattctcctttaccccataatttaccatatcatagcatatatataacaccttgacactatgacattttggaccaggtaatctttgttgtaggcagc

SEQ ID NO: 137198 - DNA, 441 bp, Homo sapiens
ttcttaattgctcttcctccgttactcactagtgacagaatacaaccttcttataacaaaagaagtttgcactgactcccatccagagaaatctaggtagaataggggctacaaaacaatggtactcagggccaggaatttagaagttagatgaaaagttaagacaaatactaaatacctgccaaaggccccactgtctaataccatcccctttgagatgactatttcaacatatgaattttgggggaataaagcagtcagatgatagtactatacaaagcttgaaaaggtacaacacttcgccttttgaaacatctataactagaagccaaataacaaaggtctttgggagttgattaggtcatgagggtgacacctgcatgaatgggattaacaacttcattttaaaaaaggcctgagagacaacccttgccctttcca

SEQ ID NO: 137199 - DNA, 219 bp, Homo sapiens
tggtttcacagggataaacgttatgtcaaaactctttaaattatacacttctaaatgcttgcagtttattgtatgcccaataaagttggaaagaaatttaaaaggaaaagactatttttaaaagataggtaaatgggaatgcctgtatgtgactcaaatacaagcttgaatgttggtattcctgttcaaacagttgctttttttctgaaaaatacaagt

SEQ ID NO: 137200 - DNA, 742 bp, Homo sapiens
gtggttcttattttcgctcatgtgtgtgcagtgagtatttagagcataggatattgtgctgcccctgaaccttatgacttcccagaggtgaccaacgttttagctaaaaacatttagctaaatgtttgaatggaattgtgctttaaaataaggtacaacttgctgagcatggtggtgcatgactacagtcccagctactcgggaggctgaggagaaaggcccaggaattcaagtccagcctgggcaacatagcaagacacgtctctacataataataataataattaatacataaaataaggtacaagatgctgggggtaaagagagaagaggaggggcatcatgtcaagcctctccaggagaaaggacacacctgctggattgtgtgagggatttagaataggggcatataagggaacacagggcagtcaataattctacacaggcagcaaatttgatgctgaaggatgaccaatgtggatgccatgccacttaacgctactgttgcagccgcagatcctagtatttgaaatatgcctcaagaaggaaacacttaagaagtgctgaataagaattccaatcctggcttcatcgctaacttgctttgggaacttgggctttaatttgctcaaagcctcagtttgctcatctgtaaattggggcaaataacatctgttcaacttacctaccagaaatgttgtgtggctaaaaagaaatagaagatatgaaaatgctttggcta

SEQ ID NO: 137201 - DNA, 184 bp, Homo sapiens
tttgaccctaaataacaaaggcatctgccgtgaaagtttgccatgactgctgagatttcaggaataatataactggcctttctagaagctagaagcggtggtatgatgtgctgtgtcaaggaataaagagcccacttctccctggaagagtcacagatgtcttcaaagatcagcgtgagctgag

SEQ ID NO: 137202 - DNA, 383 bp, Homo sapiens
tgttcgacggagactctcttctttccatctggaactcttattggctaaactctagactttcagaattgatcttcaatgaattttatttttttctcctattttccattcacctgtcttttgtctcttctagttttttctttttccttttacaaacagattttttgaagcataattgacaaacaataaattgcatatgttttaagtatatgaattgatcagttttgacatagaaatacactcatgacaccattaccacaatcaagataagacatcagtcagcccccaaaactcccttctgtccctttgtaatctctccctcctgccccttcctagaccactttatctctttcctcccaggcaggagggagagtctccgtcgaact

SEQ ID NO: 137203 - DNA, 256 bp, Homo sapiens
aataattaggctgtgagagggtgaggacttgcccgaagtcacacagcccctgctggaaatgcacacagcccctgctggaaatgcgcacagcccctgctggaaatgctccttccctttccctactctcccgcgccttcaggtagagcgtttaagggattcccagcagttcccgagtacacgtggaggctgctccccggcgtgctggagcggctgcgggctcagtctgcggagggcgccccggtgaagtgtggagttc

SEQ ID NO: 137204 - DNA, 179 bp, Homo sapiens
aaagtattatctcttcagagaggtcttcaatctaaagtacagtcctttagtctaaagtaatgcctatcacgttaactaggcttctttttttttttttgatagagtctcgctctctcactctaggctggaatacagtggtgccatctctgttcactgcaacctgcacatcctgggatcca

SEQ ID NO: 137205 - DNA, 265 bp, Homo sapiens
cctgtatcttgggggcagtgaggggagaggtagggaaaacctgcagacatagaaactgtggatatagaaactgttctgaacccattttctgaactctgttctcaacaggtatatttgaatgttttcattgaacacatgactaactcttgtaatccccctcccctttttgatgttcaatagatgtgaagactactagcctaagtgaaaatatattccactattggtgaaagtaatgtttaacacttaatgagcgcttatatactgt

SEQ ID NO: 137206 - DNA, 442 bp, Homo sapiens
ccatctttttatcgttggcaggtgctcttgaaacagaatacataaaagaaaagaaaaaataatcaaaccaactctttatttttgcccttttgaatatattgtaggaaacagaagtttctgacattagtctactctgattcaattaaacaaataccttatgcttgctcaccaccaaaatgaggaagctgcttgcccacaaattctctaaaggaagattcagaagaaaaaggaattgcagttaatcctttcccaggtcacacctaaaataggtctctgctaatagggaagttagttgtgtttaaaatataaatatacattttagaatatgtcgaaggaatcattgataaaagagtagagtcagaacttcaagtccccattaaaggggctggaaaatacaagtacagtatagtattttccaaactgtgtcttagggtctgagaac

SEQ ID NO: 137207 - DNA, 209 bp, Homo sapiens
gctgaattgtccctgctgtgatctgaggccatgctgtgtgctttgcgcgggaaccccatcccctctcgcttgttagggacatcgctgatcaattctctctctcctgcagtgccagtatttcccaatcttgagctgaatcatgccttttagaatacaaacctgttgtaatttctcccatctgaaacaaaacttcttatgatcccacttcc

SEQ ID NO: 137208 - DNA, 449 bp, Homo sapiens
  misc_feature (141)..(141): n is a, c, g, or t
gctctgttgcccagcctggagtgcagtggtgcaatcttggctcactgcaacctctgcctcccaggctcaagcgattcttatgcttgagcctcccgagtaactgggactacaggtgtgggacaccacgcccagccccatttngtctaaattcttaaaggtactggtttaaggctgttttgtcatcctctctctttagagttttgcttttttaaagatgctcctcacagcgtattttgagacggagtctcgctctgttgcccaggctggagggcagtggcatgatctcggctcactgcaacctccgcctcccaggttcatgccattctcctgcctcagcctctcaaagtgctgggattataggcgtgagccaccgtgcctggcccagatggggtctttctgtgttacccaagctgatctcaaagctaagctggtctcaaactcctgggctt

SEQ ID NO: 137209 - DNA, 476 bp, Homo sapiens
cacctcccctatggatcacactcttctgatgtccatcactgtagattagttttatctattccttccccgccagccccctccgccccaagatggtatctcactctgccacccaggctggagtgtgattgcatgatgacaggatgacagttcacagcagcctcaacctcccaggctcaagcgatcctcccacctgagcctccctgttttgtctattcttgaattttaagtataaccaaacaggatgtactcttttgtgtctggcttttattcagcgtaaattttttagagtcatctgtgttgatgcatctatcaataggtagttctttttgtattttttctgagtaggactccattaccacaatttgtttatccattttgtaaatagctatgtgggtgtgttctagtttgggttcttacaaatagacctgctgtgaatactcattcacaagtcttttggtggacatttgcagtatttt

SEQ ID NO: 137210 - DNA, 429 bp, Homo sapiens
agcttgttcttccccccaagcctgagatctgctcttttcctacttctgaaaaatggctccctggtccctgattagtcaaatcatcatttttcaagatctaccctcaagtgaccctgtcaaataatcaggccctggacaatctttcccttttttgagtatgtggcaacttagaatctagagtacgacatattagacaattgatcaaattaattatctattcatgcttacttttaagtcttctctaaccagactattaatgaaggcagatcttgtctcttcccttcttatataccccacagtaccgtacattttggctagatgatttaataatttttgagagaatcaataccctggtccctggccacagggcagagcacctcctcattcatgagattaacttggacaatgagacccaaattctggctaggc

SEQ ID NO: 137211 - DNA, 314 bp, Homo sapiens
aagataaggagaaaataagatggttttaggctgtcataagtgctatacaggaaatgagacaggtggatgtgataaagtgacttaggtggtgtctttagaaagggtggtcaggtaaagcctctattttgtgtcttcccaactctaaacgatacaccgtggattcctctcacctcagatgtccatttggaatcctgctgtattcttccaccccagagatgttctagctgaatgatatcctagcctaagaggctgcccttgctgaagtagcacatactgagtacctttcctggagactgagtgtctcaacagtggca

SEQ ID NO: 137212 - DNA, 368 bp, Homo sapiens
tgactcttgaggatcccctgcgcgtctgctatatctacatttctaaagggaagactgaattatttttctattctctcaatagagaatattgcaaaatgttattggaagagatgatcaaagagtgtgcaaccaaaaaatataggagaattatttcagaggtatggcaatcagttaataaaaatatttgttttttaaacacttcatatttgtagtatttatagcttttaaaaatttgttgtttgtatgatactatttaaaattttttttccagagatgagatctcattctgtcactcagtctggaaagcagttgcataatcataactcactgcagccttggagtcctaggttcaagcagtcctctagagt

SEQ ID NO: 137213 - DNA, 842 bp, Homo sapiens
catggggcaccatctggagctgggaggcctcggattccatcgtccttggaggtgggtgtgtgggtggccttggtgagaaaagaggcctttcctcctccaggaacaatactcaggctcacaaagaggcagacccactcaggcacccactgcatgccccaggccctcaggatgcacagggggcttggtgggtgggggcctaggctcagaaggcccagcccaacctggctttgattcctggctcttcaacatgtgtggtaggagctagagctgttcccttcacttctgtgagtctcagtttcctcggctataaagtggctatgggattctgtcttggcataaacattgagtgtgatgggggaggcagcgtggtggtggagctctgggagtgtgacctgcagcaagccattctcacctctgtgagcctcagctcatctgtaaaatgagatgagaataataatgataataatacccacttcatggagtatttgaagattcaacttgctgttgtgttgaaagtgcctataataatgaaaggcttaataaatattggaacgtattggacagggtgtggtggctcacgcctgtaatcccaacactttgggaggccgaagtgggtggatcacctgaggtcaggagttcaagaccagccaggccaacatggtgaaaccccgtctctactaaaaatacaaaaattagccaggtgtcctggcacgtgcctgtaatcccagctacttgggaagctgaggcaggagaattgcttgaacccagaaggtggaggttgtagtgagccaagattgtgccactgtactgcagcctgggtgacagagcaagactccgtctca

SEQ ID NO: 137214 - DNA, 202 bp, Homo sapiens
tagatttagaaattaaaacgaaaccctaaagttattggaagagaatgtagcagaatacatttctgccttaagagataacaggaaaaaataaagcaaagtagaatttcaccaaagttatcaacttctgctcatcaagaatcaccatgagaaagtgagaaggtgagccacagactgggagaagataattgcactgtgtttacct

SEQ ID NO: 137215 - DNA, 315 bp, Homo sapiens
gcctcctcagaccacagatagtctttcccccttcccagtgtacatcgcaaatcactgctgatttcactaagctacctttagctctggagttggagtgagaaacttttgtttccacttcatgggatatgactccatcacaatgaaaatgggtccagtaaaaggagcagttttaaaaattaaggtcaatacattttcagtgaaatgctgttctctcttttcttattctctcctctctttctctccttcctccctcctttactcatttcctttccctatttttcttctgatctcaaaataaattcagaaagaaataaa

SEQ ID NO: 137216 - DNA, 335 bp, Homo sapiens
cccccaactcttgtcccccagctcacctctccagaaggaccactcctagtagtttcttgggtatgccctccagagacagtcctcacaaatatatgaaaacacatacataatattctgcactttgcttttcacataacactggggtggagatctttccatattatagcacagaggttcctcactgttcctggctgtgtcagccactgaggtacactggggtggtagggtggtgaaccccaactccaaggggacagaagctcttgcacttgggacccttccagaccttgccctatgcacctcttcatagggtgttcatctgtatcctttataatctc

SEQ ID NO: 137217 - DNA, 288 bp, Homo sapiens
gacttcgcatgtcagtacccgcagtgaagggggccaggcccaactggctcctgtacatgcgtgcgtgcgtgtgtgtgtgtgtccctggctacagaaggggcagagggcaatcttgggggcagagggcaatcttgtttgaccgggccacatttattaagtacttaggactgtgtctagcacataataagtgctcaataaacggagatgccatgatcatttgtagctagttacatacccaatatccattcttcctatttttttccttaataacagattcagatcgtgctg

SEQ ID NO: 137218 - DNA, 463 bp, Homo sapiens
aggagaaatgcaatgtactgaatgtttatgtccctctgaaatttgtacattgaaatactgacccccagtataattgtattaggagatggggcctttgggaggtaattaaatcataagggtggtgccttcatgaatgggattagtgcccttataaaagagactccagagtgctcttttgttctttctgtagatggcagtctgcaaaccagaaagggccctccacactggcaccctgatctcagacttccagcctcccaaactgtgaggaataaaattctgttgcttataagccaccctgtctgtggtactcttatagaaactgactgactagaacaggaggtcagtactattttagttttgcagatggagaaattgagacacaaaggtattaagtaacacactcaaggtcacatatgtaatttctagggtccaggattcaaacccaggtaatgaaagtccacac

SEQ ID NO: 137219 - DNA, 557 bp, Homo sapiens
aaggtgattttcaacaggtatacgtgaatgagtcttgagcctttctgtctgggaatggaggagcatttgctgagtgtttattctgagtgcactgggcggatgtgagaagggaataagccatggtctcttgcctctggcagtttctagcctgtgttaccacataataactcaatgctaagctgtgactgtaagtgctacagggatcgagggaagggagaggtggagtgtgcagcagtggcagctaagaaagcttacacaggaaatggaaccaaccttacagaaagccaagcctagaaccgagttaggctggaaggaatggtgagactattccaggtggggtcagtggtaccaacatgacagaagccacaatgtatttaggggtcaatggacagatgggcctggctggagcagaagatatatgggaaacttggagtgaggaaaggttagaaagcagaatagcatcatggaaggagcatgggacagggaatctggacatatggattctgcttttagttttgctactaactagttttcgatgcaggctctgtggaaaagta

SEQ ID NO: 137220 - DNA, 122 bp, Homo sapiens
gcggatactacacacacaacacacaccacgcacacacaccatacaccatgtatgcacacagacaccacacacaaaatataccatgtatgcacgcagacaacacacaccatgtatacacacac

SEQ ID NO: 137221 - DNA, 453 bp, Homo sapiens
gcagactacagctatgaaataccgcaaaagtgacctcagatcatgcagactacagctatgaaataccgcaaaagtgacctcagatcatgcagactaaagctatcaaataccgcaaaggtggcccgagtagaatggtgaatgaacatctgttcacgcccactcatatgaaatgaacagttatgaaaatttctccccatttgcttcatctgtctccttttcttttcctttgctgaacaaattttaaatactttaaacaaatattttaaaacaaatcccagctatcctgtcctttcactctatgtatatccgtctgcatgcctgaaacagcatgaacacctccctacatgactgccatgctcttaacacagctcattaagtgatcagtaattccttggtgttatctgacacccattctatagtcaaatgtgttctcagttgttgcataaagatctt

SEQ ID NO: 137222 - DNA, 142 bp, Homo sapiens
gacgaggactccccagcaccgggggatccaggcggccgtggcttgcagagaagcagggtgggggcaaggagggtgggggcccagaggggagatcagaccgctcagccgagaccagctcccctccttcgccagctcccacccc

SEQ ID NO: 137223 - DNA, 386 bp, Homo sapiens
cagaaaagagtccacggagtaaggcaaatggggtgaccatgcaagtaccctgcaatgggaatcagcaatggggagtgcggcagccgcagaacagagaagggagggctctctcctgcaaggtccacctctcactaaaaaacaaaagatctgaggctcacctacaatccacctaggaccaccctctctcctggccaaggcaagagctgggggcggctctcccaccctctagctcagcatggacccgggatttccttttcatcaaggcagccctggctgttcatctcagccggatttttctctttatgacatccataaggccccagggtggcacctgcccccaaaggctggcttccttcagaagagtccctgactgccccataaacttc

SEQ ID NO: 137224 - DNA, 422 bp, Homo sapiens
atctgctcacctcagatactcagttgctacagcagggggttggttggctttttgctttatgaagaggtctggcgcagactacacacacggccacagatgcccacacttcttcattagcaagcccacctgtctcccctgcccccaggagagcttcagaggtggaacatttgggtggacgagtggctgggaacgctggtgcctcaggactcagggagcctgacgcatcagtgccagagtcggctgcaagcaaagagcgtcacacgcgagcagcaaggacagtttattctgagcgactgaaaatgttatttgtgtattaaaaccaaaaccaatgcataatatgccataaagtcaattatcgtcatcagttgttaggataaaactgcgatttcaatgcaatttcatctttgcactgggcctgttcg

SEQ ID NO: 137225 - DNA, 312 bp, Homo sapiens
gtctcacaggagtagaactaggtcttttggcccttagaccttagatgcctcttcttagatgtggtggctcacaatatccctattgtgataatatcttactgactttcatacaattctttttatttgagaaacatcttttgtcataacctcccttaatgatcacaatgggaaaaactttgtgttgctatttggggctgagctttcttgtcatcacaaagtagaaatgagacaaaattcttcactctgaattccaagagctcttgatgaaattcgaaggttgggggcaagggctggatgacttgggatttggtg

SEQ ID NO: 137226 - DNA, 186 bp, Homo sapiens
actcacatatcgcatacaataccctatattggcctattacatcactaccacagaaagtagctgtagttcattgctggggccaccagaagggtcaagatgaaattgctcagagaaacaggagggctgaccaagcagctagggccaccaccatctctgggaactttttttttttttttttttgagacg

SEQ ID NO: 137227 - DNA, 687 bp, Homo sapiens
  misc_feature (266)..(266): n is a, c, g, or t
actgttactcccttgaatttataaacaaggaggctcaaagagctgaagattaaagagatgaagtatctaggctaaggtcacagagctagcaaatgacatatgctagatctaagcccaagtctgactctaaaattctgctttcttcatttagtttttctgccattcaaagtttactgccagctcctccaggaacttctgagtaagcctgtctccaaattgcccctaactcctcagtgccagtcatgggccaggcccctgggggactnggaatgagtaaaacatgcacctattgttaaggttcacctggtccagaaggggaggcagacccacctgcccaccatgacccggacagaggcgataaatacggagcacctcatggccagggcctggaggattcccaccataccctacccaacgccaataacagagggaccctggagttgtgtacacaagatagcagttcagtgcttgcacacatactagttgagaagggaaatcaaggctaatgaaacagctcaactgtctggcagaaccaggctccttctgccctgaaacagtttggatgtttggccctttctaatcttatttggaaaatttgatccccagtgtttgaaagtgggggcctggttgggagatgttcccggtattcgggaatggatcccttcatgaattaggcctggtgcccat

SEQ ID NO: 137228 - DNA, 2684 bp, Homo sapiens
  misc_feature (1330)..(1330): n is a, c, g, or t
gcggccgcgaattcggcacgagcagagagcaatatggctggttccccaacatgcctcaccctcatctatatcctttggcagctcacagggtcagcagcctctggacccgtgaaagagctggtcggttccgttggtggggccgtgactttccccctgaagtccaaagtaaagcaagttgactctattgtctggaccttcaacacaacccctcttgtcaccatacagccagaagggggcactatcatagtgacccaaaatcgtaatagggagagagtagacttcccagatggaggctactccctgaagctcagcaaactgaagaagaatgactcagggatctactatgtggggatatacagctcatcactccagcagccctccacccaggagtacgtgctgcatgtctacgagcacctgtcaaagcctaaagtcaccatgggtctgcagagcaataagaatggcacctgtgtgaccaatctgacatgctgcatggaacatggggaagaggatgtgatttatacctggaaggccctggggcaagcagccaatgagtcccataatgggtccatcctccccatctcctggagatggggagaaagtgatatgaccttcatctgcgttgccaggaaccctgtcagcagaaacttctcaagccccatccttgccaggaagctctgtgaaggtgctgctgatgacccagattcctccatggtcctcctgtgtctcctgttggtgcccctcctgctcagtctctttgtactggggctatttctttggtttctgaagagagagagacaagaagagtacattgaagagaagaagagagtggacatttgtcgggaaactcctaacatatgcccccattctggagagaacacagagtacgacacaatccctcacactaatagaacaatcctaaaggaagatccagcaaatacggtttactccactgtggaaataccgaaaaagatggaaaatccccactcactgctcacgatgccagacacaccaaggctatttgcctatgagaatgttatctagacagcagtgcactcccctaagtctctgctcaaaaaaaaaacaattctcggcccaaagaaaacaatcagaagaattcactgatttgactagaaacatcaaggaagaatgaagaacgttgacttttttccaggataaattatctctgatgcttctttagatttaagagttcataattccatccactgctgagaaatctcctcaaacccagaaggtttaatcacttcatcccaaaaatgggattgtgaatgtcagcaaaccataaaaaaagtgcttagaagtattcctatanaaatgtaaatgcaaggtcacacatattaatgacagcctgttgtattaatgatggctccaggtcagtgtctggagtttcattccatcccagggcttggatgtcaggattataccaagagtcttgctaccaggagggcaagaagaccaaaacagacagacaagtccagcagaagcagatgcacctgacaaaaatggatgtattaattggctctataaactatgtgcccagcactatgctgagcttacactaattggtcagacgtgctgtctgccctcatgaaattggctccaaatgaatgaactactttcatgagcagttgtagcaggcctgaccacagattcccagagggccaggtgtggatccacaggacttgaaggtcaaagttcacaaagatgaagaatcagggtagctgaccatgtttggcagatactataatggagacacagaagtgtgcatggcccaaggacaaggacctccagccaggcttcatttatgcacttgtgctgcaaaagaaaagtctaggttttaaggctgtgccagaacccatcccaataaagagaccgagtctgaagtcacattgtaaatctagtgtaggagacttggagtcaggcagtgagactggtggggcacggggggcagtgggtacttgtaaacctttaaagatggttaattcattcaatagatatttattaagaacctatgcggcccggcatggtggctcacacctgtaatcccagcactttgggaggccaaggtgggtgggtcatctgaggtcaggagttcaagaccagcctggccaacatggtgaaaccccatctctactaaagatacaaaaatttgctgagcgtggtggtgtgcacctgtaatcccagctactcgagaggccaaggcatgagaatcgcttgaacctgggaggtggaggttgcagtgagctgagatggcaccactgcactccggcctaggcaacgagagcaaaactccaatacaaacaaacaaacaaacacctgtgctaggtcagtctggcacgtaagatgaacatccctaccaacacagagctcaccatctcttatacttaagtgaaaaacatggggaaggggaaaggggaatggctgcttttgatatgttccctgacacatatcttgaatggagacctccctaccaagtgatgaaagtgttgaaaaacttaataacaaatgcttgttgggcaagaatgggattgaggattatcttctctcagaaaggcattgtgaaggaattgagccagatctctctccctactgcaaaaccctattgtagtaaaaaagtcttctttactatcttaataaaacagatattgtgagatcacataaaaaaa

SEQ ID NO: 137229 - DNA, 2588 bp, Homo sapiens
  misc_feature (1234)..(1234): n is a, c, g, or t
ggaagtggcttcatttcagtggctgacttccagagagcaatatggctggttccccaacatgcctcaccctcatctatatcctttggcagctcacagggtcagcagcctctggacccgtgaaagagctggtcggttccgttggtggggccgtgactttccccctgaagtccaaagtaaagcaagttgactctattgtctggaccttcaacacaacccctcttgtcaccatacagccagaagggggcactatcatagtgacccaaaatcgtaatagggagagagtagacttcccagatggaggctactccctgaagctcagcaaactgaagaagaatgactcagggatctactatgtggggatatacagctcatcactccagcagccctccacccaggagtacgtgctgcatgtctacgagcacctgtcaaagcctaaagtcaccatgggtctgcagagcaataagaatggcacctgtgtgaccaatctgacatgctgcatggaacatggggaagaggatgtgatttatacctggaaggccctggggcaagcagccaatgagtcccataatgggtccatcctccccatctcctggagatggggagaaagtgatatgaccttcatctgcgttgccaggaaccctgtcagcagaaacttctcaagccccatccttgccaggaagctctgtgaaggtgctgctgatgacccagattcctccatggtcctcctgtgtctcctgttggtgcccctcctgctcagtctctttgtactggggctatttctttggtttctgaagagagagagacaagaagagaacaatcctaaaggaagatccagcaaatacggtttactccactgtggaaataccgaaaaagatggaaaatccccactcactgctcacgatgccagacacaccaaggctatttgcctatgagaatgttatctagacagcagtgcactcccctaagtctctgctcaaaaaaaaaacaattctcggcccaaagaaaacaatcagaagaattcactgatttgactagaaacatcaaggaagaatgaagaacgttgacttttttccaggataaattatctctgatgcttctttagatttaagagttcataattccatccactgctgagaaatctcctcaaacccagaaggtttaatcacttcatcccaaaaatgggattgtgaatgtcagcaaaccataaaaaaagtgcttagaagtattcctatanaaatgtaaatgcaaggtcacacatattaatgacagcctgttgtattaatgatggctccaggtcagtgtctggagtttcattccatcccagggcttggatgtcaggattataccaagagtcttgctaccaggagggcaagaagaccaaaacagacagacaagtccagcagaagcagatgcacctgacaaaaatggatgtattaattggctctataaactatgtgcccagcactatgctgagcttacactaattggtcagacgtgctgtctgccctcatgaaattggctccaaatgaatgaactactttcatgagcagttgtagcaggcctgaccacagattcccagagggccaggtgtggatccacaggacttgaaggtcaaagttcacaaagatgaagaatcagggtagctgaccatgtttggcagatactataatggagacacagaagtgtgcatggcccaaggacaaggacctccagccaggcttcatttatgcacttgtgctgcaaaagaaaagtctaggttttaaggctgtgccagaacccatcccaataaagagaccgagtctgaagtcacattgtaaatctagtgtaggagacttggagtcaggcagtgagactggtggggcacggggggcagtgggtacttgtaaacctttaaagatggttaattcattcaatagatatttattaagaacctatgcggcccggcatggtggctcacacctgtaatcccagcactttgggaggccaaggtgggtgggtcatctgaggtcaggagttcaagaccagcctggccaacatggtgaaaccccatctctactaaagatacaaaaatttgctgagcgtggtggtgtgcacctgtaatcccagctactcgagaggccaaggcatgagaatcgcttgaacctgggaggtggaggttgcagtgagctgagatggcaccactgcactccggcctaggcaacgagagcaaaactccaatacaaacaaacaaacaaacacctgtgctaggtcagtctggcacgtaagatgaacatccctaccaacacagagctcaccatctcttatacttaagtgaaaaacatggggaaggggaaaggggaatggctgcttttgatatgttccctgacacatatcttgaatggagacctccctaccaagtgatgaaagtgttgaaaaacttaataacaaatgcttgttgggcaagaatgggattgaggattatcttctctcagaaaggcattgtgaaggaattgagccagatctctctccctactgcaaaaccctattgtagtaaaaaagtcttctttactatcttaataaaacagatattgtgagatcacataaaaaaa

SEQ ID NO: 137230 - DNA, 2371 bp, Homo sapiens
  misc_feature (1017)..(1017): n is a, c, g, or t
ggaagtggcttcatttcagtggctgacttccagagagcaatatggctggttccccaacatgcctcaccctcatctatatcctttggcagctcacagagcacctgtcaaagcctaaagtcaccatgggtctgcagagcaataagaatggcacctgtgtgaccaatctgacatgctgcatggaacatggggaagaggatgtgatttatacctggaaggccctggggcaagcagccaatgagtcccataatgggtccatcctccccatctcctggagatggggagaaagtgatatgaccttcatctgcgttgccaggaaccctgtcagcagaaacttctcaagccccatccttgccaggaagctctgtgaaggtgctgctgatgacccagattcctccatggtcctcctgtgtctcctgttggtgcccctcctgctcagtctctttgtactggggctatttctttggtttctgaagagagagagacaagaagagtacattgaagagaagaagagagtggacatttgtcgggaaactcctaacatatgcccccattctggagagaacacagagtacgacacaatccctcacactaatagaacaatcctaaaggaagatccagcaaatacggtttactccactgtggaaataccgaaaaagatggaaaatccccactcactgctcacgatgccagacacaccaaggctatttgcctatgagaatgttatctagacagcagtgcactcccctaagtctctgctcaaaaaaaaaacaattctcggcccaaagaaaacaatcagaagaattcactgatttgactagaaacatcaaggaagaatgaagaacgttgacttttttccaggataaattatctctgatgcttctttagatttaagagttcataattccatccactgctgagaaatctcctcaaacccagaaggtttaatcacttcatcccaaaaatgggattgtgaatgtcagcaaaccataaaaaaagtgcttagaagtattcctatanaaatgtaaatgcaaggtcacacatattaatgacagcctgttgtattaatgatggctccaggtcagtgtctggagtttcattccatcccagggcttggatgtcaggattataccaagagtcttgctaccaggagggcaagaagaccaaaacagacagacaagtccagcagaagcagatgcacctgacaaaaatggatgtattaattggctctataaactatgtgcccagcactatgctgagcttacactaattggtcagacgtgctgtctgccctcatgaaattggctccaaatgaatgaactactttcatgagcagttgtagcaggcctgaccacagattcccagagggccaggtgtggatccacaggacttgaaggtcaaagttcacaaagatgaagaatcagggtagctgaccatgtttggcagatactataatggagacacagaagtgtgcatggcccaaggacaaggacctccagccaggcttcatttatgcacttgtgctgcaaaagaaaagtctaggttttaaggctgtgccagaacccatcccaataaagagaccgagtctgaagtcacattgtaaatctagtgtaggagacttggagtcaggcagtgagactggtggggcacggggggcagtgggtacttgtaaacctttaaagatggttaattcattcaatagatatttattaagaacctatgcggcccggcatggtggctcacacctgtaatcccagcactttgggaggccaaggtgggtgggtcatctgaggtcaggagttcaagaccagcctggccaacatggtgaaaccccatctctactaaagatacaaaaatttgctgagcgtggtggtgtgcacctgtaatcccagctactcgagaggccaaggcatgagaatcgcttgaacctgggaggtggaggttgcagtgagctgagatggcaccactgcactccggcctaggcaacgagagcaaaactccaatacaaacaaacaaacaaacacctgtgctaggtcagtctggcacgtaagatgaacatccctaccaacacagagctcaccatctcttatacttaagtgaaaaacatggggaaggggaaaggggaatggctgcttttgatatgttccctgacacatatcttgaatggagacctccctaccaagtgatgaaagtgttgaaaaacttaataacaaatgcttgttgggcaagaatgggattgaggattatcttctctcagaaaggcattgtgaaggaattgagccagatctctctccctactgcaaaaccctattgtagtaaaaaagtcttctttactatcttaataaaacagatattgtgagatcacataaaaaaa

SEQ ID NO: 137231 - DNA, 1238 bp, Homo sapiens
gcccgcgttctgccccggaagtctatgcgtttgagaccacggaatggccggggagtcggtcacagcgcatcctcgcctgcgtgatacagaacttcatgcctgaggtcatctcagtgcagtgtctgcacaatgaggtgcagctcccggacgaccggcacagcacgactcagccccgcaagaccaagggctccggattatttgtcttcatccgcctggaggtgaccaggccgaatgggatcagaaagatgagttcatgtcccgtgcagtccatgaggcagcgatcccctcacagtctgtccagcgatcggtgtcgtaaatcccggtaaatggggtggtcctgcctccttccgctcgccagcgcgtccaggcttcatttatgcacttgtgctgcaaaagaaaagtctaggttttaaggctgtgccagaacccatcccaataaagagaccgagtctgaagtcacattgtaaatctagtgtaggagacttggagtcaggcagtgagactggtggggcacggggggcagtgggtacttgtaaacctttaaagatggttaattcattcaatagatatttattaagaacctatgcggcccggcatggtggctcacacctgtaatcccagcactttgggaggccaaggtgggtgggtcatctgaggtcaggagttcaagaccagcctggccaacatggtgaaaccccatctctactaaagatacaaaaatttgctgagcgtggtggtgtgcacctgtaatcccagctactcgagaggccaaggcatgagaatcgcttgaacctgggaggtggaggttgcagtgagctgagatggcaccactgcactccggcctaggcaacgagagcaaaactccaatacaaacaaacaaacaaacacctgtgctaggtcagtctggcacgtaagatgaacatccctaccaacacagagctcaccatctcttatacttaagtgaaaaacatggggaaggggaaaggggaatggctgcttttgatatgttccctgacacatatcttgaatggagacctccctaccaagtgatgaaagtgttgaaaaacttaataacaaatgcttgttgggcaagaatgggattgaggattatcttctctcagaaaggcattgtgaaggaattgagccagatctctctccctactgcaaaaccctattgtagtaaaaaagtcttctttactatcttaataaaacagatattgtgagatcacataaaaaaa

SEQ ID NO: 137232 - DNA, 1351 bp, Homo sapiens
ggaagtggcttcatttcagtggctgacttccagagagcaatatggctggttccccaacatgcctcaccctcatctatatcctttggcagctcacagggtcagcagcctctggacccgtgaaagagctggtcggttccgttggtggggccgtgactttccccctgaagtccaaagtaaagcaagttgactctattgtctggaccttcaacacaacccctcttgtcaccatacagccagaagggggcactatcatagtgacccaaaatcgtaatagggagagagtagacttcccagatggaggctactccctgaagctcagcaaactgaagaagaatgactcagggatctactatgtggggatatacagctcatcactccagcagccctccacccaggagtacgtgctgcatgtctacgagcacctgtcaaagcctaaagtcaccatgggtctgcagagcaataagaatggcacctgtgtgaccaatctgacatgctgcatggaacatggggaagaggatgtgatttatacctggaaggccctggggcaagcagccaatgagtcccataatgggtccatcctccccatctcctggagatggggagaaagtgatatgaccttcatctgcgttgccaggaaccctgtcagcagaaacttctcaagccccatccttgccaggaagctctgtgaaggtgctgctgatgacccagattcctccatggtcctcctgtgtctcctgttggtgcccctcctgctcagtctctttgtactggggctatttctttggtttctgaagagagagagacaagaaggtagagcgtgtactatttttgtcctcacccacattcatgtttttctccttcactgattcaacaagcacatatagagctgtgtgccagacttggcatgaggtgttgaagatgcagagatgaagaagccacagtctctgccctcaagaagcatacagtcagcctgtgtccaatacaaacaaacaaacaaacacctgtgctaggtcagtctggcacgtaagatgaacatccctaccaacacagagctcaccatctcttatacttaagtgaaaaacatggggaaggggaaaggggaatggctgcttttgatatgttccctgacacatatcttgaatggagacctccctaccaagtgatgaaagtgttgaaaaacttaataacaaatgcttgttgggcaagaatgggattgaggattatcttctctcagaaaggcattgtgaaggaattgagccagatctctctccctactgcaaaaccctattgtagtaaaaaagtcttctttactatcttaataaaacagatattgtgagatcacataaaaaaa

SEQ ID NO: 137233 - DNA, 411 bp, Homo sapiens
gcaatatggctggttccccaacatgcctcaccctcatctatatcctttggcagctcacaggtgagtccggccggattctcttccactctcctgtctaccccatcctgaatagttccaggtttcttgttccactctgggcctctggctcaactcgggaggctctgtgttctcatctaacatttgctttttatcaatctctgatctctgattctcaggtcaggaagagactagagagagggggaaaaatggctctgggaactgactcccctgttgactgtcccagggatgaaggagctgaaagaagtggtgctgggtatcagagaccatttttctaatccaggttctgccatgagttagataaggaatgttaaagttttcctgggcctcagaaactttatcttctagccttct

SEQ ID NO: 137234 - DNA, 514 bp, Homo sapiens
tcagttaaactactaatgcagtagctttaaggcttattccttcacagagtacggttggcagcagtaatggtatctttctgtctcctttttcttcctctcccaaacagatccaaaaagataagaatcattaaagcagtttgcttagtaatagaaaaggttggtttagtgaattattacaactgaacaaggaaagttcagttcattaagcattcagcaagataaatatgcgttaaacttacagaatagtttctctaagctaggggtgattaaaatcaaacagtgggagccagcatgccagccgatttgggttgggtaaccttggaaataaagtttcctggatgtcagggtctccatggacgatccagagccctgctcacctccctcactctactttctttttgtctgtcttcagatggaaaatccccactcactgctcacgatgccagacacaccaaggctatttgcctatgagaatgttatctagacagcagtgcactcccctaagtctctgctc

SEQ ID NO: 137235 - DNA, 2737 bp, Homo sapiens
  misc_feature (1330)..(1330): n is a, c, g, or t
gcggccgcgaattcggcacgagcagagagcaatatggctggttccccaacatgcctcaccctcatctatatcctttggcagctcacagggtcagcagcctctggacccgtgaaagagctggtcggttccgttggtggggccgtgactttccccctgaagtccaaagtaaagcaagttgactctattgtctggaccttcaacacaacccctcttgtcaccatacagccagaagggggcactatcatagtgacccaaaatcgtaatagggagagagtagacttcccagatggaggctactccctgaagctcagcaaactgaagaagaatgactcagggatctactatgtggggatatacagctcatcactccagcagccctccacccaggagtacgtgctgcatgtctacgagcacctgtcaaagcctaaagtcaccatgggtctgcagagcaataagaatggcacctgtgtgaccaatctgacatgctgcatggaacatggggaagaggatgtgatttatacctggaaggccctggggcaagcagccaatgagtcccataatgggtccatcctccccatctcctggagatggggagaaagtgatatgaccttcatctgcgttgccaggaaccctgtcagcagaaacttctcaagccccatccttgccaggaagctctgtgaaggtgctgctgatgacccagattcctccatggtcctcctgtgtctcctgttggtgcccctcctgctcagtctctttgtactggggctatttctttggtttctgaagagagagagacaagaagagtacattgaagagaagaagagagtggacatttgtcgggaaactcctaacatatgcccccattctggagagaacacagagtacgacacaatccctcacactaatagaacaatcctaaaggaagatccagcaaatacggtttactccactgtggaaataccgaaaaagatggaaaatccccactcactgctcacgatgccagacacaccaaggctatttgcctatgagaatgttatctagacagcagtgcactcccctaagtctctgctcaaaaaaaaaacaattctcggcccaaagaaaacaatcagaagaattcactgatttgactagaaacatcaaggaagaatgaagaacgttgacttttttccaggataaattatctctgatgcttctttagatttaagagttcataattccatccactgctgagaaatctcctcaaacccagaaggtttaatcacttcatcccaaaaatgggattgtgaatgtcagcaaaccataaaaaaagtgcttagaagtattcctatanaaatgtaaatgcaaggtcacacatattaatgacagcctgttgtattaatgatggctccaggtcagtgtctggagtttcattccatcccagggcttggatgtcaggattataccaagagtcttgctaccaggagggcaagaagaccaaaacagacagacaagtccagcagaagcagatgcacctgacaaaaatggatgtattaattggctctataaactatgtgcccagcactatgctgagcttacactaattggtcagacgtgctgtctgccctcatgaaattggctccaaatgaatgaactactttcatgagcagttgtagcaggcctgaccacagattcccagagggccaggtgtggatccacaggacttgaaggtcaaagttcacaaagatgaagaatcagggtagctgaccatgtttggcagatactataatggagacacagaagtgtgcatggcccaaggacaaggacctccagccaggcttcatttatgcacttgtgctgcaaaagaaaagtctaggttttaaggctgtgccagaacccatcccaataaagagaccgagtctgaagtcacattgtaaatctagtgtaggagacttggagtcaggcagtgagactggtggggcacggggggcagtgggtacttgtaaacctttaaagatggttaattcattcaatagatatttattaagaacctatgcggcccggcatggtggctcacacctgtaatcccagcactttgggaggccaaggtgggtgggtcatctgaggtcaggagttcaagaccagcctggccaacatggtgaaaccccatctctactaaagatacaaaaatttgctgagcgtggtggtgtgcacctgtaatcccagctactcgagaggccaaggcatgagaatcgcttgaacctgggaggtggaggttgcagtgagctgagatggcaccactgcactccggcctaggcaacgagagcaaaactccaatacaaacaaacaaacaaacacctgtgctaggtcagtctggcacgtaagatgaacatccctaccaacacagagctcaccatctcttatacttaagtgaaaaacatggggaaggggaaaggggaatggctgcttttgatatgttccctgacacatatcttgaatggagacctccctaccaagtgatgaaagtgttgaaaaacttaataacaaatgcttgttgggcaagaatgggattgaggattatcttctctcagaaaggcattgtgaaggaattgagccagatctctctccctactgcaaaaccctattgtagtaaaaaagtcttctttactatcttaataaaacagatattgtgagatcacataaaaaaaacatgtaggacgtatagatgcggccgattcgagtttactgggcctttgcctat

SEQ ID NO: 137236 - DNA, 2667 bp, Homo sapiens
  misc_feature (1313)..(1313): n is a, c, g, or t
tgcaggctggtacggtccgaagggtagatcatcatgcctcaccctcatctatatcctctggcagctcacagggtcagcagcctctggacccgtgaaagagctggtcggttccgttggtggggccgtgactttccccctgaagtccaaagtaaagcaagttgactctattgtctggaccttcaacacaacccctcttgtcaccatacagccagaagggggcactatcatagtgacccaaaatcgtaatagggagagagtagacttcccagatggaggctactccctgaagctcagcaaactgaagaagaatgactcagggatctactatgtggggatatacagctcatcactccagcagccctccacccaggagtacgtgctgcatgtctacgagcacctgtcaaagcctaaagtcaccatgggtctgcagagcaataagaatggcacctgtgtgaccaatctgacatgctgcatggaacatggggaagaggatgtgatttatacctggaaggccctggggcaagcagccaatgagtcccataatgggtccatcctccccatctcctggagatggggagaaagtgatatgaccttcatctgcgttgccaggaaccctgtcagcagaaacttctcaagccccatccttgccaggaagctctgtgaaggtgctgctgatgacccagattcctccatggtcctcctgtgtctcctgttggtgcccctcctgctcagtctctttgtactggggctatttctttggtttctgaagagagagagacaagaagagtacattgaagagaagaagagagtggacatttgtcgggaaactcctaacatatgcccccattctggagagaacacagagtacgacacaatccctcacactaatagaacaatcctaaaggaagatccagcaaatacggtttactccactgtggaaataccgaaaaagatggaaaatccccactcactgctcacgatgccagacacaccaaggctatttgcctatgagaatgttatctagacagcagtgcactcccctaagtctctgctcaaaaaaaaaacaattctcggcccaaagaaaacaatcagaagaattcactgatttgactagaaacatcaaggaagaatgaagaacgttgacttttttccaggataaattatctctgatgcttctttagatttaagagttcataattccatccactgctgagaaatctcctcaaacccagaaggtttaatcacttcatcccaaaaatgggattgtgaatgtcagcaaaccataaaaaaagtgcttagaagtattcctatanaaatgtaaatgcaaggtcacacatattaatgacagcctgttgtattaatgatggctccaggtcagtgtctggagtttcattccatcccagggcttggatgtcaggattataccaagagtcttgctaccaggagggcaagaagaccaaaacagacagacaagtccagcagaagcagatgcacctgacaaaaatggatgtattaattggctctataaactatgtgcccagcactatgctgagcttacactaattggtcagacgtgctgtctgccctcatgaaattggctccaaatgaatgaactactttcatgagcagttgtagcaggcctgaccacagattcccagagggccaggtgtggatccacaggacttgaaggtcaaagttcacaaagatgaagaatcagggtagctgaccatgtttggcagatactataatggagacacagaagtgtgcatggcccaaggacaaggacctccagccaggcttcatttatgcacttgtgctgcaaaagaaaagtctaggttttaaggctgtgccagaacccatcccaataaagagaccgagtctgaagtcacattgtaaatctagtgtaggagacttggagtcaggcagtgagactggtggggcacggggggcagtgggtacttgtaaacctttaaagatggttaattcattcaatagatatttattaagaacctatgcggcccggcatggtggctcacacctgtaatcccagcactttgggaggccaaggtgggtgggtcatctgaggtcaggagttcaagaccagcctggccaacatggtgaaaccccatctctactaaagatacaaaaatttgctgagcgtggtggtgtgcacctgtaatcccagctactcgagaggccaaggcatgagaatcgcttgaacctgggaggtggaggttgcagtgagctgagatggcaccactgcactccggcctaggcaacgagagcaaaactccaatacaaacaaacaaacaaacacctgtgctaggtcagtctggcacgtaagatgaacatccctaccaacacagagctcaccatctcttatacttaagtgaaaaacatggggaaggggaaaggggaatggctgcttttgatatgttccctgacacatatcttgaatggagacctccctaccaagtgatgaaagtgttgaaaaacttaataacaaatgcttgttgggcaagaatgggattgaggattatcttctctcagaaaggcattgtgaaggaattgagccagatctctctccctactgcaaaaccctattgtagtaaaaaagtcttctttactatcttaataaaacagatattgtgagatcacataaaaaaa

SEQ ID NO: 137237 - DNA, 2468 bp, Homo sapiens
  misc_feature (1114)..(1114): n is a, c, g, or t
ggaagtggcttcatttcagtggctgacttccagagagcaatatggctggttccccaacatgcctcaccctcatctatatcctttggcagctcacagggtcagcagcctctggacccgtgaaagagctggtcggttccgttggtggggccgtgactttccccctgaagtccaaagtaaagcaagttgactctattgtctggaccttcaacacaacccctcttgtcaccatacagccagaagggggcactatcatagtgacccaaaatcgtaatagggagagagtagacttcccagatggaggctactccctgaagctcagcaaactgaagaagaatgactcagggatctactatgtggggatatacagctcatcactccagcagccctccacccaggagtacgtgctgcatgtctacgagcacctgtcaaagcctaaagtcaccatgggtctgcagagcaataagaatggcacctgtgtgaccaatctgacatgctgcatggaacatggggaagaggatgtgatttatacctggaaggccctggggcaagcagccaatgagtcccataatgggtccatcctccccatctcctggagatggggagaaagtgatatgaccttcatctgcgttgccaggaaccctgtcagcagaaacttctcaagccccatccttgccaggaagctctgtgaagagaacaatcctaaaggaagatccagcaaatacggtttactccactgtggaaataccgaaaaagatggaaaatccccactcactgctcacgatgccagacacaccaaggctatttgcctatgagaatgttatctagacagcagtgcactcccctaagtctctgctcaaaaaaaaaacaattctcggcccaaagaaaacaatcagaagaattcactgatttgactagaaacatcaaggaagaatgaagaacgttgacttttttccaggataaattatctctgatgcttctttagatttaagagttcataattccatccactgctgagaaatctcctcaaacccagaaggtttaatcacttcatcccaaaaatgggattgtgaatgtcagcaaaccataaaaaaagtgcttagaagtattcctatanaaatgtaaatgcaaggtcacacatattaatgacagcctgttgtattaatgatggctccaggtcagtgtctggagtttcattccatcccagggcttggatgtcaggattataccaagagtcttgctaccaggagggcaagaagaccaaaacagacagacaagtccagcagaagcagatgcacctgacaaaaatggatgtattaattggctctataaactatgtgcccagcactatgctgagcttacactaattggtcagacgtgctgtctgccctcatgaaattggctccaaatgaatgaactactttcatgagcagttgtagcaggcctgaccacagattcccagagggccaggtgtggatccacaggacttgaaggtcaaagttcacaaagatgaagaatcagggtagctgaccatgtttggcagatactataatggagacacagaagtgtgcatggcccaaggacaaggacctccagccaggcttcatttatgcacttgtgctgcaaaagaaaagtctaggttttaaggctgtgccagaacccatcccaataaagagaccgagtctgaagtcacattgtaaatctagtgtaggagacttggagtcaggcagtgagactggtggggcacggggggcagtgggtacttgtaaacctttaaagatggttaattcattcaatagatatttattaagaacctatgcggcccggcatggtggctcacacctgtaatcccagcactttgggaggccaaggtgggtgggtcatctgaggtcaggagttcaagaccagcctggccaacatggtgaaaccccatctctactaaagatacaaaaatttgctgagcgtggtggtgtgcacctgtaatcccagctactcgagaggccaaggcatgagaatcgcttgaacctgggaggtggaggttgcagtgagctgagatggcaccactgcactccggcctaggcaacgagagcaaaactccaatacaaacaaacaaacaaacacctgtgctaggtcagtctggcacgtaagatgaacatccctaccaacacagagctcaccatctcttatacttaagtgaaaaacatggggaaggggaaaggggaatggctgcttttgatatgttccctgacacatatcttgaatggagacctccctaccaagtgatgaaagtgttgaaaaacttaataacaaatgcttgttgggcaagaatgggattgaggattatcttctctcagaaaggcattgtgaaggaattgagccagatctctctccctactgcaaaaccctattgtagtaaaaaagtcttctttactatcttaataaaacagatattgtgagatcacataaaaaaa

SEQ ID NO: 137238 - DNA, 958 bp, Homo sapiens
ggaagtggcttcatttcagtggctgacttccagagagcaatatggctggttccccaacatgcctcaccctcatctatatcctttggcagctcacagggtcagcagcctctggacccgtgaaagagctggtcggttccgttggtggggccgtgactttccccctgaagtccaaagtaaagcaagttgactctattgtctggaccttcaacacaacccctcttgtcaccatacagccagaagggggcactatcatagtgacccaaaatcgtaatagggagagagtagacttcccagatggaggctactccctgaagctcagcaaactgaagaagaatgactcagggatctactatgtggggatatacagctcatcactccagcagccctccacccaggagtacgtgctgcatgtctacgagcacctgtcaaagcctaaagtcaccatgggtctgcagagcaataagaatggcacctgtgtgaccaatctgacatgctgcatggaacatggggaagaggatgtgatttatacctggaaggccctggggcaagcagccaatgagtcccataatgggtccatcctccccatctcctggagatggggagaaagtgatatgaccttcatctgcgttgccaggaaccctgtcagcagaaacttctcaatcaccatctcttatacttaagtgaaaaacatggggaaggggaaaggggaatggctgcttttgatatgttccctgacacatatcttgaatggagacctccctaccaagtgatgaaagtgttgaaaaacttaataacaaatgcttgttgggcaagaatgggattgaggattatcttctctcagaaaggcattgtgaaggaattgagccagatctctctccctactgcaaaaccctattgtagtaaaaaagtcttctttactatcttaataaaacagatattgtgagatcacataaaaaaa

SEQ ID NO: 137239 - DNA, 497 bp, Homo sapiens
aagcctgtccaccctgcaaagactcctcgggcagcatgcgggtcccgcacactgcacccatttcctggatgtcccctgcaggcgcgggaggccatccgggcctgctggctgcggccccctctcagccaggcctggctcagcccactgcgtgggaggtcaccggccactccccgaggagctgggatccccgggatgcaggcccacagtgcggggctgcacccatgatgcggagctggcctccaaccctgcgggccgcgccaggcaccaactcagtgtttgtcagtgtttgtttttccaagaaatggttcaaattgctgctcagatttttaaatttactgtagctgccagtgtacacgtgtggaccccattttatttttacaccaatttggtgaaaatgctgctttcctcagcctccccacaattaaactgcacatggtctctaaaaaaataaaaataaataaataaataaataaataaaaagtatcttttctccccaa

SEQ ID NO: 137240 - DNA, 457 bp, Homo sapiens
atcaccgaaagtgagatacaccctaaagaggaaaagcaatttgcagcacgttgaactcattctggtggtcacactgttggaagctctgctggagctgtcttctgagaattgtatggggaagcccaaagcaaatgaggaattatgttcgtgtccctgagaaccgtgactgctagagagatgaccaatgtaccacatgagcctggggcatctgtccatctttatctttcctgtgacatcagaaatccaggaagtggtcaatgtcatgtcaagagaacacagaaggcttcctgaaatgcttccacacgcagaagatgggatcactggagcatccataacagctttcaccgcaatgcaccatgtacatttaatccagagagttcacaatgatctaaaactaattagtcaattttaaacggagtctactaaaccaaaacttgttatttttacgattagtaaa

SEQ ID NO: 137241 - DNA, 182 bp, Homo sapiens
tgtgacttaatggtaattaccaatttctcagtgtaattcttggtatttttttcatactttagagaaggaccagccagccattctcatattctgttaaaatagcttgtcctctcttaactgctgctatgtgggccaaaaaggctagtattgcattgccaaccaagagggctaagccaaggcaa

SEQ ID NO: 137242 - DNA, 579 bp, Homo sapiens
cccagttcgacggagactctctcttgctgccagcatctgcataagatgtgactgctcctcctgccttcctccatgattgtgaggcctccccagccatatggaaatgtaagtccaacaaacctctttcttttgtaagttgtccagtcttgggtatgtctttatcagcagcatgaaaatgaactaatacagtgtctatgtgacaatatacccaaattattaacatttcaatatataattcatgttaagttattgcctagctaatttacaatctttttttctactaaatgtatatattttatacttacagcacactttggcttggactagcaacatttcaattgctcagtaccctcgaataactagtggctactagttccacagttagagaacacaggtggaaaacacacagaaataaaaaactttttaagacgaagataatgcttctttaggtaaaagtatgtgaataccattactttagccactctcttaataagtacttttattacagtacagtggataaataagtacagtaataaaagtacttattaagagagtctccgtcgaactagttcgacggga

SEQ ID NO: 137243 - DNA, 464 bp, Homo sapiens
cgagtcgctctagagtgatcccgactgcatacaacgccgcaggctatgacacatataccattcctgcctgtgctagaggattgcctttaattgcttgctggagcacatatgcttttccctatggtagataagccttgggtctgggagtaagagtgcagagatctacctgtcttggtgccacccaaggtcatacctccgtctgtaagttcccctttcatggaacacaaggtaaacctcacaaagtataaggcagatcttttcccatttcctgcatgtcttctcaatacctgtgattgaaacatgcagtggaaatatccatgcccgtcttgatggatgaagctaactggctggtaggtcgaagccagttcgaggaacaggctaggaggtctgcatggaacctgggattggccatcccctcatgagggctctaatgggaagatgatgccttgggtgtgcctggatgc

SEQ ID NO: 137244 - DNA, 352 bp, Homo sapiens
cgtacacaagcaggaacaaaatctaactgtagatgcaaactggaaacagtcatgcgaaaagaattatttcaaatacctctgaaccctgggattctaactgactgtcagtgataaatgcaaagacaaacagaccggatggacaccttcagcctcagtctgaccaacacagtgaaaccccgtctctactaaaaatacaaaaaagtcagccaggcacctgcaaggctgctgctaagcgtcagtctcactatcaccagccactatggggcatcttgtgtgtgctgcaggaagaacttggtgtcaggagccgaacttcgcaggaccgagagaaacagagccttctgtttttacacat

SEQ ID NO: 137245 - DNA, 427 bp, Homo sapiens
tggattctggagccgcctgccagcaagcatgccagaaccagaaaggaacgccccttcctcctgcagtgtctttcagacatccactactggcaaagcttaacattgttctggcaaggaaaaatatttctatagcccaggtctgcttttgcagagtgaaaaaatggtgaataaagggtgaatttggaacttaggggcaatacattgataactagcacatagtcttctaagagttttaaagttaattttttaaaatgtaagtcatttatctaagactgactttgctgtgagatagggatataatacttttcaaaatttttatttatttatttattgatagagacagagtctcactctgtcacacatgctggagttgagctgagattgtgccattgcactccagtctgggtgacacgagtgaaactccact

SEQ ID NO: 137246 - DNA, 235 bp, Homo sapiens
cgccaagaggggcatgtgggtttttgatctgggaggcggtcctgtgggacttagggtgttgtcatcattgtccccagcagaaaccagtgcagtggggaagtggcttctgggctgaagcctggttggaattcgggttcctagttctgagtccatgccctttgtagtaccatggttggcagtggtggaggacgccacagggtcagatgcccgcggtggggttcctagtctcacttcc

SEQ ID NO: 137247 - DNA, 450 bp, Homo sapiens
attagtcagggttctccaaaaaaaaatcaataacgtgaattggtgtacataattatggaagccaagaagtcctacagtcttccatctgcaagccagagaaccaagaaagccaggggtatagtttagtccaatgtttgaaatctgagcccaaagacctgagaaccataggtgccaatggagtaggtcctggtccacgtctgaaggactgagaacctggagcaccaacacccaaaggcgggaaaaaattaatgttccagctcaaaaagagagagtgaatttacccttcctctgcctttttgttctgagtcctcaacagattagatggtgcctgcctatgtcaatgaaggcaatttttctactcagtctactgattcaaatgataatttcttgaaaacaccctcacagacatgcccagaaatcatgtattaccagctatctgggtacccccct

SEQ ID NO: 137248 - DNA, 342 bp, Homo sapiens
gaaatgtaccacaaagttttacccaaaccactgacttcactctcttaatagatccccatgtatgtttttcttccctgccccaatctgaaggaggtgaaattgggaggatgcaaagaggtagaaaccacgtgtaataaaacagatgtaatggaagaggcacagatagaggatactgtttttacaaggcaggctcttttattattattattattatactttaagttttagggtacatgtgcacaatgtgcaggttagttacatatgtatacctgtgccgtgctggtgtgctgcacccattaactcgtcatttagcattaggtatatctcctaatgctatccctc

SEQ ID NO: 137249 - DNA, 737 bp, Homo sapiens
gtagctactctgcctctgacatccttcaacgtttattatgcagatgtgtatttgttaccaactacataaaattgaaaacaaatttatcatgcattacccaagctttcactggcagggctatctggtcacccctgtgccatgcccatcaaggtgaccagtagcatacggctagagtctgtggtgagaccatcccattgccaacactggcactcaccaccctttaatcagagcctactaagagtggcagccagagagaggggaaacacctgccacattatcaagctttggggtttgctggtacagagactaacgagatacaagctaagatacaaaaataggaccaacaaaaatgctaggctatatttaaacaagttttagcatgtgtaatgataccttcttaacaaaattggattttttcttttgtacttttggtaatttcttttcctgtaggatagcttcttctatttattaattgtataaatcaatgggaaattaggctacatatttacaatgtttatttacatatagtctttgaagaaaaatcagtttagttaattaaggcatccttactattaattgcattattttagaatgttacatccttatctttgtataattatacttcaggaaaacataatgtcaagttgtaaataatggtggacaagtgaataacaattatattattatgcttgaagtttataaagtgtaattaaaagactttatttgaaaggcatact

SEQ ID NO: 137250 - DNA, 567 bp, Homo sapiens
atattcgacggagctctctatgcaggctgcaagttttctgactagcagcacctttcacagccataattattatttggacaatgtttaatgtttcttccagttgtctcatgaagcagggactaaacaccgggctgacattcaccagtgtatactcagcatctctcatgaagtgggcactcaataaacagttgaaccccaatttacctatgaagaaatgaagttcagtgtgtttaatgacttgcccagagtcacctggcttgactgcggtagtcagatttaaatccaggtcacctagttcagcatctattctaggggctactctggggaagggaggatatcaagactttcaagtgggttgggacagggctaccttctatgcttacagttgcctggtcccgagtggtaacagagttgctcatagcacaggggtcactttggaaagcaggactgagaagccccagcctaccaggggaattcataccacctgcgccagagccctcatgggccctgaggaagagcagaatggctcagcccaggcatactagatcccatcatgcagctccctca

SEQ ID NO: 137251 - DNA, 316 bp, Homo sapiens
cctgctgtcaccaggaagggacatgtgccccgaggcggggctgatgtcactgctgcaccctggtggggcgcaccagcccacggctgtgccacccgggaggtgcccttttgttggagggcatttgccaaaaccagcaaacttgggttctcattctgtggccttgaggggtcagggggacagaagtcaagggccagtcctgcccaaaatggggagcattatagaaaacccttcccaccttaagctgaaaacctaaaggtctacactcttagggtaagaatgaaacggaattagccctgctccctccacacgaaagaca

SEQ ID NO: 137252 - DNA, 534 bp, Homo sapiens
acccttcctccttttcaccatctgccaagtggagtgtatgactttgtgtttccacattttctcctttcatcctctgaattctctacaaagttagagactgcagagaaacagaggggtgttcaaggagttagggagtttaggatgggatgcttagggataggcctgcagagttaagagactgccgtaggtaccctggtgtttgtttttctttacctgaagcatttgtagccaaggaagttatagtagagggattctgtcaattcacatctacttgcagttatatggcattctatagagaagcgcatgattttttattatagcatggctgccaagcaacaagctggttttctttcctacatctttggttttcagtttgctgacactccatcgaaggcacttaattttaatgccaaatacagaaacacaaaggacatgtgacaatggtaagagggtggggttgttgtgtcttatcgctattgtaggttgtggaatcttcttattaaaacttacattatacaaagtacaaaaacaaaa

SEQ ID NO: 137253 - DNA, 603 bp, Homo sapiens
acccttcctccttttcaccatctgccaagtggagtgtatgactttgtgtttccacattttctcctttcatcctctgaattctctacaaagttagagactgcagagaaacagaggggtgttcaaggagttagggagtttaggatgggatgcttagggataggcctgcagagttaagagactgccgtaggtaccctggtgtttgtttttctttacctgaagcatttgtagccaaggaagttatagtagagggattctgtcaattcacatctacttgcagttatatggcattctatagagaagcgcatgattttttattatagcatggctgccaagcaacaagctggttttctttcctacatctttggttttcagtttgctgacactccatcgaaggcacttaattttaatgccaaatacagaaacacaaaggacatgtgacaatggtaagagggtggggttgttaattttataaatatagttagtgggggaaaattatatttacaaatgcatttaataagactctggtattttgaattttaacttcccctcaatattaactgctactctttttgggaaactccaaagggaagcactgtttaagaa

SEQ ID NO: 137254 - DNA, 254 bp, Homo sapiens
gtaatcctagctcctggggaggctgaggcaggagaatcgcttgaacctgggagatggaggttacagtgagccaagatcgcgccattgcactccagcctgagcgacagagtgagactgtctcaaagaaaaaaacaaaaaaaaaattgagttatctttttttcttactggtttataggagctctttcctaagtgctttttattatggttttaattctttggaaattggccgccttagtgccgtttatggaagctag

SEQ ID NO: 137255 - DNA, 762 bp, Homo sapiens
atcagttaccatgctctttaagttttaccttctaactatctcttgaatcttcccccttctttatgcccacttaatgcagatccttgtcatttctctcctgggttcaaaaaggtaattatttgagtgccccttaagtgtcaggccctgtgctagacactgaggatacagtggtaacagtatttgccttcagagagctcagtcttcacagtaaaggcagacactaaataagaagtcacagcagaacagaggttgctaaactgtggcctggagctaagaatgggttctgcatttttaaagggatataagaaaaaggagagtgatagcgtgtgacccacagagtgcagaatacttgctgtgtggcccttcaccgaaaaaatttgcctattcttgtgacagtgttatgaggaaaataacaaaatccattctctgttatacactcattctgcagaaacactcgatgtatgtgatcctatattttctggtcaccagcactcttcccagtccagtctcttaccattaccatttctcacgtccttgaacctcagccaccttgatctacttccagatctacagattcgtcactctttctcgcggccagggagtggcatgtgctgcagcctgaaaagccactatttcttcccttgctcccttgattcttcatctgactgcctcctgtgtatccttccttactcagctgggggaatcctttcttccagaaaacactccttccttcagtctgagtgaggcagccttctgtagcat

SEQ ID NO: 137256 - DNA, 708 bp, Homo sapiens
atcagttaccatgctctttaagttttaccttctaactatctcttgaatcttcccccttctttatgcccacttaatgcagatccttgtcatttctctcctgggttcaaaaaggtaattatttgagtgccccttaagtgtcaggccctgtgctagacactgaggatacagtggtaacagtatttgccttcagagagctcagtcttcacagtaaaggcagacactaaataagaagtcacagcagaacagaggttgctaaactgtggcctggagctaagaatgggttctgcatttttaaagggatataagaaaaaggagagtgatagcgtgtgacccacagagtgcagaatacttgctgtgtggcccttcaccgaaaaaatttgcctattcttgtgacagtgttatgaggtatgtgatcctatattttctggtcaccagcactcttcccagtccagtctcttaccattaccatttctcacgtccttgaacctcagccaccttgatctacttccagatctacagattcgtcactctttctcgcggccagggagtggcatgtgctgcagcctgaaaagccactatttcttcccttgctcccttgattcttcatctgactgcctcctgtgtatccttccttactcagctgggggaatcctttcttccagaaaacactccttccttcagtctgagtgaggcagccttctgtagcat

SEQ ID NO: 137257 - DNA, 1140 bp, Homo sapiens
tttctttttttaaccaactgggtctgtgcaagaattatcctgactgtaagtgtggattaaaatagctgttaaaaattgtcatcatggctgggcacagtggctcacctgaggtcaggagttcgagaccagcctggccaacatggcgaaaccccatctttactaaaagtacaaaaattagccaggcgtggtgggggctcctataatcccagctactcaggagcctgaggcaggagaatcgcttgaacccaggaggcagaggttgcagtgagacaacatcgtgccactgcactccagcttgggtaacaagagcgagactccgactcaaggaaaaaaaaaaactgtcatttggggtgtaatctaaatagtgaaaacccaattatggcaaataaacatacaatctataaaactgatatctctacatcatgatgaaaactgaagttgaatcttaaaatttaataaaggcatcgatctagtcggaacatgtgggcagaaaaaaataatacccaaatatataaggctgtgttttaacagttggctttaaacgtatacattaatttcaactttctattttatgagaaagaacaatagggaaataaagtacagccagccctctgtgtctatgagttccaccaattgtgggtcaaatacactggggaaaaaatgatgtctgtactgaacatgtgcagacttctttggtcattattccctaaacaccacagcataacaactatttacagagcacttacactgtattaggttttataagtaatctagagatgacttaaagtatacaggaagatgtgtacaggttatacgcaaatactatgccattttatatcagggacttgagcatctgtagattttggtatccatggaaggacctgggaccaacctttcatggatactgaggcaggaatgtatatataattatgtttagaaaaaagtgatggggtaaggaactttgacagttaaagtagaacattctcaatttataaaaagattattgaccgggtgcggtggctcacacctgtaatcccagcactttgggaggtcgaggtgggtggatcacctgaggtcagcagttcaagaccagcctggccaacatggtgaaacctggactgtactaaaaatacaaaaatt

SEQ ID NO: 137258 - DNA, 1639 bp, Homo sapiens
tttctttttttaaccaactgggtctgtgcaagaattatcctgactgtaagtgtggattaaaatagctgttaaaaattgtcatcatggctgggcacagtggctcacctgaggtcaggagttcgagaccagcctggccaacatggcgaaaccccatctttactaaaagtacaaaaattagccaggcgtggtgggggctcctataatcccagctactcaggagcctgaggcaggagaatcgcttgaacccaggaggcagaggttgcagtgagacaacatcgtgccactgcactccagcttgggtaacaagagcgagactccgactcaaggaaaaaaaaaaactgtcatttggggtgtaatctaaatagtgaaaacccaattatggcaaataaacatacaatctataaaactgatatctctacatcatgatgaaaactgaagttgaatcttaaaatttaataaaggcatcgatctagtcggaacatgtgggcagaaaaaaataatacccaaatatataaggctgtgttttaacagttggctttaaacgtatacattaatttcaactttctattttatgagaaagaacaatagggaaataaagtacagccagccctctgtgtctatgagttccaccaattgtgggtcaaatacactggggaaaaaatgatgtctgtactgaacatgtgcagacttctttggtcattattccctaaacaccacagcataacaactatttacagagcacttacactgtattaggttttataagtaatctagagatgacttaaagtatacaggaagatgtgtacaggttatacgcaaatactatgccattttatatcagggacttgagcatctgtagattttggtatccatggaaggacctgggaccaacctttcatggatactgaggcaggaatgtatatataattatgtttagaaaaaagtgatggggtaaggaactttgacagttaaagtagaacattctcaatttataaaaagattattgaccgggtgcggtggctcacacctgtaatcccagcactttgggaggtcgaggtgggtggatcacctgaggtcagcagttcaagaccagcctttttctactactgtttattctgctactctatgtctaaaccacaacagatcctttatttcctatttttcactatcacaacgatttggtaaatatttttatacacgagtattaggtaaacattttaactagaaagtaccaacccctggccaggtgcaatggctcacgcctgtaatcccagcactttgggaggccaaggaggacggaccacaaggtcaggagatcaagaccatcctgactaacacagtgaaacttagccaggtttggtggcacacgcctgtagtcatagctactgggaagactgaggtggaagaggaggatctcttgaggcccagagttcaaggcggcagtgagctataatctgcactgcactccagcctaggtgacagagcgagatcctgactccaaacaagacaagccttgaaatcaaagttgatttttaccaaagcctcaatggtaggagttttagatttcttaaaataatagcacactaatggagtgcgtgattttctttagattaaatgtttacatatttatacaactcgt

SEQ ID NO: 137259 - DNA, 247 bp, Homo sapiens
tatcacccacctggcttgctcaggtctcctgctcccgctcttacccatagagttgttctccacatcagagagatccttctaaaacctgtcacttctttgcttaaaaatcctccatgcctttccactgcccttaaagcaaggtcccatgtggccctacaagacctggcccctggtgacgtctcagacctgattcctaccactggcttactctactctggccatactggccagacctgagcaagccagg

SEQ ID NO: 137260 - DNA, 230 bp, Homo sapiens
tgtcatgaagctaagctggcttcaaccctcctgtcatctgaaaatcagcaacaacatgtcattcaggaaatcgtatcaggtctgccttcaaaatatatctagaattctttcatttctcactaattcccactgccctgatcaaaaccactattaaattgcagcagatttactgatttccctgcttctgatcttgtctgtcttcactctgttcttcacacagtggtcatatt

SEQ ID NO: 137261 - DNA, 303 bp, Homo sapiens
ttttccacaggggggataaagcatttagactgagcttctcagctaggaaaatctatctatctatctatctatctatctatctatctatctctatagataaaatgatttgttcaaccaaactaagttctttttactgtatcacattcagcagttcaggtgacttacctcagctgagtttcagtaccctgagaactctttttgcaaaggactggagtttagtaagaagtccatttcttgatctatgatgttttcctcaattcctggctaatgcctggtattgtgtgccctgttcatggaaaaata

SEQ ID NO: 137262 - DNA, 268 bp, Homo sapiens
gtcaaaacatcaatagttcctaataggactcagagaaatgtcaatggtctcttgctcttcactttgtcttgacttattagtattattttagtcaaatttctttcagatgagataatatgtctttaaactctcttatgtctacttatgttcatccataaatgacttgaaacatttaaatcaagcttgtccaacccacggcctgtggactacatgcatcccaagacagctttgaatgcagcccaacataaatttgtcaagctttcttaaa

SEQ ID NO: 137263 - DNA, 765 bp, Homo sapiens
cgcgatctcggctcactgcaacctctgcctccctggttcaagcgattctcgattctcctgcctcagcctcccaagtagctgggattataggcatgcaccaccacgcccggctgattttgtatatttagtagagatggagtttcttcatgttggtcaggctggtctcaaactcccgacctcaggtgatccacctacctcggcccccacaaagtgctgagattacaggcatgagccaccacgcctggccgaccccgtctatattttttaaaagaagaggaattattttaaagcagcagattaaaggctgacttactttccagggtaggatattatagcaattctgatcacctagggtgatacaggcacttctatttgtgacagttgcattttgtgacacatggaggtgacacagaggctttccctgttttaccagtgaggaaactgaagctcagaagtaaagggaatgatacaaattcacacactagtaagcaacagggccaggactcagaccagcactgtccaactgcaaaaaaggctacgctgtcagaactgctccttacagcagcactagcagtaataagacggtaatcacaacagctaccatttatcaagcacctgtcgtgtaccaagaatggtgctaggtggccggccgggcacggtggcttaagcctgtaatcccagcactttgggaggctgaggcgggtggatcatgaggtcaggagatcgagaccatcctggctaacatggtgaaaccccgtctctact

SEQ ID NO: 137264 - DNA, 286 bp, Homo sapiens
tagcagctgagccctttaatgagcagggctctcttcaattcaccatggcccagcctggcctgtttcactcactcaggtacctgtctggcctccagggggcagagattttgactgtagggcacccattggtcccactaggtcagaagccagcagcctccaaagaagaggaaaaaagggtgcttctattagaattggtggaaaacactgttcccaagacttccatgggaccctctcattcctcctccccgctgctactagtactgcctggtcccctctcccactccca

SEQ ID NO: 137265 - DNA, 195 bp, Homo sapiens
aactttgttaacagcttcttctgtcattaagctccattcccatatgatattcttatattagtccttgagttctcactttaagcggctatcagttgacttcttgttatagcagatgaagattttttctttttgttttttgttttcttttttgagacgtagtctcgctctgtcgcccaggctggagtgcagtggcgc

SEQ ID NO: 137266 - DNA, 430 bp, Homo sapiens
ggctcattgtttctcactctctcttcccattcatacactgtatgatggtgtacacaccatcaccttaaattaaggtatcatcaccttaaattaataaaatttactcattggggggaaaaagcaaattctaaaaaacaaaacaactgtcttattttctaaccaccataacaaataaaacagaagtttccatcctattcttgagtaccctaattatttaaggaaactcttttctccattcttgatcaaacactttaaagaacactaatataactatactttggtaactgaaagtctcaagtaaaaaataacttcaaaatatttgaaaaggtgatcttttgccatcagattggcttatcatagaaggatggttaccagaggctggaaagtgtagtgaggagctgggggcagaaatagggatggttaatgggta

SEQ ID NO: 137267 - DNA, 776 bp, Homo sapiens
tcaggagtaagccactgctcctgtctctggccattctgagacctgtgcataagtaatttatgtataaggcatagtttgagagactggagcaattatttagaatatgaagacgttctaaatttgtgctacagcaatgtcatccatctcatgggccccagcagaagctgatgaaacttaatcaaaaataaatcaagagcaagtccaaaccaaattggaagcacatcatgaatattcgtgaacatctggatgtgtgtgtgggggggtgtatgtttttttttagtgtgtgcaacagcagagacatgatttcttaacaaagatgccaaaaggaagacagattttcatctgtgatttcaaagggtgtctttgtttgtatgtgtgtgtcctttctccttagggtgtgggtttcttttctccgagatattcctttgatctctttcatctttcgggatctgtttgggtattttatctgaattcttcattggagtcagtcattttgattcatgaagattaaacatttccttctaaaggagaatttcaacttaaggaaagttttactatttaatatttttgatgaatcttttcaatgctagcgatgtgataattatcaattaagctattctgcatcattgatcatcagtttcacttcacatgtctaaacctcagggtacggtactttatctgccttgctacctaaagtactgccaaaaactaaagaggaaaaaacaaagtatgggaaggcggtaataacaaccatgctgataattatcacaaaaatg

SEQ ID NO: 137268 - DNA, 384 bp, Homo sapiens
agttctgttactaaaaatgaaggagagaatgggtattgagtagaccaacagcaatctctgcaagactggacaaaaaagaggcctgcagatgaagttgagaaggaatgaccagtaaattagaagaaccaatggtggggaggctgtttcctgaagggcagttccctgccttcctatgaactcaaaaggtagttagattttaatatagcccctgctgtgtagaaggccaagagtaaagacattagctctccacttccaaggtattctgatggagaaccaacttgggtggagcggggaactgcttcagctgacagggtcccttaggaaatcacataccttggctgtattctcttgtatctaatacaggcattggtgctaacctgcttc

SEQ ID NO: 137269 - DNA, 431 bp, Homo sapiens
agagaccttcctgcagggaaaaaggatgcaaacattcttggtaatgctaaaggaagaatacctgttaaatcagttcttcctaatcaaggctatacatcagctacccaaggagattttgctaatagctacacgcccaggccccaacccctggagattctgattaagtaggacaagaatgatgcacagatgtgtatattttcaaaaagctcctccaactggttgtgacacacaattaaaacctgatttaaaaccactgttttgaattcccgagaagatttcaggcaatctgtggacactcatcagtagttgtgttcaagtcccatccaatctaaaaggggaagcacttttcaaacaaatatactaagctgagagcaacggtttttctgactagctgtttaggtcattgcagaaaagctactcacctgcttaat

SEQ ID NO: 137270 - DNA, 641 bp, Homo sapiens
aatgtgtagtaatttgttatagaaacagtaggaaactagttcatcatgccattcccctaactattccaacatctcactacctgtatctcagccactgctcatccagctccagctgccttgctctgtgcatcataaccatacaggtagccgcttatttgcttacttcttatgtggcctgttaccccggtgttgagacccccaccccagagtatagtgttacttcttaatgttcacatttttgaaacctcatttttgccatggtaactcttccaaatctcattactcttactccctcagtcctgtctttagtccactacattttagtagatgaccttacccctactctactggtgatgttgacagcatctgtcttgagctccctttactttcaaaacctctctgtgaattccagtcatccatttctgggtttccatctctggacctctgttcagcatttcacagtgtcaacaccaccttccttttttccatggcctctgtgacattgcattcattttcccatccctctaattgcttttccccctttatatcagccatatttttttcagtccttaaatctaagccttccttagtttctgttctcaaacttcaggcctccttttaaaatttattcattctcttga

SEQ ID NO: 137271 - DNA, 194 bp, Homo sapiens
cagtgcaagtgccagccggggcccctcatcgactacctgatgctaccatgcccccagctgatgggacagagatgaggccctggaagctcagccctcgtccaagggcacccagtgaccaaccgcacccgctggacttcaaacttggagctctgtgccaccaggaagccccctcacccccaccactgaaggagctc

SEQ ID NO: 137272 - DNA, 155 bp, Homo sapiens
ctgaggttactggttagcagtgattgtcacctccagcctctatgtctgcatagtataatgctccagtggattttaatcttcctgctttttgcaaagttaaactgcttagataaactcttacgtgctttgtgcttaatacgaaattttagcatgag

SEQ ID NO: 137273 - DNA, 272 bp, Homo sapiens
actggaagctattgtttactactattattactagaattcttatcatcactgatagggagagagcacccaaaatttccgaggtagaggctgggacgacctctgggtccggcagagtttgaaggggagggtaagaaggcgaggggagctagcgccgcccacgtccagcccgtgcaccctctctcgccccacagcctgctggctgcacgtgtggctcttctctccgcagcgctggtgcgcgaagccaccgggcgcacagcccagcgctgtcgtct

SEQ ID NO: 137274 - DNA, 151 bp, Homo sapiens
agacaattttaataagtcatagagctgttagagaggatgattcaggccaatcaaatctgaccaaagatctacttttagtgggtggtgggtagattattaattttcattcataataaatactttaatagacaataaaaattcgtccacttta

SEQ ID NO: 137275 - DNA, 367 bp, Homo sapiens
atgggcaggttatatccatggaacagcagataactttgtgattcttctgtcagcgaagtgtgggtgtaggggagttcaaccttgtccatcagctgctagaggcctgaccctgcccttaacagctgcagagaataaaagtatcagcttgttcagctcctggcatgcagggtacaagcagttgagctgcatggaattggatctcatagttgagtttcttggcaccctagataccttgttctctcctcgattacgggtgtagactttgtcttggtggctgttctgggcctcctaatttagttgagattcttttcttttctttttttttttttgagatggagtctcgctctgtcgcccagcctggagtgca

SEQ ID NO: 137276 - DNA, 398 bp, Homo sapiens
tactagctacatgaccttgaacaagttacttgggccttaagtccttctctacaaaatagatataacagtaataacttctaaagttcattggaagactgaataatatatgaaaaattcatagaatagtacctgaaacacagaaaaaaattaatcattatttattaaacagcttgacaaggcctgttaaggataaaaattaaaattaaacatgaatattatcctcaggaagctgacagattgagaaaaatacatcatgtttagaaatagcaataattcaaagaagaaattgctaagaaagacaagtgtaatatttatgaagggtaatctcacttcagggagggatacatcactaccaccttcaggaataagaaagctccatttatttttaaaattttatt

SEQ ID NO: 137277 - DNA, 710 bp, Homo sapiens
ctagatctggatttcaaaaagatcactctggcagtaaaatggagtacaactcaggaacaggagggcagagtggctgtttggagaaaggcaagataattttacagtctagaagagagcctggaaatgctcccttccacagaagttccagctcctgcagcctagttccgtcctcatgcaaccttccttccgtgaggttctgcctaccaagagggaaggaggaaggacctgtgcaatgagctttaacccgagacagagaaagtgaacaaactggaagtccagctggcaaatgagtcctttttgtgtccatatgaatgagttcgcctaggtgaaataattcaaaagtggtttctgaatttgcaagttgagaactcagctctggattcttggtgaccccaagtacaggaggcctgaaaggccctgtctgagaatatgcactaggcagctccatctcctgtactcaccttttaactccagttaagaagctatcatgtacaccccatcactgagaagatgtggaaagtgaggcccagagaggtttagtaacttctccaacatcacacagtaacttttaagggccagtccctgaactgtcatcctaaaactcattaggtgtgtgatcctttcaaaatgctctactggccggcatgtttagggatgagtaatggagagagtcataaaaacatacttttaaattaaattcttttttcaaa

SEQ ID NO: 137278 - DNA, 569 bp, Homo sapiens
ctacctcagtcttccgagtagctgggattacaggcatgcaccaccatgcctggctaatttttgtatttttagttgagacggggtttctccatgttggtcaggccggtctcgaactcccgatcccaggtgatccactagcctcggcctcccaaagtgccgggaccacaggcatgagccaccgcacccggccctaattttttaaaatgtttttaaagaaacagggtcttgctacattgcccaggctgggcaacactaattgtataaacaggttgggcatcagtgtaagcctggctttcaattcaaactcaaactttgaaccaatggggtccatattatgaaggttccttttacatgtgaatctctgaatcataggttcactatgagattttctcctggctgagaggtcatcaggataagagttcctcagtgctccccctaattttccagggtagaaagcattctctttggtcccaaagaacgttttgtttgaccaaaagaaagagtccagctcaggaagaaactctctatgggatctgaaaaacagacccctagagagtctccgtcgaact

SEQ ID NO: 137279 - DNA, 172 bp, Homo sapiens
cagtgacacagggcatcaagcccagagtggcagctggagcacctgaccccatctgcaaagggtagatatatagcaggagaaaagggcacctctcaatccacacacccttagcaaaagcttttctcaagggaaactagtcaagaggcttcaggaaaatgaccaatagaaagct

SEQ ID NO: 137280 - DNA, 550 bp, Homo sapiens
ctagaggatcctcgctctcacccacccatgatcatgcatactgtactccagcctggatgacagagtgaaaccctgctctaaataaaagaaaatagaggcagactgtggtggctcacacctgtaatcccagcactttgggaagctaaggctgttggatcacccgaggttgggagtttgagaccagcctggccaacatggtgaaaccccgtctctactaaaaacacaaaaattcacctggtgtggtggcgcctgcctgtaatctcagctacttgggaggctgaggcaggagaattgctggaacccgggaggcagaggttgcagtgagccaagatggcgccattgcactccagcctgggcgacaacagcaagactccttctttaaaaaaaaaaaaaaaaaaaaaaagaatggaaacgaaaaaccaaaaacctgctttcctcctcaagaaaaaggcagagagaggcagcaaagaaagaggaggcttagggtgaagggtctccctgtctgctggtaaaaccgccgccccgcagagctgctgcctctgtggggctg

SEQ ID NO: 137281 - DNA, 283 bp, Homo sapiens
agttcgacggagactctcccttcatcagggaagggagagtgcagagaccctccagaatcaaaggaggccagcatggctggagcagagggagcaggaggtcccagaggccccaggggcaaatcagataaggcctttctagctcatggttgaaacttttgcttttagtcttagtgaggtgggaagtgaggggatttgagcaggagagtgacatgatttctctcttgctgtcttccatccttcacacgttaccaagacacatcaagagagtctccgtcgaactggg

SEQ ID NO: 137282 - DNA, 305 bp, Homo sapiens
atacatttacactatcttccctcttccctgaatcttagaaacataacttcttcagtaggctgataaaatatgaggcatggagaaattttttttgagtgcttgtgcagagttgggactttatgaatacattttgctgaaaactaggagcggggctaagagcttacattgaaaagttaatttacaactgtacagatagttgtacagttgaagttgagtgaactccaaagggatttacataatataaaggtatgcgtttacatttgaaaggaatataaggcctgtgatcttggagacatccctaggct

SEQ ID NO: 137283 - DNA, 364 bp, Homo sapiens
ctcgggagagctctttctccattcatcccccgcgcccggccaacagccccgccacccccgcccgcgcagccggggcactaaaagcaacccccggcgccccgctccgggcgccccgctcccgccacccccagcactgctcgcgtagatggcgctcctgggtcgcgaagtcccgcaaaagccagaggcgaggctgggctttaaccccaaagcccgaggaggttaaagcctaagcctgcaaagagcgggcagcgtccggcaggagcggcgtccccatccagccctccccggcaagcgcgggagacccacgtggccgagacacccactccgaggtggatcaggatgcgcgcccggactccagcagccc

SEQ ID NO: 137284 - DNA, 323 bp, Homo sapiens
ccctcttcctcatcatcactgtcatcaggtctgtaatctagaaacctaggagataacctgatagcacctctcttttacttaccctttcaagtctatccagtcgcctgtttatgttactccctgatggctgtcaaatctgtccaagtctcttctccacttatgtacctctccagatacgcaaggctaagctagcagagtcttgcaaatggactacaacgaggattgctgttagggactagaataatctccagactagtttttcacatcctcacttaaccattgtccacagtgcagccagagcaatctttttaaaacagtaattt

SEQ ID NO: 137285 - DNA, 191 bp, Homo sapiens
ggctgatgtggcagaatgacaaggaaaacctcgatttcctcagaggtcaacacggggtggggtggaagttggtcctgacatctccccacccccacctgttccaggtggattgtacataaatggaaaaggcaaaatagtaaaaacgtaagcaagtgttctctaagacactaaaaaatcaaataaggcagaca

SEQ ID NO: 137286 - DNA, 205 bp, Homo sapiens
ttaggttggtgcaaaagtaactgcgatttttgctattaaaagtgatatttccattacataatattattgtaacaatttcaaatatcttgagaacgataatggctttatgattaggatagagaatgtcctatcttcttagaaaatacaggctgaaatacttaggagtgaagcgtcataataacttactttaaaatggttccgcaaa

SEQ ID NO: 137287 - DNA, 165 bp, Homo sapiens
ccggaggacttgggctgtttgccaggagctgtgggccctggggacccacccaggcacttgttgctgccagcacagcttcaggtgctgagctccagcagagctaacttgtcctgggaaattaagtgccaagtggggacgcagctcgtgacagcagggagtggaacc

SEQ ID NO: 137288 - DNA, 909 bp, Homo sapiens
gcagactctcaccggcttctggagatgttctccagtccagaattgctttatgtttctgggttgagaggttactgcatgccttatctacagacctacaccagaatacaagcttatcaagagcggctgcacacttcctgccatcatgtcccctaaatgacaaacaaagatggtttacatgtgcaagttgtgtgtgctaccctgtcttaggcacacagttcaatgcggaaaggaatggaggccagatgtgaagtcaggattctacccagcagagttttaattgagctcctggggcaagagtgagggggtgggccagctggctctcttgctgaccttactgttatcttaactgtcaaaacctccccgctgtgtatatccctaaggactatggcaaactgtcctatcccatagcataaagggtggggatgtctctccctctgtttggggaatgactgatcacctagtttcagccaagttctcagtaatcttccttccgtcattttgccaaggcagcatttcacttcatctaaatgcctcgagctctccaaacagccccattccccttttgcaattttccaggggaaaaaagtcactattgaatgtccttacttctgcagcaggaggtcactcttcccattctcctgcctaaggcatctgtcatcaacatttggacagctagcacatcagaacacagaggcagtcccacgttgctcagcagcctagaaatacatgcccagaactgccagctttccgagtggtgctggctccacagccgcatgaagagaggaggaaggcgaagacacttatccaaagaacagacacaacaacacaaaatcatttgaaaaagaacatctctgtcagcagctaccaccgagcaacaagtcctccttgaatgtgctccatgctatgatt

SEQ ID NO: 137289 - DNA, 145 bp, Homo sapiens
ggggaggctctcctgtcagagtaggcattttttcatcctcactggtcttgcgagtggataggcagccagctcctttgtgcccctgagatataactgttcttggcattcttttggcatctgctgttggagcatgaggctggtgtaa

SEQ ID NO: 137290 - DNA, 368 bp, Homo sapiens
ccatggcttcatcccaaaattctatgcagataattctcagacccgtacctccagcccagacttctctcaacagccacttacatgactcaaaggtatttcaagctcaccatggtaaagaccaaattcgtgatctttcccagacaaacctcattgtcttcctgtgttgctatctcatggaatggcccaactacccatccatgcagcagaagcagaaagtccaggcattatcttttgtacccctcctgcattcaatcttgccctgtagccccctgctatagtctgtcttccaaaaagcaagagagaagtctttccaaaatgcaaggtgaatcacgatactagctatttaaaatatattgctcattggaaac

SEQ ID NO: 137291 - DNA, 454 bp, Homo sapiens
actctacccaaacactcccctttcttggggtggcttaatgctctgtctcattgcccttcctactgcctacccacatatcacatctaccaaccttccacgcagccatagacgtgttctatcaaagacagttccctccccaagaggacttctctgactaatcataatctgcctttggttgtaattttgtgttgtgaggccaccacaagggtgtttgctgaagaggtcctggagtcccctcagagcacgcttgctaccaggagtcagcatgtatgtaacttcatcagctggggcttctgcttctcttacaaacaggtgccagggcccaccttgggcactcctgcagaagtgagcagaggcttctgccatggggccataccttgtttgacctaggtgccagcactgggacagatggcacagcacagtcctgccgttcccacagggtttgtgtgtgcat

SEQ ID NO: 137292 - DNA, 802 bp, Homo sapiens
cagagctagatctggcagccagagtcccaggaggagggcacagcgagtgcagagcctggatgtgaggaggtaggtatctaagggaagagggtacgcgtgggccaaggagtagccttaagggaagttggacaaggtgccagggttagagcatggggtcttggagaccaaggaaggaacttgggttttaatcaaagtgtgctggacagccctggagagttgtacacagagaagtgacagggtgggatttctgtagtttaaatctctctggctgatgtgtggaaaaagaatggaaagggcaggggaaaggggaaacaggagacctgttgggaggcacctgcaattgcacaggtaagaactatcatgacttgaactgacagagagatatgggaaagggatggattcggggcacattctgaagatagagccaccaggtttactactatattggatgttggacttgggggaggcgcgtggttggtgaggaaagaataattaagaacaagattttggcctgagctattcctggagctaccatgagcaggacaggaagaccaggggagcaaggagtgtgggggatgttgggtggtagaggggagggacaggagggaaatgaagacctgtgtttctggtagtgaaaagcaaaggagatcaagatgctgcagtcaggaagctggaaaaataccaagccagggcgttggcatgggcaaaggagcgagggcctcagtcaaatgctgctgtgagggagaatgagaccaggtggagtaatgagtacaggggtgccaggcttcctggaagcggcagc

SEQ ID NO: 137293 - DNA, 336 bp, Homo sapiens
gtctctcaaggagtttataatctagtaggattgacaggtccctgtgtagacacatagagtaactaaagggcaaatgcatgtagagaggaggaagaaaggggaaaatggatagagggtgggaattaacaaaaactttatatagattcctttttatcataactgtggaaacttttctatacaatgcccaagatgaacttgatcctttttttttttgagacagagtttcactcttgttgcccaggctggagtgcaatggtgcactctcggcttaccacaacctccgcctcctggattcaagtgattctcctgcctcagcctcccgagtagctgggatta

SEQ ID NO: 137294 - DNA, 177 bp, Homo sapiens
ggagcacctgttttgtggcaggtcctgctgcagacacaaactacaagtccgtgggagagacactacatggttctcatttggggtacattcctggaaatggaggagtgttcatcagagctgtaccagttccttacaacgcagtccttagtgagatgtcttccctgacacaatgcttta

SEQ ID NO: 137295 - DNA, 239 bp, Homo sapiens
cgtggtataatgtatctgtgttttaagctaagtattattacaaaagtggaaaattagaaaatgttcaaaagtatataaagttaaaaagttacagactaagcttagttttattactagtagtagtaatatttttttgagacggagtcttgctctgttgcccaggctggagtgcaatggagtgatctcggctctctgcaacctccacctcccgggttcaagtgattctctcgcctcagcct

SEQ ID NO: 137296 - DNA, 294 bp, Homo sapiens
taatagagacacggtctcactctgttagccaagctgggttacagtggtgcgatcatagctcacagcagctgcagccttgatctcctgggctcaagcagtcctcccacctcagcctcctacgtagctgggaccacagatgtgtgctaccaccccacccactataggaatcttttttaatgcatttgcagtttaccaaaatggcttttcacatcttcaatttgaaaagtgttatcttgtccgggcacgatggctcacacctgtaatcccagcactttgcgaggccaaggccgaagg

SEQ ID NO: 137297 - DNA, 457 bp, Homo sapiens
caaagacagggatggcacaaagcagaagctgttgtcttataaaattttatgatctcaaacttatatttgttaagcctcttacaaagaagttgggcagacaggggaaaagataaggggacaaaagtaatatgagtccaaaatgaatattggccacactgtagaacaacaaagttcctgtgaccccaactgaagatcatcaaagagattgtcaaccagtgcaacatcaggaagccctactatattagagattaagaacttccctggattatgaacaaagaacatcaatgagataaatagacttaaaaaaaatcttcccttggccaggtgtggtggttcccacctgtaattccaatactttgggaggctgaggcgggaaaatcgctatgatcccgagtgccggaccttgctgagcgccaaaattgcactacttctctccagcccggtgacagagcgagac

SEQ ID NO: 137298 - DNA, 619 bp, Homo sapiens
gacttgtcttattagaatggagtgtctcattccattcacctgtcagcaccattctcttccctgcagccaagtgagctttcactaaagtggtctgttcttgctattttccctactttttttctcccctgctgagacggagtcttgctctgtcgcccaggctggggtggaatggaacaatctctgctcattgcaacttccgcctccctggttcaagcgagtctcctgcctcagcctcctgagtagctgggattacagacgcacatcaccatgctggctaatttttgtatttgtagtagagacggggttttgccacgttggccaggctggtcatgaactcccgacctcaggttatctggccatctcggcctcccaaagtgtggggattacaggcatgagccactgcacctggcctgttttccttactttaaaccagttttgacttgcccttctacctgaagtgaaatgtagacttattatcaaggcgtcggtgctttccaggatctggtccccaccgaggccattctttctcctcttcactcaccctagtcacactaattcatttttcactttgtgtaatatgccacattctctcttacttttcttacatttcctgtgctct

SEQ ID NO: 137299 - DNA, 336 bp, Homo sapiens
caaccctggactgtctgaccctaatgcctccaactctcatctaggggatggcaaaggaccccctcaggcccctgccatgtctactcctcctgcctggcattctggctgcatcctcccatggcttccttgcgtgcacaggaaagcccagctccatgcccagcagccttccttcctgcagccacctggccacctctggttccctgctgctctaggttccttccagcctcctggcctttgtccctgacataccctctgctgggagccatccctccgggctctttctgctgaaatctactcacccttcaggtctcagctaaataccccaaccccagggaa

SEQ ID NO: 137300 - DNA, 138 bp, Homo sapiens
gacgttcccctgctaagctgcatttcaatatcagcctcatgcattaaccttgaaacgctgtgcccatgatgtaggtagcgtcttcattttccagatgaagaaattaagacactgagaggttaaatgagctgcccaagg

SEQ ID NO: 137301 - DNA, 456 bp, Homo sapiens
cagggcaggggctggcatgtaataatcactcaatcaatagtaagcatacatgttgataggtttagagaaaacggtaacttccttcaaatgtcagtctttccgaatcagttcttcagaggaagaacagaagtaaggcggagaaagaaaaattgcaactttttgccatccctgggacccaccctggacccacactggacactggatgagagaatcttcggcttctgtattcccgctttcttccctaaagctctctgccttccagccagaaaggctgcctagctcatcctgcaaactgcggctgcattgcagcaatgacttgcctcctcctgatttaaagcgaagggcactgggttcatccttgcaaggtggaattttacagcggcaaataatggtggaatcctgagatacctcctcaatctatgacagattttgaacaaccacccactccagggatga

SEQ ID NO: 137302 - DNA, 421 bp, Homo sapiens
tcatccatctgtacttttgaggttaaatttaatctcctctaaaattcaaatccagggaatgtggattagaatctgagctgttagctggcatactaaagactaaatgaagctagtagcagtgatgatgaagagaagtgtacagattttagaaatattcagagttagaattaaaaagtggacagatttggcaactgattaggggtgggggcaggtggtagggagcgaggccaggattccaggctggggaactgggtgtgtggtgatgatatgtactgaggtggggaactcgggagaaagagaagacttggggaacaagatgttgagtttggtttgggacagagtaggctccaggtggtgaagggatatgccaatggaactgtctgctagctgttggacatagaggtctggagtgcagaagaca

SEQ ID NO: 137303 - DNA, 224 bp, Homo sapiens
caggaatctatcttggctatttatgcaccaatccattcttatttcttaaattattatcaagagaaaagtttcataaaacagaaaaacaccatgttttaaagtaaaaaaattttgcatatatattaatttttagggaaatcattatgaaagtgctttacataagtttatctggaatgtagattttcaacgtgtgaataatgctaacattattgtggctttatttt

SEQ ID NO: 137304 - DNA, 316 bp, Homo sapiens
taatacagggtagttaaaacaccttcaattggtgtattataaacttaaaagatgataaaaagcaaaaagtgaaattttattcctctacaacttgatataatttttatattatactttcataggaaaacaagtgatgctataactaaaataaatcccttcactgcagaaaaataaaaatttttaacaggaattttccacacagattaagatattctaccaggatcttaaaaatataacatctataaacccattctataagtgtcccactatataagaaatgtttctgtgcatttaagaagtcaattttaacaaattt

SEQ ID NO: 137305 - DNA, 270 bp, Homo sapiens
ctgaagttaatgtgtgttttaaatgaataatcttatttataacaacattttcagcgtggcaactgcagtttcagaatggtggaattataccagtcagagagagatgcaaatgatttaaaataggaagaaagcaggtgtctggcccagaggaccagattaagaagaccccatgagagttacaatagttagtgaaaatggtgcttctgcaaacctcatgtctacagaagctggtcaaagaccagatgccaccaggtagaatcccagcaaact

SEQ ID NO: 137306 - DNA, 450 bp, Homo sapiens
ccagtaacgtataatttaagcatgtggatatgccagtcagctttccacagcttaactggggtggagagaggtgtgcgaaccagtgctttgttctttcttgtctttttccccttacttttgtactcccactcctgccaaactagacatcgttttatcctggtgtgttcattaacctctactccaaaaattaagtgtggttaagggagtgaggtcgatttcaaaatgctgcatctgatttagaggggggtatagttgagtgaagaactaggcactgaagcagcagcttatgaggagagtgttttctctttatttaaagtccttacatatcgaggcatctggtgttcatgaaatagtctgttgtgctgttcaactttttcactcttttcttacctgacttagacaattaactcctagggctgggttttccctccacattgcgattccttcagg

SEQ ID NO: 137307 - DNA, 530 bp, Homo sapiens
caaggcagggtacctggcagggattggttggggaggctcccccatgctggagaagggtaagtgacccccaacagtcagcatccgcattcccattgtgaagtcctgcaatcccagccatggaagaaaccctcaacccacacaaacagggaacttggggactgcatgatggcactgctccagagagggagctcatccccccgagtcctaagcagctacagcagggcaccattttgagagccccacccccagcagactgcatcattccctgaggcccaacagcccctgcatatccacatctctgaagccccattaaagtcccccacccacagctgggtgctgccgcagggccaaagtatacaagctactggcagtgagccagcagagccactgtgcattgtcaagcctgattacaggctaccctgtcctgcagataccatctggggccaaagtgcatgctcccaacccacctgtttatgactgctgccacacaaaaacacccctacctaccacagccaagccctatacacacc

SEQ ID NO: 137308 - DNA, 259 bp, Homo sapiens
gaggcccttagttttatcccatttgagaatttcttttctatttagttaggagagcagaactaaactgtgaaaatcagtagtttatggaagtaagaatccttccccccaacccccaccccccaacctctgccattttctctgtttctataataacttgatagccaggacaagctcattctgagaaagtttggtgttttcatggcactctgtgtagcatgtgtgtgtgtgtgtgagagagagagagagagagagaaagggt

SEQ ID NO: 137309 - DNA, 532 bp, Homo sapiens
gtctcctttccatccgggggaaaatgggggtggaataatataaataatgtgcctactacagtgcctggcatatttggtaacgctgtcagtggtggctttaagtattaggcaagattgcatcctctttctttggataaatagcatggtctggttcagacactctattgtgagttgagttgtaacgcctctataccagagtttgcaaactcaaattgcaggaccaagcaggtagcacatgtgaactgaaaggctcccatggggattgtatcaaataagagaacatacttctgtctaaaaagggccgctaactcagggctacctaaaaataatctgacaggtgaaatcagcaatgaaaaagcccagacattagaaaatggagttacctgttcggcagcttttactgaacgaggggagaccattcagtgtggagacctccagtgtgcccacttgcctttgtaccaacttttctctgagcataaatgtaaaggacgtccgttggaaaggaacctttgggatggcttagtccagctac

SEQ ID NO: 137310 - DNA, 457 bp, Homo sapiens
tttcaagctggttttcttttttttttgggaaattaagtaacttgaaaagattaagtgattaatattcctgtggctgtgtcagggatccccgagccttctctcaggcttgatgattcactaaaaggactcagaagagctgttatagtcacagctgtgtttttactgcaaaaaggatacagattaaaattagcagagggaagggtgcatggagggaagtccagaggaaactaggcacacgcttgggtgtctctccccagtggcgtcacgtggatgtgcttagctctcccagcaatagtgtcacatcatgtgtgaagaatggttaaccaggccagcgcacctgagcctcgagtctagagattttgtggggggccagtcacatacgcaggcagtgcccctgtgactgacctcactcaggctccagtgccccagtgcaaaaacaagtgattgttccccgcta

SEQ ID NO: 137311 - DNA, 356 bp, Homo sapiens
gaacatggcggcccccgagtcagggccggctttgagtccaggcactgcagaggcctagaggcaaccaaaaacatggtgcatcctttatcatcacgaaagcaattcgagatcgtttattatttttacgccaatacatctggtacagcccggcaccttttttgctccctgatggactggttcgcttggttaataaacagataaactggcatttggtacttgcaagcaatggaaagcttttggctgctgttcaagatcagtgtgtggaaatcaggtctgcaaaagatgattttacatccattattgggaaatgtcaagttccgaaagacccgaaaccccagtggagacgggtagcatgg

SEQ ID NO: 137312 - DNA, 765 bp, Homo sapiens
caatcagtacatgaaaacaagaatttctcatttactgaaatgatatttgccttgtaattgctgtctgggaatgttgaaccaagtagaaaacattaaggaaactgcactcctccccacaaatttaagcttggtgattgttaaaaataaaaataaaaaagaccaagaatactgtagtcccagctacttaggaggctgagacaggagaattgtttgaacccgggaggtggaggttgcagtgagccgagatcatgccactgcacaccagcctgggcgacagagcaagactccatctcaaaaaaaaaagaccaagaatattatttggtagtctagctgttttgtcctggtttcaaggcaccacatgtcttttgatgtaaaataatatactaaaacatgcttacagcttaaaacctgaaataaatttgtggagtataaaaatacatggaatacctagcaagaaaggagttaaagaaataaaagataatacaggggtgcaaccaaaaagtctgggacttccaaaaaaaacaacgatcaggctgaaaacctgcagcccagacttaatggacaagctcgacacgctaacatcagaaaggatcgcaccacaggggactcctccctcctctccaaggatgacgcaggacctgtggcgttcgaacgaagcagagatgcgtgacccacgggcgggccaggccttggagaccaagaactgaggaaaagacgtctctggatggggcaacataacaagtggaatggcaaccccacaacaga

SEQ ID NO: 137313 - DNA, 746 bp, Homo sapiens
ggcctctcaaaatgctgggattacaggtgtgagccaccctccctggctgggattcagtattatgtctgctttgatacctggtaagatccaggggggcctcagatggccaaactgcaagtctccctccccactctgcttccacatataaggttccctaaccagatagctctccctatcaaggggagcaggcacagatttggaggggacaaatgcttgtcccctcagtagcaggcttcagttcccaccagtctgcctgtggaattatccagacaagccaatcacatcctctgtggggaaccagggctcatcccaccccctcctcttgttactgcaaagcctgcctgcgtggcccctgcccgaacactgttcccaggtgcaacccctatgtggccctgcatggcgagatgtcctcctttcccgggccacagtgtgtgcaactaataaacctcctccatctcatctgcccagtgtcgggtcttgtgtgttcagccatcaccatagccctcaggcagaagtccatccctcaccaacagggaagagaggcagtgatcaaaacacctcctccaggaagtcttccctgaagttcgtagtctggcttcagtgccacttcttccctgccctcatattcgctaaccgccacttactgcctggttttcagcctcactaggatgtgggccactaagggccaacatggtcctacttgcagctgcattatcagggcctaccataacaccttccaaatgctt

SEQ ID NO: 137314 - DNA, 111 bp, Homo sapiens
tagtcaaaacaacagatttttaactccataattatgcccatcatctcttgactagactactgtaatagcttaatagttctctcatgttttctcttgaaccccttgtgtatt

SEQ ID NO: 137315 - DNA, 307 bp, Homo sapiens
tcatggtggtacgtgcctctagtcccagatacttgggaagtgggaggatcacttgagcccatgaggtcagggctacagtgagctgtgatcacaccactgcactctagcctgggtgacaaagtaagactctgtctcagaaaaaaagaaaagaagtggttaatatggtaaatgttatgttacatatgttttaccacagtaaaatttttaaaactaagatgaaatggccagtttacagcagagtaaaaattcgaggcctgatattcaccccttatgtgcctaaccctgttctcaaagtattaaacccttg

SEQ ID NO: 137316 - DNA, 592 bp, Homo sapiens
caagagactcacctaacatataaggactcataaaaatttaaggtaaaggggtggaaaaagacattccatataaatggaaaccaaaagcgagcagtagttattcttatatcagacaaaacagactttaaagcaacaacagtaaaaaagacaaagaaggatgttatacaatgataaaaggattagcccaacataaggatactataatcctaaatttatatgcaactaacactggagctcccagatttataaaacaattactattagatctaagaaatgagactggcaacaacacaataatagtgtgggacttcaatactccactgacagcactagaaagatcaagacaaaaagtcaacaaagaaacaacaaacttaaactatatcctagaacaaatgaacttaacaggtgtttacacaacattcttcccaacaactgcagaatatacattctcctcatcagcacatggaacagtctccaagataggtgatatgatgggccacaaaataagtctcaataaatttaagaaaatcaaaatcctatcaagtatcttctcagaccacagtggaataaagctggaaatcaactataaaag

SEQ ID NO: 137317 - DNA, 392 bp, Homo sapiens
atttaagtaaggcattccatgtccctcattttcaaaatgataggattaaagaagaaaaaaatctctgaagtttctagcattttcagcctatagcttactttttctccctcctatgccagcctgggccacccaccaccttcccactgctgcagcaccttaccataattaggcagctttttaaagcttctaattaacggaacacagaaattaaaacctttaaactttcttttctatttctggctcactgcaaatgtgcaacagcattttattaaggagttgttaatgccacacagttcttgctatactggcttttctctgaaccccagtgacagttacacagtgacaagttgtaagcaaagaggttgttaccatgggaacccactaggattcct

SEQ ID NO: 137318 - DNA, 340 bp, Homo sapiens
cggagactctcattgcccaggcaatgccaatggcatgatattagctcaccgcaacctccacctcccaggttcaagcaattctcttgccttagcctcccaagtagctaggataataggtatgcaccaccacacccagcccattttgtacttttagaagaggaatatcctagttaaaagatactatgaagaaaaagatatgtgaggctgtctgattggccaaggttgtacaggtgttttccctttcaatttgattctataaatgaagctcggcaggatagaaactattacactgtctacggatagcaccgacacagttgtcactctccaatctcctatgagg

SEQ ID NO: 137319 - DNA, 758 bp, Homo sapiens
aaagcctccagattcaaaactatgcttgggtcaaattctagctctgccactttgtgtgtgcagtgttgggccaaacacttagctcaattccctcatgtattcagcaaacagttactgaatataatatgctactcttctagtcttgtagcaggacgagccgcagacaaaacctctcagacaccgagttgtagaaggaagggctttattcagctggcagcatcggcaagctactgccttaaaatccgagctccccgaatgcacaatttctgtcccttttaagggctcctcacagcactaaagatttcacatgaaagggtcgtgattgatttgagcaagtaggtggtacgtgacaggggctgcatgcaccagtggtaagagagaaacagaacagggcagggagtttcacaacgttcttctatacaatgtctggaatctatgaataacatcggtttctaagttatgagttgatttttagctactgggtgtgaggcctctgagcccaagccaagccatcgcatcccctgtgacttgcacgtatacatccagatggcctgaagtaactgaagatccacaaaagaagtaaaaatagccttaactgatgacattccaccattgtgatttgtttctgccccaccctaactgatcaatgtactttgtaatctcccccacccttaaggtactttgtaatctcccccaaccttaagaaggttctttgtaattctccctacccttgagaatgtacttcgtgagatccaccc

SEQ ID NO: 137320 - DNA, 376 bp, Homo sapiens
atatatgaaccttagtccaagctggaggtaactttgccttgaaggatgaaggaccattacccacaacagcctcaagagcttagggaagaagcctcctgctttatccccacagcagtcctggcacttgccagggctctctgtggtctccagaggctggaaaacctgtttgttgcaagatctctcgggagagcaattaggcagccaatgatacaagtcataaatgtggtcacaccctttaacccaggaatgtcactctggggaatatgatccaagaaatcattaaaaaggaaaaaaatagaatgcaagttgtggtaggaacaggaagaagctgccaacagcccacaggcccagcacagaggaagggaagctaactaac

SEQ ID NO: 137321 - DNA, 344 bp, Homo sapiens
ccagaatataagcgcctctggttttgtttttctgatggctattcagaaaatagtatgctttggctatgtttttctgatgaacattcattagataagttttacatgttcttttcctgatttttaaaatatctttgaagtgatattgtgccagttaaaaaaaaattattactcatcataaaatgagttggagttcactgccctagctatttgtggggctagtcctctggatgtcagttttgtttttttgttttctgcatgtaaggcgtgctggggccagggcagccttctgtagttaacagtcgcagtactctctgcttcactgtttccacagacattctgcttcc

SEQ ID NO: 137322 - DNA, 489 bp, Homo sapiens
cgggccagtacggatgtgcgggccagtgggaaatacagagtttgaatggagacaggggtggcacctgggcagaagtggtgaccaaagggtgcaggatgtgctggtgacctgggatagaagaggagcctggtgatcccaggcctgagcgatgtgggggtgagggggaattgggaggacaaaagaagagctcaggagtgcggaagcatcagaaactttctggcagtatctgtggtcactaagtcaatcaacaaacattaccctgaagtccttcaagccatagattatcatctccccagcctggcgaggccccttagccccccagtaatggagatggggtgctggagggaatcccacccttccactgacccttcccctctggcctctctgcgtggtaggactcagttctcttacctgttaattgggggtgagaatccttctcccaccagctgggaagagggtagggagcaggggtctactgaactttttttt

SEQ ID NO: 137323 - DNA, 931 bp, Homo sapiens
caacggtgtctggggcagcagcgagtactcactcggctcgagatgcgtcaaagtggatcagagagcagtctcgtcaatgtgtcagaatccatagcagtatcaggtacttccagttcaaccaacccttggggccgatggtgtgatattatacaaccagcctatagtcaacagaaggcgagggaggaggaggaatgtagaaggtgttgacatcttcttgcggagcagaagtaaacgacgcgaatcgatgtgtcgtaacggcttaactcgtacctcacagatatccacagggataaatccagtacgatcctatactcaacctcaaggaatccctgatacagaaagtccagtgccgagttattaatcttagagatggaaggagagttgcgaggagatgatgcagcaaggagaaaggatagggacaacgggctcagggagcacccgggtcatgtggaagattcgggagctattattcctagaatgcagctacagtgagggaagacccaaacaaaaaagacaccgttgcagaacaccgtcgaagctcgacggtgttctgggatagaagaggagcctggtgatcccaggcctgagcgatgtgggggtgagggggaattgggaggacaaaagaagagctcaggagtgcggaagcatcagaaactttctggcagtatctgtggtcactaagtcaatcaacaaacattaccctgaagtccttcaagccatagattatcatctccccagcctggcgaggccccttagccccccagtaatggagatggggtgctggagggaatcccacccttccactgacccttcccctctggcctctctgcgtggtaggactcagttctcttacctgttaattgggggtgagaatccttctcccaccagctgggaagagggtagggagcaggggtctactgaactttttttt

SEQ ID NO: 137324 - DNA, 496 bp, Homo sapiens
caccgctggcttgtcctgcgccatactcgcgggctcatgtgggtgggcaggcagacccccaaggagccatcacgggcaagggctggagttgattacgtcagatctgtgtgtgtgtgtgtgtgtgtgtgtatttgtatttgtattcttgggtctataacatatagaaatataatatatttgacaataacagtacaaaggagatgggtgataataaaactgtattgatattaattctttaattatttggttgaattcagcagtgaaataaccttgtcataaacttttccttttgagaactttttttgatcactaattctatctctttacctgttataggtctactcgtatttaccatttctttttgtgtcagtttttatagcttgtatctttctaggagtttgtctatctcattgaaatgatcgaatttgttggcatacattgttcataatattcacctataatccattttattttggtaatgtcattggtaatgttg

SEQ ID NO: 137325 - DNA, 257 bp, Homo sapiens
aaataatttttaatgctttaaaatttagtaagtgcacacaatacatgttttagcagaagaatgaaaatgtgtgtatggcatttaatacaaatttacattacaaaatgagaccatgttaggaaaacattagaagtaaacatttaagtaaaaaccaaataaacaacatgctaagggatacaatttaaaaaatcctagtaaatgtagttgcctaaatccagacttgaaacattgagattgactttgccactaaaaaaaaa

SEQ ID NO: 137326 - DNA, 448 bp, Homo sapiens
tggtttgggaatggagcctgctgtcacggtctgactaatagctgaggaatccctagttatggcggcagaatgtatcataacgatgtttactttagggcttggcagtgacctcgtttattatctcaggctttagaagaaatgaagaatgggcaactctttgcatttgggtagggagctggctttgaggtggaggggccacccatccctgtgtatctctcctcattgaaggttcttggggccggctgacaaaatggagatcaacacttcactggtgtgtcttgaatacttctgtaaactgctttgatcttgaaaatgtgcagattattggtgaattttttcaagttgtgctttctccattgctggcaaagaaaacagagtggtagcttttccaggaccgatttcttttatgtcctgttaggctaaagaatgaactgaaatgaaggataaa

SEQ ID NO: 137327 - DNA, 399 bp, Homo sapiens
accagttattcattcagtaacacttactgaatacttaatattccagagaaatgaaaaagccaaagtcctcgccttaaagttgctcacaatctcatgggggagaccaacacataattataaccaattcttatttagcacttactccatgagagatatacttaacaataattcttcagaggtagaaaggattaccatcccttcttagagaattgaagcacaaattgactaagcaaccttctcaaggtcacacacttaataagtggcagagccagaatttaaacccaggcagtctggttagtttgtgctttaacacctactttatgtagctgttctgattattaaaatacagtgtaaaaagtgcaaaataaagaggtaatacacaatgagatcaaaacctaa

SEQ ID NO: 137328 - DNA, 489 bp, Homo sapiens
cgtcaaaaaaaaaaaaaaaaaaattacatgtgtggcttacattggtgactggaattatatttctgctggacagtgtagtgggctgaataatggccccaaagatttccaggtcctactccctggaaaccgtgaattttattttacaaggcagaaggaactttgcagatacagccaagggtatggatcttgagatgggagcttatccagaattatctgcgcagactctaaatggcatcacaaagtaggcagaatgcgatttgacaagagaagagaaggaatttgactgtggaagcagagatcaaggtgattgatgtgggcagccaccattaacaggaagaaacaagcaaaagaatctttctcccccagagcctccggaaggaaccagtcctgatgacactttgactttagccccataagactcattttggacatttggcctctggaactataagagaataaatgactgttgttttacgctgctaaaaaaaa

SEQ ID NO: 137329 - DNA, 451 bp, Homo sapiens
ctgggaagaacctcagttgttagagcaaccatcacaatagccactgtgtgcccaggctattacatgccaggctccacgccaagcactctacttacacaccctctctccctgggattcccaacaggctacaagagggggacgattgtcaccctttttacagatgcagaaacaggatgcccagagaggttataccactagcttggggtctcacagacaggaagtggcagaagagaattagatttgggctcggaccccagacaccacctcctgctattctgttggccatgaaaaccaagaatcattctaaaggagcgccagggtaacagaagctggaggaagaatgacaaattgccaggactccatgcagattggccaaagccattcattactcatgagccctggaccagcttcccagtaaatcaacccattcaaggtttgattgtgtttggga

SEQ ID NO: 137330 - DNA, 476 bp, Homo sapiens
aggtttttaaatctctttcagatattttaagtatcttttttgtgtctggattcagagaggtatgataatgagattctcttctagaggggaagtgggagtaggtaaccatactactctttctacggctacagagccgcatactcgaaggagggagatttttatttgtaaggacatttgtattatctttcattaaagtagagtcccatgggcgtggcaaatggctgtaaataaagtaaaagtggctaaagaaaacagtgcctgctattagcttgatgctggcattttcttctttccctggatgtgactgttattgtctttattgggtccccttattatctgctttgatatccatctctggaactttgatctctaattttttttttttttttttgagacagagtctcactctgtagcccaagttagagtgcagtgacacgatcttggctcactgcaacctccacctccggggctcaagc

SEQ ID NO: 137331 - DNA, 222 bp, Homo sapiens
ttgtggtccattcatagattcttaaatacatttagacattttgatctagttttagttacacattttgttagaaattggcttatttaaaaataatattgtattgcatttatatccaaatatcttaatatagtttcaggagctttaattagaatttacatttatacacacacacacacacacacacacacacacacacacacacacacacacatatatatatat

SEQ ID NO: 137332 - DNA, 173 bp, Homo sapiens
gaggatactgccctacggcagtgaagagcactacatctcagccctccaaatctcagctccccactagcaggtccacctatacatccccctactatcttcttacccaaaccaatagtccttctggcccttatttccaaaaacaccacaaatatttccccagtcactcaagttca

SEQ ID NO: 137333 - DNA, 292 bp, Homo sapiens
tgctgggattacaggcgtgtgccaccgtgcccggcccattctgttctatttttaaaagcagtactgctcataacctactaaattgatttcaaaacctataatctacgtatttttactttctttttctttttcttttttttttttttttgagacggagtctcactctgttgcccaggtggattaaggatttgcaatttattcaaatgcagtgagaacccactgatgggttggggaatgccgtgatctggtttatattgttaaaatatcactcactcctgggagaagaggggat

SEQ ID NO: 137334 - DNA, 242 bp, Homo sapiens
agcaggcggtacctcataatgttgccaggaggttgtggctgcagtgagccgtgatcacaccattgcactccagcctggatgacagatcaaggccctgtctctcaaaaaaagaaaaaaaagaaaagaaaagagaaataaaaacctgggaccttcttcttacccttggacagagcagtctcttaggaagaaaatctaggagctctgaagaaaagagtgcccacatgtgggcacacattatggag

SEQ ID NO: 137335 - DNA, 179 bp, Homo sapiens
gtaatgcatgattctgagaggaggatgttttcttgacttgagtatgttgggtccatttttctcttggctgtgtggacggcagtctcagtggttaacagcataaaatagggttcttcccagggtggcttgaggtttttctatgttttgataaggacttggttttcaggctggtgcttgtg

SEQ ID NO: 137336 - DNA, 461 bp, Homo sapiens
agaactacagagttccaggactgagagcggcctcaagcctccggtgacttcatcctctcccacgtgggccaggacatctgggtctcattttttgatcagagagaacaaatgttctacaactcccattggcaagctgattcagtgcttactgtactcctccctcctgctcagaaaggtccccactaaggtttgacttcctgctacagctgagggctctttcttccataccgatgaactgagagttacttcccatgcgtaggcctcatctctaattgtccaaggagagagaactctgaaaagggaacccctccttccccaccaccccacctttacaaagaaatcataagggcagattatgtttctcacattaaacacaacacagaaaggaatcaaccacaatagtgagattttgaaaaagggaaaaaaatctcgataacatcagcaactagtgatgggagttc

SEQ ID NO: 137337 - DNA, 352 bp, Homo sapiens
gacccactgttttatagtctctggtaggacattttaaaatcttgtttaggagcattattttttaatagcatttaaagaaagtattgtactgatacttcctctcccagagggaaaacaattacaacacaattacagttttattaattcaatcagcaggaactgtattctgattaagaagcatcattaaggccaggcacggtggctcacgcctgtaatcgcagcactttgggaggctgagactggtgaatcacctgagatcaggaattcgagaccagcctgaccaacatggctaaaccccatctctactaaaaatacaaaaattagccaggcatggtggtgggcacctataatc

SEQ ID NO: 137338 - DNA, 491 bp, Homo sapiens
aaaaaacccaattaaaaaatgagcaaaggacttagacattttctccaaggaagatatacacatagataagcaaattgaaagattttctgtataactaagtatcaggacaatgcaatcaaaaccacaataaggtattactttacatctgttaggatggccactataaaaaaagtagaagataaaaaattttggagaggatgtggagaaaacagaatcctgtgcattgccgttataatcgtgaaaaagtaaaactgtgatggcaaacagtatggagcttcctcaaaaaattaaaactggaactaccatataatctagccatcccatttctggatatatattcaaaagaattgaaaacaagattttgaaaagatacggttacacttgtgttcatttcggtgtgattcacaacaaccaagaagtagaggcagtgtaatatccacggacagatgaatggataaagaaaatggggtatatatataaaatggaatatt

SEQ ID NO: 137339 - DNA, 125 bp, Homo sapiens
atgctcaacccatacaaccttacagaggggtgacatctatcagtcaagcaagagtcatcctgcagtaccttcctttataatggggccgaccacaggggcaggcactgggtttcctttttcaggtt

SEQ ID NO: 137340 - DNA, 239 bp, Homo sapiens
gtacatagttgccaatgatgattatcttgtagaaatcaacttttagttaggaatgcactgcaaaattattagattatttcattagatctttttatgggacaattacagtaaaatgtaagtgaattgtgatatcatttgtaaatttaacttatgacaaaccagacattttactgtaaacattagttattaaagtatcatttcagctaattgcttcttgtagggaataagtcagttttata

SEQ ID NO: 137341 - DNA, 305 bp, Homo sapiens
actaaatgctgacctcgtccaaggcattgttccatccagcgaaaatatgattcaacccacatgtaattttagattttctagtagccataaagttagaaaaaacagatgaaattaattttaataatttaacccaatatatccaaaacattatcagttcaatatgtaattaacatcaaagaattggttcatgagataacttggcagggtgcagtggctcacgcctgtaaccctagaactataggaggctgaggaaggcagattgctggagcccaggagctcaagaccagcctgggcaacacagggag

SEQ ID NO: 137342 - DNA, 524 bp, Homo sapiens
caaaaatgcagaaaattgcaaaaggaaaaaatagttaatgagctcaatacacacagacagcagttgacattaccagtttctcaaggttttactctatcacatattttggtggctattttcgccacaaaaactgttctgtagtctacctctccactcagtaccaggtcttgaatgtcttcctatatcggtaagaaccagctgttttcaataataatttggtaattggttataaaatgagtaattaattgcactacgttattatccctttggtggttaaagccaccttcagcagcaggaacaagcatcagatattaagtgatttaaggatcagtttcctgagatgctacatgctgaaattctgtggatttctagattctgctttgttttttccatgtaggtatattctaggtggttttgttagggtgaaggcacagctgtctagaagcagttggggctggtgccagtgtttgactccagtgagtcttatgatttggtcttgactcttgaatctggactgtgtttcc

SEQ ID NO: 137343 - DNA, 201 bp, Homo sapiens
tcactgctggtgggaatgtaaaatgacgcagctgctgtgggatgatattgagaagatatttgcgatgatgatgcatgttgctgaggcttggagtgaagacagtctgctaaaacaatggataagtatagagtgtaagaggaagagcacgtctttgactgatttggggaatgggaactaatagatttcattttggatatgttg

SEQ ID NO: 137344 - DNA, 173 bp, Homo sapiens
caagaactcctgtgtttgaggcatacttatcctctcgaatggggcgctactgtttctcgtatcaaatctaaatgctaccatgtggccctgaacgtctgcactccttgtccctaccctaatggaccagtgttatctcccatgactccctaactcaaaccttctgcttcaggcgg

SEQ ID NO: 137345 - DNA, 142 bp, Homo sapiens
agttcacctacctcataggtttattgtgaggattaaatgacttgatacatgtaaaatgcttagaatagtactttagaaggcgctatgtaataaacagaaggtgctaggtagaagctcttatttcatcttttgttgccttcct

SEQ ID NO: 137346 - DNA, 259 bp, Homo sapiens
ttcttgaggatcccctgcggtttctacctgacctgtggatgctgaggaagtgctggtgacaggaagaggggtgacgtgacctgtagatactgaggaagtgctggtgacaggaagaggggtggtgtgacctgaggatgatgaggaagggatggtgacaggaagagaggtggcgtgacctctggatactgaggaagtgttggtgacaagaagaggggtggtgtcacctgtggatactgaggaaaggctggtgacaggaaga

SEQ ID NO: 137347 - DNA, 893 bp, Homo sapiens
gcctcggcctcccacgatgctgggattacaggcgtgagccaggcgcctggccttcccctttgcttttataccctggaattagttgttgctattcttatttgatgaagtctgcttatttgaattcactcacctgcttgccaacttttttgccttcccttccttcttttatcatacttcatccttttgagttaaatttccttcttccagaggtaggctttaacactgttttttagtgagagtctattggtgctaaactctttttgcttacctaaaagtgtttttatttgtcataaccattggataatttagctagttataaaagtctgggttggcagttactgtttctcagcaattagatgatgttattgtgtttcattatcttctagcttttgatattactgcatttgaaaagtcttctcaactcttagagttaatgtttttttctcttggctgctttatcttgtctttactcatggtgctctccaaatttactgtcatatgttccggatttaatttatttttatacatctgtttgctatttgtccttgaatatcaaatatcatgtgtttcacagcacctaagaaattatcatctagttatctcttcaaattttacctttcttttattctttcccatccctccttttgaaaatcctagaaattttatattgggccttctgtctgccttcctgtttcttaaactcttttgtattttccagttctttatatgctttactatgggtaattccttatctctgttttcagtacactaatccttccgtccgtccatccatccgtctcgctctgttgctcacgctggagtgggctggcatggtggtgggcacctgtaatcccagctacttgggaggctgaggcaggagaatcacttggacc

SEQ ID NO: 137348 - DNA, 345 bp, Homo sapiens
caacagggctgataccaactcaccaaggtgggttgtgcctgctgcctccagttcctctgccctccatcagtccttcatccttgcaactgaatttccaccctctctactctacaggcatccaattcccatggctatcactaataccataattacaaaacccaacagttcttcaggctttatttgccccaagtttctccttcacatttgacaacttggtatttctttcattcttagaattcctcgtcccagccttaagacactactatctagaatctcacccttttgcagagtcttcctcttcttcctgcccctacataagagggcccttcctaggaaactgaagac

SEQ ID NO: 137349 - DNA, 530 bp, Homo sapiens
ctcttcctccattgttgccatggggatgtaggggacccaggggcagcagtccaggtgctctaggcagcctgggacttacaaagctggagataaggaatgaatcttagtcactgtctttctattaggttactttaaacaactctaaaagttgtgcagacataatttgtctatgatgtacttgtttgcaagagagtttcataaaatcattagtaaaaacaacctgctacttcagttggaatattggcagcccgggcgtgattgatggctcatgcctgtaactctgacactttgggagaccaaggcaggtggattgcttgagctcgggagtttgcgaccagcctgggtagcatggtgaaaccctgtctctacaaaaaatataaacattagctggacgtggtggcatgcacctgtagtcgcagctacttgggaggctgagctgggaggattgtttgagcctgggaggtgaaggttctagttagctgaaatcacaccactgtattccagcctggctgacagctagactgtctcag

SEQ ID NO: 137350 - DNA, 296 bp, Homo sapiens
gttgatgagttcttggactaagatatggttaaagtcttaatgcgaaatagcaacagctggtcctgaggagaggtgcaataacaaccccttaacatggctgatttggcgcatatcagtttgccctgcagtgttgtgagtaacagtcagtgataatgtttgcaattccataattcagcagtctttccttggcaccagatgagagcagtccttgcatgcaggaatgagtcatgtaatagcagagatcattcttacaagtaatacacatctctttccattagtccaaaggcaggacattg

SEQ ID NO: 137351 - DNA, 447 bp, Homo sapiens
agcgcctgatccagcctggctggtgtgcccaagaggaggagaagtgactttatgtcagcctgacctgcaggcagtcagtaaacagattctgttatcaggtctacattccacaccacaggcagtgcagatggaaatccgagacaaatgtctgtggtcatctgtgacctttactttcaccccaaagcttgtagtatcaagagctgggactcctatgaagggaaaagcccaaagaagctttaagagctaatggtctgcactccatgcaggagcaaacttcagggccaccactctgaccagcggtaaaacccagtccagcgcgaaggacagtgggcaggtctcagctcctcagcccccaccagccactggccactctctcggcaagcagacatcctgtcagttcggccgatttgtagcccagacacaaactctcacgtcttatttaccaaa

SEQ ID NO: 137352 - DNA, 433 bp, Homo sapiens
cgcccagctaattgtttgtgttttttagtagagacggggtttcgccatgttggccaggatggtcttgatctcctgaccccgggatccacccaccttggcctcccaaagtgctgggattacaggcgtgagtcaccgtcacccggccctggatcttttagctataaaaaaagtcattggaaactttgattttctgcctcttctcctcttttaatgtcgtttcttcacagtagtttaaatgatggctaattgtgctgcagcatttggtaaatgtcatatatctacttttctaaaagcagtgaagtagtgtaaacatgtggcatcttttttcaaaagatctatccagtaattatcctgaaggctattacagtatgcaaatagcaaggggcgtccttgtctcctaaattagaatatcaatattgattcaacatgttca

SEQ ID NO: 137353 - DNA, 426 bp, Homo sapiens
tctgttatagcgctagcaaatcccttccaggaaggctcctcagagcctcgacaggtacacagtggactccctccctctgcggggacttcttactgagaaacttgattgtagatggaagcttctcagcacattccaaactgtgaccatggatcagtgtgggccatgttccagttgaacatactaggaagtgctttgctctgtctcagtccccatggatgcagaactctacagcttttgttttccttacactctaaggaacttgaatagcatgtaagtgcatttccagatacacagagactggaggtaactgtacaggagaggtctgcttaatcactcctctttgcgtatgtttgagacaggtgctcagtaatccagtattacagatgatttaaatgggtaacctattttcatttgtctcgcttatat

SEQ ID NO: 137354 - DNA, 405 bp, Homo sapiens
cctgctgggcttaagtgatcctcccacctcagcctcctgagtagctaggattacaggcccacgccaccatgcgcagttcgtttttaaaatttttttgtaggacgaggtctcactatgttgccgaggctggtctcgttttatcttcttaatactacaagatatactcacactgttgcattagaaatgcattttggatcctagaacttgctataaactaaacctgacgaggaatggtttgtacatttccttttaaacgtttccatacactttgtgtgtcactttggatgtgctttactcatgcatttatcctcgcaggccctcatgacgcccgagtgtcaggaatgttatgggtttgtgttgtgtgtcatctgcttgttcccccatctccatatgtgcttcctattc

SEQ ID NO: 137355 - DNA, 859 bp, Homo sapiens
ctctgagacaaagacctggtcatttcagaatcccaatggccactaaaatagagggattccaacctaaaaaggaggaagaggaggctgctggaaagcaaaggactctgtgtaagaatcataatagcaggagtggagccaagatggccgaataggaacagctccagtctacaattcctggcgtgagcgacccagaagacaggtgatttctgcatttccaactgaggtacttggttcatctcactggagagtgtcagaaagtgggtgcaggacacttggtgcagtgcaccgagcatgagccaagcaggacaaggcattgcctcacctgggaagtgcaaggggtcagagaattcccttccctagtcaaagaaacgggtgacagatggcacctggaaaatcgggtcactcacaccctaatactgcacttttccaatggtcttagcaaacggcacaccaggagattatatcccatgcctggctcagagggtcctaaacccatggagcctcactcattgctagcacagcagtatgagatcaaactgcaaggtggcagcaaggctgggggaggggcgcccgccattgcctaggcttcagtaggtaaacaaagcagctgggaagctccaactgggtggagcccacctcagctcaaggaggcctgcctgcctctgtagactccacctctgggggcagggcattggcaaacaaaaggcagcagaatcctctgcagacttaaatatccctgtctgacagctttgaagagagaagtggttctcccagcacacagctggagatctgagaatggacagattgcctcctcaagtgggtccctgacccccgagttgcctaactggaggcacacccc

SEQ ID NO: 137356 - DNA, 180 bp, Homo sapiens
aacgtcgcaaagattaatatagtacaaagaaaacctatatttctttacccagattcatctgttaacattttaccccacttgcaatatctttttatgtgtatgtatctaagatataaatatacacaaatgtgtgcacacttttttcccccagaaccgtatgatgataagttacatcttagc

SEQ ID NO: 137357 - DNA, 349 bp, Homo sapiens
aggccctggggctctacagtaagctgctggtaaggcctttcaggcctgtgttcttcccttcaagatggcgaatttccccaggccccaggtatgtccagatgtgccatccaggagccagagactagcattaaataccttagatgtctaagtggtattctattgtacggcaactgagctggcactcaaaccacaagatgcaatccttcccactcttctttcctttttccaaaggtagaggagtttcaccctgtggccactgccaacatgaggccatggagaatactgccaagctattgctgatgtttcctttaggtccaaagtctcttcagtcagcttgtgatgattgata

SEQ ID NO: 137358 - DNA, 487 bp, Homo sapiens
taatagaatgggtctgattcaaagtcaccttcttatgccatgacacatttttttacaagctgattagtatgcaaaccatttgaaaatgaaatcattgtgtttattatcctagtgaacacattcagaaaatcagaggtggtttctctgagggcaagatgctcccagagacagatgcagtaactatgggagcattaaggtagtgcagtagccttttgtgggccatgacttctgcatttttgactgtttagacttagagccatctatgcagatgcctgcacatttcaccctatcatactcattattcacaccaacacacttaacactgtcatagatactattattagctttaagctaaaagactattacaatccactctttcaattttaatatgaattcaggttacactctattcagctgtacctaatgaggaaattaaatacactgtatgaaggtactatttgacgtagttatcttttctatattggca

SEQ ID NO: 137359 - DNA, 251 bp, Homo sapiens
gcaatgggatgtgcacacacacaactaaacaaattgcatcactttataatcacgtctaagatatccgaggagggaaaagaagaggattctacgtcctattgcaatatcaagggaaacggaggcacctggaaatgcctctctacctggaattcttgccagaaagggtccacatttcttgcctctcaccccatctatgtgatgcagctccagctccgggcagagggagaccttctgggagctgctgggggtgt

SEQ ID NO: 137360 - DNA, 338 bp, Homo sapiens
tcagggagacaggaattgtaggtaaaatcctaaatcaacacatggaaagtatacattggtttggcccaaaaaggtgggccatctctaagtaggggctaacaagtcatagtgggctttaggaattttttagctggcagtcggttgaaagagttaagctttgtgtaaagacttgaagccagtacaaaaatgcctaagttaacggagtctgttgtctgtcatgtgatgctatacctgagtcaggttggaaagaaagccacattaacaccagttaatttttttaaaaactgatgagattttatggtttatagggtgagatttaaccttgtctggcatggcct

SEQ ID NO: 137361 - DNA, 587 bp, Homo sapiens
agatggaaaactaacttcagtaattatttctagaaatagagcgcaatgctgggtatgtgagcgggtgggaggtaagggtaagctggcagatgaacggcaggagaagaggaacttctagacaacaggagcagcgagggtccatatgtgggcctcctctcagtcttactggatgatgcaatccgctcaaaactgcatgcctgggaagaaaaagctctatcgtaggggaggggaagctgagcttccaacactggaatctcagaaccatctggcttaacttgttgtttacagatgaggaaactaaggcccagagatgtgaggcaaattggttatcaaccaaccaactagcatctagggaggagccatcaatctctaaagacttggcttggggccatttccccccaaaggctatggcttcgttccctgtaagaattgatttgagaatcctccaaagccaagagaatattgtttcctcacactgggctatagaacacagctttggtgtttgagaggagcaagcattagaagtaatgaggaaagtgagtcatgttttatccagaaagtcagctctgactattctagttctctga

SEQ ID NO: 137362 - DNA, 293 bp, Homo sapiens
ctggcctgaaaatatactttgaatgatatttgtgtagtttaatttcctagaagacactgttaactgacttaaagaattttgttcattataagttgtgagttgcattataagttttggcattgccaaaatgttttccttaaaaggtggtaccaacataaacttccatcgactgagtgtgagtaaatattgttgctcacactgtgttactattactctagtctaaggtggacaaatgacataagtatctttcagtccatttaggttgtacagttagatgagttttgacagatgtc

SEQ ID NO: 137363 - DNA, 265 bp, Homo sapiens
cctgcaaagagccctctgatgcccgacttggcacagatccacctctgagcaaccaggtagagtccgcatccagggatgtcacttccacggcttccatcactccgagtgtggcctggtgttgagtcttcatcacgacaaaggttagggtcagcactgtagccagcatcatggtgatgctgccagctgcaaagctgactcctatggttgtcatgggaccatggagttcctttggcctgagcccattcagccagctcttcactagctc

SEQ ID NO: 137364 - DNA, 464 bp, Homo sapiens
  misc_feature (43)..(43): n is a, c, g, or t
agtccgttcgactgagctaagtggaaaacgtgtgctcttcagnaattcgccaaaatgctcgtgtcctcaaagggagggagcgaaggatcccagcatgaacgtgcataactgaaccacctccaccagtctacctcaggcatggcgggcacaacagggtcctctggagctgagaagcctgatgagcagggagcccattcttctcttcccagaactcttagaaggctatgcaggatgcattctcaaagcatgacacagctttaggagaaatgcaaatgaagggagttctttgcagaagatatagtctttagttcccatgtcctcaatgttagacattccttgaggtcaggggtccctttcctgtcactcggtgtagactcaggcatatagtaggtgctcaatgaattcttattaaacagagatgcctgggtctgggacacctcttggctcagtcgaacggactgggg

SEQ ID NO: 137365 - DNA, 449 bp, Homo sapiens
tcaacctgttctcagtgggtagaaatatcacgccaaagaaacagctgcaatccctatggtatggatgcgagcctataccacgtgaagttagactaagcatcaggagacgggcatacgactgcccactgtaatgatcagttaagcagcgtaacaggagccgggctatgaccaggcactgatgctgagaacacaaaggcgtaatccatgtggtggggacaaacaaatctacaaggtaactccttaacaaaaagggctggctgtatacgtaaacatatacagataagacacttctataagattggagaagttgtatggcccttgttgcccaggctggagtgcagtggcgtgatcacggctcactgcaacctccacctctcgggttcaagtgattctcctgcctcagcctcctgagaagctgggaatacaggcacatgccaccacacttggct

SEQ ID NO: 137366 - DNA, 298 bp, Homo sapiens
ggtggtgactctagaggaccccaccaccagtgggcattttgctggcaatgaatataagccctgatgcctgggcctgaaagcttcctgacctgatctggcttgaactaaggctgaattagagggctcttaactttgttttccttcagctctgtagccccaggcacaagggagggacttgccagccagggggtgggggatccttaggaggggaagactcattatcattaggaaatggagttatttaggtaaaatatattgtttgtttggtacatagagatgtgagaaggctgggggctta

SEQ ID NO: 137367 - DNA, 498 bp, Homo sapiens
tggcagcctgcacgaccaagcatgcgcctcgtgtcctctagggcaggcacccccttagccatccaagctcatccctgagaattcgtggaaacaaaagacacagaatggctcgttccccagccgtttatttttaatttttttagagacagggtgcagtggcatgatcatagctcactgcagcctcaagtggtcctcccaccttagcctcccaaagctctggaattacaggtgtgagccatcacgcccagccacattctccagcttttatagtggggtggctcacagagtcacatcgaccacagccttctggatgtgggggctgaacagtgtctctgttaaaccacacccaggccgaccctcaggtgaccagggtcccaagttgccgtaggtcatgcggaatgacagggctggagacctaccccatgccttcccactgctcagatctgtgagctggatcgtgtcctgttcggcggcacatggctccttctggctgaacct

SEQ ID NO: 137368 - DNA, 456 bp, Homo sapiens
ccccaaagtgcaagggtactgatgctgacatattgctgtaattgttacattttattattgttgttgttaatctctttccgtgcctcatttataaattaagctgcatcatgggtatgtatggatagaaaaaaaaacccagtttttataggatttggtactacctatggtttcaggcatctactgggggttttcaaacatatgtcccacggataaggggggactaccatacaattaattcatttattcattgattgctgattaatttactcattcagcaaacactattgagcacttactacatcttaggcactgttctagttccaagattacagctgtggacaaaattctatatataaaatgtctgctttcatggaatttacattcaagttggaatggaggtaaaataaataaatatagaaataagggacatatgtgtcagatggtggtaatgctatg

SEQ ID NO: 137369 - DNA, 176 bp, Homo sapiens
agaaccttcaggacagcccacaagaaagcatctctgtgatatgacccagacacttcttcctggcccctcatccatccctgcacacatgcctacatccacccactcatctgtgtgttaagtagtctttcaacaaacattcattgactattccaggcactgagctaggcccagctgat

SEQ ID NO: 137370 - DNA, 306 bp, Homo sapiens
tatacctctccaaggaagcttttcttgatcaattttcttctctaatcactgcttctcccagcatttcttctgaatctatttaatgcgtaggatattattttacctatggtgtcacaatactttgcaactgatcttagtttattcatctgtgtgttttctctgtcaactagaatttaaagttcattggaggcaggtacaatatatttaattttttcatactatcttcaaagtcttacatgcagtaagacttgtacagagttttatacatagtgggcatttgcttatttgaattaaaaataatctacg

SEQ ID NO: 137371 - DNA, 444 bp, Homo sapiens
gagcacctgcagcacataatttctggacaactggataggagtccaaaaagggaaagacactaaaagatattggcattcagaaatttctgtaatcccaaatccttgctcaagctgttcacctcctagattgctttccatgacccttttcatttggcaaactctcattcacccttaaggagtcacctgagatttttattctcatgggaaagttttcttccttgcctctcactttcactagaggaccatcttgtgtgctttcatagcaccctactgctgattccaactgttccacttagcactctgcattgaaagtgcctctttgtctccacccagtagagtaacttcaagatcaagctgatcccttttggagtaacctcaaaaaaaaaaaaaagttaatttgatatgttcaatgggatcctaacatactgaaacagtgggctaaaa

SEQ ID NO: 137372 - DNA, 353 bp, Homo sapiens
ctgcctcagcctcccaagtagctgggattgcaggctcctgccaccatgcccagctaattttttgtatttttagtagagacggggtttctccatgttggccaggctggtctcgaactcctgaccccaagtgatctgcctgcctctgcctcccaaagtcctgggattataggcgtgagccactgtgcccagcccacttcttgaaggctataggatcacctgctttgagtgaaatgggcattcacttcaaacagctgctcgattcaagtgttggttgaagcaagttgacttactcagtgcctactgtgcgccaagctccaggctggaatggggctcgtggaggtaacagaatcagc

SEQ ID NO: 137373 - DNA, 237 bp, Homo sapiens
gctgcaggacttggggttggtttctctgggcctggagacttgtcttaggaacctggccagtcctttcagaccgactggaatggggccttgccttgttcttgagagattcaccattcctactccccatcctatgccacaccaggaactggggttgctgtggcacatgtcctgccctcctggtgcctattaggctgcctttgaccaccttctctgaagctaaatgctcacctgagccgc

SEQ ID NO: 137374 - DNA, 610 bp, Homo sapiens
gtactgttatcgatgcacctctggggggtactgaagccagtcagcttgtactcagttccctgctgagtaaaaaacagggctcgatgttccaccaatgaaggggtcagcaatttgagggctgtttaagacagagacataggccaggtgtggctcaggcctgtaatcccagcactttgggagactgaagcgggtggatcacttgagctcaggaattggagaccagcctggccaatgtggtgaaaccccgtctccactaaaaatacaaaaacatgagctgggtgtggtggtgggcgcctccagtcccagctactcgggaggctgaggcacgagaatcgcttgaattcaggaggcagaggttgcagtgagctgagattgtgccactgcactccagcctgggcaacaagagcgagactccatctcaagaaaaaaagaaaaagaaaaagctgctgtggagcatgggcgagcactgctgcctggacaaagaccgagggtcctcgggagggcagtactgatgtacaggtttccagcaggtcggcgtgtgtgttctctcctgcaggtctgcagccaggcgtgccaggagagggggagtctgagggattgatgtaggttg

SEQ ID NO: 137375 - DNA, 351 bp, Homo sapiens
aattcgatgacgcaagtattatgctgtatcaaaaccagaaaaagatagagaaaaataaaactagaggccaatgtctcttacaaaaatatatgtaaaaactgtcaggaaaatactagcaattgaatccagaaacataaaaagattacacacaaagatcaagtgcaatttcttccaaggatgcaagagtgccataacatcttaaagttaattgatgtaacacacactatctcaaaagacacagaaaaaatcatttgacaaaattcacaccccatttatatcaactatataaagtgtccagaacaagcaaatctatagaggcagaacttttatcagtggttgtctagagttgag

SEQ ID NO: 137376 - DNA, 365 bp, Homo sapiens
agaagaaacaaggatattccaaggtttggctgaataactagagtgatcatttcttgacagaggagtagtggggtttggatgagaaacccaaaaaccagcttctttgccagccctcgtcaactgggctctatcaagacgccaggcacagtgctaaacactgataggcagcgtctcatcctcctgacatctcatcctcccaagcacctcatcctccccctggtcaaaaaacatgccaaggccaggcgcaggggctcacacctgtaatcccagcacctttttagtagagaaaaggtctctccatgttgcctcggctggtctgaactcctagctcaagacatccgaagcagtgcacggggatcctctaa

SEQ ID NO: 137377 - DNA, 349 bp, Homo sapiens
agaagaaacaaggatattccaaggtttggctgaataactagagtgatcatttcttgacagaggagtagtggggtttggatgagaaacccaaaaaccagcttctttgccagccctcgtcaactgggctctatcaagacgccaggcacagtgctaaacactgataggcagcatctcatcctcccaagcacctcatcctccccctggtcaaaaaacatgccaaggccaggcgcaggggctcacacctgtaatcccagcacctttttagtagagaaaaggtctctccatgttgcctcggctggtctgaactcctagctcaagacatccgaagcagtgcacggggatcctctaa

SEQ ID NO: 137378 - DNA, 326 bp, Homo sapiens
aaaaatcgaatctgtttaaagaaattggaatctgtgaaaaacttataaggcaaaggccaggaatagaaagaaatccagggatataagccagcatttggggctgctttccctaattgcatgtcactatccaagaagagatggagagaggtttaaaaactgaggtgagcttgaaacaaatttacagagctagaacaataaaaattgaaattcagcatccatcacacttgtggataggtgtgttaggatcctcaaaatgccactgtacttttaaatgtataatatctagctcatatctagcacaaaaagaattaggaacaggaagattg

SEQ ID NO: 137379 - DNA, 314 bp, Homo sapiens
tatcgatattgttatcaaggacttagctagactctatagttgacacaaagaaataaatgaaacactgttccttaaatattttataatctaggcgagtaggtaagacagagttaggaaatgattaatgaataaataaataaataaccatacaagctttaaatgctgagtccttatggtgttaactatgaatgtagaggaggtaaaatttgagctagtataagaatttataattggtatgtgtgagaaggagtcttagatggagaattgttcctgcaagtctttgcacacattgagactaacaactgtaaagtact

SEQ ID NO: 137380 - DNA, 699 bp, Homo sapiens
gcctcagcctcccaaattgttaggattacaggcatgagccaccacacttggctaaggaaaacattcttaataaaatatttaaattatttttatgacctattgcatattctgctaaatattctgactttttgatgagcatgattataaccctgtcccaagagaatccatcaacttcattagaggtactgcctgcactaatagacatcacatgtagtacagtctcgtgagtaataatataacaaaccacgtgaagggtaggagtgactgtttctttcctctgcgttgcaccctgtcccttttactctacattctgatgaatggaattacaaggccttggaataggtggctggcctgtacaacaaggtaatatccttgttgccgtttcatctccattctgacagttgcctagccttgggtaaagataaattattggtgtttgtagattctcactagcatatatattagagagtttgatcgtcagagttttttcactggtctaatactctcctcattatattcattcttgtttacagaattgctgacactcttattcttttttgaaactgaccccttggtttttctgccctagacactgcctattcagcaactaatcttctgcaagctttttctgactttttatatgccttatatatctggagttatagtttgatatagttaatttgtcttattttgaatata

SEQ ID NO: 137381 - DNA, 186 bp, Homo sapiens
tgaaatcttcagcctctacatcaggagaatggcacgcacatgccaagggacgtggccaaaatggctggtggagctttgtgggaggcagagtgcatggtcccttccccaaagggattagatgcagagacatcaggagagcaagtcagcttttatggggagggtaacagtgtagtcagaagcggcaag

SEQ ID NO: 137382 - DNA, 276 bp, Homo sapiens
gctgggctgtggaggatatgcctgctccacttcctgagacaacgagaaatcgttttctgtcctcctgaaaggggaaggctcaaaagcaaatgcccattttggagaaaacattttgaatctgccaaaggagaccctgagtaatgagggacagggctgggggtccaggtccggctgcctggccgcgtggtcggcctgggctggtggctccactgtgaccctccatctcctcttttggtgccactcgcctcccagagcccctaccaaaaccctaactca

SEQ ID NO: 137383 - DNA, 488 bp, Homo sapiens
cggtaccccagtccgttcgactgagctcactcccagttccattgtaccagtggaaggctgagagatagcagacaggcacccagaagggcagatcttggacaagcccctaaatgtgtaattgcctgatgggctcttcctgactgctgcatagacaaaatcaacttacagagatcacggcactgcaataaagagtttaattaatgcaaggccaactacatggaagaaatggctcaactgactgagtgagactgatttgagtgagaagcgactgatttgagtgagactgatcactgcccaaagtctcagaggctaaagcttttgtggacaatttggtggacaggggggctagggaatggagactgctgcttagttggggatgaaatcataggggtaaagaaaacggtcctcatatactgagtctgcctcatatactcaactgggccacaggaccagatgagtcatgaggcaggctcagtcgatgcatgtgg

SEQ ID NO: 137384 - DNA, 189 bp, Homo sapiens
ctcctcagtcctgctcaccctctcctcacatcagacataaaacaactgagcaactccacacacacacctcctgcagctgctccatgagaaaacagtcgggcccggagagaagcacatctcagcacagttcctccccacctttgcactcagtttctcctccgtccctcaaatcttatctcaatcatgcca

SEQ ID NO: 137385 - DNA, 289 bp, Homo sapiens
atttagcggcctaaaaagcatccgttttccaagttctagcgccctttgccttttcattgaaaatatcggagaaggacgtgattaaaagtatttgttcaggttgtgaagagttgacaaaaattacaccacccaaagttagcgaaatactgctaggaaaatacatttaaggataatatatttttctcactttgaatttcggatgtgcaactgaagtctttatggcatcaagctttctatttttgtttctttgaacagtggacttaatttgtaagatgagcctcatcgtcaa

SEQ ID NO: 137386 - DNA, 203 bp, Homo sapiens
ataaaccacctacgttcataatagaacttttgggaccttactgattgggaatgcttgtgaaacaccaaatatgtcataaggagggagaattaaggttaatctaaaataatgagaacacttgttcaacaaaatatttgctacatgcctattgtatacaaggccttggtgacaaaatgttgaccaatacagacatgatcctagcc

SEQ ID NO: 137387 - DNA, 326 bp, Homo sapiens
tgcaacaagaggatgtgaaagaaaggtggcctgtgtcacacaagtattccttaaaggctgcatccttgtgtatggcgcacaagccacttgctgctatgatatttggctaattatgtctgttgaccttgctttcctcatgtatcatctttatataatagtaacacctacctcatggggtgctgtgcacatgatggctaactcaagtaaggaacacagactttgggatcagtcagtccagtgtcttatccttgactgtaccactaaataattacatgaccctaagtacgtttcctaacttcccagcctgtttcatcatctgaaatatg

SEQ ID NO: 137388 - DNA, 234 bp, Homo sapiens
ctgccctgacgcatgcccacagtgccgcccagagccaagctgcaggacgccaaggtaggggctggcaaagcgtttgactcccaagaatgcaccttctccgggggtggagctgcgccgtgccctgctgcctggcccatactgggggctgctggcgatgctttctggtgaatgcagcaggtcctcatcatgtgctgggctcggagggtgtccagctgagccctcccaggttagggg

SEQ ID NO: 137389 - DNA, 130 bp, Homo sapiens
cagtttacgacatcatcaaagacatgtagagagaaaatacatacacaggtaataataacaatgataattctaatactattttgttagattagaagcatttttcctggacagaagcaacatcacctggggt

SEQ ID NO: 137390 - DNA, 135 bp, Homo sapiens
acaccatggtcaggacggtgggacactggtggctgaacaagatggggaggaagctacctggggtcctgggcccttaacactatttccatctgaggcgtctcagatcccagcatctagtaacaaatgaggcacagc

SEQ ID NO: 137391 - DNA, 249 bp, Homo sapiens
taaattttccaagagaaaaaatgaataggccacaaaatgcctaaaagcaaatgctaggaattgtttggctcaaataacaaaacagagacccttaactaagctgaggacagtggaatattattttgccttcttgcctgttggaagcactaagaagacatttccaattccaacgttccatagaccaaaaggcttaggtgaagagggtttccaggctcacagctcaatgaaaacaatgatgatccaggggag

SEQ ID NO: 137392 - DNA, 589 bp, Homo sapiens
tgcatcaacaggataacgatgatgatgactgagaagcacttgtaaggtcccaaggagccatctggtgaccagggaaaatgttcagtagggatttagggttgaatatattatatttgcactctttgctacagatggcaattttcaaataaccacgttattatgatcccatttccaagaatgggagttgaataagttgtaatcgcctctaatgacacattgatgctatgcagacttgcaagagagcagagtgagaggattgcagtcacctttcatgcttggggtggtcctcaggaagtgaagctgaaggagcaggcaaggttttgacaatgattgtttgacggttttaaggtcatttaaaaaaatgttcccccgtaggctttttataatgaatggtaaactcagttctggaatctttgaaggtttgtccatgactgttctagcagtccccaaaacgggttccaaagaatgcaaattttactggccatcaaaggtttcactatagaatgattgggaaatacagatatctttagtataggcctttcataatctttaatatgttaacatgaattttaaagcttcaagaagaaaa

SEQ ID NO: 137393 - DNA, 281 bp, Homo sapiens
cctatgttgcccaggctggtctcaaagtcctaaactcgagcaatcctcgcatctcagcctcccaaagtgctgtgattacaggcatgaacccatgccctgccaggaatgagctaatttataaacacattttaaggtactatgatacagtgatttaacactgataaaaattctagacgccactccactcaaattctaactgctaatttcaagaaaatttatttgatctagagtagcagtttagagagctttagatttcactgaccagcaaaaacaacaacaac

SEQ ID NO: 137394 - DNA, 371 bp, Homo sapiens
acaggcacttgtgctggaatacatcattttaatcaggattcaaagcaaccagagagaacacgggttgggatagtgtaaaagcactcacattggaccggagttgctgtacatatatcataggtagccaattcaagagcttagagatacatgtaactgtttaaggctgcaaataggtctttaaaggaagagaatattattaaaattttaaattatgcatcaacttatacctaaaatatgtaacaaatatatgttggttttacttgatgctataaattattagggatcagaatttggagacaaattactataacccttagttgagaagctggtaaattcttgatataactccttaaccagacaagaaccacacg

SEQ ID NO: 137395 - DNA, 268 bp, Homo sapiens
agtgcccagaatatactgcttgcttctgtgttttctctatctctactcactcccttgaagatcttctccagtaagatcatgactttaaatactacttttagatagttgatcatgactcctaaatgtatgtctctggcccacacctctgtctaaacttgtatacccaactgcttgttatcaccactcagcaagtccaaaactgaactcctgatcttcttcccccaaacctgatccactgacagacttccatgcaaactacatccttcaa

SEQ ID NO: 137396 - DNA, 479 bp, Homo sapiens
tttgaaaccagcctacaaaccctgtttctacaaaaaaatagaaaaattagctgggtgtgacggtacgtgcctacagtccccagctacttgggaggctgaagcaggaggatcacttgagcctgggaggccgaagctgcagtgagccctaattgcaccactgcacaccatcctgagtgagacagggagaccttgtctcaaaagcaaaaaagatatgtactttaaagatatgtaaacaatacaaaaaaaggagaattttacatttatccacatattgaccatttctggagatcttcattgttttgtgtaggtctagatttccatctttcccaaaaggtatcattttcctcctgcccaaagggcttccttgaacatttcttgtagttcacatccgctggtaagaaattcagcttctgaatgtctgaaaaagtcattattttgcccttgtttttagaagatattttgccagttgtagatttgct

SEQ ID NO: 137397 - DNA, 299 bp, Homo sapiens
  misc_feature (215)..(215): n is a, c, g, or t
  misc_feature (217)..(217): n is a, c, g, or t
  misc_feature (222)..(222): n is a, c, g, or t
ccccaggcctgacctggagctggcctgtggtaaaggcctggccatgactgatctaggatgggtgtcctcctcaccaagggccaccctcaccagacgcttggcccagcagctgtggcccctcctggatctttctcctatgggggacagaaagaggaagaggagccgctgagtggcaatgggtgcctgtgctccctgtgtgggggaagggcaccccnancagtnctagactgtgtcagagttcaccccaaagcccccgggccctcagagttccaagctgggatcagtaacgacaatgataa

SEQ ID NO: 137398 - DNA, 122 bp, Homo sapiens
taagcctttgtggaaagacccacctggttcaagtgtctgtttttagaacaccaatttttcctctctagccaccactctcatgctgtcatctaagtccctccatgaatttaaactcaaccaca

SEQ ID NO: 137399 - DNA, 439 bp, Homo sapiens
gggattacaggtgcccaccaccacgctcagctaattttttgtatttttagtagagacagggcttcaccatgttagccaggatggtcttgatctcctgacctcatgatccgcccctcttggcctcccaaaatgctgggattacaggcgtgagccaccgcacctggcctcacaaatgctcttgatcatgttaaggaagtttacttctattcctagtttgctgaggtttttgtttgtttgtttcagtcttaaaaagatgttgaattctgtcaaatgctttttctgtcagttgaggtgactgtgtgggtttttttttttttttttgagatggagtctcactttgtcacccaggctggagtacactggtatgatcttggcttactgcagtcttcacctcccagggtcaaatgattctcctgcctcagcctcccaagtaggtggg

SEQ ID NO: 137400 - DNA, 420 bp, Homo sapiens
agaacgtatgggtttgtactggcatagcattgttgaattgaagtaaaataggtatattttttaaattgaatcaacatgggggatacagtgaaaactggaaagaaaaaaatgttaagccagataattctgcaaattcagattcatgttctctatctggccataaatacaaatgtatcacatttttcaattaacccagccctactctgattaatcattccctcagcatccaattaaaacttagatattcaaagctgggcatagtggctcacacctataatcccagcattttgggaggccaaggtgggcagatcacttgaggtcaggagttcaagaccagcctggccaacatggcgaaactccacatctactaaaatacaaaaattagccaggcattgtggcgagtgcctgtaaacccagcta

SEQ ID NO: 137401 - DNA, 376 bp, Homo sapiens
gggatcagtaccccagactgtgagataacaggatcgaattcaggggttggttggtgatccaggaaccatacctacttggatgtgatactgagtggcctagacgttgtaggactctcataagttttagacattttgttatactgtaaaaatgaagcatatacggcctcagtagtaacattgcactaataggtaattattactctagagaattttgggttccatggctggaatgttcatcagtatctcagcaatttcagttaataaccagattaagctgacctcttgagtcttttgaaatctgctgggtccctataataagacagggtctggattttttaatcttttgggaatttccaccaaggatttagggaaatag

SEQ ID NO: 137402 - DNA, 397 bp, Homo sapiens
  misc_feature (22)..(22): n is a, c, g, or t
  misc_feature (35)..(35): n is a, c, g, or t
gaaattcggcacgagccgaacntaaagtggggcanacataaccttgctgctatgccttcgaagctgtagtctgaatcaacctaagttttaaacagaaggtgaacctctgagaaaatccagttcttagaggaaaagataaaagctaacagtaagatgtcagctgtggatttatcatatatggccattattatgttgaggtactttccttctgcacctaatttattgagagtttttatcacgaagggatgttgaatattatcaaatgatttttctgtcctttaaactcttgaaataatggttagaaatgtcatccttttttttttttgttctagagacagagcgagacctccccccaaaaaaaaataataaaagaaagaaagaaaagttacccttaccc

SEQ ID NO: 137403 - DNA, 796 bp, Homo sapiens
atccccggcagaacacactctaatgaaacataacaaagggaataaggtcgactaggttggtaagtcccaaggagagaccggtttaataaaagataatgaattctatggcagttaagttgaaatagaaatgttagtaaaatatccaaatgaaagtgtgcagcaggcagttgggattataaatcttccaagttgcagattagatttggatgaaggcataaacattactatcataaaattataaaatgaacatattagagattttatttgagtcattaatgaatgagggaacagtaagatcataaacagaggagaactcaaaaatataacacatttatagttaaagaatgcagaagtaaatttataaatagaaacaaaagtggccagtatccacagggtgacaatcaatggtattccacaggaaacaatttctggaaacaagaattatttgcagctactacaagttttctataagttaactaatgtccatctctgcagtgttgtaaaatagcctcatcaaagaaacggaagtggatgtaactaacctaaatggaggttctagccagggcactcactaagtttcaggctttcattgtttttccttaaattggtatggaaattttaaactcaagagccttcctactactggagtgtttggtcagcagtagatagaaagaaaaacaagcaatggggaaaggattccctatttaataaatggtgttggaaaaacgagccagccatatgcagaaagctgaaactggatcccttccttacaccttatacaaaaattaagatgggt

SEQ ID NO: 137404 - DNA, 453 bp, Homo sapiens
aaatgtcgtctctggagttctcatttacaaagcacacctggatatacatctcaagcctttcatgctacaaaagacttcactaatttcaagacctgagacccttcagttatttgcatgttactttcatataaaaaagtctgctgttgctctcggtgtttcaactgctggcatagctttccctggtgctcacacattcttggaattgttaccaacttcccaaggaattcttttctaattgggcctctaggcttaattagcttttagaatggaatccaacggtgtgaaaagaagttggtcctttggcttgactttccgaggcagaagaggcaagccatcaattaaaaagcttccaaagggcagtggacaaagagcttaggagagccttagctgtgtgcatcacccctgcaactatgtggtggttgtcagaaggctgacaggtgggggcggggccag

SEQ ID NO: 137405 - DNA, 534 bp, Homo sapiens
tgtctcggaagacacctgggaggggctaacaccaccagcccagaaagcccctggcttccccagcccactctggcctctcctgggtctgcccagcccaggcctccctcactaccctgccccggccaatgcaccatcaaaaatcccacagggagcggggactgctgggacgccatcacaggccacgcaggagattggccaagctgagaaagaactcaggagggggtggaagggcaggacaggaaaacagcaaaggagaggctcagggccatgggggaaaacaggcagagaaggcctctcaggttcaaatgcaaggtgagaattcaaacctcacatcagccactcaccagctcttggaccggtgacttcacctttctgtgcctcattttccccatctggggagggggagtaataagtagcacccatggccgggtgcagtggctcaggcctgtaatcccagcattttgggagactgagatgggcagattacttgaggtcaggagttcgagaccagcctggccaacatggtgaaacccc

SEQ ID NO: 137406 - DNA, 151 bp, Homo sapiens
tctcgttccatcagtgtcaacctgccccactctctcaaagacaaaacaagactttgttaatcccacctggccctccagctcccctcctcctaccaactgccaaaccaagagggctgtccatcctcacctctgtctcccagtcactccccga

SEQ ID NO: 137407 - DNA, 274 bp, Homo sapiens
aactcccaggcccccaagttgtgacaaccaaatgtctggttgacaactacatgtggatgtgtttcagcaacttgaggcttcagttttgaaatatagcatttcattctttcttaaacaattggatgtccctattttatgccattagtatccagtacaatccttaatgagatctgttgtctttatgtgtctgaacactgaagttggttgattctttttttgaaaatgactcaggttttgttgaattcactggttgtctgtcttgataacagcatga

SEQ ID NO: 137408 - DNA, 407 bp, Homo sapiens
aaagaaaacagggaataaagagtttcctttaaactagaagttcagttaaagaaattaaaaagtacctaaggatttttaatgcagtgttctgtgcagtgttctgcagtgtgttattaaaatttacttttcaaaatatatacattaattttgtttttgcttttttatcaaaaactttgattctgctttagaagttttacataaattaaaatctttatcaaatgttaatatgaagggaggcacaggatgcaacatatatagtcaagttacctctctgtatatttagaaattactttctcctccaaggtatttgcaacagaaagctctgtctgtcctgcttaataatcagtagtacaggttggaatcaaagttcctcttggggaaatggcaagtctttaggacaggcgaga

SEQ ID NO: 137409 - DNA, 324 bp, Homo sapiens
acttttcttcagtcctgatgcgtgggggccaattcatcaggaagttttccaaaccgtttgaggaggtgtgggttatgcagtgatcagggtatacacaaaacaaaacaacattgcctttaatacacatcagaattgacagtaattcttctatgtttttcccctacctgggtcatccagatgaccttatctcaggttacaagttgaatttggtaataataaatggttgctttgtatatctagtatgtagaattaattccgctttgtagagttccatatggcctggccactgacccaagaggatcatactttttcaaagacaggatt

SEQ ID NO: 137410 - DNA, 310 bp, Homo sapiens
attgtagagtcagtgatgagattgaaaaggtaagtagggtctcatatgacaccttaaggaagctgaactttatcctgagggtgcagcagagtcttctgatggttgtaggcaggaaagtgacttgcgctgctttgtatttgaaaatgctcctcttggttgcaatcaaacagctgaagaataaattgatctctcgggttagagacagtcagaattattgtgaccgaaacttagctttagtttggttattgggatgaacacaacagggccaaataaactgaagaggccaaccagacaggatttggtgattgat

SEQ ID NO: 137411 - DNA, 184 bp, Homo sapiens
gtcttcaccaaatggaataagtggttcagaaagcattgtaataactacatgataaactgcttacataagcaatgcgtatcttttaggattgggtgaagacagttgtttttggaagatattttattatgtagaaggtaggcacaatttcatatgattcatgattgtttaaaaagaccgtgagttt

SEQ ID NO: 137412 - DNA, 281 bp, Homo sapiens
aatggatatcttaacccagtaaaaaccattaacaatttactacagcattttaaagaaacaaagcagaaatatacctcagattcaagttattagctaaagacaacagcaacaaatacatatatccaaggctaccctcagcataagaccattgtgaattagagaagctaccttcctcggggctaaacaagtttaaggcacagtgaatcaagctcaggttggattttttttttccccagagtctcgctctgtcacccaggctggagtgcagtgacacgatcttg

SEQ ID NO: 137413 - DNA, 263 bp, Homo sapiens
ggcggctggggcctggtggggaaggagccactgcatgttttccgacatctttgaattccgcatcatacacacgcattactgagttcaaaacattagagtagctaatagctattcaacactgactctatgccaagcaaggcattgagaacttttcatgattattaacctttttgatttctttttaaatagagacagggtctcactctgctgccctggctggagtgcagtggtaaggtcacagctcactacaacctccaactgta

SEQ ID NO: 137414 - DNA, 385 bp, Homo sapiens
tccccatgcccagcctgatttctgagtggaactcaatagaaagtaacaggcaaccaaccagagggaagatgaatcagctactaggattaatgggatgagaagtttaaatctcttaaaattctcaggaatgtttgtgtttgtaccagatgttcttgacagtcatctagtacaaatcaatcatcttgacaatcaaaccagaatggatgcagaagtccctatggcctatgagaactgtgtttgcctggcatgtgcttccttgaaagtcttatgttaacttcttgctttcctctggccagtttctctaccatggaatgattagcttctacctgcctggctctatttcctggatactgccttttgctccttactgttttcctgagcagaa

SEQ ID NO: 137415 - DNA, 176 bp, Homo sapiens
ttcaccatgttggccaggcaggtctcaaactcctgacttcaagtgatctaccacctcggcctcccaatgtgctgggattataggcatgagccactgcacccacccgacgtgaatactcttcatttttttctctggcctgatttccttggcctgaacttccaatcctatgttgaata

SEQ ID NO: 137416 - DNA, 729 bp, Homo sapiens
gtatggtgtatttcactgtgggttttaactgacatttccctgatgactaacaaagttgagcacgtttcatgtgctaagtttccatttgagtaagtgatggtcttgatttcctataggattgtctaccttttttcttaataatttatgagttccttatatattctggatatgagacttttgccatgtatatgaattgcagatatcatctgccaccctatggctttgccttttcattctcctagtggtatcttttggtgagtagaaattcttactttcaaggaagtccagtttatccttttcccctccttgtgattagtgcttttgtgcctcttgtttaagaaacctttgcctagcctaagattatgaaagtactctcttgcattttcttctaaaagccttatggtttactgttcacaattagatctgtggtccaactgaaactgtttttatttttgcatacagcatgatctctagggtcatggttctttttgtcctccccatgtagctatccaaataacctagccccatttattataaagagcatcctttcctcactgaatttcagtgtcatttttgtcataaatcaggtgaccatatatgtgtgggtctgtttctggccactctattctgttccattggttgttttctattcttctgacagtgccaccactggcttaattactatagtttttggtaagttttatactaagctttgctgttggaagtcca

SEQ ID NO: 137417 - DNA, 216 bp, Homo sapiens
atgctccagaagccaccctcaatcattgtggggtgggggatggaggacaaataccctagcttcctcacccctcaacaggacaattctcaggtatggttcatagagtttctcaaaggcttcccagaacaactcatcccacgtttcccatagcagtaacttgctggttaatgtactttttactggctttctcccttcccaagtgattgatctccgctc

SEQ ID NO: 137418 - DNA, 479 bp, Homo sapiens
atagttctctccatgcacgtcactgcgtcctcgtctgattgcacagcggatcatctagtactcccacacacctgcccacttgaccgtccgttgtccatacaaaccccagcacacctcccatctgttacacataggagtaaacctctcagcacttactacgggctggacactgagcatttaatacttagaataaccatattgaggttgagaccactagtacctccattttacagatgagaaaactgaagcaaggagggtaaatgacctgcccaagatcacacagctgcccaaactcggattcctcacctgcctcaggaccctgccaatttgtgttcacacaaggccgatcctgggccaagtctggggcttggttagggaatgtgacgtgtgcagagagctcagcgggcacattgtgggtgccagggctcacggaccaatggagcccactggggggctccaagcacacctggtgtcacaga

SEQ ID NO: 137419 - DNA, 369 bp, Homo sapiens
acccagacatcactgtgagggctgtgggtccccaatgaccctggaagaaggaggggcagggacagtgtattcagctcttgttgggcaggaaatgctcttgcccctgctcaaggaaagaaggggcagaattaggatgcctggagcaagggtatctgtccatgggagcccaggaacccggagggaatcaggccgcatgagggctagaagacgaaggctgagacctgaagctccccagccaaagtgtgcagacttttactcttctgtggctctgatgttattacttggcctttttttccccttgctgctgttctgtgaccctctccttctccctctccctctctctttgtcttcctctctctttaattaaga

SEQ ID NO: 137420 - DNA, 421 bp, Homo sapiens
aaacactagtgtattctatacaacttacttctcatagcaaccctatgaggtagatgttattttcatcttcgttttatccattaaagaaaaagtcacattacactttgaacatgcgatactaaaagtatgtaagaggaatgacagtgacacaaagactattttgaaatttaataaggtagaaccacagtggcattttaaaattcatttaaaaagtgccttctttatatttccctaacttctaaaacaacaaaacagtgttgacagtatagttgtattacataaatgcaaatatgctgtaaggacaggcactttatgagcttaaagcaaagtaaatatttgaattatttggtttaagttgacatgccatctggctttaaataataatcaaactctagattattaatttagacttgcttttgag

SEQ ID NO: 137421 - DNA, 594 bp, Homo sapiens
  misc_feature (14)..(14): n is a, c, g, or t
agttcgacggaganctctctgtggcggacagacaggcacagagagtgtctgagaggtggagggacccctccagagaaacaagagtgaccttgtgctcagcctgagggttggggagtgacccagagcagggcgagtatattctcaccagcctaccccccttctcctttggccagctcctactaaaaggggtctgtgtcgtaccttgtctctttcttgtggggcatctccagcttgggagacaggaacaaagctctgacctagtccctgccctctttgactgctcaccctcttccagcccctctacccagcctcaatctctcattcttcctctactttgaagtctggcttctgtcttggcccctgtgggtttgatgacaaagggcagttcaggaatgacactatctacacatacatggccatatggacaatttcaggtggtgggacttgcagcagctggggttcccaggactgctgacattctgctgagtgttattagaagatcagggacagagcttatcatctggctgtcactgcccctttccaagccacagcgagcctccacagaggggccctgggggatagccagctgccctg

SEQ ID NO: 137422 - DNA, 782 bp, Homo sapiens
gcaaaatggtacagctactttggaaaacagttttggcagtttcttataaacatacaacccagaaatcatactcctaggtatttactcaagagaaacaagaattgtgttcagacaaaaaacattatggaaatgtttacggcagctttattcatagctgccacaaactagaaataattgaaatattcaactattgaacagataaatgcactgtgatacactcatataaaggactgctactcagcaataaagaaactactgatacaacaacacagatgaatcttaaatacattatgcactgtacacgtataaactaaaaaattaaaatacctatttaaaagtcaaacgggccgggcgcgatggctcacacctgtaatcccggcaccatgggaggccgaggccggcggattacctgaggtcaggagttcaagaccagcctggccaacatggtgaaaccctgtctctactgaaaataccaaaaattagccaggcgtagtggcgggcgcctgtaatcccagccactcaggaggggaggttgtggtgagctgagatcgcgccactgcactccaccctgggcaacaagagcgaaactctgtcgatagacagacagatagatagatagatagatagatagatgatttagatgacagagaccatttctttgtttccagtgctttctgcataagaggtactaaataaacctgtattgaattaatgaaaaactgaggtcaagaattctttttgaatgactttcgggtctcaaaaccgttccagttacgggggga

SEQ ID NO: 137423 - DNA, 301 bp, Homo sapiens
gcctcaggccttaagacacatgtgccaataaaatcagacaaattatcattgctggagcccaccttgcacttcctcatgttagctcatttattctttcttcccagaaagtaacctcaactccatttctcccaactatttaaaactaaaattggctgttttaagtcattaatgttttcccctgtaattcctccgatcaaatgagttccttttcctcaaaatctccatgtaatatttatctcttactgcttgacataatcataatgattcttgccatgtcttacctacccctttggcatgtaaa

SEQ ID NO: 137424 - DNA, 813 bp, Homo sapiens
tcaatgaatgtaagtagcagtcactgggaatgcaggtagagactccagttgttcctcagcatatttaaacttgccactaggcaggagcactcagcactctaccctcaaatgcgtacagcaaatgtaacgagccccaagcaataggcttgctaattcttacaactttgacaagcaaggggaaataatgaatatcagtactgtgatcacttgaaagtggagaagaaatgaattgaccccaagtttaagaaatgtcatgcatagagaaagagcagacttctgtgagcagtgaaaatctaagcttgcggccttccccttcatctccccactgtcataacctgcaccccaccgtggagttccttgacctcctcatttccagccaccttctcctctactgcactgctgtcactagaaactccacccaaaccttcatttccaggcagccatactcacagcacctccttgccactgactagtccaccctttccaccatgataactcttcagcctcattggaacctttcagcctaccatgctttctctatcattgcccttctttcttcagttcatggggttggaggtggaggtgagagtaactatgaaataattaagatcatacagaaaatccacttcccaaggaggaccacacttttaaaatcagctgaatcataatctctatttttatttaatattggggctggatacatttttgtagctgtattattagtatgctacatacaaatcttttttaaattatttttttaaattgacagataaaattgcatgcatttactgtgtacaacatgatgttttgaag

SEQ ID NO: 137425 - DNA, 267 bp, Homo sapiens
actttcatgtgctctggggaagctagatgccatgttgtaagggagctcaagccagattactgagtgatgagacaccttgtgaagagagagggtatcattgagaagaactaaacatgtgagtgaagtcttctagagctttgtagcctggtcagtaaccaaatgcatctgagtgattgaccccagccaaagacaaataaagcagaaaaactgcccagctggattttctgacccattgaaatatgagaatagtggggcttctttgtcaca

SEQ ID NO: 137426 - DNA, 118 bp, Homo sapiens
ggccagggccagaaagtgcagaaggttatggtgcagcccatcagcctcatcttcagatacttacaaaatagatcgcggattcaggtgtggctctatgagcaagtgaatatgcggatag

SEQ ID NO: 137427 - DNA, 278 bp, Homo sapiens
gaacctcccacctcagcctcccaaagtgctgggattaactgggtgagccactgcacctagcctaaaatttctttcagtacttacaaaccttgccactttcttgtattcagtgtttctattgagaagtctgatgtcaatttgattcgtgttcctgcaggacagttctccccatggccttggccttatccagttatctcccctttatcacttggagctctcaggaataactgtagaatgggctgagatacaacatcccgagataaagagggactggtgaa

SEQ ID NO: 137428 - DNA, 190 bp, Homo sapiens
tgcaccgtcatccatgtgtctccccgtgagggaggcctggttcctccacttcctcctcttccacctctaagacctcttggagggcctctacttcttggaggtggaggcggaggaagtgattgttccccgctggaaggagaaatggagaactatggatgcacaattgtgcttctatagttgtgtgatttag

SEQ ID NO: 137429 - DNA, 640 bp, Homo sapiens
gtgaataatggtgtggtaaacatatgagggcaggtgtcttttttatataataatttcttttcctttgagtagataccaatctgtgggattaaatgcaccaattttaaatttactgtttaatgagttttcacaaatgcttgtattgtaatccaaatccataccaaaaaataaaacattatcattactttataaagtccctggatgttccttttcttctaattactgacccacccatcagagtgaagttttcctacaaaagtctagttatatctgttctagagctttacataactaaaagaatgtgtatatttggtataaaattttcattcaaaatataaatttttcaaattaacccattttacatgtaaatactaataattcctttcttttaattactgaataacacttcattgtataaatatatccaaataagattaaacaaagaaaaccacagctatgtaaaacatggtaaaactgtgaaaaccaaaggcaaagagaaactctggaagtcagccacaaatagaaaacacattgcctcctggaaagtaataataaggcagatagatgagttttcaacagaaagtatataaccagaatacaataaaatgacatatttaaagtgctgatgtatgttatttaa

SEQ ID NO: 137430 - DNA, 207 bp, Homo sapiens
ctgggcacggtgctgggccttgtgttttctgggaaatgagtcctatgggctgatgcctctcccaactctggccttctgtgctcctaaggagggttctggggccctgcctggaggtgggctggcaccacatatctttccgtcccatgccaggttcctcctgagtcaggcttagcacggcttccccaggccactctgagctcctcgtgg

SEQ ID NO: 137431 - DNA, 368 bp, Homo sapiens
cactcagccttcctggctctgcctgtcctttttagctgggcaagtgggcaaataacctttctaagtaaataattaatcagcagcaacagaagccataaggctttttactcatatattctgatctacgtgtttggttttgcctttttgtttttgttttgttttttggtgggctgctcatggccatagaatgcatacaactttggataagcattttagtcttctgagcctcagtctcttgttttgcttgattgtagtaagtgtgaccttgttctccaaatacgtggtaccatgtcctgactccaggcctttgtgtgggctgttcttgggtgtggactacctgccacctgtccttcctctttgagcataat

SEQ ID NO: 137432 - DNA, 429 bp, Homo sapiens
ctacaaaaaaataaattagccgggcatggtggcacactcctatagttccagctacttgggaagctgaggcaggaggatcacttgcgtctgggagatcgaggctgaagtaagccatgaagtgattgagccactgtactccagcctggggaacagagtgagatcctgtttcaaaaaacaataaaagctaacgggtggttcagcagcatattggtaatgaggctaaccactggacttgcattaacattaccaaaggctgtaccataaagcagcaccttctcaaactgtggcctcttccaaggcaccctcatcataatacaaaatttgcataataccaccaaaatatttcctgcttttttcactcattcactccccagtgatatcacaaaagactgaacacgctgggcatggtggctcacgcctgtaatccca

SEQ ID NO: 137433 - DNA, 223 bp, Homo sapiens
gattttcataagggactgtgcaacctaaatccctcacatgtgcagttcacaatagggttcacgcatctatgatcatctaatgctgctgctgatgtgtcaggaggtagagctcgggcagtaatgtgagccacaggaagtggcttacatacagacaaagtatcgctcactcacctgctgcttacctcctgttgtgcagcccagttcctaacagatcacggactgg

SEQ ID NO: 137434 - DNA, 260 bp, Homo sapiens
catgacagtcttaaccttgcaagatcagatatttacctaattatcctttacctgtagactacaaacatctatagaattacaatcttccctccactacccaaacaccgaaatcaggactgtgtacaatgcatttatacagaaaattataaagagaagctcctttctaattttttaaaagagaggtgtcagggtatgttcatagctaatactctttcaggctgggtgcggtggctcatgcctgcaatcccacactttgggag

SEQ ID NO: 137435 - DNA, 501 bp, Homo sapiens
attttgtgtggctcttgtgctcctgacatttgctttatgttactactaacctattgcctgggcctagaaaacaagagcccaggttgctttgggataaaaataaaaagaaaggagtaggaggtagtaggtaaaagaaaaaggactgtaccttgagtttttaagtgtagtttccatgtggcaccagcctacctatgataaagctattgcagagaagtttgaagagtggagatgtctgctggggattctgggggagcttaggaaggaataatattttaagaacattgaagaactgggtctgcccacactaaggtgggagagcttggagatctctgtaaaccataaattgaagggtatggtctctttgtagggtatagcaggagaacccaggctcactctctttcaaagttttatccttggtatccttatttgtctctctgtattatattttgtcttcagggtaaatctaggttttttaggtatggttttcttctattcaagagc

SEQ ID NO: 137436 - DNA, 326 bp, Homo sapiens
gacagaaaagttctccaggtccccacccgactcagaagcccagccagcttcacctctcaatggcactggctgcgggactttgtggcacctagcctgggcactccagcagcccagagggagcttgtcccctgattaagcccagcaggcaccagccagtggcaccgagtgctgggcctgctgagcccgtacacacccggaacctgtgctggcccgcgtgcgctgcgcgcagcccggctcctgcccgtgcctctccctccacacttccccgcgagcagagagccagtccggcctcggccagccacagagaggggtccccacagcacagc

SEQ ID NO: 137437 - DNA, 592 bp, Homo sapiens
tatcaagggggttgtggtatagaatctctaaagagctttctagtctgaaatgtctaggtttgtgacccttgtgaaggaagaaaggaaggagggtttgggtgctagttttcctatataatgcacgaggaatggagtttagtttggagttaagatccatggacgtctagcccaggaatctgtccaaagcacagacatcaagtttgtgaattactgttggaggtgatgacagtttaacagattgtgagacactgtcattaggtcagcaagttacggtgtatgcctgggtagaattttcccccataaagaattgtagaccccagttccccattggaaccagagaactgagagtttttagcccttagctgagtaatcagcggaagctgagtcaagtcagttggttgtggataacagcctgggaatgtttgggaattttgcccttgtttcatgggggaagggagagaatgcctttccttgtcagatggaggttgcagagctccagatcttcgaggacactttgggattgtccaaagtagttttctagtaactggagtcactgcattgaaagaaagtggttttattatcttagatgata

SEQ ID NO: 137438 - DNA, 512 bp, Homo sapiens
gggcccaggaacaagatgtatcctgttaaaaaaaatttaacaccttcatcaagtatactccaaatgacagcttacagtgctatgaatgtacctctagctcatgggtaaggagcagtgtttatttttgggtgccctgaagaaaatatttgggggaaggagtggggagaagctcaggcagctccatttatggttgagcaatgcttggtattctacagaagggaccatatggacagtggaagagagtttagcattctgattgttcacctcttgctccttccattctgatggctaattagggacacctcattagctatcagagtggaacaagtatttgccaggctgacatgagcctcagccctgcatcctgcatcttctgctttcccaacctgctgagtcaccacctaggaatggcagtagccaggttaccacctggagcacctggagcactcttggcataatgcactgttgactggttttggtctcctagacacagcttgggcctctccaagcct

SEQ ID NO: 137439 - DNA, 251 bp, Homo sapiens
gttatctacaccttcgagactgagcaatagatgaacgaatcgagtctatttgggtatgaagtgactgtgtgtgactcctcaaaacaaagggattgtggagaccccaccgtcagctgtgtgtgtactttaaactcctccaacagaaggggcaggatgaactgacccagtcactccctatgctggcctacgatgttcttccacatcccctgtacacagtcccgtgcatcactttcttgaagatcaagtgtgtg

SEQ ID NO: 137440 - DNA, 737 bp, Homo sapiens
caaaacaaaacaaaaaatatgctgctagtaaattaattcattcttaggtctgagtatttatgaaagaaataagcagtcctcctttggaaacagggaatgtttccttccagtaaacaaatagataagagatttcttctttccctttggcttcaacatgaaaatggtattagaaaataccactgaaatgtatttgtgtgaaatttcatgagtcagaataggtaggaagaagtcaacattgctctttttcccagagggtcaagtataaagattttatacagtgcagttagaatttcaaaagcccccagtagtcactttcagatgttgtctgagtccaacacccaccagtgtaaatattctcccttcaccaggtctggacttgatcagaatactcctagagcactaactttgagtatgattgacatccttttccctgtgatcatttttccgacgaggaagacagtaaggttggccagaacttaggcgttgcctcactcacaaatctatgcctaggtctcagacatgaagtcttgtgatttatgaggtcagtagtgggtgctagctaaccactcctttgcccttcaatacaagatagagaaaagctgacttagactacgatgatgatgtaccaggcatgtatattgttgatctactgaaatgtctctaaaagttactttcagaaacaacttgtattgcagcttatgcaacttcagatctctacatacccaaatattactgtg

SEQ ID NO: 137441 - DNA, 282 bp, Homo sapiens
ctgccatagaggatcccggcagctatccggttcaatgataagtttaaattataaagaattttaatctttacataagagcttcattgcaactaataaaaattttcaccaggaaattatattcatatttgtgacaattttctgttttataaaccaatcagtgtgaaagagaatcattcctttactcaatgtaagtaatttcaagcttaattctaaaactaatgacttaattcttgttagcatcccttttcctgtgcccctttctcccttcacatcatggaattg

SEQ ID NO: 137442 - DNA, 108 bp, Homo sapiens
atgaaagaaatttcttttttccaggaaaataatacatcataaaagaaaggtcaaacttcgatctgtcacattaaatttctaaaacagttccaaggtataatatctaag

SEQ ID NO: 137443 - DNA, 147 bp, Homo sapiens
ctaaacataccggtttgtgccatgtttctgaaatgcttggtgcagaggcttacacttaaaaacagatccagcaggaggggtgggagcgttcctgttactgtttgtgagtttcttttgcactccctggagtcagtgaggtggtggctt

SEQ ID NO: 137444 - DNA, 482 bp, Homo sapiens
aggcgtgagccactgtgcccggcctaaaattattcttttaaaaatggtaacagggtctcactatgttgctcaagctggtttcaaactcctgtgctcaagcagtcctcctgccttggcttcccaaagtactgggattacagatgtgagccactgtgcctggccccgagtagtttttattgtatacgtatactgtgactggaagttaggactgtttttaggaaatacactgtgagattttgaagtttgccgcattgtctttgttgtgatcagtgtgaagttttgaacatagtggattttgatttaggggatgaaaattcattcaagatgatactgtcagttttcagaaataatgaagttgtatagtgttttctgcaatggaaagctgaacttttacaaaggctcagttagcatttctgaaatgatggtgtgctaattatctgttgaaatttaataatgaaaaataaaattttcagtccatggac

SEQ ID NO: 137445 - DNA, 123 bp, Homo sapiens
ttcacacaacaaattaatccacctaatggtaaattacgaagtactaacatttgaccagtctaaaaaccacaggggagaaaaaagaaactaagtaacatctatccccgtatttacgtagctcca

SEQ ID NO: 137446 - DNA, 422 bp, Homo sapiens
agtctccctagaatagactgtgagtccagtgagacgaggggccttgtcctttacctctgactccctagcttctgacacagtcttggctcttggaaaatattggataaatgaaaatgaatttctttagcaagtggtataagctgaaaatatacgtatcacatatcctcattctaagacacattcagtgtccctgaaattagaataggacttacaataagtgtgttcactttctcaatagctgttattcaattgatggtaggccttaaaagtcaaagaaatgagagggcatgtgaaaaaaagctcaacatcactgatcattagaaaacttccattcaaacccccaatgagataccatctcataccagtcagaatggctattattaaaaagtcaaaaaataacagatgctggcaaggttgtggag

SEQ ID NO: 137447 - DNA, 752 bp, Homo sapiens
gaggggccattcaccttagttaagtgtcatctctccgtggctgagaatgcagaataagatggactttggaaaggggccactgtgcatagaaacttgcaagagcagagcggtgctatggatcctctcctgtaaaatggtggtaataaactacccatctcaacacagcggagagtgaattacgtgagccaagaaatgtaacacactttagaacagagcctgaaacagacttatatgctcaaaaaatggttgctgttcagtgttttaaccacaatgaaccaaaaatcaagcactctgtatgtgctaggcacattcctaagtattttctaagtaatcacttaatctctactcatcaaacctccagtgggccacttctgaaatgccccccaccccctagggtatcccctcctttctactctggtctgagccacctaaccccaaccttttgcccagactatgcaacaacttagctggtcttttgctcccactacagtctacgtccacacagcagctggagcactacttgcaatggcagtcacatcatttcactcctgtctaccaattctagaaggcccaacatgatctgtcccttttccactgctctgacatcatcttttatcatcctccccctcactcagggcagtcacacatatcttctgtgcctcaaatacaacaagctaatttctgtcttagggtaacatacttaatgtacttcctagtctcttttttttccccctttaaatttcttaacaaca

SEQ ID NO: 137448 - DNA, 199 bp, Homo sapiens
aaataaacagatgacattgaatttgctcctgttgcttacatgctgcagacaaatggctgatctcattagacaaatggatatggttaaactataatctaaaaaaataagagcagagaaacaatttaggtaggcaactgaggtctgaaataattatgtgctatgcttaatcatagggtagtttgaatttttcaagtgtatt

SEQ ID NO: 137449 - DNA, 678 bp, Homo sapiens
aactttcatcccaccatttgccgaatgctgtgcgccagatgctcttccaggcgcttgacatctaacagcagagaagagagaggaaatgcttgcccaacaggaactcccattctagtggaaggaaacagattctcaacaataaacataaaaataaagggaggccaaggtgggaggattgcttgaacccaggagtttgaggtcagactgggcaacataggggaacccttgtctctacaaagaatacaaacattagctgggcgcggtggctcacgcctgtaatccgagcacttcgggaggccaaggcaggcggatcacgaggtcaggagcacgagaccatcctggctaacacggtgaaaccccgtctttactaaaaatacaaaaaattagccggacatggtggcccatgcctgtagtcccagctactcaggaggctgaggcaagagaatctcttgaacccaggaagcagaggttgcagtgagccgaggtcatgccactgcactccaggctgggcaacagggagacgctctcaaaaagacaaaaaacaaacattaaccacatgtgttggcacatgcctgtggtcccagctactcagaaagctgaggtgaaagtatcactcaaggctggaaggtcaagactgcagtgagccatgatcatgctactgtactgcagcctgggcaa

SEQ ID NO: 137450 - DNA, 642 bp, Homo sapiens
actagaggagtgcatgcaaagcatcaacctagtgcccagttcatgacacatgaaatccatgtaaaccacagtataagtcattaggtgagatataaggagaagatcattatcatgttaagcaagaaataatatgactcatttgctaattatttaatcaaacttgagggaaaccagattcagttgtattggagattctgcacatttagctctaaagattcttatctacgtccatttctagtcattcacttaataaacttttattaagtgcccagtatgtttcagtaactattctaaaccctaagtatacaaaaatgaatagaatagggcttaactctcattttgctcccattccagtgggagagacagattcaaacaaaatgcattaagtgtaactatggaggtgcaggcaagggctgggagagcttaaggagcaagtattgaaatccacttagaaaagtcaggagaatttttaagaagaggtaaggaattgagctaaattttacaccgtgagtagcagtttgccaggcagataaggtggagaaggacgtacctgaaaaagagtccagcatatgaaagcaggaagttgaaaaagaaaaaagcaagggagagagacggcatgtggctgagtacatttttatcaca

SEQ ID NO: 137451 - DNA, 263 bp, Homo sapiens
gataaatataaagttaccaaaactatgtaaaaagtggctataattctttgtaactgcatgtgtaacatgttcttattgagagagtgattctaaaattactagtggacacagtgggcatgctgtggtaaatatttttgctccacagaagtggaatcccaggctttactggcaatagtaaaaaaaaaatctatttagacttaatacttgaaatttcttgtggcttattctgagttcctttctgtttcctattgccacaaatagca

SEQ ID NO: 137452 - DNA, 458 bp, Homo sapiens
atcaccaccaccaccaccctgtcactatcactaccaccatcactactgccaccatcatcaccacgaccacctccatcaccagtattaccaccatcaccaccaccattgttaccactatcattatcaccaccaccgccgccactgccaccaccaccatcattaccacatcaccactatcacccctattaccatcactaccatcaccaccatcatcaccaccacacccatagctactaccattaccaccatcatcaccaccaccactgctttcactatcaccaccaccactaccatcaccatcactgttgttgaggaagtctgcctgaagctgtgctagaaccctactgcaccagtcctgagataccacagccaccacagcctctgatttgaagcccgaatggaacggacaatccatctagcttttgggagctggacctggagcatttggtatctgaatg

SEQ ID NO: 137453 - DNA, 250 bp, Homo sapiens
aggactactatatgaaatattacgtggcagagtctcgttctgtcacccaggctggagtgtagtggtgcgatcttggctcagtgcaacctctgcctcccggcagagcgattcttgtgccccagcttctcgagcagctgaaactgcaggcgtgtgtcaccatgcctagctatttttttctattttttagtagagagagggagttcaagaccagcctgggcaacatagcaagaccccttctgtaccaaaaaaa

SEQ ID NO: 137454 - DNA, 376 bp, Homo sapiens
aggactactatatgaaatattacgtggcagagtctcgttctgtcacccaggctggagtgtagtggtgcgatcttggctcagtgcaacctctgcctcccggcagagcgattcttgtgccccagcttctcgagcagctgaaactgcaggcgtgtgtcaccatgcctagctatttttttctattttttagtagagagagggtttcaccgtgttggccaggttggtcttgaactcctggcatcaagtgatccacctgcctcggcctcccaaagtgctgggattacaggcatgaaccaccacacctggctggcaaaaagggattttaaaattaatttaaaacattaaaacaaaaatggttttatcactatggtaatattaa

SEQ ID NO: 137455 - DNA, 419 bp, Homo sapiens
ctcattttgcatatttgtactacctgttagtaaaatttagacttttaaaactatttattggaaagatagtgatctaagggtcaagacatccatactctagtttaactcagttaattatataatcatatgattgtgaacatgttttgcctctgtaacttttttctcatgtagagtagaaataataaccaccaaattataaagaatggatagaaaaaaaatactgcacagatgctaatacatttttatgactgtttacagcttcctttcatataagattcatacctaagtcattaaacaagcccatgatgtgagaagggtaagtatcatgcccattttacacatgaaaatatagaaaactgatgttcagagaggttaagagacttccccaagaccacactgcaagttgcacaatcaaaagc

SEQ ID NO: 137456 - DNA, 361 bp, Homo sapiens
agtcgaggttgcagtgagccatgatcgtgccactgcactccctggataatgggaaggccaagacaccattgtccactgcagtatggcagctagagctcaatgagtttaaaagtgagctcattgtcctcccctccaaatgtcctctcctctcccaatttctgccatagtttctttagggccccaactttctctaccagtcacccaaactcaaaactctttcactcaagtcctaatgattctttcttcaaaacatttctcacatctacagacaatatgaaaataaaagtggcacaggtaacctgtaagtagtaacttacagctttcattggtgcttacttcttaggagagggggaaagacaga

SEQ ID NO: 137457 - DNA, 367 bp, Homo sapiens
ctcttcccaagatatcagtaataataggtcatgttgatgtggctcttaagatgggccaagctctagtgcaaagaactttctatgcattaatgatttaatcctttcaaaaaccctattgggtgggtaacagtgtttccctccaagttgaggaaaccgagtgttacaagctgaattgtgtgtccctaaatgctatgtggaagtcctcaccccagaacctcagggcgtggccttattcagaagcagcgtccttgctgatggaatgagttaggctgaggtcaggctggagtgggcaggggctactccaacatgactgtgtctttctgtgtccgaattggtgggttattggtctcactgacttcaagaatga

SEQ ID NO: 137458 - DNA, 588 bp, Homo sapiens
ttttcactcccattatctaagtagtcaccataaaatagcaatatttaccaaaaatatctctcatatctgttccatcttctccaattcaatagaattgtcagtgctaaaaaatctactatttagcttaagcctccttcaattatttatttttcataatgggagacactgtagcacaactgttaaatacacaagttctagacttagactgtgcgtggttcaaattaacgtctgactagtggtgtcatcattgccaaattacttaatttctctgacccattgcagaattaacaaaaagtacaataattatgatgcctactcctgcaagcattaaaacaaacatgcctatatacacatatatgtaaaatgtgttttataatatctggaacaaaatgtccattcaataaatattagctactagtattattgccattattatctccaaaatttagctcaaatatttctttttcagttacaatttgaatatctctgggaaaaatgtcaatcattttactctgtcttgtgatgtcgtcttgtgaaatgtattctttttttggcactgataatattaaatggatgaaatttaaaata

SEQ ID NO: 137459 - DNA, 634 bp, Homo sapiens
ttaagcataacgatggctaaggatacaacctgcagacgccgtagagtgagagacgtgtctctctttgctgtgattagctgcgtgcttttggacacgttgctgatcttctccgagcctgtttccttgtctctacagaaggaataataatacatacacctgaaggaagctactgtgaaggtgaaataaaataatgtaggtaaagcacacagtgctcggctcatagtcatcaccactcaggaaatggagcaggaaggacgtcacataactcgcccagatgagaggaggagccagcgttggagctctggccttccaagatccccatctctgctgcagtgtctggtactgagcatgcacttaacagatgcttttttttttttttttttgacatggagtttttgctcttattgcccaggctggagtgcaatggcacgatcttggctcgctgcaacctccacctcccgggttcaagtgattctcctgtctcagcttcccaagtagctgggattacaggcacccaccaccatgcctggctaattttttgtatgtttagtacagggagctctaaagctgagatgcctttcagagttgtcccaagttggggtgagaggttcatggctttacgccacagcatttt

SEQ ID NO: 137460 - DNA, 551 bp, Homo sapiens
ggaataaaaacctatatgaagaaaagagactcacattatgctaagtgaaataagccaagcgcagaaggataaatattgcatggtgtcacttgtaggtggactctaaacaagttgaactcatggaaatagtagaatggtgattgcaggagtaggggttgtggtggggaacagggagttgctggttaaagggtacaaagtttccgttaggatgagtaagttctggaggtctaatggtagaacatggtaattactgttaataatgtatacccaaagatttctaagagcgttatcttaaatgttcttaccacaaaaaataaaatacttatgtgaggtgatagataagttaattcacttgatggtggtaatcatttcacagtgtatacataaaaacaatatgtcgtacatcgtatatatatatgtgtgtgtatacgtgtgtgtgtgtgtgtgtgtgtgtgtgtgtatatacacaattttaatttgtcatttatacttcttcaatagacctgagggagaaaagaaaaaaaagaattttacttgactcccaatcttta

SEQ ID NO: 137461 - DNA, 496 bp, Homo sapiens
cggcgccaagatcaatacacgggttagaccggcagggagagccgcaaaggtcaggataaacagtggagtttctatgaaagccccctcggcacctgggcaggatcagccacattcaatgatggggagccacagggctgcagcagagctgctgtttccactcgtatcctgtgcctctgggggcgtgtgtgtgtgtgtgtgtgtgtgtgttcagtcaggttaatactcagacctctccaggatgcatgtgggttaaaccaccttatctataatccatatgcctcatttatgaatgggggatagtaaagagctgctaaaaattcaataaggggcacgacagcgggatacccgggaggtagtctatcaaacacagcagccagcgtgcagccactccttcctactctgtcctggggctgttaaacagcctctttgaaacttttttttttgagacagagactcactctgttgcccaggctggagtgcaatggcaagatctcag

SEQ ID NO: 137462 - DNA, 424 bp, Homo sapiens
ccgtcctaagctgttttataattttcttggctatctattatattattatgcaactgcaccttagagatagctgaatttgagtagtcactaaaatacattttaaattgataaaattgccatggaattttgtagcataaaggtaaaatataaatttggaatctttataatacatataattaactaaattatgagctgaaattatcgttgttgcaagtttataataccaacagctaactgagagaatttttataagtttacaatagccattttccctttaaaactgagtacaatccagaaaattgatttacagcataatagtatactatttttacatataaatactggttatctactcccaatgttcataacagaacttaggttctcttcaaggtatgatagttgtgaaaacctctagacgcctctt

SEQ ID NO: 137463 - DNA, 385 bp, Homo sapiens
actagcgaggagctacaccaccagataccaaataactgctcaggtcattgtttttcacttaatggacattgtctgtccatagtgggcagtcagtttgcgaagctcatgactgagatgtgattgaggggaatcgactagctggtgacactggccgctttgtggctgatataactgatgatgtgtggcttgttttctctggtagaaatgtgtgggattgtcacctctgctgaacttccacagcagtcttttccaggactcgtcatccttggcagccccaactcctgcctgtcagcccaagtctccctttgcggttgctacaaccaccaagggctcatcctcttctcctgtctgccctcatgtcctgccaatcaggagccttttaaat

SEQ ID NO: 137464 - DNA, 372 bp, Homo sapiens
caggattaaaacccaggcccagagctctcacttcagcgtttttattttacatcatgatctcaaaggctcgtctgacctccatgtctacatccaataactaggaaggcttaatagtatactgcccatgactgtgttatgtgttcgttttaagaatttctaaaacttaggctcttattggaattgtgtagaaggaagtgatttttttatttagaacattctttttctggccaagactttagcagaggagagatagaaagtaacaactgatcattggttagaacatgcttatttagatttgagaagatggtgcttactagatttggaaaagaccctttgtgtgcaagcagaaagttagaagcatggcagaaacat

SEQ ID NO: 137465 - DNA, 447 bp, Homo sapiens
tgcctccagataacagaggaaatcaaatcttgtgagccgggaagcaaagttgccttcactgtcatcatcaaggggatgatttgtaagaatattgggcatgaaataaattcttgccaaagttgtctacaggagtgtccaatgtgggaattgttgtcatctctttcacccttctaacattaaaaggaacttactgaaaaagttctcagactggattttgctaaattgtgtctgctttggaatctttgtccatcagtcaagtctctatgactattggatagtgcttttaactctgtgtggtcaaaactttggaagaagtaagagaaatatctttcattccaaagaacaaaagaggaccattagtcagagcatctttatttttcataaaaagaaaagtcagttagattgatcattcatgaatatttataatatatcagatattctttgggg

SEQ ID NO: 137466 - DNA, 223 bp, Homo sapiens
aaaaatcagatctatattgtatggatacatcacagtagtaaaatagcacagaaatgataaaaaataaattcagtaatatgtcaagggagggaaaagggggattgtgcaaagatcatcaaaggccaccaactttatctttgattctgttttccactaaaatgaaaaaaaaatacgcagcaaataatgaaagatgttaagatcagacagatatgctttggtggtt

SEQ ID NO: 137467 - DNA, 335 bp, Homo sapiens
actctgttgtccaggctggagtgcagtgacatgatctcagctcactgcagcctccaccccccaggttcaagtgattcttgtgcctcagcctcctgagtagctgggaccacaggtgcataccatcacgcccagctaattttttatttttagtagagatggagtttcactatgttgcccaggctggtcttgaactcctgacctcaggttatctgcccacctcggcctcccaaggtgctgggatttcaggcgtgtgccagcgctccgcctcctcttcctttttctctcaagcaacaatcccagctttaggacttgctaacctcacacccctgggccgt

SEQ ID NO: 137468 - DNA, 350 bp, Homo sapiens
tgtttcacaatgttggtcgggctggtctcaaacccctgatctcaggtgatccacccaccttggcctcccaaaagtgctgaaattacaggtgtgagccaccgcgcccagccgaccttgatgttttgccagttattttgtaggatgcctctcaatctaatcctgtgttcccgtcccctcccccaactcatgttttctcactagattgaggtcatacattttgggcagaatatgacaaaaatgatgttgtgctcttcttagtgtgaaatatcaggagacacagaaagttgaattgcctggtggtagttaactttgatccagtgtggtgctgacaaatgtttaacaactcaact

SEQ ID NO: 137469 - DNA, 191 bp, Homo sapiens
aagttatctgaacttgggacgggagagaggcaaatggatagccgcggaagcatgagattgtcctgtctgacagggagaagcaagggattgagcgtattcacgctgaagtacatggcatgaggttggctggatattaggaaaggatgcttgtggttgttcaggtgttgagtgtgaggccacaagctcgtgca

SEQ ID NO: 137470 - DNA, 277 bp, Homo sapiens
catatatagtttgcagcactcagaatcaatacaaagtaccttcagccactttggttcacattctgaagattcatgtaataaacacccatagtagttgtgggctcacattatctaatgagaatgttttcttgatgacttgacatttctccgtcactgttggataatcagagaaaaaaaggacgttcagaacaccaaggtgcttggtacaattatgccaagtgccctgtctttaaagggagtagcctaattctcagcatttgggagtttttgactaaat

SEQ ID NO: 137471 - DNA, 649 bp, Homo sapiens
agatgaatcagagaggttaagaggaagtagagagcagaggctaaagtacctgtcccgagaaaatgagaaagagagagagagagagagagagcacaaccttgcagcttctattaaaggtagtccaggctcctggccattttccagtccccagcagtcctggctgtactatggattctgtcctttgatttcagtaagtgtcctttgtgtgactttataataaatgtccccattttgaagctgacttgagggactttccattctagtcatcaaaaagattccaaatacaaattagttgcagacatgtctctctccacctctaaactatagactgtgatcatctttaagtaaagcatgaaatcacttttctattacttataaaatatttcaaacataaaaatgaaaaataatgaatgtgcatttacgaatccatacttagttttaatgattattaaataattttgccatatttgcctcaccatttttaaaacataaatgagacatttcagatgaaacctttcagatactcctcctcaattctattccccattctcttcaaaagtagccactattttgaatttggtatttatcattcacatgtgacgtgtgtgtgtatgtgtacacacattaatatgcacacacacacatacat

SEQ ID NO: 137472 - DNA, 327 bp, Homo sapiens
tgtattacaaattgtctcgggtttgtaattgcacagcaaatcactgagccatccagcatatcttccaacatgaagatctaatcgccaaagccttaacttagattgttacttatgtttctaaatctgtggaagcacatttccttttcttcttcttttcttttactgttaatatccttattctctattttaccagtggagaatgtttagtattaatttccatttagctcaagattcaagaaatgcaaagtgctatttttatcaaatttctgaaagcctactgtcttctgctttggaagtcccacaacagctctttaatttccttaagcc

SEQ ID NO: 137473 - DNA, 338 bp, Homo sapiens
atccagtggggggatttccgatgatgtccttcttgatctttctgatccacttgagagttgaccacaccatctctcctaaacccttctgcattcttggtgtattagtccattttcatactgctatgaagaaatacctgagactgggtaatttataaagaaatcgaggtttaatggactaacggtttcacatggcgggggaggcctcacaatcatggcgtaaggcaaaggaagagcaaaggcatgtcttacatggcagcaggcaagagagcatgtgcaggagaactgcctttataaaaccattaatcatatcagacttattcactatcatgagaacagca

SEQ ID NO: 137474 - DNA, 646 bp, Homo sapiens
tgtttgcatgtgtgtcccagcggatcctcctgctgctgtgtctaaaatccctaaaaatctttcagacgatctagagctgtctgggtaattcacaggaaaagcacctacagaactcttaacctcacactgcataagaataaagtggggcagtgctaaaatagagaccaagaaggcatctttattaattttttacccagctggagatgagggagagtaacagccaatcaccagcagattactatctaagaactcattgatctaagaagctgctgagccagcccaactacctgtggtatatcaacaaaaaaaggaaactaaatgatgagaacatatggacacacagagggacacaacacacactgggcttaatatatggatgatgaaataatctgtacaataaacccacatgacttaactttacctatataacacacctgcgcatgtactcctgaacttaaaatttggttacttaagtttacctatataacacacctgtgcatgtactcctgaacttaaaatttggtttgagagttatttgaagaaacaaacctaacagatgttcactttttgccccttcctttctgttctgcaaagaggcatattcctcgaagatacgtaagaatctgaaagcatccagcacaggact

SEQ ID NO: 137475 - DNA, 310 bp, Homo sapiens
taaaatggtgttttgttaagatgataagatcatttcacagtaacttttctaaaattaaaacatagagttagagttgattttcctatgtgatagtccttagattctggattgcttaatttgatcttttttttactgaaatattacattttttggtattttaaatagaatattgcattcatcgggacctaagaggaaggtaatggagagaaacatgaagaaagcctgaagatttattttggagagggcttctgtaatgaaatggaaaaaggaaggatagtaatgagagaacagttacagaactaggagtaaa

SEQ ID NO: 137476 - DNA, 430 bp, Homo sapiens
tcagagcatgggaatgcctaaatgacagtatggctatattctctccatgcattctggaaatattataaaggctggagttgagttgaataaagagacaagtgcactaggaaagctgattgagcttctgccatccagggaatatatatttaactcagatgatatcactaagaagtaagtgtattttttaaaaaagttttgactgttttcctcccatcacacaatcagtcattatatgctgctctttctgtgtctagcacagtgacttttaattcttgctgaaattagaaaccacctggggaggggataaaactcttactgcccagttgggataccagaccaattaaatcagaatctctggggtgggaaataagcgtcagtattttttgaagcttcctgtgtgattctcatacatagctgagtctgagtacca

SEQ ID NO: 137477 - DNA, 476 bp, Homo sapiens
atgcccagctaatttttgtattttttgtagagatggggtatcaccatgttggccaggctggtctcaaactcctaacctcaagtgattcacccacctcagcctcccaaagtgctgggattactggtgtcagccactgcacccagccaatatatttcattttaaagcaagcaataaaaacttatttcgctgtttaatatttttattgactttaaaaagactttgaacttagtgaaagagaatcagtcacctagaaatgtactgctctcatctagctgggaaggtcattgtaattttcttctatatagatttgtttgctctagataagcggctcaatttgaatagatttttagtgatgaaagggacattgggagctgctgccacccattcctttttcagatgcagaagccacagcctggaaaaattgtgatttgtcctgaggcatacagttactagcagagaaagccaagaccagaccc

SEQ ID NO: 137478 - DNA, 288 bp, Homo sapiens
ggtctttattcttttggtttaggaaacatccaaaatagcctctctcggtgggtatgcgccctctgaaagagcttgtcttgcacgtgttggagctgactgtttaggtactgctggaatggcactgagacagtccagttgggactgctaaatgggggcagcagctcacacagggatatttttcatagttgacattatcctttatgggaaagggccttatttagaggagcatttccattttaatggttcagaaacctgaactgttgctatggcctcattttcatcgtttgg

SEQ ID NO: 137479 - DNA, 491 bp, Homo sapiens
tgccctgtaattaatttatcaaaagccatttccgggtaacaggattaatttcactccacacttgagtgccagccagtgtcagatgcctgaccagggcactgggatgacctgtcattcaccaggaaccactacggctccgcattcaggggagatcagtggccaccagcacttcaagggccaggcaccctgctaagccctcatgtgctctactccccttcataacagcactttctggaagatactactgcctgtttgacagagaaggacattaaggttcagtcaatcaggatagaaaagtaacacacccggcaggatgcgggtgactcacgcctgtaatccctcctttcccacagaagccactcagagacactgccacggggaggtagagcattctgaaacttgccagcctaaaagaaaatattgccattaggcagatgaaaaaggggcctaacacccatatgaagatagatttgggaacaaatcaatggaga

SEQ ID NO: 137480 - DNA, 252 bp, Homo sapiens
ttttttatatcaataggttaggggtcaggtggttttggttacatggatgaatgtatactggtgaagtctgaattttagtgcaattcctatgggttaaccattgggctcctttcaaatgcaaaccctcatgaaagagactacagtgctgaatagagacctccaaattccaggccaagctcaggatagtcatgagggaattactaaaaacctggtatatagggcaaaagcagaattaggaatggactgatttca

SEQ ID NO: 137481 - DNA, 190 bp, Homo sapiens
tactacaacgatatgtactgagttcttggcacaaagctgtccttcatagagttgtttataactgcctccaaatgaaaactgcctaattactcatcaagaggagattggttcaatcaatgatggtctatcagtcagccattcaaaatcatgttggggctgcgcaccgtggctcacacctgtaatcccagca

SEQ ID NO: 137482 - DNA, 518 bp, Homo sapiens
taatccacaaggctaatactgagggtggagggaatccaggaggaactccatgcagacgaatatgcctactacatccaggtaggtcagcctgctgggattcaaacacacggaacaagtgtgctcagggcctcgtgtggctataattatacttttaatgtgcaaattatgggtagcacttaaaacaacctaccttcttcatatcctcacccttaacatccaaccaaaaaagattttggagggagaccagacttggagcactgcattcaattaatgtgagccataatttcctatttcaggcttataaagattatccctataaggtttctcttaagaactgtaatcttgttctaataactaatctatccccatggaaacttaattggactcgattaaaacatttaaaaatactgtacttttcagaaaactgcctttcttaccagaaaaccgaaacttaacaaggatctccctgaagggggagttgaaaggtaaactatgggcccacggtgaggatttctgaa

SEQ ID NO: 137483 - DNA, 518 bp, Homo sapiens
caggatggcaagcctttgtagtgtctcctcgtcaacctgaacgtcagctataccatgcctccaccctcatgtggcctgaccggagatggttctggtggagatgccctctgtcaccggcccagctcatgagagccattaccaaatatgtgagtgttctttagagtgagggtgactcacgggaaattcacatggttctgctttctacggcaaagtttgcattttcctcacctgcactgtttatgttctgctgtggtcctttgtgctggtggtcatggtcctcccgtcacagcatgggatagtagtggattaggaaacgaggtgttggttctcagaaaaggcatgatggaaacccagagcaggaagtgctttgtgcagacgacaaagaacctttttttgctttttcagttgttttctcttttctacttacctctcatccctttacagtgttatctgtttgctttacctctttcttacctccaagccccaaaacatggcaggagaggatgtaactgaggttc

SEQ ID NO: 137484 - DNA, 378 bp, Homo sapiens
agagttttttttaatttgagacagggtctggctctgtcacctaggctggaatacagtggcgcaatctcagctcacttcaatctgtgcctcctgggctcaagccatcccctgacctcagcctcctgagtagctgggactacagtcctgccactatgcctggctaatttttgtattttttgtagagatgttgcccaggctggtctgaaactcctgagctcaagggatccatccacctgggcctccccaagtgctgggattacaggcatgcgccaccgtgcccaacccagacatcacttttatctgaagcaacaactatctgctctttctgtttccttactaattatccaggaacttttacaggtgaactctgaggaggac

SEQ ID NO: 137485 - DNA, 724 bp, Homo sapiens
cacgcttcgcctgcctcacaccaggcagcggcctgagaagcctggccacgccaccatgcctgggtcctcactcccactgctctcttgcagggaaggacatggagcccaacggcccgtcgctgcccagggatgaagggcccccgaccccaagctctgccacgaaggtgccaccggcagagtacaggctgtgcaacgggtcagacaaggaatgtgtgtcccccaccgccagggtcaccaagaaggagactctcaaggtgagcccgggcccggggagggtgcagcagtgtcactgtcagaccgacggccacctgagccagggaggtcaccctccccacctgtcaaaaggaggggacaaaccgcacctggtcgcctccacaccccctacttcctcctacttcctctcctgcccctgcccctggacccatccctgggctggacggtgggaggagctggggcagctcggtgccttctcccatgacccaccgcgggtgccccgggcccaggcgcagaaggagaactaccggcaggagaagaagcgcgccacacggcagctgctcagcgctctgacagaccccagcgtggtcatcatggctgacagcctgaaggtaggtgatgcccggcctccggccacccaggacacgggtcagcgtgctgctgccataacaaaggaccataaaccaggtggcctgaaacgatggaaattcacttccctgcatctagccgt

SEQ ID NO: 137486 - DNA, 3861 bp, Homo sapiens
ggacttctcagccagggcacccccaccatgtggctctgaagccccttccggggcggtgacctcctgctgcccctccttccttccttccagaagcccccgagcgcccacagcatgaaggaggaggccttcctccggcgccgcttctccctgtgtccaccttcctccacccctcagaaagtcgacccccggaagctcacccggaacttgctcctcagcggagacaatgagctctacccactcagcccagggaaggacatggagcccaacggcccgtcgctgcccagggatgaagggcccccgaccccaagctctgccacgaaggtgccaccggcagagtacaggctgtgcaacgggtcagacaaggaatgtgtgtcccccaccgccagggtcaccaagaaggagactctcaaggcgcagaaggagaactaccggcaggagaagaagcgcgccacacggcagctgctcagcgctctgacagaccccagcgtggtcatcatggctgacagcctgaagatccgcggcaccctgaagagctggaccaagctgtggtgcgtgctgaagccgggggtgctgctcatctacaagacgcccaaggtgggccagtgggtgggcacggtgctgctgcactgctgcgagctcatcgagcggccctccaagaaggacggcttctgcttcaagctcttccacccgctggatcagtccgtctgggccgtgaagggccccaaaggtgagagcgtgggctccatcacacagcccctgcccagcagctacctgatcttcagggccgcctccgagtcagatggtcgctgctggctggacgccctggagctggccctgcgctgctctagcctactgagactgggcacctgcaagccgggccgagacggggagccagggacctcgccagacgcatcaccctcatcgctctgtgggctgccagcctcagccactgtccacccagaccaagacctgttcccactgaacgggtcttccctggagaacgatgcattctcagacaagtcggagagagagaaccctgaggagtcagataccgagacccaggaccatagccggaagacggagagtggcagcgaccagtcagagacccctggggccccggtgcggagagggaccacctatgtggagcaggtccaggaggagctgggggagctgggcgaggcgtcccaggtggagacagtgtcagaggagaacaagagtctgatgtggaccctgctgaagcagctacggccaggcatggacctgtcccgcgtggtgctacccacgttcgtactggagccgcgctccttcctgaacaagctctccgactactactaccacgcagacctgctctccagggctgcggtggaggaggatgcctacagccgcatgaagctggtgctgcggtggtacctgtctggcttctacaagaagcccaagggaatcaagaagccgtacaaccccatcctgggggagaccttccgctgctgctggttccacccgcagactgacagccgcacattctacatagcagagcaggtgtcccaccacccgcccgtgtctgccttccacgtcagcaaccggaaggacggcttctgcatcagtggcagcatcacagccaagtccaggttttatgggaactcgctgtcggcgctgctggacggcaaagccacgctcaccttcctgaaccgagccgaggattacacccttaccatgccctacgcccactgcaaaggaatcctgtatggcacgatgaccctggagctgggtgggaaggtcaccatcgagtgtgcgaagaacaacttccaggcccagctggaattcaaactcaagcccttcttcgggggtagcaccagcatcaaccagatctcgggaaagatcacgtcgggagaggaagtcctggcgagcctcagtggccactgggacagggacgtgtttatcaaggaggaagggagcggaagcagtgcgcttttctggaccccgagcggggaggtccgcagacagaggctgaggcagcacacggtgccgctggaggagcagacggagctggagtccgagaggctctggcagcacgtcaccagggccatcagcaagggcgaccagcacagggccacacaggagaagtttgcactggaggaggcacagcggcagcgggcccgtgagcggcaggagagcctcatgccctggaagccgcagctgttccacctggaccccatcacccaggagtggcactaccgatacgaggaccacagcccctgggaccccctgaaggacatcgcccagtttgagcaagacgggatcctgcggaccttgcagcaggaggccgtggcccgccagaccaccttcctgggcagcccagggcccaggcacgagaggtctggcccagaccagcggcttcgcaaggccagcgaccagccctccggccacagccaggccacggagagcagcggatccacgcctgagtcctgcccagagctctcagacgaggagcaggatggtgactttgtccctggcggtgagagcccatgccctcggtgcaggaaggaggcgcggcggctgcaggccctgcacgaggccatcctctccatccgagaggcccagcaggagctgcacaggcacctctcggccatgctgagctccacggcacgggcagcacaggcaccgaccccaggcctcctgcagagcccccgatcctggttcctgctctgcgtgttcctggcgtgtcagctgttcattaaccacatcctcaaataggagccctgggggcagagctcctggccagtcccgagccctccctcccaggcacccagcactttaagcctgctccatggaggcagagaggcccggcaagcacagccactgtgacggggagtccaggcgcaggagggacccggggccacaagggcgctgcgggcccaggtgtgctgggcccctctcaggggcactggcctctctgcagggccttccgcccagcgctggccttaatgctaaagccaaatgcagcttctgctgtgcgacgcactcctggccatcttgccgtgtcaccccctgtccggcctccacttgccatgggggatggatggatttagggtgggagggcctgtgggggccctggacagtcacaccccagcagcagtgagtgggcaggtttggaggagcagccagggagccccgagtggcccaggagtccccccacacacagatgcataggcctgccttccggagaccctgtccacattgccgggaccaccctggtggggccactggtgggtgccagggacaggttagggccactctggggaaggcattttggttttttattccacgctgtgctgtttggatgggagccccacagaggcaggtcctggaaccaccccacccccacacctggacgctcgctctggtgggggcacacgcaggtggaggtggttgtgggtgcaggtgtgtgcaggggtgtggggggcgcaggggtgtggcttagctggccccgcacccaggccggggaggctcaagttcgccactttactcagaccgatgcacagtcttcccattttacacttttttaataaacataattgcaatattttaggtgggctgcgagctgcagtcagccttcacgtctggcctcagtccccgtgtcagtgccgctctgcgtgtgcgtgtgcgcgtgtgtgagcctctacacatatatatacgtacagagccttaaaccacatcgtggcggtgccgtctgagctgtagcgggtggctttgtttccagtttttgtacccgtgtccttgtctcccctcctcccccatctggggatgtgtctgtgttccacaccttgaaataaacagacacatacgtgttctcttcttgcggga

SEQ ID NO: 137487 - DNA, 3704 bp, Homo sapiens
cacgcttcgcctgcctcacaccaggcagcggcctgagaagcctggccacgccaccatgcctgggtcctcactcccactgctctcttgcagggaaggacatggagcccaacggcccgtcgctgcccagggatgaagggcccccgaccccaagctctgccacgaaggtgccaccggcagagtacaggctgtgcaacgggtcagacaaggaatgtgtgtcccccaccgccagggtcaccaagaaggagactctcaaggcgcagaaggagaactaccggcaggagaagaagcgcgccacacggcagctgctcagcgctctgacagaccccagcgtggtcatcatggctgacagcctgaagatccgcggcaccctgaagagctggaccaagctgtggtgcgtgctgaagccgggggtgctgctcatctacaagacgcccaaggtgggccagtgggtgggcacggtgctgctgcactgctgcgagctcatcgagcggccctccaagaaggacggcttctgcttcaagctcttccacccgctggatcagtccgtctgggccgtgaagggccccaaaggtgagagcgtgggctccatcacacagcccctgcccagcagctacctgatcttcagggccgcctccgagtcagatggtcgctgctggctggacgccctggagctggccctgcgctgctctagcctactgagactgggcacctgcaagccgggccgagacggggagccagggacctcgccagacgcatcaccctcatcgctctgtgggctgccagcctcagccactgtccacccagaccaagacctgttcccactgaacgggtcttccctggagaacgatgcattctcagacaagtcggagagagagaaccctgaggagtcagataccgagacccaggaccatagccggaagacggagagtggcagcgaccagtcagagacccctggggccccggtgcggagagggaccacctatgtggagcaggtccaggaggagctgggggagctgggcgaggcgtcccaggtggagacagtgtcagaggagaacaagagtctgatgtggaccctgctgaagcagctacggccaggcatggacctgtcccgcgtggtgctacccacgttcgtactggagccgcgctccttcctgaacaagctctccgactactactaccacgcagacctgctctccagggctgcggtggaggaggatgcctacagccgcatgaagctggtgctgcggtggtacctgtctggcttctacaagaagcccaagggaatcaagaagccgtacaaccccatcctgggggagaccttccgctgctgctggttccacccgcagactgacagccgcacattctacatagcagagcaggtgtcccaccacccgcccgtgtctgccttccacgtcagcaaccggaaggacggcttctgcatcagtggcagcatcacagccaagtccaggttttatgggaactcgctgtcggcgctgctggacggcaaagccacgctcaccttcctgaaccgagccgaggattacacccttaccatgccctacgcccactgcaaaggaatcctgtatggcacgatgaccctggagctgggtgggaaggtcaccatcgagtgtgcgaagaacaacttccaggcccagctggaattcaaactcaagcccttcttcgggggtagcaccagcatcaaccagatctcgggaaagatcacgtcgggagaggaagtcctggcgagcctcagtggccactgggacagggacgtgtttatcaaggaggaagggagcggaagcagtgcgcttttctggaccccgagcggggaggtccgcagacagaggctgaggcagcacacggtgccgctggaggagcagacggagctggagtccgagaggctctggcagcacgtcaccagggccatcagcaagggcgaccagcacagggccacacaggagaagtttgcactggaggaggcacagcggcagcgggcccgtgagcggcaggagagcctcatgccctggaagccgcagctgttccacctggaccccatcacccaggagtggcactaccgatacgaggaccacagcccctgggaccccctgaaggacatcgcccagtttgagcaagacgggatcctgcggaccttgcagcaggaggccgtggcccgccagaccaccttcctgggcagcccagggcccaggcacgagaggtctggcccagaccagcggcttcgcaaggccagcgaccagccctccggccacagccaggccacggagagcagcggatccacgcctgagtcctgcccagagctctcagacgaggagcaggatggtgactttgtccctggcggtgagagcccatgccctcggtgcaggaaggaggcgcggcggctgcaggccctgcacgaggccatcctctccatccgagaggcccagcaggagctgcacaggcacctctcggccatgctgagctccacggcacgggcagcacaggcaccgaccccaggcctcctgcagagcccccgatcctggttcctgctctgcgtgttcctggcgtgtcagctgttcattaaccacatcctcaaataggagccctgggggcagagctcctggccagtcccgagccctccctcccaggcacccagcactttaagcctgctccatggaggcagagaggcccggcaagcacagccactgtgacggggagtccaggcgcaggagggacccggggccacaagggcgctgcgggcccaggtgtgctgggcccctctcaggggcactggcctctctgcagggccttccgcccagcgctggccttaatgctaaagccaaatgcagcttctgctgtgcgacgcactcctggccatcttgccgtgtcaccccctgtccggcctccacttgccatgggggatggatggatttagggtgggagggcctgtgggggccctggacagtcacaccccagcagcagtgagtgggcaggtttggaggagcagccagggagccccgagtggcccaggagtccccccacacacagatgcataggcctgccttccggagaccctgtccacattgccgggaccaccctggtggggccactggtgggtgccagggacaggttagggccactctggggaaggcattttggttttttattccacgctgtgctgtttggatgggagccccacagaggcaggtcctggaaccaccccacccccacacctggacgctcgctctggtgggggcacacgcaggtggaggtggttgtgggtgcaggtgtgtgcaggggtgtggggggcgcaggggtgtggcttagctggccccgcacccaggccggggaggctcaagttcgccactttactcagaccgatgcacagtcttcccattttacacttttttaataaacataattgcaatattttaggtgggctgcgagctgcagtcagccttcacgtctggcctcagtccccgtgtcagtgccgctctgcgtgtgcgtgtgcgcgtgtgtgagcctctacacatatatatacgtacagagccttaaaccacatcgtggcggtgccgtctgagctgtagcgggtggctttgtttccagtttttgtacccgtgtccttgtctcccctcctcccccatctggggatgtgtctgtgttccacaccttgaaataaacagacacatacgtgttctcttcttgcggga

SEQ ID NO: 137488 - DNA, 2371 bp, Homo sapiens
acaatgccatacgcccactgcaaaggtatactgtatggcacgatgatcctggaactggctgggaaggtcaccatagagtatgcgaagaacgacttccaggcccagctggaattccaacgcaagccccttctctacgggggtagcaccagcatcaaccagatctcgggaaagatcacctagggagaggaactcctggcgagccgaggattacacccttaccatgccctacgcccactgcaaaggaatcctgtatggcacgatgaccctggagctgggtgggaaggtcaccatcgagtgtgcgaagaacaacttccaggcccagctggaattcaaactcaagcccttcttcgggggtagcaccagcatcaaccagatctcgggaaagatcacgtcgggagaggaagtcctggcgagcctcagtggccactgggacagggacgtgtttatcaaggaggaagggagcggaagcagtgcgcttttctggaccccgagcggggaggtccgcagacagaggctgaggcagcacacggtgccgctggaggagcagacggagctggagtccgagaggctctggcagcacgtcaccagggccatcagcaagggcgaccagcacagggccacacaggagaagtttgcactggaggaggcacagcggcagcgggcccgtgagcggcaggagagcctcatgccctggaagccgcagctgttccacctggaccccatcacccaggagtggcactaccgatacgaggaccacagcccctgggaccccctgaaggacatcgcccagtttgagcaagacgggatcctgcggaccttgcagcaggaggccgtggcccgccagaccaccttcctgggcagcccagggcccaggcacgagaggtctggcccagaccagcggcttcgcaaggccagcgaccagccctccggccacagccaggccacggagagcagcggatccacgcctgagtcctgcccagagctctcagacgaggagcaggatggtgactttgtccctggcggtgagagcccatgccctcggtgcaggaaggaggcgcggcggctgcaggccctgcacgaggccatcctctccatccgagaggcccagcaggagctgcacaggcacctctcggccatgctgagctccacggcacgggcagcacaggcaccgaccccaggcctcctgcagagcccccgatcctggttcctgctctgcgtgttcctggcgtgtcagctgttcattaaccacatcctcaaataggagccctgggggcagagctcctggccagtcccgagccctccctcccaggcacccagcactttaagcctgctccatggaggcagagaggcccggcaagcacagccactgtgacggggagtccaggcgcaggagggacccggggccacaagggcgctgcgggcccaggtgtgctgggcccctctcaggggcactggcctctctgcagggccttccgcccagcgctggccttaatgctaaagccaaatgcagcttctgctgtgcgacgcactcctggccatcttgccgtgtcaccccctgtccggcctccacttgccatgggggatggatggatttagggtgggagggcctgtgggggccctggacagtcacaccccagcagcagtgagtgggcaggtttggaggagcagccagggagccccgagtggcccaggagtccccccacacacagatgcataggcctgccttccggagaccctgtccacattgccgggaccaccctggtggggccactggtgggtgccagggacaggttagggccactctggggaaggcattttggttttttattccacgctgtgctgtttggatgggagccccacagaggcaggtcctggaaccaccccacccccacacctggacgctcgctctggtgggggcacacgcaggtggaggtggttgtgggtgcaggtgtgtgcaggggtgtggggggcgcaggggtgtggcttagctggccccgcacccaggccggggaggctcaagttcgccactttactcagaccgatgcacagtcttcccattttacacttttttaataaacataattgcaatattttaggtgggctgcgagctgcagtcagccttcacgtctggcctcagtccccgtgtcagtgccgctctgcgtgtgcgtgtgcgcgtgtgtgagcctctacacatatatatacgtacagagccttaaaccacatcgtggcggtgccgtctgagctgtagcgggtggctttgtttccagtttttgtacccgtgtccttgtctcccctcctcccccatctggggatgtgtctgtgttccacaccttgaaataaacagacacatacgtgttctcttcttgcggga

SEQ ID NO: 137489 - DNA, 3429 bp, Homo sapiens
cgcgccgccagtggagcccccgcgcgcccggccggcccggagcaccgagctcgcggcacggtaggagaagcccccgagcgcccacagcatgaaggaggaggccttcctccggcgccgcttctccctgtgtccaccttcctccacccctcagaaagtcgacccccggaagctcacccggaacttgctcctcagcggagacaatgagctctacccactcagcccagggaaggacatggagcccaacggcccgtcgctgcccagggatgaagggcccccgaccccaagctctgccacgaaggtgccaccggcagagtacaggctgtgcaacgggtcagacaaggaatgtgtgtcccccaccgccagggtcaccaagaaggagactctcaaggcgcagaaggagaactaccggcaggagaagaagcgcgccacacggcagctgctcagcgctctgacagaccccagcgtggtcatcatggctgacagcctgaagatccgcggcaccctgaagagctggaccaagctgtggtgcgtgctgaagccgggggtgctgctcatctacaagacgcccaaggtgggccagtgggtgggcacggtgctgctgcactgctgcgagctcatcgagcggccctccaagaaggacggcttctgcttcaagctcttccacccgctggatcagtccgtctgggccgtgaagggccccaaaggtgagagcgtgggctccatcacacagcccctgcccagcagctacctgatcttcagggccgcctccgagtcagatggtcgctgctggctggacgccctggagctggccctgcgctgctctagcctactgagactgggcacctgcaagccgggccgagacggggagccagggacctcgccagacgcatcaccctcatcgctctgtgggctgccagcctcagccactgtccacccagaccaagacctgttcccactgaacgggtcttccctggagaacgatgcattctcagacaagtcggagagagagaaccctgaggagtcagataccgagacccaggaccatagccggaagacggagagtggcagcgaccagtcagagacccctggggccccggtgcggagagggaccacctatgtggagcaggtccaggaggagctgggggagctgggcgaggcgtcccaggtggagacagtgtcagaggagaacaagagtctgatgtggaccctgctgaagcagctacggccaggcatggacctgtcccgcgtggtgctacccacgttcgtactggagccgcgctccttcctgaacaagctctccgactactactaccacgcagacctgctctccagggctgcggtggaggaggatgcctacagccgcatgaagctggtgctgcggtggtacctgtctggcttctacaagaagcccaagggaatcaagaagccgtacaaccccatcctgggggagaccttccgctgctgctggttccacccgcagactgacagccgcacattctacatagcagagcaggtgtcccaccacccgcccgtgtctgccttccacgtcagcaaccggaaggacggcttctgcatcagtggcagcatcacagccaagtccaggttttatgggaactcgctgtcggcgctgctggacggcaaagccacgctcaccttcctgaaccgagccgaggattacacccttaccatgccctacgcccactgcaaaggaatcctgtatggcacgatgaccctggagctgggtgggaaggtcaccatcgagtgtgcgaagaacaacttccaggcccagctggaattcaaactcaagcccttcttcgggggtagcaccagcatcaaccagatctcgggaaagatcacgtcgggagaggaagtcctggcgagcctcagtggccactgggacagggacgtgtttatcaaggaggaagggagcggaagcagtgcgcttttctggaccccgagcggggaggtccgcagacagaggctgaggcagcacacggtgccgctggaggagcagacggagctggagtccgagaggctctggcagcacgtcaccagggccatcagcaagggcgaccagcacagggccacacaggagaagtttgcactggaggaggcacagcggcagcgggcccgtgagcggcaggagagcctcatgccctggaagccgcagctgttccacctggaccccatcacccaggagtggcactaccgatacgaggaccacagcccctgggaccccctgaaggacatcgcccagtttgagcaagacgggatcctgcggaccttgcagcaggaggccgtggcccgccagaccaccttcctgggcagcccagggcccaggcacgagaggtctggcccagaccagcggcttcgcaaggccagcgaccagccctccggccacagccaggccacggagagcagcggatccacgcctgagtcctgcccagagctctcagacgaggagcaggatggtgactttgtccctggcggtgagagcccatgccctcggtgcaggaaggaggcgcggcggctgcaggccctgcacgaggccatcctctccatccgagaggcccagcaggagctgcacaggcacctctcggccatgctgagctccacggcacgggcagcacaggcaccgaccccaggcctcctgcagagcccccgatcctggttcctgctctgcgtgttcctggcgtgtcagctgttcattaaccacatcctcaaataggagccctgggggcagagctcctggtccccccacacacagatgcataggcctgccttccggagaccctgtccacattgccgggaccaccctggtggggccactggtgggtgccagggacaggttagggccactctggggaaggcattttggttttttattccacgctgtgctgtttggatgggagccccacagaggcaggtcctggaaccaccccacccccacacctggacgctcgctctggtgggggcacacgcaggtggaggtggttgtgggtgcaggtgtgtgcaggggtgtggggggcgcaggggtgtggcttagctggccccgcacccaggccggggaggctcaagttcgccactttactcagaccgatgcacagtcttcccattttacacttttttaataaacataattgcaatattttaggtgggctgcgagctgcagtcagccttcacgtctggcctcagtccccgtgtcagtgccgctctgcgtgtgcgtgtgcgcgtgtgtgagcctctacacatatatatacgtacagagccttaaaccacatcgtggcggtgccgtctgagctgtagcgggtggctttgtttccagtttttgtacccgtgtccttgtctcccctcctcccccatctggggatgtgtctgtgttccacaccttgaaataaacagacacatacgtgttctcttcttgcggga

SEQ ID NO: 137490 - DNA, 705 bp, Homo sapiens
gggcccgtgagcggcaggagagcctcatgccctggaagccgcagctgttccacctggaccccatcacccaggagtggcccttcttcgggggtagcaccagcatcaaccagatctcgggaaagatcacgtcgggagaggaagtcctggcgagcctcagtggccactgggacagggacgtgtttatcaaggaggaagggagcggaagcagtgcgcttttctggaccccgagcggggaggtccgcagacagaggctgaggcagcacacggtgccgctggaggagcagacggagctggagtccgagaggtgaggcctgtcagcgcccagggaccgcacccaggccggggaggctcaagttcgccactttactcagaccgatgcacagtcttcccattttacacttttttaataaacataattgcaatattttaggtgggctgcgagctgcagtcagccttcacgtctggcctcagtccccgtgtcagtgccgctctgcgtgtgcgtgtgcgcgtgtgtgagcctctacacatatatatacgtacagagccttaaaccacatcgtggcggtgccgtctgagctgtagcgggtggctttgtttccagtttttgtacccgtgtccttgtctcccctcctcccccatctggggatgtgtctgtgttccacaccttgaaataaacagacacatacgtgttctcttcttgcggga

SEQ ID NO: 137491 - DNA, 392 bp, Homo sapiens
ctgctgcactgctgcgagctcatcgagcggccctccaagaaggacggcttctgcttcaagctcttccacccgctggatcagtccgtctgggccgtgaaggtgctgcggaggggtggggttgaagacagaggccccgtagggccaaggggctcattcctagggccctggtggagggtggagccaaccagctgaactgcttggggccttgggcaggtctctcaccttctctgagccccacatgcggccaggggatcagatatggccactggtgctccatgtgaagcacacagtaggctgcaaggaggtggcatcaaggtcaccccagcccctcacccagctgctgtccaggagggacaacagtggctgctccccaggggtggccgaggaacagc

SEQ ID NO: 137492 - DNA, 3838 bp, Homo sapiens
cgcgccgccagtggagcccccgcgcgcccggccggcccggagcaccgagctcgcggcacggtaggagaagcccccgagcgcccacagcatgaaggaggaggccttcctccggcgccgcttctccctgtgtccaccttcctccacccctcagaaagtcgacccccggaagctcacccggaacttgctcctcagcggagacaatgagctctacccactcagcccagggaaggacatggagcccaacggcccgtcgctgcccagggatgaagggcccccgaccccaagctctgccacgaaggtgccaccggcagagtacaggctgtgcaacgggtcagacaaggaatgtgtgtcccccaccgccagggtcaccaagaaggagactctcaaggcgcagaaggagaactaccggcaggagaagaagcgcgccacacggcagctgctcagcgctctgacagaccccagcgtggtcatcatggctgacagcctgaagatccgcggcaccctgaagagctggaccaagctgtggtgcgtgctgaagccgggggtgctgctcatctacaagacgcccaaggtgggccagtgggtgggcacggtgctgctgcactgctgcgagctcatcgagcggccctccaagaaggacggcttctgcttcaagctcttccacccgctggatcagtccgtctgggccgtgaagggccccaaaggtgagagcgtgggctccatcacacagcccctgcccagcagctacctgatcttcagggccgcctccgagtcagatggtcgctgctggctggacgccctggagctggccctgcgctgctctagcctactgagactgggcacctgcaagccgggccgagacggggagccagggacctcgccagacgcatcaccctcatcgctctgtgggctgccagcctcagccactgtccacccagaccaagacctgttcccactgaacgggtcttccctggagaacgatgcattctcagacaagtcggagagagagaaccctgaggagtcagataccgagacccaggaccatagccggaagacggagagtggcagcgaccagtcagagacccctggggccccggtgcggagagggaccacctatgtggagcaggtccaggaggagctgggggagctgggcgaggcgtcccaggtggagacagtgtcagaggagaacaagagtctgatgtggaccctgctgaagcagctacggccaggcatggacctgtcccgcgtggtgctacccacgttcgtactggagccgcgctccttcctgaacaagctctccgactactactaccacgcagacctgctctccagggctgcggtggaggaggatgcctacagccgcatgaagctggtgctgcggtggtacctgtctggcttctacaagaagcccaagggaatcaagaagccgtacaaccccatcctgggggagaccttccgctgctgctggttccacccgcagactgacagccgcacattctacatagcagagcaggtgtcccaccacccgcccgtgtctgccttccacgtcagcaaccggaaggacggcttctgcatcagtggcagcatcacagccaagtccaggttttatgggaactcgctgtcggcgctgctggacggcaaagccacgctcaccttcctgaaccgagccgaggattacacccttaccatgccctacgcccactgcaaaggaatcctgtatggcacgatgaccctggagctgggtgggaaggtcaccatcgagtgtgcgaagaacaacttccaggcccagctggaattcaaactcaagcccttcttcgggggtagcaccagcatcaaccagatctcgggaaagatcacgtcgggagaggaagtcctggcgagcctcagtggccactgggacagggacgtgtttatcaaggaggaagggagcggaagcagtgcgcttttctggaccccgagcggggaggtccgcagacagaggctgaggcagcacacggtgccgctggaggagcagacggagctggagtccgagaggctctggcagcacgtcaccagggccatcagcaagggcgaccagcacagggccacacaggagaagtttgcactggaggaggcacagcggcagcgggcccgtgagcggcaggagagcctcatgccctggaagccgcagctgttccacctggaccccatcacccaggagtggcactaccgatacgaggaccacagcccctgggaccccctgaaggacatcgcccagtttgagcaagacgggatcctgcggaccttgcagcaggaggccgtggcccgccagaccaccttcctgggcagcccagggcccaggcacgagaggtctggcccagaccagcggcttcgcaaggccagcgaccagccctccggccacagccaggccacggagagcagcggatccacgcctgagtcctgcccagagctctcagacgaggagcaggatggtgactttgtccctggcggtgagagcccatgccctcggtgcaggaaggaggcgcggcggctgcaggccctgcacgaggccatcctctccatccgagaggcccagcaggagctgcacaggcacctctcggccatgctgagctccacggcacgggcagcacaggcaccgaccccaggcctcctgcagagcccccgatcctggttcctgctctgcgtgttcctggcgtgtcagctgttcattaaccacatcctcaaataggagccctgggggcagagctcctggccagtcccgagccctccctcccaggcacccagcactttaagcctgctccatggaggcagagaggcccggcaagcacagccactgtgacggggagtccaggcgcaggagggacccggggccacaagggcgctgcgggcccaggtgtgctgggcccctctcaggggcactggcctctctgcagggccttccgcccagcgctggccttaatgctaaagccaaatgcagcttctgctgtgcgacgcactcctggccatcttgccgtgtcaccccctgtccggcctccacttgccatgggggatggatggatttagggtgggagggcctgtgggggccctggacagtcacaccccagcagcagtgagtgggcaggtttggaggagcagccagggagccccgagtggcccaggagtccccccacacacagatgcataggcctgccttccggagaccctgtccacattgccgggaccaccctggtggggccactggtgggtgccagggacaggttagggccactctggggaaggcattttggttttttattccacgctgtgctgtttggatgggagccccacagaggcaggtcctggaaccaccccacccccacacctggacgctcgctctggtgggggcacacgcaggtggaggtggttgtgggtgcaggtgtgtgcaggggtgtggggggcgcaggggtgtggcttagctggccccgcacccaggccggggaggctcaagttcgccactttactcagaccgatgcacagtcttcccattttacacttttttaataaacataattgcaatattttaggtgggctgcgagctgcagtcagccttcacgtctggcctcagtccccgtgtcagtgccgctctgcgtgtgcgtgtgcgcgtgtgtgagcctctacacatatatatacgtacagagccttaaaccacatcgtggcggtgccgtctgagctgtagcgggtggctttgtttccagtttttgtacccgtgtccttgtctcccctcctcccccatctggggatgtgtctgtgttccacaccttgaaataaacagacacatacgtgttctcttcttgcggga

SEQ ID NO: 137493 - DNA, 3709 bp, Homo sapiens
ggaggaaggtggacacagggagaagcggcgccggaggaaggcctcccggaacttgctcctcagcggagacaatgagctctacccactcagcccagggaaggacatggagcccaacggcccgtcgctgcccagggatgaagggcccccgaccccaagctctgccacgaaggtgccaccggcagagtacaggctgtgcaacgggtcagacaaggaatgtgtgtcccccaccgccagggtcaccaagaaggagactctcaaggcgcagaaggagaactaccggcaggagaagaagcgcgccacacggcagctgctcagcgctctgacagaccccagcgtggtcatcatggctgacagcctgaagatccgcggcaccctgaagagctggaccaagctgtggtgcgtgctgaagccgggggtgctgctcatctacaagacgcccaaggtgggccagtgggtgggcacggtgctgctgcactgctgcgagctcatcgagcggccctccaagaaggacggcttctgcttcaagctcttccacccgctggatcagtccgtctgggccgtgaagggccccaaaggtgagagcgtgggctccatcacacagcccctgcccagcagctacctgatcttcagggccgcctccgagtcagatggtcgctgctggctggacgccctggagctggccctgcgctgctctagcctactgagactgggcacctgcaagccgggccgagacggggagccagggacctcgccagacgcatcaccctcatcgctctgtgggctgccagcctcagccactgtccacccagaccaagacctgttcccactgaacgggtcttccctggagaacgatgcattctcagacaagtcggagagagagaaccctgaggagtcagataccgagacccaggaccatagccggaagacggagagtggcagcgaccagtcagagacccctggggccccggtgcggagagggaccacctatgtggagcaggtccaggaggagctgggggagctgggcgaggcgtcccaggtggagacagtgtcagaggagaacaagagtctgatgtggaccctgctgaagcagctacggccaggcatggacctgtcccgcgtggtgctacccacgttcgtactggagccgcgctccttcctgaacaagctctccgactactactaccacgcagacctgctctccagggctgcggtggaggaggatgcctacagccgcatgaagctggtgctgcggtggtacctgtctggcttctacaagaagcccaagggaatcaagaagccgtacaaccccatcctgggggagaccttccgctgctgctggttccacccgcagactgacagccgcacattctacatagcagagcaggtgtcccaccacccgcccgtgtctgccttccacgtcagcaaccggaaggacggcttctgcatcagtggcagcatcacagccaagtccaggttttatgggaactcgctgtcggcgctgctggacggcaaagccacgctcaccttcctgaaccgagccgaggattacacccttaccatgccctacgcccactgcaaaggaatcctgtatggcacgatgaccctggagctgggtgggaaggtcaccatcgagtgtgcgaagaacaacttccaggcccagctggaattcaaactcaagcccttcttcgggggtagcaccagcatcaaccagatctcgggaaagatcacgtcgggagaggaagtcctggcgagcctcagtggccactgggacagggacgtgtttatcaaggaggaagggagcggaagcagtgcgcttttctggaccccgagcggggaggtccgcagacagaggctgaggcagcacacggtgccgctggaggagcagacggagctggagtccgagaggctctggcagcacgtcaccagggccatcagcaagggcgaccagcacagggccacacaggagaagtttgcactggaggaggcacagcggcagcgggcccgtgagcggcaggagagcctcatgccctggaagccgcagctgttccacctggaccccatcacccaggagtggcactaccgatacgaggaccacagcccctgggaccccctgaaggacatcgcccagtttgagcaagacgggatcctgcggaccttgcagcaggaggccgtggcccgccagaccaccttcctgggcagcccagggcccaggcacgagaggtctggcccagaccagcggcttcgcaaggccagcgaccagccctccggccacagccaggccacggagagcagcggatccacgcctgagtcctgcccagagctctcagacgaggagcaggatggtgactttgtccctggcggtgagagcccatgccctcggtgcaggaaggaggcgcggcggctgcaggccctgcacgaggccatcctctccatccgagaggcccagcaggagctgcacaggcacctctcggccatgctgagctccacggcacgggcagcacaggcaccgaccccaggcctcctgcagagcccccgatcctggttcctgctctgcgtgttcctggcgtgtcagctgttcattaaccacatcctcaaataggagccctgggggcagagctcctggccagtcccgagccctccctcccaggcacccagcactttaagcctgctccatggaggcagagaggcccggcaagcacagccactgtgacggggagtccaggcgcaggagggacccggggccacaagggcgctgcgggcccaggtgtgctgggcccctctcaggggcactggcctctctgcagggccttccgcccagcgctggccttaatgctaaagccaaatgcagcttctgctgtgcgacgcactcctggccatcttgccgtgtcaccccctgtccggcctccacttgccatgggggatggatggatttagggtgggagggcctgtgggggccctggacagtcacaccccagcagcagtgagtgggcaggtttggaggagcagccagggagccccgagtggcccaggagtccccccacacacagatgcataggcctgccttccggagaccctgtccacattgccgggaccaccctggtggggccactggtgggtgccagggacaggttagggccactctggggaaggcattttggttttttattccacgctgtgctgtttggatgggagccccacagaggcaggtcctggaaccaccccacccccacacctggacgctcgctctggtgggggcacacgcaggtggaggtggttgtgggtgcaggtgtgtgcaggggtgtggggggcgcaggggtgtggcttagctggccccgcacccaggccggggaggctcaagttcgccactttactcagaccgatgcacagtcttcccattttacacttttttaataaacataattgcaatattttaggtgggctgcgagctgcagtcagccttcacgtctggcctcagtccccgtgtcagtgccgctctgcgtgtgcgtgtgcgcgtgtgtgagcctctacacatatatatacgtacagagccttaaaccacatcgtggcggtgccgtctgagctgtagcgggtggctttgtttccagtttttgtacccgtgtccttgtctcccctcctcccccatctggggatgtgtctgtgttccacaccttgaaataaacagacacatacgtgttctcttcttgcggga

SEQ ID NO: 137494 - DNA, 3224 bp, Homo sapiens
cgcgccgccagtggagcccccgcgcgcccggccggcccggagcaccgagctcgcggcacggtaggagaagcccccgagcgcccacagcatgaaggaggaggccttcctccggcgccgcttctccctgtgtccaccttcctccacccctcagaaagtcgacccccggaagctcacccggaacttgctcctcagcggagacaatgagctctacccactcagcccagggaaggacatggagcccaacggcccgtcgctgcccagggatgaagggcccccgaccccaagctctgccacgaaggtgccaccggcagagtacaggctgtgcaacgggtcagacaaggaatgtgtgtcccccaccgccagggtcaccaagaaggagactctcaaggcgcagaaggagaactaccggcaggagaagaagcgcgccacacggcagctgctcagcgctctgacagaccccagcgtggtcatcatggctgacagcctgaagatccgcggcaccctgaagagctggaccaagctgtggtgcgtgctgaagccgggggtgctgctcatctacaagacgcccaaggtgggccagtgggtgggcacggtgctgctgcactgctgcgagctcatcgagcggccctccaagaaggacggcttctgcttcaagctcttccacccgctggatcagtccgtctgggccgtgaagggccccaaaggtgagagcgtgggctccatcacacagcccctgcccagcagctacctgatcttcagggccgcctccgagtcagatggtcgctgctggctggacgccctggagctggccctgcgctgctctagcctactgagactgggcacctgcaagccgggccgagacggggagccagggacctcgccagacgcatcaccctcatcgctctgtgggctgccagcctcagccactgtccacccagaccaagacctgttcccactgaacgggtcttccctggagaacgatgcattctcagacaagtcggagagagagaaccctgaggagtcagataccgagacccaggaccatagccggaagacggagagtggcagcgaccagtcagagacccctggggccccggtgcggagagggaccacctatgtggagcaggtccaggaggagctgggggagctgggcgaggcgtcccaggtggagacagtgtcagaggagaacaagagtctgatgtggaccctgctgaagcagctacggccaggcatggacctgtcccgcgtggtgctacccacgttcgtactggagccgcgctccttcctgaacaagctctccgactactactaccacgcagacctgctctccagggctgcggtggaggaggatgcctacagccgcatgaagctggtgctgcggtggtacctgtctggcttctacaagaagcccaagggaatcaagaagccgtacaaccccatcctgggggagaccttccgctgctgctggttccacccgcagactgacagccgcacattctacatagcagagcaggtgtcccaccacccgcccgtgtctgccttccacgtcagcaaccggaaggacggcttctgcatcagtggcagcatcacagccaagtccaggttttatgggaactcgctgtcggcgctgctggacggcaaagccacgctcaccttcctgaaccgagccgaggattacacccttaccatgccctacgcccactgcaaaggaatcctgtatggcacgatgaccctggagctgggtgggaaggtcaccatcgagtgtgcgaagaacaacttccaggcccagctggaattcaaactcaagcccttcttcgggggtagcaccagcatcaaccagatctcgggaaagatcacgtcgggagaggaagtcctggcgagcctcagtggccactgggacagggacgtgtttatcaaggaggaagggagcggaagcagtgcgcttttctggaccccgagcggggaggtccgcagacagaggctgaggcagcacacggtgccgctggaggagcagacggagctggagtccgagaggctctggcagcacgtcaccagggccatcagcaagggcgaccagcacagggccacacaggagaagtttgcactggaggaggcacagcggcagcgggcccgtgagcggcaggagagcctcatgccctggaagccgcagctgttccacctggaccccatcacccaggagtggcactaccgatacgaggaccacagcccctgggaccccctgaaggacatcgcccagtttgagcaagacgggatcctgcggaccttgcagcaggaggccgtggcccgccagaccaccttcctgggcagcccagggcccaggcacgagaggtctggcccagaccagcggcttcgcaaggccagcgaccagccctccggccacagccaggccacggagagcagcggatccacgcctgagtcctgcccagagctctcagacgaggagcaggatggtgactttgtccctggcggtgagagcccatgccctcggtgcaggaaggaggcgcggcggctgcaggccctgcacgaggccatcctctccatccgagaggcccagcaggagctgcacaggcacctctcggccatgctgagctccacggcacgggcagcacaggcaccgaccccaggcctcctgcagagcccccgatcctggttcctgctctgcgtgttcctggcgtgtcagctgttcattaaccacatcctcaaataggagccctgggggcagagctcctggccagtcccgagccctccctcccaggcacccagcactttaagcctgctccatggaggcagagaggcccggcaagcacagccactgtgacggggagtccaggcgcaggagggacccggggccacaagggcgctgcgggcccaggtgtgctgggcccctctcaggggcactggcctctctgcagggccttccgcccagcgctggccttaatgctaaagccaaatgcagcttctgctgtgcgacgcactcctggccatcttgccgtgtcaccccctgtccggcctccacttgccatgggggatggatggatttagggtcaatgatttccatgggatgagttcatttaactgagcaccttttcttaggagagacgtaactcaactggacccaaattatatattattggaggttaaagttttacctttagaaacccttttcctttgaaatcttatagtaaacactgtctcattttgga

SEQ ID NO: 137495 - DNA, 3524 bp, Homo sapiens
cgcgccgccagtggagcccccgcgcgcccggccggcccggagcaccgagctcgcggcacggtaggagaagcccccgagcgcccacagcatgaaggaggaggccttcctccggcgccgcttctccctgtgtccaccttcctccacccctcagaaagtcgacccccggaagctcacccggaacttgctcctcagcggagacaatgagctctacccactcagcccagggaaggacatggagcccaacggcccgtcgctgcccagggatgaagggcccccgaccccaagctctgccacgaaggtgccaccggcagagtacaggctgtgcaacgggtcagacaaggaatgtgtgtcccccaccgccagggtcaccaagaaggagactctcaaggcgcagaaggagaactaccggcaggagaagaagcgcgccacacggcagctgctcagcgctctgacagaccccagcgtggtcatcatggctgacagcctgaagatccgcggcaccctgaagagctggaccaagctgtggtgcgtgctgaagccgggggtgctgctcatctacaagacgcccaaggtgggccagtgggtgggcacggtgctgctgcactgctgcgagctcatcgagcggccctccaagaaggacggcttctgcttcaagctcttccacccgctggatcagtccgtctgggccgtgaagggccccaaaggtgagagcgtgggctccatcacacagcccctgcccagcagctacctgatcttcagggccgcctccgagtcagatggtcgctgctggctggacgccctggagctggccctgcgctgctctagcctactgagactgggcacctgcaagccgggccgagacggggagccagggacctcgccagacgcatcaccctcatcgctctgtgggctgccagcctcagccactgtccacccagaccaagacctgttcccactgaacgggtcttccctggagaacgatgcattctcagacaagtcggagagagagaaccctgaggagtcagataccgagacccaggaccatagccggaagacggagagtggcagcgaccagtcagagacccctggggccccggtgcggagagggaccacctatgtggagcaggtccaggaggagctgggggagctgggcgaggcgtcccaggtggagacagtgtcagaggagaacaagagtctgatgtggaccctgctgaagcagctacggccaggcatggacctgtcccgcgtggtgctacccacgttcgtactggagccgcgctccttcctgaacaagctctccgactactactaccacgcagacctgctctccagggctgcggtggaggaggatgcctacagccgcatgaagctggtgctgcggtggtacctgtctggcttctacaagaagcccaagggaatcaagaagccgtacaaccccatcctgggggagaccttccgctgctgctggttccacccgcagactgacagccgcacattctacatagcagagcaggtgtcccaccacccgcccgtgtctgccttccacgtcagcaaccggaaggacggcttctgcatcagtggcagcatcacagccaagtccaggttttatgggaactcgctgtcggcgctgctggacggcaaagccacgctcaccttcctgaaccgagccgaggattacacccttaccatgccctacgcccactgcaaaggaatcctgtatggcacgatgaccctggagctgggtgggaaggtcaccatcgagtgtgcgaagaacaacttccaggcccagctggaattcaaactcaagcccttcttcgggggtagcaccagcatcaaccagatctcgggaaagatcacgtcgggagaggaagtcctggcgagcctcagtggccactgggacagggacgtgtttatcaaggaggaagggagcggaagcagtgcgcttttctggaccccgagcggggaggtccgcagacagaggctgaggcagcacacggtgccgctggaggagcagacggagctggagtccgagaggctctggcagcacgtcaccagggccatcagcaagggcgaccagcacagggccacacaggagaagtttgcactggaggaggcacagcggcagcgggcccgtgagcggcaggagagcctcatgccctggaagccgcagctgttccacctggaccccatcacccaggagtggcactaccgatacgaggaccacagcccctgggaccccctgaaggacatcgcccagtttgagcaagacgggatcctgcggaccttgcagcaggaggccgtggcccgccagaccaccttcctgggcagcccagggcccaggcacgagaggtctggcccagaccagcggcttcgcaaggccagcgaccagccctccggccacagccaggccacggagagcagcggatccacgcctgagtcctgcccagagctctcagacgaggagcaggatggtgactttgtccctggcggtgagagcccatgccctcggtgcaggaaggaggcgcggcggctgcaggccctgcacgaggccatcctctccatccgagaggcccagcaggagctgcacaggcacctctcggccatgctgagctccacggcacgggcagcacaggcaccgaccccaggcctcctgcagagcccccgatcctggttcctgctctgcgtgttcctggcgtgtcagctgttcattaaccacatcctcaaataggagccctgggggcagagctcctgggggagggcctgtgggggccctggacagtcacaccccagcagcagtgagtgggcaggtttggaggagcagccagggagccccgagtggcccaggagtccccccacacacagatgcataggcctgccttccggagaccctgtccacattgccgggaccaccctggtggggccactggtgggtgccagggacaggttagggccactctggggaaggcattttggttttttattccacgctgtgctgtttggatgggagccccacagaggcaggtcctggaaccaccccacccccacacctggacgctcgctctggtgggggcacacgcaggtggaggtggttgtgggtgcaggtgtgtgcaggggtgtggggggcgcaggggtgtggcttagctggccccgcacccaggccggggaggctcaagttcgccactttactcagaccgatgcacagtcttcccattttacacttttttaataaacataattgcaatattttaggtgggctgcgagctgcagtcagccttcacgtctggcctcagtccccgtgtcagtgccgctctgcgtgtgcgtgtgcgcgtgtgtgagcctctacacatatatatacgtacagagccttaaaccacatcgtggcggtgccgtctgagctgtagcgggtggctttgtttccagtttttgtacccgtgtccttgtctcccctcctcccccatctggggatgtgtctgtgttccacaccttgaaataaacagacacatacgtgttctcttcttgcggga

SEQ ID NO: 137496 - DNA, 3526 bp, Homo sapiens
cgcgccgccagtggagcccccgcgcgcccggccggcccggagcaccgagctcgcggcacggtaggagaagcccccgagcgcccacagcatgaaggaggaggccttcctccggcgccgcttctccctgtgtccaccttcctccacccctcagaaagtcgacccccggaagctcacccggaacttgctcctcagcggagacaatgagctctacccactcagcccagggaaggacatggagcccaacggcccgtcgctgcccagggatgaagggcccccgaccccaagctctgccacgaaggtgccaccggcagagtacaggctgtgcaacgggtcagacaaggaatgtgtgtcccccaccgccagggtcaccaagaaggagactctcaaggcgcagaaggagaactaccggcaggagaagaagcgcgccacacggcagctgctcagcgctctgacagaccccagcgtggtcatcatggctgacagcctgaagatccgcggcaccctgaagagctggaccaagctgtggtgcgtgctgaagccgggggtgctgctcatctacaagacgcccaaggtgggccagtgggtgggcacggtgctgctgcactgctgcgagctcatcgagcggccctccaagaaggacggcttctgcttcaagctcttccacccgctggatcagtccgtctgggccgtgaagggccccaaaggtgagagcgtgggctccatcacacagcccctgcccagcagctacctgatcttcagggccgcctccgagtcagatggtcgctgctggctggacgccctggagctggccctgcgctgctctagcctactgagactgggcacctgcaagccgggccgagacggggagccagggacctcgccagacgcatcaccctcatcgctctgtgggctgccagcctcagccactgtccacccagaccaagacctgttcccactgaacgggtcttccctggagaacgatgcattctcagacaagtcggagagagagaaccctgaggagtcagataccgagacccaggaccatagccggaagacggagagtggcagcgaccagtcagagacccctggggccccggtgcggagagggaccacctatgtggagcaggtccaggaggagctgggggagctgggcgaggcgtcccaggtggagacagtgtcagaggagaacaagagtctgatgtggaccctgctgaagcagctacggccaggcatggacctgtcccgcgtggtgctacccacgttcgtactggagccgcgctccttcctgaacaagctctccgactactactaccacgcagacctgctctccagggctgcggtggaggaggatgcctacagccgcatgaagctggtgctgcggtggtacctgtctggcttctacaagaagcccaagggaatcaagaagccgtacaaccccatcctgggggagaccttccgctgctgctggttccacccgcagactgacagccgcacattctacatagcagagcaggtgtcccaccacccgcccgtgtctgccttccacgtcagcaaccggaaggacggcttctgcatcagtggcagcatcacagccaagtccaggttttatgggaactcgctgtcggcgctgctggacggcaaagccacgctcaccttcctgaaccgagccgaggattacacccttaccatgccctacgcccactgcaaaggaatcctgtatggcacgatgaccctggagctgggtgggaaggtcaccatcgagtgtgcgaagaacaacttccaggcccagctggaattcaaactcaagcccttcttcgggggtagcaccagcatcaaccagatctcgggaaagatcacgtcgggagaggaagtcctggcgagcctcagtggccactgggacagggacgtgtttatcaaggaggaagggagcggaagcagtgcgcttttctggaccccgagcggggaggtccgcagacagaggctgaggcagcacacggtgccgctggaggagcagacggagctggagtccgagaggctctggcagcacgtcaccagggccatcagcaagggcgaccagcacagggccacacaggagaagtttgcactggaggaggcacagcggcagcgggcccgtgagcggcaggagagcctcatgccctggaagccgcagctgttccacctggaccccatcacccaggagtggcactaccgatacgaggaccacagcccctgggaccccctgaaggacatcgcccagtttgagcaagacgggatcctgcggaccttgcagcaggaggccgtggcccgccagaccaccttcctgggcagcccagggcccaggcacgagaggtctggcccagaccagcggcttcgcaaggccagcgaccagccctccggccacagccaggccacggagagcagcggatccacgcctgagtcctgcccagagctctcagacgaggagcaggatggtgactttgtccctggcggtgagagcccatgccctcggtgcaggaaggaggcgcggcggctgcaggccctgcacgaggccatcctctccatccgagaggcccagcaggagctgcacaggcacctctcggccatgctgagctccacggcacgggcagcacaggcaccgaccccaggcctcctgcagagcccccgatcctggttcctgctctgcgtgttcctggcgtgtcagctgttcattaaccacatcctcaaataggagccctgggggcagagctcctggtccccccacacacagatgcataggcctgccttccggagaccctgtccacattgccgggaccaccctggtggggccactggtgggtgccagggacaggttagggccactctggggaaggcattttggttttttattccacgctgtgctgtttggatgggagccccacagaggcaggtcctggaaccaccccacccccacacctggacgctcgctctggtgggggcacacgcaggtggaggtggttgtgggtgcaggtgtgtgcaggggtgtggggggcgcaggggtgtggcttagctggccccgcacccaggccggggaggctcaagttcgccactttactcagaccgatgcacagtcttcccattttacacttttttaataaacataattgcaatatttaaaaaaaaaaaaaaaaaaaaaaaacaaaaaaaaaaaaaaaaagaaaaaaaaaaaaaaaaaacaaaaaaaaaaaaacgaaacaaaaaagaaaacaaaaaaaaaaaagaaaaaaagggggggccaggaacaaaattccccgaggcggtacctgaataagaagacaacgagatgattatagcaaaaaaaggaacgacctatataaggagagaatggctgactctaataacaaaacaccgcgcgcggcgcggctcaaaacaacagagaacattcaggagcggcaagccaaaatatagtggagagcaccttgcttgacaagcggaacaatctatctgatggaagaggagaaatacaaagggcggaacagagctcaatcaa

SEQ ID NO: 137497 - DNA, 1727 bp, Homo sapiens
acatattgtaaggagtaagggttgtaatgtttctgtcccccgccccccccaagttcataggttgaaattaatcccagcgtgatggtctttggaggtggggcctttgggaagtgaataaatcatgagggtggagcctcatgaatgggaatagtgccataacgaggccagagagctctcttgcccactttccaccgtgtgaggatacagtgagaagatggcctgcaacccagaagagaggcctcaccagaacctaaccatgctggtgcctgatctgagacctcagcgcctccagagctatgagaaatgaatttctaaacccagtctatggtactttgctgtagcagtctgaacagtctaagacagggatgaaaaagcttcaaggagcaagtttgtgaactgagcctggaaggaggagtaggatctgacaaagggttagaagaggaaggactccaagcagaaggagcaaacctaggaaagagactgagggaaaaattcaggagaccaaactctcatgcgcaggaggttcatgctgaggggagcaggaagcagagctggactggggaggccttgaaggcaggcagagcaaggagccccaccaggtgactgctcattggctcccagatggattcgatggtatcgctcagatgatggaacaaaaaagaaaaagagaaaacacaaatgtgacatgtgaaaaataggaatgaaagagaaagataaaagagaaggaaaatcttcccaggtctagaagatacattctcgtatcgaaagggcccagcaggtgcccagcacaacaaacctaggaagaccaacaccaaggcacatcgccacagcattcagaacaccaaggataaagaaaagatcttcagagtttcctgaaggaaaaatgaaaaggtcacatttaaaggactggaaatcagaatggcatggaaattctccacagaatcccaggaagctggaatacaatagggcattaacttcaaaattctgaagaaaataattctaacatagaattcaactctcactatattagctgtttgtgggtaggatgtagatattttcagatatccttatctcagaaagctactggaggatattcttctccaaaattaagaaattagccaagaaagaggataatatttgggacctaaaaaacaggaagtcccagcttaggagagaggagaagggaagtactaggacagaagctaggacttatacagtaggggatagaggcctctaggagagatgtttccagaaggaagtgaatcacatggaatgcctgttatggatgaatatcttaaaagggatcttcagaatttgatgatgataagtaatagctagataggaaagtgaataaggaaataaatgaggccattattgaatctagtgaaaacaatatgcaaaaaaggatatagcatatgtcttggctgtgaataaatatgtaattataacaagataattgctgaatgggagtttaacccaaaggggtgttataattatttttgaaaaaagggaggtgaccttacgtgtgtttacataaatgtgcatgtgtctaggaagtgagggtgggagagttaaatccttgtcttctagagttaggaagtccatagactatacgcacaattgaaaagtaaggacagaacattaaatatgtgttcttagaaaatatgagcataaggccgggcacattggctcatgcctgtaatgccagcactttggggggccaaggt

SEQ ID NO: 137498 - DNA, 794 bp, Homo sapiens
cctataatcccagagctttgggaggccgagaattcaagaccagccaaaccaacatggagaaaccccgtctctactaaaaaaacagaattagccgggtgtggtgccacatgcctgtatcccagctactcgggaggctaaggtgggagaatcgcttgagcccggggggtcagcagaggttgcggtgagccaagatcctgccattgcactccagcctgggcaacaagagcaagactctgtctcaaaaaacaaacaaacaaacaaaaaaccaaaaacccaccaatgcctggctaggtgcggtggctcacacctgtaatcccagagctttgggaggctgaagcgggtgggtcacttgaggccaggagttggagaccagcctggccaacatggtgaaaccctgtctatactgaaagtacaaaaattagccacgtgtggtggcatgtacctgtagtcccagctacttgggaggctgaggcacaagaatcactttaaaccaggaggtggagattgcagtgagccaagatgatgccactgcactccagcctgcgtgacaaaggggaaacaaaaaaagcaaaaacaaaaaatcaatgcctgcatcttacccccagaaattctgacttaactggtaagatgtgagttaactcatgagatttaacaggcaacagtttaggatccactgtcctagagtgtgatccatggaccttcagtacctaggagcttgttagaaatatggaatctggccgggtgccgtggctcatgcctgtaatcccagcactttgggaggccaaggtggggtg

SEQ ID NO: 137499 - DNA, 436 bp, Homo sapiens
ccaggaccacctgctgggctctggaagtgcctcctgttgcctaacctagttttaggcagttccacccatgcagaaggcctttttttcccatgtcaccctctcaaaatccttgagatcttcaagatctgtctccatggcaccccttccacaacaaatcttctctctgcttctccaacagcctgacccaatcacaccgtagaagcgggtaagcctatctgtgtgctctggggccagggcaggtgtgcagacctagtgagaggaaggtgcctgagttttcattcaatactcaagtgcctaccacattaaatatgtactaacagacaggacttcaggtcttgactctcaagatgtctggagtgagtgcagatgaggtgataggtgaggccatgggaactgctggaaacagtattctgaggaagacgctgtttcagcgggt

SEQ ID NO: 137500 - DNA, 221 bp, Homo sapiens
agggccatttgtccagacaggtaaattgcacctaatgattgacactaacaggagaattattaatagtacagagctggaattaacaacaaccactacatacacacacatatacacagtcccagggagtattagatctatagtcatgtatttaggcaaaacttccctttgaactgctttgatccatctgccctgaacatatgaaagaagaagagataactttg

SEQ ID NO: 137501 - DNA, 447 bp, Homo sapiens
tacctctatggaatctcacttagattcctctggtcagttgataagtcctgtgatgaatgttgtggaccagagttggagatgggcatgaagcctatctgatcttcaccagcatcacccacatctgtggaggctgatgctgagcaacatcacactgcaagtgatgaaaaggccagtggtaaagtgagtgtggcctcccaaggaactgaggaggaagagctaggaacttcggtagataagtagatggcacaaccaaatttgttatacaatagataatatgagcctatataacttctacatttcgttgttttctacatttttctgtaaaaaggtaacacatccaattttaaggcttactgccagattactttccaaaaagattgaattcaagcattcccatatatttaaaaacagaggaaatcattatttgtaattcaattcagtaagtga

SEQ ID NO: 137502 - DNA, 201 bp, Homo sapiens
gacagtcacataaacttggtgtgaaatttacactatagcctgaaaaacacaacctgagaattgaattctcatgattacaggttagtgtgggcccaaggtgcctagtacctggaagaagcaatcacaaatctctggggaaatgaacattaaccaaaatctcaaagaattcctgcagagttccaatgaccataagctccccac

SEQ ID NO: 137503 - DNA, 317 bp, Homo sapiens
atttccttttgagtttaacttagcaggatttgtttaattttgtatccctccaagcacccaggctggagtgcagtggtacaatcatggctcaccacagcctccacctcatgggctcaagtgattcttcctctttggcctcctgaatagctggaactacagacacatgccaccatacctggctaatttttatttttttttatttttggtagagatgaggtctcgctatgttgcccaggttggtctcaagctcctgagctcaagcagtcctcccacctcaacctcccaaagtgctgggcttacaggcataagccaccatg

SEQ ID NO: 137504 - DNA, 447 bp, Homo sapiens
gaattattcttggtacagatttgaccatttattagcttggtttccatggttacattagccaacctttgggctttcgcgtcttcattgtaaaacaaagatggccactctatgtacacaccaagataatcacatgtgaaaatgattgtaaagagtcctaagagcaaatatgagttttcagtttatgctcttgtctagagagctaatattttaggattaggttagggagtgggaaggaatataaacatctgggagcactgtgtaatgtgtatccaaagacatttatcccaacatcactgactcatacacatcaatgaattgaagggtttgtcattcataacaattatgccaaccattctagctgcgtataatcagtaaacctgttttctttggaaagctgaagaagtcacatggtctccattttcattccagtgatgttccatggtggtt

SEQ ID NO: 137505 - DNA, 161 bp, Homo sapiens
tgcactagtgtaggtaccaagaatacagaaatgaagcccccaccttaagatgctgggagcctcacagagaagacaggtatggaaggagctcatgtgaaatgagtatcgcatgaaatgaatgttatgacagtgtcctgcaagggccaggttaaggaccagag

SEQ ID NO: 137506 - DNA, 209 bp, Homo sapiens
agtggaaaatcccacacccgacctcatgtgatgagtccaaactgttgtatgcccaaaattatttaaaatattgcataagatgaccttcaggctagtgaatagaaggtgtctatgaaaccccatctctactaaaaatacaaaattagccatgcaccaccacccctggctaatttttttgtatttagtagagatgggcacacataatggag

SEQ ID NO: 137507 - DNA, 375 bp, Homo sapiens
gcgtaaaagccttcctcttgaaataaagcaaataaagtgctaactggttagggttgagcaagagcttcttatggtcattatattgttttctgggtctacaaaataggatgttcagactttctgggcttatattaattaagcaatccttggggttgtcccatcccctgaatccctgaaaaatattgcagctctcgtggtgacttttgtgattctccacttttccccccttggataaagcacttcctttcaccatgaggccagattgggatgcagacgtgacccagcacaattagagctgctgctggttcgtgcccctggtgaagagccatgtcacatttttctcttctatgtacagcgttttaacttactgacaca

SEQ ID NO: 137508 - DNA, 358 bp, Homo sapiens
cagagctgctgtgatacgaatgtttgtgcccacccccatttatgtgttaaagtcctaacccccaagtagaaggtattaggagatggagcctttgggaggtcattaagccttgagggcaaagtcctcatgattgggattagtgtcctcctaaaagaacccagggagttagcttgtctcttccaccatgtgagaacacagcaagaaggcaccacctatgagccaaaaagcaagccctcaccagacattaaattggccttgatcttggactttccagtctccagaactgtgagaaattctgtgtggagggagtaacagctgagagccctggaatgacagaagattgtggtcacagtatggg

SEQ ID NO: 137509 - DNA, 274 bp, Homo sapiens
acaatcacatgatttcgtacatatgagtttctagaagagagaaatctaatctttagtgctataaaacagattggtcgttacttgaagccagagttgataagaaagactgattgaaaaggaacactacaaaggaactgactatgaagaaatatttttgggatgagggaaatatttaatgtcttgatttgggtgacggttacgtgggtgtatatacttgtcaaaattcattaaactgtccacttatgtgtattttatctttttattgttttacttc

SEQ ID NO: 137510 - DNA, 179 bp, Homo sapiens
gcagtggactggaagaaggtaagggatgccaggtatcccatgttctgtctcagctctgcagctgaagatttgggccatgggcttgtacggccctgcagcaggggaagggtatagaggaatggctgcatatcaggaccaagtccatgtcatcttcttaggcattgttaccacagatggag

SEQ ID NO: 137511 - DNA, 408 bp, Homo sapiens
gccacacctgtgatatgaatataatattccagaaagagaagaggtctcatgatgaatggaaccttgattaactcaaaactgtattgactcagaaaagacagagcagacaggagaaccatgtgagtgtggtgtcataaagtcaagggaagagaaatttttcaataaaaaggaaggtgagcagagcaataatcaagcttaatgatacttcccagaagtctagtaagataaaattgaaaaacatctgctggattcagacgtcgttaatgaccttagcaaaagctgtttcatgtctggtattggttcagggctagctacctctgtgacatagacaagatcagtgaatgtctctgatgtcaggtctattcatctgcaaaataaggggaatggggctaggttggtgtgttttga

SEQ ID NO: 137512 - DNA, 118 bp, Homo sapiens
ctggcaccagtctcttagcacatattgaagtcatcacctcctcccctgactgcacttaagtcacagatagcttgggttggttgaggatcctactgagtttacctgagacagtcctggc

SEQ ID NO: 137513 - DNA, 582 bp, Homo sapiens
cagggagatcaacttatagtcctttatatgaaatagaaacactctcttgctttccttttggttaaggtaggaagataataaatcacagtggcttgggtttgaatactggtttatttgctagctgtatgaccttgcaaatgatttaaacaatactgctgagtcctcatgtgtaagttggagaaaacagtacatcccaacaaagttgttggaggattatgcctgaacatgtgaaaaactactagtattgtgcttaacatatagtagttgcttaataaatgatagccatattctcagtgcacacttaagatcacaccctaattggaccagtaatcacatttcatctatttagttggaaaagtagtaaactgtgtctttatgccattttgtgtgtgtgggtgtgtgttttggtagagaacggggttttgccttgttgcccaggctggtctcgaactcctgagctcaagtgatctgccccttggcctcccaaatgctgggattacaggcgtaggctgccgcacccagctaataatatgctatttcaagtgcatttagagaagagtgttgatgaaccatggaatgatt

SEQ ID NO: 137514 - DNA, 436 bp, Homo sapiens
acttttaaagaatcccggcgggatgggggttatacggatggagactgggtgtatgggacagagaaatggatgtagaaacttgtgctgggtggggaggagggctggacggatataaaatgtacgttggatgagtgggacagggagagagctgaatttatgaatacaatgcttcttgatgtacaatggggctacagtccaacaaacccatcataagtttaaagtgtcataaggtaaaagtttcatacgcattttcgtatgatgtgtttttcacaagcctggtaagctgaggagtgtactgggtgcctatggctttcctgccattgtgaagttgaaaaagcatacgtcgaaccgtcataagatggggaccgtctgtatatgctgggtggggtaacaggtgcatagacgaacatatgaatatatgtccaagtggacagat

SEQ ID NO: 137515 - DNA, 260 bp, Homo sapiens
tgcgcttcacgtgcccgccatatcagcagcagcggcggcggcggcgaggagggggtgctgggaggcgcgcggccgttcccgcggggtctccggaccccgcctccccgcccctccccgtgggggctgggccgagaccaccctgcggcccccatcccagcgcaagccgaaagcggcgctgccagacgcagagaggctcctggggcgccgttccgagagccgcgcggcggcagcagccaggggagggtgctcctcgcggccgc

SEQ ID NO: 137516 - DNA, 535 bp, Homo sapiens
gcagtcagttgacaacattgccatagccattattttgattgtgcagagcctcatggtaaagcggaggtgagcacctggggacttctcagatttttctgggcgtgcacacagccccttatctgtgcttggctttcttgattattaggtttttcatatttttgttggagcttttaaaactcttacagacatctcagtctcctgcttttccttctgaagtttttggttggtcttttgtttgtctctgttgttatccactgctttagccagcctctaagctaaacaattccctggaattcttttcaacaaatggccttcaagtaaagggatttcacactggtgaactctatttatgtgaaatacctagctttgcaagagggatcttccagggaacatttatacaggtgaattttctgggaatgaggctttgatggagcttcagcctcattgtactccctctgctggcttttcaggctgctggattttaccagaaatctattatgctgtttgttttcaagtctactgcagagctgtatgg

SEQ ID NO: 137517 - DNA, 334 bp, Homo sapiens
tccacctttcatgatcctataaacccttaccttttacggttccctcattctaactgcagcctgcctcagggcttcatcaatgggttttggtaccacagtgctgggggctcctgtattgagtcccagtaatcttttctccacactgcccccaccgctgaccattttacctactgatgtgcataaggctttgggtctccactgagaaggggtagagccaagggactgtgacccttttgtcaatcttcatcttgatgaacctgctaacaactgtcacagtgattgctggtcaggtttctcatgataaactttgcctttggctttttaaatttctcca

SEQ ID NO: 137518 - DNA, 452 bp, Homo sapiens
tgtctcaggttcgggacgccagaaagaacgggtacacctgagtgcacagacaagtccagtggctctcttccgtcgtggtccactgtgccagctccattgttccagggctgaggcctagggcggtggggctatatggcaggaggagtgtctgcactttgggcctctgcctgggatttatttgtgtctctgaggcatccagcagactcttggaggacaggatgaggtgttccctggcctttcccagcacgtaggtgggaggcctgggcccctcatgaagaaatcagacttggcgtggacttgcaaggaaggtcccccagccggaggaggcgtcatcccctccctggggctgaatgctggggccacctctcccctcatgcctgccatccacaccccgctccaggtctgcttttaggccccagtccctgccccatctagtgtgttcttccagcctc

SEQ ID NO: 137519 - DNA, 492 bp, Homo sapiens
ctacacagcaagactacgagagtagagggagttcgcgagtagctggctgctgcctgggtggaggaaaccaggggtggagagtcgcccttttctatcttttccatccctggggttcacagaccctgttcttctgtgggtgtccacaggtccagaggtgcaaccctgcagtgggatgtcataggatgtgaccttgggccttgtggggagactctgccagtctgtgacagggatgttccctctgtgaccccctattccaagggcgtctctcttcctttgtctccttcatcccctttggaacatctcctaggacctagggttcctctggagtctgatggcccactccacgatgacaccccagccgggccagcctcctccccttgtgcccacatcccaccaccatgggtacctgccttgagctgtaatccctggaaccaagtctccctattttacaaagtctcagacaaccatccaatgcttaaggtcttttttttc

SEQ ID NO: 137520 - DNA, 443 bp, Homo sapiens
attacagttttgcataggatagtcagagtgtcttcactgagaaggtgatgtttgagtaaagacttaaagagaggtagttagccatattgctgtccacaagaagggcattccagactaaggtatcagtttggtgcagaggcattaaggtgagagtgtacctgagaagcaacaaggaggccactgtggccagagagaactgagtaggggaagaagagtataagaggaagctggaagagtatcagtggttaggtcccttaacctaaccattgtttgtttattggacattttaaagacttcggcttctttctactctgagtcagcggagggttttgagaacaggatgacatatctgagttttagacacacacacacacacacacacacacacacacacacacacacacacacacacacttttaaattgtagagatagggtctaggta

SEQ ID NO: 137521 - DNA, 190 bp, Homo sapiens
ggtggttgactggcgtctaggggcaggtagggtggatagatttgaagcaggcaggaaaaaactttgaaggtgattatgttcattatcttgattgtggtgatggtttcataggtgattaactatgttgaagctccacaaactgtatgcttaataaaacttttaaaaatggtccatggaccatctgcatctg

SEQ ID NO: 137522 - DNA, 472 bp, Homo sapiens
taataggctatgatggctagaaaggatctcactgatcatcagtgcaaggattgatttttagaaacaaggaaagtgaaaccagagacagccagtgactagtctcagtactcagagaggtcatggttggtcagaggtcagaactcacatctcctgacccacagcacgtttggctttgtgcacaactgactgccttagttaaggacagataattcttttctctttaacaatagaaaattagactaattaaagtcataaaagatgttgctcctttataagccatagagaaacccccgatggtttctttatttggatctgtgatctttaaagcatgtgactagcagctataattggattaaagtgaaaacatgtgattgtgaaggagttaaagtacctttgccttattctgctttgatagccagcttcaattgcacatcgtgacaagcagtgaaccaacatcaaccctgtggaatta

SEQ ID NO: 137523 - DNA, 325 bp, Homo sapiens
tgggtctccagcctgcttgctgactctgcagattagacttaccagcctccatgatcatgtaagcaaatccctttaaataaataaataaataaatagacatctctcagtaacatgagtgcccagatcttgatttctaaataacattcacactaaaaagaattagggctgcttgaaaatatgacagatttcaaggctggataaggtaagtacaagatgactctgaaacacttattgccagaatataagaaaaggctcaggccggacgcagtggctcacacctgcaatcccagcactttgtggggctgaggcgggtagatcacttggg

SEQ ID NO: 137524 - DNA, 1113 bp, Homo sapiens
cctttccctacttttgagtatcatcgtgaactcgtgttttttagtatattttcaggggtttcagtataccgcagtcattattctttctgatgctcaggggcagggaagggacagtatctttttgatagaaggaaacaccaggactgcctcagtggaccttgttttggaatgtccatcatttgtaggaatgatggagtctcacttcctaatggttcagaaccattagaggtgcttccctaggtgcccaatacgacctatcactgttagagtataatgcatttctttggctatttatctggttaaagcaactcctttatccacagaaaaggaggttgaggtaggaagatccctggagcctaggagttctagtctagcctgggcaacatagtgagatgaacatccacagaaaaacccacttttacagctttgtgagaataaaatttttagaaaggaaatagattttttttttttaattactaagattctttgattaggaactacagtagaacactgggattactagtggctatacgttgttattttcttcccaattgtaaggctttgtcagcagaacatgaaattaagctaaaagtggaaaggtgggacatgtaatagccagaatgttcatcaacaagaaaagaaatttatcttgtaaaaagtgtgtctttgcacgtaagataaacataaaacagactgagcactgatattgactagatgctttaaaataagcagaaggggcagaaagttaaatatttagattagttcaaaatgttagctttatagtagtgtgccattgatggagcattcctggaacatgtcttctctgcttgttttaacacctgaccttggtccctgaaatggaatgtatagacaggaagacagtgatatgggtgggtttgtttaacattttctctttgtttgaataagccctttagttgtttcttaatactgttgaatatttagtggctttctaggaccaagacagtatggttctgtcatgattggtttgggtttattgacgttttccccaaaaggacgggacacacttgaatctgaggttgaatttagttgactttttcgttgtacgtttatgaagaatagatgaactttgtc

SEQ ID NO: 137525 - DNA, 614 bp, Homo sapiens
ggtacctaaaatgtagataatcaataaatcaatcaatgataagaattaatggaatgcatattaaatccacagatttgtgtttgctgatatagacaataaaaatgtaaggtaaatgccatacaaaaacattgacataaaagtcaaacaaattgaaaaatattcttaccttgaaagcatcagcaagcaacttgggagacaagtgtaatacccatgaatcgatacatccataagcagacaggactcacgtttcccaaagctgagctgctgtataccattttcacaatttgtgtcatattttctgaaatacataaactatcatgcacttaaaatttctataattactctttaattaaatctatttttaaaagaaatgttatagcattgccaaaaatagaaagctagttatcatgtgccataaataaaaaagaaaacctcaaaaataaatgcaattaaaagaaactatattaatagtactaaatgagagttaaatacagggactccaagcctgttgttgctggcagtggtggtggtattaaaaatggagattaggaagtgtttcatgcttttcatgctaaacaaaccactaaaacactagaacaaaactgagactgtga

SEQ ID NO: 137526 - DNA, 373 bp, Homo sapiens
tcctgacactgttgcctccacggccttcctttttgaccactcctttgttgattcctgtattagtttcctagggcttccatgaaaaattaccacacacttactggcttaaaacaattgagatttattttctggcagttctggagtttagaagtctgaaactgaggtgtcagtagggccatattccctctgaaggcaatagagaagacccccttccttgtctcttcctagtttctggtggctcccagcaatcccaggtgttccttggcttgtagttgcgacattccagtctctgcctccctctgcacatggtcttcccctctgtgtgtctgtgtctctgtccaaatttcctttgtcttataagggatactgcttg

SEQ ID NO: 137527 - DNA, 723 bp, Homo sapiens
gcggccgctccaacatcaggcgctccagccatggcgcgttcgctcgtccacgacaccgtgttctactgcctgagtgtataccaggtaaaaataagccccacacctcagctgggggcagcatcaagcgcagaaggccatgttggccaaggagctccaggcctcatgggtaatatgaaccctgagggcggtgtgaaccacgagaacggcatgaaccgcgatggcggcatgatccccgagggcggcggtggaaaccaggagcctcggcagcagccgcagcccccgccggaggagccggcccaggcggccatggagggtccgcagcccgagaacatgcagccacgaactcggcgcacgaagttcacgctgttgcaggtggaggagctggaaagtgttttccgacacactcaataccctgatgtgcccacaagaagggaacttgccgaaaacttaggtgtgactgaagacaaagtgcgggtttggtttaagaataaaagggccagatgtaggcgacatcagagagaattaatgctcgccaatgaactacgtgctgacccagacgactgtgtctacatcgtcgtggactagccctagaatgccatccttcttcaggagctagtttggagatgggtttttctggtgccactgacacctgggctgcccatgccgctcaggctacccttatctcctctgcacttatgttatcaataaagaggcaaattctca

SEQ ID NO: 137528 - DNA, 348 bp, Homo sapiens
cgaaggaagatgcaaactgtgcagtgtgcgacagcccgggagacctcttagatcagttcttttgtactacttgtggtcagcactatcatggaatgtgcctggatatagcggttactccattaaaacgtgcaggttggcaatgtcctgagtgcaaagtgtgccagaactgcaaacaatcgggagaagatagcaagatgctagtgtgtgatacgtgtgacaaagggtatcatactttttgtcttcaaccagttatgaaatcagtaccaaccaatggctggaaatgcaaaaattgcagaatatgtatagagtgtggcacacggtctagttctcagtggcaccacaattgcc

SEQ ID NO: 137529 - DNA, 113 bp, Homo sapiens
gaacttgggatacctcttaattagcagttagctattaataaagactggccaggcacagtggttcacttgaagtcaggaattcaagaccagcctgaccaacatgtgaaaccctg

SEQ ID NO: 137530 - DNA, 326 bp, Homo sapiens
gatgatcatgagccttattaattggattcgtcacctttccctgtggccaaaactttgaaagtagaattttgagttttattctttactatatcattttactctaaaatatgttcaaatagatttttccacactgtgtagtactgtactgtgtaaagaacgtttgtaactaggtcaacatacactgtttctaggcaccactaaggaaataactgtgttatacccataatagaaaattaccagagtaacaggattaaaatgactcattaggcctttgattggggtgctctgtgctacaggtagtgccaaatcgagggctctgaagactc

SEQ ID NO: 137531 - DNA, 769 bp, Homo sapiens
agaaatcctgtcatatgccacaacggggctgaagcttgatgacattatgttacctgaaataagccaatcacaaacaaaaatacaaatcaacatatatgtatgattccacatagatggagtacctaaagtagtcaaatccatagaaacacaaagtagaattctgattaccagagcttgggggcagagggaaaagcaggattgttgtttagtgggtatagacttttcagttctgcaggatgaaaaagttctagaggtctatttcacaacaatgtgaatacactaaacaattctggaacttaactgcatacttgaaaatgattaagatggcaaattttatgcttttttatcacaatgaacaaaaacgtaatcaaaagataaaagaacatctttatacacagattaattttaaattgacccattaggaacctcacaaattttggttctatataggggagatgcctatgatgtgcctgttacttttacattcagatcctttaatgctcatgacaaacctgtgaggtgggcggagtcagactaatttgctgaacaattaccaaatggccaagattcaaaccacaaggacaattccaaagcccgtgagccttttatacgttgtttaatttccataaatcaccataaacaaaaatcttctttctcctttgctcctctctttccatgctagaccctgtacttacttactcattaagagaagtgttttagaacttggctctggaattgcacaaccctgggtttgaatcccacagatcta

SEQ ID NO: 137532 - DNA, 326 bp, Homo sapiens
tccttggagtgtttcagcagaggaggggcagatctgactcagttttcgcaggatccctctggctacttgtgcgggtagatgataggaggtggggtggaggctgaggaggaggctgccacagcagcccgggcaggagagcctgttctgcaggtggctagatggcagtccactgcccctgctttgtcctcctgtgctgctcacgagctgtgtgacctcgagtcctggctgctttttcttggagctctattttctcatctgcacagtggtgttaatgatgtgacctcgctgatggggctgtggggatgaactgcatgaacacataaatg

SEQ ID NO: 137533 - DNA, 355 bp, Homo sapiens
agtccgttcgactgagcactggacatacctcatcagggagaacctggctctttggaaggccagggttggggaaggaggcctagacaaggcaagttgggttggctcaaccctggcttttgtcttcctcactcacatccttttccagacttatatctgtaagatctgaactcaagatcagaatgtggggtcagaggagtagcaaagagcagccaggatgagtggctgccaagcaagaagggccaaaggggttgtctagacccatcctctgggaccttggtgctggtctctcttggtcacccgagagtgtacctaccttcttgcccttatgatatggttggctcagtcgaacggactg

SEQ ID NO: 137534 - DNA, 211 bp, Homo sapiens
ggccctgtgtgtggatctgacaccctgcccgggtcgctggttcgcgtttccagcacctcgggcgcgggagctgtgttctgcatgcgagtctgccgaacttggagccgctggtgctatgacaagcgtctgtggcctcgaatggacctgagccggcggaagtcactgaccccgcccatgctcagtggtgtggttcgccgccagccccgtgccc

SEQ ID NO: 137535 - DNA, 264 bp, Homo sapiens
aggttgggatagaaaacccaacatacaaaaaaagcatctactgcaaaatactatctatctcagccagcagcagtgggtggggggtagaagaggctgatttcaagttatatggagcacaagaccgaacaaacagaagtcttgaacatttacttgcatttatttccttttctgttattaaaggcataaaagaaaggtcttcatttcaacgtcatggggcaatgctgggactaacaagtttgtgcttgaatgtgaaatgtgttccag

SEQ ID NO: 137536 - DNA, 338 bp, Homo sapiens
ttaagagtcaagggaagaactcatcagaagagtaaaagaagagaactgaaaagcaaagggggacaatcaacaaaatgtgaacctacagtttatacgaggaatgcaatcatacaggtaccaataactcagttgcaaggaataattgaaatatgcacatatataaaaagtacacatactttgtataacttgaaaaacatttgaggatcaaataaaataatgtattcgaaaatatttataaaaagcatgaagttttctacagacaaattagtgggtacaatactgagcgctactccttgaaggtgaacaacatagaaatattgttcagtgcaactcaacaa

SEQ ID NO: 137537 - DNA, 272 bp, Homo sapiens
atggcctcatcctgtgtcccagctctcattacccacactgaggtctccagcctgggctgcaaccctgaaccgcaggaccccacatccagcccctcctgactcatccacttggtgttgaatttgatgcaggccagtgcagccacattgaattctgcatttttccctcttcaaatctctccttcaaggctttctcatcctcccaggcccacggtcagtcttgtttctgtcctactcctccttgagtaagacctctcggctccacctcctaaact

SEQ ID NO: 137538 - DNA, 455 bp, Homo sapiens
tgtcaacatgaagtggttgttaatgcgaaataagaagaaactcttctgatatttataggcccctataaagggagagaaaggaaatcacactccctagaacccgaaagctcccagccgaaccggaccctcggggagttttagaaatccttctttccgcacaggaatttcgcgaaggggtttccggaagactttgtcgaggaaggttttggtatcagactccacgacctcagagcgccctgcaaattccccccggcccagtggctagccccagaatgcaaacctcaaggcgggcgccccagaccaagctgacctagcctctgcccacccccagctcacaaccccgaggctcccaccccctgcccccgaccgggtcggcaccgtggcgtccggcacatgccaagtctaccgtctccaagccaggctgcaagatccaaaggttggggcctgccgcggac

SEQ ID NO: 137539 - DNA, 138 bp, Homo sapiens
tggagtgtcacttgttataccctatgtatcaaacttcccacacggtaccaaaattgttttttcagctgcagtatgagctttgagaggctaggatccctgcctgtcatatgcagcactgtgtctccagcataggtattg

SEQ ID NO: 137540 - DNA, 370 bp, Homo sapiens
gggttcaagtgattctcctgcctcagcctcccaagtagagtaactgggattacaggtacatgccaccatgctcggctaatttttgtatttttagtagagacggggtttcgccatgttggccaggctggtcttgaactcctgacctcaggtgatccaactgcctcggccttccaaagtgctgggattacaggcatgagccaccgcgactggcttggcagtaacttttgaggaataaagaatacagaaggagtttcctcaaatcttgttgcccttcccatctttgtgagctgagatcagagtaccgtatctcaccctctgcctcttggaggtgattatggtttacatataaatgcagattgcaagtccagga

SEQ ID NO: 137541 - DNA, 350 bp, Homo sapiens
taagttggtagcatagtgcagaggatgagaacatagactctgaagtttgacagaccatttctgcatcctgaccctaacacttctgatctatgaccacagacaacttagtcttcctgctccagattcctcacttataaaaacgggataacgatagtacctatgtcaactgagttaacatttgtgaagtgctttagaagagggtctgacatgtcattagcattgcgtaactatttggtgaattgagaaataatgacactagagcaaaaggacattttaaaaaagatgaatggtacttcatttgagtcagcagtctgagttagataaaaattctattttttccccaaaatata

SEQ ID NO: 137542 - DNA, 144 bp, Homo sapiens
tcaaatgttgttcttttcaacaatgcttccatagaatgaaaccctcaagactgagtcaatggttttgtaccaggtgattcctgcttgtagaaacattcgtagttccagggtccactatggggctaaactctgacctctaatgat

SEQ ID NO: 137543 - DNA, 111 bp, Homo sapiens
ccaacatcatcctcacgagttccagcagtgactggcaccttcctgagcctggccaggaagcgaataaacccccccggtagtccttgatgacttggccgaggtggtgtagta

SEQ ID NO: 137544 - DNA, 823 bp, Homo sapiens
gagctttaagacttaatgactgccttgctgggtttcagacctgtgtggggcctgcttcccctttcttttggccgacttctcctttctggaatgggaatgtttatccagtgcctgtaccaccattgtatcttggaagtaaataactttttttattttacaggctcattagtggtaggagatgagtctcttatgagacttaggactttagacttgatgctggaacaagttaagacttttggggactttggggaaagtatgattgtattttgcaatgtgaggacgagatgtggggggccagcggcagaatgatatggtttggatatttgtcccctccaaatctcatgttccagtgtgattcccagtgtcagaggcgggacctggtagaagatgattggatcgcagcagtggatccttcacaaatgggtttgcaccatccccttggtgataagtgaattctcactcagttagttaatatgagatctggttttttgaaagagtcttggacttccccttctctctctcttgctcccactctcaccatgggatgtgcctgctcccccttcgccttccaccacgattgtaagctccctgaggccctgaccagaagcagatgccggcactatgcttcctagacagcctgcagaactgtgaaccaattaaacctcttttctttataaattacccagtcttgggtatatctctatagcaatgcaaatggactgacattcttgtaaacaacagaaatttatttctcatggttttggaggctggaagttcaagatcaagtcatcaacaaattcagtgtctggtgagggcacatttg

SEQ ID NO: 137545 - DNA, 415 bp, Homo sapiens
gccttggtctttgttcccctctcactccctccacccctgccccccccaacacatgtggagtaccttaccctgccttcctagttctggaatggctgcccctgtgccaggccaccccattttctagaaccaccttcatacagcccctgcgcatcccactgtactatttccttgtttgtttttcctgtcaatcttgccttccgcgctaatgggacactgatgctgtatggtgatgtgttctcccacagtcatcttttcctcctgtggttggggtggggagctttctctgtgtccccccatgagagtgaggacagtctcatttaatggcaccatggtctgtggagccaggcaggcctgtgtgtctgactccacttcagcgctctcagccagcgtgggcacctcggacccagacagacgc

SEQ ID NO: 137546 - DNA, 596 bp, Homo sapiens
ctccaaaggccatgtgaggcatcttggtctctgtgtatgcaggtccctgggcatgttcaggcacgtgcctgtctagagctgcctcctgtcccctgccctgtggtggatgggtgggcttctttcatcccctcatttcacccatgctcccacacatgcatacacattctctgagcaagtgggtatctgggcagacagtgtggacagcctgagtggaagaccagctctgagccaaggcagatgtgacacttttgtgtgactaaagcctgagcgggaagctgagcaccagcacacagggcctaggatggctgcaagagggctccttcatgcctccagcgatggctgcctagaagatgcaggcttccttcccaggaccgagatgtgtgatgagcgggaggagggaggagaagagggatgttggtctgggaccctgaggaggaaggcatggcgaggataggtaagggtaagggagaatggataaggggtgagagacgaagttggagagggaagcagaggtagagtcatgaagcctctgccttatgtgccattttaggagtttggcctttttcctttactgataacatggggaagcatccaaa

SEQ ID NO: 137547 - DNA, 389 bp, Homo sapiens
aattcaataaattcatgcccatatttccaaacttacacaaatgcaggaggttctcatatagtaatttcaatagagaggaataaatcaaatagcaaattttactataaaggaaagaagctctgttttacagaaatttcactttaaaaatacaacctcaaaatggtacctccaagaactgcattctgttcttgactttgctaagtaataaactcccttaaaagcatacaattttcaatttttttttcttttttttttttgagacaggctctcgctctgttgcctagactggagtgccgtgctgcaatcatggctcactgcagccttgacctcccaagctcaactgatcctcccaactcagcctcctgaacagctgggaccacaagcatgtg

SEQ ID NO: 137548 - DNA, 176 bp, Homo sapiens
taaagcaacaaacatgtattatctcagtttctgtggaagcaagaatctaggtttgtcttagctggtcctctttcttaaggtctcgttcgaggctgcaattaaggtgttgaccagggctgcagtctcatctgaaggcttcactaatgaagttgccaaactccctcacttggctgttg

SEQ ID NO: 137549 - DNA, 474 bp, Homo sapiens
tgtctcaccattctgtccacagcagctggcgcctgaaaggcatgcagtggaccctctgcattttcatttcacagtgatctttctccagatatttctcatgtgatgtctgtatcttgctcttacctcttgagactgtgcatgaccttaatgtaatgatcttttgaggtaacacacacataccatttttctgcattgtaagtttcaggggatggatttttcctatatattttcacattcttcactgcatcagaagtgatgctgagtatatagtaggtgctcagttgtttaaaggacattgaagagagaggagtcaaggtaaccaaatgcacaaggaagtaaagcaacatgagtaagagccagcagaatcaatggaaggcagaaatagacccacacaggcttcaggtgttaggattatcagaactaggttgtaactatgcttagaatgtttaaattaatgaaagacaaactggaaaa

SEQ ID NO: 137550 - DNA, 282 bp, Homo sapiens
tgctggaattacaggcgtgagccaccgcacctggcttaatttgttaagtatatgtctctcttacagaaatgtaagcatcttgagggcaggtgatttgtttgttgttcatgttttatccccaatacctagaaaagtgctagcctatagcaatacatactgctgagtgaatgaaggatgccagcactagactctttccagaaccacttaccacaaagttatttagagagttctcatcatttcacaacagtagctgtaaacttgggaccaagtaaagaagagcag

SEQ ID NO: 137551 - DNA, 342 bp, Homo sapiens
attcatatgacccagcaaatgagtattcaggagataagaacaagaaaacagtccagcatttggggaaagcatcttcctggtgaataaaactggtctgtgtgtatggtgggggcaggaccccgatctactctatgagtgtcaccagcatattgctctgctgtgataaagttctccagggcagaaacaggtatcacttgggagaaaagtaatattaaggcatcttgtattttaatgaagcacccaactcattttttttccacaaaaagtaattacaaatttttccaatttaaaagcaggcagctcaattatgtaattgcctaataggttatgtgggcactgcag

SEQ ID NO: 137552 - DNA, 345 bp, Homo sapiens
ttgttgtctcatgatactttgggttgtatgggctcctgtggatgctgcttctgctcagttggctggggttgcagtcatctggaggctcgactgggctggggcatcttaggcagcttgttcacatggttgaaggtttatgctgctgtggactggaagttcagctttggtctcttcccggtggcttgggcgtgggtacctcatagaatgacagctggttctaaagaggagtgtttcaagcatgggaatatcttggaagtgattcagtatcacttaactgcattattttagtcatagtgacactggtcacagggccagctcagattcaaggggagaggaaatagactc

SEQ ID NO: 137553 - DNA, 233 bp, Homo sapiens
agactagtttgacttaaaggttacatggcatacacaaaactccttgtgaggacattctaggtgaggcatttcaaagagctaggcagttattttctagagcagctaatctgtttctggtattaagagtcaatttatataggccatgatgatcacaagtggtggtctcacgtcacctcgagtgttgtaagagtggaactagacgctcaccaggctgcagttgtggtaaacgactc

SEQ ID NO: 137554 - DNA, 386 bp, Homo sapiens
ctcagcctcccaagtagctgggactgcaggcagacaccaccacacctggctcacttttaaaaaaatttttgtagagaaaaattaagatttttgtagattttgccatgttgcccaggctggtctcaaactcctgagctcaagcaacccacccaccttggcctcccaaaatgctgggattacaggcgtgagccaccgtgcctggccaagcaggccattttcatatgggtatatccactaaagaagactccattggagtagagggaaatttatttctttgaccacctgctaaactgaagtcactagagcaggaatagttttgttttccctttcctggtgttttaacgtagcgtcctaaggtaacaggagctagaggacttggggcgcag

SEQ ID NO: 137555 - DNA, 374 bp, Homo sapiens
cccttcagactgatgtagaaattgagaggaaagaaatagaagagcctaactgctggtgtagcagaatcagcagatgactttgtttcaaatagagatttcttgctggaaaaaacaaatttcctcagaaaatataagtgaaatgatgttagataaaaaactcagactatgtttgacattcaaaaatttagtcttcagcctgtcaaacaaagtgaagaattctactatgaccttggcaaatattcagccttttagctaaaaaaaagcaatgtaaacaaaatgagtacatatccaagttttatatgactgttcacatgccacatatactgacacatctccagaaaacatatagactgtctggggatttagttatcttg

SEQ ID NO: 137556 - DNA, 549 bp, Homo sapiens
ggccccgttatcatataggaggtggatattaaggtgagatgttgttaaataataaaatgtcagtataattactgaccagataaaaactggtgagaaagacattcttaacttcaagtttgcatggcatagtgatgcaatcagataaaattaaactaatagcaagacaggaatgagtgttaaattgaaaatcagaaaatgcaggctctagcccagctctgccaaggattaactttgcactcttgggaaaatcacctccacagtgtctgaacatgccaagcaatcttgcaaaggtaaacttgggtttcttatttccgcagaattaaatgctagcctgggggcaagtttaaatgcaaggctaaagttctagagaggatatcattaggatttttaaggtggatattaaggtgagatgtttgttaaataataaaatgtcagtataattactgaccagataaaaactggtgagaaagacattcttaacttcaagtttgcatggcatagtgatgcaatcagataaaattaaactaatagcaagacaggaatgagtgt

SEQ ID NO: 137557 - DNA, 253 bp, Homo sapiens
cacacagcaacctccacttcctgggctcatgtgatccttccaccttagcctcccaaagtgatatgattagaggcgtgagccactgtgcctggccaaattcaccatttttaagtgtatagtcctgtgatttttcgtatcttcagtgttgtacaactatcaccactatctaattccagaacatttccatcatcctctaaaaaaaaacatatacccattagcagatactcccagtcacccctactcccaagccact

SEQ ID NO: 137558 - DNA, 280 bp, Homo sapiens
cacacagcaacctccacttcctgggctcatgtgatccttccaccttagcctcccaaagtgatatgattagaggcgtgagccactgtgcctggccaaattcaccatttttaagtgtatagtcctgtgatttttcgtatcttcagtgttgtacaactatcaccactatctaattccagaacatttccatcatcctctaaaaaaaactgtatctgttaaacgataattacctattattccttccccaagccacggtcaaacccacaagccacggacaccccac

SEQ ID NO: 137559 - DNA, 154 bp, Homo sapiens
cggcccgctttgcttctgcgcttctgaatttcttctcgtgtcggtaactgactgctgggcctcagtttcctcatcagtgacacagcagaaaaaaacacaagtccgtgccccctggggctcacgctcctccggtgctggagagagaccagtggca

SEQ ID NO: 137560 - DNA, 409 bp, Homo sapiens
ctcctggggcaggtggtagatgaagattgcagccatcagggccttctctttgctgctgctgctgttgctgctgctgctgctgctgctgctgctgagatggagccggggggtcggggcccacagcccagacgctgcagagaagctggggagatcgacttaccaggagtgggaattagctatccaacgtaagaaaatgaaattagcttgactttagaactacgagaaggaaatagaaaatatccttataaccttagggtagaattccttaaaatataaaatgcagaattcaaaagagaaaatactgatacatatgacacatttgactttgtaaccttctttttcatactaacctcactatggggacaactgtaacttttattgaaaggcatttttttttaataagccacag

SEQ ID NO: 137561 - DNA, 272 bp, Homo sapiens
cacatcctctgccctagatagttcaattatggaaagcaatcctaattataacataacctagatacccaagaacaaattcccattcccacattacagatgaagaagtccaaacacaaacaacttgtccaaagtcacatagctgggtaaactgaagaacatggtgttgctccaaagccatttctactaactacgaccctatacaaaaatctaaaacagaaaattctgcttacatggagatgttcacacatatatatttcttttctttttagaga

SEQ ID NO: 137562 - DNA, 327 bp, Homo sapiens
ataaaaagagaataaaagttctccataaattagtatgtgcaagattcccccagagagcaaaatattttcagccattgtggaggtatgagaaccacatgtttgcctggaaaaaaaaagtatgctctttactatggatttctgaatcattctgtcaaaatatttgtagttatttctaagttataaatagacaattaattttattacttttttcctttaattcatatcactaggaaggtactagtgaagaattttttccccctgcagactaaatattatacacagaaatataacaaatgaaaaattgtttatatgggtcaataatttatg

SEQ ID NO: 137563 - DNA, 120 bp, Homo sapiens
tcattcaataaaactttccctatatcaatgtagttgttatactccattcaaattaaatatcaggtattgaaatagatgaaaagagacttcgtgtgaaatttttcaagagaaatgagaatt

SEQ ID NO: 137564 - DNA, 471 bp, Homo sapiens
tgacaccttaaggagatgctgtacgaatactcacctagcaggtgtgtgcagggtgatgtgcagggagggaccaaaaggaggtggccacagttatctgggcctgatgtggcactgattgtgggaagaggaaagaaatggacgtgagaaaggaattctggagacactcccaggagggaatcaatgtggcaggatggctgatttcatgaagggggtaaaggacagagaagagtcaaggtgactggaataacatcaaacctgacacaaagagggatgcccagtggggaagaacagatgtgagaggaagttgaggacttgaaattaacactaaatgagtttgaggtgaaagcagggaatcctggtgggaatgctgagcaggtgaatggaaatccaggaccacaggcagtatgtgggctaggatcaacaggaatgtgggtgttccccatcctaggagacagcaggaaaggggagagg

SEQ ID NO: 137565 - DNA, 187 bp, Homo sapiens
gccatggtctgcctgatgcctggctccacacagaagaactcaagaaaggttctggcaacccataggggcactagggtcctgaccctgagcaggcgcagatgacttagagacagtcatatcatgtccttgcacctgttcattctggatgcagatcctcctaacaagctgcagtgtgtctgatcactga

SEQ ID NO: 137566 - DNA, 113 bp, Homo sapiens
acagaacttttgagaagcatcttgagatcctgtggaattttctctgggaaacggtccagtgggctctggatttgaggatgaattgaaaattgctgaaggaatttggagaattg

SEQ ID NO: 137567 - DNA, 399 bp, Homo sapiens
cgttatagcaccgtggtatccaggaggccaaatgaagaaagtgcatgaaataagaagggatcaattgtgaaaatcatgccaatagctctagtaagataactgagaattcactacgaaacttggtaatgaggtgatgacattgtcaagatcagtttgtatgatactttgtattgttttctaagttctgaaacagattatatttcttgagctggtgatatggagaatttagcatgagtaattatggtttaactgtggtatgagatattaaaatccacacacgaaaaacaacaatgacaacaaaacaaaacacatgaaaatacgattatcttgacaggcttctgcagggttttctgctttgaagatctttaaaggtctttttaacctttaaccgaagactca

SEQ ID NO: 137568 - DNA, 381 bp, Homo sapiens
aattaagtggtattggcatgaaggactactaactgcctcaacttattaaaaacagtgccacgtcaggccaaaaaaaagttaacccatgtaaccactgtaatctaatataatgaggactaatgttttctctggctactaatcaggattagtaagcagagccaatttacactatagcttacaaactaagagcaatatgtttactgaaacattctaaaaatttagtctactcttaaccaaagagagtgttatgttccaaaagaactgcttaacacttctagtgtcagacagtattacagctgtaagagatcctagcaaatatcttgcctaacaccctcatctaaacataggaaaaccaaagatcagcaaagttaaatggtctga

SEQ ID NO: 137569 - DNA, 658 bp, Homo sapiens
ggctccctgccctgctctgtgtatctgtgaagggtgggtttgtctgtgggctccccactccgctctgtgtgtctgttgagggtgggtttgtctgcaggctccctgccccgctctgtgtatctgtcctctgcggtttgtttggtttctctgctgtacagcattctgctgagcaaacctgccgtgtacatccgtctttcctcctgtggacaggcttttgggctgccaccaggtttttgctttgaggaatggtgctgctgtggcctgtccacacacctctggctgtgcatgtgggttcctcttagctttgtacctggaagtggaattgccagctcccagggcacggaagagtgatgcctgcgaacacccacgctctcgctggttctccagcacttagaattccggggggttcacttttgctggctgagcaggagcaaagggggcctctctgtgcctggatttgcacttcctggtcacgggttatggtgagcgtcgtcttctgttcttggccatgtgggttttcttttctgtgaaaagtgtttacatctttttgctcatttctctttcccctttgaaaccatcagaactcacagaaagtttcaaggatactgcaaagaactttttgttctccctgagccattggcttaggccaccagcatcg

SEQ ID NO: 137570 - DNA, 553 bp, Homo sapiens
aatttaaaattatattccatgataatggttctcataaaccttaatgcaagggaaaaaaaaaaaactacagcagaataaagaagatttaaaaagaagcaggataggaaaaaagacaagccagaggctagctatatcttttcataaagcacacctggtctcataagcacatgagagctaggcccagaagtttcgagccttggagactcacttcaaacaaattccagggaaagacactcaattaagtgttcaggacaattgtatatccccagtgcactcatgtactggaagtgcttaaactctgccctcagtggtcaataaaatggtattaagtcacagacaacccattgccattggtattggctgatgtctctggtagtttatgtgatgacaaacattagccttaacagcagagccttcctttctttgatttccgtgtgaaattctgtggctgggagatgtttatgttcacatgaacataactgtaagcaaaccatcttatggtagacatctctccagaaaaagcaaattccatctttttaaatagaaaaaaaaa

SEQ ID NO: 137571 - DNA, 402 bp, Homo sapiens
tgctgatggacatgcacagtagggttgggggctcaccgaggaggtggtcaggccaggccccactaaatctgctgagagtgtttgagtggttcttgtggtcatgccaggctcctgaaggactgctgcctttatctgctcggcggacacagcagagcacggcatctgggtaacttcacagcagatatttattttctcagacttctggagtctgaaattccaagatcaaggagtcacttggttggtttctccttaggcctcttttcttggcttgtagatactctggtcacattggattgggcccttcataacaacctcattttacctttcaaagataccatttcaatacagtgacattgtgaagtactaggggttaggatttcaacatacatggatttggtgagg

SEQ ID NO: 137572 - DNA, 685 bp, Homo sapiens
gtaatctattaggccttggatggattattattttcttgagaaaatctttatttcctcctctctccctaaactaacttttatcaggttttttcttaatacagctttaatatgtaaagtttcctaagaatctctcttattttctttatgattggtggctttattataaatatttcaagtgttgtgatcagggttattttgtaggaagtggctgccaattattttgtctttctcaaaaactatgcattgtttttcacttaaaatatatttttttcattcagtatttctgaagtatttcctatgtgctagttatggtgcaggctacttgtaatacaacaatgaatgaaacatggaccctgccctcaagtgatagggaggagcagacatgaaatgataaatgacattacaagtagtataagtgactcaggtgctctaggaatatataagatttactagctgtgcctaggggatccacagaaagccatttttaacagcaagaatgtagtatgcaacatacagtgtcatgacaggatgtgatattttttgaaatggtaagaagtatgactaaatatagcgtgcatagaatgggggaatagaagatagggttatggaggtggatttgggccagaatataaagaattgacaagtttaaattcatcttgtagctaacagacagccactggaagtt

SEQ ID NO: 137573 - DNA, 275 bp, Homo sapiens
acacacacacacgggatcacattgcacccatgaagagcctcacagacaacacacatacacaggcgcacaaatgcatgcacctcctggctcccattcattaaggtcttctggctgaccttcgatttggcttccagaagccctgtcatctttctcctcaaaaccctcaactttgaccttaaatctgcttccctgccttagtgtaagtgaaacctgttggctccactctctctgcagctgcttgtggactgactctctgccttgccttagccctcggg

SEQ ID NO: 137574 - DNA, 424 bp, Homo sapiens
gcaatggttgcacaattctgtgaatatattaaaaaccactgatttattttttcacttcaaaaatgattctaaagtacattagagagaataaagcttaaagaatagctgaggaattgttgggaaaaacaataaagaacactctaccattagatacttacatgtttattaataagacagagtaattaaaattgtgatgctatttcaaaaatagactcagtaatggaacagaatataaagtccagaaacaaattccaatacataatatgtacatatttcattaatgatgaatatggcatttcacataattagagaaaggattccctgttcaatttgtgatgctggtaaaatttattgactttttagaaaatagaaagttaggtggttttttttttttaatcttaaataccaaattgaactttaaatg

SEQ ID NO: 137575 - DNA, 283 bp, Homo sapiens
ctccagcaaaggctggtgatggcttagaatgttccttttgtgcatagaagtattttgcttctggtatgtgccctgagccaggaatagaggcaagctctgattttttttcgctcttgtcgcccaggctggagtgcaatggtacgattttggctcaccgcaacctctgcctcctgggttcaggtgattctcctgcctcagcctcccaagtagctgggattacaggcatgcgccaccacgtctgggtaattttctgattcttgaagtaaaatgagtgctgtatgtt

SEQ ID NO: 137576 - DNA, 452 bp, Homo sapiens
ctcggccctccttaatgtgtgcccaggaatttgaggctacagtgagctatgatagctacagtgagctatgatcgcaccactgcactgcagcccaggtgacagaatgagactctgtctattcaaaaaacaaacaaaaagtggatctcatggaggtagagggtagaatgatggttatcagagactaggatgggtgaaggggggagaagaaaagaggttggttaatgagtataacaatatttcaaaatataagccatgaacttgaattagaaaggacattaacaaattcattctttaacttaacatttttcataaaaccatcatttaacttcccttaatcagattataccccttagttatgacagggagataaaccataactatatcaagtaaagcaatttacagagtgttgatcagtaaagattagcccattatcttctaaatgtacactaaat

SEQ ID NO: 137577 - DNA, 510 bp, Homo sapiens
cgctatcagcctctcaccctcaagagagtgggcaacaggagtaaataagggaaaactttctcttttttcaaagtgtttaattcttttaacatatattggcatttgggaccccacttcaattcaaaagcatatgttagagttagcattaaagtgaaaatgaaatgaggtggttctcccccatatgccactggcttcattatatcacaaagaatgagctcaaataacagggcagcaatgtgaaccttcttgctgataaattctcctacgtttaggtcagtatggatatttggggaaagacaagtgataaagaaacagaaaaattctgactcactctgatattcctttataaatcaatgtataatgatgatgattattactgagaaccctggaagatctaggaaatgggtgaaaggtctagttaatgtttaatgagtgattaaaagaattcatttttatatttcatttatccctagaggatgcagaatttagaaatgtaaattccaaaacaac

SEQ ID NO: 137578 - DNA, 642 bp, Homo sapiens
cctctccttagaatgtaaggatagcttaatgttaccaaatcttttactatgatagtatattaaataaaccaaagggaaaaccaaaaacaaaataatttcagatcatgccaagaggacataaataaaacttaagatccgttcttgacaaataggaacttttagtaaactagtaccagaaggatacatctttaatgtgctaaaagttttgtctattttaaatcagtagtcaatgccattcttcctaaaggcaaaatacttgaagcattctttttaaaaatcaggaacaaaacaagcaacctgctgtcaccactgtttttaaaaattgctctagaatgtttgaccaattgttatttttgtaatcttagaaaaataaaagaagcaattgaaaatctatccctacctatgtatatatttatgtttgtaactaacattactctgataattttggtttgtatcagatgtacatttaggggaaaagggattattttcttcatcacaagaaccagtgcaacaacaaacatagattgactgattgacagattcatagatttaaatataacctttaaaagaaatagggagtacctatatgtagaaaatctcaaaactgagatagggaggacctatatgtagaaaatctcaaaa

SEQ ID NO: 137579 - DNA, 475 bp, Homo sapiens
cgtacgcacgagttcggagttcaaaatgttagtcaggctggtctcgaattcctggactcaggtgaagagttcacccacctcgacctccaaagtgctgggattataggcatgggccaccttgcccagctgagcccaggagttgaggccttcctcagcagcacagtgaaactctgtctctcttaaaaaaaaaagaggccagacgcagtggctcacacctataatcccagtgctttgtgaggcccgagcaggaggaagcttggcctcccaaagtgctgggattacaggtgtgagccaccgtgcccagccagattctcttggatctaccctgcagaggaaaaccatgccaaaatctaaaacttttttttttacaccgggtacgctggcctgcacctgtagtcccagctacttgggagactgaggggagaggaacccttgagtccagggtttttttttctttttgagacactgtattgat

SEQ ID NO: 137580 - DNA, 262 bp, Homo sapiens
cagatggatgaaacaccaaggggattctagaactagatagctaaatatttgtgtatgtcaacaactgtgtacatggaacagacattttgaaattcattattttcagaagtatgggtcatatgaaaaacactgatccctggccgtaggggaggtggaataattacactggaggctttgcaacagtcagctgtcaacactccttttctgtcaatactataagatcatttctcatgttcttctcataggaaacaactgtaacaaa

SEQ ID NO: 137581 - DNA, 409 bp, Homo sapiens
gatatgttaagaggcagggcctttgggagatgattaggtcatgaggcagagcctttttgaatgagattagtgcccttataaaaagagaccctagagagctctttcatccttttttggccatgtgaggacacagaaagaagccagccatctgcagcccagaataatggccctccccagaacctgaccacactggcatcctgatctggaacttccagtgtctagaactgtttgaaataggccacgcgcagcggctcatggctgtaatcccagccctttgggaggccaaggccggtgaatcatctgaagtcaggagctcaagaccagcttggtcaacacggtgaaaccctgtctctactaaaaatacaaagattagctgggtgtggtggcacacacacctgtagtcccagct

SEQ ID NO: 137582 - DNA, 764 bp, Homo sapiens
atttctcacccattctttggtcttctttcttatatataataggaataaagggttcctcttctccttgaagtgagtagtttggagactttcagagctgtcctgggacctggccctgcataaccagaccccaagaagcttccccaaagctgacttgtctttaaggctcagaaagtctacaggggatctgttccaggacaccatgaaatttcccaactcctggccctctctaaaaatcagctgtacatttggaggagtctcttgcaggttgccaaggtctggacctgtgaccccagtcccctctagcctgccccattggcactcaggcctctgggtcttcactcaccttgggcagaatgaagagtggccaaaggttgaaagtggtggagatccctcactccttgcttgcccagggccaaatcagagtgtccaatacccatttgggggctgtgacaacctgccgttctgggaagggtcatgcccacctctgcagtctgtggcattgttgagtttctgcccaaatctagacccaggaaacctgcctgttcggaagcctgacaattcattcccagtgtaaacagagcctttgctggaaaaatcttccctatcagagtggatgagtccgaccctgtgctatgtgggctcttgccatccactggaccctgagatcctgagtggcccatggatgtacagtcctgaatgccaggccagagaggtcaggggcggccaagagccctgcagggctggctgcttctgaagaaggaatc

SEQ ID NO: 137583 - DNA, 469 bp, Homo sapiens
gtaaaacttacacatgagcagaaaaatattattttcacagcccttgttaattatttcaaaataaagcaaatttaatagttactaattgagaaatcgtggtttagaaaagtgtatttagagctcagatttactaccaaagcctccgctttggaagaggagcattcactttatctattaaaatggaaatatcaaattggatgggctgaagaggagacccataactgtgctgaatggtttgcttccaaaaaggcagtcattactttatacagacatactttctcaagcctactgagaaaaccaagtataagagcatgtttagaaactacctagcaaataaaacagacttcacagtcttttctaagaacagagtcaaccactcacgtatctataaacattgagtacctgtgaattccatggagatagtgggaatacagatgaaatgggaaggatagagaaggatatcaaagta

SEQ ID NO: 137584 - DNA, 517 bp, Homo sapiens
tgacattcacaggggtgcgatgttccccttcctgtttccaggtgttctcgttgttcagttcccacctatgggtgagagcatgcggtgtttggttttttgtccttgagatagttggctgagaatgatggtttccagcttcatccatgtccctacaaaggagtgaagtccgctcctcagcttgatgccatggggcgctctggagtgggaattaccccacagtttatcccatctcaagacaaaggagtgggactttcacactcccacacccttagtagttagtgcacgggcaatcactgaagaagggaacacgtgctggccattaggagccaagcatggagaagctgtgagacactgctgaagggattttgtaggcacgtaggtggaggtcaaccagaagacaagtgagccgggatcagagctacccagccaacctgcagctgtgtgagaagggaaggctttttggcctgtaccagtgagatttttttgttgtttgtcatgcagcattattgcagcagta

SEQ ID NO: 137585 - DNA, 500 bp, Homo sapiens
cgtcttttcacaatattcttgcttctgagtgtcatgaaacaattagtcataccaaacataacctactgcaaatccttttatacataaatagtgcatttgatgctagcattttaagtgttgctgctggacacatttgttcctttcacctttaataacataaagctataaaaacatggacatttgtcttcagcacctaatagtgtcctcatcccagctgataatccttccatggtctaaactggctgattaattcagttcattttatgaatagaatagactcatccccttcccatatgcacagcacaatctctcttactaatgcaaaagcattactctaatagtgggcatttcatggtaggtgggaaatggtagttctctggaaaactatgagagaagtattatggataatctgccctttaaatacaccacatgaagaacttacctcttccatctataggaaggctaagcctttagaagaaacagtagagcttcatgggaaa

SEQ ID NO: 137586 - DNA, 573 bp, Homo sapiens
ggtcatcccatctcatgcttgactgatcacagtaaccaagcccttgtgcctcctaggaaaggtcacaggagactccggagcctgccactgtcaacagtgatgcccgtttggctggcactgggttggaatgatttgataacctggttagaagcagggaaaccagaagctggagccgtcaccgtagagctctgtttcaattgacaaatgcaagccagatgccttacagcagctcctcttctacggacttcagtctctctacaagaaacatgcattgtgttgccaccaccttcaaagtggcagccagtgtgaatcctggggagtttatgtgggactcaggatccaaaggaggcacccattcatcagatatatattaagaacctgcctagtgcaaggaactgtgtggggctcagcaaggaatcccaaaatgagaaagattagcccctgccctcacggagcatacactctagaaaggttgtaaaaacaaactttgtatattttagaattggattagagcaaagtcaggttccctcaaaattagaaaattgtaactagatgctataatgtataatggat

SEQ ID NO: 137587 - DNA, 788 bp, Homo sapiens
gaagacacagagacaaagtatagagaaagaacagtgggcccaggggaccggcacactaagcgtgggaggacccgcactggtgccggtctccgggttccctcagtatttattgatgattattttcactatcttggcaaggggagtgcagcaggagaacagggagaacggtgatggtggggagaaggtcagaaggaaaacgtgagtaaaggaatctgtgtcataaataagttcaagggaaggtactgtgcccggatgtgcacgtaggctagatttaggtttctctttacccaaacattttagtatagcaaagagtaacagagcagtatcatcgctagcatatttcgcctctagccacagggtggttttctcctatcttagaatagaacgaataatcgaataatcggctttacaccaagacattccgttcccagggacatgcgggaaacagagggcttcctcttatctcagctgcaaagaggccttcctcttttacgaatcctcctcagcacagaccctttacggttgtcgggctgggggacggtcaggtctttcccttcccacgaggccgtatctcaggctgtctcagttgggggaaaccttggacaatacccaggcttcctcggacagaggtccctgcagctttccgcagtgcattgtgtccctggttaatagagaatggagaatggtgatgacttttaccaagcatactgtctgcaaacatattgttaagaaggcacaccctgcatagccctaaatcccttaaaccttgatttaatacagcacatgtt

SEQ ID NO: 137588 - DNA, 627 bp, Homo sapiens
gaatgacacaatggggagatatccgatgaatatcatggaacatctgtgaatggatcacaactatgcctgatgtgaatcattcttccctcaaaaattctaaagtttaatagttaaaaaattccaaactgttgtcgtcacataaacttcattgtttggcttattttaggggttgggagggaaggaatacaatacatactctaggacattttgccagtaagttgtttgactatgtttaagacccctaagtttaggaaaacataaaaaatggttgcagaaggtgatcagcaagagccctgggtcagtgcaagcaataaaaaagactaactgctcaccactgtcatggaagctacaggatttaagtgtcatgagcttggtggatttaatagtttgccctgtcagtctttaaatttaaagggcttagttaaaggtaggtgtgcataacatgataacggaggcactcccacctgcagaatttctatgatttaggggaacttgggggaagcatttggtgtgtagctctttaggtgacagtttctttcactgaatgatcctgtttcacatatatttccctaatttgtgatcacactgtttttttagggcattattacttgaaacaactgggaaaaa

SEQ ID NO: 137589 - DNA, 227 bp, Homo sapiens
ccttgcacaggtctgtaagctgtgcaacgtggcagtgtgaggtcttttcaccccactgccttaggccctgccacacagtggccccagcttgcatcccattcctattcctgactaataccaaagcaaaacaaaaccctcaagagtgaatttccccatgattatatggggaactgagtacatgtacacagggaattatggaaagtcctgactagacatggtaagccatg

SEQ ID NO: 137590 - DNA, 682 bp, Homo sapiens
gcatctgtgaaaatgcctaggacaaggcctggctgagttgaggggagtttatccagacttcacacagctaccggcagtttcccagaagacatcctgtctgctagccctcacaagaagggtgtagacatgtgcaggctggccagggagaatggctctcactgtggctcgctttgggaatatgccgccccagcaaagcagctgtgcctctttgtggtcacaagacagagccaatggtggcagcatcagtgttgcccttcctaatgcaaagtgcaaactgcagaggtcctccctcctccacccacctgcccactcctcccggctgccatcagacagtccccactatccacacccatctcaaagctgccctggcctcccccacctctcacctgtggagttactaggaaccccattcagcctagtgataaagggccaaatggcttacactgccagcatggtagcagttgtccacaacctggacaattatggaccccaaattccccgggtaatttcggaggttttactttggccaggagtcacttatcctgaggaagtagcctctgatgccttgatatcaaagaccacgcagtggccacatacacacagctttttgcgtcctgcatccccttaggtcttatttataatttggtatcttatcaccagaaagaatccgttccatgagact

SEQ ID NO: 137591 - DNA, 154 bp, Homo sapiens
aatctggagagtcaatactcaggaactaaaacaaaacttcaaaataagagatagaagtgtagtaagagaaatataatgaaaaggctagatttattttttgagacaggatcttgctctgtcacccaggctggagtgcagtggcatgatcactgct

SEQ ID NO: 137592 - DNA, 471 bp, Homo sapiens
gacctgaagagtctccttaacccagtggtcctcagcagagggcaaccttgctttcccacaaagggacacttggcaatatctgcacacatttctggttgtcacaactgggaagtccttgtatcatcacaaggccaagagaccattcctactcccaagagaaaaaataaagtctaggagtagctgggtgctatggtctgaccgaatatttgtgtccccccaaaattcatatgttgaaatccaactccccgaggtggtagtattaagaggtgaggcgttttggaggagaggaggtcacgagggtagagcactcataaatcggaccaatactcttctaaaagaggctcaagagagacctcttgagtgaggcaagagtgagaagcaggctctcaccagacaccagatctgctggcaccttgatcttggaattcccagcctccagaacggtgagaaataaatttccattgtttacaa

SEQ ID NO: 137593 - DNA, 706 bp, Homo sapiens
ggcccagtggtgataggggcctgtgttcacaccagggccaaaacagatctggaaaaaacaaagtccaagcaactggattatccatcttgttgtgtggttctgtctgcactggcataagcacatttcacaaggcacttttgcagccaggcattggggctgcataaatggttttttaaaaatcctttcccaaaaggcaaagctgggttgctgggattcttgggaaatgtaatagaatgggaattcagaatgcggtttactgcagaatttacagcatggcaataaaggctctctatgttcagggggtgagagaagagactagatgcattgtctcagatgtctcctgacttcctgagaaatgccactttgcagatatggggctgcttttcacactggctaagtcagttcatggcaaaatatgagggaattcagtgtgtttcagacactaaccaaagtccatccttcctttctccttccgtccctcccttcctccctttctcactcactctctctttctttttaatgccatggagtaccatatttttcaaagttccaacaaagatgcactacatttagacaatgtggaaatggccctcagccttctctccctgaagtctgtggccagcaaaaatctggactttacttcactctgatgctgaacacccccctcccccacctcttccccaatatctcagatcccaagcctccc

SEQ ID NO: 137594 - DNA, 476 bp, Homo sapiens
cactggacagggtgaagagggaggagcaaggctgagcgtggcttaagttcctgctggggacgaggagattcctccggttttcaaaatattccttttccattgattctgctaggtccttggtccttaaatatcagaggcaggtagatgtttatatgtaagtgtacaatcctgacagtgtgcaataaattcttgtggatgtagaatgaaagaaaagtagaaaagaaggaggaagagagaaagcgaaggaggaaaaaaggggagaaaggaaaaaaggaaggaaaggagggagggaaagagggagagagggaaggagggagggaagaaggaagggagagagagaggaaaaatatttacaagtctacaaagagtaaaaattgcagaaaaataaaagcttgtctctgaaacaacaaaggttagctcatataaacttttagcttcctgcatttgaggagacaagcagaagtgaatgttttgat

SEQ ID NO: 137595 - DNA, 356 bp, Homo sapiens
ccactgtgcttggcctgttttttaaaattacagttactttgtagtagcatgggatagagaaacccctttaaggttttgtaaaaaataatttggtgataaactggtaaatatagtttgtttaatatgaaattgaaaattaagaaattatttggtaggtttttaaacaaaatattgttttacattttaaaaatgaaatcctggttactctttatctcctttgttcaaagaagttaaactatatcttttcaaagatgaaagaagatgtaattggttgctaacatcttatttctattatgtctatttcaacttatgtcttttccttgaattaaatttagccgtgaagttactttgacgcg

SEQ ID NO: 137596 - DNA, 292 bp, Homo sapiens
gcaaactgtaatattttgtttcacgtatatctgaagtaaattaaccagaaaaggttttctatttttttaactttggctttcaatacttaatgtatttatattaatatatatgtcttggatgtaatagtaatgacattttttccctcagaatgatagaattaaagaacaaaaaggaccttgagaatctagtctagtatcttattttacaaattaaataaaaataatctgaggccaccaaaagataaatggtgtgattttgctcaaactatgtagagtttgcttagtgtcagaa

SEQ ID NO: 137597 - DNA, 534 bp, Homo sapiens
ccgcccccagcgggatgtgaaggactccgggtgaggccggccacgccccgcacggatgggaaggccattgtgactatgtggtgattacagttgtcttactactgagtttcctactgaaatcatggaggagaaacagcagattatattggctaatcaagatggtggaacagtggcaggagcagcacctaccttctttgtcatcttaaagcagccaggaaatggcaaaactgatcaaggaattttggttactaatcaggatgcctgtgctttggctagtagtgtgtcatcaccagtaaaatctaaagggaagatttgccttccagctgattgtactgtgggtggaatcactgttaccctcgataacaatagtatgtggaatgagttctatcatcgaagcacagagatgattctgaccaagcaaggaagacgcatgtttccttactgtcgttattggataacaggtttagattcaaatttgaagtatattcttgtcatggatatatctcctgtggataaccatcgttataagtggaa

SEQ ID NO: 137598 - DNA, 363 bp, Homo sapiens
ccgcccccagcgggatgtgaaggactccgggtgaggccggccacgccccgcacggatgggaaggccattgtgactatgtggtgattacagttgtcttactactgagtttcctactgaaatcatggaggagaaacagcagattatattggctaatcaagatggtggaacagtggcaggagcagcacctaccttctttgtcatcttaaagcagccaggaaatggcaaaactgatcaaggaattttggttactaatcaggatgcctggacccgcggcgctcttagatcaccttcgagcttcctgacaacgcaagcagtgcttctacaggacatcgttcagggcaccagtccacctcgagttccagt

SEQ ID NO: 137599 - DNA, 278 bp, Homo sapiens
gccaaatgggaaggatatgtgtggagggagaggggctgttgctgtgtacctggagtggtgttttcatgtgataatgctcaatcatacgttcccatcatctgcctagaaccttgctgctgttccttctctaccaggcccctgtggtccaaggtagaccaggtgtctccacctggggttgtgtgaatttccttctactgaatgtctggcagctctcacatgcctgcaccccatacctcatgcttgttctccctagtgacagatgtttgaatttaacttat

SEQ ID NO: 137600 - DNA, 566 bp, Homo sapiens
cacagggatggggaattatgttggtttcattcttactggcaatcctattaaactgagttctgggagaacagaaactgagacacaatctttctgcaaaccctcatgcattagcagagtgcctggcagacactgtcagcacacagcagatgtttcttgaacctgtgtatgcgtgaatatcctctggcacccgtcagtggtcctgggaagcctctgggcagcactgtgctcgggaaaagcagcaacagagaatgtccaacaagatgctgcctagacccctgctgctcccagtgtgccccgtgaccagcctcagcattccctgggagcctgtgagaagtgtagacgctcaggccccaccccagactctattagcaagcagcccagtgatgtgtatgcatcagtatccaagaagcactttaagtttttggcctgcacagcagtgggaggcatcgaaggttttaaacactcagtagagactcacggaacacttcctacgagccaggcatgtgtagagccctgtaggtaccaccatgaggccgccaggatttcagctctgctgggaggcaggc

SEQ ID NO: 137601 - DNA, 711 bp, Homo sapiens
agggtggagtgcacagtccattacagcatttgcttacacaactatagagcacttgggaacaagataagcttcttacaatcattgcctataccaccctggctactcaggaggttgctgctactaaaactggcatttgagaaagccaccgcactaagactatttatgtccaaggaaacaatactgtctttagcactgaacacacctagaagaaaagccaaaagacgctacccaacatatactacagttacattctaaaaaaaagaaaaggcctgccccaataaaagtaaatgtaaaaatacgaagtggcaactatatctccagatgcacagaaatcagcaaaatagtacaggaagcattaaaaggcaaggaattatgacacccccaaatgagtacagtaattttctgttaatgaatccaaaccaaaaataaatcagagtgccaggtaaagcatttagaatattggttttaaagaagctcaatgagatccaagagagttctgaaaactaacacaatgaaatcagaaaatcaattcaggatataaacaagaaatttactgagaagataaacatcttaaaaaataacagaacttccggaaatgaaaaattcattgaagaaaatacagaataaatttgaaggcattaaaagtagactggactaagcagaagaatgaatctcagaacttgaacacaagtcttttgcattaagccagac

SEQ ID NO: 137602 - DNA, 441 bp, Homo sapiens
gcaaaagccgactttgctcggtgacccctcctggtgccacatccctcatgcctgcagcagaaggtggggggctccaggcccctgacaggtcatcctgatctcagagaagagtctgctgcccccaggacggggactgagctgagggcgaggaggatgccaggagaggcaccttggcccctgctgtggtattggccacaggttgggagctgcctttccccgaagccctagctttgcttctgtgagaagcagacacccagcagcataagcagcctgcctaggaggcttttcactaggaattaaaaacaccaaaaaggaacttcttatcagcaggtaccctaggggccacatggactggtaagtggtatcttccccatggtctcttaaggcctctgaagtcccagaccctcagatagttggcaactctgcctttccgcatatcaa

SEQ ID NO: 137603 - DNA, 305 bp, Homo sapiens
acaaaattacccaggcgtggtggcacatgcctgtaatcccagctacctgggaggctgaggcaggagaatcgcctgaacctgggaggcaaaggttgcagtgagccaagatagggccattgcactctagcctggatgacagagcaaaactccatctcaaaaaaataaaaaaaaaaaagaatgtgcaagtttatagcagaagggctggtggcctattgggatggaaaatttaaagacaagcagtaggaatcagttgggattatgacaggcagctttgggtttgaaaaaggaagttccagatgtcaaag

SEQ ID NO: 137604 - DNA, 350 bp, Homo sapiens
aggctcgtcttgaacttctggcctcaggcagtcctccggctcggctacaggcctgagctgcacacccagtcttgctggtgtttcataaggtccggcccctcccgtcggcctcaggtgtatgacttgtgaggcccagcgatgggctcggaagctcttggtcagtatcccccaaactctgttcccccttgtaggtgttcctcttttttctttgctgcagaagagtgtgtgactcacaaaaagttgaggactgttccttgatgtcctcccaggcttcgcccaccacctggctcctggtaatgcaaggaactgtgtttccatccattcccttcctttcactgcaactccagccc

SEQ ID NO: 137605 - DNA, 315 bp, Homo sapiens
aatttcaaacttcacctcaggaagttcttttctggttacagtatctgaagtaatctcccaatcactaccacaactccttaccttatttcccacacagcacttattctctgagattatttcttatatactgtctgtctctccatcccaagccagaagtgacactccaagaggatagaaatttaatgggttggacaggtgtggtggctcacgcctataatcccagcactctgggaggctgaggagggcggatcatgaggtcaagagatcaagaccaccctggccaacatgttgaaacccagtctctactaaaaatac

SEQ ID NO: 137606 - DNA, 329 bp, Homo sapiens
attgtttgtaggcctgttaatggacagagctgggaaatatgatacatttttattttatttaaggatgaaagacatcattaagttcatattttaattgcaaattcaacttaagaactctaggacttttatctaccctaatcgatcttaaatatgtatctcctttctgcgggttaaaaatcatagttctcaatgacatcaatgtaatacttacttcctttgtctcacactgcccagaacaatctcagaatatattaataaccaacactactattaatatggttcctgaaaacagtttgtttttcagttctttattttgccatatatataga

SEQ ID NO: 137607 - DNA, 404 bp, Homo sapiens
caacatctcttcaaaaaacactcaacaaactaggcatagatggaacatacctcaacatataaaagctatatgacaaacgcacagctaacatcgtaccaaatggggaaaaatcggaaaacctttcccccaagaactggcacaagccaagaatgcccactttcaccactcctattcaacacagtactggaagtgttagtgagagcaattaggaaagagaaagaaagaaaaaccatccaaacaggaaaacttgaagtcaaactgtccttctttgacaatgatatgatcttatatctagaaaaacctataggctccaccaaaaatctcttagatctaataaacaaattcagtcgagttgaatacaaaatcaacatataaaaaatcagtagggtttccgtaccccaata

SEQ ID NO: 137608 - DNA, 526 bp, Homo sapiens
caaataaggagttttggcagagatgcagaaaatattaaaaagaacctaaaactaatgaaaaaaaattaactggataggattaacatgagagttgacaattgaataaggagtcaattatatgaagttagatcactaacaattatctaatccaaagaggagatagaaaaaagactgaggtaggggaaacagtctcagggacatgtaagataatatcaaacactaatatatgtgtgattagaatcccaaaagagaaaagaatgaattagggcagaaaaaatactagccaaaaacttcccaaatttgatggaaaacatcaatttataaattcaaaaagctcagcaaactccaaacaggttaaataaaaggatgaggcttatgagggctaatgagcctaagttttaaaaaagaagtttctccataaataaaaggcattataaagctttcatatatttggtatatagtttaaatatttgaagctttaaccagtggcgcgatcttggctcactgcaacctccgcctccaggtt

SEQ ID NO: 137609 - DNA, 662 bp, Homo sapiens
ctcttaatagagacctgatcttctgtaacctcaaaactccacctacccaacccttgctgtccctaccctgctgtatctaacatccaattattccatatcttctctcctactttaggaaaaaatttctaccatgacatcactttgttaatggcagcatctttctttctctatgtccgacaccatctcagataaatccctgcctattggttttaccttgggcttttgtatctaaagcatctcttcaccaactgttaggctatgctgctttcccttcttttatgttacaagcgtgaactcatttcttcaacataaaactaacataattttagattgtgaaatttttcattttcaaataaaatttgtgaccactttattgcagcattgatgttatgcttcttgaatgcattaattggcaagtgttagtgttttatttcggtaactatctagaaggcagtttgaaaactagaaaaaaaatattcaaatgtatcttaattagatacataatggctaagagagtatattgtcattcttttcctttctttcactttcactttatctagattaggacctattctaacttaattattcctttaatttcattctgagaacatagctatcctaggtaatatattttggaattattactaatgagaggaaaatag

SEQ ID NO: 137610 - DNA, 288 bp, Homo sapiens
tggctataaagggtggcatgagaatccttggggtgatggacccttctgtgtctggactatgtgatagtcacatgaatctaaacaagtatcttagtccatcttggctgttacaacaaaaaaaccagagctgtgtggcttcgaagcaacagaaatttgtttctcacagttctgcaggctgggaagtccaagatcaacgctctggcagactctgtgcctagtgagagcctacattctcacagttggattcttcttgctgtatcctcctcacacagtggaaggatgagctag

SEQ ID NO: 137611 - DNA, 319 bp, Homo sapiens
agaaactgaggcaaggcaagtgttgtttctagcctcaaggagtttatgatccagagccagaggaacaacaagtaactggggtgagctggagtgcatgggaggccagggcaggtcaaaggagttcaaagagactcgtatggtgattttaggggacaaaaccaaggctttggggacagacctaaggctttggagccagaggggatggctcaattcccaacattctcactgactcactgagcgatgttggatgagttacctcatgtctacaacccgtctccttagctataaaatgggttaacaatacctagctcggagtgtt

SEQ ID NO: 137612 - DNA, 412 bp, Homo sapiens
gaggtggtatgaagtgtatatcaatggtgtgggcgcggttgtcgttggtgggtgtgttttaatagagaagggtctgtttctcccaggccagagtgcagtggcacgaacatggctcactgcagccttgacctcccgcctaaggattctcccgcctcagcctcctgagtagctgggactataggcacgtgccaccatgcccggctaatttttgtatttttagtagagatggggtttccccatgttggccaggatgatcttgatctcttgacctcgtaatccacccacctcccaaaagtgctaggattacaggcatgagccaccatgcctggccctccaaaataactttttcttactccctttttgtttttattctttcctctgccacttctgcttcgcacttctgtgaaatgcc

SEQ ID NO: 137613 - DNA, 208 bp, Homo sapiens
accatgttgactgcatcacttgaactcctgagttcaagtgatccaccctcctcagcctcccaaagtgcttgggattacaggcgtgagtcaccacacccgcctgctcaacttttttaaattgtattttttaatagctttattaaatgtagttcacttatcatgtaatttacccctttcacaagtctgcaattaagtgattgttcccagt

SEQ ID NO: 137614 - DNA, 310 bp, Homo sapiens
caggtatggcgcttggctgtgctgtgtactgtgtggggcttggcaggtcaactgctcagatccttgtttttcttgcctgtgtggtgggataatatccataatgaccttttaaggctgttgtaggagtttgaaaaataataatgatgtaaaatacctattctggagaccggtacacagggcctgccctttaaatatttgccagattttgaataaatgattttattgtttactgaacatttcctgttattccatgttctgtgttgaatggctgcttttgtgactgctcaatgccaggccccgagtcttcttg

SEQ ID NO: 137615 - DNA, 715 bp, Homo sapiens
ctgatcttcaaataatttaatcacttgccagaacaaagcctcacattctttaataaaggcagcaaaatccaaacactcagtataacattcacagtgtttagcatccaataaaaaagactaatcgccagtataagaagcaggaaaatttgactcataaccaggagaaaaatcagtcggaagcagactaaacagatgatagaattagcagacaaggatattaaacagctatttcaagtacagtcatgtattgaaaggaaaatatgaacataagaagataaatcaaaggtataaaaaataaaccaaatgaaacttttagagctaaaaaaatatatctggtgtgaaaaattcactgtatagaattaacagcacattagacactgcaggtaaaacagtcagtgaacctgaatatgtaacagcagaaaatattcttactaaagccacagacaaaaaagattgaaaaaaatggaggaagccttggtaacctatggaacaatatcaagagtattctgtcaagcatttagggaagaaacaatgctgagtacacagactttcagaaatagagaatgaaatgtttttctactgctttaatgaggctagtataaccctgatgccaaaattttacgaagtcattatgagagggaaaaaaccctacagaccagttattcctcatgaacacagatataaaactccttaaaatataatcagattttattat

SEQ ID NO: 137616 - DNA, 207 bp, Homo sapiens
aacacagcagggaggagcgaagcttatttctcattaaacagcatttattgtattgcctgacatttttaaaaattatattcaatcatttttttaattaacctttttattttaagatgatcgagcaaattcatcgagacagattttacctgtaggtgtaagaaacaatgcccttgctgggagcggtggctcatgcctgtaatcccagca

SEQ ID NO: 137617 - DNA, 171 bp, Homo sapiens
caacactagggttaagtaagctgctggacacatgtgcccgagccttgactggcacatctggatgggagtggaatgagtgatacagaggtttggttcctactggggaagcccaagttttagaagctagctgactttggagctgcggcctgactgtctacttattatttctct

SEQ ID NO: 137618 - DNA, 408 bp, Homo sapiens
acttctagggaaaaacagaattctccctccaccatatgacggtctttgagcatctcaatgatttcctttggttaaatacattgcggtgcattttattgtcattattttgaatatgcaaagtcctctcttccccctgtccctgctccccagttagcatgtgtgtatttagacacagaaaactggccccactgttaaggatgaaataaaaagaagaagacagcagagaaacttcagctttgcaattcgagcctggccactgcatggttccaaccagtccccatggccctacgctgcatcaggccacttcatctgctgacagctggggaagctccaggtagcagatctccgtgcttcctcccactcccaccgcctctctgcccaatcccgtctgtgggagcagagccacac

SEQ ID NO: 137619 - DNA, 429 bp, Homo sapiens
cttgggccataagtttgtgcaactctgggaaaatgaagatgacaaaaggatttgttgggaatgattgtaatatgaactttgtacaatttgcttacttgtacttaaaaagtattaagcgaaggcggtgggttctaatatcaagctccatttcctcattgccgaagcccaggtgacaatccttagccaatgttcttaaggaacagctctgtttctatctgaatccccatccactgatcccttagctgaggcatggtcagcgggagaacaagcttcttgttttggggcctgcagtactaagtctcagtctttgcccataaactcactcgaaatagtcttctgttcagaatctttctacaaaacattttgcagtcgtccaaaatattctgcaaaatgcttgctgcctgccagtaaataagtggaatgaaaaag

SEQ ID NO: 137620 - DNA, 517 bp, Homo sapiens
tgaacaatacttgaatcaggaggtggaggttgcagtgagcgagatcacgccattgcactccagcctgggtgacagagcaagactctgtctcaaaaacaaaacaaaacaaacaaaaaaaggccgggcacagtggctcaagcctgtaatcccaccactttgggaggactacctgtgagcgaccgcgcctggcctgttcttcccagtgttaaatgacagctagatttgcactctcctctctccagtagtttgaaactttttttttttttttggaaacgcgtctcactctgtcaccaggctggagtgcagtagcgtcatcttggctcactgcaacctctgcctcccaggttcaagtgattctcctgcctcagcctcccgagtagctgggactacaggcgcccaccaccacgtccagctaattttttttgtatttttagtagagacagggtttcaccatcttagccaggatggtctcgatctcctgacctcgtgatccacccgcctcagcctcccaaagtgc

SEQ ID NO: 137621 - DNA, 228 bp, Homo sapiens
ggtttggggactggctcgggaatgggctcaggcagctccacggggtttgcctggcaggttcaggctcaggacagccctgagctcctccacagggaagtcaatgggtcccggttagggccacaccatccccaggctgtctcctggtggcccccagcagcagcaccgtctccctggcagcgggcttctttgtgcgaagcccggagaatgtgaggctgcagtcggatgtgg

SEQ ID NO: 137622 - DNA, 319 bp, Homo sapiens
aatgaaagcaactagaacagagcatttagcgaggttaaaacagacaactaactgtgtgaatcggaaaacgtggcttcgttttcaacaatgtttcgtgggacgcttatctaatacctaatggctatttatcgggatttagagaggttaaaacagacaactgtgtgaatcgaaaactcggcttcgttttcaacaatgttttatgggatgcttatctaatacctaatgggtatttatcgggaaaacacttctttactgcagtgttgtgacattttttgttgtttctgctaaatctacattgaagtgttgctttgtaagtgtg

SEQ ID NO: 137623 - DNA, 231 bp, Homo sapiens
cagagaagggcttggtactgtttagaataaagtataagtagctgttcttggcagtaggaaccttgaagggaagttacattgcaatattattttgataacaattaaggaaaatattaaatgagtataccacttttaaaaatacatttttatctagattggttattataaagttttggtgcttaagactctaaattttcacctttgtgaagctccagtttatccagaataact

SEQ ID NO: 137624 - DNA, 139 bp, Homo sapiens
aacctaagctccaagttgtatgacgacctgacattgtctagagggctcagagctggtagtaaaggaaactgcactctcatcccagctgagccactcagagcttgtgtctgggacatatacgctcttaagcttattttct

SEQ ID NO: 137625 - DNA, 544 bp, Homo sapiens
actatatctggctaattcacacactccacggtcattctttctggatgtctacttggctccatcaaatagcattctaatctttccatgacaaactagttagttcttttgaggtgtagctctacacacaattaagcactgaaataatgcttctgttgccaatagagcatctctatgtctttattaacaagtagatacattgtgtttttatttaaaaataagcacattcactttgagaaaattgcagttcattagaataacgccttaaaacacacagacacggccgggcacggtggctcacgcctgtaatctcagcactttgggaggccgaggcgggcagatcacgaggtcagcagatcaagaccatcctgtctaacacgaaaaaattagccgggcgtggtggtgagtgcctgtagtcccagctactcaggaggctgaggcaggaaaatggcctgaacccgggaggcagagcttgcagtgagccaagatcgcgccactgcactccagcctgggtgacagagtgagactccatctcaaaaaacaaaaa

SEQ ID NO: 137626 - DNA, 866 bp, Homo sapiens
cacgggggagcccgagaaacaacgggaagagggcgaagtgaagcagccacaggaagaggactggacgcccccagacccgggcctcctgagctacactgacaagctgtgttcccagaaagacttcgtcaccaaggtggaggccgtcattcatccccaattcctggaagaattgctttccccagatccacagatggatttcttggccctaagccaggagctggagcaggaggaaggactcacccttgcccagctagtggagaagcgcctcctacccttgaaggagaaacagcatgcgagggcagcccctagtcgtggcacagcccggttggactcaagttcttctaagtttgcagctggccaaggagcagagagagacgtccctgtcccccaacaaggggttggcatggaaacctgcccaccccagacgactgcccgggactctcagggacgaggcagagcacacactgcctcgggccttctcagcccagaaaagtggggaccccagggaactcatcagttcccatctgctgagagaagaggcctcaacctagcaccttctcctgccaacaaggccaagaagcgacctctctttggaagcctgtcccctgctgaaaagacaccccacccagggcctgggctcagggtctctggggagcaatccctgacttgggggctgggtggcccctcacagtctcaaaagagaaagggtgaccccttggtctccaggaaggagaagaagcagcgttgtagccagtaggggcttctgagcaggctctctggggccgatccccaaggatggggctctggcatccgatgccccaaagcggtcaaaagcttcttctcccccagtgctgatcttgctgggc

SEQ ID NO: 137627 - DNA, 392 bp, Homo sapiens
gcgagactccgtctcaaaaaaaaaaccgaaaaacaaaaaaaacctactccttctttcctcaaaaatatgacttgtttaatataaactacattagcacgacttgacaagttttctttttattcaatccctttagtcctctaaacaacctatagattcaaatgtctagaaacacccagagtaggcccttcatcatgatgtaaaaattcctctctgtaggatgattatttgttagaattcatggattacaataaagttatagactttaaagaacttgtctagtgagatgagtaactgagttaccttgaatagaagttagtctaaataattttttactcatgtaacaaaaggtaaatttcaaataaaacgatcatgctatacagaccagtgatttt

SEQ ID NO: 137628 - DNA, 257 bp, Homo sapiens
gattctctgctgctgcctcagttgctaggggaagagactgggccttaggtgggtgacttgaccaggtcaccggctttgtgggtagagctgctcatagtagaacccaggagacttatctcccaggccagtgttatttctcccgtatcctagttttcttaatagaagattattaggtgcagcaataaccaagttcagttagataatttagaaacaaaaccatattttatacacattcatttcatttctgagagctcaca

SEQ ID NO: 137629 - DNA, 203 bp, Homo sapiens
agaagtaaaaagataaggaaaccaaatatctgggcaattatttggctagggttacaaagcctagatttgaacccagtttgatctgattcttaagttattgtttttccattacatctagttactagcatttatattaaacatttccttttaaaatatttctttttttgcaaataatcctcctatggatgatactaattgtaatt

SEQ ID NO: 137630 - DNA, 410 bp, Homo sapiens
tttttccctatgcagaaatatttggttatttttgttgtccagtttattaatcttttccttatggttttggactgatagcatttggagacatagttagaaagtccttcccacttgattataaagaatctgcccatgtattctaatacttttatgcattttatgtttaaatctttaatccatttggagtttacttgtatgtagaaacttaattaaattactacagtatcattccatttactccaccccccgatgtgtgctgttgttttgatgctttcttctccttgtgttctgaaccccacaaggtatctttagtattacgactttagagagtgggtaggctttcgtatttactgaaataattgccctttactgtgctttttcttcccttttgcaatatcatgcttcatcta

SEQ ID NO: 137631 - DNA, 399 bp, Homo sapiens
cctcagcctcccaagtagctgggattacaggtgcgtgccactacgccagactaatttttatatttttagtagagacgtggtttctccatgatggccaggctggtctcgaactccttacctcaagtgatccacccaccttggcctcccgaagtgctgggattataggcgtgagccaccgcacccagccctccttagtctactcttaaatgctgggggtttcctctggctctatccttggttattttctgttcttgccacacacacacatacacacactccatgtatgatctcatcccatggcttgtatgaccagccacaccgtgctaatgattaggcagtctctttctctggctttatcctcttccctgagctccagttcttaatctctgcttaaatatt

SEQ ID NO: 137632 - DNA, 358 bp, Homo sapiens
ccctaggaagtttttgaagtttccagggttggcagccacactcatatggcccggctggagggtacagtggcaatccaacgcccagacagggtcctggacgttggactcctagaccaaagcggagaggaagtgatgggtcaaggcgacaacagggagccttaggagaatgtgtgctccaacccctcatctcataggtggagaaactgaggcccaggtagaggaagtgacttgctaaaggtcactcagctaatcttggtggagccagcactaggattcctgacaagagaccccttccaccataggctgctgacatgcccggctcagggcaacatcacccacccagacaggtacctcccac

SEQ ID NO: 137633 - DNA, 1009 bp, Homo sapiens
cagaagagaggtgtgagttctgtgtctcaagccaaaaggagaaaaaaaattttttttctttgaaacagcgttttgctcttgttgcccaggctggagtgcaatggtacaatcccggctcaccacaacctctgcctcccaggttcaagcaattcccctgactcagcctccctagtagctgagattacaggcatgcaccaccacgcccagctaattttgtatttttagtagagatggggtttctccatgttggtcaggctggtcttgaactcccgacctcaggtgatccgcccatctcggcctcccaaagggctgggattgcaggtgtgagccaccgcgcccagcccaaaaggagaaaaatttaaatttaatagtaaacaagttttctacccatttcttaggcttaagtcatctgggtcactgggtcatttcctctaaagatctgcttctttcatttcagaacccacaaattttgtaaacacctataaattgtcattcattcttcaattttgtatcacctagtttgggtcaactacagttccaatctaccatatcctttctggcttcacttctttccttatccaccttggacttcatggacaatgatctcaagacacttttaccacaccctcagttacctttgtcttttgttctttggtcccaaccacctcacccctccccagttctagatcaatgtaaactttatgtttatttgctcattcaagaaatatttattgagggcctgttgatatgccaacagttgttctaggtattgaggacacagatgtgttttctctccttctgagtgttggcatctgttttataggagagcattagttaatcatgagccggaactggtaccagtatgtggtttccagccttaacttggcagtcctcatggggagccaaatgccttgtcaatttctcacagctgctctccttaagcacctctttctagtcccagcctttgccttttgtagaccaccttacagtcggcctcaaaaggataata

SEQ ID NO: 137634 - DNA, 1027 bp, Homo sapiens
cagaagagaggtgtgagttctgtgtctcaagccaaaaggagaaaaaaaattttttttctttgaaacagcgttttgctcttgttgcccaggctggagtgcaatggtacaatcccggctcaccacaacctctgcctcccaggttcaagcaattcccctgactcagcctccctagtagctgagattacaggcatgcaccaccacgcccagctaattttgtatttttagtagagatggggtttctccatgttggtcaggctggtcttgaactcccgacctcaggtgatccgcccatctcggcctcccaaagggctgggattgcaggtgtgagccaccgcgcccagcccaaaaggagaaaaatttaaatttaatagtaaacaagttttctacccatttcttaggcttaagtcatctgggtcactgggtcatttcctctaaagatctgcttctttcatttcagaacccacaaattttgtaaacacctataaattgtcattcattcttcaattttgtatcacctagtttgggtcaactacagttccaatctaccatatcctttctggcttcacttctttccttatccaccttggacttcatggacaatgatctcaagacacttttaccacaccctcagttacctttgtcttttgttctttggtcccaaccacctcacccctccccagttctagatcaatgtaaactttatgtttatttgctcattcaagaaatatttattgagggcctgttgatatgccaacagttgttctaggtattgaggacacagatgtgttttctctccttctgagtgttggcatctgttttataggagagcattagttaatcatgagccggaactggtaccagtatgtggtttccagccttaacttggcagtcctcatttatacacaaattctatgtcatattccctcatatactatccttaatcacctttttttattgcgcaccctttgcctttagaaccccacctaacattcgtcatcaaaaggaaaaaatcccagtccaagctcca

SEQ ID NO: 137635 - DNA, 195 bp, Homo sapiens
tgcttcactccaaatctgcatgggagaggaggctaaagaattaagcccagatctcagaaacgctgagtggaatttttcagtctcgttactcagcaaacaaatatgtactagggacagtacacacatactaaaaataagagaggagagctaaaatacccccctccccccatgatggtaaactgacatggatacaaa

SEQ ID NO: 137636 - DNA, 156 bp, Homo sapiens
gtgaaactctgtctcaaaacaaaaataataaaaaaaaactcttcagacatcttttctgcaaggccccgctccccaaactctcatagacagagctagctgctccccattgtgggtcccctactccactgtcagagtcattgaaaggcctgtccctcc

SEQ ID NO: 137637 - DNA, 340 bp, Homo sapiens
ctgtttatgcctgcacaggcctgggcagtgagcagctgtctcctgccccgaaggagctaaggccagggttacagagataactgtgctgtagccctggcagggagcagtcaagaagtcacatcacccaaagagatgcccactgcttgtgcatcaagagcctttaaaacgttcattccagttcatgaacaggtaaagctaattgatagattgatggtgacagaagtcaaaaaagtgattacgttgccaggggaaatggggtgggtattgctaagaagacacatgatgaataagaagacacatgaggaataagaagagacatgaggagccttctgagtaatgt

SEQ ID NO: 137638 - DNA, 449 bp, Homo sapiens
tctgtgaaaccttccatttacttggccactttcccacggacattcaattaaaaacaactgtgggaaaagcgaatctagccattagacactgcagaagctggctgggcaataaaatctgcctctctcctaacagcccagagaagccttttagcatttacattcaacagaagccaaaagccaggagccccaagagggggcccacatcatcgttccaatccaatccgagttcaataaatgtctctgataggacaccaaaacacaggcagcaaaagaaaaaaatagccaaacaggataccagcaaaataaaaatcttctgagcttcaaaagacaccatccagaaaggcaacctacagaatggaaaagaatatttgcaaaccatatatctgatcaaggagctgtatctagaatataaagggccagacaactcaaacaataaaaaggcaaataat

SEQ ID NO: 137639 - DNA, 451 bp, Homo sapiens
gtacattgtcatctttgctcagaaaccttcaagaggaagccattaattcccttcagtgtagagtctgaacttttaatcttgctttcaggattcagtgtaatccgttttcctttttaattttagttctcaccatcctatgtaatcctctatcacagttaactctacattttgaaaaagcagccaagacattatactgcagtatattaaatttgggactcaaggaagaaacatgctttacttactcaaccagcttacaatagaaagtgactacaggagagaatatggtttattatgataatcattatggaatttatgcaaaagcaaggaaagagctgaccaataaactaaaaaaatccttttcattaattcattgaatagctatttagcacatatgtatcaggtggttgacattaatccactgtgtatttccgagcactcaagatatttagtt

SEQ ID NO: 137640 - DNA, 256 bp, Homo sapiens
cagagccaggagttgaattcagaaaaatacaagagtctctcagtatattggcctcaattattgtttgtgggttcctagttgatctagaatcagttacttcagagttcaggtgcctttgtgaataagacgaaaaccttggaccctctcctcagaaataatggccctgcatccctcctggatgtcatttgaaaatgagctttgcttgtggcctgctgggtaaatgccactctttgtctgcagtacaacctgccggtgg

SEQ ID NO: 137641 - DNA, 458 bp, Homo sapiens
ctcgagaggtgccgatcttgatctgataacatgaccagctctctgtcctaggttggtctctacctttttggttaatttaataggagactaaaaaaccaatggaagaaagtaacctgctattaagtcaaccaaagagtaggacctgccttccggctcgaaaagcctgggtctggcccatcccaccctatggtgagctgccgtgtgaaccaatgctctgtctgaaggcggcacatcccggtcaggagccagtaagggaagcaaacacggatgggcactgctctgcagaaagcaccaggattcatgtgtgtgtctgtatccgcaatctacacaattatcgcgcctcctacaaacttcaattttaaaggcaaaacagtgctgttttcataatgcggatcaaacgggccgtggagccatcgtgagaaacagctggccctgagatggcagaggcaatactcact

SEQ ID NO: 137642 - DNA, 420 bp, Homo sapiens
ctcccccatctctgaagtgcacgggccaaatctccttaacaaaacagaaatcctcagggcaaaaggattcccaggaccccataaaaatggccattatggatggcattgtcaccaaggaatgacagctccttgtaacatactgtattctaagagatctgacctagattctcctgctggactgtgctttaaagatcctgaatacccaatttaaaagtaaaccaatcaaccaggcagaagagactgatgtgcctccccaggcaggcaagaagcaccttcagaacctccaacacggcagctcagcctgcgactcataagcaaagtcaccagcatcaaagggtccagatgattaacggaagacaagcgggagccacattttggaggctgggggtgggagctgttgacacagctgtgccagctcac

SEQ ID NO: 137643 - DNA, 263 bp, Homo sapiens
ccacagtggtgctaatcatctctttgtgagcagttgtctcttgagtaaattatgtatagcagtaaaaagtgatctcttgcagttctccagttttgttattttttgtttttggacaatggatttaggctcttgtcgccgcgggaaaacactgcgggggcacgatcttggctcactgcaacctccacctcccaggtccaagcgattctcctgcctcagcctcccgagtagctgggattacaggcatgagccaccatgcccggcta

SEQ ID NO: 137644 - DNA, 596 bp, Homo sapiens
agtgctgggattacaggcatgagctaccactccactcaaatccaggtggctttactctctcaccgtggtgaatacttcatcgtgtgtgagatttcatttattttaaacaggagtttcatggagaattacatgttttaaaaccatagacctaggagtttgtataccttttattttaggtagaaaggattgctgtcttcctattaatactttccgtttgaaacagaagggtgaaatgaatgagaattttggtgaagagaaggcagagtggagaacaggatacagcaggctagagaattgagttgtgcatggcacgtctgttttctgagcctattcttttcactcccaccgcctataaccttcccccagatgaaattccctttatcctcctccagttacaccatttaatttgaataaaatacctgtgttcaacttaaaagtatttttcaagcgcagttgacttttcacctttgcaggggtctaggttttgttattactgagttaccgtcaagacccctcacagctgcctcatcgtgctctgtggctgggagtgtataccacactgggttcacatcaccattcagaaattaaccacacag

SEQ ID NO: 137645 - DNA, 521 bp, Homo sapiens
agggaaccagtttggcagcctgagtgcgaggtgacaaagcccttaaggaaggcagagggtgaaaagttgggacaggaggtcagaggcagaaccagcagggcttggtgccccggtaaacacgggcacggatggaggaggccaggatgacgaagatgtctggtttgggccaccgaggtgggacctggaagaaggaagggagaaggggacagaggtgggaaaaagaacagctctcccagcagacatggtcagtctgaaatgccacccaggaccctctgctcagaagtcctgaaggctgttgagacgtgcgtggagtcagggccatcatcaaggctggggacacctatttctttatttttgaggcggagtgtcactctgttgcccagtctggagtgcagtggcaccatctcagctcactgcagcctctgcctcctgggctcaagtgatcctcctgtcccagcctcccaagtagctgggattacaggcgtgcaccaccatgcctggctaatttttgtatttttagt

SEQ ID NO: 137646 - DNA, 478 bp, Homo sapiens
tcgttctaccgatgcttagttagttgggacaggaggtcagaggcagaaccagcagggcttggtgccccggtaaacacgggcacggatggaggaggccaggatgacgaagatgtctggtttgggccaccgaggtgggacctggaagaaggaagggagaaggggacagaggtgggaaaaagaacagctctcccagcagacatggtcagtctgaaatgccacccaggaccctctgctcagaagtcctgaaggctgttgagacgtgcgtggagtcagggccatcatcaaggctggggacacctatttctttatttttgaggcggagtgtcactctgttgcccagtctggagtgcagtggcaccatctcagctcactgcagcctctgcctcctgggctcaagtgatcctcctgtcccagcctcccaagtagctgggattacaggcgtgcaccaccatgcctggctaatttttgtatttttagt

SEQ ID NO: 137647 - DNA, 314 bp, Homo sapiens
gatatatgggagcatgcacacactcaaacatgtgtgcacacaccttctgtaggctgaaattccaacatctgtgtcttagccacttaaaaccatctctagacacctaactccacatacataccactgtgtgaatgagcagctaggagtggctgttttcagactactcctaagttcactatccttgtaacttggctgtaatcaccagaaacctcatgttggtaacctctatagctgatcagatgttccctgatatacagtaaattttggccataaataaaagacagttttacattacccaatttaggcacctgtgt

SEQ ID NO: 137648 - DNA, 194 bp, Homo sapiens
aaagtaggtagcaaagtgatgaatagacaagtcacagaaaaataaatgcagatgatccttaaacacagcttcacacttaagagaaatacaaacgaaaactgtgctgtgatttctcttctgttgggagaagatccaaaaacttgacaatacattctttggtgtggctgcgaagagttgcattcgtgtattgctgg

SEQ ID NO: 137649 - DNA, 469 bp, Homo sapiens
gttatttttatatttgtattttttagcagagaacagggtttgtatttctagcagagaacagggtttcaccatgttggccaggctcgtctccaacttctgacctcaagtgatttgcctgctttggcctcccaaagcgctgggattacaaatgtgagctgccatgcctggcaggaaccaccgtttgtttgttattttcctcaaacaattggtatttgaaatactactgaagtagtatcatttgggaatcttttgaaacattttgatcttacaagggaccctagtactttgaagattgtgaaccactgtctgtactcttaagggtagagaattcctaattccttagctttgtagagatgtgtatcactatctgtgaatgctgttatttccaacacgctttgtaattcgacaatgtttgttttctgacatatgttgtatgtgatatttcagtctaaagaaatgtagtttgaaa

SEQ ID NO: 137650 - DNA, 357 bp, Homo sapiens
aaatcctgtgtctggtgaaggccaattgtttgattcatagatggcacctcctcatcatgtcctcacatggtggaagcggtgaggggtctcgcttcagccactttataaggacactaatctcattcatgagtgctctgccctcatgacctaactacctctcaaagattccaccttctaatagtatcaccttgggggttaggtttcaacataagaattctggggaaacacaaacatttggaccatgccaatactcaaatagcaaaatgtccagtcttaactgtatttctgcaaatcttagctggtcgtggcccgggggctccccttagctccattccagatgcactgtcctggttacca

SEQ ID NO: 137651 - DNA, 451 bp, Homo sapiens
taggataagtgcattctatgagctttggagaaataagtaccagtaacagagaaatttggggttaatgtctctgcacacagagtagaatgaaaataggattgtcccaatatatacttcagtgaattgtaaataaagtgttggtgttgttcatgtttgtttgtttttaaatttttgttttttctctctgtgctcttgtcagaagtcatccctttttggtatgattaagttggaatccttttcagagttaaacattttcttggtccatgtttttaactttataattttttttttggactaagaatacatgtactgcaaaccttcctttatgttactgtcatctttttatttaatcatactatttatatgctactaaagaatgctgggtattggtaccaggaaaaagtaaaattgcctatgtatatttagtaaaatatttaaagtacatattttg

SEQ ID NO: 137652 - DNA, 946 bp, Homo sapiens
ttacgagccagtgcgagcggcgggcaccttacgagtcagtgtgagtggcgtgtacgttaagagtccctgtgagtgccgtgcacgttaagagtccgtgtgagtggcgtgtacgttacgagtctgtgtgagtggcgtgtacgttacgagtctgtgagtggcgtgtacgttacgagtctgtgagtggcgtgcacgttaagagtccgtgtgagtggcgtgcacgttacgagtccctgtgagtggcgtgcacgttacgagtccgtgtgagtggcgtgcacgttacgagtccgtgtgagtggcgtgcacgttacgagtctgtgactggcgtgcacgttacgagtctgtgactggcgtgcatgttacgagtctgtgagtggcgtgcacgttacgagtccgtgtgagtggcgtgcacgttacgagtctgtgagtggcgtgcacgttacgagtctgtgagtggcgtgcacgttacgagtctgtgagtggtgtgcacgttacgagtgcatgtgagtggcgtgtacgttaagagtccgtgtgagttgctgctgaggcaggaatgtgggtgggatgacagcgagatatctatgtctagttacgttttctttaacggcagcctatttagctcgttaacatcagatgaaaatcagaactgaaaggccgtgggggtgagatgggatgacaaacaccaaccaatgcccagaatctgttcctcggatccttccgttcctccctcctcccggctcccccaaaacactcccctgcttagagagttaaggaaaggagccgggcacggtggctcacacctgtaatcctggcactttggaagcctgaggcaggtggatcccctgaggtcaggaggtggagaccagcctgaccaacatggtgaaaccccgtctctactaaaaatacaaaattagctgggcgtggtagcgcacccctgtactcccagcta

SEQ ID NO: 137653 - DNA, 455 bp, Homo sapiens
tgaaaatggtcctgatgatgctggatgcagaatgcagattccttcgtttgaaagtttttcagtaaagatttgaattcaggtccaccgggttctttgtgctcacaggcaggtataggtatatatcaattcatgtggtggagaaaagctcgtttatctaaaacaaacaagaaattatatctatttggatttgggaggtattgcactttcacagttgttttatttcctgattgtttatttcagacaaataccaatcatgaatgttctgatcctctgcaggactctttggggaatgcaaataatagccagtttagcagttaccatcgatggtgaaacatacttaacactcgtgttttcgtgtgattcctgcaggtcattgaatgtaccctaatgtggggtaggtttttggattctgttttacagatgaattaactgcaacttggagcaattcaccaact

SEQ ID NO: 137654 - DNA, 434 bp, Homo sapiens
tacctctagatctaacacaattttgcaaggtaggtaactatgggcccattttagagatgagaaaactgagactcagaactgtcccagctcacccaaagcaatagacatcagagatggggtttccatgcgggtctgtgtgtctgaagttggtgtacctgctaccattcttgtctctcctcatctttaagatggaacaatgacccttactctcctagctaccatgtaaggctgttgtgagagttggataagatgctggatgcaaaagcactttgcagactgcaaagtcctgtacagatgcaaggcttgtaggcagtccctggcatccagccagatactgtacccagctgccacataagtgagcaatatggtatttaattgggtctcattgagacatggagcctgggaaggtctttgcagagtctgggtaaaaggaa

SEQ ID NO: 137655 - DNA, 802 bp, Homo sapiens
gtatttgtattttggaagtttaagacacattttcctattgggtttttggagtaaaggagtaaagtaagatgatctacattgttgctgtatacaggcctttccagttgtaagaaatgtttggaggcttagatgagataaaaagaatatatttgaaaaaatgcatttatttttcctcatgaaagctggtagtgctgaaactgcaaacctaggactaggaaggctgttgaaattagggaaaacatcagtgacatggcatgtcagtgtgtgtattaaagtgcttcagaaaaacagaaccaataagatgtagatatcttcagaaacagagtgagtgagtgagtgagagatttactataaaaaactggcttacttgattgtggagtctgagaaacccagactagggagagctcgtggtatagttccagctggagtctgaaggtctgagaaccaagagagccaatagtgtaagttccagtcttgtacaagtctgaaggcgggagaaaccagtgtcctagtttgaagacaagtagagagaaagaattccttcttactcagtctttaattctattcaggccttcaatgggttgctcaacgcccatccacattggagagaccaatctgctttactcagtctactgattcaaaagttaatctcatctagaaatatccttggagacatacccagtaacaatgtttaatcaagtttctgggcaccccatggcccagtcaagttgatacataaaattaactttctctgtgtgtgtgtgtgtgtgagagagagagagagagagagagagacagagag

SEQ ID NO: 137656 - DNA, 260 bp, Homo sapiens
aaagctaaagaaacatgtgttacaatgtagatagggaatactttcttaatgaaccatgctgaactgtaagatttttaagactcctttttaatgcattacattacactgtatcttgttttcacatttatggtgaggttaatataaaagagacattaaacaaatatatttctgctctttacaaaggatgattattgttttcttacatttcaactaaaaatttctataatattatacttgcaagaagtataacactcttaatg

SEQ ID NO: 137657 - DNA, 184 bp, Homo sapiens
cgtagatctaaaatgttttgcattttgagtctaatgtcaagagaagttgcaccaattgtttttcaacaaagaattgatttttgttttggtttctaagcagtctagcttagaaatagaaaccagtctagcgttaaattatttccatcatattttatttagggatcattttaatgaacttaaaata

SEQ ID NO: 137658 - DNA, 172 bp, Homo sapiens
cgaactcctggcctcaagtgatctggctgcttcagtctcccaaagtgctggaattataggtgtgagctgctgcgtcctgcctctcttccacttttaaagatgtgttcactttgagccaacccagataatccaaattaatttacctattttaaggacaaatgattaccaactt

SEQ ID NO: 137659 - DNA, 662 bp, Homo sapiens
cagtttaatactctcgttatgcgtggtctatacacagttggaattctgtattcagtgatataacagcttcatagaaatgtcttaaatgtgttgtggaagcatgtaaaccatcttaaagatcaatgcctcatgggtttatttgtgtgtggccaaagcaaatcaccaatgtagttgttcatgttgccatttgcagtttgtaaaagacatgccatgtgtgcactaaatagtgcattttcggctagctgtatttgtagcacaatgtcagattgaatttggagatatgattcactctctttgttccagagcagatacaaattatcatggcatgaagtaaatagagctactagtggttaggtcagatgttaagaatgatgtgtgtgtttctttgtgtccctaagaatgctatggtaacttttggtcagtagatggagttgcaggtcccagacatgtttgttttcttttggatactttggccttattcaaaacagaatatagatagaaagatagctagatagatgatagatagatagatagatagatagatagatagatagatagttcaggagccaactaacagtaattcagtttttccattcattaatttaataatgaagtacatatatatagtgtgtgtatatatatataaatggtatatatgtata

SEQ ID NO: 137660 - DNA, 393 bp, Homo sapiens
taccagccttcagaggtcttccacggggagagtcagacattaataagataaatggctaaaagacatgccatgttagatattgctaaataaggatagatagatagatagatagatagatagatagatagatagtgatagatagatataatgcagggaagtggggagagtaagtattgaggggaatgactgaactcaggaggagcatcactagaaggaaagttggaataaacacctgaaggaagtaaaggagctaacaatatgagtatccgagagaagagcatgccaggaagatgctgaggtcagactatggaagaccaaggaagccagggtggctgtcatagagtgaataaggcagagggtagtaagaaatgaaataagagaggtacaagagct

SEQ ID NO: 137661 - DNA, 699 bp, Homo sapiens
agaataatttgtaagagtaaatagtagtggatgaaggtcagtatatgaagcccattatcttcctgtactttatattacaatttcaggttctttttgacccttaaggtatgtaccagagaaaacctagaaatattgccacctggaataagattgagtgtatatgaactagaaatatgtgaagagttatgacaagagattttactagtgctgtattgattcagctctggaagctggctttgaggtatcctgagaaagatgccacagttttaggattcagctttttctgaaagcaataattgatgacctttttaatcttataattaaatctccttccagagatgcaaagatacaaacagtaatcctcacatggttgcatgactgattaagaatttatccagccaggtttggtggctcacgcctgtaatcccagcactttgggaggccgaggcaggtggatcacctgaggtcaggagtttgagaccagcctgaccaacatggagaaaccccgtctctactaaaaatacagaattagccgggagtggtggtgcatgcctgtaatcctagctactcgggaggctgaggcaggagaatcacttggacccgggaggcggaagttgtggtgagctgagattgcaccattgcactccagcctgggcaacaagagcaaaactccatctcaaaaaaaaaaaaaaaaaaaag

SEQ ID NO: 137662 - DNA, 212 bp, Homo sapiens
tccagcccctgctccattctctgtgtggcagctagtataaatatttgtaaggcacaaatcagacaatgccatatgtgactatttcaaaacctccaggggctctcctttacacttcagatgaaatctaaactctgtaggatggcctagaaggccttatgtgatcttagccccagccaccttaattcccaccatttttccttaattcccaccat

SEQ ID NO: 137663 - DNA, 287 bp, Homo sapiens
tggaaactgtttccacggatgggacaggcggatcaaatgggctggtggatcagtgggaggaagcataaagttcacatcttcaaaacagtaaaaacagcctttatttgaagggcccctagaaagagcagccctgttcagagtggtgactgacattttagtggctgatattagacactgaacattggggagagatgatagctatttgcaatttaagacccctgtgagaatatgaacaaaaacggtattgagagagcgatgtgccgtaggaaatctagagatgtttaagc

SEQ ID NO: 137664 - DNA, 421 bp, Homo sapiens
gactgtagcttattatatgaccttgggcaatttacttgactttgtttttttaattgaaaaaaattctctttttttcctgccaacaaagacccagaagagatacttgacttttctaagccccaattttctcatctttaaaatgaggataacactgatgcctcacagggttatgaaagaattgagattaggttctagtatgtatgcctggtatattagtaagcagtcaataaacatagctgtttttcttttctatttttttttgagacagagcctcgctctgttgcccaggctggagtgcagtggcgcaatcttggctcactgcaacatctgcctcccaggttcaagcgattctcatgcctcagcctcccaagtagctgggattataggcatgcaccaccacgcccggataatttttgtattt

SEQ ID NO: 137665 - DNA, 450 bp, Homo sapiens
tgaaaccagaagcatgacttttaagtagcaggaacattgagataatggaaaacttggagcctttgagaaaacaaagcacaaagctgctcttgaacaccttgccatgaaagtaacaaaacgctgaagcatgtttataagtcagggctgaaaatcatgatgaagaggaaaagccaggtgactgctgtcagtttcaataccttatcctgtttcttttatcatgaaattgagtagttcgtcagcaagaaggtcaggtctgagcatctatttaaactcttaaccttgagactgtgatgcttatgtgatgtgggaaattgtatctgctcattagagctctgatatgtaattgaaatctgagattacttatctgccttgtcgtatttaaaccactgattatggctctgacatttttgttactcttcaatcaaccagtatataaaggattcagaatct

SEQ ID NO: 137666 - DNA, 124 bp, Homo sapiens
cctaaagaatccaccctcacaattccccatctaaaatacaaactacacctggaagtccccagacaagacaacaagtccctggtcaggaatataggaggtgcccaatacatgggaaatacagaag

SEQ ID NO: 137667 - DNA, 472 bp, Homo sapiens
tttctgaaattcacagggcctggataaggttgatttaataatggaggatgtccctaggaagtttaaatttaaaaagttacatagagctatgtgatgaatgtggtctacttgtactacatcatgttctacaaagagaatatgagttattttgaaattacagctggtctgttttcttttgccatagtactgctctgattttggatgacatgggtcacaatataatgaggacaccagagataatggacagtactcatactcaaggttatactcatttaccacctagttcaggagtcagatactcagtctgtaggaaacaaaacaaaacaaaacaccagagcataagaagtactatgagataaagcagagctataggaatacactacttagggctgggagctccaggagtatctacctgaagaagttacacaaatgagcgctcaagggaggaaggaaaaaccagacatcagcactg

SEQ ID NO: 137668 - DNA, 443 bp, Homo sapiens
acccctgttcacttccataacacattctcaccaccagccaggggcaaggagagttaatcaagtgcagcccacttagttttcagaagagaagactgaagcccaacaggtttttaccccatcagctttctctgccacctagattgtgaatactatttactatcacttgttttctgggcttagaagcgtgacaacccaactttaaatctaattcctatgtcccacatcaactttctatcttcttctatttctcagaaacttctcttatatttgtgtgtaaaccagaaataaaattctaagacccctcaactgactgaacagatcccccttttggccaagggcattccaaagtaaacctgaaaaacaagtgcagttcatgatgggaagggggaatcggacatgtctcattatgccttcctccctttggaattcaggcacaactgacc

SEQ ID NO: 137669 - DNA, 264 bp, Homo sapiens
tgcccgcaagtaagagccttcatacaccaggttgcagactatttcatagctttactggatgcaacaaagcccagcaaaacccagctgtgagacgtgctagttgtttccagtatatacccacatgggcttctgggaagaaagattcattctttgttccacctgttataggaattcctgctccttggattttatttttctattttacattcagtcattttgttttgtctcctcatccttgactttttaaatcactcactgtgaaag

SEQ ID NO: 137670 - DNA, 465 bp, Homo sapiens
gatgatgggacatttacataagggaaagatcatacatatttccttgattatgagataaacactttaaaaatcattttaacaataagtgcatcttctaatacatttatatatttaatattctctttccaaataactgctattacatcaatagtgcgtcttacaattgatggtatgttagcattaagaaaatacagtaactaggccgggcacggtggctcacgcctgtaatctcagcacttggggaggccgaggcaggcagatcacaaggtcaggagatcgagaccatcctgtgaatggtgaaaccccgtctctactaaaaatacaaaaaattagcagggcatggtggcgagtgcctgtagtcccagctactcgggaggctgaggtgggagaatggcatgaacccgggaggcggagcttgcagtgagccgagattgtgccactgcactctagcctgggcaacagagc

SEQ ID NO: 137671 - DNA, 164 bp, Homo sapiens
tactgctgatgataaaggggagatgagaaaggtaggtggattgttatggtgaaatatatctttaaaccactggaacccttctcgaaccattgctacttccaacttgggcatctccatactctagggattgtcagtttcaaaactcagacatgtgcccatgtgct

SEQ ID NO: 137672 - DNA, 122 bp, Homo sapiens
atccctgcctccagtatagctcctgggcaggattccaaaggaaggtctgtaaggtcctctctcttcttgttggctccccctggtcaccatcgtgaacacagcagacagcaattgagcatttg

SEQ ID NO: 137673 - DNA, 164 bp, Homo sapiens
tgctgggattacaggcgtgagccactgcacctggcctccttttttttttaattgacagatgaaattgtatgtagttgtgtatgacatgatgttttgaagtatatatatgttgtggaatgactaaatctagctaattagcatagcatggtctcacataattagga

SEQ ID NO: 137674 - DNA, 219 bp, Homo sapiens
tccagcctcaggtaatctgttagagcaacacaaaatgaactaatagaatggctattcactttgattctatttttttaatattatgaacaatcccgaataaatattcctgtacatgtccctttgtatacatatgagaaggtatccctagggattatacttcccatagaatttctgggtccttataaaatatgaaactttactacatatataggtgaaatt

SEQ ID NO: 137675 - DNA, 284 bp, Homo sapiens
gagaatctcacttatgtgtcacttggcaggaggcttcagttcttggccacatgggcttctccctagggctagacgtgtgacattaacagctggcttttctgaaagtgaggagagaaagagggaggctgaaagagagtctaaggtgaaagccacacactcttagaacttgatcttggaggtgacaccttgtcacttttgcacttgatttggaggtgacaccttgtcacttttgctacatgctattggttgttcaaatcaaatctggcaccatgtggatgaggatt

SEQ ID NO: 137676 - DNA, 280 bp, Homo sapiens
atctcctgacctcttgatccacccgcctcggcctcccaaagtgctgggattacaggcgtgagccaccgcgcccggcctatgtgggagatttttcaaccgaagatcctaacatgagggaggcctaatgtgagcatttttggctgctccccacttgaaagacccctgcatctgtgaccctgcagatgccagcgcaccttgtcacccagtcgtgcctcttcacccagcgcgcgcctcgtcacccaatcgcgcctcgtcacccattcgcgcctcgtcacccaat

SEQ ID NO: 137677 - DNA, 442 bp, Homo sapiens
tatagaaaaggaatttttatgatttcttcctgcccaacccccactaagaagcaaaggccctactcttgaccttggcatccccttgttgctttcttctcgtccatgacacctaggcttgatattctttaccttgggtattcttgtgaatatttgctgaattttcatttacaccaaatacaattcagaagacagaggctttccaaggtatgagtgtgtaagtatgttaaagaaaagctctcagcttgtctcatggtttaaagtcctcctaagatatctgagctgaatctaaggaataaagtagattggttcctccctgtctgatgagttttatcaaaatgtgataaaatgtggtaaagaaaaatggtgggccaacttcgttatagttctactgagggacactgtacaggtaaaccaggccataactcatttgtcctgtgacagt

SEQ ID NO: 137678 - DNA, 443 bp, Homo sapiens
agtccgtgcgactgagctggaccctcctgtcattcccatacctgttccagagactggaggggcctctcccaggccttcctgaggctgaccatgaggagcccaggttcctgggagaaatgttcagccctgagcccatcatgagaggggatttagtctcagtttcctacctgtccccaacctcccattccagccctgttcttttccccagcccccctgagggaggacagccatgccatgataactcctgtcagtgtcacacagcaaggaaacccaagtggcccctggcttccttcagcctggcttgcttaggtctttgctgtccggggaaggactccaggcatctgtgggctgtgagctgctcctggagcctcctctgagggctgaagctcgtggggctaaaggaacttaccacagtggctgtcggagctcagtcgaacggactg

SEQ ID NO: 137679 - DNA, 418 bp, Homo sapiens
cctaggagttcgagactagcctgggcaacattgtgaagccccatctctacaaaaaatacaaaagttaaccaggcgtggtggcatgcacctgtggtcccagctgctcaagaggctgaggtgaggagattgctttagcttgggaggttgaggcttcagtgagctactaccatgccattctactccagcctgggtggcagagtgagaccgtgtctcgaaaaaagaaaagaaaaagagggatgcacttggagaagtttcttggctgccccctttctttctgcctaggtgctgttgagtgaaaacatagtgcttggagccctgacagctatctatcttgtgaccaggaggggaaggccaggagactcatggttctctgttcactcagatctcagatacctggaaccactgacttttgaacttt

SEQ ID NO: 137680 - DNA, 196 bp, Homo sapiens
agcagggcatacgaattcctccccagtctggccccagtccacctccttgcctcacccccaacccacgaagctcatgcaacctccacggctcactcaaggccctctcgggccaccatgcttttgcatatgctgtccctggtcccggaagcaccctctgccagcctgccctcagcacacgcctaatcgcccttccatg

SEQ ID NO: 137681 - DNA, 433 bp, Homo sapiens
ccaggctatgtgcagtggggtgatcatagctcactgcagccttcaacttctgggatcaaaggatcctcctacctcagcctcccaactcactagaactacaggtgtacacgatgcccagctaatcttttttctttatattaaactgtttagggaaattgttgtaattttttgtagatacagggtctcactatgttgcccaggctggtctcgagagatcttcctgcctcaacctcccagagtgctgggattacaggcatgagccaccgtgccgagccagtttccaagatttctaataccccattactttctgtttaatttacgacagtgtttccttgtttcatggcttctttttctttttaaaggtataaaatatagatacttatttaaaaatctctcccagattgttctattaactttatttccttaggtataa

SEQ ID NO: 137682 - DNA, 974 bp, Homo sapiens
attttttagtttggatattgttacaccaggttttcatgggggcaaggcatacctgatttactcaggaaactagcaaattgatgacagcattacaaaatgtacaaggtagattttgctattaaggacagttcctattgctgagtaacagcggaatgaaaccaggtatttactgatgggccaaacctggtaagcatttgtctaggaggcagatcagagctactaagttgggacggaagcccgtcagtggtggacctatcaccttggcagttaatgacaaaaggagccagacgagtttttgcctttgctactagatgtaacagtggatagagaagccggcctggcatgagccacaggtgtgggcagtgaggtggtgggagaaggcatgcagggtgagaaaggtggcgcagagcccacggtagatgggcatgactacatttcagccccagaatattctagtgtctgcagagcaactgttttcaagtaaagaaggtgctgggaaaacaatcaaatttgataaaaaataattaactttatcgagagcatgaggcagaacggggtgagagaaaccacaggcagtattatctgtgaaatctccatgaacacagatttttggattgctgttattttggaagataaataaggcttggtggaacaggaagagcactgctgatttgtttaaaaaaaaaagagagagggattttttagatttccgaatacagaggtcatcggccaaagatgaaaataaagatggaacaggtaatcacaccagggacgaatggatctctcataagtaattctattctttaggtgatgtacttcagagctactttaggtagaagttgagctcaacaactaattgttcctcctatggaaagttgatgcagatgctaaaacagacttttaagacgataaaaagattttgaaacttattttgtagacgtcaataagtctgcattatgattataaatgaggat

SEQ ID NO: 137683 - DNA, 695 bp, Homo sapiens
aaaaaaatcaggcttggtgtaatcccagcactttgggaggctaaggcaggaggattgcttgagtccaggagttggagaccagcctgggaaacatggcaaaaccctgtctctaccaaaaaatacaaaatattagcagggcatggtggcatgtgcctctggtcctagctactcgggatgctgaggtgggaggatcacctgagcccgggaggtccaggctgcagtgagctgtgattgcaccactgcactccagcctgggtgacagaggaagacactgtctcaaaaaaacaaaatgaaacaaaacaaacgaaaaacaagtttagaggaaggaaacttgagattccacagacaccaaatacagtaatggactttctgctttacttctctgtttccatgttaattatgagaacaaggtagatttaacattgactcgatctatgtttaatttcaagaacttaaaatagcaactgaaatagcttcatagataattgatagatttaaaataatatttaaaaaataatctttaggacggacgtggtggcttatgcctgtaatcccagcactttgggaggctgaggtgggaggatcacctgaggtgttgtggtgcctattcacattaaaggtggatcttcctttcctagtccactgactcaaatgttaatctcctctggcaacaccctcacatacacaccagaaac

SEQ ID NO: 137684 - DNA, 192 bp, Homo sapiens
gaggatccaacattctcacagcctcacattcacttccatctattctctgaaaatattccctgagaggtcacagagaggaggactcagaggccacaggtcatggaaaggtagattgaggtcacagaggtcacgaaaaggtggactgaggtcacggagaggtggactgaggtcacacaggtcacaaaaaggtgg

SEQ ID NO: 137685 - DNA, 337 bp, Homo sapiens
gtacaaaaaatacaaaagtgagccaggtgtggtagtgcgtgcctgtagacactaattcagtaggcttaggtcgggggtggaggttgcagtgagctgagatcacaccactacactccagcctggatgacagagccagaccttgtctcaaaaataaccaaccaaacaaaacacacacacacacacacacacacacacacacacacacacacacacaaatacccaaagtgatataagactattctctgtgcatagaagagtattttgtgtgtatgtgatattacatatataaaaatatatcatggccgggcatggtggctcacatctgtaatcccagcac

SEQ ID NO: 137686 - DNA, 548 bp, Homo sapiens
ctcgaatgtactgtttcaattgtcttacacttgggagtgagggatagatgaggcaccatgtccagctctatctcagattaaactgccagccccaaactgagaggtcttcttcatcatgattggaaaaggcatatcggaagggatcagtcggtgacacagcattttctcagctagccctggaaaaccacccaaacgtcatagaaatataagggaaatgtctgcttaacctactctttcttttgggagggcatgcagtttagctatttgagtgagtattttgtttttgttccaatacttgattttagcagagcaaatgagtccatcatgcattagcaaataaagtcagctctgaaagtgaattctcagggaagggaatggaggcacatgctagaattcttgtactgttctaagtttgttattatgtctcatgtggaagtcagaatgtcctggagactgactcctggtttggctttgatataagcactggaagatgaacaagagatgaggtggtggcaaaaaatagggatgatcttagacaaactgaaaca

SEQ ID NO: 137687 - DNA, 372 bp, Homo sapiens
taaagcggtacagcatcccatccagcaagaatccgggaactttacaccagcaactgtcggtgggtgcccaccctcccaaggtgggcagaagacataccttgggtcccactcaacactaatcagaaagttaacaagcatctcattcttttccaaaagggtctgggtcctgctacagccagttaggttagctcagcctgaggaaacagagaaaacaacgatgctaattcttcctagatatactctctaggccatagcccgccagcccctattctaagcagtaccgcagtcactgagaagagccccacctccactatcagcacccctaaccccttacagtacaggcctctgttacagatgcattaaagacacttt

SEQ ID NO: 137688 - DNA, 431 bp, Homo sapiens
atcgagctcggctccaatgtcatataagcggagaaaaagaacaaagaggttaaatgtaaaataaatatccttctactttggacagatgcaggaaagaggaatctacttttgtcagaaaggtacaggaaaataacagggtagaggcacagaaaattttacatccacaaactccaggaggatacagattctctggctgccttgtaatggattccctatagttgtactatgagtttgaatgtacctttcagttcctacggtgttgaaagttttgagtaatgcatgagtgattcataagaagctagcaagtatccatctatgatcgtgcatgtgaagaagtggagctgcaggtgagaaaggtccagaaagatagtttcccaatagcatcttgacaatgatttcaataggacagcccgtttgaacgcttatatgac

SEQ ID NO: 137689 - DNA, 293 bp, Homo sapiens
aaggcctggttggcaaagagtgcagctggactttagagcaggccagatgcagctggctagtaaagggtttgtaaatcatgataaggagttgagatttttatcctgaaggtaatggaaggccataagagatcttaagcactagtgcgctttggcagatgtgttctttgactccacgttgtggagaaagagtgggaattggttaagagcagagttaagaagggtttgcatgcagtaatctgagcaaaagatgatgatggtctgacagactagggtgatggcagtgggcaatggag

SEQ ID NO: 137690 - DNA, 184 bp, Homo sapiens
aatcccattactacaaaaaattagttgggcgtggtgatgcgtgcctgtaggcccagctactcaggaggctgaggtaagaggatggcttcagcctgggaggtagaggttgcactcagctgaggtctgcactcccgcctgggtgacagagccagaccactctgtcacaagacaacaacaaagccaa

SEQ ID NO: 137691 - DNA, 136 bp, Homo sapiens
gcagaagactgccctcaacctgctgcaggaacaagacaaggcaggaggaatttcaaaacgctcacctttcacaagccctgattccatcgattgtttgaatcttccatgaagtccacagagcatgggtgaggccaga

SEQ ID NO: 137692 - DNA, 158 bp, Homo sapiens
tgggaggcggaggttgcagtgatcacgccattgcactccagcctcggcgacagagcaagactttgtctcaaacaaaccaacaaaatgtttaacaaaagagactgggagccccaccggccacagctcctcctacgcacacacgagtcgggattctgccc

SEQ ID NO: 137693 - DNA, 403 bp, Homo sapiens
aacagagttctcaaacctcttgctcttgtatctttcagaaattgatttcaaacagcccggatttactagatgtgtaaactataactccaatggaatgagagacctaagaactgggtgatatttctaacggttcacaatttatctgacaccaatttcaggaaacgtattgataatgagcaaacaagagatttcctgaaacttgcttatcacagagatttcctttcctggccccagtgtgctggcttatgcttgtaattccaacactttgaaaaggcgaggtaggaggattgcttgaactcaggagtgtgagaccagcccgggcaacatagcgagaacctgtctctacaaacaattaaaaagttagcaggcatcatgccatattcctgcagtacccactactcag

SEQ ID NO: 137694 - DNA, 501 bp, Homo sapiens
cgtcctcctccacaggatcaaaggctgaaggccattggcctatttgcctccttgtcatcagccttagtggggtggaaatctgcaactcaagattcctgctgcccgttacaggaatctgtccaccataaaccggggatgtcagcagaattgaatggtgaatcaaaaactggaacaaatcattttaattacctaagacccaaacctaattcacagtatttcttcactagaccatgaatcaacttcattttatcccctccctctagttgagcagttcaacccagaactgaactaagagttgtctaaaacttggagctactgctggaagggaatgtgctgaccattcagctagccaagccctctcattttacacagaggccctgagagctgtgacccagggcttcagctgcacttaaacgcttcacttttctcaaggccacatggcacctcggggacccagatttgactcattactctggcagcccctcaccttctgcactgttc

SEQ ID NO: 137695 - DNA, 432 bp, Homo sapiens
ctgtgaactatcactttacttctcattttaatcttcatatgctgtgttccaccttcccacttagcctggaaactcggccggaatcagacagttttctatgccttactgtgcctaataaggggcccaagacgcgccaggcaggtgtgtcacctgttcactctgcaagcattaactgagcacctactacgtgctggcattgttttaggcactgtggatgtagaagtgaacaaagcacatagtgactgcaggaaacttgctccacagggagaccaagaggagtgacaggtgagaagacggggagggctatcacttctctctcttttttttgttttttgagacagagtctcactctgttgcccaagctggagtgcagtggcatgatctcagctcactgcaacctccgcctcctgggttcaagtgattctcctgcct

SEQ ID NO: 137696 - DNA, 423 bp, Homo sapiens
ggatgccccagggccctcggtttaacttcagcacaccccaaaaacatcagactaaccccctttcccaccctttccccatctcccacagttcccaggttcttcctccttcactgctgtatctcactagtaacccatgaagttgcagatgttctttgggcagcataaaggtagtagcaagaactctgctccaacacttacaatatcttattgacttattctttgtcttgttcagtaaaagaagataattattgctgttttgttaaaggtgaaatcagaatcaagagcatattcagtcattacaagagcacagagtatctttatgacacaaaatctcaacacacacacatacacacacacaaaaatggccacaaatataagtgactgatagtattcagaatgtcagtaatcccaactttccaaggc

SEQ ID NO: 137697 - DNA, 135 bp, Homo sapiens
ggcaggagaacattccaggaagggaagactgttgtgtgggaaagggtgctgaagcaggaaacagctgggaacagtcacagaactgaaagaggccaggatggggcaaacagaggggaagactggtgtccagggaga

SEQ ID NO: 137698 - DNA, 382 bp, Homo sapiens
acttggcatctatgtgctgccaatttcccagacataatgaaattgtcaaagtgactatctctagttaagagctccagaggtaatgctaacgatcgcaattctataccaaatatgcagttacaaaagaaaacaagtgaaaagggtgaatatggtactccagagggaactaagggtaaaagaacctaaatttgaatcccagacctgctagtcactgaatgatttatgtgagatagctaaaattgttccatgcttcagtttttctcagttttcaaattaaatcttccctctctacagatttctaaggaataggccgagataatagctgtacaacccctttgaaaagttaaaaatgtcctatgatgatggggttttcccctgtccc

SEQ ID NO: 137699 - DNA, 249 bp, Homo sapiens
ctgggcctgggggtacatacctgtagtctcagctactggggaggctgaggtgggaggattgcatgaatctgggaggacaaggctgctgcactatagcctgggcaacagcaagacttgcctcaaaaaacaagagactgaattgttctaatagataataaagtcgcatgtgctaaattctggcaccatacactctgagacttctgctcccaaatgtataagaataactgacactagatgaggttcctgcca

SEQ ID NO: 137700 - DNA, 259 bp, Homo sapiens
tcttgaccagtctgcttttgctttggccgagaccacttccacttctacttcttggtagccattgcttttatgtgctttgtttttaggattgtaacggtaatgccatgtttcacttctttttaaaatgcttcgaagacattctttaggctcttggtcctatttgtttaaaatttccatggaaagctctggtcttgtgtgcagctgatctgagtgccatggtcttggcacccattgagtggaaagtttgcttaactttaat

SEQ ID NO: 137701 - DNA, 247 bp, Homo sapiens
gttttttgagactcatctagttcctttacaattttaatttagaatttctttagctccaaatcaggatcattagctgggagttcttataaatcaaaagcaaaacaaagctattgcaaacaagtgggagttctcataaccttaatcagaaaggcttgagttgcatttccaaatcctgtctctagagaccatgagtttttaatgatagtatttccatgaaagcccaattgaatacaatcaccacccagac

SEQ ID NO: 137702 - DNA, 393 bp, Homo sapiens
tcaggcagctcacagaccacttgaaaagaagacaaagacccatctcaggaagctcacagccacatgccaaactgggcaagaccaattataaacacaattggaacaaaatcatgacagatcctttcaatgagttaaggtgagaggaatgttaatcttattaccgccctctcctcatttctctcttcttgcactgctagaagaaaattcaataaacgatggctagtgagtggctcaccaagaaatgggcatcatcttagatgggccctggctgccacagccagccctaatagccctggcttctgactgatagggccaccatggcctgacagtcccttgccctcaggatggaaccgtggttagggtgattaatgcatgaactgttatttcataccc

SEQ ID NO: 137703 - DNA, 541 bp, Homo sapiens
tgtactcgcagggcacacgcccacccacacgctgggctacaggaaccacgcctgtagccacgagaagagagtggacacccacccatgccatgagccactgaccactggctggctcccagctggtatacttaggagctggtataataaggagacttctaaaagcttttagccttaaaatatatgttactcattaaattctaaaactgcttattcaaataccacatatggttttaatcacacttgcccagatgtctcaggattgtctactccagagtctctgtcatgttaggagttgtttaacaggcagcaggtgtatccacagcatctgctcacatgatcctaacccaggggactcctgggttcatccacaactaccagctctccatgtaccacccttgtctgagccaatctgactggggatcctgtgggccccctctgcctatggggcctgggtggtacccctcctttcccattgccttgggaccaagctagttgcagaattggacttcagcctcagtcctgattggatgccctacaggat

SEQ ID NO: 137704 - DNA, 253 bp, Homo sapiens
tatataagatatcatgtaggcataacacaaggaccacatggagaggtcagacagataatgagctgtttgtggcacattgagtttgaactgactgcagaacggtccaggagagatgtccaagaagcaattggatatgaaagtctaaaatggccgggcatggtggctcacacttgtaatcccaacactttggaaagctgaggcaagtgaattgcctgagtccaggagttcgagaccagcctgggcaacatggcaa

SEQ ID NO: 137705 - DNA, 294 bp, Homo sapiens
aggcagtggacggggatggtgccaacaccctgaatccccacaaagctgggtctcagagagagtcccaggagttacagttaatccttacacacatggtccggcactgtgggatcaggaggtgtgtgtagaataggagatgctagtgatggcattaatcattatgcctgacgtttattaagcacctactatgcgccaagcggtttctggtattaatttactggacctgcacagctgctctgcaaatcagcgcatgccaccccctgcttcaaactctccaacacctggatacaatcc

SEQ ID NO: 137706 - DNA, 205 bp, Homo sapiens
tcacattccacagggtttgctaaataattatgaccagtattttactaccatcttcttccttggtgaactactaaaattagtaaatttatgttaaaaatgaagttctccctagaaatcaaaagtgcagtctaagcactgaaaatgttctatcaacacttgttaactgagaaccattgaaacatctaggaatttttaactctgcaag

SEQ ID NO: 137707 - DNA, 454 bp, Homo sapiens
ttgactttatggtgataccctttctatttttgatgtttttctccattctacattagttactattcactatttagtaccctggtgttatcataggtcatgccatccctttggcatcactttatatattaggtactattgaactgctccaactctgctgtttcaacatgtcagtttgctgactgaccacatccatattttttcttttctcactcactgtcatctcttctgcagcctaataaggacctccaattccttgaaccccttaccttctaacgtctctctctcttttcttccctacttaaattaggttttatactttactcttttaattgttctctttccagcaacttcccccaatatgcttcagggtcccacacacctgcagaatcccaaccctgcttaaattcagctctttggatcctccactcctacaccagaaagctgtgccctgcta

SEQ ID NO: 137708 - DNA, 354 bp, Homo sapiens
tacccactctctttatgaaggaaccatggtaggattgattatactaaattgatgggaggccattgtatgacatgaccaacccaaatgaaatctgtgggaccaggtgctatgtaatctgtttttaaagaaatgggatcttgctatgttggcccaggctggagtgcagtggctattcaaaggtgggatctgtgcacggtatagccttaaaatcaaagcaccctcccgccccggcccctgcagtaactgggactgtgtgccccatgatgcctggccaagtcaactatctttgaaatgggtcatcaggacaaggtggctcacacctgtaggatcgcttgagctcaggagttgagaccg

SEQ ID NO: 137709 - DNA, 840 bp, Homo sapiens
ggtcctccaggtccccgtgggttcgcagctccacccgcccttcctcgccctgcatccctaaggagaggtgtccgctctgaagggctaggggccagccatggagtgaggggaccggggctgaccacgcgcggcacagacagaggtcctcaggcgggccctctcctggacggtggggccggagctgatctagaagaaatacggagggacgtgccgagaagccgctctccttcgccgcgaccctggagagcgcctctccacccaaaggatctgccgagctgagagatccagggcgggcgtccgcagccgtgaggccccctgcgccgccagtatgggaagatcctgcctccttacaccttggagaacgctgggcgacgactaaagcgccttccgccggcctgtcactccatgtgacacaggagccacgtgagacccagaagagtccagcgactcgccgcgcggcgcactttaaactctagcctgagtctgcgacccctccagctctccagtccccagctgttggggacatcaagccggagccctgggctctctgccctgtgggtcgctgaaagcagagactcctcaaaccaaccgaaccgggcgcattaaccctctcgcctgcaccccgctgcctcccggttgagccccgaggcggctccaggtagaacctgctggactgactgcggcgtccagaaatctggagtgtgggctccagacactctccacggtttggccccgggtctcaacacccaagtcgcctcttctggctccttcaccacacagcggggcctgtggaaagggaggggccgagagacccgtcggcgcaccactgtcctcgagggg

SEQ ID NO: 137710 - DNA, 439 bp, Homo sapiens
ttaggtgtttgtttttttaacagtctaggaatttcagtgcaattccgtgaggtggtgctgaccttagatgagaaatacgtggccaggctataaggactacatgtagaattgagatgggacagtgtacgtatggactgtgaggggaaagaaaaggtaaatgtgtgaaaggaaagagattggtgcatggtcatgacagtctgacagcttagacatttcagaggcattgtttatgagaaaggggatagggacacataggtctgatgacaaccaaagccctttgatgatgccatctgtcactcaaggctccccacagcctgcccaacctgactctcctgcctgcttctccactgcctaccttcaacaatcaaactatatttttgttacagcaaactacattccatttgcctttaaatgcttgcattttagttattgtactggc

SEQ ID NO: 137711 - DNA, 541 bp, Homo sapiens
gtatcacttacagtgagggtttcctggggcagctattctaaaaattgttcagtttgcagaacaacctctttgcagaaagctataattcattttgtaaaaacatgaataatgatatatgtaagtacccttcatagactatttttcttacagaaaatgattcctctatgtatgcaatatatgaagttatgatgtgtgtccacaaaaacacaaaccatcaaactaagcatgattgactatttctgggcttttttcagcaatactcatttataacttggttcatttgttttatggtctccttcaatttccctggaatccaatagtagtaggtgccaaaagtcctatataaatctatgggagaaaatgaaaataatcagctactttctttttttttttagactaaatcacaaggaaaaaagctacttcccaggagtttgagaccagcctggccaacatggtgaaaccccgtctctactaaaaatacaaaaaattagccaggcatggtagcgggcacctgtagtcccagctactcgggaggatgggg

SEQ ID NO: 137712 - DNA, 473 bp, Homo sapiens
cttcctatccctgcctaatctcttcaatccgaatctcttgacaaggggataatactacctataatttggcattttcttctagttcttaagtacttcttaaaaattttagctttatattggcatgacatacttggcagtggttatttctgagaaagaatatggaagaaaggaatcacacgataccctatatatttactgcttggctcttttaaaggagaatatattacttagataatacaaaatgttttcatcataatgatgctcaaaggaaaaaggtgaagagtttgtaagtatgacctcaatggtctccttgaatgggaaaagtctgacatattaaactacttaacaactaaaaaattttacaaggcaaaaatataccgtaacattaaaaggtatattcaaactagaaaaatattcacaacaaaaaagattaatcaaataaaggtattctcaatacacaaaaagctcttacc

SEQ ID NO: 137713 - DNA, 331 bp, Homo sapiens
ccaagttaagcctgaaattttggttcaggattcttgagaggccctgtgagagctcagactctcccagggaacagctatgtaagaagaggaagaagagggcagcatgaagtcaggtgcagttggaaggccctaacttatgctgtggttatctactaaaatgccccttaagcagtctttattcaataaatattgaaagacctttctttttaaaaaatacacctaaaaacaaggagagtacatgtgtttacaattattagaaagcatatatttgcagtctagctgtatttgattaatttcaggatatgggcttcccttgccaggtggtctccat

SEQ ID NO: 137714 - DNA, 231 bp, Homo sapiens
cagcactgaggctggacagtggggaatggagggggactccttgagataaattaccacctccttcactttttttctgagacggagtctcactatgttgtccaggctggcctcagactcctgggttcaaatgatcttcccacctcagtttccctagtagctgggactacaagtgcaaaccactgcacccagtcctccttcacttttgatttgctcaacacctagtggcatcct

SEQ ID NO: 137715 - DNA, 517 bp, Homo sapiens
caggaataatagatgagaggaatatggactgtatataaattttgtgtaaataaccttctttattccaaaataacttcagatgttctgatagtactttatagcaaaagaaagcaataatactttctagcagataattatatttgataactaatgcttctgtatatcttttgctagttcttcctgttctcctcaatcacgagtaatcaagatccttatatttctgtccttgtccctctttcttttctcaccatgcaccctcttgccttgggcagtttaaatactgtccctgtctgccaacttttaaacttacacttcatatcaggtctttgttctgagctccagatccgtatgtgtaactgtctctttcacatttttacttagagtgctcaaaggcatcaacattaatttgtcaaaagctggactcttggtctacccaactctttctcctcatcctacctcttctcattaagtcacccaggtccacatatcattcacctgaaagtcatgcttgaccttg

SEQ ID NO: 137716 - DNA, 741 bp, Homo sapiens
gcactaaatccgtaaattgctatgggcagtatggccattttaatgatattgtttcttccaatccaggagcttggaatatttttctatttatttgtgtcatctctgatttctttcagcagtgttttgtagttttccttgtagagatctttcatttcctttgttagccatattcctaggtattttattttctttgtggctatgtaaatgggattgtgtgcttgatttgactctcagcctaatcactattggtgtatagaaatgctactaatttatgtgcattgattttgtatcctgaaatcttgctaaaatcattcatcagggctagcagcctttttgtgtagtctttagggttttctaaatagagaatcgtatcatcagtgaagaaagatagtttggctttgtaagacctcaaactataaaaatcctagaagaaaagctacaaaatgcccctcttgacattggtcttggcgagaaatttttggctaagtccctaaaggcaattgcaaccaaaaattgacaagtgagacctaattaaactaaagagcttctgcacagcaaaagaaactatcaatagaataaacagacaacctacagaacgagagaaagtatttgcaaactatgcatccaacaaaggtttaatatccagaatctatagggaatttaaacaaatcaacaagcaaaaataaataaccccattaaaaaaagggcaaaagacatgaacagacactgctccaaagaaga

SEQ ID NO: 137717 - DNA, 318 bp, Homo sapiens
cagtcagtaaaaacttctaatcccaagcagctgtactcatctgggtggactgctttctctttccatgtacctaattatttcctgcctcattccaagactgtaggtgactggtgtggagcacttgttctacacaagaccctctgggtcacctcacagatgggagtcctccagagaggggggcttcacagccagactccttggaagaatcttctgcactgggtgtcccctcctcactcctcagctgacaagggtcagcgtcctactcccacaggcctgtgtcccctggtgaccgagagtcactccatctagtcctcatca

SEQ ID NO: 137718 - DNA, 751 bp, Homo sapiens
tgggttttttcccccctaaaggtctgctctctgatccaaatttttatctcttgatgtaatatggaaagtggagcattaacttacaaaaggcaagaacttgtttgaaaagtgtcttttaatatttatacattttgggcctgtgaaagtaaatcaaaacatccaaataactgttttcataaagcaagctaaaccatattataagatttttatgttagtaatagtgttattgaatttaggctatggaagcatctttgatgtttttaccttactgctttccaagtttaatattttcctattgctgcaacttctttttaaagggttgtagagcaccacgattctgttaataaataagtgaaagttatgcagcttgggaaatctttacctcttttaggagaaaacagatgtttctgcagtatgatgagaatgtctttgggagagaacttttattttttcctggaactgttgcagttttagtacatgaagtgacccccctcacattctaagttattatgtacttttaattacctaacttcatgtcaaggaacagctcttaagaatcagcctttatataaaaccagaattagtagaagaaaagataataaaaatcagagcagaattaaagattttgaaataaagtagcacaaaagatcaatgaaacaaaaagttggtctttgaaaagataaacaaaattgacaaatctttagacagaataagaaaaaaaagagagaggagccaaataagattagaaatg

SEQ ID NO: 137719 - DNA, 587 bp, Homo sapiens
cgtttgttatataagcagggagggacacgatgatagaaacatgtagccttggaagcgcgtcaaaacatccatcatacgctagctcagtaagtgggcagcctcacctgctttccaagtttaatattttcctattgctgcaacttctttttaaagggttgtagagcaccacgattctgttaataaataagtgaaagttatgcagcttgggaaatctttacctcttttaggagaaaacagatgtttctgcagtatgatgagaatgtctttgggagagaacttttattttttcctggaactgttgcagttttagtacatgaagtgacccccctcacattctaagttattatgtacttttaattacctaacttcatgtcaaggaacagctcttaagaatcagcctttatataaaaccagaattagtagaagaaaagataataaaaatcagagcagaattaaagattttgaaataaagtagcacaaaagatcaatgaaacaaaaagttggtctttgaaaagataaacaaaattgacaaatctttagacagaataagaaaaaaaagagagaggagccaaataagattagaaatg

SEQ ID NO: 137720 - DNA, 484 bp, Homo sapiens
aaattctatgtgtaaactatgcccaagtctctggatgcctcctgaaccagcatccactgggcaggttccaaacaatgcatccaagactaaaataactgagctgacatttcagctgccacccaccacagaggagacagaatttacagtttgggttcagccaaggcaattgtttatttaaaaaaatacaaaacaacaaaaacagcacttttaagagacacatactagaatccaaagtttctacagcttatcactcacaaagtccaggatataatcccaagctacttggtacataagaaaaaagaaaacatgacccattctagaagaaaaaataattcatggagaatgcccttaagatgacccagatgttggaatcagcagaaaagtgttttaagacagctattttaactatgctccatatcataaaggaaaatacacttataatgaataaaatgtaggaaataggctgggtgcagtggctcatgcc

SEQ ID NO: 137721 - DNA, 554 bp, Homo sapiens
cagagatagtgaggagatttgattgtctgtgctgacattaaactactagaggttgatgctaggagtgtagtgttgagcagaccccaagaccatattcaggcttggcaggatgatattctctgcccgattaatgtgacatttcatggaacaaatggaaagtgtttaccattcctgccctaggtgatcaattctttccagccttgaaagccatgtccaggtggagtctggtttagatgtagtccaaagcaaaaggaaggtcaggaagaaagggtaggagagccagtcaaggtaccccacatctgtaatctcagcaatttgggaagccgaggtaggcagattgcttgagctcaggagttcgaaaccagcctgggaaacacagggagaccccacctctacaaaaagtaaaaattagttggtcatggtggtacacacttgtggttccagctcctcacgggctgaggcaggaggattgcttgagccagatagatcgaggatacagtgagccaagatcataccactggactccagcctaagtgacagatgatatctgtctc

SEQ ID NO: 137722 - DNA, 363 bp, Homo sapiens
tctatatgtgaaatggcataatatttaaaggtagacttacaaattaaaaatgtgtattacatatacttcaacagctactaaaaaatgtataatgaagttgtaactaagccagtagtggatataaaatggaaccattaaaaaactcagtccaaaagaaggtaggcaaagagagaagaaggaacaaagaatagacggacaagtcaaaatctaagacgtataggatacatttaaatgcaccttgttgataagtacattaaatgtttattaattttcaatttctattaacaaattacctcaaatttaatagtttaaaacaactatttttttagctcacagttctctatgtcagaagtctggaaatgg

SEQ ID NO: 137723 - DNA, 414 bp, Homo sapiens
taaataaagctggaggcctgcactcttatacctgagtgggtggttttatggcctaattctctaattgctggcatttatgacagtgtggatgctactggccctgtggctgaggtagattatgctgggaatagggaggaaaaaggggtccttttgttagccttttcattttgcccctcaataaagtctctgcaaaaaccctgaggaaatacagagacacttggactgagggaatgacttcccataaaatggttctttatgtttttaaaatgatgagccgcttttcttgacctatccaaagaaatccataccaccactgttaaatatttcaatgagttttttaccttgtcaggttacacaccaggggaagccaaccatgagactgtagctgctgccaaacattcgcttctaaagact

SEQ ID NO: 137724 - DNA, 175 bp, Homo sapiens
acacagaaaccctaaatcttctgattggaataaggagcctaagatgcttcccatcccactccccagcaccccatccaaaggctgggcatctctggaatgggaaagacccagccacccactcagacccctaatccagcatcacacacttgctcagggaattcttttttacatttta

SEQ ID NO: 137725 - DNA, 378 bp, Homo sapiens
ccagcctgggcaacaaagactccatcttaaaaaaaaagaaacttgaatgtgaaccttgaagctaccacccactagctgtgcctacttagacaaggctgtgagaggacactttcacaaagaaataaaggttttatcatgtaagtgagctactgctgacctcacccctatctggtttctgcaggaaagaggtgtcatattcacaagggttctgtaatggaaggactgtgggcagaggtaagagaacccaagaacaaggaaggggtgccaaagcacttggaaccagcaagggactgaaggagcaagagggggagctgctaatgggaaataatattaataccttgacctctctcaaatcctgcccatcaatctcctgccagt

SEQ ID NO: 137726 - DNA, 425 bp, Homo sapiens
agcacgtgacacatgacaactgtctcactgtgccatcaggaatggagtggacccctattgggatgtccatccccctaccttttttggttggaaccatccctcttctctcccctcccctccacacagtgacagggatgggcttctgattgccatgttcataaacaagactacctgcaactactccccaccctgggtgggagttgggcactgttagtaaattggtcaaggatggtgcctgacccaaggtggttcagtctgtgtccttctccaggaacttggaatcaggacgtacagagagttgcctctctgcaggtgacgagataagcacaggccctgtccatggtcatgtttttggccatttggaccagagaacccggtttgcaagaagacaagatttctaagatccaagctcggattgcttttcc

SEQ ID NO: 137727 - DNA, 313 bp, Homo sapiens
agattgtgccactgcactccagcctgtgacagatactctatctcaaaaaaagtagattttcagggcttagtgggaggaggaaatggcaggaaactgctcatggatacagggtttctttttggggtgatgtaaatgttttaaaactgatcatgatggtggttgccgagctctgtgaatgcactgaaaccattgatttgttcactttaaatgggcaaatcatacggtacctgaattatattttaagagttatataaaaaagaaaatcttccttgaagagatgacacttaaggagaggcctagggagtgggatgag

SEQ ID NO: 137728 - DNA, 408 bp, Homo sapiens
gtttgacataatgtctgctcagaaaattttctctttaaagattaattcaaacgcaccaagaatttatcttgatcagcacaacagagggcaaatataaacactaggtctgaatttattccattcacactaaagtgactcccagcatcctctactcattctaataaagtagaagctagaaggaggttcttaaattccctccttataaatcgaaacaattacctgccctatcctagagtatgagagtgtatgtaaaccaaaataccaagcaagtttacagatataactcgcatctgtgcagactggtttgcactaatctgtagagaaaaaatgtatttaaattaaaccaccaataaataagctctgtaatttgtcctctaggagcttacaatctagtagggaaaacacaaa

SEQ ID NO: 137729 - DNA, 372 bp, Homo sapiens
  misc_feature (25)..(25): n is a, c, g, or t
  misc_feature (53)..(53): n is a, c, g, or t
  misc_feature (58)..(58): n is a, c, g, or t
actagtcacgtgttggctagttggncaggagttgggaaagccaccttagtccngctgnagcagattggggaagggtcatggaaacaacaggagtgtaagaatctggcttctcaaaaataactatgagtcaaaaatatcaaaagtgttacaggtgtgggtccagatgagaagaaggcctcaggtgtgggcttaggaagaagctttcaaaaaatgtctgagaaggaaaaaggtcatgcctatttctaaaagaattttactagggtggactgctttgatgtggaggctaaggtggaagtgaggagggtgcagcaatctgactgaagccgggattcaatctcaaaaaacaattagccaatgcagatgatgaagcca

SEQ ID NO: 137730 - DNA, 767 bp, Homo sapiens
atctgagactataggatattttcatggatgaaatgatttgtatttgagtctaaaattccagaattgatgaagtaaacatcagtctcttgaactgccaaggcaatattaatgtcacttgaaatgaatgtgaatgtcagagaagcatccttctagctagggctctgttgtcatgccaagactgtagcagaggcggggcaccgtggctcatgcctgtaatcccagcactttgggaggccgaggcaagtggatcatgaggtcaagagatcgagaccatcctggccaacatgtgaaaccccgtctctattaaaaatacaaaaattagccgggcatggtggtgtgcacctgtagtcctagctactcaggaggctgaggcaggagaattgcttgaacccgggaggcagaggttgcagtgagccaagatcacaccactgcacaccagcctgggtgacagggcaagattctgtctcaaaaaaaaaagactgtagcagaatcatcaggttggaatggcaaggaagtcaaaatgcttcaatatttaccctgtgtgtgtgagcgactgtggaggaagaaaacctgaatccacacatccccaacccaatcttcagcatcactggtagacagctgtctattcccccatgcttcaagcctggtcattcccttcgtgacattgttttgccactgacactaaattgtctctgctgcagacaccaaaggccaagtgaaatgaagccacctccttatttcagagcacaactgcgaccacactgacc

SEQ ID NO: 137731 - DNA, 436 bp, Homo sapiens
tagtcactgtgtttattttatttatacactagaacctgctgctatccttgttgaagaaatagtggtgagtccaggctttggagtcaggaaaacctggatgggagtttcagcttcttcatttattagcagtttgggcaagtttcttaacagttgtaaaccgtagttttcttctttgtaaaataatagtaactacttctttagtgtctatgtgaggattaaatcagatgatcatgtaaagcacttagctatagtacctactacatattaagtgcccaacaaatgttacttatgatacaataggttttacttaacataaaattaactcctaatttcttaaaaaaatatgtcttttgaatgtggacctttcgattttagtcagctaaagcattaagtctgttttcttccactccctcaacttcatagtaacatgtctgtt

SEQ ID NO: 137732 - DNA, 550 bp, Homo sapiens
ttactgggttcaggaaggcaccagatcatcaagatggaatagaattccttaggctccatgttcattgtcaaaaatggcatgaatttggttgttgcagaacctgtgtccaaattatgcatagaagagttgatgtttaacctcagttaagttgctggaatcttctctcatctccacaaaggggatgatacagaccatatcctgggaagggaagactgtaacccacacctgggatagtaactgtcagtctggtctctaaagggctgggtgaccataagcaataactgccttcccattgccatacctcaaaactctgaggcacaaaatccacccacagaaatggtggactccctaggtcattagcagctgagccatccaccctgcaaactctatcacccctaggcacctccaagagtgttacaagaaagaacttaaaaaccacctgaaagaaatggcacatagagaaaaccttccagccgggcgcagtggctcacacctgaaatcccagcactttaggaggccaaggtgggtggatcacctgaggtcaagagtt

SEQ ID NO: 137733 - DNA, 276 bp, Homo sapiens
tcggtaccacctagggaacagacatggttctcctggcatggacactaagtaatatatgcagtggtggtggtagttgtggtaaaaataataagagctaatacacatttatagcacttagatgccagatacctaacctttgtatgcctcattttcttcatgtgtaaaatggtgatagtaatggcatttacgtcatagggttgttaataaggtttaaatgcattaataatatgtaaagagcttaggatagtatctggcatctaagtgctataaatgtgt

SEQ ID NO: 137734 - DNA, 516 bp, Homo sapiens
acctggcgcttgaagataataaatataaattgttattttatgactcttgttattattattgtgatggcatattcttcaccgcagtcttgaccacagcattagaatttactaattctcctgatgggcacacagcacaccagcagctttctcactgcagtgagctcagccttgcgtggaacctgcgccccacctgcactggcggcatgcccgagttgtggcgctgtaggcacaccatgtgcccccttcttaagtgttctgaagtggtaggaggagggagctgtgactaaaataaggtgggctgggcatcatggacccaacaccataaatcattttacaacagatcaggaaagtccttccacctcttttcagagctgtgctataattttccttttcagtagagaaggattaccgggcctctcccttcttggcagtagcaagtacgccagaagctggcaggcttccagagaagggagagccagtttcatttcccacaagtagaaataatactcatgaatc

SEQ ID NO: 137735 - DNA, 469 bp, Homo sapiens
aggtggggagatcacttgaggtcaggagttccagaccagcctggccaacatggtgaaacctcatctctatcaaaaatacaaaaattagccaggcatggtggtatgcacctgtagtcccagctactcaggtgtctgaggcaggaaaatcgcttgaacctggaaggcataggttgcaatgagccaagattgcaccactgccttccagcttgagcaacagagcgagactcttatctccaaaaaacaaacaaacaaacaaacaacaacaaaaaaattggaatgactaaaacattagtattaattctcttacaaatgaaattcctgaatcaaatgatatatcagatactaaagcctctactactgaagcaggacattaaaaatctgctttgccctataaaatgctcttcattccaagacataaaaacaaagtgtgagtctttcacctacctcatattgactcttacggtggaaa

SEQ ID NO: 137736 - DNA, 209 bp, Homo sapiens
agtgtttgttaactccaaacaccaataaatgctgataaataatgctattaaaaacgtgttattgctctgacactttgttataacatctttcctcttacgttttccccatgtaacatttactttaaaaggccccagccaaaagccgaacgccaataaaactgcaccaagtctcccagaacatcttcatttatgaaacagtcaaagactca

SEQ ID NO: 137737 - DNA, 659 bp, Homo sapiens
agctggtacagataaccataccacattgcctgtttttccaaaaaattacatttgggtgatatcaaatgcaaatttttgaactgcattgacagaagtcaggcatgtttagagagttagtaaactttttcagaccacagatcagcattaagtgaaatactgcttcagccactgataccttcatggcagataagtattatactgacttctttttagagacacttctgttcacacacaagacacagaatttgttgaataaagaggaatttgaatgctcatctttgtccgtttctaaccttaggaagaatgaagtttacattatccttaaaaggtattatttgactaatgttaacagcttgtacagaatatttgactattgtccttagataacatttatcaaatattatattgaatgagtattttattctagtggaggaaaatctctcatcatgccttcctactcgtggtttgttttattattatgacaaatggcacatgggtgatcacaatccacttgcaagaaacactgatattctcttgtaactaagtcaaagcttatgccataatgccaacactgttgtcctccttgagtttatcctctctagctttctttgtaaaggcctaaatcagccttgagtacagatatttaaaaagaagacagg

SEQ ID NO: 137738 - DNA, 121 bp, Homo sapiens
agtgatccacccacctcggcctcccaaagtgttgggattacaagcatgagccactgcgcctggccctaagtcttcaagttctgatgtctgttttacccttagagtacatctcagttcagac

SEQ ID NO: 137739 - DNA, 364 bp, Homo sapiens
acggacaccttggccaagagagatttcagcattatctattacgtctaaattgttacaaggagaaggtgttcatatgttagctgtgtaactgagagataactgatatgactaaagtgcttgtctctgggtagaaagcccgtgaggtggattttcccacttccctctgttgtctataatgaatgaccactacatttttaaccccaaaagcttctcatatgaagaggagacttctttcagcagcaggcagggcaccttctctgaagctcgccagcaagcaccaaccgactccctggccacggccaggctgacgcccaggcagtgaccccacacgggagggctctcgaaaaggctggagctcccatga

SEQ ID NO: 137740 - DNA, 521 bp, Homo sapiens
aggctggggtgcagtggctgatcttggctcactgcaagctcactcccgggttcgcgccattctcctgcctcagcctcctgagtagctgggactacggcgcctgccaccatgcccggctaattttttgtatttttagtagagacggggtttcaccgtgttggccaggatggtctcgatctcctgacctcgtgatctgtccgcctcggcctcccaaagtgctgggattacaggcgtgagccaccacgcctggccatctcagtctgatcttctgtaaactgtggatgaattttataataagctgcctgatttggtattgtaagaatcaaataagtgaatgcatctactcaaatatgataagacaagatttagtggtacttagtaagattaaattagtcctaggtaatgatattttaaagaaaactcatctgtatgcaaatcttctaaataaaatttctagcaaaactaatccagttatgagaaaaaatagtgccctatgaacagttttactttaggattgcaag

SEQ ID NO: 137741 - DNA, 247 bp, Homo sapiens
tgtgcccatagtcccacagcaggtaaggaaatgagccaggatttgggcctatgcctgtctgatgtgccaggtcaatttcctttgcagaggctgcctttaattaattaattaattaattttgagacagagtctcgctctgttgcccagactggtctcaaactcctggcctcaagcaatctctcagccttgacctcccaaagtgggtggatcatgaggtcaggagtttgagaccagcctgactaacata

SEQ ID NO: 137742 - DNA, 466 bp, Homo sapiens
cttttcccttaggactcggctcaagcagctgagcatagtgactcaggcctgtaatcccagctactcgggaggctgaggtgggagtatcacaggagcccaggaggccgtggttgtgccactgcactccagtatgagcaacagagtgagaccctgtctcaaaatctcaaaaccaaccaatcatccaaccctcagctcaggcctcacttgcaagaattttttccaaatccccaggttggagagtcttaacacttagcgctaccattgtagtaccaatgtattgaagtaatacgtttttgcattatgcatgtctccagataggttgtgaacttgcagatggcattgaatatcttcttcacctgcctggtactaatggataccagaaataaacctgttcagaagaacatacttgaagccctgctaatggagtccattaagtagaagttaattgtttttctttctttctttt

SEQ ID NO: 137743 - DNA, 216 bp, Homo sapiens
ctgccccccaccccgacacacacatgcagtcatacatggcccctatcctattcctgtggctgcagccaaactgttccccacatccccctgtgcacctactgtgtgcccagcacccacagactcaggcaccacgtgcacgtttaacagaagcctcagccaggcagagcgaggaagacaaccacagtaataaaccagatactctcaaagtcagagcgg

SEQ ID NO: 137744 - DNA, 251 bp, Homo sapiens
tccaaagaaaccatatttcaccttttaaattttcctttagaattaaaaaaattaattttatatatttcggatcctcagataaaatggataagatgtgtagaattttatttaaatcaaatgatgtaagttggccgagcatggtggctcatgcctgtaatcctagctctttgggaagccaagatgggtggatcgcttgagctcaggagttcaagaccagcctgggcaacatggtgaaaccccgtctctacaaa

SEQ ID NO: 137745 - DNA, 245 bp, Homo sapiens
tcaatcagcttctcaggctcatacatagatttaattagtctccagtactgacagtttagtgcatttattcattaagcatcaatattgctgaacaaatgtaaataaaatatagacagagatgctttaaaggggcagtcacagaaacatctgggcgagataatgaggctgggaaagatgtgaatgttaatgagactcccaagctgctggaggagctccagctcttggaagcaagggatctcagtaac

SEQ ID NO: 137746 - DNA, 414 bp, Homo sapiens
tacgatcagctcggtacccgcgagaccccaactgcaatgaagataacataaaaatattaagtctagaaccaagaaatctgttcggggaaaagtaagtgaatattcttcttaaacgatatattaggcttaatttttatctgtttaaaaattttagataaatttgcaaaataattccttctttactatgatatgtaaggctatatattgtaggagattaaatacaaggagttaagcatgtatttaacaattcaaggcaatgtaccaaatgaatggcaaaaactggagagctaaatatgttcagaaagaaaagaaatcactttgaaacaaagtagccaaggaaggaagtgctaggatttgccagctgggcactgaaagagaaagcatcagaaagaattaagagagaatgggtgaact

SEQ ID NO: 137747 - DNA, 852 bp, Homo sapiens
gaagaagataattattaaattgacctcttaggtcatttgcagtcttataatttgaagactttaaaagtctcttaataaatattactggctttcacagttctctcttagtttttaacatactaacgagttattctttttacattttttcttgtgaagttgaagcgtaatagtttgctgagtgttatagtcaagatgaacactgattatcagaaaataaagatttccagggagactggtagttacgtgaaaaaataatagaattcttttgcctctggttttcattccctttgtataaatacaaatgggaatggtttttatctttacattgaaattaaaggtagtacttattaaatattttcttatggattgtcctatattgtttcaggctgaggaaaattggatttataaaattggttgaaatatctgtactttaaaaaatactacttatgctttctgtctgaagtgagaaaaccctattttcagaagctcgtaaaactggcttaatttttcattattggtcttggagaattgtacagttaaaatatattttattatgtattacaagcaggattctgaactattcttggaaagttagcaagtaaaacctagagaagaaggtgaaaatcacggcttccgtaaatctctagatgtagttttccgtgtataggaaaacatgggatagaggagcaagttaaacacaccatgagaaaacaatggattgtactccgaatgtgggacattgcacagaacatttgacctgggttcttttaaattcatgttatgaaaagaaaaaaagacaggagatctgttctagattaaaagagaatgaagagatacaggaaccaaatgcca

SEQ ID NO: 137748 - DNA, 308 bp, Homo sapiens
atgaacaagaaacacaaaaacaaaaacgctaaaaattcttgaagagatgcaaaatcaccaataaggaaagtaattccagttaaagagagatatcacctgaattcctattaggctgatgaaaaattaagcagctgaatgttgcctactgaaggctagaatacaaggttatgtagtagcagctgaatgttgcctactgaaggctagaatataaggttatgtagtagcagctaaatgctgcctactgaaggctagaatataaggttatgtagtagcagctgaatgctgcctagtgatggctagaatataag

SEQ ID NO: 137749 - DNA, 347 bp, Homo sapiens
aaaaaaatctgttaggaccatttggtctagagtgcactttgacttcaatatctctttgttgattctctatctggataatctgttgattgctgaaagtgtatattgaggcaccctaatattatcacatcacattctatctctcctaggaccattaatgcttgctttatgtatccaggagttccattgttgggccatgtatgtttacagttttcatatcctcctgctctattgacccctttatcattatataatggccttctctatcttttcttactgttttgatttaacatctatcatttttggtttccatctgcatgaaatatctttttccgtaccttccctttcag

SEQ ID NO: 137750 - DNA, 228 bp, Homo sapiens
ctgggattataggcgtgagccaccacgcctggccctttttctcttgacttcagtagtaaacagacttctggaaagagggctcctcctctcccttaaattaattcagagggcaagaaacttattaaattattttgttaaagctctttcttttgccctgtagggagaatagtgtagctaggagtggtagaattcaacccaaacccctgtttaaaatatggccatagttag

SEQ ID NO: 137751 - DNA, 198 bp, Homo sapiens
gaatggatggtctatgtcaagactcttgatttttttgcctttaacttatgtaaaaagaacagaatgttcagagttcttaggaaagtttgtgaataaagtgaccacatcccctgatctactgaaacactgaattaagatcagagacttgcgagtttgtattttttccatttcagcaaatccctaggtgcccttggattt

SEQ ID NO: 137752 - DNA, 412 bp, Homo sapiens
acccacaggggaaccacatgatcaacttctcagacacaggctttaaaataactgtgtcaacctgaaaaaaatatactgaaattgagaattcaataaatggatttttaaaattagacacagatgaaaaaagttgataaactgctatataggtcagaattctggccaaacacagtggctcatgcctgtaatcccagcacttggggaggccgaggcgggtggatcacctgaggtcaagagttcaagaccagcctgaccaacatggtgaaaccccatctccactaaaaatacaaaaattagctgggtgtggtggtgggtgcctgtaatcccagctactcaggaggctgaggcaggagaattgcttgaaccccggaggcggaggttgcagtgagctaagatcatgccactgcactcc

SEQ ID NO: 137753 - DNA, 304 bp, Homo sapiens
tgcccaccagaccataatgagccagtctgctcagcctccacactcccaaggacggactactgccggagctgctggcagctgctggaggccacagtgttgccctgggtccacccagcacttgaaccctgaccagaaccctgaacccagcatggtcaggcaggaggctggggccttgggcctcagggggacctggcaaggcctaccccaggaggtcaggctggaaactggaggagactcaactcatgcagaagctcttagctgagtacagcttcctctcccccagtgcatttaagctgcgctttac

SEQ ID NO: 137754 - DNA, 292 bp, Homo sapiens
gtgtgttatgtaggaaattaccattcctgttgtctgtgtaggatgttctaaagatgtagccaggaatctcagaggagagagagaagagacagagagagagagacagacagagagtcagacttgtagttctaatattttcttgcttttgcctctgcctctggtcatacattggattgtttttctgcttttgttccttggggtggcatctgtcttcaggagaaatcactccatagtcaaacacagattgctgaactgtggcatttttgctgttactgttatcctgaatttactg

SEQ ID NO: 137755 - DNA, 502 bp, Homo sapiens
aatcctcctcctccctcctcctctattgaaatgatggtgacaagtaaatggcagttttaaaatatctttacttagcaaaatttaaaaaaaaatttttttaatggcagcccatgtcatggtccccagtggtttttattgtttctatgtttctttttatgggtctataaaatccacaagtctgggaaccacttgttaaatcacataaaacaacaaattaaaaagataattcaaaggatcgattaaatacacgatccacatctcttcttcctttcactgacttatgtaatggaaaattgagctcatttatccttgcctccaggcttagcataaatttaatcagaagattcatcttccttcatatgaaagacttgtcatgtgagataattctagaaaattctgttacaaatactaatttatctcacttcgtaaagaattcaccaagccggtggtggtggctcacgcctgtaatcctagcactttgggaggctgaggcgggcagatc

SEQ ID NO: 137756 - DNA, 347 bp, Homo sapiens
tgtataagagagagaattagaataaatttaaatatccattaatagaagaatggctaaattatggaccaatcatactgtggaataccacacattccttaaaaaggttgaggcagtcatatgtactaacatgaaatgatttccaagattggagaatggagaaaagcaaggcaggataaacgcccacctgggagtgacacagagacagagaaacctcccccacccagggaagcagctctgcagagttggcaggatcaggggctagtctgaacccctagcacagaacactcacctcacggaagagtggccagaatgttttccacataggtcctggtcctcacttctcctca

SEQ ID NO: 137757 - DNA, 315 bp, Homo sapiens
taggtatgagggcatactgaagtgtatgtgtgtacagatgtggcatggtgggggatgggaggggttgtccatgttcttcttaagggccacggattatactcttaccactctgacagaggagaaccctttacttcttcagcatcagaatccttatgcccagtaaccaatgaggctgtgttccaggcctcaacaagaagggacccagacatgactactctttttctctctggccttccattgccttctctgtttatctccacaagcgttctcattttgcctttcttttctttttttttccctctgctattctgctta

SEQ ID NO: 137758 - DNA, 441 bp, Homo sapiens
tcatttttcctaaccagttgcatgtaacaagctgtcggtgtatatctgtggaaatgaatttgtcatcagtgatagcactgcaatatgatgtaattgatacaattcacttatctcacaaaataagcttgctgtttctcctggggggccagggtggttgtatagatcagatctgactttgtccacgtcttctctctgctcaacaaagtgaaggaatcaagccttgtgtgatcaccacagtctgctgtatccagcacgttctcttgtacacgctgggtgcccagtacatccttgcagatgagtgaatggcctgcctttccgtaatacaggctggcgaagcttccctgcgctcatgtctcagaagagatgctctctgctccccgtgcaagtggaatcgtctccctttggagtcattgagaggtgacaggggccgctgtgagtggc

SEQ ID NO: 137759 - DNA, 225 bp, Homo sapiens
tgcctagtgctcactacttgctcgtaagtggaacagtccatcagcattttctagctcatagtgttccaaccccagggcactcaggcccctaacacagagcaggaccagataagaggcagatgaggctgggcaacattcctcatgggactccagaaattcatgaacatctggccaaattccttctagatttaggatcacacctggagtcaaccaactccccattaa

SEQ ID NO: 137760 - DNA, 303 bp, Homo sapiens
ggaagtctacctcttccatactgaaattccatttcagtagccaaattaaaaaaactcctactgggcatcttcctaaaatagatggtgtatttcttgtttttgatgagcctcagggttatcagcaggaacaacataatacagtggggctccagaggcaatcaaaccataggaggctggcttctcaaagttgctcagccttaaaggagataatatgtgtagcttcttgctgttgtttttcatttggtgcttctaactgggtaattagttggattaataagcactgtctgttacctaatttccaga

SEQ ID NO: 137761 - DNA, 421 bp, Homo sapiens
tcatgttcctggttatccctatgcccaaagcttgcctgaggataccctgtggttccacaaaaatacattaccaccacacaatcctagccctgtccatgctggtgactgccagcattgcttccaaactagagcctcaagaaacaagcctaagcactcagatttttctctcaggaattcggggacacctgttgttctatctttaaccagcaggtagcgccaactccccagctaggatgtcaccttggcctcatccctgaagtcggcaccctgccttctattcccactagctatcagcctctaatccatcagcctcatgtgcagcaactgtgtatcagagagagctgtctgagaaatagctttgtttggctgacctaaaagggatgtaaaagaacagcctttttataaaaatagggctgtactt

SEQ ID NO: 137762 - DNA, 309 bp, Homo sapiens
ggaattaatgaaatatgccaaaacagtgtcttgtcaagaaaaacacaatacaggcaatcattgtgcttaaaaaaatactatggtccctttatataccgttgaagccaacccagttataactgacttttactgttaagaactaggctatttgggaggaatgggagaaataattttatcccttgcatatctaaatgcatgtcataatgagccttcatataataggggtcaactgtacattcagtggaaagggaatcattaaaaggcaccctgcctctcaacacacgaagcacttcctctacagcttggcca

SEQ ID NO: 137763 - DNA, 377 bp, Homo sapiens
tctctcccaaggggaagaaaataggcaagaatgcaaagatataaacaaaacaactgtcatgaagttgtttattacagtaaaaaaaaagaattggaagtactcaaatatccatcaacttaaataaaattaaataaatgatgattcacatgcagtcttggaggatgataatgttgatcaagggttcttccctacaggccaggactgagctgcaggggttcaaatgcagctctctcacagggctattgatggattctttgaggctccgtggggtcctccgaccacagctccctgttgtggtgagcactatgggggcaactagtggtaccctcagctgctaactgctggcattcccttgccctggcaggccaccctctttg

SEQ ID NO: 137764 - DNA, 240 bp, Homo sapiens
ggaatagtgctggtgctaacgtgtggtctagtttagaagctgcacaatggctgaagtatttcattgcttgggaagtgaaatggaaagagtagagggactggaaggtgcccagctgtcattattatagtgtctctttgggaccatgcacgaatctctggagatgaccagcataaccccatttcacctttaccactgccactagcttatcaccagcttagtgggagggagcactggctgatg

SEQ ID NO: 137765 - DNA, 429 bp, Homo sapiens
ggaagaatcaaaattattatgtcaacatgaggatgaaagttatgctctgttgtttctcataacatttgtgtgtgtgtgggtgggtgggtgtgtgtgaaaggtaggatcacctctctgtgcctcagtctccccatcatccttcggtggtagatcaatgctatctgatgaggccttttttgggatcacccactccaacatgcatgtcctttctctgtcccctcctggtgcctgtattagtctgttctcacattgatgtaaaggactacctgaggctggctaatgtataaagaaaagaggtttaattggctcatggttccgcaggccatacaggaagcccagttagggaggcctaaggaaacttaaaatcatggcagaagatgaaagggaagcaggcatgttctgcatggctggagtaggaggcaaggagcg

SEQ ID NO: 137766 - DNA, 1813 bp, Homo sapiens
acgaggaggaagcagggctgcccagggaaatgccaccctggagaggcccctgtccctccctctccgtccttccctgtgcccctccgtccctcccatgacacgatccatcgcccgatcaccatcgtccagtcaacgcccgaagcccgagtacacatccgtccatgacgtgacaggcgagcacacattctgattagatagcagagagcatcatagagacaaagagtcagggcaggagcccaggtcggaagcgatgtaactcacagagaaggaacagaacgagcgagatgatgacacaagaacaatagagcaaccgagagacacatcacacagaacaccatgacaataccccgaagaacacacacgaacggggagacaagaataggaggagacagaatcacaagagaagacgagcacacatgagcggacgcaactcaaacagtatgagaatgacaatataatacacatagaacagagacatgggcatcacacgagaccaagtcaacacaaccaggaacgcttgaaaaatacacaagagacctgggagcgcagagaaagacacaggcaaatgctgacagacaacaaaaacagaccatgagagaacacaagagaccacacacggaaaaccacaccggggaagaccacagagaaattccgaatacagccagcacgagcgcaaagagaaagaggaaagaagagagagagaaataacagacaaaaaagaaagaagaaaccacacacaatccaatcaacaaaagaaaaaaacacacacgaaataaaagaaaaagaaacgaactacaaaagccaactaatcaattagaagagcaaacaaaggaaacaaaaaaaaacgaacggcaacaagacacatcaagaaaaagcaacataaaaggactataacacacgactattaaaacacatggaaaaagaaacaaccactcggcatcaatacaacaaacagacgacaaaagcaaaaagaacagaacacaacacactacgaagacaacagcaaaaaaaaaaaaggaataaagagaagaccaaaaacagaaatgagaacaaaaacaaagcacaacacgaaaaacaaagcaagaaaactgaaacaaagaaagaaaaacactgacaactatagtataaaaggacaaccaataaaaagaccaaccacaatgaacgcaacaagccaaaaaaaaagacaaacaaagaaacacaacacacacaacacaagaaaaaagcacaaacaaaaactagcagtcaacacacaaacaaagaagaaaagcagagaagcagaacaaacaactgaaaacacaccacactaagtagacaacaaaaaacgcaagaccacaagaagacagacagcagaaacaaacagccaacacaagaacgcgagaaaacgaacaacaagcaacacaacgacaccagagagagcagacaacagaagagaaacgccaccaaacacagaccccaacaaacggaaaaacaacacacgaagaacaaacagtacaataagatcaacgacatcaaaaagagacgcaaacacagaaaacacaaatacaaaatgacaagcgacaaaacaccaaacaaagaatgagcacaaaccaaacaacacacaaaacactacacaaagcaaacaaaaaccccgacacacagcagcgcccacaaaaccacaacaacaacgaaccaaacaaaacaaaccaaaacaaaaaacgaccagaaacgaaaaaacacaacaacaaaaagaaaacaaaaaacaagatacaaaaaaaaagaatcaaacataaaacgagaaacacaccaagcatagcagcacacaagagcagacgcc

SEQ ID NO: 137767 - DNA, 279 bp, Homo sapiens
ggtcacagccagggacatgagaggaccaaggccaggtccagaagcagggaagaaccagggccagggcagggacatggcagggccagggccatggcaggatcagggtcagcagaaggccagggcagggctagggtggcacagggccaaggcagggcagggtcagtgtagagcaaggaacgggccagggtatggcagggcagggacagggaggtccagggccagagtcaggtccaggacatggacagggcagggccagaaacatggcaggaccagaaaggg

SEQ ID NO: 137768 - DNA, 195 bp, Homo sapiens
tcatgtctcttatctgcccaaactcagtctatcagtgatttagggaagacaatttgcagtccactcgtcacctacaaaggttaatttttgttcataccttactctacggtggttaaatattgtcagctttatgaaaggcactaaaacactgagaattttttgtttgtttgtttttgagacggagttttgctttgt

SEQ ID NO: 137769 - DNA, 476 bp, Homo sapiens
gcttggtcacctccattggtaaccaatattaaaggttactttaatattttcctgtataactgtaagcctggatggcagtgtttatgttgagaatagtttaaatttaggtggccttaaagatatctctgaggtgaacaccagaagagtaaatcatgcttttttactttgttatctttgatattgacagggtgttgagctgaaatttttcataaacatacatagctgccagtagtttcaagtactactagcatttaacacccataagtagttatcattttgcataatctttggcatctcaagttgggtattttcatcaggggctaggaaaatgggaaactagttctaataccgaatttataattgaacttatcaaactgattttaaccaggaacttagacttttcccaattgtagtgttggattttaagaaattattaaacatctttgttatcattaacaaaatgacttcagaattaa

SEQ ID NO: 137770 - DNA, 263 bp, Homo sapiens
acatggcaagaggcaggcaagaacggcagcccccctctcctctgcccctctgtgccacaaaggccaatattcagggggtcattacccagaaggacaccaggacctcatcagtggccaggccccaacccagctctgctcagtctcctagacaaccctccacggcctcaccgagatgggccttcagctttagctccaatgccacctcctccaggaagccctccctgaccacagagctgttgctgttggtcccggctctgtagatg

SEQ ID NO: 137771 - DNA, 511 bp, Homo sapiens
gcatagttttaattcatttactaatgtgagttattttgtccatttaacaaattaggaaaataatcgtgccaacttcacaggtttgttctaaagagaatgaaaaggtatacattttaaaaatacttagtgcttagcagatggtaagcactcaataaatgttagcagttgtcaacatgttaagaaaaaaaattggactatccaggcttgttggaaaaagaaataatgaagaaatgagattttttaggcagaaagtgaaatatccagaattttttattaaagactgtcactgaatagttccacactagaattaaaaaaaaaaagaaaaaaaaaaatgttgttgggcgcggcccggcgcccccggaaaagagcttttcaagaacacttgtttggggacgcgcggggcccagaatagtttaggtgaaccagtgggcaaagacggtgttcccagaagaaaaccgggggagggaacaaggtggcttgggttttctcacaaataaaaaaggccccgggg

SEQ ID NO: 137772 - DNA, 218 bp, Homo sapiens
atgtttgagtatttaggtcattctactttctgctgttacatatagtaattctgtgattaacatttttgctgaaactgacatttttcactgttgcataagatagcttcccaggagtactaggtagacgtatataaacatttaatacatgttcataaacttgaaaaagttttgtcagtttatacaactgtcataatgtatgagtgttcatattataattt

SEQ ID NO: 137773 - DNA, 371 bp, Homo sapiens
attgccccctatcatttggagtaattgactgtgttcaataatatttaatagttcctttatgcattttagtatatttgtcttgataaagtatatgcagaaattggagttaaaaaggatcttgtaaatcagattatagttctcactcctgtacttgagccagcctaggtacattaaatatctgtctagtttaaataattctagaaaagattccacaattttccttagtaacccaaatatgtcattgccttgatttaagccattttcttctggtttgtcctaaatagagatggagaacagctggttaccattcccaatataataacccatatatttctagaacattataaagcattccctcaggtttttcttca

SEQ ID NO: 137774 - DNA, 672 bp, Homo sapiens
tcagcctcccaagtacctgggattacaggcatgtgccaccatgcctggctaattttgtatttttagtagagacggggttttgtcatgttggccaggctggtcttgaactcctcgccttaagagatgtgcccgctttggcctcccaaagtgctggaattacaggcgtaagccattgtgcctggccatgcatctcattttcaaacagtccctatacctttgtcatttaacgttctattcttttagtatgtgaaaaccaaactctaatttacaagtcacaaagaattatccaagacagactcccattgtggacatgtatgtggcattgctgattcacagctactgtactgaagccttggccaccctggaggaccctctctctttttgctggacccttctgcacagtgactgcagtagggagagtcagacctgggagtgggggagaggttttttggattcctctctgggtagatgtgtgttgggaagtagtgaaatgttgatagctgcctggctcatctgatccagtaaacataactggtgcgtttgggttgaaagaaattgggctttccttatcagttctcagttataagaacatcagtcagcagtacattagacttaagctttgcattccttgcgtttttttgtttgtttttctcttcctggaaaaaagtttgc

SEQ ID NO: 137775 - DNA, 207 bp, Homo sapiens
ggcctggtgggatctgaaccgtgaaaggccttcattgttattttttattattgacatacaaaagactgcatacatttaaagtctacatttgatagatttttatgtatgcatacagctttgaaatcatcaccacaatcaaagtgataaacaagtctttcactctcaaaagatttgtgtaagacctttaaagagggaaagtctggcctg

SEQ ID NO: 137776 - DNA, 478 bp, Homo sapiens
ctcaagcaaccctccctcctcagccccccaaagtgttgggattacaggcatgagccactgcacctggccctattctttgttttcaagacaattttggctattctgggttcctttagatgatatttttgtcttaattttctgaggcaatttattggttttaatattttcctaggaaacgggacagaattaattaattaaattcaatattttgtttaagtggatctggaaggagacctttctgtagttatcagtcatctttgactacttcattctcaccacatggtatagggatcttttcagctgtagctcttaaactcctcagaaagtctatgttcacttaactgtctgcattgctattttatagaagcaaatgagtattgtcatgttgtagctgcagtgacacagagttcccatggactgtaactcaagattatgtgtagctagggctagaatgtttctcaaacagaattacttaaaa

SEQ ID NO: 137777 - DNA, 408 bp, Homo sapiens
ttctcatactggatgtctatccaagttcagcaggggattctgctcattgtaacaactccgaccatggctgatagacgtttcctctcggcacatgcttccacagttgctcactgccaaggaaatgtggcagactgctccctggctctcagagctcctgccaggaatggcaaactttccttagcttacatttcactggcaaaggaaaccgagtggccttctctaagcatggcactcctaccatgtgcccacaatgggagatgcgtttgtgaacagcccagtgaccgccacaggatcctcaacttctttagtcattgtcattcctttgaggcgcaagttccaaagaatcattagagaagccatcataattcagaaagagaggaaagagaccatctgtggggttggcactat

SEQ ID NO: 137778 - DNA, 231 bp, Homo sapiens
cccctttttccaggtaaggtaacttgtccccaggttccagggattgagatgtaaacatggggggaccttattctatataccacaggtgcaatgaactatgaggatagcatgaaggtgctgaaaggcagatggtagtataggaaggaatatccaagaaaaaaggagtagaggggaaggcatagaggcatgaaaaagaattaagttatttatggctggaccttgcaattggaa

SEQ ID NO: 137779 - DNA, 231 bp, Homo sapiens
atcgctcggctgacagagggcatgtcatgccggaagatcgcacagctggccgtgtcctggcaggccacggcgtatgcctccaaggacggggtcctgaccgaggccatgatggacgcctgcgtgcaagactttgtccagcagcaccagcagatgatgcgctggctgaagggggagaggcctgggcccgaggacgagcaaccctcatcctgagtccatggggagaccacacct

SEQ ID NO: 137780 - DNA, 581 bp, Homo sapiens
tttcagaactcagtgagactctccatgtgcactgagcatgcactgtgagctaagccctttgccaggttttgcaagaaatcataaaggcagtattagatatggtctctgcccttccagagcttacagtatgagagggaagataaatatctactcctccgaccctcatctcccacacatgatgaaaagtgagtgactaacttctgctatctcatttacattgacctcagatggtgaatcagagtctagacaagaaaatcacacatgtacatggggaaactgaggaaagtttaatgaaaggataatttgtaaagattggacagagttaagagggaccaagaagagatggtgaagtgtcccaggactaacaatagcaggaagtccttacacccaaaggcctgaaagagcaagaagagggagtatttatcagaggccagagagagagctgaaactgcaagagatggcctctctcaggaaggaataaagctaggtcctctctgtagcctacaggaagtgagtcaggggcatttagtaccctaacctctgtcttcagtaccctaacctctctcttcactttctctcta

SEQ ID NO: 137781 - DNA, 206 bp, Homo sapiens
tgcagagcatatacactggagctggggaggctgatgcagtggacggcaggattgaaattatttaggagttgaagtgccacaagatgaatggtgtgaagctgacaggcacaatctcaagctagatctgatccacagatgtgatcctgaaggtggcacacgcgtactgtggagtaccagcagcctagcatacagcccatctcatacat

SEQ ID NO: 137782 - DNA, 303 bp, Homo sapiens
ctcacccgcctcacattttccgccaacctcctaactggctcccccagcacactcgccatcgggctccttcttaaggcggaaggtgcccgggatcggggagggaaaccaccgaattcgatgacacgatgggtttcttctccccacaactgacccctcaacccgtctccaaatggcgattctaaagcccaatttcatctccccgagaacaaaacttgttaacttttaatccccgcatccgtgcggccagcatgtactccgcgccgggcactgggttgcccgtgacatatgctcattaaacattta

SEQ ID NO: 137783 - DNA, 154 bp, Homo sapiens
ttcacccttgaggaggacacgggacttccccaggaacctcccgtcaatcctgttgaggctcctgaaatggtggaatgacgtggactttggaaccacgcagacctgggtttaaatcccaggccaggcacggtggctcatgactgtaatcccaaca

SEQ ID NO: 137784 - DNA, 532 bp, Homo sapiens
tttgcatccctgtgtcagaacagttcatgtaccccataaatatatacacctaatatatacccgaaaattatgcaaaatgaaacatataaaaatgcaagaaataagtgtcttttaaaagtacgaaaatagaaagctttttcttttctttctgttatttgtgtctcatttgctgtcttgctgtgtctcacattctgtggtggtttttcatttcctgttatgattccatgtaaagaaaaattaaaattttaagttattagcatgggttttactatttatatttatattgtcacaataccgttttaaatgcaaacatatgcatttaacttgtataaagaatcatcaaaattacacagtttgcattttatagctcatgcatgcatatattacttttgccagaacagtgaaaacttgcacaaaactaaactgttttaattcatttcttgatatatgcacattctatcaagactctctagatttggcttactgatgagtaaagaaggactgaaggaaaagaaattatggcttgcctata

SEQ ID NO: 137785 - DNA, 363 bp, Homo sapiens
gtggtgggcgcctgtaatcccagatgcttgggaggctgaggcaggagaattgcttgaacccatgaggcagaagttgcagtgagctgacagcgcgcacagtcttggctcactgcaacctctgcctctaaaaaagttttttttagacctctgttattgtcacaactttaaaaagttttcaggctcaaattctagataagtagaaatttttattgtttacccttacttaaatttgaggtttccttcagtgcccaatccttgtgactgctagctaatttcccaaagtcataaagaagtctctcaaaaataactaatattcagccaggcgtggtggctcacgcctgtaatcctagcactttgggaggc

SEQ ID NO: 137786 - DNA, 258 bp, Homo sapiens
ttcttggatctgtggtttgatgtttttcctcagttttggagaattttcagccttcgtctgttcttcgaatatttcttctgttccatttctccctttccgcttttctgaaactgaaattacatgtaggttagatcatttcattgtatcctttatacctcttaccttctctttggtatttttttataaatctttttgcttctctctgcttcattctagatacttccttttgacctatttaccagctcactaattctctct

SEQ ID NO: 137787 - DNA, 356 bp, Homo sapiens
actagtgagacaaactggacagccatgtcacagaggactcaggctcacacatatttctctgcttgcttcttcatttccaaaagtcagtagcaagcattattgtcacagttcctagtcacaggttctccatagaaactacaggggctgaggaatatatctggggagaagagacaatctgtgacatggacttaaatatagcattgaaaggagtgttgagggaaaggctcgtgtattgcagaatgatggttagttatgagagagagctagagacaggcctcagggctttttttctgtctgttccctttcctaaaatgtattattttccaaccacaaagaagactttttatctcccagtg

SEQ ID NO: 137788 - DNA, 250 bp, Homo sapiens
cattctcctgcctcagcctcccagttagctgggactacaggctcctgccaccatgctcggctaattttttgtatttttagtagagacggggtttcatcctgttagccatgatggtcttgatctcctgacctcgtgatccacccgcctcggcctcccaaagggattacaggcatgagccatctcctttttcattgtttcttctctctttttagccgtctttcatatttctcttaacatttttatttttgag

SEQ ID NO: 137789 - DNA, 852 bp, Homo sapiens
tagaacatttttcattgatgcctctaatcagagcttgactgccattcctttggagatcttcacattcacagaattagaagaagtgcatttggagaataaccagattgaagaaattccccaggagattcagcgtttaaagaacatcagggtcctctacctggataagaacaacctgaggagcctgtgcccggcgctggggctgctgagcagcctggagagcctggacctgagctacaaccccatcttctcctcctcccttgtcgttgtcagcttcctccacgccctgcgcgagctccggctctaccagaccgacctgaaggaaattcccgtcgtcatctttaaaaacctccaccatctcgagctgctcggactgaccggaaaccacctgaaatgtctgcccaaggaaatagtgaaccagaccaagctgagggagatctacctgaagcgaaaccagtttgaagttttcccccaggagctctgtgttctctacaccctggaaatcattgacctggacgagaacaaaataggtgccatcccagaagagatcggacacctgacggggctgcagaagttctatatggcttctaacaaccttcccgttctgcccgcgtccttgtgccagtgtagccaactgtcggtgctcgatttatcccacaacctcctccactccatcccgaagagcttcgccgagctcaggaagatgacggaaatcgggctgagcgggaaccgcctggagaaggtgccacgcctcatttgcaggtggacctcgctgcacctgctctacctgggaaacaccggcctgcacaggctgcggggctccttcaggtgcctggtcaacttgcgcttcctgga

SEQ ID NO: 137790 - DNA, 160 bp, Homo sapiens
ttttagactcagcaacatcacagacaagaaaggaatcctatggattaaagttcttcactataagttttttttttcctccagttcaaatgggtaacgtgccaatgtagtaaaggtttgagggaggcacgtctgacacaggcacatgaacacccagtcatca

SEQ ID NO: 137791 - DNA, 1944 bp, Homo sapiens
caacactttaggaggccaaggcaggaggatcacttgaggtcaagagttcaagaccaacctggtcaatataataagaacctgtctttatgacttcttttttttttttaattatccaggcatggtggtacacaccagtagtcccagctacttgggaagcttaggcgggagggttacttgaacccaggaggtcaaggcttcagtaagcagtgattgtggtactacattcctgtctgggtgacagagtgagaccctgtctcaacaacaaaaaaggatctttccacctcagcctctctggtagctaggactacaggcacacagcactatgcccagctaataaaaaataataattttttatagaggtggggtccgctatattttccaggctagtcccaatctcatagcttcaagcagtcgtccagccttgacctctcaaaatgctgggattacaggtgtaagccaccgtgccctgcccatgataaatattttaattttgcctgataagtcataaaaagtttattcaacaccttaaatagatttctcaattttttaaaaatattaaacctttgaaatcgaaagtaatttttggatttcacccctttattgcaaggtttttgatgtctgtgggaaaaacccctgaattgcttgtgaaactctggatatgtaattttttttctttttctgaacagagtaaaatcttggatgggccatgatccaaaaatcatggttttgaaagtagaccgtactataagccataatcacaaatctgaggtaatagttgtgaaagtgtttaaaacatcctgaaaacaatgttgaaaaaaaaaatctatgataaaaactataaaatctctgcatatgttatactgtattgaacttgaaactttgaaggaattagagtagataagacattaatggtagaagagaaaccacaggggtgaattatatcctacaaaagagaaatcttcatgatttaacctttttttctgagtgacttttattttgccttattaacagaaacctgagaaagtatgttgctttgtattaaatggttgagaccattatttgatataaaagctgaaaatttaatttttgtattttggagaattctgtggttccaagtaattgaaagaatgactaaagctgtatgtcatagaccctgctaaaatgaaataacttgttgggaacattccatgcagatttccaaaatgtattttaccttattattagagaaagaaaataaacttttaaaataatctgataactagcattcatatatttaataagtattttggttacagaagggaaggtgatactgtacattgtaactgctgagacttttttttaaccaatgtctttggtagatagcgaggcacaattattttctcttagggaggattttgaatacctattgcaggcgtgagccaccgctgctggctctttttactttagattgtatctgcctgatttgacaatgccaaattttttatgtaatcaccatttggtttgggactgagagctctttcattttctaccagtcaaaccactattagagtcttcatgttacttccccaatttgctagcaaggtagaatcagcatggatagcttattttccttattggaattctgttttggaagaggcaggtcttatagcagggcagactaattaatgtgctgaactcattccctcctgcttaagtgaataaaaacttttatttgactatggattataaagattgcctttaaggagccttgtttattttggggaaggagaatggatattttgtaggagaaaaagactttatatagtaaatgaaaagtctatgggctgggtgtagtggctcatacctttaatcccaacactttgggatgccaaggtaggagtattgcttgagctcaggagatcgagaccagggagactgcatctctatttttaattaaaaaaaaaa

SEQ ID NO: 137792 - DNA, 263 bp, Homo sapiens
gccaggctgatctcaaactcctgaccttaggtgatcttcccgccttggcctcctaaagtgctgggattacaggcgtgagccaccgctgctggctctttttactttagattgtatctgcctgatttgacaatgccaaattttttatgtaatcaccatttggtttgggactgagagctctttcattttctaccagtcaaaccactattagagtcttcatgttacttccccaatttgctagcaaggtagaatcagcatggatagct

SEQ ID NO: 137793 - DNA, 270 bp, Homo sapiens
ctcgggtgttccagcagtgagaatttggatacacttacttcaagccgagtaagttaaagtacctccaattcagagatgaagagctacaagaagtctgcctgaataatgttaaattggcattaaggaactgcatttattcagttattttgcctttgctaatgactttagctaagtccttcacctgcccacttctccagcccagggatctttcttaaacctatatccttgttttgtataatttatcagcatctgaaattatcttatatattt

SEQ ID NO: 137794 - DNA, 989 bp, Homo sapiens
tagaaaacaatgcttttggacttacattgccacggcagtttacacagttttattcccaaaaattgtagttttgtgactaggtgataaaaatgatctcctatatgtgccaaacttggtattctagacactcatacttaggatgtaaattgactgtagtccaataatttaatatgttgtgtttaattcttgtaatattttactcacaaattgaacttttccttaccaatttaatgtttgtaggcttaatttggcatctttgtcaggattattagacttctctgcattcttctgacttctccctaaactaatgtttagaactgaattgggtccagcaatttaagtggaaaatcagtatgactagagacttctagaaacttctggtgtcactgagatggtgaatttgatgattctgaccctacttgctcatctgtaaaagctattagaggattgttttaagcatttctattctatacaggtatatgtacaccatgtaataccactcagccataaaaaagaatgaaataacatttttgcagcaatttgggtggagctgtaggccattattctaagtgaagtaactcaggaatacaaaactgaataccatatgttctcacaagcgggagctaagtcatgggtacgcaaaggcatacagaatagtaaaatagactttggagactgagacgcggggagaataggaagaagataagggataaaaaacgatatattgggtacaatgtatgctactttggtgatgggtgtagtaaaatctcagacttcaccactatacatttcatccatgtaacccaaaaccacttgtactccaaaagctattgaaataaaaaagatatttaaaaaaaaagaggccaggcaggttggttcacgcctgtaatcccagcactttgggaggctgaggcgggcggatcacttgaggtcaggagttcgggaccagcctgaccaacatggtgaaaacctgtctctactgaaaaaaa

SEQ ID NO: 137795 - DNA, 583 bp, Homo sapiens
agacttttcacagggaaaggttaagttagagatgcccaatggtccacattcctactgtgaacccctggaattttagtcacaggagagaccctagccccttgcaggacaaaaaattcacatagagggctgcccagagacagcacaaaagcatttcctattccagtgaggaagttcacactgggtcccacgctccccccgagtcctaagcagctacagcaaggtgatattttgaagcccagctcacaacagaatgcgtactcccctggggcccagtggcatcgtaaaaaagaatgtaatcatgtcattcacagcaacatggatggaactgaaggtcattatgtcgagtgaaataagccaggaactgaaagacaaatataacaagttctcattcatatgtgggagctaaaaagttgatcacatgaaggtagagtggattggtagcagagactggcaaggttatatgggtgggaagagggaaatgaagagatgttggttaatgggcacaaaaatacagacagaaggaacaagttcaaatgtttgatagaagagtagggtgactatagttaacaaccaatgtattgta

SEQ ID NO: 137796 - DNA, 434 bp, Homo sapiens
ggacataaatggcagatgaggatgagtttcttttctcaaactgactactggtaatgcttcttagagcactgtgcataaagcattcttaggccaagcccaggctctgtaggaatgatcctatgataaattacctatatttatcatagattttggaaagtatgatgatgacatgcatgccatacttctgccatggcaagtactagaatttcgcagaatgcattttacttttctgacttcccactattttccttctattttacaaattcgcttttccttgttgtattttatgtatccattagaaatgcacactaatacaatggtgtattagtctgttctcatgctgctgataaagacataccccagatgggtcaatttataaaggaaataggtttaattgactcacaattcagcatggctggggaggcctcaggaaa

SEQ ID NO: 137797 - DNA, 275 bp, Homo sapiens
tttttgtattcttagagacggggtttcaccatgttcatgttagccaggctgatctcgaactcttgacctcgtgatctgcccacctcggcctcccaaaatgctgggattacaggcatgagccaccacacccggccattgtgtatgcattctttatggatgagaattaaggtatttggtctgcagaaggatccagcttccagaggccaaagagagatggagtttagatggaaaaatattcagatttggaggacgttctccatggcgtggggagagag

SEQ ID NO: 137798 - DNA, 206 bp, Homo sapiens
tattaagcatgagttgggacaactattctaaccagagaaattggctccagtgagggcagtttggcaatccaaggtatggcatgtctatggctggcaaaattcagggtgactgaagcaaaagtttcaaaaccataaagactacaacgggggtagagcacaaaattctcaagagatgaatctttgtaagagtgaggcagaactacatg

SEQ ID NO: 137799 - DNA, 157 bp, Homo sapiens
caagtaccaaacaccaaggaaacactaaggagagaaaaacgcctgtgagaagaaaaaggaagacacgaatcattcccaacagaagctgttaccatgaaggaagtacgggcaggggcatttgttgaatgtctactatgggagaaggggttcgcatcat

SEQ ID NO: 137800 - DNA, 223 bp, Homo sapiens
aaacaagagggaataaatatcacatatgacctcaaaagggtagtaaaaaattgacaggcaataattatatgttctaagagattatatctaagagaagatataattactgttttggtccagaatgattatatcattattttgaagaggaaaagctaattttaaaatatgttaattgctttctttcaaataatgtttaagctttaatatccaatttatcatttaa

SEQ ID NO: 137801 - DNA, 347 bp, Homo sapiens
actgcagtaatgtacacaccatctgtcctaggttctagtaaaaaatatcagtattgtttattgttttatgatttggatacacactgagatggagtttatatttccttccccaagatccttgaagaaaaaagacacagtgaacaacttggtatccagcatccctgcccaggcataaccctaacactcatgcaccagcactgaaggccctcccctctcccttacagggtcttcacctaatgacaaagtcatgggcagtctctgttcagctgtcacctggacgccctgagtcccagactatagaagggccccagggtgtggagtggggctgtggggccctccctcgggct

SEQ ID NO: 137802 - DNA, 294 bp, Homo sapiens
tccaggctgcccttgccagagctgcttcaagatccctcttgattgtccttaggcctgattgctctggagagccccatacatgaaagccagctcttgttctatctcttctcactccagtcctctctgcccccaccgtcccccagctgggcattatgagaaaagcaagatgactatgagtattgtgattatttatatgaacaaataatctcaaggactattgctaactaacccatgggactcccactaccttcatgaggtttggacgaggtgaaggatccctaaaatcctgccacc

SEQ ID NO: 137803 - DNA, 406 bp, Homo sapiens
ggtggctactacactggatgacacagctacattggtacactctctgggagaaagatctttggttttcattatttacatactcccagtttctatcagtgcaaggcacagagtattcctagactgaactcatctactgaagttgtataggaatattttctattttctagaaggctttcctttcaaaagcatgttttgactggaaggtgcaagcataagcacacacaaaaaatgcctaaactttcaagataaatcagtaatgaccagagaaaagccaaaaaccctaggttttataaccaggctaaagaatcaataaattccaaaaaggaaaagtactagcaaagaagtttgaagctgatattccatgacccatgtattaatgtgttctcacactgctaataaagacata

SEQ ID NO: 137804 - DNA, 491 bp, Homo sapiens
tgaggaagaggggaggagtaaaagggagtagagggagtttgtgtctagaaaaatctgtgtagaagtcttgttctttttaagagaaattgtgtaaggtcaatggctcttctaattgtgcaattcaaaaaattaagtcattctgaaggtgaagataataagtgaaataaaatggttcttagcacctcaatgcatatataactggccgtgataaattatactcatggacaattcatatagcctcatatagctacatgttcattcatgaaaagatcctgaatgttattctgatagagtagttttaaatctgaaaattactttatcacacttgaaagtttattgttaatttctcccttcactgcttctttctttctttctttctttctctttctttctttctttctttctttctttctttctttctttctttctttcttttggcccggcctgggggaaaggtgggggatcctttaaattggaccggcgggcttgca

SEQ ID NO: 137805 - DNA, 462 bp, Homo sapiens
cagcagtgggcacttgtaatcccagctacttgaggaggctgaggcaggagaatcggttgaaccccagaggcggagttctaaagtgagccgatatcacaccacttcattcctgcctgggcaacaagagtaaaattccatcttaaaaaaaaaaagctagaggatctgcagttatgaactttgatagccattaactgactagatcttcaacctaaacgggttaaaagagggggaaagaaaatggaatggtaaaaagaactagatggaaaaaggaatgaagtaagaagtgatatgcaaaataattgtcatcttctccgtgcctcccattccctcagtctagtcgaggtctttccacctggccatgtttcttttcctcagataaagcaagctcattctcaccttaggactttcaaaccaactattccctaaccttggagtgcttttcttattttggctgagttgtct

SEQ ID NO: 137806 - DNA, 466 bp, Homo sapiens
atgagccaccgcgcccggccaactcctgaactttctatggtggagtcatttttgtcttttacgttttaagactcacacagatgtttgcaaaaacaccgttagctgaaagtggaaagtttggtgatgggtattttgcttctaggaagcaaaaacatcagagtgacacatcatggatcaggattctgaagaggaatctctcccagacatttatggagagttaagagaagtacctttgtgagcacgtgattcctgccttctatttttttttttttgttattatttatttttttgagacggagtctcactctgttgcccaggctggagtgcagtggtttgatctcggctcactgcaacgtccgtctcctgggttcaactgattctctcacctcagcctcccaagtagctgggattacaggcatgcaccaccacgcccagctaatttttttttttttttttttcattttta

SEQ ID NO: 137807 - DNA, 117 bp, Homo sapiens
gcagtgtggacctcctgagctcaagcgagcctccccagtatctgggattataagtgtgtgctaccacatctggctacttgttgtatttttcatggagaaagattttgccatgttgct

SEQ ID NO: 137808 - DNA, 620 bp, Homo sapiens
tgctgggattacaggcatgagccaccgcacccagcccaggctaggttctatatgggtgtgctttttagaatttagatcatgggctatccccaacacaaactggataatgtttctttctagattctctctaagcgtgtattctctttctttcctaggcacagccaccacttcacttacattgtgggattataatttcatgagtagtggaatttccttaaccttctcttgtgtgggagctgaaggacaaaatgagatattctctgaagagtggttacatcatgcaaaactatgatgtgtaatgaggtcacttagttttctaagtacattatacattttgataagattttcatagaaaagcttgtctcctgcctcagcctcctgactagatgggactacaggcgcccgccacgatgcccggctaattttttgtatttttagtagagacggggtttcaccatgttaggatggtctcgatctcctgacctcgtgatccacccgcctcggcctcccaaagtgctgggattacaagcgtgagccaccgcgcccaacccaggctaggttctatatgggtgtgctttttagaatttagatcatgctatcccccacacaaactggataac

SEQ ID NO: 137809 - DNA, 597 bp, Homo sapiens
agccgggtagactgtatgggtggctagacccagaagagagacaacaatcactgcagttcagctcacaggaagccacacccataggaaaagggggagagtactacatcaagggaacaccccgtggggcaaaagaatctgaacaacagcctttagccctagaccttccctctgacagagcctacccaaatgagaaggaaccagaaaaccaaccgtggtaatatgacaaaacaaggttattctaacaccacccccccaaaaaaccacactagttcaccagcaatggatccaaaccaagaagaaatccttgatttacctgaaaaagaattgaagaggttagttattaagctaatcagggggataccagagaaaggcaaagcccaatgcaaggaaatccaaaaactggcacaagaagtgaagggagaaatattcatggaaataggtagcttaaagaaaaaacaataaaaaattcaggaaactttggacactcttttaaaaatgcaaaatgccctggaaagtctcagcaatagaattgaacaagtagaagaaagaaattcagagcttgaagacaaggtcttcaaattaacccaatccaacaaa

SEQ ID NO: 137810 - DNA, 481 bp, Homo sapiens
atgaaagaaatttaagagaacttaattgaatatgaagacatcccgtattcatagattgaaagaattaacattgttacaatgaccatactgctcaaagcaatctacagattccatgtaattcctttaaaaataccaataatattcttcacagaaaaagaaaaaaaaatcttaaaatttatatggaatcaaaaaagagcttgaaaaaccaaagcaatcctaagtaataacaacaaagctggagacatcacactacctgactttaaaatatattacaagaatatagtgaccaaaacaatatggtatgataggaaaaatggtacatagaccaacagaacagaatagagaacccagaaataaatccatgcgttttttatccaaatgatttttggaaaagttgtcaagaatattcaatgaggaaagaacatccttttcaataaatagtgctgggagtatttgatatccatatgcagaagacagaaac

SEQ ID NO: 137811 - DNA, 371 bp, Homo sapiens
tttggatattcaggttgaatataagatgtctgcggaacatctagggagcagctaggtgtatggattttgtgcccagaagagaagtccaggctgggaaacaatgtcatttgatgtccactgaaggaattttaaatgcttactctagacaggagtacttgaaaactgcttttacatgtataaagagctttcatacttgcaaagaatttggtgtggctgtgtagcccgaagaagtttaatctaggaacaagcagtagaaaatagattttggtatggcctaaagaaaagctttctaatagggcagcctgatgaaataagctgccttgagatataacgagcactctgtcagtggaggtactcaaaccataggctag

SEQ ID NO: 137812 - DNA, 430 bp, Homo sapiens
tcaggcacaggggatgaggtaaagccaacacagaagtaagactcatggttgggtattggagttggtccaagacctagtgcaatgtgatgctgacatgaagagggcagagatgaagctccttaaatctttcctggggttaggattgaccccaaaggctgatgtgaggctggacttagatacaagtcaagaatgtcaagtaaaggaagaaaagagtggagggactaggaactagcaaaatctgacagtgaatctatattctgtctttatgatcctgaaaaaataaataaaattaaaaaagcattctaaccatttcaatcatgaaaataattatgacaaattcataaataacagattacatttaaaaaaactggataaaatggaatttcggattccttattgttttccctttgatttttcagtatttttttct

SEQ ID NO: 137813 - DNA, 708 bp, Homo sapiens
acaaacttttgtgatattgcaagaagaatgaggaaataaatatgagaaagtatattaggagaaggataagaaacaggtttcattatgaacaaagatttagagattaaaataatgataacctcactcaatctctttgtcaattattaggaataaagttggaggaaaacttatctacactccatgtggttctgttcttcccaagacattcttggctcagccaaagcaatgcagagactgctaagtatatgtggagtctgtcatagttaagggatataaatatggatccagagattctctgcaacagaaagactgttcttgacaatcactgtataatagtaaaaatgcagtttataacattgcgttacctaagtgttttgaatgtttcttattcacatttacatgagagaattgttctcccagttaaacaaaaataacatatcagggtctgaaatttacaaataaatcaagtttatatggtgttcaaccaatctgaatttgtgtttatgggtaatgttgaaggttcctttatggtgtggtactcattgcactttggaaaggctgtgagaaagttcccataagccgaagttgttttaatgacaaatagtgaagttatgatcaaggattttaaagaagggaagacacttagaaatagtctagtctaagccctcaccttacacttgaaaaaattgaggccctttgtgattgacc

SEQ ID NO: 137814 - DNA, 506 bp, Homo sapiens
  misc_feature (289)..(289): n is a, c, g, or t
ttggataggctgttggagaggcttggaatggagatattaatttgggattcatgggcatctagctgcatttaagtccctaggactagccaaccgtggactagtactagtccacggttggctgtactaatttacattcccaccaacagtctacaagcgttcccttttctccacattcttgccagcacttgttctctttcatttttgttaatcaccattctaacaagtaggaggtaataattcattgtggttttgtgatcggagatgttgagcattttttcacgtatctatnggccattgtatgtcatctttagagaaatgtctatttattcaggtactttgttcattttttatttgagttgttttcttcctactgagttgtttgagtaccttatgtattttggacattaaccccttatcagatgaatactttgcaaatatttctcccattccattggttgtctctttactctgcggattgtttcctttgctatgcagagtaaagagcc

SEQ ID NO: 137815 - DNA, 364 bp, Homo sapiens
caatccaaaattacttggcatatggagacccatggacatttcaactcctatgagaacagactcaacagacacccatgccattatgaagtatatgttggaattatcttacaaagaatgaaggcacgtatttttaaaaacatgcaggccaggcacggtcactcacacctgtaatcccagaactttgggaagccgagtctggcagatcacttgaggtcaggagttggagaccagcctgaccaacatggtgaaaccccatctcttccaaaaaatacaaaaattagtgctgatgcatgcctcagactcccgaataggtgggataacaggcgcccgccagcagggcccagctaatttgtgtgttaatgtt

SEQ ID NO: 137816 - DNA, 394 bp, Homo sapiens
aggctggggcaatatggactgcacctgagctagcaggacagggtgggcaggtgggcagggccgcagactttgctccttttgggagatccgtaggcagctccccggcgctatgcctactggggccttcatgctggcatttggcccagtcaggaagtctaggctaggtgtggcctagaagacagcattgcctcaaaccaactcatgccagcgagcactgactagccacccactctgtgcccagctctgtgctgggagctttggaggttacttcatggaaatgaatccccttaacagcagtgaaatgtaggcaagagacccattgatttgttcattcactcattcacacgttctttacaccaaactttgctgagtaccacttcattccagagaatac

SEQ ID NO: 137817 - DNA, 292 bp, Homo sapiens
cccgagccgtggcttcctgtccgggaacggcccggcgtcctggctgtccagctagtcctggcgcctctctctggggcttcaccgcccgaccccgcggcggagcctgcttctctcggacctccagagacctcggatccgtccgagcacctgccctagtcctgcctggtcccccaggacagtcccaagccactcctccccaggcgagcacagcgaagggtgcgcgggattgccaagccagttcctcttgatggcagtattgctccagaaatgcccacctgcccttcccccacgt

SEQ ID NO: 137818 - DNA, 435 bp, Homo sapiens
agctgggattacaggcatgtgccatcagtcctggctaatttttttgtatttttagtagagacagggtttcaccatgttggtcaggctggtctcgaactcctgacctcagatgatctgtctaccttggcctcccaaagtgctgggattacaggcgtgagccactgcacgcagccccgaattacaatttttgagtatgtatagtatattgtatgtcaatcattcctcaagctattaaaaaagaaaaacaaagcagccgctcagacttactggaacgacggaaacgcccaaccaacattcatggttcactcaattaatatttactgagcccctactatgtgctagagtctgttctcagcactggagtcgcagcagaatcaaaagtccctgcccttgccagccttactaattctggtgggcaagataaacaataaatat

SEQ ID NO: 137819 - DNA, 414 bp, Homo sapiens
atgtatattattattttctgtctcctgccactagaatgtaagctgcaagatcaggaatctgtggcttagaggtgtatcccacagctctaaaacagggcctggctcaaaggaggcactttatgaatccctactgagtgagtgaatggatgagtgagggaaggagggagtgaatgagtgagggagtgaatgaatgagtgagtgagtgaatgagtaagggagtgagtgagtgagttaatgagtgagtgaatgaatgagttaatgagtgagggagtgagtgaatgagggagtgagttagagagtgaatgagtgagggagtgagtgaatgagtcagtgagtcaatgagtgagtgaatgagtgaggaagtgaatgaatgagtgaatgaatgagtaaaggagtgagtgagttaatgagtga

SEQ ID NO: 137820 - DNA, 302 bp, Homo sapiens
gtctacatgatctgtaaactcttaatcctgagagtctttgatttcacttggagtgttttctttgaagagactttattggttaagagttgcattcatttcctgactactttgaaaagtaaattccctttaaaagtagacttatagctatagattatgttgcttgctattgtatctccagcacttaaaatagcctctgacacatggttgatgctgaagtatagtaacaataatatcgaagcacaccctaaatatgaggctctttattcagtaattatgatttatatatacaaagcaacccactg

SEQ ID NO: 137821 - DNA, 583 bp, Homo sapiens
tactcaataatcaaaatattctgtggtataagtacctttacattgttgtgtggctatcatcacgcctcatcttcagaactttttcatcttactcaactgaaactctatacctattaaatattaatttatcattttcttccccccacctatcctagctgcaaccattgtactttgtctttatgaatgtgaactattcttggtaggttatataattgtaatcatacagtatttattcttttgtgaatggatatttcacttggagtagtgtcatcaagattcttccacgctgtagcgtatgtcagaatgttcttctatctaaggctgaataatataccattgtatgcatataccacattttgtttatccattgacccacttccattgattgctttcatcctctggctgttgtgaataatgctactataactgtgggtgtacaactacctctttgaaacctactttcaatctttttggaaatactgtatgaccggaagtgaaattgctggatcaaatggtagttctatttttaatttttagagaaaccaccatagtcttttccatagcagcttcatcattttacatt

SEQ ID NO: 137822 - DNA, 268 bp, Homo sapiens
aaacctgcacgttgtacacatgtaccctagaacttaaaagcataataaaaaaatttttagtgtaaatattttatatattccaaattttccttcaaaaatttaaaaccaattcactatcttaccaataatgtattaagatgaccatttcaggccaggcacagtggctaatgcctgtaatcccagcactttgggatgctgaggcaggaggatggcttgagcctaggagtttgagactagcctgggcaacatagtgagactccatttctac

SEQ ID NO: 137823 - DNA, 150 bp, Homo sapiens
gagtttacaaaatgtttaattggaccagaatttaaaaaagaactctaaaaactgcaaacattaactaagcaattactaggtgttcatttcttcttggggaccaaatcaagacagagaaatgtgcaagatcatctttctttttttaaatca

SEQ ID NO: 137824 - DNA, 317 bp, Homo sapiens
cccaaattcagagctccctgcagcccactcgcctggtctgtagtgggaaagcctttggcaggatcgtaagacggtggtgtgctagccgtggcttgctgtggaactatctggagcttggtagagtctgtatatctggcttctagggaggctctacttctggctgccatgggtaggttagttaacctctcttgacttcagtgacctcatgtgtaaagtgggggaaaggccatgccttctcccggaaagcttaggagaatttaatccgacgttaatgtgaagcctgtatagcccagtgccgggtgcagagaagtttagtt

SEQ ID NO: 137825 - DNA, 377 bp, Homo sapiens
  misc_feature (1)..(1): n is a, c, g, or t
  misc_feature (19)..(20): n is a, c, g, or t
  misc_feature (24)..(24): n is a, c, g, or t
ntgctagaggatcgctccnngggncccttaaccctttaaggtgaaatacaccatctaaatgtaaatataaatgatacttcctcaacataagtttcttcttatactatttcaataaatctcagatctgcttttattctttctcttccatgccaccaataccacttttcttcttaattttactgttagatatgttgtttttggaagaagtatagagggaatggtagtaaagagagagtgctttaggattcaatacattcttttgaacagtaacatttagagaatctgtactccatagtggtatcactgcacatttttaagagcatcttgtatctagaacagataaggaattcatgtgacgtaagaaaaggtgtcactgt

SEQ ID NO: 137826 - DNA, 293 bp, Homo sapiens
tgtccagtccatcctaacctgtatattctttccaggttactgtcattgccatcaaacccaggagaacacttggggttgcatctcctcagacaaaactctgtaccgtgctgtgtcacagcctgaaaaggacacttcccacagaaaatcaggcaaggggcaggttctgagcttccctccaaagctggagaacaggctccacaaagctcaactggagaaatcatgagaattatctaaaagtaaatctagttagtatactatagaaaaatctgcagaagccttctgtgaatgggctg

SEQ ID NO: 137827 - DNA, 281 bp, Homo sapiens
tggatggacccctcggctcttctttctgcttcccaattcttagcatgtgcttgctcatagttggctctaaccaggtgtttgaatgaagaagtcttggtaagaattttgaggctgtttcattcagcacggaggattcccagtaacgttattttatctgccgtgaacataaaaagagaaggccgataacttaagttctgggtatccatggtctcttgctcaagaaagaatttccaacctgtagagaatgaatggattttccaacaaaaggcattaatgtgatt

SEQ ID NO: 137828 - DNA, 113 bp, Homo sapiens
ctttaccgtaccaataatcagagaattatctatctctgattttatgactagaccctcttcaaccccacatccacaattactccagtggggttgaagagagtctccgtcgaact

SEQ ID NO: 137829 - DNA, 242 bp, Homo sapiens
aaactatgatcagagctgtgttgggaaaaatctttgattgattttcaatcctggctgcacaacagaaccattgtatggcgcttttaatagtagagggaactgggccccactccaagcttgtttaattactatgaccagagtgtgtggctcagatatatatctatatctatagatctatctatatatatgtctatatgtatgtgtatgtatatatttaaggctccataggtgattctggtgtg

SEQ ID NO: 137830 - DNA, 316 bp, Homo sapiens
acagttaccctcatcaccactccctcaaaaaaagcccagaagccaaaaaagtgaaacatgtgcaagcaaaactccttctaatatccacaagacactcttacaatgccagaacaaatacagttaaaaaggaaatgaaattttataaatgtttgtggatcatcgttttagtttcagtttgaagttaaaaaaaaaaaaagtagtgccataataaaacaaaacagctagttacagctactctgaccaaagactgctctttcagcttcagttctgctgatgccagcagcccgtacacagtgggtctcctcagtccttaccg

SEQ ID NO: 137831 - DNA, 151 bp, Homo sapiens
atatttgcttatttttttaaagagtatttctatgtggcctttgctcattttcaatggaaagattatttctgtggagtcttttgtgtactgcctcaatgaaaggagaattatgaagatttaagacagaagggaaaattgatggatagtgatt

SEQ ID NO: 137832 - DNA, 272 bp, Homo sapiens
aggagctctgagggcagaaaagagaaatgtcccagtttagcagtcaggaagagattgaattcagactttgtctacccttttattcatttaggcctttgggctttggatgatacccacctacattggggagggccatccgctttactcagtccaccactcaaacgctcatctcttctagaagcagcctcacaaacacacccagaaacaatgtttaaccaggtgtctagatatcctgtggcccagtcaagttgacacgtaaaattaaccatccc

SEQ ID NO: 137833 - DNA, 115 bp, Homo sapiens
tagtgcctggtcaaaatccaagaaaaattcaaaactggagtaccagaaacaagagctggaaaggatgtaaggcattatatcagaccttctgtaaagaaaataaaggccaggcgtg

SEQ ID NO: 137834 - DNA, 618 bp, Homo sapiens
agttcgacggagactctctttgagaagatactgctgaagaaaagaactcacagagccaaaactctgcaaagctaggagtgaagtgtagtttctgggagtacaatttacacaactgctgtgtgatagtataaaatgctgtttcacaaagtagtacatgaaaggtaaactgtgtcaatataatttaattttaggctgtgtaaagaagccacgtctaaaaaatgggggaatgtatcttaagattggtgttccctctcctaaaactgcaaagtagctgtcactaaatcaatgcccacaaaattaacaaatcaatgcttaaatgcttaggacttcatggatttataccataagtaatacaaaaagcagtttttaaaaaattacttttattcttttacagttcatttgataaactggttctactgtatttttctatgaaatgtctattaaaggtactcttgcggctaggaatccactataggtgtccatcaaaatccccattacaaaaaataacagtccattatacgtttacagattccttttgactctcgataggcatattattatcataactatcgagagtctcgtcgaacgggtacgagctcgatcgagttgtttagaaaa

SEQ ID NO: 137835 - DNA, 566 bp, Homo sapiens
gtgcaatagtgatcaggacacaggggacacaattaggggcagcaaaggtttccaggagaaccatgctctagagtctgggagaatgttatctactccggaagaatgagaaaacagtgtttaggcacttaggctctctgtgtgtgtaagtaggtggctgggccacagaaattctattttgctaataaaaattttgtattttatgtcatctctcagtcttaggtggcctaagaaaacacactttatacatattaaatagctttaataatttctagcaatctaaaaaaattagttcttaataaccaccattaaaattatctgaatgtccaagattaggggcgtgaatatgcaaatggtagcatataaactagacagagttttatcctgccattaaaaaaacagcaattgtgaagaagatgacagtgcttaacgaaaataaaataacaaaaataatattcagaatagaagaaaaaggtaaaatatatgtgaatagtaacacaacaaacagtacaattgtgagtgtaatgtagctgcttttaaattttcctttagtgtataagaatcaagat

SEQ ID NO: 137836 - DNA, 467 bp, Homo sapiens
gaaaatagtgtatctgctgcccgtctgttttcttctttttctcacatggcaattcgtaggaagcaactttagtgaaaactatatttgattctcagtagacaggtttgactcagaaactgaggacattttactaaaaattccgaagaactttcatgtgtatggagagataatagcaagtatgtggtaataggtgcaaagtaaataactaagtctgaaacgtgaatagaaagtaaatcataaatgcaaacactacattgcagtaatctttttctctttagccttttcttacaaaatctgtggcttccgtacagagttgtaaatctttgctttggatgttttctaagaaacatctgagaaagcaagtgaagtcaaagaaagtattaaaaatgcagaaaaaatctataattaatgacatattccatattctctaatcatctatattttgtgatttttaaatatcttcttta

SEQ ID NO: 137837 - DNA, 451 bp, Homo sapiens
tttgtgttacaacagtcctaagaaaatgagattatcatcatccccctgttacaattgagaaaatgtaggcaacacgagggtaacttctaatgaataagccatgcctttgtttcatataaataagtcaactcaactcacattaacttttcaaaataccggataaaatttatttctaaccaatgcaagtttcaaagataagtacacaaattaaatttatattgaataataagcttgttaatctgatgcctttcggaacgcatttcacttagcaaacctcaattaagctatttcttatatggtttgattacaaaactgcctttcagcatattaaatacaaggagaaaaaactgaaaagccacaaccatttcaacttctgtaaattaccctgactgtaatgaggggcgccaggcaggttggggaagtatggaaattgcacactgcacacaccacc

SEQ ID NO: 137838 - DNA, 667 bp, Homo sapiens
cacagattgggtggctgcagcaactgaaattaattttctcacggttctggaggctgtacgtgcaaggtcaaggtgctggcacagttgctttctgatgagggctgtctttgtggcttgcagatggctaaccgccttgttactttgtccttacatggcctttcctttgggtgtgcgcactcctggtgtctcttcctcatatgaagacaactcctactggattagagcccactgttataatctcatttaaccttagtcatctccttaaaggcctcgtcttcaaatacagttacattggggggtagggctccaacagaagaattttggtggggaggggcacaatgcagtccataacaaagcccaagtctggtattaatatgtctatctgggccgggcgcagtggctcatgcctgtaaccccaacacttggggaggcccaggagggcggaacacgatgtcaggagattgagaccatcctggctaacacggtgaaaccccgtctctactaaaaatacaaaaaaaagttagccgggcatggtggcgggcgcctgtagtcccagctactcgggaggctgaggcaggagaatggtgtgaacctgggaggcggagcttgcagtgagctgagatcacgccactgcactccagcctgggcgacagagcgagactgtctc

SEQ ID NO: 137839 - DNA, 153 bp, Homo sapiens
tgagcaactcaatttggtttccttacctgaaaagcaagtcctggattagaagagctctggaatcccttctattgaaaaacaacaaatctcttatcctggaattcatggcccaccataatttagctaatcaaactcatctacaagcatccccct

SEQ ID NO: 137840 - DNA, 971 bp, Homo sapiens
gtcttccagtttagaggaagtagtatgaaggctgtattctggcatacattctaaaatggaagacattcctcttccattttagaatgtcttccagtttagaggaagtagtatgaaggctgtattctggcatatggtggtagtagaaattcaaatgaacaaattaacaaaaagatttcataggaatgactagcaggacttagagactaattattattaggtatatggaaatatgtccttaatataggaaatgggttcatcaaagaacattctagaagtttatagatctttgcataaatgttggcgggtagtatggcacaatgaaaataacatgggctttgaaattagcaaacctgggtgtcagttccagccccaccactatactagctatgtaagcttgagcaaatttctcctctaaatgggaataataaaggtacctacttcactggtttgctgtgaatattgaacaatacgattattgtaaagtacttagagcagcacttggcacacaataaacatccaataagtttctgttgttactattaaaaaaaaaaaaaaaaaaaaaaaaaaaaaaaaaaaaaaaaaagggggggggggcagaaaaaaatcccccggggggccccattcgcttcccccgtctttttggcacaaagggccccaaaggggggcgaaaaaaaagggcaggacggggcggggcggttaaaaccccgccggtgcggcgggaacacgctcccctgcggactctgtgggagagagcccacttctggggggcactaatggcgccccaaccacggaataagaccaggaaaaaaaccttacgggttaagggtgtaacccccgcatgtcggggcgggaaattggtccgatgtttgaatcgcgcggtgcaacataaaaaggagaatcaccgtattatctgcagtagctcatgagacatatgcgaatatcatatcaaaacgcgagaacacaagtaagag

SEQ ID NO: 137841 - DNA, 538 bp, Homo sapiens
aacacgtttatacctcccagtcaagaagagcattctgagaaaggagacttgccagcttccaaaggcactcagccttgacagcttggctacttcacgggctgactgcagctcaaacacctgttggtatcttggagccacagcacatccatccttccctcacgccaacatcaacctgatggtgagctttctgagtaaggtgtctttgttggttggttgaggccttcacgtccttcttagtttgggaggcacttgcatttcatatagcatcaccacatctatcggagttgatttggggaaggtgggtgtggagcagtgataaaggaaaacgttacatcctctgtggaaattccaggcctttccacttctttcaggtacaccagagttcactgtggtcattatattcagaagactcacacagtgcaaaaggcagtattttggggaatgaagccataaaccagtaaaataagcctcagactgtttccccaatttattattctcattattctcatctcccatacacagtatgttacatggggtg

SEQ ID NO: 137842 - DNA, 577 bp, Homo sapiens
agttaccttaattatatgagaaatatacagttctctcactgttcctgtaaattactgaatcgttactcatgttatagtatacagtgatcaaattctgttttgacaaatcacatattcaagtttttggtttggaaaatatattccctataatttatattttacatgcccagaacgtaatcctagaatttactaatgtaatgagggaatctggtccttatctagcagtgaagccctaacaaccacagagcagtacatcagaaaagccagggcctacttttttggcacagtgccctttccagctccttcttaccactgatgctaaacattaaacatgcatcatcacttcttaaattataattgactgagagcaggaggaagagcatttatataatttctcaaaatctacaagtggccagtatagacttctgcacccagggaaacttaaaaataagcctatgaatgtatgctacgatttaaataaaattatgtaaatgcatagaaaatgatatccaaatagctgttctgttaatgtggagggactgagcacttagtatcattagtttgaatcttctttaat

SEQ ID NO: 137843 - DNA, 166 bp, Homo sapiens
gtaccttgttgttaaatttgttcgcaccacactcacacgtgtagccctggtggagtccatagcgtcatcacaagcatagcgtggcaggcagcaggcttagggaagaatgacgtgtgccctccaaacatacttcccaagaagtttcatagctgccaggatagctgag

SEQ ID NO: 137844 - DNA, 408 bp, Homo sapiens
cggtccgatatgctcctaacggcaggaggctacccttggcctcttttgaggcacctcccaggcctggtgattgccactgtgtggttcctgctccaagtgtgtctgggcctggccttcccgtctcccttccctgatctgtgagggtgccaggtgatgatttagtgccttctgtaaaagggtgtcccggatgggacgagaactggaaatcctgcctcatctggaagtgagttgagtgaattgtcaggatatttatttggggcgagagaggattcagaaggaaaatggcagttgtcttcaagtgtttcaaggatgattgtgtgaaattgagagtgggcttgttctgtgttgcctaatcaactcatgtgagtaatgagaatgtgactctggcttcggataaaaagaggttct

SEQ ID NO: 137845 - DNA, 243 bp, Homo sapiens
tactgctgtatagaggtggaacacaatcactgctgactaggaatgcagagcccaggccctctaggtgcacccctgcttactggaggtgctgggaggcagtgctgcgctcctccgatgtgctagcagccactccccagctgtttctaagactagaacaggccacggaagcttaaaactgctaattgcagtaagaggctgagtttaggagttggtatacctgttgaattagttgagagaactagg

SEQ ID NO: 137846 - DNA, 262 bp, Homo sapiens
ctgcaggaccccaaacgccttttggcaaaaaccccctacaaggatcaaacgaatcttccacttgctttggtggtattacacattgggagcctcttgcttcttgcttcctttagacgctaactgcagggtgatttgtggttctggccaggggactgtcaaaagaccattccaagaaactcagaaaagagctttcatttagtcatgatgaatggggaaggcaaatgtcagctgaattcatttaactagcaacatattccctagt

SEQ ID NO: 137847 - DNA, 263 bp, Homo sapiens
atttatagtcacctggaatatttatgcacaatataaagaggctctagatgatttcattatattccatatttctgtaattttatattacaaaatagtaagtgggctcattatttaatttttccaaaacatagctttattacagcttactgtaaatcagatacacctttctctgtaaacattttgtatgctcattaaaagtttgcttccctaaatgggcatgatgaacaaatattagcaaaattgctcaagaatattttcctttg

SEQ ID NO: 137848 - DNA, 437 bp, Homo sapiens
ggaaacctcacctagagggttttgctctcctgagcagagggcagtgagcctgagtccttgctgagtctaaatccctcctgatgtccacacccttccacactaagatgtgcctttcccactgggacacggtcttctggtcactgggtcatgtcttctttagctctgggccatgagctcttccttttcttatctgtgctcagctcagtgcctccctctgtcttacttcctgtagaccctgcatgcccggcacgctttatcctcagaccactgagggcatcagagaaagatcccagtccatcctctcagtgctgagagctgaatcagtgcccctggctttgagtatctcaggcagggtaagggcagttctctctcgtggaggcctgcagatcgccacctgccccgcagtgggaaggaaagatgagaggtgagagctccag

SEQ ID NO: 137849 - DNA, 384 bp, Homo sapiens
ggagagtagtggctatgtgatgatcttcaagaggtggggccttgtatggtctaagaaacaaggttgttctttgtcctgaaagccacgaagagtcccaagggatttaaaagtgctgatggtggaatggtagggagagtttgcatgatcactgctgcattctagaaagtccacagacagaaaatgtgttagctgggttagatacagtaagactatcagaggaattcaggagagacaagggcctgaatgacaccactgggaacagaggccggcctcagaagactgttaagggggtaaagctacaggtctctgagacagactgggtaggatttaggttatctgtgctgacagagtgtagtgtagccccatgactcccacttaagagtg

SEQ ID NO: 137850 - DNA, 253 bp, Homo sapiens
ggtgagatgtgctcattagtctgtgctgtcgcctgcctgtgtcagtagtcaagggaccgggttcatgtccccagttgtagaagtgctgtttcattctaatgtaagtagaatgagtgcgaagtaaagttatttgaaaacaaacataatttcttcttagaaggtagagaatggtatattcgttgctaccccaaatgtttagttttggaatcacagaaaatagattataaatactgaactaagtcattggagttga

SEQ ID NO: 137851 - DNA, 386 bp, Homo sapiens
cagtatcctttctctgtaatacgcacactaacacgatctcaaacctgttgagaacagccatcagcttcccctgggctagtaaaagagtggtttgctgatcttagcaggcgtctttcccattccaggtacctctgcccagttctctgacctatcagagcatacagggtgcgtggtgccttcctgcctggagtctgtgtggaaacccacccctcctagcacaccttgttcagcaggcacttcctcattcttgtgctgacagctttccttttctgtcaaataccccagggcacagtacactagggactgtcttatcctgcttctaccctctacaccccacattcacaattaacaaccagcttgttcattccacagacattagttgaaca

SEQ ID NO: 137852 - DNA, 405 bp, Homo sapiens
ccatcattatcatgaaaagctccttgatgaggaagcagcaaacctagcactaaggaatgatgacaattagtcctttgctgaccttcattactggctccatgcaacactcctgggaggcaaacctagtgtctccttcccagatgccaaccctgagcccacgcaaggtgtctgaccccaaggacatctcttagcaagctggtgtgagcatcagcattggatcgcctccgtttctgctttctgatcactgttacctttgtatataatagagctgaaaatgtaatctctcagtggacagcagccaaacatgtgcattcagagttccagagccggccaggaacttactttcgccccggaagcctgggctgggagtttgcaagtagatagcgtgggccatgcaattcttga

SEQ ID NO: 137853 - DNA, 545 bp, Homo sapiens
acttcttaaagtaatgtagtgagtccttgttcaacagagccatggtttcttttagtgaggcacagcattagaatctaagattagagtgctaggtgtgttcatagttactgggatgcctttgtttctaggcctttttattgaatagagctagaaaatatctgcgtatatatacacacaggcaaatatatacctatgtggacacagacatgtatgcatacgctcatattacatgcattacctacacaagtatgcttattgtagaaattatgaatttacactgattgctacattccaatccatcccacagggttctttctttttttgagacagggtctcactctgtcatgcaggctggagtgcagcggtgtgatcttggctcactgcagccttgacctcctgggttcaagcaatcctcctgtctcagccccataagttactggcactacaggtgcacatcaccacgcctggctaggttttgtatttttagtagagatgagttttcactatgttgctggggttagtctcaaactcctgagctcaagcaa

SEQ ID NO: 137854 - DNA, 382 bp, Homo sapiens
agtgacactccatctcaaaagaaaaaaagaaaaagccttagaccattgcttcattgtacagataaaggaacaaaggttcagaggctggcctgaccttccagtagcacacagggctggaccagaataaggaatggaactgacatcttgggggagctcaagcactctaccatctgcctggtgggctggacttatccttcccctcatttgactcttttcctagctgcaaccttgagggaatcaccacctctgacttctttcctttgaatccaaggttactctgctcctcgatttctccctcatatcaaatttactaaccaatgtcagtatttgactttctttgtgacaggggatctccagtaacccattctaagagttaatgatg

SEQ ID NO: 137855 - DNA, 225 bp, Homo sapiens
ccataggctggtgctctcacatctttgtagttatatggaaaaaaccaggattatacaccagggcaagcaagcaagaaagaattatctttttctagcttagcttttgagttaagttagaaggagttccaaatatgtggcaggtaacactgctattcacatagataatttctgtctttttgatcacatgatggtcctttattggaaaacaaatacaggcaaaatcaa

SEQ ID NO: 137856 - DNA, 212 bp, Homo sapiens
ccattggtgaaggatctgcctcccacccccatctcccactgtttccaggcagcagcctgctgcagacgcagagttcttgggaaacctctactagggcagtgcagaaggaaaatacggacttggagcccccacacagggctaccaccctacagaccccagatttagagacccaccaacagcttgcaccctcagtgtggaaaagctacaggcac

SEQ ID NO: 137857 - DNA, 356 bp, Homo sapiens
agtcctatgcagggggaatgacagatgcaagacccatagacccaaggggcatgtcatctacatttaactttttttcagagagtcagggagtgcaacttccacctctgatcctattttcctagaaaataacattgcagtgaaaaaaaaccatcccacaagagtcccctggttccagcccagaggcggctgcccagctgtgagaggcaaagccaaaccagaaaatagctcgtctgcctgctgcccagtgatggagagcaccccgggggaaggttagcacgggagcatcatcattagatcagcagacagtggctccgctcccaggcccaggcagcctgctggatccgctctaatgatgg

SEQ ID NO: 137858 - DNA, 362 bp, Homo sapiens
cctacgtgcatatggggcaacccccaacatgctggcccctgccacttgcaatagatcagacccaccccttgtggttgagtgaggcagtattatgtcaattctaaacctggcattttgtttactgttgttgagtgttgttggtagtgggagaagaaaataggtcacagacagtgtgaagacacaaggagaagacagccatctacaagctaaggagagagggctgcaacagcttaattccttgtagtgttcataaagaaccaatcctgctgacagcttgatctcacatagcaaaataatacatgactttttttcctccttgatttccatgagaattgggtgaaagctattactcatataagcgg

SEQ ID NO: 137859 - DNA, 180 bp, Homo sapiens
tactcgggaggctgagacaggagaatcacttgaacacaggaggtgcaggttgcagtgagccgagattgtgccattgcactccagcctgggtgacaaagtgagactccgtcttaaaaaagacaaaaacaaaaacaaaaaaatggaaataaggtctcaaattaataacttcagcttacacct

SEQ ID NO: 137860 - DNA, 673 bp, Homo sapiens
tgtttgtttttttgttttttgagatggaatttcgctcttgttgcccaggctggagtgcagtggcgtgatctcagctcaccgtagcctcctgcttcagcctcccaagtagctgggaatacaggcatgcaccaccatgcctggctagttttgtatttttcctagagacggagtttctccatgttgatcaggctggtctcgaattcccaacctcaggtgatccgcccacctcagcctcccagagtgctgggattacaggcgtgaaccaccgcgcccagctctgctgtgtttttcttaaataactgtgcttgcttatctctgtcagagcacttagcacactgtagttgtctctctgcgtcatttctgtgaattccgttgagtgatgagtttcagtgtgtcttgggtctctaggtatagcagggaatctgttatgtagtagacataacatacatatcttttaaatgaaagaaatggagaactctcattatttgccactgtaataacaactagcattttgcttttttccctaaatttttgtggtaaacataaacatttacagtattaactatttttaagtgtacagttaatgttaagtactttctgcaaccaattattgtgcaactaatctccagaactcttgttcatcttccaaaactctgtaaactctataacccta

SEQ ID NO: 137861 - DNA, 179 bp, Homo sapiens
agggtccagggcacatttttattgctcatgcttggaaaagcactccaacttaaaatcttactatattttaagtgggcttaccaaaaattaaacaggcaccaaactcttaaatgaattaacatttgttttcaaatgcttcctgctgtacccaaatgctcctcccatgcccttcactctca

SEQ ID NO: 137862 - DNA, 181 bp, Homo sapiens
gccaaaggtcgctccaagcgtacaggagatgggccatacctgaggagagaatgtatgagatcaaaaaagaacaaatgttttattattacttgagcacaagtgtaacctaaatatttctatattaaagcttaatgtgctttcttaaagaatgcctaaagtgtaataaggtcataactgcatt

SEQ ID NO: 137863 - DNA, 264 bp, Homo sapiens
aaggcagcagtgatcaccatttatggagtgcttactgtgttaccttgctctgcactaagtgctttacatatgttgttttattgaaattcatacatcagccttaatcattaggtatcattatcccagtttgtggtgagaaaatgaaggttcaaagaggttgaataacttgcccaaggtcacaaagctagttggtaatagagctgagactcaagcaagacttaacaggccaaagggaattaattatcttctcccaaacctgtcccc

SEQ ID NO: 137864 - DNA, 250 bp, Homo sapiens
gagaaccactgatgtcgaccaacgattgtcctgagggtcaatgacaccctttcaaagccaaaattattttcatactaatatgaagacgtgatttgccctttgcacaatgctgacatttgcactgatggtggaaaagcaatggtaggtcaaggtgctggcccctccacaggaattacagtaatgacaccaaaccgtactggagctcttcaccaccacacgctcacagtaagaaaaatgggccgggcgcggt

SEQ ID NO: 137865 - DNA, 226 bp, Homo sapiens
attacagcccgttccctcccttggtgtttttgcaatcacagtgctccctgtgtgtcgccaggtgcctcttgtaagaggtgtgaagttgtggaaatggaaggacacactgaccttcccttagccttcagatactgcaggtacataaatcctgggtgattttatgacagagccactggtctcctcatcccaacctgctgctttccacctgaggtttacatggcacccg

SEQ ID NO: 137866 - DNA, 247 bp, Homo sapiens
cccactcctgggaggtcactgtatggatgctgactgtagtgtattggacaatcagcacagtgcgctacagtccagaactcccgggctcaagtcgtcctctcaccccagactcctgaatagctgggactacaggcatgcgccaccacacccggctactcctttttatcacggactacgacaaaggccatatactcatcatctttctccttttcttcctttctttttttgccagacaatgttaaagtaa

SEQ ID NO: 137867 - DNA, 163 bp, Homo sapiens
acgaggcctggacccctctcgccatagagctgccctggtgacacgcccatgcccgacccagtggggcttcagggcagatactccctgctgcagggtgcccttctccaaatgaaatagggcagccggaggagggagaaggaaaacaatgcaagactcggggccc

SEQ ID NO: 137868 - DNA, 381 bp, Homo sapiens
cccggcatggtggctcatgcctgtaatcccagcactttgggtggccgaggcaggcagatcacttgagattaggagttcgagaccagcctggctaaacatggtgaaacccccgtctctactaaaaatacaaaaaattagccaggcatggtggcgtacccctgtggtcccaggtactcaggaggctggggcaggagaatcacttgaacccaggggggcagaggttgcagtgagccaagatcgtgccactgcactccagcctgatgacagagcaagactccagctcaaaaaaaaaactagtgtggtactggcagaaagacagacatattaagaccaatggaatagaagaaactgcccagaaacaaaccttgtgtatatggtcaa

SEQ ID NO: 137869 - DNA, 154 bp, Homo sapiens
gaggcctctagcagggctcaggctggcgggcagtgccagcagttgcagggatcaaggtcagactctgcacagctaggcccatgtgtctcggcagagtccaccagtcccacccagcagctgaagggagaaagacgaggaggcagggagcagacga

SEQ ID NO: 137870 - DNA, 488 bp, Homo sapiens
gtgcatactgttatctttcacttctccatgtcaacctctgcactcggctttgaggagagaaagctaaataagatatggcccttgcatttttgggaattcaaagtaggtcagtgacacacaagccaaaatgcagtaatatccacaatccttagccagaaagaaagaccatagacagttctgtaataccatgtgacaagtaccatccaacaagcgaccaaacatgcaggacaagaagggagataatggtcacttctttttctggtgatcagtaaaaggctcaaggaggaaaagataattttaaaagatcttgaacaatgaataggaggttccaggcagacaagatgtatccaaactctttgctaaaacaagagctcagtgggggcattccatgagcaattaggattccatttcaggaagcatcacactgctaagtgttttgttccctgttcttacaattaacaccctcagcaggtagacaacccatcttc

SEQ ID NO: 137871 - DNA, 573 bp, Homo sapiens
agttcgacggagactctcctatctactattttctgccctgtcactgcattccaatcaaccaactaaccttctggtggactttaaagacacctggtgtgttcttgcctcaggattagtgtgccccatccccttcacctagaacattctttcactaggtatgtatgtggtttgctctctcctctctcaaatttttgcttatatattccattctaacacaaagccttccttaattaccttgtttaaactataacccaggctccttttccaactttatattataatttctatgggaaattatcacctctttctgtatattttacatgtgtattgttgtcttctcccactaaaatgtattacagtatacttaaggaagagttcttttggtctggtttttactgctatgtctttacaacatacaacagtgcctagtgcataggagcacaacaaatatttaataaatgacaaaaaacctgattgttttgttgagagttaagcagagatctcttctgttcaactataagctgttgaacagaagagagtctccgtcgaactagttcgacggagactctccat

SEQ ID NO: 137872 - DNA, 352 bp, Homo sapiens
tgccctcctcacctccctgttctggctcccagcccctgcacagggctgtggtctccctcctgtgtctatcctcactgcccacatgggcttttgtattctgtgtgccaggtggctgctgccccagccaccctaacaggtgctctctttctgccaatacctaccctggctgcacctgcccctctacccctagtgtctactctattagtttcctgtggctgccataacaaattaccgcaaactgggaagcatgaaacaacagaaatttattccctcacagttttgaaggccaaaagttggcaattaaggtatgggcagggttggttcctattggggaccctgagcgggaatctgc

SEQ ID NO: 137873 - DNA, 629 bp, Homo sapiens
taaaaaaaaacaggtttattagattataattattaaaatgtaaaatttacccttttggtattaatagtttcgtgatttttggccaatgtatgcaattgtataaccaccactaaaaaagagatacagagcatttccattccctccaaaatgttcccttatgtccctttgtagtcagtctcctccaccccagctgcctgcaacctctgatcatatatctgtcctgtaattttgccttttccagagtgtcatataaatagaatcttacaatatgtgggtttttgaggctctgttctttcacttaacataatgtttttgagagtcattcatgttgcatgtttctttcattgctgaatagtattccattgtacggttgtaccacaaattttaaatatctatatctatatatttattaaccatctactatgtgctacctacagtgagtcctgaccacttagcgaagtaggtattattatctccttattacaggtgtggaaactgaagtttctaaatgagagaactggcccaaggtcacacagctactgagtgatagatttggcattcaaacccagatttgtctgaccttcaaaccaagctctcggtttaggatgaggagagtgatagtacttggc

SEQ ID NO: 137874 - DNA, 211 bp, Homo sapiens
gtatttttagtagagatggggtttcaccatgttggccaggctggtcttgaactcctgacctcaggtgatccacccacctcggcctcccaaagtgctgggattacaggcttgagccaccgcgcccggccgatcctttactactttaggattcccactttcccttcagtttttgcctgaaggtttggtaacctacagtcgtgtccattcttca

SEQ ID NO: 137875 - DNA, 314 bp, Homo sapiens
accctagaggatcccaggttcgacaggagactctcgtgcctgtggtcccacctgcttgggaggctgaggcacgagagtcgcttggatctggggggcgggggttgcagtgggccgagatcgcaccactccactccagcctcagtgatggagtgagactcagtctcaaaaaataaataaataaataaaaaaagaattccaagagttccagtatctagtctaaatcttataaaagatttatgcattcctgagtactgtttaatactataactaaacactgatacagcacactaagacagttactggatacaaaaaac

SEQ ID NO: 137876 - DNA, 278 bp, Homo sapiens
agtgtgagttgtactaaagtaaaatcagtattctggatcccttaatgtgcacataattaccacttaggcttctaagcgaaatgatttgctaatggcaactaaaatgtgacatggcccagagtgaaaaaattgattcataacttgggaaggtttgactagattgcccttaggcaagtgcctagagggctttcctgtctctccctaaaccttgcttctgcagttccaatgtacaaaatagggatagggttgttgtgaagattaaatgaaactagggcagg

SEQ ID NO: 137877 - DNA, 362 bp, Homo sapiens
gggttaagatctgagggggaggcctggacatattttttgcactgactctgacggttgaggcagttgatttagttctggagtgcagactaatcagctgaccatttgctctcactcctctgaggtttagaagcctaagaagagaggatttgagccaataaatgactatggggtccttggaacccagtaagccctcacttctggtggagaagatgggcctgtggctgcagacagacctcatgtgaccctgatctccccctttgggtttgtgtgactctggttcagtgactgtgccttcctgtgcctcagttttctctcaatcaaataagctaagtggcaaatggactgtggattttcatgctact

SEQ ID NO: 137878 - DNA, 341 bp, Homo sapiens
ccatctggagagatagaaaatcagtcacgatactgctgtgcatgtgtaaaatagaagtttgtgcaaaatgcagtggaaatgtagagaagagactggctgcttatgagactggtggggagatgtcacaaagtagcatttgccatagatcttaaagaaagatttgccctttcttagaaacaggggatagggatggacattctaggtagagtgaatagcatatgctgaggtatgtaggcctgaaagaaatctgtgtccacgactgggcacagtggctcatgcctgtaatcccaacactttgggaggctgagatgggtagatcacttgagtccgtgagttcgata

SEQ ID NO: 137879 - DNA, 408 bp, Homo sapiens
gatgatttgagcaacactcgaccaacatgacctaagagacatttatagaacacatcactcgacaacagcagaacacacacttttcacaagtgcacatggaacattcaccaagatcacatcctgtgccaggaaacaaactggcaaatttcagtgaattgaaatcaggcatattatattctctggccataaggaaatcaaactagaaatcagtaacagaaaggtagtaggaaaatggccatatatttagacattaaacaacatattttaacccaaggaccagagaagaaatctcaaaggaaatttaaaaatacatatagccaaatgaaaatggaaatacagcatcaaaattttgaggcccaactagagtagtgatgaggtgagatttatagcaacaaatgcctatatttg

SEQ ID NO: 137880 - DNA, 146 bp, Homo sapiens
ttaaagaaaaagtattctttattcctagttctgaactcaatatcgtctttaaaatactatatatgtgaagctcaaaacacttaacactattatcaatatttggttggctagggatcccatataaagagaaatctacaagaggtaag

SEQ ID NO: 137881 - DNA, 427 bp, Homo sapiens
cagcaacgtaccattaaacagtgttggctcagaattcagagcaaagctgaatattaaacataaaagtaattggattttcaatctagttactttgaataaatgaaaattgaaaaaatgtattagaaatactaacagcagaaaggcattcccaatcacatgacttgcatttgaatatttttaggttaatagatattaaatacaggctcaatatcagagggggggggaaaggagtgttgacaggatacgatattaccaatatttaagggtacattcaagagacgtagaaatatgaaaccatagaaacattagctgcattctgtaatgcctaaaattaatctaaatgtcttaaattttggatgactctacaatagatttgaaataaataagtctgaaaagaactaaagaagaaatctttaataaactatga

SEQ ID NO: 137882 - DNA, 146 bp, Homo sapiens
agagggcctggcgctgtaggtggactagccatgttaatcacaaagtccattaggatgatgggtgccctgctgccttgccagggagcctgttagtacagaacatcatctgtggagctggagattgcagggtttgccttcatcagcgg

SEQ ID NO: 137883 - DNA, 358 bp, Homo sapiens
gaatggaccatatactagtccataaagcaaacctcaacaactttaaaagaaaagaaataatacaaagtacattttctgaccaaaatggaatgaaattagaaatcaatagcaggaaaaaattggggaaactcacaaatatgtggaaattatatgacacactcttaaataaccagcgggtcaaagaagaaattaaaaaagaaatccaaaaacactttgagatgactgaaaatgaaggaagcatagtaagacttatggaatgcagataaagtgttacttagagggaaagttataaccgtaagggcttttgtgaaaaaagaagagttaaataaataacctaaccttccaccttaagacggag

SEQ ID NO: 137884 - DNA, 483 bp, Homo sapiens
ggcagaattgggaccagtgaggtcataggaaaccagaagttaggagccacagaggaaaagagttgcagaaaagagcaagtagtcagccatatccattgactgctgctgttaaatccagaaaaaaggccttgagatttgacattgtgatgaccatgctgagtggacttcagccgactggtcgggaaaaaagcagattgaagaggaaattggaggtgaagaaatggaggtataggtatagcaatctttcaagaactttaactgcaaaggaaataaagaaatggggaaaggatttatgttttgtaaggtaagagatcctagaacatttgtactctgtggggtgatccagtaatcattctgtagagagggagacactgacgatacaggacagaaaagatgactgaagagtgtaatcctcaagacgagagttggatgagcgttggcctgatagacacacaccgtcaccagtgttccgactgacaccta

SEQ ID NO: 137885 - DNA, 360 bp, Homo sapiens
agccaggattacaggcgtgcaccactacacccagctaatttttttgaatttttagtagagacagggttttgctatgttggccaggctggtctcaaactcctggcctcaagtgatctgcccatatctacctcccaaagtgctgggattacaggcctgagctagcacacctggcctaatattatttagatttattccactgctttcgttttttacctttttaatgtggctacttgcaaatttaaaagtgcattagtaacccccattatatttctgttggttatagctgatctaggttagggctagtagccctagaagagggattgaaagcagggtgaacaagaaaaggaaagggagagaaga

SEQ ID NO: 137886 - DNA, 394 bp, Homo sapiens
ccggagtgggaagctgagctcaggactcccccagcagaagccccagctggacggcagacactccagttcctcttccagcctggcgtcctcagaaggaaaaggcccaggagggaccaccctgaaccacagcatcagcagccagactgtcagtgggtctgtcgggaccacccagaccacaggaagcaataccgtcagtgttcagctacctcagccccagcagcaatacaaccatcccaacactgccacggttgcacctttcctgtacaggtctcagacggacactgaagggaatgttactgccgagtcaagctcaacaggtgtgagcgtggagcccagccacttcaccaagactggacagcctgctctggaagaactcactggtgagtatggagcc

SEQ ID NO: 137887 - DNA, 774 bp, Homo sapiens
gtgatctagaggaccccagttcgacggagcccctctctggagataaaccactataacaagtttcttgtatatccttccagagagagtctctgcatatacaggcatttgcatgtatattatatagacatgtttgcaatatatatacaatcttcccctcctttggagctgggatttgaatccagacctgtgtaattctaaaatatctgcccatttcaccagacccacagcctctcagaccacagaagaactgggagctgggtgagtagttatcacaagagtgcagcacagttccactctgtaaaggtgccaggtgcatagggaaaagtgagggctggggcatcaggagactcaaaataaagtcctaggtctgaattgatatgttcctgagcaagtccttcccttcgctgggcctcaggtaagtcctctgaaaatgagagtctccgtcgaactagttcgacggagactctcagtgtagctccctggaccagttcaagagcaaactgcagaacctgagctacactgagatcctgaaaatccgccagtccgagaggatgaaccaggaagatttccagtcccgcccgattttggaactaaaggagaagattcagccagaaatcttagagctgatcaaacagcaacgcctgaaccgccttgtggaagggacctgctttaggaaactcaatgcccggcggaggcagcacaagttttggtattgtcggctttcgccaatcacaagtcctgcattacgaattagaagagagtctccgtcgaact

SEQ ID NO: 137888 - DNA, 467 bp, Homo sapiens
aggagaaaacagaaagaagcattgaaatggagtgacctgggggaaaagcttggaggaaatactctctccctgccatgtgacccaccccagttgaacatgggaggaaaggagcagcactatctgtttgggaaagctctttagcagttctaaagaaatgcccctcttttcttcaaccagaccactctggcttcctcctcatcctcccgtcccctcctcgtctttcctcctctcctcctctctctcctcgcccctccctctcatgacaatgtcctgagggcggtttgtgacatctaagaccttctccacgacagggcaaccattggctaggtagtagcttgctgaccaatcaaagctcaggggtctcgttcgtcattgtcctgggaggggtatgtatagggagaccaggcagcctggaatagacaattgagagacgctggcgaagatgaccaggaaacgacgagcctcca

SEQ ID NO: 137889 - DNA, 322 bp, Homo sapiens
tggcggaggtggcagtgggcatgtgcacttggctctgacacagccactcatgcaacaccctgtgcaatctcggcctgggcctgtgtgtcctgccctcattcctcgcgggtgactgtctcccctgagccactcttctctctattggattagctccttttatttccccctagggatgcaacacatttttatgaacaaacagcagtgttcacatggctgtgatgaggacgtactggggtttcccctggacatggcattcatctgatgccagtggtgggcaggaccgtgctgtatactttaaaaaaaccctagggggttctgttag

SEQ ID NO: 137890 - DNA, 205 bp, Homo sapiens
atacagcctttgcagaaaggccatttgtcacttgcaactaaaaatgcaggctctgaattattatgaaaggtttaaaacacctaaatctgttcccagagggtgtgctaatcaatgtgcctcttataagcttgaacacaataatccataacaatcactatggattaataacgggatttcagtgatttccccccacaaagatctacat

SEQ ID NO: 137891 - DNA, 315 bp, Homo sapiens
tggttttaaatttccattctgccccttattagctacatgatcttgggaaattggatagcaattgacacagtcgaccacttcctccttctcaaaatacttatttcccttagcttttgtgatgtaagactgccttgattttccttctgcttctctggctggtctttttttctctctctctttttttcagagcaattcttccctcctggaccctcaaaccatatattttgtgctgagtgatcttatccacataatggcttcagccacagtcaaaatgcagaggattcctgtatttcaatgtctagtctggagctctca

SEQ ID NO: 137892 - DNA, 657 bp, Homo sapiens
ggatgtattttgaggtttgttatgctgcagtgagcataataaaaaaaagtaagcaacttccacgtttttgataattccaggctgctaatttaggtaatggcagacaatagatggatgatacagtgtatacatgcacagcctgggaaacatcccttagccattttggctggggtttggcctgtgtttcctggtgatagtgcatggtaactagtgccactattcagtcaccttgtttagtttaagtatgaaaggtaaaaataaatttagggatttcatataatgccagaaaataaatgtggagtgaaagtagaggtttgctaggctgggtgagataacattgtagttcaaggtgatatcttaaaatgaaaatactcagagaagggctggactgaacaagtactatattgctttgtttgccatatcagtttacataaattattggtttgttgtcccagtctattatactgtactttggtaaagatcctcccttggtaatatacaagcttgatcaaatgacaacctcagaacagtgatgtatttggctgaatgatttttgaatgaatgaagtcagcagttgcagatagcccaagactgcctataaagaaggtgttaaatgagtaatttacagtgaaattactatgagcttaaaaagagata

SEQ ID NO: 137893 - DNA, 331 bp, Homo sapiens
agatgttcatatttacataggaatgatttcttagctcaataagtaaacccacatttgggagaaacaactggtctttcagctaagccatgatttcaacgttattcctacttacataacagattaagcatttatttctcaatactaaagtcaaaagaaacattgggcattgaagagctttatgatattctaaaggccagcttcagatctggagctaatgaagacgggtcaggaattacccagcaattactttattcactctattcagtgtttacacctagaagccccaatcagctgcaaatgatccgacttgaccaggaaatcagaaactttc

SEQ ID NO: 137894 - DNA, 481 bp, Homo sapiens
catctaacccaacacctggcacttactagaggcatcaacgatgcttgttgttctgtgtggcgaaggcacacctggattctggatggtcagtctcagctctccatctttgctgcctcacagggactccaaatgtggagcgtctcccactgcccttaattagggaaattcagcctcgcagaagacagtgaaactgatgaaagcattgggaaatggaacctaggaaagttaaagaattggcatcatttgatgtgagaaagagaagcgaagatgatgagagatcctagggaaaaggctacatgccctgtctttcttgagacaagcgtgtgcacttcctttgcttccactcttacttgtgtttatccttggagggacctttaattatctaacgcttgggtattggccacggtgcttatcgtctgcgtgtgaatctggacatggtccccaagctgtgtggtgctgtttgttggtgcggtccaggatg

SEQ ID NO: 137895 - DNA, 384 bp, Homo sapiens
gtctcacgagacgtgatagttttaaaaagaggagttcccctgcacaaactctctctctttgcctgctgccatccatgttaagatgtaacttgctcttccttgccttctgccatgattgtgaggcttccccagccatgcggaactgtaagtccaattaaacctcttccttgccggacgcggtggctcatgcctgtaatcccagcactttgggatgccaaggcgggtggatcacctgaggtcgggagttggagaccagcctgcctgaccaacatggagaaaccctgtctctactaaaaaatacaaaactagccaggtgtggttgcacatgcctgtaattccagctactagggaggctgaggcaggagaatggcttgaacccaggag

SEQ ID NO: 137896 - DNA, 525 bp, Homo sapiens
tgccaaaaaaggcagcacgcccctgaggctgactggcacccagagccaaagatcagcaacggacaagaagaggctggcgagggcttgaggtgcttcaaagaggaagctacacagatagtggataaatagcagggatttcttgtacttttgccaccagaaaactcatagtgggttggcctatctatcacgctttttaaagaacaggcaaaaaaggattaactagggacaagtgctcttccacccacccctcaggagatcaatttcctctccctgacacatataaatacacacatcctcgaagggtgagttagaaagtgcaccaggagctcgatgctttgggaggcaggggtgagaggattaatcgcctgaggccaggagttccagaccagcctgtgcaacacagcaagaccccatctctacaaaaatatttaaaaagttagccgggtatggtggtacaggcctgtagttccagctacttcggaggctgggataggaggatcacttgaggccaggagttccagacta

SEQ ID NO: 137897 - DNA, 276 bp, Homo sapiens
attcttttaataaattgttgggaagttatattagtttctattgctgctgtaaaaaattagcacagactttgtggcttaaaacaacacaaatctatcatcttacacttctagaggtgagaggtcccaaatgagtttcactgggccaaaattggtgttgtcagggttacactctctccagagactctaggggagaatccatttccttgcctttttcagcttctagaggctgcttagattcctagaataatggcttctttcctcatcttcaaaataact

SEQ ID NO: 137898 - DNA, 841 bp, Homo sapiens
tcacggtgaatgctgccaaaaggttaaatcacgtgagaacagagatgtgactccaactagcaccatgaaggtgactggtgatcttaacaagaacaattccagcagagaggtggtcatagagccagactacagaggatgatgacgggaggggtggtgaggaagtggagggaatgaaaaaaactgtcttttgagaaatgttgctatgaaacaaagcaaaaagaggccagcaattggagaaagagacgggtcaagaagaagttgtaaaacgtgggacatactagagtatgtttctcaacaattgcaaggattccttagggtgaggttgaagctggaagggtaggggcattatccacggagtaaaaaagtccttgaggaagtgagaagagaacagatccagggcgcaggtaaccacattgaaatttaaaacctctgtatgataaacattcacataaagatgaataatagtctattagaagatatctacagcccatgtatcaaagagttagtatagtgatatacattaagaaaaatgagaatttcataagcaaaagacaaatgaccaagagaaaataacatgaacaggcaggaggaaagttgaatggccaagaaaaatacaaaaaatcctcagtgtcatcagtaattaggcaaatttgggttaaaaaaagagatgccactttttaacctatctgattagcaaagtttttaaaatgtgataatatcagtgttgggaagggtgtgggaaagaagtaatgtcagacactgctggttgaaatagaattagtgatactatgttggatggtgtagggcagacaaagctttacctctaccttcataggaaccc

SEQ ID NO: 137899 - DNA, 336 bp, Homo sapiens
tgagctcgtaccgacgctctcatctgttgggggagtaggcataatgatatgacctgggagaggagtgaggctccctgggtttcacctatgaaactgttacaccacagccctcccctccataaccccagtccattagtgagggagtgcccattagccagatacactgatctgtctgttaagaggtaaattggaatcctggcatttaggagtcactgtggagacactggcaagcttgagggagctatgaaaaagagcaatgtccaatgccttcttgctcagggctccatcatggcttcgtggcatccctccagctccacgtggaaaccaggtctgctt

SEQ ID NO: 137900 - DNA, 282 bp, Homo sapiens
ctttccactgtactaacaccaggctctaaattccaagagggcaaaaaccttatctatcttgtttactcgtattcctcctgaacctaaaacagtcggtgctcaatacatacgtttgaatgacgaaatgaatcatggggtgtaaaaactagtgtgacatgggttctaaatgagaaaactgtattacaggatgatttcagctcatatgaaagaattttaacaattagccggacacaggggctcatgcctgtaatcccagcactctgggatgccaaggtgggcaga

SEQ ID NO: 137901 - DNA, 451 bp, Homo sapiens
ctgtctaattttttaatattttttagagacaaggtcttgctatgttgctcaagcaggtcttgaactcctgaactcaagcaagcctcccgcatcagcctcccaaagtgctggaattacacatgtgagccaccatatctggccagataagccaattgtgacatcagaatcacttaagaggatataggtcatgaagcacagcttgatattgacctgtatttgtgtgagtgttgtcttttgatcaggttttaggtgtcagtattatggttgcttaataaaagatttcggatgtttttccagtattttcagtgctttggaacaatatgtgcatcaggctagactcagtggctcatggctgtaatccagcactttgggagaccaaggcaggaggagcccttgaatccaggaggatccccaggactcacctggggaatataatgatcgatgtccctac

SEQ ID NO: 137902 - DNA, 164 bp, Homo sapiens
cacatccagtgttgacgtgactccagagggaagtggagcagacaggagcctcaagggtgcaaacgttaagtttgctgttttcagtctgtgcttggcactttcctcactagatctttttcacttaggttaaacaattctttctcccagtatgaggaatgccagat

SEQ ID NO: 137903 - DNA, 130 bp, Homo sapiens
ctagaaagaaaagccctcagagtggaaatctggccagataaaagtctacgaatgaataggaagttttcttaaaatgcagtgcttaaatatttcagtgagaaaaagatcttaggatctaccaagttggttt

SEQ ID NO: 137904 - DNA, 206 bp, Homo sapiens
cctagaaatttgcagatgtgcctccactgactacagaggagagagagggagggatgctgttgactttgaaatcagagagggcttcctggaggaggtgatgtttcagctggcgcttaaaggaggagggagacttcaccaggtggagtgtgatacagatatatattctgaaccaagggaatagttgagggtgagtatggggacttgag

SEQ ID NO: 137905 - DNA, 264 bp, Homo sapiens
cttaaccctccttcctttcatgtcaacttctctggagtggtctccactcgccgtgcctttctgctctgtacatgtcctctctcaaagtcactcatcgggtgtagctccaaagcctggtaggagagctttaaatagcaacatgaaaaaaaaaaggcgtcttggtaatctcttaaggggacatgtccaaggtaacttcaagggagctgggagaacaataagggctggcacaaccaatggttcccaggctccaatgaatactggtcc

SEQ ID NO: 137906 - DNA, 306 bp, Homo sapiens
ctgggagaggctgtctcactgcttcctgcagttcccctgatctggtccaaaaggaggaaggatgtgtggtgactttgcgaaagaattgtcacttagatgtctcttcatatgtcatctggtggttagggttttgtgtgccaccttccatacataattggcctctcactgccttgttaatgtcaaggaaaaaggaattagagaaagaagtttagaatgagggattgtgttttgaaaaaaatacaatctgaatcagtttccacacttccaagctggtgtggaatgcaccacacacacacacgcacacac

SEQ ID NO: 137907 - DNA, 170 bp, Homo sapiens
tctgcaatcttcttcacttagtatattgtacaagtctttatatattcttctacaacattaattttagtggctacaaagggtttcatggcataggtggacaataatttccttaactccttggagtctttcctctctcgcacatgttatgtctacttagggtccagcacaat

SEQ ID NO: 137908 - DNA, 182 bp, Homo sapiens
attatgagataaccactgaatgaatttgcacaatagacgtgcgtgcccttcatctgccgcgtcatttacttgctttcaaaggactttattattcacctgcccattcattttcacttagtcccacttatcgtcagctttttaaagaggtggagtgattccgtgttacagcaacctacagccca

SEQ ID NO: 137909 - DNA, 374 bp, Homo sapiens
ctctgtgcccaactggggtgaagtattttacatgtgtttcctcccctccacgaaaacctccagggaggtgccactgtcaccccctttcagggagggaaagtgaagctcagaggctcatccacagtcacagctaccgattcttgtccttttacccctttgcaaaactgtgtccaattgatagcgaggggaatagtgtcgactatatgtagcagacggaactagatgaataatataaccacaccatgggctgggcgcgggggtgtcacggcctgcaaattccggcattctcgggaggctgagggaggaggatcgccatgaggtcggagttcgaaatcagacctgggcaatctggtgaaagtccttctctgttaaaa

SEQ ID NO: 137910 - DNA, 340 bp, Homo sapiens
cttgactattacaaagtggcatataccccactttctggagtcagatgtactaccattgtgccacgaggtcacatatatcccaccttcttattattaaattgtgaaacctcaaaatcagataagctgcctccctcagctaagttgcttatcatcacaaatagggatttttgagttgctaatatcttcggcatgtattaattatctaattatgatgcaatttgacagtcagtgaacacgttggccaagtctgctggtaactggtgattttcatgtttcatgtttagaaacagcattgcttctaaagatattgatgacttttgatgaagcacaccaaattatt

SEQ ID NO: 137911 - DNA, 275 bp, Homo sapiens
ttctcttacgttgaaatggtctgtactcggccatgttcccttacgttgaaatggtttgtactcggccatgttcccttacgttgaaatggtttgtactcggccatgttcccttatgttgaaatggtttgtactcggccatgttcccttatgttgaaatggtttgtacttggccatgttcccttatgttgaaatggtttgtactcggccgtgccaggtcattttgggaggtaagtggggagtttcatgtggggttgtgcagtattcttaggtgtcag

SEQ ID NO: 137912 - DNA, 374 bp, Homo sapiens
gaggaaggtcctattcaagttccccacaactaaaaagtattgattctatgacaggtccatggagaaggaaagaaaataaatgggaaaataacagtgatctgattccttgatttggtttacttgtactgcagggttgttaaggaatcagagaaaaacaatcaagtgttagaaggcaaaccctaaatactactgatggtgtagaggggcacattctctatcatatgtgctcaggaaggtaaaagtcatcttcccaatactcttaaatcacacaacactatccacctactgtcatagctagtctcatttctgggctaaaaaaaaaaaatcttttcaagtgagacattacatgtgaaggttatttctaaatggtaaca

SEQ ID NO: 137913 - DNA, 553 bp, Homo sapiens
agaactcatgcagggcgcttgggcctctcaccaaaccagccagcagaaaactcaaagagccctctaatgactgctcatctgaggttcctggccctctgtggggggttctcaggagggcaaggatgcctgttctgctcctcttggggaggcagcctcctcaaccatgggtccactcagcaggcctggcacaatgaaaaccaactggaggctttgagtccctgagcctgtgaacaagttccttcagtgtttcactgctgtgttcaggtcaaagtgacaggctcatgttgagtgtggacttctcttactcttcttttgtctaagtaagtcagtatcctgcaaggtgtgggtgctgacaccagtagcctaggggcacagccccaagagcaactctactgggagaggaccagcaccagaacctgctgcgtcactgggctgccagcccttcacccagctccactcccaagccagtttttgttattgaaatagacaccctctttccaaagcagtgcaactgccagaacgctgattaaaaagttaatgattgggccagatg

SEQ ID NO: 137914 - DNA, 715 bp, Homo sapiens
cactctgccctgactcataggtacagtaccacccttttctctctgagatttttttttttaatcttattttactgtattaaatcttactaatattctgtaagggacaaaccagacgagtaggctacagtgaagaaatcttattttggagagttaagaaaccactatgatacttccaggtattatcttcagtgatgcttcttatctttattcagggactccaggtaatattcagctcctacagctaccacaaatgcagcaaatccccatttgaatcctttaaacaatacatcaaaaaaggaaacactctttgcaaagccacccatgtatcttcaagcttcattgtggccccacggatcccttagccctttttcagccagcttcttctggatagtttctaatggtgtcccttctgtcttccgttgtctgtaatctagaagttccattttacgatgtccatgctcatgtccatgtccatgggccatgtctgacagcaatctgacctctcaggacactcaactctctctctctgagatcttaatggtagttttccatatgtcctctacatcctttataacctcagtttcttccatcttaatttgttttctacctgcctttcatattagaggcaattctcaactgtttggtgtttcttggctatttgctggtgttttggggggtgcactgaaagctgctggatgcactcttcattggggaa

SEQ ID NO: 137915 - DNA, 792 bp, Homo sapiens
ggccaggcgacgtgactcaaacacctgtaatcctggcacttggggaggccaaggcgggtggatcacctgaggtcaggagttcgagaccagcctggccaacatggcaaaacctcgtttctactaaaaacacaaaaattagccgggcgtggtggcgcgtgcttgtagtcccagctactcgggaggctgaggttgcagcaagctgaggttgcaccactgcactctggcctgggcaacagagtgagactcagtctaaaaagaaaaataacaacaacaaagtgtggtctctaaaccagcatctttggagcttgttaggaatatagtctcaggcactgctgcagacctgctgaatcagaaccttcattttaacaagatccccaggtgattcatgtgaccccctcaacctcaggctttttgtccatccagtggggaggctaaggaagttttttgggggcattgctatggagtacttaggagagcctgcgatcatcaagatgacctttgaagcttttgtcctgtgggttgccacatgggctaagtcgtcccaggtttgggtaggtgaagcagcaggtcctaggtgtcatagattaagtgtcagatgggactctcagtacagagtggggaggggtgcagaggttgcaccagatcagggaagcaccccaaggtagggaggggatgaaaacttacttgatgcatgaggatcaaagaccttggacttgggcccagacttgtaccttgcacaccctgagtccttcacattagggttcataaccttttggtaactaagtgggtcca

SEQ ID NO: 137916 - DNA, 823 bp, Homo sapiens
ggccaggcgacgtgactcaaacacctgtaatcctggcacttggggaggccaaggcgggtggatcacctgaggtcaggagttcgagaccagcctggccaacatggcaaaacctcgtttctactaaaaacacaaaaattagccgggcgtggtggcgcgtgcttgtagtcccagctactcgggaggccgagggaggagaattgcttgaacctaggaggtgaggttgcagcaagctgaggttgcaccactgcactctggcctgggcaacagagtgagactcagtctaaaaagaaaaataacaacaacaaagtgtggtctctaaaccagcatctttggagcttgttaggaatatagtctcaggcactgctgcagacctgctgaatcagaaccttcattttaacaagatccccaggtgattcatgtgaccccctcaacctcaggctttttgtccatccagtggggaggctaaggaagttttttgggggcattgctatggagtacttaggagagcctgcgatcatcaagatgacctttgaagcttttgtcctgtgggttgccacatgggctaagtcgtcccaggtttgggtaggtgaagcagcaggtcctaggtgtcatagattaagtgtcagatgggactctcagtacagagtggggaggggtgcagaggttgcaccagatcagggaagcaccccaaggtagggaggggatgaaaacttacttgatgcatgaggatcaaagaccttggacttgggcccagacttgtaccttgcacaccctgagtccttcacattagggttcataaccttttggtaactaagtgggtcca

SEQ ID NO: 137917 - DNA, 292 bp, Homo sapiens
tgcacgattgctgagccaaagcagatcgaaagtcattttggtaagaggctagatgctgaccttgtattctgaaaatctgatgattctactgttgttgatgtgattccaagtaagcctgtgtgaacttctgggctattctcagggaagtgtttatgacacattgttgaaggtatcatcagggcagttgatccaagaagactctaggagctggctaagccacaaagtctgcccaaaaagctcagaatgacaaatgaatgttttgtacattatctccactataatgctagaaaaa

SEQ ID NO: 137918 - DNA, 339 bp, Homo sapiens
ttgctttcttttctcagtcaccatcagagatggtgggttgatggaaacctatggagggagagcctttggtcggctggtgactgggacgcccttccaaagtgagggtcccttagtgggcgggtacaaccgaggagcctgcttcactatgttttcttggaaggcgaggctggaagctgtggcaaggagatgggggagaaagggcagtttcctagaccctggaaatttcccgacagcctcgggggagtccacccaccgaaatctcccctaaataagagcacctcctctcttcctcccaaccttgttggacttagtcggccgccatctggatggcagactgtg

SEQ ID NO: 137919 - DNA, 333 bp, Homo sapiens
tgtatatgtgcatctgtatgtctatatgtgtgtctgtgtatgtgtgtgtctgtatgtgtatgtgtaactgtgtatgtgcctgtatgtgggtgtatatacgtttctgtgtgtatatatgtgtctatgtgtgtgtgtatctgtatgtgcgtgcacacgtggccatgccacactgccgggtcttgtctacattttccttagcagagagggagccccacagtggactctgcagtgtccacatccagcagtggccggcacatggcaggcactcagtttaggcagcctgagcctcctcaccatgcacacctcctaccccaggcccgggcaacgcagcag

SEQ ID NO: 137920 - DNA, 339 bp, Homo sapiens
atagcttatactgctgcgtcctgcagctgaagagagatagtggtctctctgtatgttcatgaccactcctctccagcgccatgctcaattctcacagcctctttattcttccacacttgaagggagacttttatagaagatgctttgaatattacattactgctccccattctttaatcttgcaagacctatccctcatcacattttcattaatgaatttgcccattacttcatggagaaaatagaagcaatgtgaaaacagccgtcatatccttctctcacctcattcaactacctctttgcatctgtactgaatgaggtgagagtctccgtcgaact

SEQ ID NO: 137921 - DNA, 413 bp, Homo sapiens
agaatcgagtcggtaccaacgtcatatgagcgggagtcatagggaagagaaagaaatggaagcacagcttctttcagacttccctgacaagcccatggcaatttgtcatcccctccttattttatttgggagagggaaatgtttcagaaacaaaagggcctcatcccctttattttccctgtgtatacattcactgctgtccagtgctgtagacaaacggtttgtttgaaaacattttgtgaaagcctgctttgttccacagcattgtctccactcttgaggagcagaagcatatatctttatgagaaagatggaggcttgagttatgaaatacttttacatttaaggagataaaggatgtacatatgaatgggcacattttactgcacacttcagacgcttatatgactttt

SEQ ID NO: 137922 - DNA, 361 bp, Homo sapiens
gagacccagtggttactgtgcacttaggaaaaccttcagccacatctttcttattagtttacagtgaaatgttatctcagggacattcaaacaaaggaggaggagtcatagggaagagaaagaaatggaagcacagcttctttcagacttccctgacaagcccatggcaatttgtcatcccctccttattttatttgggagagggaaatgtttcagaaacaaaagggcctcatcccctttattttccctgtgtatacattcactgctgtccagtgctgtagacaaacggtttgtttgaaaacattttgtgaaagcctgctttgttccacagcattgtctccactcttgaggagcagaagca

SEQ ID NO: 137923 - DNA, 550 bp, Homo sapiens
aagatgaactcatgtcatccagcaaccctgtgaggtaggtagttatgctggagtggacactgaggctaaactgctttcccatggcctcacagtgctaagtgatgaaaccatggctccagccctggtagtctggctccagagcatgtgtttggaaccactatattctgctgcttgtcttggttcccaaggtgggaggttcagatcctctatttatgacaccaaacacagctggccagtgctggaacgaatgccacgtgttctgtctctgagacttacccttcaacgagtgtattcagtgtgtttagagcctggtgtgcagtagcatcgggtggcctacatcttctgggatgcttgagacggaagacctgtgagtaggaagctaacactggctccatctgattgtaccattaggccgagttctcttttatcccttgagtggtatgaaactaaaacccttttatttcattgatttgaatatttgagtacctaatgtggctcagggtaggtactttctaaccttgaggcagttgagtaaatgagcacaataaac

SEQ ID NO: 137924 - DNA, 321 bp, Homo sapiens
ataacaccatcaaatgattttttaaggatatttcaaaaaccagtcaagcacacttttgaataaaaactttgcaaattggaattaaataaaggaacatgatatagaaaacatcaacaagaaacttaccccatgaaggtttgtttatagtcagtttcagcatcccctttgcttgtgaaggatgagtgactattgggtatatctcaatgccatatgtattattgaataggtttgttacagttttatcagagggaaattctatgaatggcagccagtgcataccttgaatgattgaacaaccaaagcatcctcctagaaggaaag

SEQ ID NO: 137925 - DNA, 515 bp, Homo sapiens
ttggtgaagtcactgatccatttatgtctcaatagttgaaggaagaagtcatgttgaagttcagtcagtatgagctagatgtggatgtatttaagtggttagttacaaagggaaagtccagcttgaacagaggccatgcagggatggggatgaggtgcagtatagatacttgggggctggtcagcttccaggggtgggaagtaacaggaaggaaagctagatcacagggatcctgctgagcttaagccatttagatctgatcttatgggcttgcagataggtaactggggcaatcatgtgataaaactaatgttttacaaaaatgatccattagtttgtagtatgctttgaaaacgggagagtcttaaagcagtggaataagttaaaccgtagaactacttctggcaagaggtatggagttctggtccttctgtctcatttgcatagccacctgctcccacatgtggaacatgcaggaaagaatacaggactgagaataagtgggttctgtgtgg

SEQ ID NO: 137926 - DNA, 486 bp, Homo sapiens
atgtcagattgataatttaggtagagttctggaaaacattaatctacaaacatatgcctgatagaaggatatttgcagaaatggctgcaagtgccatattgttccagctggtgagtgtggtccataaaaattcagtctttaaaaattatagtatagtccaattgtaggactgtgtgctcagtgaaaatgcactttacctatagatagggttgggagaaccaccctgtcttaccacagtgtatgtccgctcaacacactgccatgacctgggaagagaactttagggggacattcttatgaagcccttccctgtacctttttgttagttccttataatcccagaaattttctattagggtagataaatgaccataaaacctttctaccccgttgaggatgtttcttaggacttcttttatgacaaccatctaaactcagccacatctgcctctggcatgtctagtttggggccacctctctgcatcc

SEQ ID NO: 137927 - DNA, 841 bp, Homo sapiens
atggaacaaattcaacgggaaacaaccattatccctgaggcagctagagaagctattcagttttttacgaggttacttgtcggggcagagtctggcagaaacaatgggaacaaattcaacgggaaacaaccattgatcctgaggaagacctgaacaaactagatgacaaggagcttgccaaaagaaagagcatcatggatgaactttttgagaaaaatcagaagaagaaggatgatccaaattttgtttatgacattgaggttgaatttccacaggacgatcaactgcagtcctgtggctgggacacagagtcagctgatgagttctgataccaaacactcaaaacatgcattgggctagcagaatatccatgtttattaccagactggttctggaagaagctgtaaagaatactaaatatgttgggttataggggattgaccatgttacttttcaaaaccaggacatttaaagcatctactatgtaggtgcatgaggagtatgggaaaaacagaataaaggaatctgcctttaaggagcttacaatcatgccgggtgcggtggctcacgcctgtaatcccagcactttgggaggctgaggcgggtggatcacctaaggtcaggagttcgagaccagcctagccaacatggtgaaacctcgcctctactaaaaatacaaaaattagccaggcgtggtggcgggtgcctgtaatcccggctactcaggaggctgaggcaggagattcgcttgaacctgggaggctgaagttgcagtgagccgagatcgcgccattgtactccagcctgggcgatgagcaaaactccatctcaaaaaaaaaaa

SEQ ID NO: 137928 - DNA, 1285 bp, Homo sapiens
ggctaggtgcgaggctgggtttgaatcggccgaggcgctcgccgggacctggaatccctgtacgccgaggtgggagccggtggaccggtcccccagccggcccccacctccgcttcccggtgtttgagggttcgggcctcccgccggggagttcacccctcgggctcgtcagtagggctgtggctgtcgcctcttcctgcagcgccaggctccgcccggtctcacagtcggcttaggggctttgcgtgcactgcggttgggtggaaaaacccactcctggttgtttagacgttggcctgcagacgatgtcatttctgtattcctctaaggcaggaagtcattatgcaacttacacatattcatcagatttcctctgacttacccggacatgtacgtgggaatgatgtgcactgccaagaaatgtgggattaggtttcagcctccagctattatcttaatctatgagagtgaaatcaaggggaaaattcgccagcgcattatgccagttcgaaacttttcaaagttttcagattgcaccagagctgctgaacaattaaagaataatccgcgacacaagagttacctagaacaagtatccctgaggcagctagagaagctattcagttttttacgaggttacttgtcggggcagagtctggcagaaacaatgggaacaaattcaacgggaaacaaccattgatcctgaggaagacctgaacaaactagatgacaaggagcttgccaaaagaaagagcatcatggatgaactttttgagaaaaatcagaagaagaaggatgatccaaattttgtttatgacattgaggttgaatttccacaggacgatcaactgcagtcctgtggctgggacacagagtcagctgatgagttctgataccaaacactcaaaacatgcattgggctagcagaatatccatgtttattaccagactggttctggaagaagctgtaaagaatactaaatatgttgggttataggggattgaccatgttacttttcaaaaccagcactttgggaggctgaggcgggtggatcacctaaggtcaggagttcgagaccagcctagccaacatggtgaaacctcgcctctactaaaaatacaaaaattagccaggcgtggtggcgggtgcctgtaatcccggctactcaggaggctgaggcaggagattcgcttgaacctgggaggctgaagttgcagtgagccgagatcgcgccattgtactccagcctgggcgatgagcaaaactccatctcaaaaaaaaaaa

SEQ ID NO: 137929 - DNA, 1405 bp, Homo sapiens
ggctaggtgcgaggctgggtttgaatcggccgaggcgctcgccgggacctggaatccctgtacgccgaggtgggagccggtggaccggtcccccagccggcccccacctccgcttcccggtgtttgagggttcgggcctcccgccggggagttcacccctcgggctcgtcagtagggctgtggctgtcgcctcttcctgcagcgccaggctccgcccggtctcacagtcggcttaggggctttgcgtgcactgcggttgggtggaaaaacccactcctggttgtttagacgttggcctgcagacgatgtcatttctgtattcctctaaggcaggaagtcattatgcaacttacacatattcatcagatttcctctgacttacccggacatgtacgtgggaatgatgtgcactgccaagaaatgtgggattaggtttcagcctccagctattatcttaatctatgagagtgaaatcaaggggaaaattcgccagcgcattatgccagttcgaaacttttcaaagttttcagattgcaccagagctgctgaacaattaaagaataatccgcgacacaagagttacctagaacaagtatccctgaggcagctagagaagctattcagttttttacgaggttacttgtcggggcagagtctggcagaaacaatgggaacaaattcaacgggaaacaaccattgatcctgaggaagacctgaacaaactagatgacaaggagcttgccaaaagaaagagcatcatggatgaactttttgagaaaaatcagaagaagaaggatgatccaaattttgtttatgacattgaggttgaatttccacaggacgatcaactgcagtcctgtggctgggacacagagtcagctgatgagttctgataccaaacactcaaaacatgcattgggctagcagaatatccatgtttattaccagactggttctggaagaagctgtaaagaatactaaatatgttgggttataggggattgaccatgttacttttcaaaaccaggacatttaaagcatctactatgtaggtgcatgaggagtatgggaaaaacagaataaaggaatctgcctttaaggagcttacaatcatgccgggtgcggtggctcacgcctgtaatcccagcactttgggaggctgaggcgggtggatcacctaaggtcaggagttcgagaccagcctagccaacatggtgaaacctcgcctctactaaaaatacaaaaattagccaggcgtggtggcgggtgcctgtaatcccggctactcaggaggctgaggcaggagattcgcttgaacctgggaggctgaagttgcagtgagccgagatcgcgccattgtactccagcctgggcgatgagcaaaactccatctcaaaaaaaaaaa

SEQ ID NO: 137930 - DNA, 1254 bp, Homo sapiens
caagttcaactgtggctacatctttgctcttaagctcaagagcgtgctttaagttcaataaaataatatcattgttcatattaatgttattaaggtaaacttattcattttgtgaccctgcatttccttcaatatttgttctaaaactgttttgtatgagagtataagcataaccataaaaacctggttgggtaatataataaaaataatgtggcaacaataagagggaacaagattttggcgttcctttaaaagtttctgtatattttacttaagtataaagaaaattgttatgaatgataggaggaaggatttttgtccacctattaaaaaaaaactgctgtgaagcataggaagtttcaagcataaaatcaagcagtagataaatgttctttgaacttacgaatttcaaattataaatttcaaccatgctattaaagatattcaacacagtggatattccttttgctttcaaatttatctaaatatatgagacaggcaaaagctcaatgcaaaaggcatgactttataaaatggatccattttgccaacagctcaaagaattatggtaatattgtgggaactgagtgaaaattcagagtaggttttgaaatgtgatacaagtagaattttaaaaagaaaaagaaaaaatttctgtatttagctaaaatcataactgtttcctttgcaaactgacataaaaatgaagaagcaaaatgtgtctttagttatatccaagttccaaattcaagttaattactgctgctcctcactcttctaccttttccttcaaatttaaagatgggctttgcagagattaaagcttcagaaaaaaatatgggaaaatatgttaaaatgttgacctgaaaatgaagtggatgactataaaactcttgagagaattagactttttgtagcagtttattacatgataataccttaaaggagatcacattcagtgacctgcgttgacaggtaatatttaaaattaagtattaatgctgattaattcaggcagatgggtggtagcctaaagtatagacatttttccaatattaattttgatattaaataaatgacatcggctcttgttggatattgtaaaatttcctttacttcaactgtaaaataatttcaacagtgaaaggtataaagtaagatgaaaatttccatcatgatcttacctagagataacttctctttttttgagtcggagtatcgctctcgttgcctaggctggagtgcaatggcgtg

SEQ ID NO: 137931 - DNA, 477 bp, Homo sapiens
caattttttaagtcacattatcccctaaattctcattgtgtaagattcaaacaacatagaacacaaagttctcctttggccagctccttctgttcccctccctgtttgaattctcatgaggcttgatctttaacattatcatttctgtttgtgtattccttaggaaggctaagattatgaaaatatttttatggctttgtttttatgcataactctataaagagtttcttcctagtccatgaagaactttactttggaggtggtgttaaaaaggctgtgtaggccgggcatggtggctcatgcctgtaatcccaacactttgggaggccgaggcaggcagatcatgaggttaggagatcgagactgtcctggctaacacgatgaaaccctgtctctactaaaaatacgaaaaaaattagctgggtgtggtggcgggcgcctgtagtcccagctactcaggaggctgaggcaggagaa

SEQ ID NO: 137932 - DNA, 1349 bp, Homo sapiens
tgatccagaattgtctttctgaaaggaagcactcggaatccttccgaactttccaagtccatccatgattcagagatactgccttctctctctctgggattttatgtgtttctgatagtgaattgttgatgtatttgctactttgcttcttttctctttcaagacttgatcattttatatgctgtttggagaaaaaaagaacttttgttagcaaggaggtttcagaaatgattttggattttctgtaagtgtttaatttagttctaggggacagcatctctcatcccggagtaaatttctgcctttgacctgcatggattattttttcaggctgcggaatttctcggcacctacctgtagtatggggcacttggtttggttgcagagtaagaaggtggaagaatgagctgtacttggttaagcagttgaaaccttttttgagcaggatctgtaaaagcataattgaatttgtttcacccccgtggattccagtgggcccgacagcgcaacaggtttgcagatttcttttgaaattcctttttcccccctccctctgcctcagcaaaagaaaagaatccatataacaggttcatgttcaattgcttggcttttcagcacttattctgaagactttataatatttttaaacttgaccttggaacacagagggctttgtgggtgaggtgtatttatatttacttaagggtgcacattttaaaaatcttattctgtgtttgtacaaagacgcaaattttcatagtgcctagaaatagcacagatctattctactcaagattatttgtattttttcagggtattctacctagagcctgtggttaatcgcctccctgctccccctaccttttattccctaccccctcagggaatttggatacatgtgaggaatagtcctttgtttttcttatgaacctagaaaattacagatcataaaatctggatattaaagtagtttccaaaagcatctcatgggaaatcaaagtgctcggcatttccgagctggagaataaaatcaagaatccttaagagagaaaagaaaatggagatggaaatatgaattttaactgggaaaaataattggaaagctaaccttttcaaatactctaattatgaaagttggaaaaggttgtgatgctcaggattatcctgtaatgtgtgaagatacataaattagcacctaatttataggcaaattttggtaaaacacaaaaaattatggtatgtctaagttcatgaaaagtatgtaaatgcagtgggcctagaaacctggccacactgaaatacagtttaatgtggaaacttttctaaatacatattgtagcatctttgga

SEQ ID NO: 137933 - DNA, 161 bp, Homo sapiens
cccaagttacacctgaagagggcactaacacatccaatggtaatctcaggctaaggaaaaaggaaatcagtcttgtgccatttccaggaggaacagcagtaaaccttactgattcctcacccgttaattttattaccgaatttggggaaagctcttgtttt

SEQ ID NO: 137934 - DNA, 466 bp, Homo sapiens
actaccctcacaattgcctacatcccccaattccctctacactatgaaggaggtgctatttaagcttcaatcatctagccaatcttttggtgtcacatcttctatggttcctgtgtttatgcatgtatatgactgtatatgaaggtttttatttgtttttatttttttcttctgcctgaaaaaaataaaaagttttaactttttatctggactccttttagactcagagaaaagttacaaaaatagtacaggttatttccgtattgctcacccagactcccccagtgctaacatcttacataacgacatacagtacaataatcattgtcaaaaccaggaaattgaacctgcttggttgggaccggttgggagcgtggagagactccctagtgcagggtaagtgagagatcccccacgagccacatttccattgtggactcactcctgtaatcctagctatggaaga

SEQ ID NO: 137935 - DNA, 494 bp, Homo sapiens
cacgctgtgatgtcctgtgagtgcccgaagtttgaccgtgcagccacgccactcatggacttaacccctcgcatcactgcgggacattcagcagcttcctattttgtacggttgcgttgtcttacacgcacatgcatctgtccccccaactggaccctagcgttcttgtgggccatgtccttctctcacacttcctcgcacccctcaggatggtgaagagctgacacagagaagactctggtgagtgttggcggctgacctgagcaaccaacccccaacattggagcatcatcacggctgacctctgagagctgaactgcacaggagaatttaactacaccaggagcacttagtcattccttcccctgggtaacaggaggcagggcccagccatgcaatgaactgccaaatgcctcaggtatctgcttgatctcttgggtctcctaagctgcttctctcccagcctccctctctcattcatcgctcgtgttggc

SEQ ID NO: 137936 - DNA, 104 bp, Homo sapiens
atgaagagctctgtgtctgtggagattgctgtggtgtggagagttctgtgtcagtaaagagctctgtggtgtggagacctctgtgtatgtggagagctctgtgg

SEQ ID NO: 137937 - DNA, 271 bp, Homo sapiens
gattcttgcatcgggatggcctaaagccttctattcatagtgtggtgtgagaccagccacatcagcattacctgggaacttctaagaaagcagaacctaaggtcccattccagacctgctgaatcgaaatctaagatcctcagtgatttgtttgtgcgttaaagtctgagaagtactggctgaagcctttggaatattgataataacagtttcactttctttcagtatcaaagaatgttcctcaccctgagaataatagtaatagttaata

SEQ ID NO: 137938 - DNA, 404 bp, Homo sapiens
ataaaaacaaatctaatgagagaaagcagatcactggttgcctggatgggttgggggaaaggctgttggtggttcagagaattatggggagctgtgagaaaaaaaacacaggaggcaactcttgggattgagagatatcttcattatcttgattgttgtgacagcttaaggagtgtgtacatatgttcatacttatcaagttggacttttaaataagtacagtttattatattttagttgtacctcagtaaatcaataaacaataatagctgacacaaagtgttcttttaaaatgtcaggcactgtttttagttctttatataatatatataagacatatataaacatatttagaacaatacttaggtactcaataaatattagttgaaaataaatccagttta

SEQ ID NO: 137939 - DNA, 248 bp, Homo sapiens
ctcagcctgcctgcccttacttctgatttcccaagcagtgtgggagctgcatcccttcctcaccgttgttcctgttccgggccaccattcatcggaaagcaggccagcttggcagcagccccattcctattcctgcccccctccggcaccctgcccaggcctccggaagcccaaacagctgatctgagatgtcaataaggcccttccagctgcacctggcctggctgaaagggagccccgggggtacc

SEQ ID NO: 137940 - DNA, 351 bp, Homo sapiens
tctacagtcaggaagcaggcttgagcaagtggctcaagagctccagttgtttttattaagcttaggtttttattaagctagaagaatttggtaacacccccaggtatccttgggaggcttccaattggttacaccctatataaatgaagaattggctcatggccaatcagaggctgcagtggagttataccatatgcaaataaagaattagcccacagcccatcagaggctaaagctttcctttcagtttaattcaaggacgtcagccacaggttggccttaggctctgtctccagactctactttcctacctcagcttgccgccctccccttggtgttgagttcttgccc

SEQ ID NO: 137941 - DNA, 326 bp, Homo sapiens
tgccatgcactttgggtagcttcccatccagagatgtggcaaggatggcaggttgttccactgttggagatgctgagtctgacgttggcttaggatgacagacagctgtctaccctcagcagagtgtgcttttccctctcagtctgaaagtaatctgtttgtgaccctttggcatcagctctcttgcatcctgcctgaatcagtagtttcgttggggttggaaaaatggtgattttctttttttttttttgaaacagggtcttgctctgttgtccagactggagtgcagtggtgtgatcagagctcactgcagcctcaacctcctg

SEQ ID NO: 137942 - DNA, 328 bp, Homo sapiens
tcactatgaaaatccaagtgtgtcaaagaaatattgtaaaatgtacatatgatataaagccaagaagagccacatggcttctgtaagaatttgcaaatactgaaaggatgaaaatactcttactctactttttacaccaagaaatagcaaaagctttatagcagttgaatttatttctttgcaaaccagagaaagcaaaaagcagttagcaaagctatatatccctatgaaggaacgagaggcccggttttgttagtaactttaaaagctgcatcacatattaacagacatctgcttatctattcttttgctcctgttttcccagagc

SEQ ID NO: 137943 - DNA, 256 bp, Homo sapiens
acaagattgtggtgatggttgtacaactctgtaaattaactaaaaatcattgaattgcacacttaaaatgggtgaattttatggtcttaaattataatttgataaagatgtttaaaaagtgggtgatctgtgttcttattaaaatggattataatgtttttcaatatttcatgtgcagtggaacttttagccctagttctcttggccactggaatatgggagtggagtgaagtaggtaatctatgccttgcctaag

SEQ ID NO: 137944 - DNA, 154 bp, Homo sapiens
gcacctagcccctaaatccttatctttaaaaaagtcttagggcctctatgtttttcttttaaacaaggtcttgtataaagatggattgctctctagaagagaaaatgtttccagtttttgagtcaatgcctgtgtcatcttttgtcttctttta

SEQ ID NO: 137945 - DNA, 536 bp, Homo sapiens
cctgtatgttctgatgcatatatcccgttttttttacaagaaataaaaataaagaaaaaaaagaaaatctcttgcaaccaatgaaaatgaaaacaaaatataccaaaacatatgggatacaactaaagcattgctaagagggaatttcatagtgataaatacctatattagaaaagaagagaggattttaatttagcagactcacctagagagcacaactctgattttgttgagaaagcctatctccacagaacctaaaacacacaaactttcaaggtaggggagattggaatccaagaagaatgcaaaaacattttgcaagctggtaagtctctggactggagaatatctggatcaggaaggaggcaagatggtcgactagatgcagccagaaggaacatctcccaccaaaggactgggacatcagaaagactggcacactcctagcagatcttcacagggaaggcactgagggcagatagagggaagacacagatgctgggctgcagagggaggaagctgggaaccctgagcaa

SEQ ID NO: 137946 - DNA, 693 bp, Homo sapiens
ccgggcccctgctcctcagtggtgcagccacaagcagaattttcagaagcatggatgggatttccgacttcatctagacttcacatccgctttgttcagaaaagaaaactcaggcccggagacggatagttagtgatttgccaaaggtcgtgtagacatcagtattgctgccatcccaggagccagactcaaatctccttactgacctgtctatctcaacaccctttagaaagagagccaccaacactggagttggagaggctaggggtttgtttgaacagagaagggatagtgtgaggtcaaggatgcaaatttctaaaattctgagctgggttaaaagaaaaatctttctctactgtggtaatatccacattggaacaagggaccctcctctcatcccttcatcaccagactatattcaagtcacgtatccccacccagagggaaaggttagctgcagatgaagaagatggagcacaaacactattattgcctgattcactttgtggaaaattttctaatcctggccctgccatttcctggctgcgtgtccttgggatagcagaccaagatagcctgtccacagaggctgggtgcaagacccaggctgatccaatcctaagaccatatcctcctggcaaaatcagagaggagcgtgcgaccaagatgggccattcagatgctgtttcaaac

SEQ ID NO: 137947 - DNA, 372 bp, Homo sapiens
acaggcactccccaccacaccaggctaattttttgtatttttggtagagaggggatttcaccatgttgcccaggctggtcttgaactcctgagctcagcaatccacctacctcagccttccaaagtgctgggattacaggcttgggccgttacacctggccttagatccttttatttttaaatgtcagcaaacaactgatttttttccctcagttctttgcaggccagcgtgtaagggggaaagcaggtaagaaacaagtctccgggggcaagcacaggctccaagtagcacattaagaacctagatttccactggtctgtatcccattctgccttggacgcctttacttcctgctgctcactgagaagcct

SEQ ID NO: 137948 - DNA, 482 bp, Homo sapiens
agccaccgcacccagctgaattttccattctttcattattatatataattatttttttagaaattactttttctcgtggattattatattggactatgttccttaaaatgggtaaaattcagaatagttttaaggttcaattcaaaagccaaacccagagtgagcccttgccagccagtcaaaagtccttttaccctggaatggctcgtgcatctataggcatagacgttgaaagtcttaaacgacatccttcctttacagcgttaaatatctgttcctgatttcagaaatagacaatataataacacaaaacataagagaaatggatgtagagatgaaaacatgtagggcaggcatttaattggtgggatcacatgctcagtaattgttttgtccaccagtgattgattctgcttgtgtattgactatttgagaacactgtctctgtgaggcctggctgactcttggatgtcttaaactga

SEQ ID NO: 137949 - DNA, 766 bp, Homo sapiens
aaatcatcataccctaaatcctgtagagatgtgacaagacatacatagttatcaataagttgtatctaataacaacaatttttaacgcagcacaaaactgaaatgtactgccagtgatttcaaggtaacacagaaatacctgcatattcaaacaataaacaacatccgtattcagtatttttggtttaaaattaaggtaatggtagccaaaaagcaacatctattgtggagaaatttgactcatttaacaaaagacaacttagcttgctgggcctgaaggaagaactcataagtatttgtcctatctcccagcctgtccctcactactagtattctattatctcgtattacatgaaaataagtaatacacatggtactgttactttgatgccctgaggaaagctcaacttgctgtattcatgccattttatagtcccctcccatatttaatgcacactgggttatgtgaccagcactcaccattggaacattagcaaggatgaggaacacagaagcttgataaataccggcacactagggcttggaaaggtctttcacggaactgccatagctgccatgctatgaagaaggccaagctggctgggcacagtggctcatgcctgtaatcgcagcactttgggaggccaaggtggcagatcacgaggtcaggagttcgagaccagcctggccaacatggtgaaaccccatctccatgaaaaatacaaaaattagctggacgtggtggcacgcacctgtaatgccagct

SEQ ID NO: 137950 - DNA, 529 bp, Homo sapiens
catggatgtgtccacagggaggaggcagaaggatccagagctttgcactgtgtgctgatggcaagcccatgaagagaaaggacagagggagcaggagggtcaggagacagtaaaatggattctgttttgacatgggttgttagtgataaccaatcatcaaggtgagaatgtccagtagattttggaaggaggctctgacaatttggagatgcatcaagactaccatttagctccagggaatcaaagatgttgatgtgacaattggagaaataagatcagatgaaacagccaaaggagacagcctagaagatgaagatggcacagagagaacatgaaaaaaaaaaaaagagagagagagaaagaggagtcacacatgtggttcactgacaactaaacaaaatgtctgagattacaaatcatcctgccaaatactgcaagagtcacacacaatttgatgctgctcacagccttgagaaaggagctggagtgaggaacacagccaggcatagacaacactctgaactggaga

SEQ ID NO: 137951 - DNA, 190 bp, Homo sapiens
acagggacgtgtacattataccagccggatccacatacctggcagctgcaacctgttaaacctgtgtttttttcttctgtgtaaacactataaacaggaaggcaaacgtcatccatttacgcagaagagaaaattgatgatgaaaaactgtcactgctttgcttaaaaaagtctaaggtaaagaacgtat

SEQ ID NO: 137952 - DNA, 566 bp, Homo sapiens
ttgcacacaggctgtttcctttgctcagcacaccattccatacactcccttttaaggtccactgaaaatgccaagtttcaggctatgaatgaagtcttttccatcgcccttatcagaaggaaagtctccctccctttgatcccacacagcactttgtctgtagttctctgattacaccaaacacattctctactatactatagtgatttgtattcatagcttatctcccccttctcaatcacaagtttgtggagaacaaaaaagaagtttgttattcattttacatacctacatagcacctgacgatatctcaaataagagaaacctcatttttaaattaactgcacactgtacagaatgatctacaagttttacctgcaatgactattaaaaagggctgagttgacaatcacgactgtgaaatgagtttcaccttcaaaacccagcttcttggctctatcacatagctttaaacaatatccaatgcttccctttttcttttggtggttgttctgtgttttgcctttagaaggaggatggaaagaactgaggaagcagtaaaagca

SEQ ID NO: 137953 - DNA, 653 bp, Homo sapiens
ttgcacacaggctgtttcctttgctcagcacaccattccatacactcccttttaaggtccactgaaaatgccaagtttcaggctatgaatgaagtcttttccatcgcccttatcagaaggaaagtctccctccctttgatcccacacagcactttgtctgtagttctctgattacaccaaacacattctctactatactatagtgatttgtattcatagcttatctcccccttctcaatcacaagtttgtggagaacaaaaaagaagtttgttattcattttacatacctacatagcacctgacgatatctcaaataagagaaacctcatttttaaattaactgcacactgtacagaatgatctacaagttttacctgcaatgactattaaaaagggctgagttgacaatcacgactgtgaaatgagtttatatttataagctgcacatctgggatcagttgacttatccatctgctaactacaccagtaaacagtatgtctgggaccgtcaaacccttgcatccatcacaaattcctgctttaattgtgtgtttacgtggcaaacctctgcttaagtatatttgaagactgttttaagcagttgtaattgctcctttcttcttcatattaactttaacacattttatttacc

SEQ ID NO: 137954 - DNA, 318 bp, Homo sapiens
ggccggcagattttgagaggaggggaatgctggcgtggtggcagcctagggctgccaggctctgggtgtgtgttgggagggggggttgggggtgtgtgtgtgtgtgtgtgtgtgtgtatgcacacgcactcacgctgggcaggggtgaaggggacaggccaaaatggaagtggggcaaagagtccaaggtccagacgctgagagctgccacctatctgtccagtgtcattctgtgtagcccctatggtaggctgaataatgacccccagagatgtccacaacctaacccccaacatttgcgaatatgttaccttccat

SEQ ID NO: 137955 - DNA, 368 bp, Homo sapiens
cgtgctggtccgggattgtacgcgctctcctagggaggggtctgagctcaccctggcagcgcccgcgtcctcgccagcgcccgcgtcctcgccagcacccagccatggttcgcgattgtaggcactctcctagggaggggtccgagctcgccctggcagtgcctgcgtcctcgccagcgcccaaccaggcttgtctcctgagtgttgatcacacccctgacccggggtctgggagccagttcctggctgctgatgtttctgcacggatcgctgcaggaggaagacctgtacatctgtaaaaacacacatacctggtgctgttaccacacctgagaaactcacagtcactctctaaggctgccaggtgc

SEQ ID NO: 137956 - DNA, 410 bp, Homo sapiens
cagcctctgtgctgcagagaccctcagggtggggtggaaagtgtgcctgggtcccaacacaggggtccctagagaccacggggagtgttttgggaccatggacagcaggagtgcaggaaatgctccagatttgcagagaaggaggtggctggaggttatcttgggtagagggaggtctgaggctgtgagtgccaagtgaggggcaaggtacccaggcctctgaaaagcaaggacaggaggagaggtgccacctgagcgtgccccacctgggcatgcgcccatctgagcccctcctctgctggatgcgcggccacctgagcccctcctgacctgggcgcgcgcccgcctgagcccctcctctcctgggcgcgcgcccgcctgagcccctcctcacctgggcgcgcggccgc

SEQ ID NO: 137957 - DNA, 711 bp, Homo sapiens
aaatcaagtaacctctattattattataagcattataatgcttgagatggaaactcaaaaatactcatttaatgcaaaaaggcttgaaagtaacaatagaaaaagtccccaaacaataaaggaatgtatgtgaactgatcactcaagcgatgttttcaccagctctgtatcaagaagaagagggggaaaaaaaaaaaaagctcctgcaactttacagacactttgttcctccgacccatcaactgcatgaaagatatgctggcaaaaagattgaaggttccagggtcttgagtagccaagtaatcgtgctttagaatcaaagggttcttttcagcagaccacagttgactcctacctttaacacaacactcaacattccaggagaggtttttgccttcccttcaatccttccaacacacaagttgaagactaagagggaggtaagccttttttttcccctactttcacccaggggtgccctcttaatccaagacttgtgtgtgtgtgtgtgtgtgtgtgtgtgtgtcccttaacacagggggcaatgactcttatcactttcaattacattatttgtaaattgtttttttaaatatgttattctagagacaacacaaaaaaccttaatttagatttttttaagtctctaaacattaaatgtattgacacaaaatttaaaatacaaaacttttagaatgttactttgacgcg

SEQ ID NO: 137958 - DNA, 738 bp, Homo sapiens
caccacagggtctgacagggcttaccgccatacctgtactgcactccaaacagtgggacaaagcaaggggcatgaaccagaagctgcacacaccatctctgctcacccttactggccagtcacatggccatacctggttgcataagatgctgaaaaatgtaacttgtattcagccagccatgtgcccagctaaaattttttattcaggaagaagaggaagacaggtactggaagataaccagcaatctctcccacccccacgcttgtctttttcaaacagaagcagcccaatctggcaaaagtaccgatccttagatctggagacaaaactcaacaacgggcttctctgacttttgtcagacatcttgcacatcacatgtagatagagccagagactgtaacgcatcattgtcagcgggaagaagatacaagcttggagatatgcatcagaatgactacccatgcaaattcttgaattttcacctgagggaggtgttggaggaataaattgttctacgggacaaaatcaggtgcaatatcaaaattccatgtacccactctagttgactgaatacagtgaagcatttccagtacaacaatataggaaaacttcaaataaaggggtattctctaaattccactaaatacatcatctttggcctgaaactatcttgttaagctacttgttgagactcttcactctagatatgcttggtgctgcctttgcattcaagtcct

SEQ ID NO: 137959 - DNA, 295 bp, Homo sapiens
ccatgattttaaatgattcactggaaaagtacaaaatgaacttcccctctctgaagcaaaaagttgtatatttctccactgccttttcacatgaaagagaaagaaaattggattttgccagtgggattctcaccacctagaggcagaattaaatattttatatcacaaatttggacacttttaacttactttttaaattcttagagcagtgtgtgtacacacgcaggtattgttacctgtaaataagttagacactctttgagtgtttgaggttttaaactacaggaaagattga

SEQ ID NO: 137960 - DNA, 279 bp, Homo sapiens
caccactctaaccctctctgctggttcagcatttcttcacctctgcaacctgctgcacaagggggagcgtggcaggggtacgggggtctcctgcagtaatcgagaggctctgtttagccaaaggcactccagatcaggcatggttctgttggattttctgctaatgttcatgacactccaccaaccacccgggcctttgagtcaccaagaatatcacctggtaaccctatgtgatttcagtaacatagtgacttctgacactctgtagcccatcttccc

SEQ ID NO: 137961 - DNA, 149 bp, Homo sapiens
ttcgatatgtcagggactagaacaaacgctttggtctatgagaaattttgtggatttaaagatgtttgtcatctaaacattgatcatcatggacagtgtcacccctttattgaatggacagcatatggaatcctggggtcatgaattgt

SEQ ID NO: 137962 - DNA, 388 bp, Homo sapiens
taacactctaagtttgcatagttgatagtaaattgtacttgaataggtcgaagagcaactctaactaatttatttgcctcctttttttttctagccagtaacttgctttattcttgaaatctgataatttccaaatgtcaggagaggcagcattgtaggtcccatcatgtaatgtcatttggaggagtgctgagcatggactccagccagatcgcctgcactcaggttccagctcaatcccttactctctgtatatgatctcaggcaggtcataaacactctctgactcagtttcctcatctgtaaaatgcagatgataataggacccacctcctgaagttgttctgaggattaaatagtatactgtgtaactgagaactgcctcatt

SEQ ID NO: 137963 - DNA, 398 bp, Homo sapiens
ttggcaacaccctcacagacacacccaggatcaatactttctatccttcaacccaatcaagttgacactcaataatattaaccatcacaaacacttagaagacaggaagagcaaacaagaaggaactaggaaaggaatggttagagagctagggagtgggagcaggagtatgagtatgtaaaaggccactttttatgagccagatactgccaacatgcaaaaaccaaaagaaaagtaccccatgccttgcaggaaggtcacttccaaagtcatatcttacccacagcaccagcaaaatcctaagaagtcacaaataagagctagctccacaaatgactcagtaacaaagtttaaacaggtatgtgggaggttattatgttaaaaaaaattttccgaaa

SEQ ID NO: 137964 - DNA, 389 bp, Homo sapiens
acatcatggtagtacaagtactatataaaacagtattcccaattcttctctcttgtactcttatagaatgactatcattcatttcattcacaaataagctataatcactgaatgcattgtcattgttattttgaacaaactgttctgttagatcaataaataataagaaaaatttaatattttaccttctttttttctttcctaatgctcttccattttttttaatacagatctgagtttctgccgatatatttttcttctctctgaagaactttttaaaatattacttgcaaggcaagtctactggtgacaaattttctccatttttgttggtctcagaaagtctttagtatttactacttcactttaaaaaattgtggcaaaatata

SEQ ID NO: 137965 - DNA, 521 bp, Homo sapiens
atgctttccaatgaaccaggagttacaaggtcctgaaaaccacaagtgtgttacatcctttaatagataaagcaaagctgatattaatgtgaatatactttatatttacttatattcgtgttaatttttctttgcctgtaatacatatttttatataatggggaataagaaacatcttaggaaaaagaaaacaaaaaataaaatttcactgtttacactgtgccttggtccagtaaccctgcactgcacatatacactttaaattggtgtcttggggaaccacctcggtatttcattttaatagcgcatcctggagaatatatttgagtggatcacatattacaactgatttaaattttgacccatatagaaatgttttcaaaaatatgtctgaagcctggatactgtaaaaatgtttatcatcatagaataataaaaggctagccattagttactcagaaattgttcagtaaatctaagatgacttagacataaatagttatgagtgaatatagttcatc

SEQ ID NO: 137966 - DNA, 382 bp, Homo sapiens
agatttgaagccagtcgggctagagggtccatgatgtcatcagtcacttttctccaggtggcttccaagaacagggaggaatgagagagactcagaggtagcactgagatgaaggaagtacagagggagactgggctgagcaggccctttcggtaacaagagggataagtgaactcacctgtattaagtgtccaccaggcacactttgcatgcatcatctcattttaatcctcacactaggccctgaagaaaagcattttacaaactggtcaaaaaacctcaagagagatgaagtcatttgctcaaagtcacttagattgagtaagggcagagctgtcagaaaactagtcagaaagggactatgagaggtgacactctgata

SEQ ID NO: 137967 - DNA, 536 bp, Homo sapiens
atcccgtcaccgacatcctgaggtataaagtagcagcgttaccattttatatgatgcaaaaagtagcagatcagaggttgacatggcttgctcatctccttacaggcatgagccaccgaacctggcctgcttgttactttagacccttcttatgttttgtttgttttttcagggaaatgtttttaaagaaaaagtgcccctattgcctatttagtgcattggtttgaataaaaaattgttgttttacttctgcctttgaatgtggcatttttggacaaggtttgtcattccagaatattctttccctaaatagaggcattactgtacttttggaaattaagcctttgtaattcattttttgatgtaggcttaattgtatgcctgatctcagcaaagactaaccatatactcatatagtattgattttgtttcaacttgtttagaaatatttgttgcttattttatgatgtcgttttattccattgatttgcaaagtgatgtgattgtatttggtgtgaacacttttcttcagttgt

SEQ ID NO: 137968 - DNA, 425 bp, Homo sapiens
tgagtgaggtgcttgaggatcttcgtgcactgctcggatggacaatggcagtattggaaatgtgacagcaatggccttggagcctgcagatttccccaaagagaaaatccaattagatggactatcttacgtcagcaaatgaaaacagaaggtgaatgcataatttcatgagaacattctttttctctgcttattagattaggtgatctaacaaggcactctgcttctctcaataccaggaagtaaaatgcattttaactgtgccaggagttgattttgctatttgccgtttgttgtgggatgacacgtgacacctaaatattctctcatttaaacaatatctagcatgctgcacaatgggaataagatgctccaggaggccccactgctgaatgacacagacccagagtggtcagggctccatg

SEQ ID NO: 137969 - DNA, 108 bp, Homo sapiens
ttttccacggaaatgagcacacacagtctctgtggaggtctgtaccttcccaaccctttctgccagggccacccctgcaaatcgcgctcgtcactgagggagcctcgg

SEQ ID NO: 137970 - DNA, 321 bp, Homo sapiens
aagttgcagtgagctgagatgaagccagcctgggtgacagagagagactttgtctccctctcccccgcaaataaataagtaaataaaggaatacagcgtacaaaagcctactttatatctttaaattggttttacattttgcttttctgattctattgtgagaattagtacttctccaatagttgttggtctttatgaagtatgaagacttagtagctttgaagataaaattaaatattcgaatggcagtgatgccacagtcactcaggattcaagaagaagcattagccagtggtgatccctaccagccccgtttcctct

SEQ ID NO: 137971 - DNA, 556 bp, Homo sapiens
agaatagtacctgatacacctgacattagctgtcattgtcatcatgttgatcatcactcacaggaattgaaatctcccctgtattgcccctggaatactagtagtcaaaaacatgttgatttaattggaaatgataacttatctttatttatgttctctttggacactagtcagtccttagctacagttactagaggcaactagactctaagtgaattttgctacttgtattttattgcatgacaataatggttaagacctggcttaagcaaaagtgtgatgcaagttaagttcggcatacttcatctctcttttctgcacttttctcctttttgtgggctttctgatactcagaccaaggctctatttctcccattatggggagaagtgtcttatagacaaactcagagttgtttgttaatgactttaagtatcatttctcaggaatgtttaaatttcatgacagggtactagagagggtaatgcttagcccgaaattcagaatatctaagagtggatgctgttgatgtgtggtagggctgggagacagttagca

SEQ ID NO: 137972 - DNA, 329 bp, Homo sapiens
catgagctaccatggccagcaagaaatctttatttcttaaaacagatcttcttcatgaaaagaaggtcttctctggaatcagtgatgttggtacaaagtaggagttacaaactcagacgtctacagaggcttagcagataacaaaaaggcagcctgtggtgtttatgctcttgaatttgtttttgaagtacttataacactctgtttatatttacagaaatttctttactgtaaaaaaattagaaatgttagatgtgatgataaataacactaggtgttcaccctcaacactgggaagcagcagggagtgttgaggactgcatggaaat

SEQ ID NO: 137973 - DNA, 249 bp, Homo sapiens
ttttaaaatgtctttttcttatatatttcattttttaaagagatgaggtcttgctatgttgccgggcttgaatgcagtggctattgacaggtgtgatgtagcttcaaactcctagcctcaagcgatcctcccatttcagcttcccaagtagctaggactaagccaccttaccctccaaatcaaatcagtaactaaatcctctgaattttgtcttatgtcttttatttttgagatggagtctcactttgt

SEQ ID NO: 137974 - DNA, 314 bp, Homo sapiens
tcttctaacatttttgcccacagtgctatagtatttactttgggattggaaccagatttttccctcttaatcagcaattttgatatctggctagacttttagaggttctctttttcatcattctttcggattctgtcctgttgccagagtttgttgcttctttttgtttttgtttttgttttttgagacagagtcttgctctgtcacccaggctggagtgcagtggcacaatctcaactcattgcaacttctgcttcctggaagttccaatgattctcgtgcctcagcctcccgagtagctgggattatagacg

SEQ ID NO: 137975 - DNA, 378 bp, Homo sapiens
aaaagggagaggaaccctcagttcgggaactacctatctctttcccagaaaactcatgaataatccaccccttatttagaatataatcaagaagtaaccataaaaatggatgactatttttatgcctatggactagcccttcttttattcctttgctttcttaataaacttgctttcactttactctatggactcaccccaaattctttcttacatgagatccaagaaccctctcttggggtctgggtcaggacccctttccggtaacacaactactctcactttacagaataggatataacacattttgcactttgttattaagggcagcacaaatacaaaacttaattttccaacagtttctctattgtctacaat

SEQ ID NO: 137976 - DNA, 581 bp, Homo sapiens
cccagggacctcacccttcagtaatcacccaccccctgcctggagagtggggcccaaggatctcatgccccaaggctgttctggcctaggtagtctggtcctaggtctgactcactccgaggtgacctcagggttgtcccctcaccaactgagctcattccatcaaacaaatacaccttaactcatgagaggggatggctggagccagactgcctgggttcaaatcccacctccacctcttcctagttgtgctaccttaggcaaggtgctttacctctctatgctctgagagcagtgagcacacagtaagctccagataagtatttgtcattagtgagcatctaccatgtgccaggtactgtgctgggacacggtcctgccctcaagaagctcacagtctggaaggaagttggttggactcaggagtcctccagactctctcaaggccccaagaaggggaaggaagagaaagctttgcactggcctgcctccttgaggaaacaccagtagctgcttagggacccagatcagaactcctggtaccatgcaggtgagaacttgatcttgaccagtcccatcct

SEQ ID NO: 137977 - DNA, 567 bp, Homo sapiens
tcttgcttttggggtttgtttatatttgtgtctgccaccttggttcttcttcacactatgaagtcttgttggttgctttcagaaaaactcaggatcatagtttttcttaaggacacctgtgtgaaggaacaacaagaaaactgataatctatttatcttaaatataggttaagtggtttaaagatggtgctgaaattaaaaagggcaaaaaatatgacatcatatccaagggagcagtgcgcattcttgtcatcaacaaatgtctactggatgatgaagctgaatattcctgtgaagtaaggacagcgagaacttctggcatgctgacagttctggaagaagaagctgtctttaccaaaaatcttgccaacattgaagttagtgaaacagacactataaaactggtttgtgaagtctccaaacctggcgcagaagtgatttggtataaaggggatgaggagatcattgaaacaggaagatatgaaatactgactgaaggacggaagagaatcctggtcattcagaacgctcaccttgaggatgctggcaactacaactgtcgactcc

SEQ ID NO: 137978 - DNA, 184 bp, Homo sapiens
ccaagaactctatgatttttatgcactcctatgctaccttgcatgctgctttatacatataagaacacaagagaagtttgtaaactcagttgtaaaatgggactagttatttctgatctatttccttcaaagggctgttttaaagatggaatgagactacatttgtcagcgtgttctgttttcc

SEQ ID NO: 137979 - DNA, 429 bp, Homo sapiens
atagcacaaagactgagtcgtaagatatctgtaaggggactgccacacaaagagggcttctattaggccactgccctactcaaaacattcatgatgtcccaccacacacaggacagattccaagcctcttggataagactgaagccctccatcacagcccatcaatccgtttcctggagttcggaaccacagccatgtgcctcatcagtgtaagactgagtctcagctctcacttcaaggaggactcaagacaagcaaaagaagtaaacttttgctgggtgcagtggctcacgcctgtaatcccggcactttgggaggccaaggtggtggattacttgaggtcagcagtttgagaccagcctgaccaacatgatgaaacgttatctgtactaaaaatacaaaaattaggctgggcgccatggctcatcc

SEQ ID NO: 137980 - DNA, 404 bp, Homo sapiens
taatccctattctattcccctgatctttatgcctatcttgaaataacggcacgctgttatgatcactattgcattataacaaaatttaaattcagttactgttaaatgtctcaatattttttatataactagtaggatcaactgctctatttctaccaaaaagaaagactgacaagattttgattgggaatatgtttaatttattgattaatattgggaaaattgccatctcaacaatattgagttttctcatctatgaacatggactatttatctcactagttatttggatctttcatttttctcagtaccattttatagtttttagtgtataagtcttgtactcattttgttaaattcatttccacattttttatgctatcgtgaatgaaatattttaattt

SEQ ID NO: 137981 - DNA, 298 bp, Homo sapiens
tgggctcaagtgatcctcctgcctcagcctcccgtatagctggggctacaggcacacaccaccatgcccggctgaattttatcatgaaaatgatcacaatggagatgattgtgtgctggtgtaaaatctgttttcctgctagagagaaagcatggactagttgagggcatggaaaagaattggtggtgaccggattcaggctcagatccctggctcctcctctttgggtcagattctcaagagacaggatcataagagcctctccactggttctcagattctctgtgcataacatacc

SEQ ID NO: 137982 - DNA, 311 bp, Homo sapiens
tataattaacaaccttggttttattttgtgtggggggtactgttaagaaatggaggaggaaagaagtagtactgaaatagaaaacattgactttgtatcctgtcagccttttaggaaagatattaagtctcaataaaataatatattccttttcttttgacagaagtgtttctaacatgtgtcatcaaaatggataaggtgtacctaatcactgttgacacagtttctacttggagtttaattttcctactcttttccctcttctcccttgcccattcatttccacttcctctctctctctctcgctcgct

SEQ ID NO: 137983 - DNA, 572 bp, Homo sapiens
ggtggcgggtgcctgtagtcccagctactcaggaggctgaggcaggagaattgtttgaaccgggaggcggaggttgcagtgagccaagatcacaccattgcacaccaggctaggtaacagcgagagtccgtctcaaaaagaaaaagaaaaaaaaaaaaaaatatatatatatataaagaaatttccagtctgtgtatgcagctttgaagttttgaattgtttttgtaaatgatgtagtaaaaggaaatgggtaacccagaagattcttttagaaaacaggaccctggtgctgggtgtggtggctcaagcctgtaatcctagcactttgggaggccgaagcaggtggattacgaggtcaggagttcaagaccagcctggccaacatggtgaaccctgtctctactaaacacacacacacaaaaattagcagggcatggtggcatgtgcctgtagtaccagctactcgggaggctgaggcgtgagaattgcgtgaacccgggaggcagaggttgcagtgagccaagatcatgccactgcactacagcctgggcgacagagcaagactccatctg

SEQ ID NO: 137984 - DNA, 220 bp, Homo sapiens
ctaaaaataggaaaattacctgggcgtggtgacacatgccacctactcaggaggctgaggcaggagaatcacttgaagtcaggaggtggaggttgcagtaagccaatatccgagattgcaccactgcactccaatctgggtcacaaagcaagactctgtcttggggggaaaacaaaaaagttcccagctgattctaatgcatagccagggctgaggacca

SEQ ID NO: 137985 - DNA, 287 bp, Homo sapiens
aaaaggaaaatggcagtttgaaaaatcttttgacgttgagtaaaatataactgcatgaactgtaccattgaactatgaagcagttaatggcaatgaagctggagtgattttaataacgttcttttaaataaaagtcactggggtcattttacaactccagtcactgtgttcattcctagttgagttcataatggacttcataatagtcttagagtctagtgtacctctctctgtcattctctctctctttttctctcccctgatgacctgcctctctctgtctttca

SEQ ID NO: 137986 - DNA, 190 bp, Homo sapiens
ggcgtgagccaccgcacctggctgaagatgccttttttaaaaggctgactgtgggtacttaagatttaatgataaatttaaaaggaggttcctcttctatagaagaggtcttcacattcagctgaaactattgttcaagctatcctcacattagaaaaagctgagtagcaatttagtgacgggaaaaatg

SEQ ID NO: 137987 - DNA, 297 bp, Homo sapiens
attctatattgtcctataaatttggttttgttgtttaaggccattacgagacagtagtgtctaagtagtgtcctcctttcaaaaaatacattgttaggaaattaagagtgttgattaagggtattaaggaatagttccctaatgagcctgttaatttaatgaaatgggattgctttagatcagctcctctgtataagggatcacagagacatgctgaattgagatatatggtttttgtttgtttgcttttgtttttgttttgtttcattttgttttgagacaaggtatagctctgtc

SEQ ID NO: 137988 - DNA, 414 bp, Homo sapiens
gcaatacttggaaaggctagagactgttgacttagctgaggttctcaagaatccatatgtttcttgtcctctattaatggttaattacctttagacaagtgaatgtcatctattgaattaaaaactttaagcatctggaattgttagcctaaatttggacctgacctcgagtttctgtttagttgtctagataaaggtggtatgtccttagtgctagaaacacaaccaacacatattccatgccatttgctagttctttatatatgtagtatatttagtgcttgcaacaacccagcaagctaggcattctgatgtccaattctcaggtacagtaactagggcccagaaaggataaaagacttgcccaagtgtgtggcagacccagcggcacagcctctcatcccccaggccaga

SEQ ID NO: 137989 - DNA, 222 bp, Homo sapiens
cccttcaccttctaccatgattgtaagtgtcctgaagcctccctagaagctgagtagctggcatcatgctttctgtaaaacctgcagaaccatgaggcaattaaacctctttttctttataaattatccagtctctcgtactcctttatagcaatgcaaaaatagcctggctcagagtggtggttcatgcctataatcttagcactttgagaggccaaggtg

SEQ ID NO: 137990 - DNA, 189 bp, Homo sapiens
gacggcaaattaggtaaagagaaggagcctgggagcccagctctagccaggggcccgggactgcagacccaaggcaggacagtgaaagaggagagagccttaattccaattccccctgttttcagacattccattccagtcctaccacatcttcctcccaatctttgtctcttccaaactttcccttac

SEQ ID NO: 137991 - DNA, 246 bp, Homo sapiens
agatggaccaaacacatgaaaatgtttggtcattttaaaaagatgacttgcaatatggcaactgggccataaagagttaacaagaggagtatggcatgagtataggcctttcaaagtgaaagacaggaagaagcacaaaatacgtgttggataaaataatttcttggtgatgacattagcatggaatagttaccatcctagagaaggtgctagaagatacaggggaatgataagagtcatccaaga

SEQ ID NO: 137992 - DNA, 371 bp, Homo sapiens
tgctatgaggtttaaagaaataagataccatcttgcttgctatttgaaatttgggtacctagaatatttcggtctctgtgacagacagattaatgcccccctccccaccccaccgaagatgttcacatcctaatcctcagaacctgtgagtatgttgccttagatggcaaagagactttacagatgtgactaaattaaggatttttgagatgggaagattatgccagattatctggttaggcctaatatgattataagggccgtttaaaggaaagaggcaggcaggaggatcacagaggagatgtggtgatggaagcagaggtcagagagagagagagattgaaagatgctgcgttgctggttttgaagag

SEQ ID NO: 137993 - DNA, 532 bp, Homo sapiens
gattaacccgtgagtgccgagggaggaggtctggattgaccatagatgagggtacacatgatctcactgcatcggggctctcacgaaccaggcactctgttaaaagagtgtatcagggaacagggtctacgagaatgctgtagctcatggtcataggtctcacctgagtcagtggccaagcccggcttccgaccctggtctcttgcctaagcacaagatctctcttctctgccaccaccttctctatgccacacggaggcacttaggcagagcagagtcgctgtgacctgcggctggtgtggtagcagtttttacacccgaggttaacagctgtgatttaagaggttatttgtctaaattttcgggaatcagtttctcagggaggagacaactaacacattgggctcgggaagctagtctttttagaaaatatttatagcatttcaagacagtttggtggcaattggatctagcatctgctattttcctcactttccaccatggctttaaaacccatggcagttaagacaca

SEQ ID NO: 137994 - DNA, 276 bp, Homo sapiens
ggcatagggttcctgatggtgggggcagggggctgtggatagaagggacttttggggtatctgataaagttctctgacctgtgtgctgtttgccttaggattcatttagacattcatttgatttctgtggctttcaaattgttgtttgattttacaataaaagattttctttaaaagttcctgctctttccacaaaaatatttggtctccagagcacccggattgaactgaggcaactgcccctcccatgtcaattccagacataagggtctgtgg

SEQ ID NO: 137995 - DNA, 759 bp, Homo sapiens
ggggcttctgggcgtgatctatgaagaccacaccctgcagagaccagcgagaggcactcagatgtgggcagggcttaggctgtgctgaagagagagccagagaggaaacctccaaccctcgtcaggcccagaggtgcccctgcaagaggagcaagtcctcccaccagccacctagagctgagccccagctcccttctaccccaaaccaggaggttgcacaattttggtttgagaggaggaccaggaggctgatgggagtcacagttgttgactcagtggctgatgggaattgtgttctacactcctccaaggactgatgggagttatagttctcaccttttgggggctgatgggaattgcagtttctgcccaagggactccagttatcagacctagagatggggagacccattctcccctcacaaagccctcccctctcattcccatgggccctatttagcaggtgcttccctcccagatggctgtgtatgtattttcttttctttttttgctttcttcttctttccgttgttttgttattgttttaactataataagagggccagaggcagtcaagccctggccaggtcctggcggcccatgggggttctggggagggggaggggggaagtcagtgggggtcagaggtggagggtgaagaatgagaaagttggggagttaggcttagctcaggaaccatgtgtccctgcccactcccctccttccttgcccctccctacctccctgcctctacatggc

SEQ ID NO: 137996 - DNA, 572 bp, Homo sapiens
gtgaggggagatgtaaagagatcactattgtcacggaaggcgctggaaggagctctgcttagaaaaaatgcctttctctaggaggtttcatccagcatgggaacacaaaacaccagtttaaaatagctaggtaaggcttcacagtctctcaatgtgatgtgggtgtcctgagtcgtgaacatcccattgtgcaggataaaatgctggtttctgagctgtctttcaagacacaacccaaatgctgtctttgccatggtgccttccttgggaacccaagccaggtgaggtctgccttttctctgatgttgcctaacttttcctctttgtgtcccttgagctcagggacatgcatcccctgttgtacctagcacagaatcatgcacaagcaggtgcttgttaactgttggtgtgtaccaacaaacatttacggagcacctattagcaggagcacaggccaaggagctggatagatgagcgtggagtttgggggagaggtctgagctgagatatacatttgtgagtcatcattgtatggatgaggccgggctggggaggatatgagcgtagaatga

SEQ ID NO: 137997 - DNA, 450 bp, Homo sapiens
ctataaaaatgtgcccaaactcagtggttctttaacagagaacataggtcaccatcaggaggcatctggaaaatggtttctggtttttataatgccaaccctacttaccctgagtatgtggcacaggggaatcagccacggatcctaagcagctaaatatccttccatttgcaggacaatcccataaaaaataattctcttgcctccaatgccagcagcacctccatttgacaaactgttaattaacctaatcctcaccatctagacatttactattaacgaagcaatcaactttcatcctaccagggaaggaactggattaatgtagatttggaatgtaatctgtggtctaatcagccagtgggtgagaagcacctatactatacctaagatattatcccttaaaatatcctagacaaagcaaactattttaatagtggtttcctctgg

SEQ ID NO: 137998 - DNA, 128 bp, Homo sapiens
tcaggatttattggctgtagcatgataactcatcaactatagttgagcttgcaggaatttgagcagaaaagttaattaacaataattttaaaactgccaaaagcggctgcaagttcagtctgcactct

SEQ ID NO: 137999 - DNA, 375 bp, Homo sapiens
gcccaggcaggagtgcaatggtgagatctcggctcactgcaacttccccttcctgggttcatgcaattctcctgcctccacctcctaagtagctgggactacaggtatgcaccaccacgcctggctaattttctatttttggtagagatggggtgtcaccatgttggtcaggctggtctccaattcttaaactcaggtgatctgcccgcctaggcctcccaaagtgctgagattacaggcgtgagccactgtacccagcccaaaacacatttttaaatgaaaacaaaccaccactgttaattggtagtgtactctgtagctcagaagctatcctctagtacaaaaaaaaagagtttaagtaaattaaaaaaaacc

SEQ ID NO: 138000 - DNA, 371 bp, Homo sapiens
  misc_feature (191)..(191): n is a, c, g, or t
agttatttgggatgaatatacatgcctggtagaatcctgtatcttgtgatagagcagactgcagagctttgtctcgctggcctgttttctcatccacaaaatggggataagacttaccttatgaaattgacactggtgctatccgaatcagatatcatgaagagaaagagtcctgagagttggcgacatgntccaagttccctgccaggagtctctagcagaggagtcgctgcctctctcacctgcatgtacagagggactgggttcagggcactggcgacagaatgtctcactgcgagaaactgcctgggacatcctgactcctcttccgactccttgccgtgcttcatcgggcaatcatcttggccact

SEQ ID NO: 138001 - DNA, 370 bp, Homo sapiens
tcatgaacataagaggttaagcctacctgggtagggacaggaaatatgggggacttaatgaagtttcaaggaggagtgactctatctaaccttaaaagatgagtataagccagaaagagaagggaaggaataaagttgctacataaagttatagctaatgcaaattcatggagacaagaaaaagcttatgttcaaagaactgcacataattaggaatagctgaaagacaactaggtagtggcgagataggatggtatgggccaaatcaagacctttcatgacaagcttaaggaacccgaactttatcctataggtaaggggaagcattgaaagattttaaattggagaatgacatgctcagatttgtgtt

SEQ ID NO: 138002 - DNA, 236 bp, Homo sapiens
cgaaacaaaagtctccaaaatgtgtacgtgatacataatacaaatatttgtaatatttagcttaagaaactacctggaaagtaaaaatgtgaaggtaagctacataagttcttgtttctctgaggtttaatagtttctcaaattttatccatgtgctcatcatcttcatggttttgccatacccagtgatatgtttctgctcattatcatgtcattactgtaaatggtaagctgtg

SEQ ID NO: 138003 - DNA, 520 bp, Homo sapiens
gccagttgatatgtattttgcctgttgacatgggcaatattgacattttggacagaataattgtgttttgggggatggagggtgtgtcctgtgtactgtaagttgtttagcagcatccctggtctctacccagtagatgccagtggctctccccgctccaaatatcacaacccaaactgtctccagacattaccagatgttccccggggtacataagtgcccttggttgaaaagtgttgtttagagggatgtctcttgaggcatccctgagatttctttcctagtgaatgtattttcatctaaatgtgtgtaaaatttgccaatgatgaatattaggacatcgtgtaagaaagaaccaagatataaatttatctcaactgggcagtattcaaattcaacatcctaaaatttctaatggataaatgtaaagtcctacatttaaactcaaataataaatttcataggtataaattaaagaagcattgtcttggaaaaaataattttagttgaataaattcac

SEQ ID NO: 138004 - DNA, 364 bp, Homo sapiens
ccctcctggagtgactgatggggatcagaggtgcagatatgagcacaggcaaatcaggaatgggaagagcaggttagggaggtggctttccagcagtagtgcagaagcaggactggaggcccctcccagtgaagcaggttctcctgaggccatggcaagcccttgcctaccacactgcggtccatgacaccagtctggtagccaaatgctgtcatagtgccttccttcaatgccactatttctgtacctatggcattcattattgtcatccatctttccatgcgtgtgtgtgtgtgtgtgtgtgtgtgtgtgtgtgactctgaggttaactctccccctctctactcagatggcaccttctcca

SEQ ID NO: 138005 - DNA, 464 bp, Homo sapiens
aggcagccaactccttgagatctagcgggagagcaaaagggagtgtggtggaggatgaggctggagaggtgggcagggggcctattccatgaggccttgtataccagggattggggctccagtaatttaaccagtggtgaacatgcctagttgcttcagtatccagcccatacatacccatcttgtccacaaatatactgcgaacaatttcctttcctgatccccatacatgatcaaaggacattccctttatactccaaaccattaccttccagtcttcaccatcagtgtggcacagaaaaatacactggtttttgcttttgtttttgtttttttgagacagagtcttgctctgtcacccaggctagagtgcagtggcacgaacacgggccaccacagccttgacttcccacgcccaagtgatcctcccacctcagcctcatgagtagctgagactacaggca

SEQ ID NO: 138006 - DNA, 638 bp, Homo sapiens
aaaaccacccaccggttaatgattctctaactcaacggcccaggtttcagtacttctttgctgtctgtaatataaacatgacccctacttacactgtcctacctatgtggccaataagagtgttgtcttcgcagttggaacccaaaagccctatgggatggaggatatgcactgtacttctttgtaaaagtgtcttgacaaagctgatgtccaatcaacatttaattaccagactgtccaagctagaaatgaaatacagttgattgcctgagtcctgataatcttgctaacaaaattataaaaggcctatagtatggccaatatatttggctaatggaaatgattttcttaaagccagaaaattcagctacccatagtgcttaaaaccagccttaaaagaacatgaacaggatggttcccaccttatcgagatcactggcattccatagtatccattcattcatatcctcctcctaggccgcatgaaacacctaccacatttccctacctcctaaagcaaacaaaactcttttcctccctcttgctgcaaaaaggtttattaaaagccgtatgtagtgtataaagcctttcaaaaatactagcaatccatgcctttctttttttgagatggagtcttg

SEQ ID NO: 138007 - DNA, 632 bp, Homo sapiens
aactaggctgtgaggcccttaagggtcttcaacttgtccctttcctccacgtaactttctcaaacgccccagttctcagtaacttttctcttttgctgtctgtaatataaacatgacccctacttacactgtcctacctatgtggccaataagagtgttgtcttcgcagttggaacccaaaagccctatgggatggaggatatgcactgtacttctttgtaaaagtgtcttgacaaagctgatgtccaatcaacatttaattaccagactgtccaagctagaaatgaaatacagttgattgcctgagtcctgataatcttgctaacaaaattataaaaggcctatagtatggccaatatatttggctaatggaaatgattttcttaaagccagaaaattcagctacccatagtgcttaaaaccagccttaaaagaacatgaacaggatggttcccaccttatcgagatcactggcattccatagtatccattcattcatatcctcctcctaggccgcatgaaacacctaccacatttccctacctcctaaagcaaacaaaactcttttcctccctcttgctgcaaaaaggtttattaaaagccgtatgtagtgtataaagcctttcaaaaat

SEQ ID NO: 138008 - DNA, 206 bp, Homo sapiens
ctcacagttttccgtgctgtggtacagaaggatcaatcaatccaccaatctgctgtttccttggggtgaaatagattctttcactctctatgcataacctgtgttcatgctgagcacacagtcccttaggagccactaggtcccaggcagatgcatgagaagggttggacaaagcacatttccttgatgccagtaacacatccacc

SEQ ID NO: 138009 - DNA, 514 bp, Homo sapiens
ggagaactgtaaaattttagcagagactgatcttccaagtccctctaagatttcttgagaatccctctcaggaaagctttggattaggttcagttctgttaactatcttctggtaacaagagggcataagtagctgagcagaagaaatatcagagttaaactggccatcttacaccaccatcttggggtccatccatattttgcagatccgcctctgaagagcacagctgtgtggaaacaggaagtcaagaaccagtggccatttatttcaccagtgggacgacaggctctcctaagatggcccagcactctcagagcagcttcagcattgggttcaccgtctgtggaaggtagggaagaaaactctggttttgggtttgaactccccaaagagctgccaatatgtgtatccaactaatcgatacttctccttgaattgctataagatattgccaattaattgctaccaaacagaacttgtgctggccgtgcccaacctagcttagtaaatgac

SEQ ID NO: 138010 - DNA, 389 bp, Homo sapiens
gtctgatactgagagaataagtgagggagagtctatagagagagagcattcagggcaacaagctttggagaatggccatgtttagaaggatagaccagttagcaaaataaaaagaggattcaagataatcagaaaaaggatgaggacagtaaaatattatggaagcaaaagaggagagagtttcaaggagaatgtaagaagaaacagcagcattatgaaaaggagagtagtagaaaatatcctgagtgaactctgataggtgtatttcgaatgagactttcaagaataaaagggagataacctcaataacaggaagagagattctgttccaggtttgtatagcagcctaaacaatgattgggaaacctttcctttagacacactaagtc

SEQ ID NO: 138011 - DNA, 232 bp, Homo sapiens
tataatcctcaacagctcacaccacacacaacatcaagcctttaagtatcagttaatgcaacatcaccaccagcagcaccaccaacctgaacttcagcagctgcagacccggcttccattatttcatggggatacttttctaaataaagataagaaagctacccaagggccagacttacccctgagcccagcagagtcagggctaccattaacccatccagtgtctttgtgc

SEQ ID NO: 138012 - DNA, 527 bp, Homo sapiens
tacaaggtcaaattctttcatttcactggtactgtatagctagtgctacttatttgaagtaaattactcaatttgttaaaaccctgcaggtaaatacacattacattggccctgtggctgtggttaattggaatagaagctgaaccttctgccttggaaccaaatgtttctgtagcatgcacatgttgggttttggatttggggcagttcaatttccccttcttctccatttattgtgtgttttttttattgagacggagtttcactcttgttgcccaggctggtctcgatctcccgacctccagtgatccacctgcctcagccttccaaagtgctgagattacaggcgtgagccaacgcacctgtgccatacctgggtaatttttgtatttcgtgtagagatgggattttgccgtgttgcccaggctggtctaagaactcctgggttcacaacatgccactcatctcagcttcccagagtgttgggattacaggtgtgagataccatgccttggctcaaggggttg

SEQ ID NO: 138013 - DNA, 947 bp, Homo sapiens
tccctccttttattttcaccatttaatatttagtggtttatattttatcggtcctcgttttttaattattgttaggattttggttttttttggacgcgcccggcccattttgagtttaaatcaaaggagacagaaattttctgagaaatcctcctttcttgaatcctttatacacaacattttctagcaattgcataagcaaattggaatctaatcattgtccaaagcttttcccttgagtaagggaatttttcattgaataggtgtgcacaactgattttttactttttaggaattttttagcttctcagttcagttcacagatttttgtaaatttttaaatacaacatttaagtcatacattatagtctgcaagtaggaccatctaattttatgatacttaattatatcttattctagtctcaactgctagttctacctaaatagtacccattactagtattcctgtagaagaagggttggtaatatatctggaccactacctgtgtctataaatgaaattttattggaacacaactcagttcatttattatgttatctttggccacattggtgctacggtggtgcagctttgagtagttgtgacagattgaatgacaggcaaagcctaaaatacttagtatcttgctatttaaaagaaaataattggctgagttttattttagaggagcagattgaaagaagaaaacaccaaagtgggggccagtcaatatagtcataatgtcatagaaggtgataaagaatagattatagaagtatatacgaagtatacattacagcgtagacaatcagatgaatttcttggggaagggatcagtctaagagtcatgttaaagtctgctgtggaggaagatgggtagtctttaacaacatttaaacacttcgtacccgttttcattaaaaatgtaaggcacacgatggccagg

SEQ ID NO: 138014 - DNA, 1353 bp, Homo sapiens
aattagcccactaactccaaactcttacactatgcttaggcgcagactgctgcgaacagagtggtgatagcgccctttttacaaagtaagagcagagaggaattgggtttactgataaattccttctagcctttttttaagtctgtttttgaagtattatccttcaacttgaatcagttaggcttgtttatggccaccattttgagttattaattaatttatttatttagagatgaagtttcactctgttgcccaggctggagtgcagtggtatggtttcggctcactgcaacctctgcctcccaggttcaactgattttcctgcctcagcctcccaagtatctgggattataggcacccaccaccacacctggctaatttttgtatttttggtagagacggggtttcaccatgttctccaggctggtctcaaactcctgaactcaggtgatccacctgccttggcctctcaaagtgctgggattacaggcgtgacctaccgcgcccggcccattttgagtttaaatcaaaggagacagaaattttctgagaaatcctcctttcttgaatcctttatacacaacattttctagcaattgcataagcaaattggaatctaatcattgtccaaagcttttcccttgagtaagggaatttttcattgaataggtgtgcacaactgattttttactttttaggaattttttagcttctcagttcagttcacagatttttgtaaatttttaaatacaacatttaagtcatacattatagtctgcaagtaggaccatctaattttatgatacttaattatatcttattctagtctcaactgctagttctacctaaatagtacccattactagtattcctgtagaagaagggttggtaatatatctggaccactacctgtgtctataaatgaaattttattggaacacaactcagttcatttattatgttatctttggccacattggtgctacggtggtgcagctttgagtagttgtgacagattgaatgacaggcaaagcctaaaatacttagtatcttgctatttaaaagaaaataattggctgagttttattttagaggagcagattgaaagaagaaaacaccaaagtgggggccagtcaatatagtcataatgtcatagaaggtgataaagaatagattatagaagtatatacgaagtatacattacagcgtagacaatcagatgaatttcttggggaagggatcagtctaagagtcatgttaaagtctgctgtggaggaagatgggtagtctttaacaacatttaaacacttcgtacccgttttcattaaaaatgtaaggcacacgatggccagg

SEQ ID NO: 138015 - DNA, 692 bp, Homo sapiens
ctcgccttgcgatatgcccagggtctgcacctatgggcagtgcttggagccgaggcatgagtgtatgtgtatgtgggtgaaatgtgtgtgcgtgtgtgtgcgcgtgtgagcgtgtgtgtgtgtgtgtgtgttgggggacaggtgagaagtttctcccccctccacccactgtgggggcgtctcccttccccttggcagggagcaggtgagggagactcctggtattttttgaacacccgtcattcccctgtgggtctggcggcagagccatctctcccggggagcctccctgccctggggcctggacagctccctcagcactagttgctggtgcagaccggcttcgtccagcgccccctcctggcggcctggacctgcagggaaggggcggtgccctgcaggatgccaggggaagccgcctcgggcctcggcggaggggagagggtcgcttgagcgccatgtgtttgccaaccttgtgttcatttccacaggacttggacctgagagttagggtttccaagaaagaccctagaagtcccctgcctgtctccccactctggaccctagccggaatcagatgttgggacctagtgggttcctgccacctggaacttaccaagtcccgacttcactcctccacttactcctcccgggcaaagcctccccgcagtgctctggtcccagcgctgggc

SEQ ID NO: 138016 - DNA, 119 bp, Homo sapiens
ggtagatactcctccctccaggaggtggagtttaatcttcccctccccactgaatgtgagctggacttaatgaataccttacaaataaaagagtaccagaaagagaaaagtagtaacta

SEQ ID NO: 138017 - DNA, 331 bp, Homo sapiens
tgtctcagtttctcacaggacccttggagggaccccggacttcatctgttttgtaggatgcagagtcctggctgaggcgctaacttctaccctcccctgggttggactaaatgagctcttgctgagcatggtgactctcacttgtagtcccacactttgggaggccaacgcgggcagatcatgagatcaggagatcaagaccatcctggctaacacggtgaaaccccgtctctactaaaaatacaaaaacttagccaggtgtagtggtgggcacttgtagtcctagccactaggcaggctgaggcaggagaatggcgtgaacccctgggag

SEQ ID NO: 138018 - DNA, 122 bp, Homo sapiens
ctaagtttatcagccaactcctaagctgataactccttagttatcaagcattaatcaaactgttaccataaaaacttgtcctgaaatattacaatttaagaaaatttgggcaatactagata

SEQ ID NO: 138019 - DNA, 427 bp, Homo sapiens
cttattataatgggcaggtgtcctttttacaaaaacacttattaaatgaattaagtgcttctgtaaataaattataagcaatgtataacaaaacaagcaactgaaacgttttgtttctgccgaactaacacaggcagatactttttatttctactttacattgtaaacagttcagtgtgaacatctgttcatttctaatattttgtactttttactgaacacacaaaataaagtatcttatgaatagcctaaatatgtaatttcctacacaattgtgagcctacaaatatcaagctttttaaatgattactgaaatggttttactactaacttttaaggagctgttatgggggaaggggggaaatagtccccatccctaaatttcgaggtcctcaaaaaagagtatactgggaacctcaaactgcaa

SEQ ID NO: 138020 - DNA, 336 bp, Homo sapiens
gttccaaaagatttggccattgttaaataaagctgaaattcacttttaaaatatccaaatacagtaatgaccactgatagtcaacattcattgggcctcactaggtgcaaacttattggtgagttattaaatatattacctcctttaggccaggtgcgatggctcacacctgtaaatcccagcactttgggaggccaaggcaggcagctcacctgaggtcaggagttcgagactagcctgcccaacatggcaaaactccatctctactaaaaatacaaaaaattagctgggcatggtggtgggcacctgtaatcccagctacttgggaggctgagg

SEQ ID NO: 138021 - DNA, 119 bp, Homo sapiens
ggcgaccttagcaagtttcttaacatctctctgcctcatctcatctcatctatggcatatgaattatactactcaccctacgtaatcttaaaaaattgcactaaaatgagagcactctt

SEQ ID NO: 138022 - DNA, 462 bp, Homo sapiens
ggaacttgcaggctagtgcagaacatgtaagaaagctgtaatctcagcaatgggatcagtttctttatgcaattgtacacacatagaatttctatagaaacacggaagaggaagagcacaacggccagtctacacctcagcaggtccatgcctgatgaccacctgagagcatgaatgcatcacggagcggggggcctgtcaaagagcaagatggcagcaagaagaaatattgggacactggtgggtgaagtcagaagatagactttgcctgctttgcaattttattagagattgaccttaacagtgcagaacgccaagagtgatgcgaaatatagtctatgtgagaatgcaaatgtgttgttccaatcatttaacaggaggccatgtgaccattgccatttcacttcttttggtggcctcagcagcaggggcaacgagattcctaatgtttgataagtttgt

SEQ ID NO: 138023 - DNA, 447 bp, Homo sapiens
gggattacaggtgtgagccactgtgcccggcccttgttttatttttcaaataaatgcaggaagaaagaaagagaaagcagaggtggccatatctcaagtaagtcatgccacccccaccacaaaaatccgtggaggctgagaaatacaatacctggcaaaactcagcaaacataaaagccagcagttattcaaagatatttgttgagaaaccactagggcccagttactagagctaccgagatgaacactactttaaaaaccaaaccaaacaacctgcctcatggaggcacttgcccctcagttcagtggcaagtatggtaagtgttctgcagaaaagctaagcagctgaggggagcggcaggggcccgagggtgtgcattagcattctcttcagtgggttcagggagtcacccccgggggcggtgggggcggggggtcggggagcag

SEQ ID NO: 138024 - DNA, 486 bp, Homo sapiens
atcaaaggcagaaggtttgtgtgtgtgtgtgtgtgtgtgtgtgtatctgtaagtgtttaaatcaaggggagattgcatttataaatcatactggccttatgaacatcctctgcaataaatatactttttagccttaactataaattatatattttagtgtttaaaaaccttccggtgtgaaacatctaagataacccttaaaaaccacctgttctctaggtaaacctctgaggtccgagacaatttagtgcatgtgtgtttgtgtgaagttcagtccatttttatcttgtatagattcttgttaccactaccaccgtcaggatacagaactgttctatcaccacaaggctccctcatgttctttcataggcacacctaccacatgtacagttattaaatgattaatatacagatagcagttgttcaactgaaatgataatttaggataagtgttacaaatctaagcacttacaagcatcttaatat

SEQ ID NO: 138025 - DNA, 316 bp, Homo sapiens
tacattacctctcctgttaccaatatgaaaaaaaagaggacctttggttcctcagaaaaacacaaactgttatttttttaaagaaaaacttatcaagagatgaaatcggaaaaacttaagtctttaattctgcccttgggaatgtaataaattattccttttatattccaatacacaaagaactcttgtagacaagaatcaggctcaacaaactaaaaacagcatgtacctaggatcctggcagtttacaggtgtttgattatccttaaccagagtaactcattagaagcatttaaaactatttaggaggggggag

SEQ ID NO: 138026 - DNA, 326 bp, Homo sapiens
cagggaccacaggggtgagctccagttttccactgcttttttcaggggccaactggtgagtccaaggaggagaagccagtgagcagaggggcttcccccagtcccagccaaagcagctcccctgggcctgctttacctcctcaacttccacagaggatcccatttgagcaaaggactctccttagctggcaggaggttaagtctgcagtggctgatggcatctctaccaccactcagggaccacctgccagagaaggaagccacagcagaggagaacagagaccaagaaaggacctgtcaatactatttaagcccctggatccagc

SEQ ID NO: 138027 - DNA, 194 bp, Homo sapiens
ttttgaaaaacagggaaagtgggtttgccgtgtagccagatatatgtacatctcatggacactgccatctgtttagatgcctagtgtgcatgtgataagctctaaatttcttagactactgggttcactgatggtaccagacataattttatatctttcccccttgaaggtctggatgtacgccattaacttaa

SEQ ID NO: 138028 - DNA, 314 bp, Homo sapiens
taataaaatgcttgtcaaaaattgcttgaatccagggcatctaacatattgacaggaaaatcacgagaccaataaaaaccaacggtaacactcactatttgttttttcaatgatgctgctaccttcatctctgaataacttgggaccagaagaccagcctgctggagcaggaagaactccaatctagaagtcagggacatgggatctagttcagttgatgctactagctaggtaggtggccctaaataggtcatttactttgttttttctctttctcagggtttactttccttaatcaaggggctgactagacc

SEQ ID NO: 138029 - DNA, 459 bp, Homo sapiens
taaaatgttcaattagataagctctaagatgcctttgagcgggaaaatctaatgcacaatgactctgttttattagtatctgcatgaattcttctggttttgagtccttgacagtgttttataaattaacattctgcagcatttagctccatttgttaaaaaaaaaaaacaaaccctaaaactaaaacatttcagtgtaaaaccaattagtaaaatgtagcactgctgtgacctttatgctacaatgtaaagtaaccttggacagcaatgtggctgactctaaggtgtctctcccctccccacccaggtctcactggctcctgccctggccttgccaccacctggcaggtggctaagtctctatgggcatgaaatgacggagcttgactactagacaacagaggtcccttcagctccccaaataggcaattttacacatttctattttcttgttttcca

SEQ ID NO: 138030 - DNA, 133 bp, Homo sapiens
tcctgtctaaatatagcatgcttgtctccccaggcagctgggaggaggggcctgcatgatcatagatgagggtgccttgtccacctggctctgggctctcactgagcatgctcttccttgggacggcttctca

SEQ ID NO: 138031 - DNA, 496 bp, Homo sapiens
gtagagacagagttcaccattggccaggctggtctggaactcctgacctcgtgatctgcccacttcatcctcccaaggtgctgggattacaggcgcaagccacagcacccggcttctatgaattcttacaagttcctttattcaacggtcatttactgagaacatttttgatgtccaacatcggacccgtcttaagatccaaacatctgacgtggttggtctctgtccctgtgaaatccacaaccttcttggaaatgttaaataataatatctaattggagtaacaggagtgttaaacattattatgtgggatttttctgattaaaaccatcaaatgggttgtgtaaagaccaatttcccattgtcttctaatgcatttgggtcacactggtgttgccagttccttgttctttttcttccatctcatttatctcagtctctactgacattttcatctttctgccattctctctttttttttttttaagccctgtat

SEQ ID NO: 138032 - DNA, 273 bp, Homo sapiens
tcaagatgtcccctttttgttctctgtcctccccagggtagaccctacttctctcccctgaggaagtcctgactccttggacggtgacagcttcaggcatggccctggaggcctgggagcacagaggccccgtgtgcttcgaggacttgaggcaggaggcgggcagaggcgcccagggcgtgagtgtggccagcaggacagagggcaggactgcgcttctgacagtggtctgctccggccaagcacctgaaagatggggagcccttcacccca

SEQ ID NO: 138033 - DNA, 221 bp, Homo sapiens
tacctgaggctgggtaatttataaagaaaagaggtttaattgactcacagttctgcaggcttaacaggaagcatgactggaggcttcaggaaatttaaaatcatggcagaagtgcaggggaagcatgcacatcttcccataggagagagagaaagaaatgggaagagcaacacactttcaaataaccagatctcatgagagctcactcactatcatgagag

SEQ ID NO: 138034 - DNA, 331 bp, Homo sapiens
cctcacatctttcagatctttgcccagatgctatcgtcttactgagatcttctctgacctcccacctccctgtttaatgcccctgattctaccctcagcactctgtacacctgccgagactctacattctaggcaggaatttcttttgtttgatttacttttgtatcctaaatgcctaggacattacctgattcacactaggcactcaataaatacttgactaagttaagtatatggaattacatatccgttgcgttcataatttacatctgctattataaatttaccatggatcttagattttgaatttatacaagtgtgtataatttcc

SEQ ID NO: 138035 - DNA, 256 bp, Homo sapiens
tcctattggagttacccaaaggacttcgttcccccaaaatgagctggggtcggtgctggtatctcctcttcccctggggactcagcagacacaggaggttccacgttgcctggcatcttttagaaactcaggccccagcagctttttaatgggtactgaccacctgctacatgccaggcaggatgtagatgatttgcaggcattgaaatatataaacctggaaataaacaaaatgctacagaacagttcctaaaga

SEQ ID NO: 138036 - DNA, 385 bp, Homo sapiens
ggagaccagttaaggagttgcaatgtgaaagatttgatagtagcattaagaatgggcaaaaatagatgtactcaagagatgcttcaaagtagaattgactaacataatatgctgaatttggaatagaataacagatgataggcctgaccatcatagtggaaggttttgccactcactgagataggatacagaaaaagcaaagcaggatttggtaggaaagataaccagtttgttacgtgctaagtataagatttttgtggtacatgcaagtagagtgatctactgagtatttagatacattttctgaaatttggggaagaattctgagctgcagataaagattttggaatcataaacatataatggtaattgaaggctgagatgg

SEQ ID NO: 138037 - DNA, 247 bp, Homo sapiens
tatttttagtagagacggggtttcaccgtgttagccaggatggtctcgatctcctgactttgcgatccccctgcctcggcctcccaaagtgctgggattacaggcgtgggccaccgcgcttggccaaaatctgcattcttaatcacaaacttacgcattgaatgttaaggctaaaaggtcatctggaaatgcttaattttaaaatattttcaagcctcaccacattagagcaaatgttaatgtagag

SEQ ID NO: 138038 - DNA, 643 bp, Homo sapiens
tttaaattaaagaacatctcaagtacttcaaattaccttcccctgacagcagattatattttactttattgctaaaatggagtttggctgtcttttatggctgtattcatcattttcactctatttttttgtgcactatttgcatcatgcatttcacattttaatagttgtagttcatgcgatgtgattttcaaacaattgtcctatttacatggcaagccatctgcttaatcagcagtcactttattttcagtcttttcaaagccactttccctgaaaagcaaagagacaattcaatccaatgtgccaagctggtcccctccagtgaccatctattcaaattcacacaggtgatcttttggtgaaggaaagaaggtgcacttcaacagcattgtcacagcaatgtggaacagatattataaaatacaagatgaaacattgccttcaaggaaaaaaagttaatttttcttattctgtgtacatgagtatctgatggttgtaaggttgagaataaagagtaaagttgggccaggctcggtggctcatgcctgtaatatcagcactttgggaggctgagggaggtggatcacaaggtcaggagattgagaccatcctggccaacattttgaaagcccgtctctac

SEQ ID NO: 138039 - DNA, 240 bp, Homo sapiens
tggaggtaccacacaaatatcaagaggaacatcatgatagacgttaaatgcaagcttgcactagctcttttaaaatgtactgagcatcaacactcatgagaggaagggaaaacaaaaataacaaaaatgtgtcaagcaaacacaggtaataaatgtaaaataaaatggaccatatcaaaataaaaaacttaagcctcccaaaggctattttctagaaatttctttatccaaaatctatgg

SEQ ID NO: 138040 - DNA, 212 bp, Homo sapiens
agatgtgggagaggaaagtcaagcttgaaaaatgggtaacaggatcccaaaatccttcatcacacctgctagaggcagaggacttcagagtcagcagtgcctaactgttctcccacgtaacaaattcaaatgctctttccacttgccattttgatacaggtaaacagaaaatgtcctagtattctatccccagggagactttccatgaaggg

SEQ ID NO: 138041 - DNA, 285 bp, Homo sapiens
agagggcaatcattattcaggtttaaaaataaatatgacaagttctttaagagataccaagtggaatctgcaaggcccagacaagagctccacttcttaaacaatatgtgtgtggaggctgtcaaagggtattgcaattactgagctccagttagaaattcaggccatctagagttaatgactgtgtcccggtgaaattacagcaaagaaaacaaagattgaacaaagtatcttcgactaaaatttctaactgttaaatcatattagagaatatagaagcaaatt

SEQ ID NO: 138042 - DNA, 246 bp, Homo sapiens
tgagtttcctagccacactgaccagtgcagaacaacaattatacacacacacacaaaaaaaaaatggtctagaagctaaactattcaatggccacagaggctcagaactaacgataattatgaaacataagcccctttgtgaaactgcagaaatctaagaaaaggcattgagcttccaagtaaaattattttcagttgagtcaaatctgaaccttaaaaggcaaataatcatagcaaacatctggg

SEQ ID NO: 138043 - DNA, 129 bp, Homo sapiens
ggggcttctgaaacaaacattgtactgtgagctctcagggaaagggaggaaaaagatgttgataaataaggaggcaatttcttgaggcaggggacgaggaaggaggcttactatttttaatgccctcag

SEQ ID NO: 138044 - DNA, 508 bp, Homo sapiens
taagtaaacatgtagcaacctagattattatagtatattgaacaaatagtgtgaaatgtaacaaaaagtctcctaggtactatataaggattttattagatactagatggtctatcctaaaataatattttgatactgttccatgacagagtcctgaaataaggtttgtatgtgtgtgtatatatgtaaatatgtatgtatgtgtgtacgtatgtatatacacatacactctggtatacaaattctcattcaatattatgtcaactatcaggtatagtatgaatctaccattatgtatatttgtatgtatttcatcagctactttaatttattttagggtcaatcattacaccaaacccatccttcctaagtggtctgcttcatttctgtcaagttaagcagttttaacaaacatattatgcttaaataaaatatggatggtatttttattgaaatataatataccataaaattcacccttttagagtgtacaattcagtactttttc

SEQ ID NO: 138045 - DNA, 114 bp, Homo sapiens
tcctctccccctcccctccccaggcgtatggctgcagctacgcttgtcaccatccgagactgcattggccacaggagatgtggatgatttttccatttgtcctgatgtttattt

SEQ ID NO: 138046 - DNA, 301 bp, Homo sapiens
atttcatgtaagaaagtggagtaaaaacttttagttgctggatttaaataagatattggtaaaatacacacaaaactaaaaacagtgattacttgattagcaggacatgtcagggtgaggaaattggggtagctggacctttcactatacacttgaaattattattttgatttttgcaccatgtgaatagaacttctatgtcaaaatgaaacagaaagataatgaagtgagatgaaataaaaaccagccagattgttttgctacactctgagatttgagagcctctgacttaaattgcatg

SEQ ID NO: 138047 - DNA, 575 bp, Homo sapiens
tatgaaataaatcactcataaataaagaatgctttctttattcacatgctgagtcctttatgctagcaagaaaaatagagaatatagaatttctttctcatggagctaaacaaagagcctacttgctgattaatgaaactgagataaaagtatcacatattacgtttgactatgttatcttctccatcataaggtacaaatctcttgttttcctcattttcaatccaaagagacaaggatttttgccaaatttttctactaatggagcccatcttaacccatctaagatatgaacatctttattctggtagacatcaaggtttgtgaaataggttttatatattgccagccatcatagtacattgtataggtgatggtgacaggacataaattgtacctgttattaatctcttcagatgcaaattaacttcaattgaacttgcgactttgttctttcccaagttaaaccaaatcctttgtttcatgaataaaaagaaaatttagtaaaatttcctgtttctttgttatagctgcttacaaagtgaataaaagtgttttagacagtctgcaaacaa

SEQ ID NO: 138048 - DNA, 444 bp, Homo sapiens
cccctcggtgttcgctcagtatggaagtttttctctatcattcggcgaagtcgactcatctttgttccggtcactctgtgtaatgtgtgcatgattgtgaaggatactgaggaatgaaaacttagtgtacagaaaaatggaactactggggctttgcagctgttagaaaagaagaagataacattctggttttttggaggtacaggactgattccagaaatttctgaggcattttggtgcaccgaatcaaatgctgagtggacttgtatttagtggccccctagtgtcaagaagtaattaactaccagaaagtacgtctacttaaatacactatcaggtttacccttttactgcacagttgcagaagttcccttaattacttcacagcttgcagcgtgattcagttgatgaacaaaaagaactgtaccaaaagaatactttcat

SEQ ID NO: 138049 - DNA, 142 bp, Homo sapiens
tctggtccaggtgaggggccccacaccaggggcatcttgccaccaggggcatcttgccaccaggggcatcttgccagctgagaaactccgacattcttctgaaggcccccccatgggccacaggcgttttcctctgagtatc

SEQ ID NO: 138050 - DNA, 350 bp, Homo sapiens
tagatataataagaccatgcagaaatagaatcattttttgtatgtgtaaaattaatctaggttaaaatacagagagaagattgcgtttggaaaaaaaccttttcccacattttctccgggctcctctttataaagcaattcatgtagtaagaaatcatttttgttcccactttctcttccttcccaagacagcatgggcatctgtgtcacttttcaatgggtgattccgtcataattattcttcatactatatcattgagtctgaagtaacaaatacaggttacatttagatacttcttatatgcatcctgtgcaacccctcctcaccacaaacacacttacactcacag

SEQ ID NO: 138051 - DNA, 319 bp, Homo sapiens
tttcctgggtactcccttcgctcaggccctcacggtccctgacttagagctgctcacgcagtggctcctcaacccaccagcatccccaggggcgcttgcatctttgcaacccacttgtcacactgtggccagggtggctttcaaagacatcaatgtggccatgctcataccctgccttctgggtcccctgctgaggacagcacagcacatgctgaaccctgggccctcttcatctctctacgtgaacgggaatgggctgagatctccacctactcctgccaggcgtgacctgagggaagctcccatcagccccacaacg

SEQ ID NO: 138052 - DNA, 241 bp, Homo sapiens
atcatacagtagagcgtaaattaaagtagaaccaaataaataacataaatagaaaacacgaggttggggacataaaatggagttgaaataaagctatctaccttagaatgagccacaaatctgaaaactctggaaccttagtttcactgtcctgaacaactctaaagtcaatcttcaattttcggggcaaggtgtctgatctgtgtgcctggcccctacctggcttcccttctttctccac

SEQ ID NO: 138053 - DNA, 335 bp, Homo sapiens
tttctattcaactgagcagagaagctccagggagctgcagaccttccatgggacccaacaagggcaggcatggagctggacccagagccaagaagaccagacgacacaaatcatgccttcaaagaagaacccaggagttcaacccaaaatgctgatcaacttgtatagtttcctgtctccacctccagttctgggaggtgaaggagtgaggctgggcggtcccagcgtctcccgggcctgggagaactcgtctctctttccacacaggggctgggatgaaggcaggcaggctaacattgcagtaggagatttaggagcttcgtgtgtaagggcga

SEQ ID NO: 138054 - DNA, 380 bp, Homo sapiens
acatttcccacagtttttgtgggtttttatttaagttgggaaaacttcggaagtttgtgtgaaagtataaataagtttggaaatgtcatgattagagtttgataataaacatgcaaaagcaaatgggaaactctattaaagtcagatgtaacattaaataatgttttctctaaaatgtatttgcagagagaagaacagtgatttatgtggatttgaaacaaagactttggctgtaatttaaaataaaggttaaatgtgaattcttcagcctgaacatggatgaagttttttgtttttaagagcttccttagtgattgttataggagcctctgtgcccttttccaattatgggcacagaaattatgcatgtatttatagat

SEQ ID NO: 138055 - DNA, 549 bp, Homo sapiens
atgctacttttccccaagggaacaaaattaatcatcatttattctaaaggtagggagacctccgttgtttctagtttgtgatcgttttttaatggaagaatgaataagcccccgaaacttgtatattgttaagaacaaattctggcttccctcacccccaccaaaagtatactgtgcttctgatatttaatccatttgcaatattcaactaaaagtacctcagaggaaaactaatcgatgttttttttttttcattttaaggcattaagtaaatgatttctttttgctactgacagatgaaaattaatagcagaaaagcagaaatattgtttagcatgtgtttctaaaaatatgagccttagatatatgattagtaagaaacccaaattcatcggtattgtgtcattaaaagaagaaaattaagtaaagaaaaatgcaacatatgaggaatgaaaaaaattgatattagtctaaacaaaaacataggctatctgctaagattctcaaagaagcacatctacgtctttaaacctacgtctttctcgtttt

SEQ ID NO: 138056 - DNA, 424 bp, Homo sapiens
agccagtgcctggactcctcaccttgctgggccaaggctgtgaattgcagggcactggctagtcacacagaagggcatctggagaagctgttggccaggaccaccaggttcccccatatgtagtctgggagctgctagccccgcagggccatgagagaagcctttctctaggggtccccaactgccagagaagccctcaggagagccacagctttgcccagaccccagagtagcacttggcatgcccctgggccaggtggggccttgtctcaggcagcaacttgtgtgtgtgcacacctacctgcccacacctaccatgcacacaccaacccacacacatatctgtgttgctaggagcagaaaccatagttttataaaacagcctggatcctgattacatgtgctctgcctgtgaagactttct

SEQ ID NO: 138057 - DNA, 446 bp, Homo sapiens
tagtgacagagggctactttatattgggagtatgagaatccctctttgagaatctttgtcgcatctttgggttgttgtttgtcttagccctttttatgctgcagtaacagaatactgtagactgggcgacttaggaagaatagaaatttttctcacagttggaggcctgaagtccaaggttaaggcacatccatcctgctgatagatgcatcccccaaggggaagatccctgtgtcctcccagggcagaagaggaaagagcaacccccaggcagcctctcctccaagggcctttgatccctttcaaagggaggagttctcacagcctagtccggtcttcatactaacacactgaagacacttacattttggagaagacaccttcacaccatagcatgtctattggtatagttgtaaagtttctttataaagttaaggaaaaaaaaa

SEQ ID NO: 138058 - DNA, 394 bp, Homo sapiens
  misc_feature (370)..(370): n is a, c, g, or t
tgatagaactggggacattgttgttaaagagaagtatggaatagaagaactatacataaggtaaagagaagccaggtacaaaacaatgatttttaaatgaaggattcaaaggactatggctcatcacaaataatggaatgaattggtaaggtagtgaagttacattcaggataacatgcttcttctaaaagtgactataaattactcctacaattaaaatttttcacttattcgtgcactctttcaacatttattaaggaccttcttgatactctggcaaaggacataaacattaagcctttgatgtatttattacagtcaacaggacttaaaaaaatagaatttcaggcagactccctgtgcaaaatanaatattctggccccgaacctccgt

SEQ ID NO: 138059 - DNA, 472 bp, Homo sapiens
tattctaaatgactgagttgtccaccccataaacactatagaagccagcacagcaaagatcagaatgatttttaaatgaaggattcaaaggactatggctcatcacaaataatggaatgaattggtaaggtagtgaagttacattcaggataacatgcttcttctaaaagtgactataaattactcctacaattaaaatttttcacttattcgtgcactctttcaacatttattaaggaccttcttgatactctggcaaaggacataaacattaagcctttgatgtatttattacagtcaacaggacttaaaaaaatattgtgaaactggcctaaacaaataaaacacatcaaattatctagcggggtgatttggaatggaattggaggaaaacagaaacgtgttggtacgaactggaaggaaatggttgtcatcaacatgaactccagggctgcttggcttgaatcctggc

SEQ ID NO: 138060 - DNA, 1056 bp, Homo sapiens
tggaaccagcagactgatttgtgtggtagaataaaggtccaagaatagcaagaaaattgagtaagaaacaaggaagataggctttatacaaatgagataagacttgtaaagttagagtaattaagacctggtggtattgatgcaaaatagagacgtcagtgtaatgggggcagaactatgtgatatccgtggggaactaaccaattattcagtaaatggtttgggaccaatgggcttagctggcatatgggaacaaaataaaataagattgtaactttcagataagttaaagccaggaaaaacaagactttaaaactgtaagaaaatagaacattttaatgttccctgagtagggaagggtttataagaaatagtacaaaaagtacaactcaaaaagtaaatgataatatatttatctatattaagacttaaaaagtctgtgttttataggaaaccataaagtgagaaaaaagtgacagactgagagaagatatttataacataactggattagtatctagaatgcatgaagaacttgtagaaatctataatagacacaagcagttcaatagaaaaatgggtgaaagatgagaacaggtagttttagctgagaaaatctgaaaagtctgcaaagttttgcagcctcactaacagggaaatgcaaattaaaatacacatattacttcacacccgttatatttacaaaaaagtttatcagttctaagtagaagtgaggttgttgaaaagcaggtactctcatgtactcctagtggccgcgcacattgatgcacctgtttgttgttgagatatgaagtgaaaatcacagatacctgtaaaaatagcaaatttttcgatgtatagcaaggccctgtgccagattccatgggtgtagtggattgcatacccaactggtcatcagagtcacctgacaaaatctgtttttaggctgcgtattttctggtgatcttccagagttggggaagactcctcccccacactagagttcagtgaatacttcactggggagtcaaaacataaatacgcatgataaataat

SEQ ID NO: 138061 - DNA, 398 bp, Homo sapiens
aagcaatcctcctgcctcagcctgccaaaacattggggttacaggcgtgagccataccacccggcctgcattgggcgtttctatgctgtttgtcaccgtggcctggcagggctggcctcctgctgctgtgccctgctaagtggaccagtttcccttaccgcagtagaccgtgattgagtgtggtgtagcatctctgctgaaacgatggcagccctgggacagctgcggcagtgtctcctcctggcttcttggcatgagatggtgtaggcggcgcctgacactctggagggagtcagagacattgttctgcaggggtggggggatttcgtttgcctgcagttgcggcccggcgttactcctgggcacagtgcgagcccacccgtgccactgggagcacg

SEQ ID NO: 138062 - DNA, 373 bp, Homo sapiens
ccaagtagctgggattacaggtgcccaccaccacacctaactaatttttatatttttagtagggacagggttttaccatgttgaccaggctggtcttgaactcctgacatcaggtgatctgcccactttggcctcccagagtgttgggattacagtcataagccaccacatctgacctccacatctgttttaatctttgaagtgtattataagttatagttctccctgcttgaaggtaatggaaaagttgagactgggttgcctgatgagagatgtagggagcttagtattaatgttgaagattaaaggagagcctgtggttttaggtctaatacagtagattccttctcctgttatttaattggaatgaatt

SEQ ID NO: 138063 - DNA, 655 bp, Homo sapiens
ggcccggcagccctgttattgtttggctccacatttacatttctgcctcttgcagcagcatttccggtttctttttgccggagcagctcactattcacccgatgagaggggaggagagagagagaaaatgtcctttaggccggttcctcttacttggcagagggaggctgctattctccgcctgcatttctttttctggattacttagttatggcctttgcaaaggcaggggtatttgttttgatgcaaacctcaatccctccccttctttgaatggtgtgccccaccccgcgggtcgcctgcaacctaggcggacgctaccatggcgtgagacagggagggaaagaagtgtgcagaaggcaagcccggaggtattttcaagaatgagtatatctcatcttcccggaggaaaaaaaaaagaatgggtacgtctgagaatcaaattttgaaagagtgcaatgatgggtcgtttgataatttgtcggaaaaacaatctacctgttatctagctttgggctaggccattccagttccagacgcaggctgaacgtcgtgaagcggaaggggcgggcccgcaggcgtccgtgtggtcctccgtgcagccctccggcccgagccggttcttcctggtaggaggcggaactcgaattcattt

SEQ ID NO: 138064 - DNA, 200 bp, Homo sapiens
aaatccagaacatgacagcttgggtaatgacaatttaaaaaaatcatgatttatggtacagaaccatggaaagtgtcaaaaattggagtcgcaaattatctctgaaagccagagtgtgaagtgggacagaaaacaaaagatttgttgaaagtgtctttaggagcaggtagctgccctgatgttctccccaagtccaacaa

SEQ ID NO: 138065 - DNA, 282 bp, Homo sapiens
gtattttttacaccaaggggtaacagtctaagttcaagacaggcttataaacaaaggattaaaatgcagtgagatgtgtctgtatggatctaccagtagattgaagcatattacagtgagtttcttgtgggccaaaatggccagatcatagtcatctgaaatagtttaaccaaacacaatgtgctacataactcctgataataggagacagagagagcttcagagaagccttaatatttgagtagaattctaaagaaagatttggattttatacagcaaaca

SEQ ID NO: 138066 - DNA, 405 bp, Homo sapiens
cacatgtagactaaacaggatcgggactgctggtggtactcatccctgtgctctcctggttctccaatgttctacatggaatatgtatgcatctctgtcagtggagaagtgaccccattctcaaacaaacaaacaaacaaacaaacaaaagaacacttggcatcctcccacacaggaaggagttcatgtcttgttctagtcatatgcgcggaggttttctgtagctgaaatcctagactgcactcctagactgcacatgtgatactctccacattctcccaagttcctcccctctaccccgtcacgcactagggcactctggcaacagcagatggggtgacatgggagagcaggttcactggactttactgctgcccaacagatttagtgaaccatcgattccta

SEQ ID NO: 138067 - DNA, 126 bp, Homo sapiens
ggaaaccaaggcctattttagtaaagcaacttgcccgcctcaccgagctaggaagtgttaagagacagcatttgcacttggcaatggactccagagatctctgtcctgtgctatagatgctgaact

SEQ ID NO: 138068 - DNA, 296 bp, Homo sapiens
ggagaaagagcaggtttgggggctaagagaaagttattgagctcaattttggacaggttgagtcagaggtgggcatccaggaggaggtggcctgcaaggagctagatagagggtctagatccagcaggagatttaaacaagagatttggtttgagactatggtcattgtagccatgggctttggtgagctggctctagcagaacgtgtcagctgagaaaagaggggtccaggaacaagaaagagccttgcccccatttaaggggtgggcagagagaggggagcccacaaaggtgaa

SEQ ID NO: 138069 - DNA, 321 bp, Homo sapiens
gctgggattgcaggcatgagccattgtgccaggcctcttcttgtgtattaacctgtatggagtaaagaattgtaacatgttttttgttgttgttgttttgtttttcctttttttcataatactataaagactggaggggatcatggtaggtatcctgagcaatatcacctgtttggcatatgaagaaaatgaaggctagagaagtgaagtgacagcaaactcttgagatagtaagctagttagtgtttataatgctagagagaggagagagaaaggcagtatagggtttaaaaaacctggatttcagagtcagacctgaat

SEQ ID NO: 138070 - DNA, 399 bp, Homo sapiens
ccaatcagtgagtttagcaaggttgcagggtacaaagttaatatataaaaatcgattatatgccagcagtgaacaattggagtttgaaatttaaaaaaaaaaatgataacaccccaaataaaggaaggaaaagaaacatctaggtaaaattctgacaaaatatgtacagtctgtatgttgaagactgcaaaacactgatgaaagaaatgaaagaagacctagatgaatagatagattctttcatgtagaaaagtgtaaagaaattacaaaaaaaactcctcggaccaatcagtgagtttagcaaggttgcagggtacaaagttaatatataaaaatcgattatatgccagcagtgaacaattggagtttgaaatttaaaaaaaaaaatgataacacccc

SEQ ID NO: 138071 - DNA, 318 bp, Homo sapiens
tgcactccatcctgggcgacagagcgagactccatcccaaaataaaaaataaataaataaaaaatgaaaatacaaaattagcacgtggtggctcccatctgtaatcccagctactggggattctgaggcaggggaatcgcttgaacctgggagaggaggttggcaatgagcggagatcacgccactgctctccagtctgggctacagagtgagactgcatctcaaaaaataaatgcatgctttagagctgttaatgaatggtcactacaaatactactgcttcaccaataaaaatgagattagatgtgttagggtgat

SEQ ID NO: 138072 - DNA, 423 bp, Homo sapiens
atgagctacatgccaaccaggggaagcaggaagtgcaggaggagcatgtttgctggagccccagcagtcaagagtgacgacccagggtcactgcagaatcacattcacagcgcactgctgtttgtgtggagagagggaaagggggtggctgtggaaacatgagacatcactggagctgggagtccgctccagagagaagaacggggagacaggggagaggcacgcattccactgcatttctttcgaattctcactctttttaaaatttttcttaccatgtgctaatgttctgtttgcaaaataaattcaatcaaacaatttcaaatgaataaatgtagctgatgccttatcaaaataaataaatataagaaaagacaggtgggtcactgactttaatttccaagtgataaagacacaatacat

SEQ ID NO: 138073 - DNA, 377 bp, Homo sapiens
agatgcgttgctcccggctgtctttcctctggtatctgccatctaagtcccaactgtgaccccagggattggaaagggagcatgacagtttccgtccctactcccatccttcaaccacccagcccagccaggaagccagcagagcccaggctaagctagctgctccttcttttgtctttcacggccaggcaggcgtcacaggggaaagacttgggttaggtaacaggcggaactggacaggaggcgctggggaacaggctcccctccaccaggtgaactctcttggctgtgcaatgtggtgaatgagacaggcgctctcagaacctgacacccataaacatgtgccacactctgtgatatgataatattggggtcag

SEQ ID NO: 138074 - DNA, 521 bp, Homo sapiens
tcgaggccagctacagtggggctgaggacagaagcgtgatggggtgggcttgccatccttgcctctggtgggcacagcaggaggaacattgcatcccgacgtaggggctggcaggacggggcccgggcagccgtcactcctgacctgtcggatgatggagaggggctcctgtgcattaggagggcttgtgggtgcctcatcgttcactgatggaggcactccaagcctctgctgctccctcctctccttccaggtggggtgggttgtctctggggccagcatggcatcgactcggcttgtctctggtgctatgttgggcgcctcacgtctgcctgtcccttgggaaccttgtctgccattctggacctcgtgcctgagttcgcttgggtcagaattgtccttgatggtgttctggagacacgcgcagttagtgagcaggcccagggggatccagacacaccagacacatcccctcaaaacctgagtgtggttttcacagcagtgagagtcaccctggctga

SEQ ID NO: 138075 - DNA, 187 bp, Homo sapiens
taaaaaaccctctctaatattggacagttatgttatgatttattttcctctatctacacaacgcttgaacaagtatggctgattgccaaaaaggaatgctagcaaaagtaattccttctgagctttctgtgacatagtgaccgattattatttctgtgccgtagatacatgctactgagcattatta

SEQ ID NO: 138076 - DNA, 472 bp, Homo sapiens
gacatgtgcacgagtcagcaagaagctttgacgtgcatgccacagggatccactggccaccagccacggtggttttgccaggtggcatctgctctgaaggagatccaaggtcaagtctctcagctctccccaggccccactgtcactcaaaactcaggatgtctcaatctaaactcctctgggtaggtctccagactggctctccacctgacctcttgtccagaaggtccacaacacctcgagtctataagcctgaccccagggagatttctgtaacctattgtatccacccaggccctgcacgctctcccctatagcgtctccttcatccctctcttctatcaccatccttgttcaacccattgcactccagcccaccttggctctccatggcttacttgtcaaagcctctagttcagtcttatgcttgttcaatagtcctgcaaatatttagtgatcacttactcaccta

SEQ ID NO: 138077 - DNA, 346 bp, Homo sapiens
ataacttcgttttatgaatatattgaagtttatttgcccactcccctactgacatttagattgtctcccataatttcatgattatcaacaatgctaaatgaccatttttgaatatgccaccctgcacacacgggacagtttctgttgggacaagtctggttttgcagtttcctatggatggaactttaggcttctaaggctgttgtgtattagaaacatctgctgttaacggaaactctgtcaggagattgtctttgttaagaatatagaccctgggccgtgcgcggtggctcacgcttgtaatcccagcactttgggaggccgaggcgggcggaacacaaggtca

SEQ ID NO: 138078 - DNA, 583 bp, Homo sapiens
caaaaatctatgtgaagaacccctcatcctaattattactcaggatgaatctaatagatgaaattattctcctttagaaaaaaattaaaagacctcacaagtaatagaaaatgtgcctgtgtttgtgatacgcccatgtgtggcaagagacgctggctggaaacatgtattggcacagtcaatacattcactagaaggcaatgaaattcccaaaagtattacactaagtatattttcataaacaaatcaacaaaaacgaagataataatcattctggtcaatgactgacccaagccctagagctagaacctaatcaggaaactagaatttaaaaaacatgaggcaagagacaagatatcactaactctaatgattctactatttggagtttctttgaagatagataaattcctttctacttccttcaaacaatgatacagtaagcctggtagcacctagcatgaaacaaaaaaaaagcatttatttttcttctgattactaaattaataatatgtcactgttttaagaatcctcaaatacgcaacaactctattgcaaaaatcttccagaaacttactctaca

SEQ ID NO: 138079 - DNA, 734 bp, Homo sapiens
aatagctccttacatataaaatcaactaatttttgacaaagctgtcaaggtacttcagtagggaaaggatagtcttttctacaaatgtgttggaacccctggataaattcatgcaaaaagaggaatttaggctgggcacagtggctcatgcctgtaatcccagcactttgagaggattacttgagcccaggaggaggattacttgagcccaggaggtcaagaccagcctgggcaacatggcgagacctcatctctattaaaaatacagaaatttctgggtgcagtggctcatgcctgtaatctcagcactttgggagtccgaggtgagcggatcacgaggtcaggagttctagaccagcctgaccaacatggtaaaaccctgtctctactaaaaatacaaaaattagctgggcatggtggcaggtgcctataatcccagctactcaggagactgaggcaggagaatcgcttgaacccaggaggcagagattgcagtgagccaagatcgtacctgtgcactccaacctgggtgacacagcgagactccgtcctccccaccaaaaaaaaatattagccaggcatggtggcatgcagttatagtcccaactacttgggaggctgaggtgggaggattgcttgagcctagatggcagaggatgcagtgagccgagattctgccactgcacacactagcctgggagacagagcgagactctgtctcaaaaaaaaaaaaa

SEQ ID NO: 138080 - DNA, 338 bp, Homo sapiens
aagacatccaacaaaactggccattactttatacttctaggtctcagtagatacaggagaggtaatttggccatgggagaaagaaacaaagtaatagaatatggaagaaaatgaggattgtgaaagagtaattcgcatttagtagacccctaataaatactggttgaatgaatgaacaaaatgaaagagaaacatactagaaaatagattgggctgcagcggagacttacatctggaaatatcctgttgtggtattgggtcaagtattaaatactggtgtgcttattttagccaggacataatttcgccactgatatagtagggaccgccaaaggggg

SEQ ID NO: 138081 - DNA, 297 bp, Homo sapiens
gtgtattatgaactgaagtgaatcagttacctgaacttacctgacttcaggatggtaaatactcttgatttttttcttcaggcagattttttttagtaaagagcaaaaaatctgtattgtatttcagaaaattgcaagtctgtggtcttatttctaacagtttgtcatagcctggagcagttccagaacctgaatgaagtcagggctacagaacagggaatatgcatgctcttaagaccccttgatgtcttgctgtctggcttgcctatatcccctcagttgctgaggctctgcgct

SEQ ID NO: 138082 - DNA, 280 bp, Homo sapiens
ggtggatgatgaaatctggagaatactattagaattttcttttttggagttttgtctgttggtattactattacaaaaagaacaatcctaagtatgagtgtgtgtatatgtgtgtgtgtattttagaagaatctatgcaaaatgtttttcttaactttatttttttgttccccaaacgagaagatattaaggtaatataagctggaaaacttgctgacttgttttaaccccacatataatttaagactacatatatgtgtgtgtgtgtgtatacatatat

SEQ ID NO: 138083 - DNA, 394 bp, Homo sapiens
aaattattaaagggtactttttaagcagaagaaaaattatcccagttggaaggttggaaataaatttaaggacaggtatgtggattggcttattgactgcataaaaaaattataagaaacagcaataataggagcaatgcagttataaaacaaaagagtaatatataagtcagaagagggctaaatggattaaatttttctaaggcacttgcattgtttaggaggaggataaaagtataagttgacattgataactcaatgatccatgacaactcaaggatacattttgtaacctctagggtaactctgaaaggataataaagagatatatgacatctaagctaacagaagaaaatgggactaaattttcaaaacactcaatacaaaaagtgga

SEQ ID NO: 138084 - DNA, 448 bp, Homo sapiens
gggaggtggctccaaagcatgtattgtggtcttgaattttgataagcaggggcatattcttagttatagcaagagggaaggtggagacgatgggtttatagatttggggctaagcaaatggagctcccctcctgatggtttctgttttctcagtgaaggcaagggcaactcttgagggaagagggtgaattggagatttgagagagaacatgtcaaacgatcattttcgagtaggaaaatgaacttactagaagaaaatggctttattgagagcctctttgagattaaggtcagaaactaagaatgaaaatctgattctacagtctttcttgttcaacctcagttccttggattcagtcatggagaattaagtggttgagattacccaaggttagactttatccaggtgagtacatcagagagacagacagacagagagagagaagtg

SEQ ID NO: 138085 - DNA, 413 bp, Homo sapiens
tgacctcaggtaatccgcccgccttggcctcccaaagtgctgggattacaggcatgagccaccatgcccagctttcatacttttttataagagatagggtcttgctatgttgcccaggctggcctcatactcttgggctcaagcaatcctcctacctcagcctcctgaatagctgagactacagatgtgtgccattgaacccagctaccttttcatacctttaaagaccgttagaatattccctttcatgaaggacctttttaaatcgtttgcccatttttctactggattatctgtcttcttcttaccaatttatagaactttttagtattgcagataaagttcctcatcggatatcttctctccttctattgggtacctttttattgtcttaatgggggtcttttaatgac

SEQ ID NO: 138086 - DNA, 168 bp, Homo sapiens
cctcattaagccttcggtttcctcttagaaaaactgtcaataatgctagaatccactccatcaggttcttgcaaggattaaatgagatgcttcatgagcatagtgcctagaacacagcaaacattcaacaaacaaattgaacatctttttaaaaagatcttcagtttt

SEQ ID NO: 138087 - DNA, 321 bp, Homo sapiens
cttgagtgtcataccctagccacctgactgtcaggggagcagtatgtggcacttgaggccttgggctggccatgcaggcccaccacaggtggcaaggaatcatgaaccccagctgagtcccctgcaggccttgcctaaaggagaagccagtgaatcaatgtgttacttgaacaaatatagggtctagggctggccaaaagggacagtgaagttggcttctcaggccacagtaggccttcacggtactcagcaggagaccccagcaggcagcatcagggcaggggtgttgaccatccctgacccaagcacgaggatcagaat

SEQ ID NO: 138088 - DNA, 207 bp, Homo sapiens
gggaatgtgtttgggggatagtgagtcatccacgtggttcaagcagagagcgattgtaggagtgaggttagatatgttacccagaaccccaggatgaaagctggaactggacagaggcacagagtatgtttaatcaggggataggcatgatgagagaagtcctttaaaatgacaaatccagcaactggctggaggctgagaaggctg

SEQ ID NO: 138089 - DNA, 311 bp, Homo sapiens
gggaatggtgcccacaggcgttttctgctgcacagagtcctttatgtgccttgtgagacaaggattcttgaaggcctcactcctcagtgggatctgaggccagccgtggcagcttctcctggcgcaggttagaaatgcagagtcccaggccccaccccagaccgactgagtgggaattggcaggggatgtgtgtgcacctgcaggtgtgggtaacactggcctggagcagagtgctctaacgaaagcccacaggccaaatccggcccaccacctgcttttgtaaataaagttttattggcacacagccgtg

SEQ ID NO: 138090 - DNA, 410 bp, Homo sapiens
caactccgtgggttggcaggagactcacacctgccgctcagggattagcaggaactgcatctggtctttttgataaggaaggctgtttcactgggcgccctttgccaagggaggactgggagagaaacttggggtgaggcactcctgatttcacctgatgtcaaagcagcacctcatattagagcttaattttaggccttacactgcacggtgggtacccagtgggtcctgctgactgcccttcatctcctgatttggtgcactccttcctgtgatctgaagctcaacacacagcctcatccctgccagcttgggacaggggccattccaaaattcaaggccaccagagcttttcgtccttttctcttgctgctgatttgttttctttttttctttttttttttttttgg

SEQ ID NO: 138091 - DNA, 771 bp, Homo sapiens
cactggcctaacctgtttagtctcctggagaatttaagtggcagcaggggagagctgtgccttttgtgtgtcctgaaaggcacatacaacccctgcagcctgcgggttaagatggaagattataattaatcacaaagatgtggctgaacgcgcagtgttcttccttctgctgcttcctgctgccagggaaagagccagtggcctctaaacgacccgtgagagcagctctgttgccgtgtgcagcattggcttcagatccttcttcctcagtcctgcctccctgcagttttggctttcctttttctgtgctttttctcttgacttgccaaatttgggcttagtcagggctgtggtgttaacgctcctaatgagccagctcacgccgactcagagcctgagcagcggtaatcagagctgaagacaaaagcaggggcggaggcacgcgtccaggtgtgctttctgcagtgcctctctttgtccaaacattttacagactccagaggggagagggcagggacaatgtgagaagcaatgaactccccaaggaaattactgtttcaataaagaaggaagattgcaagctgcactctgtacgtgtagatgagtgtgtgctcatgttttaaaactctgaacatgcaaattattattattttttattatactttaagttctgggatacatgtgcagaacctgcaggtttgttacataggtatacacgtgccatggtggtttgctgcacccatcaacccgtcatctacattaggtatttct

SEQ ID NO: 138092 - DNA, 233 bp, Homo sapiens
atggcgactccatctcacaaacaaaaatactgaggaaggtatgaaaacagccaaaaaaataaaaataaaaataaaggaaagtacatgaagatgcagcaaagctctggtatcagtaatattctgaaatagaaacagccattccttcctgtagaaagtctgtcttgagtttgaggagtctctggaggatgtatgatgggcaaagctgaagttgtcacgatctgcctaatcaagtg

SEQ ID NO: 138093 - DNA, 378 bp, Homo sapiens
ggaagtgagcattttagtcaagaaacaagtagaatgatctatggttggactaaaaggtaggatttgtataagggcgtattgactgggaaggtaaattggagccatactgtgaggacctcgaatgggaaatcgaagcctttgtcttaaactggcatgtgctggctctgtgtgaacagggctgtgatacaaccagagctatcccttagaaagattgacatgtatgtgtgcatgttatttatgttccagtgttttctttcccattaggtagttgaggtttgtgtgggtccgaggtaagcgcctgcagctgtaacagagtgtgagtgtccttgctcagggtgacagctgtacttagtctcagcgggtatgtgggttgaaggt

SEQ ID NO: 138094 - DNA, 377 bp, Homo sapiens
atgcctaaatctctgtgacataaaaaacaggctcttttagagttgtgagactgctacttgaaatcaggcaaagctgtgtgattcccagctgtttccaccacttgagtattgaataggatttattaagaaaagtagtggtgttattcttggataacttagttgtatctgtgataagtttttttctcccactcaaacctttccaaattatatctgaaggcaatattttcagattcattcctgaaatatttaggaactctgcacagtacattgtagaaagggaaaagaaaatttacatttttttgagaattactgtgcttgctatttgtgagactccttttattaaagcaattctcatggctttcttttttttgtgtggg

SEQ ID NO: 138095 - DNA, 389 bp, Homo sapiens
atttttttttctttttttgttgtttccagtgaagttggatgaaattagcaaataaccttaaggaatagctccaacagcagtcactttaatgaaataagtggaggctgggtgcagtggctcacgccggtaatcccagcactgtgggaggccaatgtgtgtggatcacttgaggtcaggggttcgagaccagcctggccaacatggtgaaacccccatctctactaaaaatataaaaattagccgggcgtggtggcacacgcctgtaatccgagctactcaggaggctgacacacaagaatcacttgaacctgggagacagaggttgcagtgagctgagataaggccactgcactccagcctgggtaacagagtgagactccgtctcaaag

SEQ ID NO: 138096 - DNA, 331 bp, Homo sapiens
agtcattctgaaaatacctacttatggtttcattcaaagcatccctctgaataaagagtgatacttcctaagtggaaaggagagtcttgctccttaaatgttttgtaaaaagtgtttgacaaaggatcacttaagggcaaaatttacaccaagaaaaacagagttcaaaattaaacacttcccatttgaaaacttttttaaataccatttgtcaaatagtgcaagtctctaaaatcataaaatcatatatgtgtagtattagtcccaaaagtaagagcaggacaaaactctcctgtccatagccaggctctggccctgaggcatgacgcca

SEQ ID NO: 138097 - DNA, 185 bp, Homo sapiens
agaagggatattcaattcaatctgtatcttaatttgttctttatagagataaatatcttacgtaagatttacagcctgtatctaacaaagatggcttaggcaccctacaatttaaaactttgttgttttatcttgaactccttattatgctctaaaggaatacaagacgccaaacaatggatttg

SEQ ID NO: 138098 - DNA, 245 bp, Homo sapiens
ctctaaagtcaacatcaagtttatgacttgtctgttttgtcagaattgattttttatttttattttttgtggctccgaattagaaacttcatagatatgctctttttcctttaataaattacttaacattgacaaaggaaaaacaagaaagttgtacattttatttgtaagaaaaaaaatggagaagtaattttgatcactctactcaaagttgccgttttcattttctgggtgcatttcattta

SEQ ID NO: 138099 - DNA, 280 bp, Homo sapiens
acacattaaatagctgtggtatactgctgaaatacatattaaatagctgtggtatactgtttctttggtggcctacaataagccatgcatcctggtattcacacccttgtaaaaatctctttctacactgaattttgcttgtccacgtaactagctttagccaatgaggtacagtagttgtgaaggaaagagaagattgataaaaacaatgtaccacggttgctattaaccggggataccgagtctcgaacttcgtaactcgtggttcatagcctggttt

SEQ ID NO: 138100 - DNA, 322 bp, Homo sapiens
ggtcaattcattaacaggggagaaaagacagaaactatgagaaatgcaaaccatctgctcaatccagatgcaacagcacatgcctcttatatccaaagctttttaccagaaacacagatctaatcctctcataaaatctccaacagaggtattcagacacatttgtatcacaaataaaaacaatgccaaaatcatcattaactgagaccttttaaatatcagtcaagacttttaccagtgagtacacattgataaaacaatattagaacagcattagagaaaaacagggttggatttctattagccttattcagctattcct

SEQ ID NO: 138101 - DNA, 189 bp, Homo sapiens
catattggagttattttatcccaatgtaaggaaggaacagttcctaaaaaagccttcagaggctcccaaccttcaattcgacccagggcaagtcctttctctttctgagtctcagttttctccctattgaaatgatgagagcagtcctggctttttagagaggttgtaagaacccaaggcaggctccag

SEQ ID NO: 138102 - DNA, 343 bp, Homo sapiens
aatggaacccactacgtacatagtagatgctcagtaaatgtatgttcgctgacaggcacatatctgtggaaccactgattagtctcttctagccccagctgtaaatttataggtgttggaatttaacgaatgccattaagtctcaattctgatatagacccggccctcctagacagttatggcataagtaactgatgagccatcatctgaagaatcacttcagaactggtcatcactgaaaccaaattctgcttggactttgaaaaagttttcattggagaaccttaatgggcaaaggtatagattaaccaaaagtgatcattattgggcaaaaattcttgat

SEQ ID NO: 138103 - DNA, 201 bp, Homo sapiens
tgctgggattacaggtgtgagccaccacacctggccttagtgtcctttttatcctttgtcttttcataaatgtccctcgtcaagtctactgatactagttaaggccactgatgcagacagaatggcagagacatttccacagcacctctttaatgagcgtgtgttgggtgagtggagtcagggaggcactaagttaaactg

SEQ ID NO: 138104 - DNA, 465 bp, Homo sapiens
agtcacagtgagtgggtggaagagccagatcgtgctcttagtggttatcataaattgtggaggaagacccaaagcaaagcatcttgggaggagactggtgagctgtcttgctggatgataaaaagttatcaagataaagaatggtatggtaagggaggagctcagcacaggaatgaggcatgaaatagaatggtgtacatggggcagtgtgggtagttaggtatggttgggactttgagtgagtgggaaggttcataatgataattaaggctggagagatgggcaggagccaggcatggaggaacttgtactaaataatacctgttttaccttgtgaatggtaaggatataggtagagtagaactgaaggcagggagatcagtgagcaagctattgcaatagtattagagatttggggagcctaacccaggattactagagataggattggaaaaggggagattt

SEQ ID NO: 138105 - DNA, 446 bp, Homo sapiens
ctcatttgagttctatgatttctgcgtggctgctacagagctggaggaggtaaagcaacagtattttctcagttgtgcgagcggcattacattataataaataggtaatattaagctgggctgatgagagttgcaaggccatttcacttccttaatcctacatttcagtgacttaaataagcacatatctaaacagccttcccttagacacaggcaaatgcaacccatgattccacacagcccttaaaatggcaactcgcaagatgtacacaattttaaaattgtattagcctattcatagcaagattcttcattaacctatgtgcatattcaatgttgaccacatgccccccaaccccacccaccaaaagaccagttagagatctgagatgtggaagagtgctattcagtttagatatttttttctcatctattactttctagat

SEQ ID NO: 138106 - DNA, 760 bp, Homo sapiens
ttttgtctaccaccaagtcctccataaaacttgccctgatttttctcaaatgaaaatacaataatcattccctctccctgaatgttcaaagcactgtttcaggacctgtctcacagcactcatcacattcaattactattataggtatttgtatgtttgtcttatcacctctctcaggtcataatctgcttaagaacaggatctatattttatcggttaatttcccaataaccactatctttttacagcacagcaccttgaacaaagtacgtactcatataactacgtcttgaccgaatgattgagtagctacttagaaattcaattacagactacctgtaccatttagaatggagagggagatattagacattgcagaacaaataactttttgtttcttacaaacaaattcaccaaagtaaagtcaatattacacatacagatgttttcaaaactcaaggacatttcatccttcaactatctggtcaaatatgatgtgatatgtttatatacatacatacattcacaatagaatacctactgttaaataatcaaatctatgcttgataataaaagtatgtaaatgttttaactatataggcaaactggaattttaagataaaatcaaccattcaaattacaagtggaaacacagagaatgaccaagcaatttgttccaaaaaaataaaaacaaaaccaaaccacactaagctttagctatttaaataccaacaaaacttgagaggcagaattttatggc

SEQ ID NO: 138107 - DNA, 167 bp, Homo sapiens
  misc_feature (12)..(12): n is a, c, g, or t
tggtcccctgtnatccacgtgattgccagctggaagtcacgcatgttccagcgaggctacacccggccaagctgcacctgctgccctgggcccctcgtggaaatccatttgttagagcccacaagcacctgcccaacccgcacagcactccatgcgtggattgccag

SEQ ID NO: 138108 - DNA, 425 bp, Homo sapiens
gcaggcactacaaggggaggctagcgtctgaagtcccactttcccaatatcacagtgatcctcagttactgtacattccatgtatgtaatgggaatcatagtgtctaccaagtaaggctgccaaaaccttgtcaggaggtggtgagtatactcaaagaacccagtacagagcctgacatagaggcatattagctatgatcagtattgctgttaatatgctcaaaaccttaacgactctaagagaagtagccctgagcaaaattaggacatgcccagtttgttttcagtgcagctataacttgtctttttctttcctcccattctttgcccctgaaccaatactgtcatggatcagtgctcacacagccttaaaatggatctgttctctgtcccagtgtctctgagtgttactttctaaataaact

SEQ ID NO: 138109 - DNA, 607 bp, Homo sapiens
gtgtttgtttgttacaacgccaaggcgatcgactcaaccttttcttatccaaaaggaataaggtaacaaaggaatattaattttacatctgtacaaagaaaaaagctggcagaaaggctcagtgacttattctgcctttgttaattgcatggttcttgcagtatctttggtgtcattttcacttactatttcatatttcacactggtttgaaagcgtctgtacctcagggacagaagggggtacctttggaggggaactcacagagcaagttactggaagcctgatatatttcatgttgattgcacagtggctcccttgtatttcagatgaagaattttaattctttataaagggtctaagtggcttctctcactgatgaaggggagctcaaataaaagtagaaagaatgagaaggaaacatacccctttggctatcattcatatcttggcggattctcttctgtgagttacccttcattcaacaacaaaaaaagagggctcccttttattcctcctcagatacgacacacatttagcgacccctgttttttccacagagcttctccctgtatccctcctttactctgacagtgtcttctgtagctc

SEQ ID NO: 138110 - DNA, 535 bp, Homo sapiens
gttttacaagttttgtcaagtttttaagagagatgatcagttttttgaaccgttttactttttagagggagtttggagttgagaattaaactttgatacttcctgttgtccatcccctagccaacacacacattattataataacatttaccgagtggcttttttctgtatgttaacatttacattgatgttcccatagattataattgagaatttttaggaaggttcttcaaaatcgtttgttgcttaactctgataatttttcaatttgggcagctggtttgattttgcctaaaacaaaaacctcatcatttaaatacagttactttaaacaattaatgtaacaataaacaaaattcgggaactgtaacaggaaaaaaaatcacccatgatcttattatcagtaaagcactgtcatcatttctatatttttcattctctttttttcaaggatcatgcttagttttgcatacacacatggaagggcaggctgtagcaggaagagagacgggatcactcgcccctttctctttgg

SEQ ID NO: 138111 - DNA, 211 bp, Homo sapiens
ttttcacagggaacacaatatgcctgtttatgtagtcttaggcccttcagtaagattatcttctcactacaggaactcctagtttttaaagtgaattcctaatttttaaagtttttatagctatcatgaatgatatatattttttgaaacagggtctcattctgtcaaataaaatattttcaattaaaattttgaattgttactgcatgta

SEQ ID NO: 138112 - DNA, 418 bp, Homo sapiens
tctcagcttaccgaggacgaagaagatcatctaccaactaatgcatgtcctacggggcacctcagagcaggaaactgacccaagttcggtgggaggaatgagtgtgcatgtgtgtctgtgtgtgtctagggaaagcctcctcaagaaggtgcctcctgagctgcctgctgcaggtaaagtactacatcagcaaagaatgtgagctggaatgttccacagcatgggcagaggtctgcagaactggacagagctgggcagttgaggaaactacattgtttatacttatatttttaatttttttctccagctatgtgctagaggtggtaaaacattaactgttcccaaggatgagaaaatagctgaggatgagcatcttaggaggggaaggagatgaggatgcatgacccctagaggcata

SEQ ID NO: 138113 - DNA, 282 bp, Homo sapiens
ctcctcacactcagggcaggccagaagtggtaggaaattaacacactctccccaccaagagcagccctcatccaatagctaagtggaatcggtgtctatgcgctccagccttctcccctgggtggggtgatactgaggtgcgtgttctgcactgcctccgagaactgcccagtggggtgaagctccaggaactcacagcagcttctctgtgggtgatacacctgttattggcagccttcccttcctcggtatttcctggagccatctctttattttatttta

SEQ ID NO: 138114 - DNA, 448 bp, Homo sapiens
gattaagtgcatttcttagatactcactacttctctgacattaaattttgtttcagttgcttacatcaacgtttcaaaacccagaaataagaaaattattgttcgaggtcaataaccatgtttataacaacttccaacttaaaatggaagaggaatcccttggagaacacacatttccttatggaagtttcctcaaaatttctaataggaatttcaactaagttaaagtactaatttaagtaggacaagacagaattctcttccttcccagacactattacaagccaaaccacgtttcacaggaacacgtcctgcctgctaaggtgtcccctaggacaaagctgcttgccagctgaccatcacttgtattgcatactttaaaaagtgtggctaacagaaaggaggcaagacagatgttatttaaataaaagcacaaagcatctgttca

SEQ ID NO: 138115 - DNA, 437 bp, Homo sapiens
ggcctgcacatgggaggggcagactgtgattccggcctgcaggggaattggagtgggagctgcccctgtgagtacccgcacatgagccaggaaagatgagaaaagagggccaaagactagaggtgcagaaggtggggacacctggggaatgagaggtttggacaaagccattagagtaagcttgtagggtgacctataaaccagaactgaagggagagacagatcagcaaaccagaggaggaaggcagatgggcagccagaccacgcggtgaggcccaggatacagagctaggagggcacagcgagcaggcccagtgtggcaggaggacgtggcggctgggaaggcaggtgtgggcagatgggggagatgtgcactgtcctgtcttcgccaagaagccctcccacgttttcagtggcacacgttctgtgagccaacc

SEQ ID NO: 138116 - DNA, 219 bp, Homo sapiens
  misc_feature (167)..(167): n is a, c, g, or t
tcattataggaaattaggggcaaccttgtcatgagatttgtttaggagatgaaattggaaggcttcagatggatgataggggtaaggaggaaaggaggagatttaagtgaataagagttgaggagagataggatggcttgagcccaggtaggttgagcctgcagtgngtggtgtttgtgctactacactccagcatgggtgacagagtgaaactctgtt

SEQ ID NO: 138117 - DNA, 434 bp, Homo sapiens
ctccccaatgcgctgatagcttccccgtcgcgtgtaacaatatcacacattctccagtgtcacggaagttatattctgacaataaaaagatgaacatgaatttataatacaacatcagggagtcgtaagtcttgtgaaggaaaacgaagcagggcaaagagatggaggatgatgagggaggaggaaagctacagtaggcaagatgatcaagggaggattctctgagaagatgacatttgagcagacacctaagtgcaacaggaggcaaaggcatacaaatatctcggggagaagatttccaaacaaaagcaagagcaaatacaaagatgttgagaagaacagcaagaaaaccaatgtcaacagactgcagggagaaaggagagtggtatgagactaggtaaaaagaagagggctgaatcttgaagagccttgag

SEQ ID NO: 138118 - DNA, 388 bp, Homo sapiens
aactgaccccttcagacttttgtaaacctttgatgccaaaatcagcatcttctactctgatctcttctctgaatctgagacttgagtatccaactgcctgctagaccagccacttagctgtcccaaatgtcctaagctggacacatcttcttcaccaaatggcttccacctccagccttcccagtttatcatccatctgatcacctacatcagatacccagtagccttcctcaaaatctttatggccctaacttacactcacctcattttttcagcacctgatttcatctcctaaatatttctcatgtctgtctatttctatttctaatacctccacactggtttaggtcctcctcatttctttcttagacaacagcaaaagccccta

SEQ ID NO: 138119 - DNA, 320 bp, Homo sapiens
gcaacaagctctcctgggcttccagccctgctgggagagagactgtgagctaaccaagccccagctctccctggacatgtcaggtgcctgtgagtgagtcttcggcctctctagagcctcagtttgccttctcgaaatgcggagtgatggcaagcagtggctctcacccaggggacccacagagggacatttggcaatgtctggagacatatttggttgtcatgctgggcagggcttgcggggggtgctactggcatctggtggatagaagccagggatgctgctgaacatcctacaacatacaggacagcctccacaaa

SEQ ID NO: 138120 - DNA, 209 bp, Homo sapiens
aatttattatttccataggtttttggggaacaggttgtatttggttacatgagtaagttctttagtagtgatctgtgagattttggtgcacccatcatcctagcagtacacagtgaacccaatttgtagtctgaaaagacatgttattttctatagtcttaagcaggaaatccaaagtgcttcagactaattaataaccttatacttac

SEQ ID NO: 138121 - DNA, 398 bp, Homo sapiens
ccgaggagggcagatcacttgaggtcagaagtttgagaccaacctggccaacacggtgagaccttgtctctactaaaaatacaaaaattatttggcatagtgacacatgcttgtaatcctagctacttggaaggctgaggcaggaggattgcttgaacccgggaggcagaggttacagtgagccaagatcgtgctactgcactccagcctgggcaacagagcgagaccccatctcaaaaacaaacaaacaaaaaattaaatttggctctgagttctcatctactggaaaggtgtgtgagaatcaattgtgttatatttaaggaaacccatttcttaggggtctttgaaaatctaaatgagacttacatgagatcaggaaaatgggagaggagagctgc

SEQ ID NO: 138122 - DNA, 465 bp, Homo sapiens
tctggagtttgtctccactaaaacttatgttaaaacatttgggcaggcgcagtggctcacgcctgtaatcccagctccttgggaggctgaggcaggagaatcgcttgaacccgggagacagaggttgtggtgagccgagatcgcgccattgcactccagcctgggcaacaagagtgaaactccttctcagaaaaaaaaaaagataaaggcgccagcagatttggtgtctgtcgagggcctgttcctcgtagatggtaccttcttgctgcatcctcatgtggtggagaaaggtggaagactccctcaagcctctctgacaagggcactgacccccttcgtagagcagagtcctaacaaactagtcacctaaaagccctacctcttaataccaccacagtgggttccagcatgaatttggaaggacacaaaaattcagaccatagcattttgccccggcccctcaaa

SEQ ID NO: 138123 - DNA, 487 bp, Homo sapiens
ttaaaatggctatgctacccaaagcaatctacagattcagtgcaatccataccaaaataccagtgacatgcttcacagaattagaagaaatgatcttacactttgggaggccgaggcggacagatcacttgagatcaggagttcgggaccaacctggccaacatggtgaaaccccgtctccactaaaaatacaaaaattagccaggcgtggtggcacgtgtctgtagcaagctacttggaaggctgaagcagaagaatagcttgaatcggggaggcggaggtcgcagtaagccaagatcatgccgttgaactccaacgtgggcgagagtgagaatccatcccccccaacccccaaaaaaaggaagaagaaaaaataatcttaaaatttgtattgaaccacagaatacctagaacagccaaagccaccctgagcaaaaagaacaaaactgggggaataacattaactgacttcaaatctatactacgg

SEQ ID NO: 138124 - DNA, 224 bp, Homo sapiens
ccaaagtgctgggattacaggcgtgagccaccatgcccacccacatcattttttatcctccattgtgttgatatgatgaatcatattgattgatctgtgtatgtctaatcaaccttgcatcccggggataaatcccacttggtcaggatgaatgacctttttaatgtgttgttgaattcagtttgctagtattttgttcaggatgtttgcatccatattcatca

SEQ ID NO: 138125 - DNA, 199 bp, Homo sapiens
tctgaagaaaggtggggcactggggattaaaaagttaagcatttcccaggaggtattagcaatatgggtctggcagccccagttctgctatcaagagatgatgtattttatctatattagcagaaatgagtacattttccccaatagaaagtgcaagacactaaagaaaatttatgatgtaactctatacttgctttca

SEQ ID NO: 138126 - DNA, 511 bp, Homo sapiens
ggaagatgtatccttctggccacagtgcacaaaaggaaatggagattctggaaggataaaggccagtgagaaggcatgataaacatccatgagccaaggaacactggctgttggaccacaagtgccacccatggtgaggatgttggcacacagcttaccccagcccacatgctacaaggatggggagcaaggccaggcacagtggctcacacctgtaatcctagcatgttgggaggccaaggcaggaggactgctgagcccaggactttgagaccagcctgaacaacatagggaaacccattctctataaaaattttaaaaactagccaggcatggtggcacaactgtagtcgcaggtactcaggaggccgaggtgagagaattgcttgagcccaggagttcaaggctgcagtgagccacaatccctccggtgtactccagcctgggcaacagagtgaggtcctgtcttcaaaagaaaaaacaaacaacaacaacaacaacaacaaaaagg

SEQ ID NO: 138127 - DNA, 402 bp, Homo sapiens
tgtgacttcctggtaggctctctgacagtctgcatttgtgcttcttttgtcctcttggccttctgggtgggccactttctcactctgttaattttctttatgacatctgttatccctttttcctcccactccaccctttttctgatttattctgggcttttttgttcttttttttttggggggagggttctttttctctttcactgcccttccctttttagcccagacttgcagataatttaaatattactcgcctgcagaattgccatcacagaaatgctaccatcttttctttaacctgccagaccttcagctgcttcttaatgattttgctgaagttataagaatgggcagcatgcaaaattatgtctatagataactctagattctcctcttttcaca

SEQ ID NO: 138128 - DNA, 260 bp, Homo sapiens
ttcgggaacaaggaaccccagtcctgcccatgcatcctcagtgccaattctgccctggccttgagccagaagcttgaggcagagatcagagactaggacccttctctaggggacacagcaaaatgacaagtacagcgagcacacagctaaactatacagctcatccctgggggagggcactgcgggaggtagagaggggtcgccaagggcccaccttccccagtgcgggtgagcagcatctcctggaggtgcgcctggtc

SEQ ID NO: 138129 - DNA, 200 bp, Homo sapiens
ggaaagctgcacagggaatggaggaatccattcactttagatgccaatttgggtgatttagatcctctacagatctctttctcctgaactgtgtatttgtttttctttttctttttggccagaaattaggaggtggtaggatgagtgaagccatctgtatatctgccctaatctctccatcattttgcttgactagactt

SEQ ID NO: 138130 - DNA, 330 bp, Homo sapiens
ccaatgggtgaatagttaaaccatggttcctccataccatggaaattactcagcaataaaaaggaataaactgttgatgcaccaacaagctggatgagtctcatgagaattaccctgagtctcaaacggttatatgccatatgattcattatgtgacattcttttttttttttttttaagatggagtctcgctttgtcacccagtctggagtgcagtggtgtgatttcagctcactacaagctccgtctcccgggtccacaccattctcctgcctcagcctcccgagtagctgggactacaggcgcccgccaccacgcttggctaatttt

SEQ ID NO: 138131 - DNA, 236 bp, Homo sapiens
gtgtgagcgtgtgagcgtccgtgtgagtgtgaccacccatgtgagcatctgtgtgaccgtccgtgtgagcgtccgtgtgagcgtgtgagcgtccgtgtgagtgtgaccatccatgtgagcatctgtgtgaccatccgtgtagcatccatgtgtgtgagcgtccgtgtgagagtgtgaccacccatgtgagcatctgtgtgaccgtccgtgtgagcatgtgagcatccgtgtgtgtg

SEQ ID NO: 138132 - DNA, 534 bp, Homo sapiens
ctttccctgcaagcatgagtcactaacttcatggttaaatagcatattttccaagataaggaagaactgtctttgcttattgttccattctggatagacgtatatatttatttactgcctgtatgtggctcctttccacaaaataggcagttttcttcatattcctgctcaaagtgtttgtcatctcaggttcccacctgctgaaaccaccagcagcgggcagccccaggggaatgtctgggaagaaagtaccaaaatgaagccacccaaagagcccttcaggcctttcttttgcttgccttagtatttgtaatttcacctctaccagcaggctttaaaaagatgaaggaaataaaacaaccccattaaccccacgtgttcctggagctcttgtccattgattttccatgttaaattgcagtttggatcttttacctaaattttttcctgtgcatattcttcatgcattttctctgaatttgatgtttgccttcgtaagaaaacgtgtatacaatggaaagttctatgtaagtg

SEQ ID NO: 138133 - DNA, 474 bp, Homo sapiens
ctatttattttttttgagtttatagccattcaataagtactttcttatcttggtctctggttttatcctcacatccttcttttcggccttgaatcctttcttgctttgcaaggaacaattttcttcctactataaactacagcactaaggtatggaccttagaaattatatagtctaattctctgctgacacacaaatcccttcaacaacaaagaatcataagttcacattgaaaggtctctccaaatctcccataaatctacaatattcttgatgtttaaaatttaggataatagagaattcactaattcataagacaaagtaccaatgtaataattctataaaatgtcataatctgctttccttgtaacttctgcctattgactctcatttgggactgttagaagtattattattaggctgggtgtggtggctcacgcctgtaatcccagcactttgggaggctgaggtggg

SEQ ID NO: 138134 - DNA, 145 bp, Homo sapiens
gctgaaaccattatttttggtttcctttgttggctcattctctgcctcccatttgagaggcagtgtagtataattacaagagcatgtgccctggaattacttcagttttgaatcctggctccaacatttaataaataaaagttaa

SEQ ID NO: 138135 - DNA, 255 bp, Homo sapiens
  misc_feature (112)..(112): n is a, c, g, or t
actgcagtgggcactgttagcttttccctcaaaagcaatcatggaaggtgagctgaatcaatccatcttcatatccacttcctccaatctaaaggaatagctgaaggacgcnagctatggatgagcttaccagcaaaatacattacatgagaaatatgctaatgtaggctagaggggttgtgctctgttggctgcaaggcagagaaatgagacaattcactttggcttcggcagctttcccgaggccaccagcct

SEQ ID NO: 138136 - DNA, 330 bp, Homo sapiens
ggaggagagaagaggaggtggaggaggaggaggaggaggcttgggcttgcgccgttgaaggtacgcgtgagggcctgcgccggcgccggcttgacagggcctgaggggtagtgagggactggacgagggggttcctgtgggtgagcgcgtacgggctggctggcgcgcggggcggccgaaggtggtggttggtgggagcagccagcgacgagcccgtagacactcgtacgcgtgcgggcgggcgtgcgcgctacgcggacggagtcgggcggagcgggggacggtgggaaagaacgcaaggaggaaggagtggaaggttgaggggggcgc

SEQ ID NO: 138137 - DNA, 417 bp, Homo sapiens
  misc_feature (8)..(8): n is a, c, g, or t
tccgatancgctctagacggctccagctaaatgctatcctaccatgaaatatcagacttttccctcaaaccctcggttcccctttcaccaatcccaagcaaaataatggacaagtctgattctgtagctacagcagacacatggtctggaaatgggggctgttacctccatttcagccctgggtacctggagggtggggagggaggccgtggactggatcactgggctgctcctgtcctttactcggggtggagtttctatccggggtctgggttggccctgccttggttagtcctggagaactgcagcctcctcagtcttgctgcagatgtcaggagcatattttataaagattggattctcttgctttgatctccttgggagggaggattggtggccccaaatctgaggatactt

SEQ ID NO: 138138 - DNA, 159 bp, Homo sapiens
tgccagctcaagggcacttgctcaactcctccctgcagggtgcccaggagagggaaatggagcccctggggagggggtggaggaggtgcgcaaccctgaccaggccccgaggcagcttccacaggcctaaccatggagtttcccagaacctgtctgcag

SEQ ID NO: 138139 - DNA, 307 bp, Homo sapiens
agctgcagatggtcgaacggcgtaagcctgctgaagcgcaggctgctgcgcctaagaattttcactcatatacataaatacaaagacacacatacgcaggtaccactaacacaccaacacacagataaccactcacaaactcagagacacacaaacttacacacacaggtacacactcagacacactacacaaaaactcacactcatacacacgcacacaaagacacatgtacacacacacacaaacagcacacacaccagcagtctcagcagcaggtgaagctcagcctctctccccagtatccat

SEQ ID NO: 138140 - DNA, 478 bp, Homo sapiens
acggctgccctcccaggctgacctgataccatgcacctgcaggtctgactgagtactgttcatgtcagaactgggacagtgtgcccggcagagtccagaagcatctcctagtgcagcggtcgtggtcagtgcttgagcagagaaggcaagactgtggggacagagacaggatcctgctcaagacttcaggccccactggatttgtgaaaagacctgtgacttctctgtaaatgttcctgttttattcatctctaaagtgagaattgtaccagggttacttcttttgtgggaatcctctgaggattaaagaaatcatgcctatgaaacttcaaaggaaaaccttgaaggcctgtccaaaatgcagattaacaaattaccattggaattacccaggtcagaagctgggttttgggaatggggagggacaggcctgctgacagcattcagagtccactgtggagaacttcattggctcata

SEQ ID NO: 138141 - DNA, 396 bp, Homo sapiens
cagcggcgccctcggtacagtttgctctggtttaatgagttggggtgggcctcgtggcgagggctgcaacgcacagttggggacccttgactgacagcagagctcacacccaactgcagcttcccaacctgtgtggccagatggaaaatcacaatccggcggaatccgcagctttccagctaacgaacattcccaaattgtctttacagcgtctacctgtaaaacctttccccatgataaataaatgcaaactctgcttcctattagctgaggtgatgcttttaatacaaaatctacagcctgtgcctactaggggagcaacatgttaacttctgcaactggggaagttttcggggaattagaagtgagtttacttcatctagcgccacacttagt

SEQ ID NO: 138142 - DNA, 514 bp, Homo sapiens
tgggctcaagcgatcctcccgcctcagccttccgagtagctcagactacaggcaagagctaccatgcctggctaaagggaccaagtttttgtacggacattgaagaccttgcttctttccatcacaatggcctgcacgcttctacttacattcccacgttctggaatctggcttcccccagaattcccattcaaatccgattttgaatccccaatccaggaatcccagctgtctcctcaccccagcttcatcctcttattcccaggcccctccatccttcacagctctggatggctaaactgcatggcttgggcccagcccatcacctgggggccttgccattgcctctggggacacaggtccaacctgctgtgtgcttacagcccccatccaagccagggggaaaattaccaatagtgataaagtgcggtgatgtagtgcctggggagtccctgtctaaggagccggcttagtgttgggggacaagcgaccatccttccaaggaaatgagtta

SEQ ID NO: 138143 - DNA, 353 bp, Homo sapiens
gagccaccgcacccagcgtgtaagttttgtgtttttttttagtaaagacggggttttaccatgttggccaggctggtctccagcttctgacctcaagtgatccgcctgcctcagcctcccaaagtgctgggattataggcatgagccactgcacccggcctaattacgaaaattttaagtgcatacaagagagaataatataatggacctccatgtaagtattgcccagatttaactcttatcgaggtttttcatacttcccttagcattacatcccaaagtacagtcttatgcagttcctgtgctgtgcttagatatcccaacagtgaagctcactcaggttgttctgaaga

SEQ ID NO: 138144 - DNA, 495 bp, Homo sapiens
tgctttgttctcaccgtggggggatgctggacacagagtccccttgttcttgttctcggtgagacctggtcctgggccaccccggatgtttccctgggctcctgcctgctgtgatgtggggcatggagttgtaccccagtgggcgacatcccaggttgtggcacctgctgtctttctgcagagtgagccgcaacagctccacctgggtgcaggtttctcccctgttcacggttcagtgaaggatgctcatgctgtcactgattgcagcagcctcaggcagaagtttatggtatctccatcagcccaagctcccagtgtaacccttgggagagatttgctggaagaaagccgcatggtacctgctcattccggcctctcctggtgggaaggagggatgtggccccgggtgttctcaggagtgctggctgttcagttacgttgacttgcgaagctattacatgaaggtgtgaggttttaatggtcaagtgcagggtg

SEQ ID NO: 138145 - DNA, 495 bp, Homo sapiens
tgttcatccacgctggtatcagccatgccaggaacaaaggtaaaccaagttcactcatgtgccagcctgagaactcagtgaatacaagtgctcccaaatctgtcacatcccaaactgaaccagcctgactgcaaggcacaaatggattggcagagcagagtgccaaaaaggggctgagctctgtcactctaccaacttccaactagccacaagactgccttccagaaccagggctcagcataacacacccgcatcctacaagagtttacagcataccacctcctttattaaagagtaggaaataaattaaccaggcacagtggcatgcatgtgcagtcccagctacttgagaggctgaagtgggaggatcgcttgagccaggaagttcaaggctgcagagagccatgactgcaccactgcactccagcctgggcacagagcaagacctgtctcttattttcaaaaaacaacctgggcactttcttaaaaggactt

SEQ ID NO: 138146 - DNA, 261 bp, Homo sapiens
tttcttttctatgctgccaaatctaagagggctaagtaaaggggtttctatctgagaatgctgtctatcccaacatcaattccctcctttatctttaagtaaaacccttgctatttaactaagtagaatgctacatataataaagactacatttctctatatggccatgtgacttaagtctctaagtgaaagtggcatatgaaacgttcaagaaggatctttttggccaggtgcagtggttcacacctataaatcccagca

SEQ ID NO: 138147 - DNA, 343 bp, Homo sapiens
catgcctgctggtcaggcccagttccttcacccagccctgggcctgagcacgggtgctggaggccgcatatggaataggacagcccaggaagcaaacagtgtaagttataagtttctttttgctcttagaaacctcttgattaggcagcaaggtacactaaacctgcttctcagtattttgaacacatcttggccagtaacaagggcaaagtagctcctctaaatggcagacatttgcttccttggctctaggctcaatgggggactttcctctgttctgcggggcatcactttggcaaggtccacccatactcagtatcttcagtgtagctcaggacctagc

SEQ ID NO: 138148 - DNA, 191 bp, Homo sapiens
cgcctgttaggatgggttggttggttgacatgacataaaaagagaaggtagggggtttgaggtcaacatttttcaacttcacagtctgagttgagggctgggattgtctgagtctctaagggtgcaggcttggtttccaagaacagcgggaacctggtgtggctcccatcataatctacccacagtcgcca

SEQ ID NO: 138149 - DNA, 256 bp, Homo sapiens
taaagctctctttgaaagattctaacttgtttctgctaagctatgggggaaaggaggtttgaccaagccagcagccagtgtagctggggaagttgaggccagagtcacaagtggtaggagggattatggcagctctaaaaatggagacctgtgcacacctggtaggacaaggttgtcagtgaggcaaagaacaaataagagtcctaagggtcagtaactgttgtttccaccttttaaaaggaaaacctcttacaga

SEQ ID NO: 138150 - DNA, 1359 bp, Homo sapiens
  misc_feature (1088)..(1088): n is a, c, g, or t
  misc_feature (1090)..(1090): n is a, c, g, or t
  misc_feature (1096)..(1097): n is a, c, g, or t
  misc_feature (1150)..(1151): n is a, c, g, or t
  misc_feature (1212)..(1212): n is a, c, g, or t
  misc_feature (1216)..(1216): n is a, c, g, or t
  misc_feature (1230)..(1230): n is a, c, g, or t
  misc_feature (1239)..(1239): n is a, c, g, or t
ccgggctggtctcgaactcctgacctcaggtgatgcccccaccttggcctcccaaagtgctgggattgcaggcgtgagccaccatgcccggcctctggcctcctttttctaaaaagtagcccacttcagatgttgaaaaccctctctctctctcactatgttcccttctgagcagactcagaaaggttctgaaaaccaaccctttgccattaatgactgactagttgtactttcactgaaatcccaccaaaatcacctcaaactagtacctacagtttaagcctttaagtctatgattgtgaaacaaaaggtacgtggccttattaataaattttggcatctgtaaggtgggagataatcgtgagacaagggaaccttcaaagccatattttgtcacttctagtggtccttggatgggggtgattttgcccctacgagaacatttggcaatgtctggaggtatttttggtgtcacagctttatggggaaagcggggaggagggacagtgctactgtaggcttccagcaagcagaggctagggatgctgctcaacgtcctacaacacaggggacagaacctcacaacaaagaattgctgccccgacttgaaagccactgatcgaaagggtgaacttgactggaacattgaggtgccctgtgagtcagggcagttagtatctgggggatgctggctgagcctgccaagtgtctattgaaaagttgctggaggtgaaggatcatgtctttgggacctaaagagtgagatatttggactcagtttctgcctccaccgttcccctaactttatttggatcttcccacagccccaagacgttcagtacacattttatctcgtcctagatcaccttcttttttagtatgtagagattttgaggggaaaggtaaataggagactctttctcaacagaggtaggataagatttatcttaatcccaattaaacaatagtgaagacccaaaagaaaaaagttggaaacctaagcttttcacttaatagcaatgaagaatcaatttattgaacaaaaattaagtcttaaaggaggagaataggcagggcatggtggctcncncctgtnntcccagcactttgggaggctaaggcgaatggatcacttgaggacaggagttcnngaccagcctggccaacatagggaaaccccctctctactaaataaataaataaatacaaaanattngcagggtgtggtgncatcgcctntaatcccagctacttgggaggctgaggcgtgagaattgcttgaacctgggaggtggaggttgcagtgagctgagatcgtgccactgtactccagcctgggtgacagagcaagactctgtc

SEQ ID NO: 138151 - DNA, 449 bp, Homo sapiens
tttccatttctgcctcttttaagtgtaataagcataatcatccttgttggatactattattttgaaacccatgtttttggaaaaactttcaagattcttagatatctaatataagagaggaaagatactattacgaaagtaatatctgtcaaggggtaaggtttttttatcacatatatttgaaatcatgtccttattcatccccatgtgggtggtatgtgtgttcacatacaactcagagtaacacagtatttcatgaaataaaatccagaacaggctttaaaaaatattaagaatcccgaggagtaaagcaggtgaatttgtttaaatgcctgaatcctgaggactcttttatcaattctacacagcatccaaaacatgtcaatgctgtgggttcctctgttaatctgtttttgaatttcccaagtgaaaaacataccaaagaaaca

SEQ ID NO: 138152 - DNA, 481 bp, Homo sapiens
tttgctcaacattacattgaatgcatgaaattaaaatattccacgcccccaagttctgtatgacaccttgtgtgttttctcagatctatgtcagtcgaaaataaagccagcaagggggaaaaaataggcaaactgaatcaatggaaaactatgtagagcacttttcttttctccaagtcatgctttccttaaaatcagttgaaaaattgaatcaaggatggttcattattctgtacccatcctacgtctaagttggtacatatggcatatgggaaatttcaccatatgtgttcctatctccaatctattctgtcattgacgcctgctatgattttgttgtgagcacatacctcttaacataagaggacaggatgcagaactcacagcagaataagaggaaaggtaacctgacagccccagatcaagctcagtattccttccagaaaacctcagctcaccccacagagcatggcaataacag

SEQ ID NO: 138153 - DNA, 526 bp, Homo sapiens
ccaagaaaccttaaaggagccacaaaatttacaaacgataaaggactttaattaaactcatgtggatctcaaattgaaatgtgcatattttgggggtagttttcaagatggaaaaaatcctcatttcaaactttgaagtgccataactccaaaaagggcgcagattgtttctctaaaaactagggaagggaaagctgtctcattgccaacagttggctagtttttcagaagactacacacggcaataatgtgggctaattttacactgttagagttgatcttctattcaaggagttcattttaaggcttctcaccctccttctgactctcaagtgtatacgttcatgaacactttccagaatattcataatggatgagggaaaaggtcaacattataagccagaattatatttctctttttctgtcctagtacagaagaccctgtccaggactctggattctgatcttgagggggtcaagatggtgctccagtttcaggaacagcaagagcaaagatatggaggca

SEQ ID NO: 138154 - DNA, 291 bp, Homo sapiens
caaattttgaagtcttctttctatctatgatacttaagccttgggattggcttagaccaactggtagataataaacaaagggtgtaagaccaggcttgaactttgcaaaatttagacttcaagcataggatgaggagcaaaggacataaatggagtgggaggaaagacaagagattgtagtgtcacaaaagctaaaggagagattgatgttgtttgctgggaacagcaagcaattaggtattataagaggaaatatgtgaggtaggaagtgacatgagataataaaagaac

SEQ ID NO: 138155 - DNA, 388 bp, Homo sapiens
tttgatggacttattatcaattttggggaaataagacttgcatgtgaaaatacagaggagtgagagaccaggcatgattatgtgacaaatgtccagagagaggaaataacctgtagttgagagtgcttggaatttggctaggccttaccccggggaggtgaacccaggtcagcagttgagactgggggatggtttgctaaacaagggcacgggaagtcaagcttgctgcagggaataggttggaaagtatcagtcagggccagattgttgtgatcttggattcctttttaaggaatttggacttaaacggggagggagccagtgatattgattagacagtccacaggacagatggagaaggagaagatgaagtgtgaacctgttttct

SEQ ID NO: 138156 - DNA, 826 bp, Homo sapiens
cgcggtggctcacacctgtaattccagcactttgggaagccagggtgggtggatcacctaaggtcaggagttcgacaccagcctggccaatatggtgaaaccccttctctactaaaaatacaaaaattagccaggcatggtgggtgcctgtaatcccagctactcaggaggctgaggcaggagattcgcttgaacccagaaggcggaggttgcagtgagccaagatcgcaccactgcactccagcccgggaaacaagaatgaaacttcgtctcaaaaaaacaaacaaacaaaaagaccccataagattatttgatgttgacattctctaaatcgagcttagtgactagcagtcatgttctgagcatggggttgtttaagagaggacatctgtgtgcatgcaccagtgtgtgcctcgtttgtaaacaaggggactcttgtgaatgtgtctgtgttgagatgtgtctgcacatgcctctgtgagtgaatatcagtgtttgggtgaagcggaaggtggggggagaattctcttttgtcaaatacaggaatggggcaggggaccccctgaggaaagaggaggggaaacagctggacatcagaaggaatgagaagtctgattggtcgcaggcctggccaattccttgccctcccccgggcacactgtctaacccaagccccagttcagacagctccaccagagtccccacctttctggaacttgcaggctctcatccaggatccaaagcattgaagggtaaggtcaaggttgaggcctctggcatcgggcgcaatgaggcaagtgttggtggggcggggatgggaacggaa

SEQ ID NO: 138157 - DNA, 559 bp, Homo sapiens
cgcggtggctcacacctgtaattccagcactttgggaagccagggtgggtggatcacctaaggtcaggagttcgacaccagcctggccaatatggtgaaaccccttctctactaaaaatacaaaaattagccaggcatggtgggtgcctgtaatcccagctactcaggaggctgaggcaggagattcgcttgaacccagaaggcggaggttgcagtgagccaagatcgcaccactgcactccagcccgggaaacaagaatgaaacttcgtctcaaaaaaacaaacaaacaaaaagaccccataagattatttgatgttgacattctctaaatcgagcttagtgactagcagtcatgttctgagcatggggttgtttaagagaggacatctgtgtgcatgcaccagtgtgtgcctcgtttgtaaacaaggggactcttgtgaatgtgtctgtgttgagatgtgtctgcacatgcctctgtgagtgaatatcagtgtttgggtgagcgtgtaaaaacactcaagtggggcggtggagggagggggctgctaggagataccc

SEQ ID NO: 138158 - DNA, 483 bp, Homo sapiens
tatgcctggcatggcttactagagactacctattggaagtgcctactaatacaattttctgataatttagatgctgaaggacttccttgaaattttcttcggctggcttgggatggaatacttgcttttgaaatatgccctaaagagtgtgctatccctggggaaatccacttgtctcaggcaatattaatctgctctgcgaacagcttgttggaaatttgctgataatccattttttttttgtcattccatatctcagtgtgagagagtaagagaatttggtaaaagttcttactttttagcttgaccttctgaggtctgaggagcactcaccttcccagtctcatcttccatccctctctaacacaccctcaagttccctgaggaaacaacattatatcctggttccagtatgtattatagttggtgccttaggaaaattactttctttttcagagacccctgccccacccttcctcatct

SEQ ID NO: 138159 - DNA, 254 bp, Homo sapiens
gggaaaaaaaaacacaaaaccactcggacaaaattcttggctcttgaagagctatgaaagaaaatagattgtttcacactaaatagactttcctctcaaaatatttgaaacatccacactaattagttttatcaccctaggaaaatttgtcacctgtaaattaatgtctgaaaatcacctgatctactaaaaggtatcttgagaaattatggggtatctaagaatgtttcaagtaggcatatgattttatatta

SEQ ID NO: 138160 - DNA, 285 bp, Homo sapiens
taggagcccttacaaaacttctcttttgttatttatgtgtcacttatttcttctctgggacaacctattaccggagttgaaaaagtctgtacttaagataatttggatcagcaagcttattatcagtgatgtttttcttgcccaatttgacctatatctagaaatgctttgctcaactttctagaaattactgatactcatctttttccccagctttgttctaactcaaatttggataattttgtgtcattatctttctgttgttttaatacttagagagttggt

SEQ ID NO: 138161 - DNA, 429 bp, Homo sapiens
ctcatttccaataatttcctaattagttctgtccatctgctttaaccaaattaatgctggctctaaggaagcaaatgagcatgtgttgaggaggaggcaaaaatagttaatctgacacccacaatcgagagacttgaacttgtgggtattttgtgcttaaacacagagacatagaatctccatctacatggaataagagcagctgcatattctatggaaggcaatcttgttctttcaacctgctttaaataagtgaaatgtaaagtctgcaatattgtggcattgaaagttattgacaccacagggtattttgttggggaatctgttggacatatcagaggtacaggagcatgatcaggcagctgtaatagcaaagtgattgccatatgggcctccctcagcattctttacctgccctttatccatttt

SEQ ID NO: 138162 - DNA, 445 bp, Homo sapiens
gattcttcacccccccctcctatcatgcacaggtactgaacaagtaaaatggctgtagccaccatgtttttgggtaacttttctttaaaacctacccaccaacagcctctgctgaagaggttggttaggtaaccatgtttatactctgtgatggttctccaggacacagcttattggaccagggctggacacccgatctaacgtttgccaatccattgctggtgagaaaacaatcagattcaaacttcgaattctgaactcagagaaccagaggtcaaactcagttgtcgggagagatctcaactgaaaagtcatgcaagtctggtcctgagaaaccaacgccactcaaacaagctgctgtcatggtcggatgagaggagaaggcaggctggtctacagttagaagagcatagctgtgctttaaatctgcatgataggagggggg

SEQ ID NO: 138163 - DNA, 336 bp, Homo sapiens
cttggtcctagataaacctctgggtctcagttctattgtgtcgtccccctgcaaccccacctgccacctcacccccgctatgggaaggccctaagtcccagagtccatcctctcctccaacactcttttcttatgggatcttcataatgttgggaggggagcaaggtgggaaggagtgtgagtgcagggggccgaaggctctgtaaatgctctcagggaccttccctagggatagcaggttgagccttcctggacagctggtggtccaagctttccctctccactgccagaggcctcaccaggccagctgggcttaacagaagtggccccaggaca

SEQ ID NO: 138164 - DNA, 119 bp, Homo sapiens
ctgccttcgcttctaagaacagtttagttcccagtattggatctctggtccaagataaatggtagtctgaggaactaggctgaaggagggtgagagggacctggtaatgagctttctag

SEQ ID NO: 138165 - DNA, 847 bp, Homo sapiens
agtctctagaaattttgtgaatcggtttcttaaatatatttattaaagacagttttgaagtagcaatgagggaagtttgtttaccattcatcaggaagaaaaccagagctgtaactcttacttttagtattaaaatatggctgtgaaggaaaaaaataaatgccttaaagacaaataatggaatgaggagctatagaacaaagtgacataaggcaattttggttgaaaaatagaaatgcaattaatttagattccactaatttgttttaatccatctagagttgaggtttacctctatgaagaaaagaatactaaaatctattaagatatgaggtagagatcagactttttaagaacttttaatgtttttaccatttgcaaatggcatttataactttcgtatacatagtaaaattatgtatacaataattaaatcctcttagattctctgctttgtaatggcaattattatttgtacctctaagtaatgatctatttgtaaaaaattttctacagcgcctcttgaattagacatcaatttaatgcattctgagaaattagtaaatttttaacgtatttctagttgaaatattgggttctttcaggcaagtatatgtataccctaaactttctttggaagttctggatcctagcaaccataatataaaaactttgaatttcatttgtacatgacgaaatgagatagccacgataggtgttagaggacttttacccagtggaggaacatgttttactctgctgcattggtctttttttttttttttttttttcctttctttttgagacggggtctcactgcctgggcaacaagagtgaaactccatct

SEQ ID NO: 138166 - DNA, 399 bp, Homo sapiens
gttctgtcctctaattaactcaaaaggaaaagataagggcgggcaggagctatagagcattttgcttcaccatgtagtattataactttaactttcagcaatttaacaacataattgtcatgcacaggtgcatcccactggaaaagttcatcacaggaaaatgctgtagcagtccagcggggtcaatgatgaaaacaacacagcagggaggccaggcgtggtggctcacgcctgtaatcctggcactttgggaggctaaggtgggcagatcacttgaggccagaagtttgagaccagcctaggcaacacagtgagatgtcatctctataaaagatcacaaaattagccaggtgtggtgccacgtgcctgtagtcccacctacataggaggctgaggcag

SEQ ID NO: 138167 - DNA, 490 bp, Homo sapiens
ccggggcccttaaccctcatagatagatcattagcttgctaggtacctactgagttttaggcacttttaaggaataggcagatgtcccaaactcaagtttttacagggctgggaggggagcatggatgaggacaggcagccaggtaagagctgtgggactctggagagcacgtgccatgtctgaagcaacagcagatgttgtcaaggaaaaggtgggctcatggctgtctgagtggtctcgcaggaaatgccgcaaatctgtatttttatgcataatctcttatgttttgaatactgatgagtaattccaacttttaaaacaaggcaacatggcccaagtaagatgagactgtctcattgttgtgaccctagagtctccagttggtaatctcagacactgggtctttattgctactttcagcagcctgcaatctataagaaggagagtggtgtggtcagaaagtctatgcaagaggtgctcagaatatag

SEQ ID NO: 138168 - DNA, 361 bp, Homo sapiens
tttattcctctttaatgagctgccatgcctctcccttccttctaatctcttcctccccttgtttgctcaccctcttctgcctctgcctttgcctcctccaagggagagtcagcgtgtccaggtggcaggatgctactggtagaataaaatggtttaggaacaaaagaaacaagtgaagttggcagaaggagggaagctatcttcagactgaagaggttggactggcagatgtgggatttcctaggacccacctggcttttattggggaaagaaacttattaaagtgaactatcccacctctggtgaagaatcagaatgcagtgcacagtggccaacgggggatgggagaatggcttcccat

SEQ ID NO: 138169 - DNA, 337 bp, Homo sapiens
ctcttgcctctgcctcccaagtagctgggaccacaggcgcgtgccaccatgcctggctaattttttgtatttttagtagaggtggggtttcactgtgttagccaggatggtcttgatctcctgacctcatggtctgcccgcctcggcctcccaaagtgctgggattacaggcatgagccacctcgccggccaggacatacagatttttaaaaccatatagaattttaaaatttcttttacaaaattttgttccatatatatttagtacatataatagttttttttttatcattgccagctaagcaacagatagctaatatataagttaaaatgccag

SEQ ID NO: 138170 - DNA, 156 bp, Homo sapiens
cgggagcttaccctggtcaaggaccacacctattgcggaagtcaccttgaaatgtgccaatgtctggctgagatgaggttgggactctccggttttagagcgagtaagcccttttccctcttaaagaggcagtgtagtgctatgattacaagaagg

SEQ ID NO: 138171 - DNA, 148 bp, Homo sapiens
gttgtctttggaaccttgtctgcaaacagctcgaaggagatgcggcccaggggctcaccatccacggtgatgtcaaagaacacggggttgaccatggctgatagtacagggctcctggtggtggcagcaaagcctctttgcccaactt

SEQ ID NO: 138172 - DNA, 183 bp, Homo sapiens
ggggcttcaagtcctatggaaatcatagatggtcattttaaagcaagtggagggaatgggagatctgaggagcagcaaagctgttggttccttcgtgggctcaccagcaggcagctcggtgccagggctgcaggtgccaggagaagggtggggaagggaggccgggggctgtgtccctgcaac

SEQ ID NO: 138173 - DNA, 1234 bp, Homo sapiens
aaaaaatgagagaattagggaaacaccaaaagcaaagagagcagctctatgttcattcatgtctggagatgagccaatttgagcaccactgtaggccaactctaaatttattcagatcgttaacatgggtaacccagcaaatatttcccagcagtgacaatctacaccctttatctaaataaatattgagatgtgcttttttcctgtgttagttcaaagaatctcttcttgcctcccattgctgattttctgtattgatggactcatttctctcaagagattggacaagctaaaattctagagagttcaaaagtgtttgaaagtacattttaagtgttctcaccacaaaaaatgctagtgtgtgaggtgatacatatgttaattagttcaactgatccattccacaatgtatacatatttcaaactatcgagttgtacatgataaatatatacaatttttatttgtcaaataaagaacgtctataaatatttatagatttcaaaattgagaaagaagtatatatggagccacggttgttttgaccatttctccatgctttttgtttggggagggggacattttttggggggcagggactgtgttcagggaaagtacctgaccaacagaacttcaagtctcttccagagtgcgagactcagcttatctgatcaaggtgaacttgcccttcaatagacttgcccttgttactgcccagtgaggccaccaaggaccaagaacagttgagctctctcagggccttcccctttcaacaatttagttgaatgactcccttccatctatcagtcttactccaaatatatgaaattactatacattgaaatgcctgcaaactatatgcaaaaatgagtatgaggaaatcaaatgtaaatcatatgcaaatattattcaaccaagcttctataaaattgtacgtgtcaataacagtaaagaattttaattaattctgtcatttaaaattcatgcattccatattttgctttcagaacttatagtctatgccaattttgaaaaaactataagcacaaggaattaaatactattgagtatagaactgttgatttcaacatacactatagcactttgactaattacagatatatttgatagaaaagtcacatttctacaaggtaattttcaaaaagaaataaaacatttctgtaaacttaaatgtggattaagtggcagaatacagagatttgaatgtttacaaat

SEQ ID NO: 138174 - DNA, 421 bp, Homo sapiens
gccattccaggctcttctgtgcctgtgggactacattctctgtgccgggcttagagaacacgaagagggagccatctgccacactctggaggctgaagcctgcaccagtgctgctcgcctcactgtggtaggtggtggtgatggaaactgcagatcggccagagtggtagaaaagttgctgcagggtttttctggctttgcctgcccagctgctccatgcctggctagaggagaaggaggagccacatgtggtacactggaggctggagcctgcagatggcatggctctgcggctcaccttgctgcagttggtggtggtgacagagactgcagcttgactgtagtggtggttaccaggagctctgccactgcatgtccactagtgacgggttcgctccaccaccccagctgggtagccgct

SEQ ID NO: 138175 - DNA, 721 bp, Homo sapiens
gccattccaggctcttctgtgcctgtgggactacattctctgtgccgggcttagagaacacgaagagggagccatctgccacactctggaggctgaagcctgcaccagtgctgctcgcctcactgtggtaggtggtggtgatggaaactgcagatcggccagagtggtagaaaagttgctgcagggtttttctggctttgcctgcccagctgctccatgcctggctagaggagaaggaggagccacatgtggtacactggaggctggagcctgcagatggcatggctctgcggctcaccttgctgcagttggtggtggtgacagagactgcagcttgactgtagtgaatttggaaattatctgtctggaagctctgagtttatcttgggacctcaagaggagaggatcacccaactcacagcaatcaaactccaaatggtgctataaactgaaccacacatggacacgtcagtcttccgaggacccttagatcaaccccaggaggagccctagctgctgttccccattcgacgcccctttccagcaggaagtagccagaagacatcgtcgcccaaacctctaacagcagttagtgcggcatctccacaggggggaatgttgtaggagttattgataaattattttaggcagatagagaggaaaaggggtccttaggaagtttttgttttttaaagcacgtctggaaaagtttcttgtaaag

SEQ ID NO: 138176 - DNA, 315 bp, Homo sapiens
atggaagaacacttgaacagagagagcataaggaatttgttatgaaggaagagggctttcaaatgatgtcaccacacgatagaggttcttagaaagtgacacttgcttaaatttgaagttttaaagtaaaggaaagatcgcttctacattccccttattcttaatcttgacttacatttaaccaatatatttattttgtatttattcctggtgaactggaagaggaagccaaatgatatactgagcaggaagaaaatgagcaagttcttctcaattttctcttcccccaaatttggggaaaaccgtatatttgga

SEQ ID NO: 138177 - DNA, 636 bp, Homo sapiens
ttcctcaagggtgtaggcatattgataccaaaacatcaaagaaaaggaagacaggccacacatcaaacacagacattaaaatcttgacctcaaactaaattctgaaagttctgttatctgctgaatacttggagcttcccagtgaaaatgatacagtgtattctgcccagattgcaactttccatactaagcatttgaaatgattcttggccctaaatatcacttacttcagactgaatgtcactgtgtatcaaaaacactgagcaagtgagatttttattctttgaacgttccagtaggtcactaatggaatagattcagtaaaaccttgcagcctacggtataatttgaaacaacaaaaaaatcaaatcactttttggaaaatattaggtttgaacaaaaatagaagtttcgaaagggctgccacttacattcttacctctgttagttctttcccatcactcacagggagactgaaatccatgctgagtgcccacagacctgggcaggagctgttcctttgagagacaatgatgcaaatgagtcaagtgatgcctagtagaagtcagactgcaaggatcaccttgacctcaccctagtgcattagctaagcaaactcacaagctttaaataata

SEQ ID NO: 138178 - DNA, 162 bp, Homo sapiens
gttttctattagacgtaataattccaaacccacacatttagttatttgtcagaaggtagtaaagacttaactcatgcctataggtaaaaattattagaaaaagaaattaaaagagctatttatttttggttctgagtatgtaccagaaccatttttttttgt

SEQ ID NO: 138179 - DNA, 307 bp, Homo sapiens
gtgtgaatcaatttaatttgagtctcttcctttaaacctcaaccttgcatcaggaactctgagaaaaaacaaaccaaaacaaaaaaaacattgctgttactggatgggaggtaggggaaataggaaaaataatttgggggataaaatagtaatagctaggtacagatctgaagggaaagcacagcttaaatgaggcagcattagatgagaataggtacagaatagtaggagtgttccgtaattgtgaggacagaaaatgtttaatctatatgctaaacaataccttaaaattagtacaaccaagtca

SEQ ID NO: 138180 - DNA, 338 bp, Homo sapiens
cctgcctcagccttcctagtagctgggactacaggcgcccgccaccacgcctagctaatttttgtatttttagtagagacgggggtttcaccatattggccaggctggtctcgaactcctgacctcaggagatccacccgcctcggcctcccaaagtgctgggattataattgtgagccaccatgcctggcctccatgagaatcttgtctgacttgttcatggctggatccccagtgtctagaatagtgagtgcctggcacatctgcagagctcagtagaaaccagttgaatgaaagagtaggcacatgaaggaggcagaaagaatgattgacggtag

SEQ ID NO: 138181 - DNA, 118 bp, Homo sapiens
tgtatcataatcttatgtaacatggtgtaaatctataattatgtatgcatacaatatgtgcaaagtagtaatgttcatcaagttgtaaacaacggttatctctgaactaggattccaa

SEQ ID NO: 138182 - DNA, 694 bp, Homo sapiens
tgatgggcgctccaatactcattcttccagatgttctccagatcttacccaggcgctaaatcagacaagctgcccaactgagcaatgcaaaatacacactgaaatgataatgcctgacctggccattaaaggcgactaaaggcgtggtttaattacctggtggctcatttacatttccaatcctagattctattaggtttgtacgaaagtgattgtggtttttaccattactttcaataacatataccgacaaacagtattctctcatattttaagagaaacgagttgtggtttaacaacaaatcatccttgtgacatttgtctctggccgtgacgctgcctggggcctcagtgctccctcagccttcggtgccctccccagtgccagctgttgtcaggtggggctcactgtgactcagttctcgacatcttgggaactgggatgaacaaagccccaaaagccagtgagtggctgacccccagcctcccttgtaaccctcacccagtgtggagatgctagtggggctgaagcagcccttgcacctgggctccccttgacgacctggtacatgtgctggcctcaaattgggaacaagtctcctcacctggatcttctgagcctctttgcagggctcgactctgtccaccctgatctcttacactgcttcccaggatgacctactactcagactct

SEQ ID NO: 138183 - DNA, 115 bp, Homo sapiens
ctcctccagctctcatatttactgtccccgtcttctgtgctttacaaattctctaaccagttgtggccaaacctggtgctgaatagattcatactttttcagcttaacccaagcc

SEQ ID NO: 138184 - DNA, 403 bp, Homo sapiens
atgacacttagtttgagatacccacaactggcactcagagtgagttacgcaggcaataccaaacaagtggcaataaaacctttatagtccctcacaccattatgtagtttgtttatgtcacataaatcagggaaagatattaagggaaaattctagtgagtatttttagtaatattactctgtcaccatatgttcctttgccatttaaatgaaatttccttagttcactctaaatcagtacaattatatttattttcaaatgttacatgtctacaaataacatcattacattttttatcaatactatttttaattgacaaatcataattgcatacatttatggggtacaatgtgatgctttgatatatgtaaataaatcttttaaaaattttgtacacttgat

SEQ ID NO: 138185 - DNA, 686 bp, Homo sapiens
gactgcccaacaacgtgaacgtatatgatactactgaacagtatacttaaaatgattaaggtggcaaatgttgtatgtattttacaattaaaatgaaaaaagcaacaaacaaaatcctgaagcttttctcccatcaagatccttctttaagttgcagcaaatggagccagaatatggctgagacatatttctgcttcctaaaagtgttgcatggtggattccttccacgaggttttaggaactctagtccgacacatttaaggaaaggttaagcatatgggctaattgtgcctccattcatccatccatccatccatccatccatccatccatccatccatccatccaacaagccagtgttccagatgttagagatacattggtgacatatacatccttgcctcaaggagcttccagtcttgtgggagaatcagagagatggcccaatagagtaacgtgagagcacacacagcatgggtgcccaaataggccgagtgtggggaaactcccaagaggaagtagcatttaagccaggattggaaagaggagttagtgaggcaaagagatggggcagaaaagaacattctcaacagaggcaactgcatttgtgaagacccggaggccagataacatggcaagtatgagaaactaaaagaaaacaaagacagcgatagagcaggaagcag

SEQ ID NO: 138186 - DNA, 388 bp, Homo sapiens
gagagagagacagagagacagacagagagagacagagagagacagagagagagagaccaagaaaacactcttgagaatgtgactttatcagtctcttgggtccacacctcgtggccagctcctgtggattgcaggacagggcccctgaccctgaacccaggtcctcactgtaacctcaaaatttcttggcgctagctgagtctcaagctctggaaccagagaggggtagcctagagagtccaggaaggtccagttgaggctcagttccaactctgttagtcaatagtttgttttttgtttgtttttattttaattttttgagacagggtctcgccctattgcccaggctggagtgcagtggcatgatcatggctcactgcagcctaga

SEQ ID NO: 138187 - DNA, 392 bp, Homo sapiens
acagttcagacactgatacgtgactgtcaagttatcagagagactaaagaagaccagattgcagagctgaaaaagatatgtgaacaaagtacggaatctctaaataatgactgggaaaaaaagcttcacaatgctgtagcagaaatggaacaggaaaagtttgatcttcaaaagcaacacactgaaaacattcaagaattgcttgaggatacaaatgtgcgtctgaataaaatggagagtgaatacatggcgcaaacacagtccacaaaccacatgatcaaagaactggaggcccgtgtccagcagctgactggagaagcagagaacagtaatttacagaggcagaaattaattcaagaaaaagcagaacttgaaagatgttaccagataac

SEQ ID NO: 138188 - DNA, 102 bp, Homo sapiens
tggcgggtaggaagccacagatggggaagaggagcgcgctgagtcaaggagggactgttacagaagcacacggatgtgatcagaggaacaaagtatttacct

SEQ ID NO: 138189 - DNA, 221 bp, Homo sapiens
agtagctgcagcattgggaagaccctctctttaggctgtaatccgcccgctctgggggactagggaggaagaagtagaggaatggcttccgggcttcctctggtcaaagggccttgctctcattattacccttgtctggaatgttctctcttcctccatctttctcctctttcttaactccagcccaagggtcactttatgagggaaactctcccacattt

SEQ ID NO: 138190 - DNA, 371 bp, Homo sapiens
tttttttttttttttatagtagagatggagttcaccatcttggtcaggctggtcttgaactcctgacctcgtgatccacctgcctcaacctcccaaagtgctgggattacaggcatgagccaccgcacccgactttttatttgtattttttattgcattgttatttaggtgaagggttccctgaatatttttgagccatggttggctgaatctgcagatgcagaacccgtggatatagagcattgctttagaaagattgtctccctaatagaaagtgctaaaccacctacagctgtaccgccctaaacatgcctgatgtcatctgatcttggaaactaagtagggtcgtgcctggttagtacttggatggg

SEQ ID NO: 138191 - DNA, 407 bp, Homo sapiens
agaaagagtaaataggtgctaagtaaggcttgaaactacctaaataagcttgaagatctcttgagatgttggggcaactgacaagagggctgtgtgtaagtgaggtgtgaccagagctccaccctgagttacgtctcctgcctgtggtcacacagtcaaagggacccaaccttgtccagggctggctcctggacgctgcctagctgctctgttactcagaccactttatggggtggaggaagggtgagcagccagctctctgcatgttcaccttggcctagactcatcctctccagcccacagcagcacttcctggccaagctgaggctggggagtgggtttctgcctcttgatgcctgagatttctgggaagaagccactcctggttttccaattcctactgctgg

SEQ ID NO: 138192 - DNA, 348 bp, Homo sapiens
atgaaggaagtggagagaatatcagtaacttgctgttgggagcaatgctgctttcaaagcctgggctcctaactccaaatcctgtgttcctttctggaaggttttctccttgaattgtttctcaccccacccaagtgaccttcgacctcctgggaactcacttctggcttggtccaggttgtccagactccatcatccactcatttgaggagtgctcatcgatgcctatgatgagccacgctgtcctacccctgaccgtaaggatgtcatggttggcggaagaggaaaggaaagaagcatccaatggtggaaatgagaatgaagtggcaggtggctctctgatgtcag

SEQ ID NO: 138193 - DNA, 309 bp, Homo sapiens
gagatattccaggccatataaaggttagtgatggggcttagccttgggctgtgagctactgttagatggttaggctctacggtgccctcatcccacccacaggtctgagtggcttgaaattaaaaggacctaggccctccctagcagagctagaagactcctccccactatccttgccagggatagctccatagagctcaagaggaatgacgtgaagggcttatgtgtgccctcagagttacagaatggtgttttctcacaggaggagcccatattaattcctaactgtgcctgtggtttagggagcag

SEQ ID NO: 138194 - DNA, 189 bp, Homo sapiens
agcagcaacaaagggccaataaacccaggagttacacaatagaagctgaattgtgcagtataccaagaccctcgggtctctccagcactgcattcctatctgtgaacgtgttctcagaaagccaggattttcatgacgtcactgggctattgcattacactgataacgcatcattcaacactgtatgac

SEQ ID NO: 138195 - DNA, 561 bp, Homo sapiens
  misc_feature (3)..(3): n is a, c, g, or t
agntcgacggagactctccactgagaccacagattcagaatatgtttctcagtggagatgctctgtcaggacaattctttgctgtcgcagtgcagaccacttaacttccttagtgtaaaggccactcagtactagcagtgctcaccaggcactgtgacaattaaaaatactctgctcaattttgaatgctcccaattgagaatcataaatacaggtaatagttatgctggcacatgtctagattttagtgaacactgtaatgtttcagggtacatagtttaataaaactatttctacaaacagcgttttgtctatgttaggccctattgtaagggtgttttctttctctgtgtgtattcctaaacttcattttggtcattctcaaattagggaagatttttcattccatgtagccctgttttttctgtttgatattctctttagtccttttgacccacaagttttgtcaggtgtccagatttgcagttcactggaagaaaaatgggagagtaatcttccctctttaaaaataaaatagaaatctttgcatatgacttatat

SEQ ID NO: 138196 - DNA, 255 bp, Homo sapiens
cacttgttcagagtctcacagcccagccatgcagccagctgtcctggctttgggtccagccccagggcagcaggagggcagaggtgcaatttgaaggcagacagggcttgggcagtttctgaatcacgtgggggcagcagactcctggtcatcctcgtctgcctctgcagggcctctcctcaatggagctggctctggtctgggaaagcttggacaggctggtggatctgccctctgggcccttcctcctccaca

SEQ ID NO: 138197 - DNA, 578 bp, Homo sapiens
gtaagtgggtagcaccactgcatgttgggggtggggaagcatgagctggatggagcattcggtggtctaaccagtggccagcagtagtgttggggtttgctgccctcacctctgaagccacacaggctcctgcttcctgaggtcaccctctcctggagggctgcccccgcatgggagtgtggacaagtgtgcacgagggggaggcacacccaggccgagtggaacaccaccctaagggggtggtgacaggtggcactgggagtggctggagtcggggttcaccttactcagggtcagggcttcccattttgcaggactgagaggtggactctgaaggaatgcagtgcttagaatcttggtgcctctcctggggtggtgggaagagcagggagtctcgagtccgattttgccaaaaatcccaactttcctgctgagtagctcatgagacaggcatttcacctctctgaacttcaacttgggggtactcagatttccttcagaggctgtgaaagagtcccctgccacaagttactcctctgttcagaagtgacttgactgatcatctagcccaaccccat

SEQ ID NO: 138198 - DNA, 377 bp, Homo sapiens
tttatcaaaacatagaaaaggtgtcagctcctaatgaacaaaacaaatattaaatgaaggtgagaaaactctagttttttcacttaatttattagttctgttttgtagaatgtcgctcatattttttaatactaattagtaaattatggcaatatcataaacctattttttatgtgtttgaccttatcattaatattttggctgatttcttaatattttacctctgacctgaaattagtttagcattgatgtgaataatggcagttgccaagtaagttttgcctaataggactggggtttggtttttaattttgtaattctttacattgaaatttgctacctaattttaacagtatgtcatttacgattgatgcagg

SEQ ID NO: 138199 - DNA, 752 bp, Homo sapiens
acttttacttttccacagggacttttacttttccacagggacttttacttttccacagggacaagttggctctgccacaattgttaaacttcatggtgctgattacaagcacaacatgggctctaagaaggctcgttccataaaggcaatggaagactttcaagtggagatggggcatgagctgggctttgaaaaatgagtaaaaaagcgaaaggataggtaaaggcatttctggcaggggaatggccaaaggccccaggccagggaggcacaggtatgcctgacagttaatagggttgtagtggccatgcagaggctttgtgttgggaggaaagggatgcttagatggtaactagctgggtctcagccctagaaggcgggggggtcaatcctgtgctgtgtaatcagcatggagtcacttagtcctctgagctttgctttcgtcttctgtaaaatgtgcatggtaataatcctgttgtgaggattaaacgaaatgagcaagagaagcccttttgtaaaccacaagttcctacacactttagatgttcaaaaaacaagcaactgttaccacgacagaggccaaagcttggaaggggagggcttggagttagcacttcctcacgcctgctccaggtggctcatcacttgcggatccccttgggtgggcatgggatgtgggtggtgattgaaggatttgcaggcagagagataggagcctttggtggggcacagacaaggcacacagatactcc

SEQ ID NO: 138200 - DNA, 161 bp, Homo sapiens
agggtggaagagatttgggtgcttcccgggaggcgggaaaacgtgtggtttgggacaagggcaggagtcgccagactccagcgggcagggatagcattggcttccctattcagcccgaggatctggagtcgtgtcctgcctcccaagattccagctggcat

SEQ ID NO: 138201 - DNA, 284 bp, Homo sapiens
aatttgccactctcagttcctgcagactcatgtcctctgggatcctgctgggaggccagccctgcatttcctgccatgctgatgatactgcggcagctgctctctgcagtgcaaaaggtgggacagagattgctagacggataaatcataaagcattaccccaagctgcaatcagccaggcgcagcggggatgggcgcagcggcagcctcggcaaattattctcccattatctcttcaaacaactctctccagtggcatgcccctccccacactccctggagac

SEQ ID NO: 138202 - DNA, 303 bp, Homo sapiens
gttaacttttgggtagttatggcattctttaagaatgtgaagaatgattcagatcccttctgctagaaaaatacacgtttacagacataaaactttgtatatgatttcaaggtattcatggaataccccctccaagagcctacccatgagccccaaagttagtaactgcattagaccaaattttataattatttctgaaaaatacttatcagctttggttcttgcatttgtatttacatagtagataatagtacacttttcccaggcatagtgaagaaataaccttttggtagaaatactttt

SEQ ID NO: 138203 - DNA, 484 bp, Homo sapiens
ctaagaggtaggtactattattagcacacctatttcacagaggggaagtggagctttgattttgtatcttacccagctaggaaatgttaaatctattctttgaactgaggactatgtcagagctcaagaaagattctaattccattcctgttcaaaacagtggtctccaggtaaaatagatcttgattaacttaaaaatctccagaatattaaagttatattacagcacaaacttcataaacagtgactgaattttgctttcagccttctcttgaatatgcctaaataattccagaccttgaactttcctaaacctttaatcatttatggtgctctctgctgtacctacccattagaacaatttttaaaaacataacactgtgtaattattttcaaaagcccagagatactaatcaagtgatcctaatagtcttaaacactatcctcaaaccaaaagataaatggagattgggaaacttgcatt

SEQ ID NO: 138204 - DNA, 245 bp, Homo sapiens
aaatggatgatgagacattgatcagaatttgggtagcacgcttaggaaggaagaatttgggatacacctctgggccgtggttcaccatttgacaacagtagatccacataacgaagtcactagccctcagcctagctttcaaggctctgcctagttcatgtgttcattggttccttccttcctttctccctccgtctctcccccgcagtgctccccttcccgatggtaccctccacccaagcaga

SEQ ID NO: 138205 - DNA, 115 bp, Homo sapiens
tttcaacttcaatttaacaatataaaaatgtattaaatgaagaaatactgaaattatggaggcagtaaactaaatgacttgtactttattaaaatataatgttttgattaaacaa

SEQ ID NO: 138206 - DNA, 463 bp, Homo sapiens
tcttccaaaatggccgttaacatttttcattcttaccagcaatgtatgaggattccaatttctctgtgtcattgacagtgcttattattctccttgtttattatactcatcctagtgagtataaagtgtgtctcatctcattgtggtttgatttgcatttacctaaggactaatgatgttgaacatcctttcgtgtatgtctatttggagaaatgtctattcagatcatttatttttgtagtaacagcttcattgataaatttgattcaaataccacacaattcatccatttaaagtgtgcaattcaatagtttttggtacatttttgtacatttagtacattctgtatttagtacatacaaccaccatcagtaacaaatttcagaatattttcgtcacctcaaaaagaaatcccctgctctttaactgtaaccccatctaccctgcactgcctttcccctaa

SEQ ID NO: 138207 - DNA, 111 bp, Homo sapiens
agtcacggatctttacctccagctcagtgtcggcctcctccagggcacgcaccttgtccaggtaggaggccaggcggtcattgaggttctgcatggtggccttctcacctc

SEQ ID NO: 138208 - DNA, 195 bp, Homo sapiens
aggctctcccagtttaggggtagttttgtttttaagtgtgaattgttagcactggaaaccaagtttgtcttaagttcatagattgattttcaagaagaggacaaaaacatttcccttcccattttatttctgtgaggaaagcatttaccatatcatcagtcattgtgtaaccccaggttttccttcttcatggcg

SEQ ID NO: 138209 - DNA, 176 bp, Homo sapiens
cctactaaatattaatatttaaattaccatcattattctcttatgaagttttaaactctgtatttagtctccttttcattcctaatactgtttatatgtgcctttcctctatttttaaaatctatcttgctaaactcagattttgattttatctaaccttttgtaacttgcataaa

SEQ ID NO: 138210 - DNA, 185 bp, Homo sapiens
aaagattcaagcatagcactgtactgaaacacagccagtattcttttgcttattttccagttttggctagtttttatgaaaactggatatctatgtctatatccatgtatatatccatatatacccatatatagatccatatatatatgtatttgacaaagtcaccattgtcaacattgaaaatt

SEQ ID NO: 138211 - DNA, 542 bp, Homo sapiens
tgcagacaaaaaaaaaattttttttaattaatttataaacatcttaattttataaaagtagagataaaatacaaaattaaaaactttataaaacagaactctatgatgtatatcataacaaataattagtttttcccaaggtactcaaacccccttttcaagtaggtattgcctcacaaatcgttttattgtccaaagaaacgagagcccagacatggttcccatcgtgcagaacacatacttcctattgcaaactcaaaacttccatctaaatatctcatagtcactttcattcagtccctcaacaagtatttattgtgtcaattatgtactaagtattgttctaggtaataaaaatgtaataccaacatgtatgccctcatggagctcaacgtttaagggggataaggaagggagcagacaaagattacataagcaatcataataagtataatgagtactatgataaagaatgtacagtgtacagctgtccctcaggatatgcaggggattggttccaggacccccacaatcctgtactc

SEQ ID NO: 138212 - DNA, 187 bp, Homo sapiens
gggaggctgaggcaggagaatcacttgaacagctgtggtggaggttgcattgagctgagatcgcaccactgcactccagcctgggcaacagatcaagactccgtgtcaaaaaaaaaaaagacttatctcaaatgctgtcacttgcatgatgtctttccagacacttccttcacccaataagtatttt

SEQ ID NO: 138213 - DNA, 282 bp, Homo sapiens
gaggcagtggtggggtagctagaagctgagtggacctgcagcacaccgagcagatgggctttgcctctgccccttttgccccctaggctatctgctgtggcccaccctgccaaggcccgagtgtgagggtgttgatttccagcctttcaatttgtttaaattatttttgaaaatgtaaacatttcttttatataattaaaaaaatgtttaaggtcattaaaaagggaaggggaagaagagccagggaagaaactaaggcacagaggaccagatgagggactg

SEQ ID NO: 138214 - DNA, 365 bp, Homo sapiens
cagagcgtcagcaggcagctgcctgggagccatgcctgatagtactggaccctcagattggagcctgaaaatatccgggaagaaacgcatgtctctcagcatctccttcctccaatacctaacaaagacaagaataagcctgacacaggatacatcaactatttcttttattttcttttttaaagacatggggtctcagctgggtgtgatggctcacgcctgtactcctagcactttgggaggccgaagcaggtggatcacgaggtcgggagtttgagaccagcctggctaacatggtgaaaccccgtctctactaaaaatacaaaaattagtcaggcgtggtggcacgtacctgtaatcccagc

SEQ ID NO: 138215 - DNA, 748 bp, Homo sapiens
gcttcttgggctggcagaggtcgcccttctcctggacctcagggaggaatgaccccgttgctatggagaaaggtggaggggaaggctgagaggtggtgtctccagcctccttggacaagggaggagcttcgctgcttttttaagacggagtcttgctctgttgccaggctggagtgcaatggcgtgatctcggctcactgcaacctccacctcctggattcaagtgattctcctgcctcagcctcccaagtagctgggattacaggcacccgtaagccaccacaaccggctaatttttctatttttagtagagatggggtttcaccatgttagccaggatggtctccatctcctgacctcgtgatctgcccaccttggcctcccaaagtgttgggattacaggcaagagccaacacgcccggcctggagtttttagggtaaaacgtgcagctcttcacgtcttcagactttcttgccaagactcatgaccattgggggagagaagcattttgatgatatctatgctactgcttcagaacataggtgaccatgacagcttcacttcaagatggcatcagtcttgccacaccacaggctgtatggttcctacatacatgatcttcaggttatctgcggctactgtattggcatggtgaaagtagaatacagtggtgtgacgctacccacttcttctcaattcatgttcagtgacattattttgacaccttgtaattggccatggtgggag

SEQ ID NO: 138216 - DNA, 490 bp, Homo sapiens
aaacctttaacaaagtaccttgctatgtttgggctcttaaaaattcaagtgatttagaaaatttggaaaggaaccagaagacaactatcaaataagaaacttaataaaaacctagtagactcagtttatactgaaaagaataaccaaaaacaaatatacctatttttccactaaaaagacagaacaagtttaaattgcagaagtaataaaataggcacgagtgaggggcaacaatctgattttgaagtttattgaagtttttgagataacaaaacacataacttaaatctccactttgtgaagctgaggtgggaagagcccaggagttaagaccagactgggcaacatagtaagacccaatctctacaaaaaaattttaaaaattagctggacatggtggcacatgcctgtagtcccagttacttgggaggctgagacggggggatcgcttgagcccaggaggttgaagctgcagtgagtcatgatcaca

SEQ ID NO: 138217 - DNA, 1211 bp, Homo sapiens
gcgcagctgctccctggcgccctctcaaggagcccctgaggattcgcgcctcccggaagggagaaaagcccgcccgaggcgcggtgctgacggtggctgggctgccgggtgcgctgtggaaccgcctcctgctagagcagcgggctggcgacggtcctcgccggggcgggaagcggctcaggctgccctcgctggcctgcggcggcgcggctggaagcgcgggccactcgtgcgtgggtcactcaggactgcgcctcgcgcgactgtgtgtgcaggaaacaagcaggaaataccctaaaagagaatgaagcgccatgttgagggtcgcggacgtcgcgagtgctgtgggaatgtgggctgaggtggagagttatggtagcccgtgttacaggctcaggggtctgaaagaagcctaatcgtggaggcggcatctgaggagggtcttgaaggctgggcaggcatttgcccgacagagatggaggaagctagtcctgtctgatggaggaaacagggcggaggcgtggagggagccgtgcagcgctggtgtgaggagcagcgagcaggccaggcctgtaaagcagagtgagggaaccaggatagagaaggctgtacaggaagcatggtgatggcatctgcatggcgcctgtggaggccccagggagcttttactcatgatggaaggcacagagggagtaggcacatcacatggtccgaggaggagcaagagaaaatgggagtggggggtgtcaatgtgctgatattccaatcttgcagaaatcgactggatttagtggaattaaagtcaactggaagacgatctgtggggataattccatgattcaaagccttcagggaaaacgtgtttgctcagctgcagtgattgaaaaattgaaggcaatgagagtcatatgttatgcttggttatgtcctgctctgatgccagtttggagtaaaggctgaactttgctgttgaaagccactgtggaaagtggaaacattgactgtgcgttgctgaggggaggaatgtatttacttacccagaaatagacgcatccttgtctcagtgggctgggagatagtatcaatcctttctgttgcaacagatcccactgccttcttttttcaaaagagtaaatatttaaataggtaatacagaaaagttattgccatttttccttcatcagccatggctgggagtcaaaagagagagt

SEQ ID NO: 138218 - DNA, 1004 bp, Homo sapiens
gcgcagctgctccctggcgccctctcaaggagcccctgaggattcgcgcctcccggaagggagaaaagcccgcccgaggcgcggtgctgacggtggctgggctgccgggtgcgctgtggaaccgcctcctgctagagcagcgggctggcgacggtcctcgccggggcgggaagcggctcaggctgccctcgctggcctgcggcggcgcggctggaagcgcgggccactcgtgcgtgggtcactcaggactgcgcctcgcgcgactgtgtgtgcaggaaacaagcaggaaataccctaaaagagaatgaagcgccatgttgagggtcgcggacgtcgcgagtgctgtgggaatgtgggctgaggtggagagttatggtagcccgtgttacaggctcaggggtctgaaagaagcctaatcgtggaggcggcatctgaggagggtcttgaaggctgggcaggcatttgcccgacagagatggaggaagctagtcctgtctgatggaggaaacagggcggaggcgtggagggagccgtgcagcgctggtgtgaggagcagcgagcaggccaggcctgtaaagcagagtgagggaaccaggatagagaaggcaagtcggggtcctgtggtcgctgaagaatttgaatgaaatcagtaaacaggctgtacaggaagcatggtgatggcatctgcatggcgcctgtggaggccccagggagcttttactcatgatggaaggcacagagggagtaggcacatcacatggtccgaggaggagcaagagaaaatgggagtgggggtaagtaccacacacccttacacaaccagatcttgaaagaattcactatcacaaggacggcatcaggccatgagagatccatccccatgaccctaccaggccccacctccaacactgaggattacatttcatcatgagatttataggggccaccttccaaaccatttcatacaccacggaatactatgcagccataaaaataacaaaatc

SEQ ID NO: 138219 - DNA, 490 bp, Homo sapiens
cacctccttgactaaatttgttactaggtattttatatgttttgcagttattgtaaatgacattgctttcttgatttctctctcagctagtttgttattggtatagaagcattagattattttgtatattgattttgtatcctgcaattttacttttaagtttcaagatttttttgtggtgtagtctacgtttttctcaaatatgatgtcacttgcaagaaggataattttactttctctcttccaatatgatatttttcatttttttctcttgcctgatggctctggctaggacttctactactatgttgaatatgaatggtaaaagttggcatcttagtcatgtttcactttttagttttttctcattcagtataatgttagctgtgtgtttgtcatatatggtccttataatgctgagatatgtttgttctatgcctaatttgttgagagttttatcatgaagagttgtttaattttattaagtggg

SEQ ID NO: 138220 - DNA, 346 bp, Homo sapiens
tactaagtgagagggggagccttagaaaggaacttgaactcagcctgatattagaagtgcacaggcaggtgggctatggttattgtctatacccagtagcatgaaaagtaaaagctatgtaaaggtgatgtatctaatggcagtaataaattagctagacataatcatatctagggcattttcagacatctgacagaaaatcaacatgcaccataactgacacttagacctgaccaaggcatctcattaagaacatgtacccttggccgggtgcggtggctcacgcctgtaatcccagtactttgggaggccgaggtaggtggatcacctgaggttgggagtttga

SEQ ID NO: 138221 - DNA, 200 bp, Homo sapiens
tcaagtcagggcaggagagctagtagagacagactatggcgtaagtcataagcaggctgtccagttgtcccgaaggtggataatcaagtcaatcttggtggctagccaatacaaggcttgtcagtgggcctaacgcagtggctcatgcctgtaatcccagcactttcggaggctaaggcaagcggatcacctgaggtcag

SEQ ID NO: 138222 - DNA, 366 bp, Homo sapiens
aggctggcaaggtgaagagagattactattgatctaagacggtttctggtgagatggctatctccacagatcaagctcgggcaggcagggataggatggcatagaaaagtctagtaaggattgggcgtggtgactcacgcctgtaatcccagcagtttgggaggccgaggtgggtggatcacttgaggtcaggagtttgagaccaacctggccaacatggcaaaactctgtctctactaaaaatacaaaaatcagcctggtgtggtagcatgtgcctgtagtcccagctactcaggaggctaaggcaggagaatcactcgcatctgggaggcagaggatgcagtgatccaagatcatacgacagca

SEQ ID NO: 138223 - DNA, 310 bp, Homo sapiens
tggtaacatgtggcactgtatcccaaggatgatgccctgcatgtgacaacgtatataataacgactgcttctgctttaataacaaatatcaaatacagtgtgacaactccttgggtgcttctgaatacatgttataatttatttctagagtggatcctttcctatcatttttggagagaatttactcaaggtctaaaactttcatgtgatcacaatgtcttgaagattatgtaaaagtaaacaattattttaatcaactaaaaatatttatttgggccaggcacggtggctcacgcctataatcccagca

SEQ ID NO: 138224 - DNA, 190 bp, Homo sapiens
ggatcattgaggcctccccactgggggtgctggggccagtcctagccagggcagagagtgggtcagccgtctcagctccttgagtggttggtgctggtactggtctcatggttttagacctggcacccagtgggtatggggagccctgggcacctgtgggcctacttatggaagtcatcctcttccctta

SEQ ID NO: 138225 - DNA, 225 bp, Homo sapiens
cggtacctacttttccacagagagaagtcaggctaactccacgacctgaaggctgatcacttactttcaggacaggggctgagagaggactgtcacggggaaagattaaaaatgagaccaaagcaaccacgaccacaacaaaaagagagagcaataaagagagacttagaaatgaacacccacttgctttcagatgaaaagcttgagtcaaagtggtgttaagga

SEQ ID NO: 138226 - DNA, 260 bp, Homo sapiens
tggaagtaaagtcagggtgtgtgaaggaggagggatgatgaactgaggtgagtgctcccaaagagtccggtaaaacgaggactttgaattaggcattggacttcacagcatgaaggcctctcgtggcctctctggagcagtgctgccagggtgatgggccagaaagcctgagtatagtgggcttcagagagaaggtgaggagagtgactggggacaactggtagacaatgcttccaaggagttctgctgtcaaggggaac

SEQ ID NO: 138227 - DNA, 244 bp, Homo sapiens
ttctacttcttccctttgtggtccctcagatcattatcttaacctgtgtagaatagtgaagaagggacaagcccagcctttggaatcatctagacctggtttcaaatcctggccctgttaccttaatagctttgtgatttgggtgagtcacttaacctttcagagcctcagttttcccctctagaaacttacttttattggtatttgctgtatcatgtttatgtttatacagttaaaaaagccc

SEQ ID NO: 138228 - DNA, 228 bp, Homo sapiens
attggtgagagcactcagtgtgcaagcaagggtgcacggtgcactcagcccctttgatacctgaaacgatgtctgggcagttttgctaattgttgctgtgtgcttgcgtgatttagacgaaggctgctttaaaacccagccagactttgtgtttgctatgtaaccagtgcatttggtgtggcctcccaccctttgcgttagattagccaacttggctactttgggttg

SEQ ID NO: 138229 - DNA, 399 bp, Homo sapiens
taattttcgacaagggtaccaagactattcaatgggggaaaggacagtattaacaaatggtgctgggaaaactggatgttgaaattcaaatgagcgaagttggacccttacctaacaccatatacaaaaattaactgaaagtgaataagggacctaaatgtgagatgtgaaactgtaaaactcttagagaaagacagggcaaatcacaacatttgatggcaatgatttcttggatatgacaccaaaggcacagacaacaaaataatagacaaaaaaggcaagttgaactttataaaagtttttacaaatggctctgaaagacactatcaacagagtaaaaaggcaatacacagaatgttagaaaatatttgcaaatactatcataaaaagaatattcag

SEQ ID NO: 138230 - DNA, 754 bp, Homo sapiens
tcctcatcttaataaagagtccatgagtagaagcaacattctagttgcttccactagttgcattctagtaggggccttatgattctgagaacttttgagatatcagtccacattttttacattctttaatttatctgagccagagtggagctgcctttggagattacgtagaatgtactgatatccattgcattttcccatatgctgccttttttttttagcctaatccaattgcaccaagatttgttgcttgtgcattatgtgaaagccctatgctaattgctgcaggggttacaagagtgaatttgatagtttttgccctcaagcagtttatgatcttgtgggattaaagacatggcagttacaccaaagctataatatgcagacaaaaataagtataatttctgtttccatttttatatcttacttgggttaaatttatcttaggctttctaatcaaagccctgtgaaataaaggaggataagaagaggaaaagcaaaatccccaggctgactgtactcatcagttgctgtgaataaactggctccaaagtatgagatccagatgttggatttatatcacagctcagtgaatgacaaaaatcatagtactatgtcttttattgcttcactatttatatataacctatgatgaagcattaaccttctttggctaatatttcctgccccaaaagaccactagcaggcatacaactgtgcgcagctggaataagcatagcctgaaattcatgac

SEQ ID NO: 138231 - DNA, 828 bp, Homo sapiens
ataggccagagaaatatggctgttacgatgaaggcgtaacttctctggttcttgattatttacaccattagagaagaatgcaaatatgaatagctcagagtagtttaactttgaagtgagagtttatatgcacctttatatgtgggataactgatgtctttggaatagacttcaaatgaatgataaaaacacctgtaaagtgataggacctctactttttctcatgtccaatgttcagtttcttataaaccaggcatgaagagaaacaaaaagtaattaattctccagatcatgaagttgtcttcaacctaagcacagaggtataataattacatttctcagaagttccccctctgttttgagtctcaagggcaattgagatgtcagtgaggctgtgattaaatgtattggatattagaggattttaaatacaaacaagtattataggtgttaccactgaccccgaaggtaagatttactgtgaaaatttataatgcaaggaagaatgatcaagttggctgtcagaacaacaaaatattacaaaccaggatgtctaagagcagaagtccgtggttgccacctctcaagcctcttagcttaatccaatctaggatgcatttccactctgcaacaaacagtatttatttttgccttatttgcagataacagttttaatgcaggtactgcccatggattagctttgagcagtgtctttttgctttggtttttttatttgtttggtttgttttgagactgagtctcagtcctccagcctgggcaacatagcaagactcccaccccttaagaaaaaagaagagagaaaaaaaa

SEQ ID NO: 138232 - DNA, 479 bp, Homo sapiens
atgaaattccttttcttttttaaatttattttttctttatttttctttataaagtgaagagtaggtagcatgaattcctcttgccctttgctatttcagtctggcatcagtagcaattgttgctatgtccagttttcattcatggatttttctgggattgaagatgagttcaatgttgattatttaattgggcagtataagtaaattcattggctctccttccagtttagtgaatactaaatatcatccatgatattttatacttcttacacttctggaatctaacctgaaaatagaagttgtaagtcagggacggtggtatgtgcctctagtctcagctagttgggaggctgaggcttgagcccaggccttcaaggctgtagtgcacaatgactgtacttgtgaatagccactgcactccagcctgggcaacatagcaagactcccaccccttaagaaaaaagaagagagaaaaaaaa

SEQ ID NO: 138233 - DNA, 964 bp, Homo sapiens
ataggccagagaaatatggctgttacgatgaaggcgtaacttctctggttcttgattatttacaccattagagaagaatgcaaatatgaatagctcagagtagtttaactttgaagtgagagtttatatgcacctttatatgtgggataactgatgtctttggaatagacttcaaatgaatgataaaaacacctgtaaagtgataggacctctactttttctcatgtccaatgttcagtttcttataaaccaggcatgaagagaaacaaaaagtaattaattctccagatcatgaagttgtcttcaacctaagcacagaggtataataattacatttctcagaagttccccctctgttttgagtctcaagggcaattgagatgtcagtgaggctgtgattaaatgtattggatattagaggattttaaatacaaacaagtattataggtgttaccactgaccccgaaggtaagatttactgtgaaaatttataatgcaaggaagaatgatcaagttggctgtcagaacaacaaaatattacaaaccaggatgtctaagagcagaagtccgtggttgccacctctcaagcctcttagcttaatccaatctaggatgcatttccactctgcaacaaacagtatttatttttgccttatttgcagataacagttttaatgcaggtactgcccatggattagctttgagcagtgtctttttgctttggtttttttatttgtttggtttgttttgagactgagtctcagtcctccaggctggagtgcagtggtgtgactttggctcactgcaacctctgcctcccgggttcaagcgagtgctgaggcttgagcccaggccttcaaggctgtagtgcacaatgactgtacttgtgaatagccactgcactccagcctgggcaacatagcaagactcccaccccttaagaaaaaagaagagagaaaaaaaa

SEQ ID NO: 138234 - DNA, 328 bp, Homo sapiens
gaaaatgaagatgcaagtaatacaggtttggtggggaggtcaaatatgttagcagccctacctgttacttaatctctctgtaatctctgtcaatgcactcctccctccccttcctcatctctatcattgagaatagtatagggttaagaccttcagctctggagtcagctctcccagttacagctgcagaaccatcagcaagttacttacctttttaagtcactattacatcatctgtaaaattggatttatgcaacatatttagtgagtgcctgatatgtttaggtacttttctaggagctagggcttagcaatgaactaaataaag

SEQ ID NO: 138235 - DNA, 356 bp, Homo sapiens
ttgtgggacaaagcatcctgttttaactctgttcttttatagtgtatttctagtgcatagtcctgaggatgttttatttgcagatccctttaattcttcccttccttgtgtgttgagtaggtgatcatccctgttctaaacttttattactccaaggatagggtctgacttgttgcctttctaagataatctaaatgccttcttcatagcaagaggaaacagttacctccttcagctggttgtttgaacataactatgtgagtgtttgaaaccatagggtccttcaaattctacaataaccagaaattgagaacattttgtctttaacaactgaaccagttcatttattgtgacta

SEQ ID NO: 138236 - DNA, 271 bp, Homo sapiens
accaagaactcacaacatatattctgttcaactttgcattatgaaaagtatacagtgttcaagtgatgctttgcacttgtaacaatctatctacttatttgagacattggtattaaaaatgtggcagaccacactttagccaagattccatcttgttactgatcttttccatatgttttctgttagtgtctttgttcttaaaactcaggctttcactaaggaagagagagcaaatctgtgttacgtctaggtcgacctagactttacacag

SEQ ID NO: 138237 - DNA, 541 bp, Homo sapiens
ctgggctcaagcaatatgcccatctcagcctcccaaggtgctgggattacaggaaggatttgatgccctggatccctttattcccatcctggtttccaactataacccaaaggaatttgaaagttgtattcagtattatttggaaaacaattggcttcaacatgagaaagctcctacagaagaagggaaaaaagagctgctgttcctaagtaacgcgaacccctcgctgctggagcggcactgtgcctacctctaagccaagatcacagcatgtgaggaagacagtggacatctgctttatgctggacccagtaagatgaggaagtcgggcagtacacaggaagaggagccaggcccttgtacctatgggattggacaggactgcagttggctctggacctgcattaaaatgggtttcactgtgaatgcgtgacaataagatattcccttgttcctaaaactttatatcagtttattggatgtggtttttcacatttaagataattatggctcttttcctaaaaaataaaatatctttcta

SEQ ID NO: 138238 - DNA, 1597 bp, Homo sapiens
ggcacgagggagagagagagagagagagagagagagagagagagagagagagagagagagagagagagagagagagagagagagagagagagagagagagagagagagtgcaaggatgatgctgaaaggaataacaaggcttatctctaggatccataagttggaccctgggcgttttttacacatggggacccaggctcgccaaagcattgctgctcacctagataaccaggttccagttgagagtccgagagctatttcccgcaccaatgagaatgacccggccaagcatggggatcagcacgagggtcagcactacaacatctccccccaggatttggagactgtatttccccatggccttcctcctcgctttgtgatgcaggtgaagacattcagtgaagcttgcctgatggtaaggaaaccagccctagaacttctgcattacctgaaaaacaccagttttgcttatccagctatacgatatcttctgtatggagagaagggaacaggaaaaaccctaagtctttgccatgttattcatttctgtgcaaaacaggactggctgatactacatattccagatgctcatctttgggtgaaaaattgtcgggatcttctgcagtccagctacaacaaacagcgctttgatcaacctttagaggcttcaacctggctgaagaatttcaaaactacaaatgagcgcttcctgaaccagataaaagttcaagagaagtatgtctggaataagagagaaagcactgagaaagggagtcctctgggagaagtggttgaacagggcataacacgggtgaggaacgccacagatgcagttggaattgtgctgaaagagctaaagaggcaaagttctttgggtatgtttcacctcctagtggccgtggatggaatcaatgctctttggggaagaaccactctgaaaagagaagataaaagcccgattgcccccgaggaattagcacttgttcacaacttgaggaaaatgatgaaaaatgattggcatggaggcgccattgtgtcggctttgagccagactgggtctctctttaagccccggaaagcctatctgccccaggagttgctgggaaaggaaggatttgatgccctggatccctttattcccatcctggtttccaactataacccaaaggaatttgaaagttgtattcagtattatttggaaaacaattggcttcaacatgagaaagctcctacagaagaagggaaaaaagagctgctgttcctaagtaacgcgaacccctcgctgctggagcggcactgtgcctacctctaagccaagatcacagcatgtgaggaagacagtggacatctgctttatgctggacccagtaagatgaggaagtcgggcagtacacaggaagaggagccaggcccttgtacctatgggattggacaggactgcagttggctctggacctgcattaaaatgggtttcactgtgaatgcgtgacaataagatattcccttgttcctaaaactttatatcagtttattggatgtggtttttcacatttaagataattatggctcttttcctaaaaaataaaatatctttcta

SEQ ID NO: 138239 - DNA, 592 bp, Homo sapiens
tcccccccgagatggaatcccatgataccattttatttaaatattggcctaattttattttgcttgcagacatttaaagtgtttttgtatctccttaccgtctttggaaaagagtttgagacccacaaatatgtcatggtaaatttaaaatcaggtagcagtttattgtcagagccaaatctggaataaccaatttagttgccatttaactgtgctagaccacacttttgtaacactgtatgcccaagaaagaaaaaaaaaatctacagatgattaatgcagttttccatcctttttaactttttccagttcagccttttctcttttctttcagcatggaggcgccattgtgtcggctttgagccagactgggtctctctttaagccccggaaagcctatctgccccaggagttgctgggaaaggtcaagtcaaaggaaaatttgtttctacttagattgttatcctgtttaaagaaaaatatttttattaatctatgtattttgacataatttcagacttagagaaaaatcatattcctgtatgcccttcccctggattcctaaaatattaacttgatcatcattgcttta

SEQ ID NO: 138240 - DNA, 738 bp, Homo sapiens
  misc_feature (686)..(686): n is a, c, g, or t
gagtagccagccaccatatgtggagtccatatgtggagtcctgtatcaggcaatgttgccagagaatgagaagtagagttacatagaagaaaaacaaataccttaccttcaaagtgcttaagtagagtctgtctgtctggtgctttgttccttaactaacatgtttcctgatcctttttcttccccaggaaggatttgatgccctggatccctttattcccatcctggtttccaactataacccaaaggaatttgaaagttgtattcagtattatttggaaaacaattggcttcaacatgagaaagctcctacagaagaagggaaaaaagagctgctgttcctaagtaacgcgaacccctcgctgctggagcggcactgtgcctacctctaagccaagatcacagcatgtgaggaagacagtggacatctgctttatgctggacccagtaagatgaggaagtcgggcagtacacaggaagaggagccaggcccttgtacctatgggattggacaggactgcagttggctctggacctgcattaaaatgggtttcactgtgaatgcgtgacaataagatattcccttgttcctaaaactttatatcagtttattggatgtggtttttcacatttaagataattatggctcttttcctaaaaaataaaatatctttctaaaaaaaaanattactgggccgcgtttacaacgtcggactgggaaacctggcgtacccactt

SEQ ID NO: 138241 - DNA, 677 bp, Homo sapiens
gagtagccagccaccatatgtggagtccatatgtggagtcctgtatcaggcaatgttgccagagaatgagaagtagagttacatagaagaaaaacaaataccttaccttcaaagtgcttaagtagagtctgtctgtctggtgctttgttccttaactaacatgtttcctgatcctttttcttccccaggaaggatttgatgccctggatccctttattcccatcctggtttccaactataacccaaaggaatttgaaagttgtattcagtattatttggaaaacaattggcttcaacatgagaaagctcctacagaagaagggaaaaaagagctgctgttcctaagtaacgcgaacccctcgctgctggagcggcactgtgcctacctctaagccaagatcacagcatgtgaggaagacagtggacatctgctttatgctggacccagtaagatgaggaagtcgggcagtacacaggaagaggagccaggcccttgtacctatgggattggacaggactgcagttggctctggacctgcattaaaatgggtttcactgtgaatgcgtgacaataagatattcccttgttcctaaaactttatatcagtttattggatgtggtttttcacatttaagataattatggctcttttcctaaaaaataaaatatctttcta

SEQ ID NO: 138242 - DNA, 487 bp, Homo sapiens
tccgagcacccgcccgccctccaaccgcgcctctagtagaccctcacggtgttctctcccggcccgttctctgccgcaccccgcagctcctacagaagaagggaaaaaagagctgctgttcctaagtaacgcgaacccctcgctgctggagcggcactgtgcctacctctaagccaagatcacagcatgtgaggaagacagtggacatctgctttatgctggacccagtaagatgaggaagtcgggcagtacacaggaagaggagccaggcccttgtacctatgggatggctataatggatttggtaatgatggaagccattttggaggtggtggcagctacaatgattttgggaagtaccacgatcagtcttcgaattttggacccctgcagggagggatcagtcgaggcagaagctctgctccctatcccgttggagtcccagatccttgctataaccacgaatccgagtatgactcgcccgtcc

SEQ ID NO: 138243 - DNA, 735 bp, Homo sapiens
gggttcctgccacattctccttattgaatttatttattcaatagacttcactggagagactcatgctgggacacccacagaaaaattcatactgtgcaagggctactccagcacctaagtaaatctttgccacacctgtcctagtatatgtacagaaattaactttcagcactatatttcatctactctgactgaaagcattccaactgttcatttacttgcccttgacctcacatttgagtatgaagaggggatatagaagaaaagctaaggctgctctatcactagataatagagttaatagtaatcggaggcctggtgcagtggctcacacctgtaatctacactttgggagggcaaggtgggaagaccacttgatgtcgggagtttgagaccaggctaggcaatatagtgagaccccatctctattgaaaaaagcaaaaaaaaaaaaatactatttagaatagcttattaaaggagtacagtgaagagtgtaagactaactgttcatttacttgcccttgacctcacatttgagtatgaagaggggatatagaagaaaagctaaggctgctctatcactagataatagagttaatagtaatcggaggcctggtgcagtggctcacacctgtaatctacactttgggagggcaaggtgggaagaccacttgatgtcgggagtttgagaccaggctaggcaatatagtgagaccccatctctatcgaaaaaag

SEQ ID NO: 138244 - DNA, 700 bp, Homo sapiens
  misc_feature (24)..(24): n is a, c, g, or t
aattcggcacgagggtcgcctagnctggagaactagtcctcgactcacgtgcaaggatgatgctgaaaggaataacaaggcttatctctaggatccataagttggaccctgggcgttttttacacatggggacccaggctcgccaaagcattgctgctcacctagataaccaggttccagttgagagtccgagagctatttcccgcaccaatgagaatgacccggccaagcatggggatcagcacgagggtcagcactacaacatctccccccaggatttggagactgtatttccccatggccttcctcctcgctttgtgatgcaggtgctcaagacagggaatggaattggagggagcccagaatacaagctgctgctagcaaaggggtggggctaaatgagaagaaaatttaaaaagatgaaatttaatctgaaaaacagaaattcatgtgttgattaccttttgtgactagtacaattactttaagctcatgtttaaacaatattgatgttttcctccttgtatagcccaagaagattccagtaatttcagcatcaaataactgttttaaatgaacttaaaatttgccttggcaaaatatcatgaaaatagttaatatgctgcacaaaagcaaaatcatagtacactcctgagctaaatagaagcaatattttgattagatgcattggtttttattc

SEQ ID NO: 138245 - DNA, 1384 bp, Homo sapiens
  misc_feature (52)..(52): n is a, c, g, or t
tcttcacattcctttttctggtgcacgatattgatgatcaacacaccccccnagaattttttgtttcaaggccaagcatggggatcagcacgagggtcagcactacaacatctccccccaggatttggagactgtatttccccatggccttcctcctcgctttgtgatgcaggtgaagacattcagtgaagcttgcctgatggtaaggaaaccagccctagaacttctgcattacctgaaaaacaccagttttgcttatccagctatacgatatcttctgtatggagagaagggaacaggaaaaaccctaagtctttgccatgttattcatttctgtgcaaaacaggactggctgatactacatattccagatgctcatctttgggtgaaaaattgtcgggatcttctgcagtccagctacaacaaacagcgctttgatcaacctttagaggcttcaacctggctgaagaatttcaaaactacaaatgagcgcttcctgaaccagataaaagttcaagagaagtatgtctggaataagagagaaagcactgagaaagggagtcctctgggagaagtggttgaacagggcataacacgggtgaggaacgccacagatgcagttggaattgtgctgaaagagctaaagaggcaaagttctttgggtatgtttcacctcctagtggccgtggatggaatcaatgctctttggggaagaaccactctgaaaagagaagataaaagcccgattgcccccgaggaattagcacttgttcacaacttgaggaaaatgatgaaaaatgattggcatggaggcgccattgtgtcggctttgagccagactgggtctctctttaagccccggaaagcctatctgccccaggagttgctgggaaaggaaggatttgatgccctggatccctttattcccatcctggtttccaactataacccaaaggaatttgaaagttgtattcagtattatttggaaaacaattggcttcaacatgagaaagctcctacagaagaagggaaaaaagagctgctgttcctaagtaacgcgaacccctcgctgctggagcggcactgtgcctacctctaagccaagatcacagcatgtgaggaagacagtggacatctgctttatgctggacccagtaagatgaggaagtcgggcagtacacaggaagaggagccaggcccttgtacctatgggattggacaggactgcagttggctctggacctgcattaaaatgggtttcactgtgaatgcgtgacaataagatattcccttgttcctaaaactttatatcagtttattggatgtggtttttcacatttaagataattatggctcttttcctaaaaaataaaatatctttcta

SEQ ID NO: 138246 - DNA, 1659 bp, Homo sapiens
ggcacgagggagagagagagagagagagagagagagagagagagagagagagagagagagagagagagagagagagagagagagagagagagagagagagagagagagtgcaaggatgatgctgaaaggaataacaaggcttatctctaggatccataagttggaccctgggcgttttttacacatggggacccaggctcgccaaagcattgctgctcacctagataaccaggttccagttgagagtccgagagctatttcccgcaccaatgagaatgacccggccaagcatggggatcagcacgagggtcagcactacaacatctccccccaggatttggagactgtatttccccatggccttcctcctcgctttgtgatgcaggtgctcaagacagggaatggaattggagggagcccagaatacaagctgctgctagcaaaggggtgaagacattcagtgaagcttgcctgatggtaaggaaaccagccctagaacttctgcattacctgaaaaacaccagttttgcttatccagctatacgatatcttctgtatggagagaagggaacaggaaaaaccctaagtctttgccatgttattcatttctgtgcaaaacaggactggctgatactacatattccagatgctcatctttgggtgaaaaattgtcgggatcttctgcagtccagctacaacaaacagcgctttgatcaacctttagaggcttcaacctggctgaagaatttcaaaactacaaatgagcgcttcctgaaccagataaaagttcaagagaagtatgtctggaataagagagaaagcactgagaaagggagtcctctgggagaagtggttgaacagggcataacacgggtgaggaacgccacagatgcagttggaattgtgctgaaagagctaaagaggcaaagttctttgggtatgtttcacctcctagtggccgtggatggaatcaatgctctttggggaagaaccactctgaaaagagaagataaaagcccgattgcccccgaggaattagcacttgttcacaacttgaggaaaatgatgaaaaatgattggcatggaggcgccattgtgtcggctttgagccagactgggtctctctttaagccccggaaagcctatctgccccaggagttgctgggaaaggaaggatttgatgccctggatccctttattcccatcctggtttccaactataacccaaaggaatttgaaagttgtattcagtattatttggaaaacaattggcttcaacatgagaaagctcctacagaagaagggaaaaaagagctgctgttcctaagtaacgcgaacccctcgctgctggagcggcactgtgcctacctctaagccaagatcacagcatgtgaggaagacagtggacatctgctttatgctggacccagtaagatgaggaagtcgggcagtacacaggaagaggagccaggcccttgtacctatgggattggacaggactgcagttggctctggacctgcattaaaatgggtttcactgtgaatgcgtgacaataagatattcccttgttcctaaaactttatatcagtttattggatgtggtttttcacatttaagataattatggctcttttcctaaaaaataaaatatctttcta

SEQ ID NO: 138247 - DNA, 1015 bp, Homo sapiens
tctcgaggatctcggtcgctcggacaacaggcatacatgtgaaagcagcctagggtagttgaaacgacgagtgaatgctctcaaaaacctgcaagttcaatgtgcacgcatagaacgccatattctattgaggaagataaaagttcaagagaagtatgtctggaataagagagaaagcactgagaaagggagtcctctgggagaagtggttgaacagggcataacacgggtgaggaacgccacagatgcagttggaattgtgctgaaagagctaaagaggcaaagttctttgggtatgtttcacctcctagtggccgtggatggaatcaatgctctttggggaagaaccactctgaaaagagaagataaaagcccgattgcccccgaggaattagcacttgttcacaacttgaggaaaatgatgaaaaatgattggcatggaggcgccattgtgtcggctttgagccagactgggtctctctttaagccccggaaagcctatctgccccaggagttgctgggaaaggaaggatttgatgccctggatccctttattcccatcctggtttccaactataacccaaaggaatttgaaagttgtattcagtattatttggaaaacaattggcttcaacatgagaaagctcctacagaagaagggaaaaaagagctgctgttcctaagtaacgcgaacccctcgctgctggagcggcactgtgcctacctctaagccaagatcacagcatgtgaggaagacagtggacatctgctttatgctggacccagtaagatgaggaagtcgggcagtacacaggaagaggagccaggcccttgtacctatgggattggacaggactgcagttggctctggacctgcattaaaatgggtttcactgtgaatgcgtgacaataagatattcccttgttcctaaaactttatatcagtttattggatgtggtttttcacatttaagataattatggctcttttcctaaaaaataaaatatctttcta

SEQ ID NO: 138248 - DNA, 2068 bp, Homo sapiens
  misc_feature (1613)..(1613): n is a, c, g, or t
  misc_feature (1622)..(1622): n is a, c, g, or t
  misc_feature (1676)..(1676): n is a, c, g, or t
  misc_feature (1699)..(1699): n is a, c, g, or t
  misc_feature (1705)..(1705): n is a, c, g, or t
  misc_feature (1812)..(1812): n is a, c, g, or t
  misc_feature (2035)..(2035): n is a, c, g, or t
ggcacgagggagagagagagagagagagagagagagagagagagagagagagagagagagagagagagagagagagagagagagagagagagagagagagagagagagtgcaaggatgatgctgaaaggaataacaaggcttatctctaggatccataagttggaccctgggcgttttttacacatggggacccaggctcgccaaagcattgctgctcacctagataaccaggttccagttgagagtccgagagctatttcccgcaccaatgagaatgacccggccaagcatggggatcagcacgagggtcagcactacaacatctccccccaggatttggagactgtatttccccatggccttcctcctcgctttgtgatgcaggtgaagacattcagtgaagcttgcctgatggtaaggaaaccagccctagaacttctgcattacctgaaaaacaccagttttgcttatccagctatacgatatcttctgtatggagagaagggaacaggaaaaaccctaagtctttgccatgttattcatttctgtgcaaaacaggactggctgatactacatattccagatgctcatctttgggtgaaaaattgtcgggatcttctgcagtccagctacaacaaacagcgctttgatcaacctttagaggcttcaacctggctgaagaatttcaaaactacaaatgagcgcttcctgaaccagataaaagttcaagagaagtatgtctggaataagagagaaagcactgagaaagggagtcctctgggagaagtggttgaacagggcataacacgggtgaggaacgccacagatgcagttggaattgtgctgaaagagctaaagaggcaaagttctttgggtatgtttcacctcctagtggccgtggatggaatcaatgctctttggggaagaaccactctgaaaagagaagataaaagcccgattgcccccgaggaattagcacttgttcacaacttgaggaaaatgatgaaaaatgattggcatggaggcgccattgtgtcggctttgagccagactgggtctctctttaagccccggaaagcctatctgccccaggagttgctgggaaaggaaggatttgatgccctggatccctttattcccatcctggtttccaactataacccaaaggaatttgaaagttgtattcagtattatttggaaaacaattggcttcaacatgagaaagctcctacagaagaagggaaaaaagagctgctgttcctaagtaacgcgaacccctcgctgctggagcggcactgtgcctacctctaagccaagatcacagcatgtgaggaagacagtggacatctgctttatgctggacccagtaagatgaggaagtcgggcagtacacaggaagaggagccaggcccttgtacctatgggattggacaggactgcagttggctctggacctgcattaaaatgggtttcactgtgaatgcgtgacaataagatattcccttgttcctaaaactttatatcagtttattggatgtggtttttcacatttaagataattatggctcttttcctaaaaaataaaatatctttctaaaaagagagggaaggngaaaaaggnagaagggaaggaggaaagaagaaaagggaaggaggaggaaaggagggggggggnagggggggggcgggggagccccnaaaaanaattggggcctctttttgccccaaggggggggagtctggggggggtctttctttttggggggggggagaaaaagagcccccgggtcagggggtcctcggcgtggggngttgggggggggggggggggggttttttctcttgggggggggggttgggtgtttcccaaaggggggggagacccgaggaaaaattgtgggcaggggggctaaaggggccaaccgggaggggggccttgtggggtttttctaaagggcgcccccctggagaaagataaaaaaatgcgttgaagggggggggggaccccgcgcggtttttaaaacccgggggtcncccgggagggctttggggggttgggggggaggg

SEQ ID NO: 138249 - DNA, 1633 bp, Homo sapiens
  misc_feature (1601)..(1601): n is a, c, g, or t
  misc_feature (1611)..(1611): n is a, c, g, or t
ggcacgagggagagagagagagagagagagagagagagagagagagagagagagagagagagagagagagagagagagagagagagagagagagagagagagagagagtgcaaggatgatgctgaaaggaataacaaggcttatctctaggatccataagttggaccctgggcgttttttacacatggggacccaggctcgccaaagcattgctgctcacctagataaccaggttccagttgagagtccgagagctatttcccgcaccaatgagaatgacccggccaagcatggggatcagcacgagggtcagcactacaacatctccccccaggatttggagactgtatttccccatggccttcctcctcgctttgtgatgcaggtgaagacattcagtgaagcttgcctgatggtaaggaaaccagccctagaacttctgcattacctgaaaaacaccagttttgcttatccagctatacgatatcttctgtatggagagaagggaacaggaaaaaccctaagtctttgccatgttattcatttctgtgcaaaacaggactggctgatactacatattccagatgctcatctttgggtgaaaaattgtcgggatcttctgcagtccagctacaacaaacagcgctttgatcaacctttagaggcttcaacctggctgaagaatttcaaaactacaaatgagcgcttcctgaaccagataaaagttcaagagaagtatgtctggaataagagagaaagcactgagaaagggagtcctctgggagaagtggttgaacagggcataacacgggtgaggaacgccacagatgcagttggaattgtgctgaaagagctaaagaggcaaagttctttgggtatgtttcacctcctagtggccgtggatggaatcaatgctctttggggaagaaccactctgaaaagagaagataaaagcccgattgcccccgaggaattagcacttgttcacaacttgaggaaaatgatgaaaaatgattggcatggaggcgccattgtgtcggctttgagccagactgggtctctctttaagccccggaaagcctatctgccccaggagttgctgggaaaggaaggatttgatgccctggatccctttattcccatcctggtttccaactataacccaaaggaatttgaaagttgtattcagtattatttggaaaacaattggcttcaacatgagaaagctcctacagaagaagggaaaaaagagctgctgttcctaagtaacgcgaacccctcgctgctggagcggcactgtgcctacctctaagccaagatcacagcatgtgaggaagacagtggacatctgctttatgctggacccagtaagatgaggaagtcgggcagtacacaggaagaggagccaggcccttgtacctatgggattggacaggactgcagttggctctggacctgcattaaaatgggtttcactgtgaatgcgtgacaataagatattcccttgttcctaaaactttatatcagtttattggatgtggtttttcacatttaagataattatggctcttttcctaaaaaataaaatatctttctactcnaaaaaataantcctattaaactcgaagggggg

SEQ ID NO: 138250 - DNA, 1600 bp, Homo sapiens
ggcacgagggagagagagagagagagagagagagagagagagagagagagagagagagagagagagagagagagagagagagagagagagagagagagagagagagagtgcaaggatgatgctgaaaggaataacaaggcttatctctaggatccataagttggaccctgggcgttttttacacatggggacccaggctcgccaaagcattgctgctcacctagataaccaggttccagttgagagtccgagagctatttcccgcaccaatgagaatgacccggccaagcatggggatcagcacgagggtcagcactacaacatctccccccaggatttggagactgtatttccccatggccttcctcctcgctttgtgatgcaggtgaagacattcagtgaagcttgcctgatggtaaggaaaccagccctagaacttctgcattacctgaaaaacaccagttttgcttatccagctatacgatatcttctgtatggagagaagggaacaggaaaaaccctaagtctttgccatgttattcatttctgtgcaaaacaggactggctgatactacatattccagatgctcatctttgggtgaaaaattgtcgggatcttctgcagtccagctacaacaaacagcgctttgatcaacctttagaggcttcaacctggctgaagaatttcaaaactacaaatgagcgcttcctgaaccagataaaagttcaagagaagtatgtctggaataagagagaaagcactgagaaagggagtcctctgggagaagtggttgaacagggcataacacgggtgaggaacgccacagatgcagttggaattgtgctgaaagagctaaagaggcaaagttctttgggtatgtttcacctcctagtggccgtggatggaatcaatgctctttggggaagaaccactctgaaaagagaagataaaagcccgattgcccccgaggaattagcacttgttcacaacttgaggaaaatgatgaaaaatgattggcatggaggcgccattgtgtcggctttgagccagactgggtctctctttaagccccggaaagcctatctgccccaggagttgctgggaaaggaaggatttgatgccctggatccctttattcccatcctggtttccaactataacccaaaggaatttgaaagttgtattcagtattatttggaaaacaattggcttcaacatgagaaagctcctacagaagaagggaaaaaagagctgctgttcctaagtaacgcgaacccctcgctgctggagcggcactgtgcctacctctaagccaagatcacagcatgtgaggaagacagtggacatctgctttatgctggacccagtaagatgaggaagtcgggcagtacacaggaagaggagccaggcccttgtacctatgggattggacaggactgcagttggctctggacctgcattaaaatgggtttcactgtgaatgcgtgacaataagatattcccttgttcctaaaactttatatcagtttattggatgtggtttttcacatttaagatattttattttctaggaaaagagccataattatcttgtcgacc

SEQ ID NO: 138251 - DNA, 1543 bp, Homo sapiens
ggcacgagggagagagagagagagagagagagagagagagagagagagagagagagagagagagagagagagagagagagagagagagagagagagagagagagagagtgcaaggatgatgctgaaaggaataacaaggcttatctctaggatccataagttggaccctgggcgttttttacacatggggacccaggctcgccaaagcattgctgctcacctagataaccaggttccagttgagagtccgagagctatttcccgcaccaatgagaatgacccggccaagcatggggatcagcacgagggtcagcactacaacatctccccccaggatttggagactgtatttccccatggccttcctcctcgctttgtgatgcaggtgaagacattcagtgaagcttgcctgatggtaaggaaaccagccctagaacttctgcattacctgaaaaacaccagttttgcttatccagctatacgatatcttctgtatggagagaagggaacaggaaaaaccctaagtctttgccatgttattcatttctgtgcaaaacaggactggctgatactacatattccagatgctcatctttgggtgaaaaattgtcgggatcttctgcagtccagctacaacaaacagcgctttgatcaacctttagaggcttcaacctggctgaagaatttcaaaactacaaatgagcgcttcctgaaccagataaaagttcaagagaagtatgtctggaataagagagaaagcactgagaaagggagtcctctgggagaagtggttgaacagggcataacacgggtgaggaacgccacagatgcagttggaattgtgctgaaagagctaaagaggcaaagttctttgggtatgtttcacctcctagtggccgtggatggaatcaatgctctttggggaagaaccactctgaaaagagaagataaaagcccgattgcccccgaggaattagcacttgttcacaacttgaggaaaatgatgaaaaatgattggcatggaggcgccattgtgtcggctttgagccagactgggtctctctttaagccccggaaagcctatctgccccaggagttgctgggaaaggaaggatttgatgccctggatccctttattcccatcctggtttccaactataacccaaaggaatttgaaagttgtattcagtattatttggaaaacaattggcttcaacatgagaaagctcctacagaagaagggaaaaaagagctgctgttcctaagtaacgcgaacccctcgctgctggagcggcactgtgcctacctctaagccaagatcacagcatgtgaggaagacagtggacatctgctttatgctggacccagtaagatgaggaagtcgggcagtacacaggaagaggagccaggcccttgtacctatgggattggacaggactgcagttggctctggacctgcattaaaatgggtttcactgtgaatgcgtgacatcacatttaagataattatggctcttttcctaaaaaataaaatatctttcta

SEQ ID NO: 138252 - DNA, 1627 bp, Homo sapiens
ggcacgagggagagagagagagagagagagagagagagagagagagagagagagagagagagagagagagagagagagagagagagagagagagagagagagagagagtgcaaggatgatgctgaaaggaataacaaggcttatctctaggatccataagttggaccctgggcgttttttacacatggggacccaggctcgccaaagcattgctgctcacctagataaccaggttccagttgagagtccgagagctatttcccgcaccaatgagaatgacccggccaagcatggggatcagcacgagggtcagcactacaacatctccccccaggatttggagactgtatttccccatggccttcctcctcgctttgtgatgcaggtgaagacattcagtgaagcttgcctgatggtaaggaaaccagccctagaacttctgcattacctgaaaaacaccagttttgcttatccagctatacgatatcttctgtatggagagaagggaacaggaaaaaccctaagtctttgccatgttattcatttctgtgcaaaacaggactggctgatactacatattccagatgctcatctttgggtgaaaaattgtcgggatcttctgcagtccagctacaacaaacagcgctttgatcaacctttagaggcttcaacctggctgaagaatttcaaaactacaaatgagcgcttcctgaaccagataaaagttcaagagaagtatgtctggaataagagagaaagcactgagaaagggagtcctctgggagaagtggttgaacagggcataacacgggtgaggaacgccacagatgcagttggaattgtgctgaaagagctaaagaggcaaagttctttgggtatgtttcacctcctagtggccgtggatggaatcaatgctctttggggaagaaccactctgaaaagagaagataaaagcccgattgcccccgaggaattagcacttgttcacaacttgaggaaaatgatgaaaaatgattggcatggaggcgccattgtgtcggctttgagccagactgggtctctctttaagccccggaaagcctatctgccccaggagttgctgggaaaggaaggatttgatgccctggatccctttattcccatcctggtttccaactataacccaaaggaatttgaaagttgtattcagtattatttggaaaacaattggcttcaacatgagaaagctcctacagaagaagggaaaaaagagctgctgttcctaagtaacgcgaacccctcgctgctggagcggcactgtgcctacctctaagccaagatcacagcatgtgaggaagacagtggacatctgctttatgctggacccagtaagatgaggaagtcgggcagtacacaggaagaggagccaggcccttgtacctatgggatggctataatggatttggtaatgatggaagccattttggaggtggtggcagctacaatgattttgggaagtaccacgatcagtcttcgaattttggacccctgcagggagggatcagtcgaggcagaagctctgctccctatcccgttggagtcccagatccttgctataaccacgaatccgagtatgactcgcccgtcc

SEQ ID NO: 138253 - DNA, 1745 bp, Homo sapiens
ggcacgagggagagagagagagagagagagagagagagagagagagagagagagagagagagagagagagagagagagagagagagagagagagagagagagagagagtgcaaggatgatgctgaaaggaataacaaggcttatctctaggatccataagttggaccctgggcgttttttacacatggggacccaggctcgccaaagcattgctgctcacctagataaccaggttccagttgagagtccgagagctatttcccgcaccaatgagaatgacccggccaagcatggggatcagcacgagggtcagcactacaacatctccccccaggatttggagactgtatttccccatggccttcctcctcgctttgtgatgcaggtgaagacattcagtgaagcttgcctgatggtaaggaaaccagccctagaacttctgcattacctgaaaaacaccagttttgcttatccagctatacgatatcttctgtatggagagaagggaacaggaaaaaccctaagtctttgccatgttattcatttctgtgcaaaacaggactggctgatactacatattccagatgctcatctttgggtgaaaaattgtcgggatcttctgcagtccagctacaacaaacagcgctttgatcaacctttagaggcttcaacctggctgaagaatttcaaaactacaaatgagcgcttcctgaaccagataaaagttcaagagaagtatgtctggaataagagagaaagcactgagaaagggagtcctctgggagaagtggttgaacagggcataacacgggtgaggaacgccacagatgcagttggaattgtgctgaaagagctaaagaggcaaagttctttgggtatgtttcacctcctagtggccgtggatggaatcaatgctctttggggaagaaccactctgaaaagagaagataaaagcccgattgcccccgaggaattagcacttgttcacaacttgaggaaaatgatgaaaaatgattggcatggaggcgccattgtgtcggctttgagccagactgggtctctctttaagccccggaaagcctatctgccccaggagttgctgggaaaggaaggatttgatgccctggatccctttattcccatcctggtttccaactataacccaaaggaatttgaaagttgtattcagtattatttggaaaacaattggcttcaacatgagaaagctcctacagaagaagggaaaaaagagctgctgttcctaagtaacgcgaacccctcgctgctggagcggcactgtgcctacctctaagccaagatcacagcatgtcagaagagatcaattctacagaaatttccagtggttctgttgaggctttatggaattcagcatgtcaaaattcacagctggctgggcacagtggctcatgcctgtaatcccagcactttggaagcccaaggcgggcagactgcttgagttcaggagtttgcaaccagcctgggcaacatggtgaaaacctgtctctactaaaaatacaaaaattagccgggcacggtggcatgcgcctgtaatccaagctacttgggaggctgaggcaggagaattgcttcaacttgggaggcggatgttgcagtgagccaaaattgcaccactgcactccagcctgggcagcagagcaagactccgtctcaaaataaataaataaataaataaataaataaataaataaatgtatactgtactg

SEQ ID NO: 138254 - DNA, 1269 bp, Homo sapiens
ggcacgagggagagagagagagagagagagagagagagagagagagagagagagagagagagagagagagagagagagagagagagagagagagagagagagagagagtgcaaggatgatgctgaaaggaataacaaggcttatctctaggatccataagttggaccctgggcgttttttacacatggggacccaggctcgccaaagcattgctgctcacctagataaccaggttccagttgagagtccgagagctatttcccgcaccaatgagaatgacccggccaagcatggggatcagcacgagggtcagcactacaacatctccccccaggatttggagactgtatttccccatggccttcctcctcgctttgtgatgcaggtgaagacattcagtgaagcttgcctgatggtaaggaaaccagccctagaacttctgcattacctgaaaaacaccagttttgcttatccagctatacgatatcttctgtatggagagaagggaacaggaaaaaccctaagtctttgccatgttattcatttctgtgcaaaacaggactggctgatactacatattccagatgctcatctttgggtgaaaaattgtcgggatcttctgcagtccagctacaacaaacagcgctttgatcaacctttagaggcttcaacctggctgaagaatttcaaaactacaaatgagcgcttcctgaaccagataaaagttcaagagaagtatgtctggaataagagagaaagcactgagaaagggagtcctctgggagaagtggttgaacagggcataacacgggtgaggaacgccacagatgcagttggaattgtgctgaaagagctaaagaggcaaagttctttgggtatgtttcacctcctagtggccgtggatggaatcaatgctctttggggaagaaccactctgaaaagagaagataaaagcccgattgcccccgaggaattagcacttgttcacaacttgaggaaaatgatgaaaaatgattggcatggaggcgccattgtgtcggctttgagccagactgggtctctctttaagccccggaaagcctatctgccccaggagttgctgggaaaggaaggatttgatgccctggatccctttattcccatcctggtttccaactataacccaaaggaatttgaaagttgtattcagtattatttggaaaacaattggcttcaacatgagaaagatagctctttctggatatcaagtgttacacaaggaacagctat

SEQ ID NO: 138255 - DNA, 1479 bp, Homo sapiens
ggcacgagggagagagagagagagagagagagagagagagagagagagagagagagagagagagagagagagagagagagagagagagagagagagagagagagagagtgcaaggatgatgctgaaaggaataacaaggcttatctctaggatccataagttggaccctgggcgttttttacacatggggacccaggctcgccaaagcattgctgctcacctagataaccaggttccagttgagagtccgagagctatttcccgcaccaatgagaatgacccggccaagcatggggatcagcacgagggtcagcactacaacatctccccccaggatttggagactgtatttccccatggccttcctcctcgctttgtgatgcaggtgaagacattcagtgaagcttgcctgatggtaaggaaaccagccctagaacttctgcattacctgaaaaacaccagttttgcttatccagctatacgatatcttctgtatggagagaagggaacaggaaaaaccctaagtctttgccatgttattcatttctgtgcaaaacaggactggctgatactacatattccagatgctcatctttgggtgaaaaattgtcgggatcttctgcagtccagctacaacaaacagcgctttgatcaacctttagaggcttcaacctggctgaagaatttcaaaactacaaatgagcgcttcctgaaccagataaaagttcaagagaagtatgtctggaataagagagaaagcactgagaaagggagtcctctgggagaagtggttgaacagggcataacacgggtgaggaacgccacagatgcagttggaattgtgctgaaagagctaaagaggcaaagttctttgggtatgtttcacctcctagtggccgtggatggaatcaatgctctttggggaagaaccactctgaaaagagaagataaaagcccgattgcccccgaggaattagcacttgttcacaacttgaggaaaatgatgaaaaatgattggcatggaggcgccattgtgtcggctttgagccagactgggtctctctttaagccccggaaagcctatctgccccaggagttgctgggaaagctcctacagaagaagggaaaaaagagctgctgttcctaagtaacgcgaacccctcgctgctggagcggcactgtgcctacctctaagccaagatcacagcatgtgaggaagacagtggacatctgctttatgctggacccagtaagatgaggaagtcgggcagtacacaggaagaggagccaggcccttgtacctatgggattggacaggactgcagttggctctggacctgcattaaaatgggtttcactgtgaatgcgtgacaataagatattcccttgttcctaaaactttatatcagtttattggatgtggtttttcacatttaagataattatggctcttttcctaaaaaataaaatatctttcta

SEQ ID NO: 138256 - DNA, 1276 bp, Homo sapiens
ggcacgagggagagagagagagagagagagagagagagagagagagagagagagagagagagagagagagagagagagagagagagagagagagagagagagagagagtgcaaggatgatgctgaaaggaataacaaggcttatctctaggatccataagttggaccctgggcgttttttacacatggggacccaggctcgccaaagcattgctgctcacctagataaccaggttccagttgagagtccgagagctatttcccgcaccaatgagaatgacccggccaagcatggggatcagcacgagggtcagcactacaacatctccccccaggatttggagactgtatttccccatggccttcctcctcgctttgtgatgcaggtgaagacattcagtgaagcttgcctgatggtaaggaaaccagccctagaacttctgcattacctgaaaaacaccagttttgcttatccagctatacgatatcttctgtatggagagaagggaacaggaaaaaccctaagtctttgccatgttattcatttctgtgcaaaacaggactggctgatactacatattccagatgctcatctttgggtgaaaaattgtcgggatcttctgcagtccagctacaacaaacagcgctttgatcaacctttagaggcttcaacctggctgaagaatttcaaaactacaaatgagcgcttcctgaaccagataaaagttcaagagaagtatgtctggaataagagagaaagcactgagaaagggagtcctctgggagaagtggttgaacagggcataacacgggtgaggaacgccacagatgcagttggaattgtgctgaaagagctaaagaggcaaagttctttgggtatgtttcacctcctagtggccgtggatggaatcaatgctctttggggaagaaccactctgaaaagagaagataaaagcccgattgcccccgaggaattagcacttgttcacaacttgaggaaaatgatgaaaaatgattggcatggaggcgccattgtgtcggctttgagccagactgggtctctctttaagccccggaaagcctatctgccccaggagttgctgggaaaggtcaagtcaaaggaaaatttgtttctacttagattgttatcctgtttaaagaaaaatatttttattaatctatgtattttgacataatttcagacttagagaaaaatcatattcctgtatgcccttcccctggattcctaaaatattaacttgatcatcattgcttta

SEQ ID NO: 138257 - DNA, 1406 bp, Homo sapiens
ggcacgagggagagagagagagagagagagagagagagagagagagagagagagagagagagagagagagagagagagagagagagagagagagagagagagagagagtgcaaggatgatgctgaaaggaataacaaggcttatctctaggatccataagttggaccctgggcgttttttacacatggggacccaggctcgccaaagcattgctgctcacctagataaccaggttccagttgagagtccgagagctatttcccgcaccaatgagaatgacccggccaagcatggggatcagcacgagggtcagcactacaacatctccccccaggatttggagactgtatttccccatggccttcctcctcgctttgtgatgcaggtgaagacattcagtgaagcttgcctgatggtaaggaaaccagccctagaacttctgcattacctgaaaaacaccagttttgcttatccagctatacgatatcttctgtatggagagaagggaacaggaaaaaccctaagtctttgccatgttattcatttctgtgcaaaacaggactggctgatactacatattccagatgctcatctttgggtgaaaaattgtcgggatcttctgcagtccagctacaacaaacagcgctttgatcaacctttagaggcttcaacctggctgaagaatttcaaaactacaaatgagcgcttcctgaaccagataaaagttcaagagaagtatgtctggaataagagagaaagcactgagaaagggagtcctctgggagaagtggttgaacagggcataacacgggtgaggaacgccacagatgcagttggaattgtgctgaaagagctaaagaggcaaagttctttgggtatgtttcacctcctagtggccgtggatggaatcaatgctctttggggaagaaccactctgaaaagagaagataaaagcccgattgcccccgaggaattagcacttgttcacaacttgaggaaaatgatgaaaaatgattgggtaagtgcatatgatacctcacacatttcagaaagaaatgtattatcattttaaacatgttctactatttcattgctaatactttacagtctctaattttatggacagccatttaggtatacctaaatggctgtgtatggttatgggttctaatttctctacaaaatcaaccagccatgatggagtaaagaaagttagaaagagtaaaatatggtcatataattttttggaaacacttccaagtacaaaaagcagcatgctaatttcacagtgcaaagaaagctcataataacaatagacttttaaaattacaaataaaatctgttacatcaaggatatttttaaggctacccgtgtgcattgtcactatgtagacaatgaagaggaa

SEQ ID NO: 138258 - DNA, 1382 bp, Homo sapiens
ggcacgagggagagagagagagagagagagagagagagagagagagagagagagagagagagagagagagagagagagagagagagagagagagagagagagagagagtgcaaggatgatgctgaaaggaataacaaggcttatctctaggatccataagttggaccctgggcgttttttacacatggggacccaggctcgccaaagcattgctgctcacctagataaccaggttccagttgagagtccgagagctatttcccgcaccaatgagaatgacccggccaagcatggggatcagcacgagggtcagcactacaacatctccccccaggatttggagactgtatttccccatggccttcctcctcgctttgtgatgcaggtgaagacattcagtgaagcttgcctgatggtaaggaaaccagccctagaacttctgcattacctgaaaaacaccagttttgcttatccagctatacgatatcttctgtatggagagaagggaacaggaaaaaccctaagtctttgccatgttattcatttctgtgcaaaacaggactggctgatactacatattccagatgctcatctttgggtgaaaaattgtcgggatcttctgcagtccagctacaacaaacagcgctttgatcaacctttagaggcttcaacctggctgaagaatttcaaaactacaaatgagcgcttcctgaaccaggtgactagactcccagaagttgagtgctaggtagtccttacatggattctttgtgccctgagtaccaatagactatggagaactgatactggagttggaataactgtatcatttttaatttctttcatacgttttgctcacagtggactcataacttgaaactcatttatccatgtgaaataaataggcaacagtaagttgttcccattttgtgggtagcaaagtgaaatccagttgattcattgacttttcaaggtacagcctccaatccctcgcaagcacatttccaactacatgattttctccagacaatatctttttagggaaccagaaatgtattggaaaaattcttctttaccctggtgattcttagataccctgtctagaccaggggccttcaactctggatataaagcagagtcacctaagagcttgttaaaaatgcagatgccagagtctcattctggacattttcatcagaatcccttatgtatgtttattcaaggctccaagcagaaatggattagaaagcattcactttggcctcccaaagtgctgggattacaggcatgagccattgcacccggcctcagctttactttcctaacagggatctgatagctaaaggaaaagcctttgccagtcacgatggctcaaacctata

SEQ ID NO: 138259 - DNA, 695 bp, Homo sapiens
ggcacgagggagagagagagagagagagagagagagagagagagagagagagagagagagagagagagagagagagagagagagagagagagagagagagagagagagtgcaaggatgatgctgaaaggaataacaaggcttatctctaggatccataagttggaccctgggcgttttttacacatggggacccaggctcgccaaagcattgctgctcacctagataaccaggttccagttgagagtccgagagctatttcccgcaccaatgagaatgacccggccaagcatggggatcagcacgagggtcagcactacaacatctccccccaggatttggagactgtatttccccatggccttcctcctcgctttgtgatgcaggtgaagacattcagtgaagcttgcctgatggtaaggaaaccagccctagaacttctgcattacctgaaaaacaccagttttgcttatccagctatacgatatcttctgtatggagagaagggaacaggaaaaaccctaagtctttgccatgttattcatttctgtgcaaaacaggactggctgatactacatattccagatgggtaagaacttcctgttgtttcttctgtctgttaggtttagttatcctgttactgtggtagccttgcagctttaattttcttttcttttcttttcttttttttttttt

SEQ ID NO: 138260 - DNA, 329 bp, Homo sapiens
gcattgctgctcacctagataaccaggttccagttgagagtccgagagctatttcccgcaccaatgagaatgacccggtgagttactaatatgtatatggggtttctcagggcttatgatttgtgttcctgtcctcattttgcataggaaaactgaaactgaaagaagcttagtagatttgcatttactcagatagtgcacctgagatagcactctggaacccagattctccctgtccctgtctgatactgtggtaacatacactggccagctcggtctgtatcagttcccatgtaatctctactagtgaattcacctagttccacgga

SEQ ID NO: 138261 - DNA, 320 bp, Homo sapiens
ctggtggcgcgcgcctatagtcccagctactcaggaggctgaggcaggagaatcgcttgaacccaggaggtggaggttgcagtgagcccaaatcgcgccactgcactccagcctgggcgacagagcgagactctgtcaaaaaaaaaaaaaaattgttgtcaattgtttcgggagaacatctaggaaaggcacgtgatgatctcttctctctttctgtccgatatgcagattgcccccgaggaattagcacttgttcacaacttgaggaaaatgatgaaaaatgattgggtaagtgcatatgatacctcacacatttcaga

SEQ ID NO: 138262 - DNA, 747 bp, Homo sapiens
cagaagttgagtgctaggtagtccttacatggattctttgtgccctgagtaccaatagactatggagaactgatactggagttggaataactgtatcatttttaatttctttcatacgttttgctcacagtggactcataacttgaaactcatttatccatgtgaaataaataggcaacagtaagttgttcccattttgtgggtagcaaagtgaaatccagttgattcattgacttttcaaggtacagcctccaatccctcgcaagcacatttccaactacatgattttctccagacaatatctttttagggaaccagaaatgtattggaaaaattcttctttaccctggtgattcttagataccctgtctagaccaggggccttcaactctggatataaagcagagtcacctaagagcttgttaaaaatgcagatgccagagtctcattctggacattttcatcagaatcccttatgtatgtttattcaaggctccaagcagaaatggattagaaagcattcactttggtcaggcacaggggctcacacctgtaatgtcagcactttgggaggccaaggcaggcagatcacctgaggtcaggagttcaagatgagcctggccaacatggtgaaatcccatctctactaaaaatacaaatattagccgggtgtggtggtgcacgcctgtaggcccatctattcaggaggctgaggcaggggaatctcttgaacctgggaatcagagg

SEQ ID NO: 138263 - DNA, 2095 bp, Homo sapiens
ggcacgagggagagagagagagagagagagagagagagagagagagagagagagagagagagagagagagagagagagagagagagagagagagagagagagagagagtgcaaggatgatgctgaaaggaataacaaggcttatctctaggatccataagttggaccctgggcgttttttacacatggggacccaggctcgccaaagcattgctgctcacctagataaccaggttccagttgagagtccgagagctatttcccgcaccaatgagaatgacccggccaagcatggggatcagcacgagggtcagcactacaacatctccccccaggatttggagactgtatttccccatggccttcctcctcgctttgtgatgcaggtgaagacattcagtgaagcttgcctgatggtaaggaaaccagccctagaacttctgcattacctgaaaaacaccagttttgcttatccagctatacgatatcttctgtatggagagaagggaacaggaaaaaccctaagtctttgccatgttattcatttctgtgcaaaacaggactggctgatactacatattccagatgctcatctttgggtgaaaaattgtcgggatcttctgcagtccagctacaacaaacagcgctttgatcaacctttagaggcttcaacctggctgaagaatttcaaaactacaaatgagcgcttcctgaaccagataaaagttcaagagaagtatgtctggaataagagagaaagcactgagaaagggagtcctctgggagaagtggttgaacagggcataacacgggtgaggaacgccacagatgcagttggaattgtgctgaaagagctaaagaggcaaagttctttgggtatgtttcacctcctagtggccgtggatggaatcaatgctctttggggaagaaccactctgaaaagagaagataaaagcccgattgcccccgaggaattagcacttgttcacaacttgaggaaaatgatgaaaaatgattggcatggaggcgccattgtgtcggctttgagccagactgggtctctctttaagccccggaaagcctatctgccccaggagttgctgggaaaggaaggatttgatgccctggatccctttattcccatcctggtttccaactataacccaaaggaatttgaaagttgtattcagtattatttggaaaacaattggcttcaacatgagaaagctcctacagaagaagggaaaaaagagctgctgttcctaagtaacgcgaacccctcgctgctggagcggcactgtgcctacctctaagccaagatcacagcatgtgaggaagacagtggacatctgctttatgctggacccagtaagatgaggaagtcgggcagtacacaggaagaggagccaggcccttgtacctatgggattggacaggactgcagttggctctggacctgcattaaaatgggtttcactgtgaatgcgtgacaataagatattcccttgttcctaaaactttatatcagtttattggatgtggtttttcacatttaagataattatggctcttttcctaaaaaataaaatatctttctaaagtgttgtgttagattaataatatggaaggagtctttagattggccaaattgcatttctctgatattcctcttgttgcaggtcagaagagatcaattctacagaaatttccagtggttctgttgaggctttatggaattcagcatgtcaaaattcacagctggctgggcacagtggctcatgcctgtaatcccagcactttggaagcccaaggcgggcagactgcttgagttcaggagtttgcaaccagcctgggcaacatggtgaaaacctgtctctactaaaaatacaaaaattagccgggcacggtggcatgcgcctgtaatccaagctacttgggaggctgaggcaggagaattgcttcaacttgggaggcggatgttgcagtgagccaaaattgcaccactgcactccagcctgggcagcagagcaagactccgtctcaaaataaataaataaataaataaataaataaataaataaatgtatactgtactg

SEQ ID NO: 138264 - DNA, 1545 bp, Homo sapiens
ggcacgagggagagagagagagagagagagagagagagagagagagagagagagagagagagagagagagagagagagagagagagagagagagagagagagagagagtgcaaggatgatgctgaaaggaataacaaggcttatctctaggatccataagttggaccctgggcgttttttacacatggggacccaggctcgccaaagcattgctgctcacctagataaccaggttccagttgagagtccgagagctatttcccgcaccaatgagaatgacccggccaagcatggggatcagcacgagggtcagcactacaacatctccccccaggatttggagactgtatttccccatggccttcctcctcgctttgtgatgcaggtgaagacattcagtgaagcttgcctgatggtaaggaaaccagccctagaacttctgcattacctgaaaaacaccagttttgcttatccagctatacgatatcttctgtatggagagaagggaacaggaaaaaccctaagtctttgccatgttattcatttctgtgcaaaacaggactggctgatactacatattccagatgctcatctttgggtgaaaaattgtcgggatcttctgcagtccagctacaacaaacagcgctttgatcaacctttagaggcttcaacctggctgaagaatttcaaaactacaaatgagcgcttcctgaaccagggagtcctctgggagaagtggttgaacagggcataacacgggtgaggaacgccacagatgcagttggaattgtgctgaaagagctaaagaggcaaagttctttgggtatgtttcacctcctagtggccgtggatggaatcaatgctctttggggaagaaccactctgaaaagagaagataaaagcccgattgcccccgaggaattagcacttgttcacaacttgaggaaaatgatgaaaaatgattggcatggaggcgccattgtgtcggctttgagccagactgggtctctctttaagccccggaaagcctatctgccccaggagttgctgggaaaggaaggatttgatgccctggatccctttattcccatcctggtttccaactataacccaaaggaatttgaaagttgtattcagtattatttggaaaacaattggcttcaacatgagaaagctcctacagaagaagggaaaaaagagctgctgttcctaagtaacgcgaacccctcgctgctggagcggcactgtgcctacctctaagccaagatcacagcatgtgaggaagacagtggacatctgctttatgctggacccagtaagatgaggaagtcgggcagtacacaggaagaggagccaggcccttgtacctatgggattggacaggactgcagttggctctggacctgcattaaaatgggtttcactgtgaatgcgtgacaataagatattcccttgttcctaaaactttatatcagtttattggatgtggtttttcacatttaagataattatggctcttttcctaaaaaataaaatatctttcta

SEQ ID NO: 138265 - DNA, 1516 bp, Homo sapiens
ggcacgagggagagagagagagagagagagagagagagagagagagagagagagagagagagagagagagagagagagagagagagagagagagagagagagagagagtgcaaggatgatgctgaaaggaataacaaggcttatctctaggatccataagttggaccctgggcgttttttacacatggggacccaggctcgccaaagcattgctgctcacctagataaccaggttccagttgagagtccgagagctatttcccgcaccaatgagaatgacccggccaagcatggggatcagcacgagggtcagcactacaacatctccccccaggatttggagactgtatttccccatggccttcctcctcgctttgtgatgcaggtgaagacattcagtgaagcttgcctgatggtaaggaaaccagccctagaacttctgcattacctgaaaaacaccagttttgcttatccagctatacgatatcttctgtatggagagaagggaacaggaaaaaccctaagtctttgccatgttattcatttctgtgcaaaacaggactggctgatactacatattccagatgctcatctttgggtgaaaaattgtcgggatcttctgcagtccagctacaacaaacagcgctttgatcaacctttagaggcttcaacctggctgaagaatttcaaaactacaaatgagcgcttcctgaaccagggcataacacgggtgaggaacgccacagatgcagttggaattgtgctgaaagagctaaagaggcaaagttctttgggtatgtttcacctcctagtggccgtggatggaatcaatgctctttggggaagaaccactctgaaaagagaagataaaagcccgattgcccccgaggaattagcacttgttcacaacttgaggaaaatgatgaaaaatgattggcatggaggcgccattgtgtcggctttgagccagactgggtctctctttaagccccggaaagcctatctgccccaggagttgctgggaaaggaaggatttgatgccctggatccctttattcccatcctggtttccaactataacccaaaggaatttgaaagttgtattcagtattatttggaaaacaattggcttcaacatgagaaagctcctacagaagaagggaaaaaagagctgctgttcctaagtaacgcgaacccctcgctgctggagcggcactgtgcctacctctaagccaagatcacagcatgtgaggaagacagtggacatctgctttatgctggacccagtaagatgaggaagtcgggcagtacacaggaagaggagccaggcccttgtacctatgggattggacaggactgcagttggctctggacctgcattaaaatgggtttcactgtgaatgcgtgacaataagatattcccttgttcctaaaactttatatcagtttattggatgtggtttttcacatttaagataattatggctcttttcctaaaaaataaaatatctttcta

SEQ ID NO: 138266 - DNA, 1869 bp, Homo sapiens
ggcacgagggagagagagagagagagagagagagagagagagagagagagagagagagagagagagagagagagagagagagagagagagagagagagagagagagagtgcaaggatgatgctgaaaggaataacaaggcttatctctaggatccataagttggaccctgggcgttttttacacatggggacccaggctcgccaaagcattgctgctcacctagataaccaggttccagttgagagtccgagagctatttcccgcaccaatgagaatgacccggccaagcatggggatcagcacgagggtcagcactacaacatctccccccaggatttggagactgtatttccccatggccttcctcctcgctttgtgatgcaggtgaagacattcagtgaagcttgcctgatggtaaggaaaccagccctagaacttctgcattacctgaaaaacaccagttttgcttatccagctatacgatatcttctgtatggagagaagggaacaggaaaaaccctaagtctttgccatgttattcatttctgtgcaaaacaggactggctgatactacatattccagatgctcatctttgggtgaaaaattgtcgggatcttctgcagtccagctacaacaaacagcgctttgatcaacctttagaggcttcaacctggctgaagaatttcaaaactacaaatgagcgcttcctgaaccagataaaagttcaagagaagtatgtctggaataagagagaaagcactgagaaagggagtcctctgggagaagtggttgaacagggcataacacgggtgaggaacgccacagatgcagttggaattgtgctgaaagagctaaagaggcaaagttctttgggtatgtttcacctcctagtggccgtggatggaatcaatgctctttggggaagaaccactctgaaaagagaagataaaagcccgattgcccccgaggaattagcacttgttcacaacttgaggaaaatgatgaaaaatgattggcatggaggcgccattgtgtcggctttgagccagactgggtctctctttaagccccggaaagcctatctgccccaggagttgctgggaaaggaaggatttgatgccctggatccctttattcccatcctggtttccaactataacccaaaggaatttgaaagttgtattcagtattatttggaaaacaattggcttcaacatgagaaagctcctacagaagaagggaaaaaagagctgctgttcctaagtaacgcgaacccctcgctgctggagcggcactgtgcctacctctaagccaagatcacagcatgtgaggaagacagtggacatctgctttatgctggacccagtaagatgaggaagtcgggcagtacacaggaagaggagccaggcccttgtacctatgggattggacaggactgcagttggctctggacctgcattaaaatgggtttcactgtgaatgcgtgacaataagatattcccttgttcctaaaactttatatcagtttattggatgtggtttttcacatttaagataattatggctcttttcctaaaaaataaaatatctttctaaaaaaaaaaaacaaaaaaaaaacaagacgttttgcgcccgactcgaggcccttggaagaagagttttgaaaaaacaatcgttagggcgcagaaggccccgagtagggcaagcgacacgggtcgcaacgcgtgtgcccagagaaacaccggcaagcaagggcgcgagatccacaaataaaaagcgccggggaaaggaggtctgacaaaatccagaggggtacggagcatagggatcaccgaggggtcagcgagcacaatcagtgccgcacggg

SEQ ID NO: 138267 - DNA, 2125 bp, Homo sapiens
ggcacgagggagagagagagagagagagagagagagagagagagagagagagagagagagagagagagagagagagagagagagagagagagagagagagagagagagtgcaaggatgatgctgaaaggaataacaaggcttatctctaggatccataagttggaccctgggcgttttttacacatggggacccaggctcgccaaagcattgctgctcacctagataaccaggttccagttgagagtccgagagctatttcccgcaccaatgagaatgacccggccaagcatggggatcagcacgagggtcagcactacaacatctccccccaggatttggagactgtatttccccatggccttcctcctcgctttgtgatgcaggtgaagacattcagtgaagcttgcctgatggtaaggaaaccagccctagaacttctgcattacctgaaaaacaccagttttgcttatccagctatacgatatcttctgtatggagagaagggaacaggaaaaaccctaagtctttgccatgttattcatttctgtgcaaaacaggactggctgatactacatattccagatgctcatctttgggtgaaaaattgtcgggatcttctgcagtccagctacaacaaacagcgctttgatcaacctttagaggcttcaacctggctgaagaatttcaaaactacaaatgagcgcttcctgaaccagataaaagttcaagagaagtatgtctggaataagagagaaagcactgagaaagggagtcctctgggagaagtggttgaacagggcataacacgggtgaggaacgccacagatgcagttggaattgtgctgaaagagctaaagaggcaaagttctttgggtatgtttcacctcctagtggccgtggatggaatcaatgctctttggggaagaaccactctgaaaagagaagataaaagcccgattgcccccgaggaattagcacttgttcacaacttgaggaaaatgatgaaaaatgattgggtaagtgcatatgatacctcacacatttcagaaagaaatgtattatcattttaaacatgttctactatttcattgctaatactttacagtctctaattttatggacagtaagttattatgtcttatttaattcctgtatctgtaccaagttagaaataaagtctgaattaaaatctatatatatgtggtttataatctttccaaagtaagtttattcaaaaccattttatttaaatattggcctaattttattttgcttgcagacatttaaagtgtttttgtatctccttaccgtctttggaaaagagtttgagacccacaaatatgtcatggtaaatttaaaatcaggtagcagtttattgtcagagccaaatctggaataaccaatttagttgccatttaactgtgctagaccacacttttgtaacactgtatgcccaagaaagaaaaaaaaaatctacagatgattaatgcagttttccatcctttttaactttttccagttcagccttttctcttttctttcagcatggaggcgccattgtgtcggctttgagccagactgggtctctctttaagccccggaaagcctatctgccccaggagttgctgggaaaggaaggatttgatgccctggatccctttattcccatcctggtttccaactataacccaaaggaatttgaaagttgtattcagtattatttggaaaacaattggcttcaacatgagaaagctcctacagaagaagggaaaaaagagctgctgttcctaagtaacgcgaacccctcgctgctggagcggcactgtgcctacctctaagccaagatcacagcatgtgaggaagacagtggacatctgctttatgctggacccagtaagatgaggaagtcgggcagtacacaggaagaggagccaggcccttgtacctatgggattggacaggactgcagttggctctggacctgcattaaaatgggtttcactgtgaatgcgtgacaataagatattcccttgttcctaaaactttatatcagtttattggatgtggtttttcacatttaagataattatggctcttttcctaaaaaataaaatatctttcta

SEQ ID NO: 138268 - DNA, 1712 bp, Homo sapiens
ggcacgagggagagagagagagagagagagagagagagagagagagagagagagagagagagagagagagagagagagagagagagagagagagagagagagagagagtgcaaggatgatgctgaaaggaataacaaggcttatctctaggatccataagttggaccctgggcgttttttacacatggggacccaggctcgccaaagcattgctgctcacctagataaccaggttccagttgagagtccgagagctatttcccgcaccaatgagaatgacccggccaagcatggggatcagcacgagggtcagcactacaacatctccccccaggatttggagactgtatttccccatggccttcctcctcgctttgtgatgcaggtgaagacattcagtgaagcttgcctgatggtaaggaaaccagccctagaacttctgcattacctgaaaaacaccagttttgcttatccagctatacgatatcttctgtatggagagaagggaacaggaaaaaccctaagtctttgccatgttattcatttctgtgcaaaacaggactggctgatactacatattccagatgctcatctttgggtgaaaaattgtcgggatcttctgcagtccagctacaacaaacagcgctttgatcaacctttagaggcttcaacctggctgaagaatttcaaaactacaaatgagcgcttcctgaaccagataaaagttcaagagaagtatgtctggaataagagagaaagcactgagaaagggagtcctctgggagaagtggttgaacagggcataacacgggtgaggaacgccacagatgcagttggaattgtgctgaaagagctaaagaggcaaagttctttgggtatgtttcacctcctagtggccgtggatggaatcaatgctctttggggaagaaccactctgaaaagagaagataaaagcccgattgcccccgaggaattagcacttgttcacaacttgaggaaaatgatgaaaaatgattggcatggaggcgccattgtgtcggctttgagccagactgggtctctctttaagccccggaaagcctatctgccccaggagttgctgggaaaggaaggatttgatgccctggatccctttattcccatcctggtttccaactataacccaaaggaatttgaaagttgtattcagtattatttggaaaacaattggcttcaacatgagaaagctcctacagaagaagggaaaaaagagctgctgttcctaagtaacgcgaacccctcgctgctggagcggcactgtgcctacctctaagccaagatcacagcatgtgaggaagacagtggacatctgctttatgctggacccagtaagatgaggaagtcgggcagtacacaggaagaggagccaggcccttaaaatgggtttcactgtgaatgcgtgacaataagatattcccttgttcctaaaactttatatcagtttattggatgtggtttttcacatttaagataattatggctcttttcctaaaaaataaaatatctttctaccaaaaaaaaaaaaaaaaaaaaaaaagttgggggctcggccagaaaattttaaacatggggggggggggccagaagtaggaatggccaggggtcaagaaccgggtgaaggggggttccacaaaaaagcggggacggggttgaaacaggggtgggcctggtaa

SEQ ID NO: 138269 - DNA, 1784 bp, Homo sapiens
ggcacgagggagagagagagagagagagagagagagagagagagagagagagagagagagagagagagagagagagagagagagagagagagagagagagagagagagtgcaaggatgatgctgaaaggaataacaaggcttatctctaggatccataagttggaccctgggcgttttttacacatggggacccaggctcgccaaagcattgctgctcacctagataaccaggttccagttgagagtccgagagctatttcccgcaccaatgagaatgacccggccaagcatggggatcagcacgagggtcagcactacaacatctccccccaggatttggagactgtatttccccatggccttcctcctcgctttgtgatgcaggtgaagacattcagtgaagcttgcctgatggtaaggaaaccagccctagaacttctgcattacctgaaaaacaccagttttgcttatccagctatacgatatcttctgtatggagagaagggaacaggaaaaaccctaagtctttgccatgttattcatttctgtgcaaaacaggactggctgatactacatattccagatgctcatctttgggtgaaaaattgtcgggatcttctgcagtccagctacaacaaacagcgctttgatcaacctttagaggcttcaacctggctgaagaatttcaaaactacaaatgagcgcttcctgaaccagataaaagttcaagagaagtatgtctggaataagagagaaagcactgagaaagggagtcctctgggagaagtggttgaacagggcataacacgggtgaggaacgccacagatgcagttggaattgtgctgaaagagctaaagaggcaaagttctttgggtatgtttcacctcctagtggccgtggatggaatcaatgctctttggggaagaaccactctgaaaagagaagataaaagcccgattgcccccgaggaattagcacttgttcacaacttgaggaaaatgatgaaaaatgattggcatggaggcgccattgtgtcggctttgagccagactgggtctctctttaagccccggaaagcctatctgccccaggagttgctgggaaaggaaggatttgatgccctggatccctttattcccatcctggtttccaactataacccaaaggaatttgaaagttgtattcagtattatttggaaaacaattggcttcaacatgagaaagctcctacagaagaagggaaaaaagagctgctgttcctaagtaacgcgaacccctcgctgctggagcggcactgtgcctacctctaagccaagatcacagcatgtgaggaagacagtggacatctgctttatgctggacccagtcagaagagatcaattctacagaaatttccagtggttctgttgaggctttatggaattcagcatgtcaaaattcacagctggctgggcacagtggctcatgcctgtaatcccagcactttggaagcccaaggcgggcagactgcttgagttcaggagtttgcaaccagcctgggcaacatggtgaaaacctgtctctactaaaaatacaaaaattagccgggcacggtggcatgcgcctgtaatccaagctacttgggaggctgaggcaggagaattgcttcaacttgggaggcggatgttgcagtgagccaaaattgcaccactgcactccagcctgggcagcagagcaagactccgtctcaaaataaataaataaataaataaataaataaataaataaatgtatactgtactg

SEQ ID NO: 138270 - DNA, 1256 bp, Homo sapiens
ggcacgagggagagagagagagagagagagagagagagagagagagagagagagagagagagagagagagagagagagagagagagagagagagagagagagagagagtgcaaggatgatgctgaaaggaataacaaggcttatctctaggatccataagttggaccctgggcgttttttacacatggggacccaggctcgccaaagcattgctgctcacctagataaccaggttccagttgagagtccgagagctatttcccgcaccaatgagaatgacccggccaagcatggggatcagcacgagggtcagcactacaacatctccccccaggatttggagactgtatttccccatggccttcctcctcgctttgtgatgcaggtgaagacattcagtgaagcttgcctgatggtaaggaaaccagccctagaacttctgcattacctgaaaaacaccagttttgcttatccagctatacgatatcttctgtatggagagaagggaacaggaaaaaccctaagtctttgccatgttattcatttctgtgcaaaacaggactggctgatactacatattccagatgctcatctttgggtgaaaaattgtcgggatcttctgcagtccagctacaacaaacagcgctttgatcaacctttagaggcttcaacctggctgaagaatttcaaaactacaaatgagcgcttcctgaaccagataaaagttcaagagaagtatgtctggaataagagagaaagcactgagaaagggagtcctctgggagaagtggttgaacagggcataacacgggtgaggaacgccacagatgcagttggaattgtgctgaaagagctaaagaggcaaagttctttgggtatgtttcacctcctagtggccgtggatggaatcaatgctctttggggaagaaccactctgaaaagagaagataaaagcccgattgcccccgaggaattagcacttgttcacaacttgaggaaaatgatgaaaaatgattggcatggaggcgccattgtgtcggctttgagccagactgggtctctctttaagccccggaaagcctatctgccccaggagttgctgggaaaggaaggatttgatgccctggatccctttattcccatcctggtttccaactataacccaaaggaatttgaaagttgtattcagtattatttggaaaacaattggcttcaacatgagaaaggctcctaccagttatcgggatcctctcagg

SEQ ID NO: 138271 - DNA, 1571 bp, Homo sapiens
ggcacgagggagagagagagagagagagagagagagagagagagagagagagagagagagagagagagagagagagagagagagagagagagagagagagagagagagtgcaaggatgatgctgaaaggaataacaaggcttatctctaggatccataagttggaccctgggcgttttttacacatggggacccaggctcgccaaagcattgctgctcacctagataaccaggttccagttgagagtccgagagctatttcccgcaccaatgagaatgacccggccaagcatggggatcagcacgagggtcagcactacaacatctccccccaggatttggagactgtatttccccatggccttcctcctcgctttgtgatgcaggtgaagacattcagtgaagcttgcctgatggtaaggaaaccagccctagaacttctgcattacctgaaaaacaccagttttgcttatccagctatacgatatcttctgtatggagagaagggaacaggaaaaaccctaagtctttgccatgttattcatttctgtgcaaaacaggactggctgatactacatattccagatgctcatctttgggtgaaaaattgtcgggatcttctgcagtccagctacaacaaacagcgctttgatcaacctttagaggcttcaacctggctgaagaatttcaaaactacaaatgagcgcttcctgaaccagataaaagttcaagagaagtatgtctggaataagagagaaagcactgagaaagggagtcctctgggagaagtggttgaacagggcataacacgggtgaggaacgccacagatgcagttggaattgtgctgaaagagctaaagaggcaaagttctttgggtatgtttcacctcctagtggccgtggatggaatcaatgctctttggggaagaaccactctgaaaagagaagataaaagcccgattgcccccgaggaattagcacttgttcacaacttgaggaaaatgatgaaaaatgattggcatggaggcgccattgtgtcggctttgagccagactgggtctctctttaagccccggaaagcctatctgccccaggagttgctgggaaaggaatttgaaagttgtattcagtattatttggaaaacaattggcttcaacatgagaaagctcctacagaagaagggaaaaaagagctgctgttcctaagtaacgcgaacccctcgctgctggagcggcactgtgcctacctctaagccaagatcacagcatgtgaggaagacagtggacatctgctttatgctggacccagtaagatgaggaagtcgggcagtacacaggaagaggagccaggcccttgtacctatgggattggacaggactgcagttggctctggacctgcattaaaatgggtttcactgtgaatgcgtgacaataagatattcccttgttcctaaaactttatatcagtttattggatgtggtttttcacatttaagataattatggctcttttcctaaaaaataaaatatctttctaaaaaaaatcggcctcgtggccacagcggtgagct

SEQ ID NO: 138272 - DNA, 1804 bp, Homo sapiens
ggcacgagggagagagagagagagagagagagagagagagagagagagagagagagagagagagagagagagagagagagagagagagagagagagagagagagagagtgcaaggatgatgctgaaaggaataacaaggcttatctctaggatccataagttggaccctgggcgttttttacacatggggacccaggctcgccaaagcattgctgctcacctagataaccaggttccagttgagagtccgagagctatttcccgcaccaatgagaatgacccggccaagcatggggatcagcacgagggtcagcactacaacatctccccccaggatttggagactgtatttccccatggccttcctcctcgctttgtgatgcaggtgaagacattcagtgaagcttgcctgatggtaaggaaaccagccctagaacttctgcattacctgaaaaacaccagttttgcttatccagctatacgatatcttctgtatggagagaagggaacaggaaaaaccctaagtctttgccatgttattcatttctgtgcaaaacaggactggctgatactacatattccagatgctcatctttgggtgaaaaattgtcgggatcttctgcagtccagctacaacaaacagcgctttgatcaacctttagaggcttcaacctggctgaagaatttcaaaactacaaatgagcgcttcctgaaccagataaaagttcaagagaagtatgtctggaataagagagaaagcactgagaaagggagtcctctgggagaagtggttgaacagggcataacacgggtgaggaacgccacagatgcagttggaattgtgctgaaagagctaaagaggcaaagttctttgggtatgtttcacctcctagtggccgtggatggaatcaatgctctttggggaagaaccactctgaaaagagaagataaaagcccgattgcccccgaggaattagcacttgttcacaacttgaggaaaatgatgaaaaatgattgggtaagtgcatatgatacctcacacatttcagaaagaaatgtattatcattttaaacatgttctactatttcattgctaatactttacagtctctaattttatggacagtaagttattatgtcttatttaattcctgtatctgtaccaagttagaaataaagtctgaattaaaatctatatatatgtggtttataatctttccaaagtaagtttattcaaaaccattttatttaaatattggcctaattttattttgcttgcagacatttaaagtgtttttgtatctccttaccgtctttggaaaagagtttgagacccacaaatatgtcatggtaaatttaaaatcaggtagcagtttattgtcagagccaaatctggaataaccaatttagttgccatttaactgtgctagaccacacttttgtaacactgtatgcccaagaaagaaaaaaaaaatctacagatgattaatgcagttttccatcctttttaactttttccagttcagccttttctcttttctttcagcatggaggcgccattgtgtcggctttgagccagactgggtctctctttaagccccggaaagcctatctgccccaggagttgctgggaaaggtcaagtcaaaggaaaatttgtttctacttagattgttatcctgtttaaagaaaaatatttttattaatctatgtattttgacataatttcagacttagagaaaaatcatattcctgtatgcccttcccctggattcctaaaatattaacttgatcatcattgcttta

SEQ ID NO: 138273 - DNA, 1067 bp, Homo sapiens
ggcacgagggagagagagagagagagagagagagagagagagagagagagagagagagagagagagagagagagagagagagagagagagagagagagagagagagagtgcaaggatgatgctgaaaggaataacaaggcttatctctaggatccataagttggaccctgggcgttttttacacatggggacccaggctcgccaaagcattgctgctcacctagataaccaggttccagttgagagtccgagagctatttcccgcaccaatgagaatgacccggccaagcatggggatcagcacgagggtcagcactacaacatctccccccaggatttggagactgtatttccccatggccttcctcctcgctttgtgatgcaggtgaagacattcagtgaagcttgcctgatggtaaggaaaccagccctagaacttctgcattacctgaaaaacaccagttttgcttatccagctatacgatatcttctgtatggagagaagggaacaggaaaaaccctaagtctttgccatgttattcatttctgtgcaaaacaggactggctgatactacatattccagatgctcatctttgggtgaaaaattgtcgggatcttctgcagtccagctacaacaaacagcgctttgatcaacctttagaggcttcaacctggctgaagaatttcaaaactacaaatgagcgcttcctgaaccagataaaagttcaagagaagtatgtctggaataagagagaaagcactgagaaaggatgaggtggaacgtgtgatcaccattatgcagaatccacgccagtacaagatcccagactggttcttgaacagacagaaggatgtaaaggatggaaaatacagccaggtcctagccaatggtctggacaacaagctccctgaaaacctctagccaccttagaaaaaatccggccccataaagggctgcgtcacttctggggccttcgtgtccgaagccaacacaccaagaccactggccgccgtggccgcacccggggtgtgtccaaaaagaaataagtctggtggccctgtctgt

SEQ ID NO: 138274 - DNA, 759 bp, Homo sapiens
ggcacgagggagagagagagagagagagagagagagagagagagagagagagagagagagagagagagagagagagagagagagagagagagagagagagagagagagtgcaaggatgatgctgaaaggaataacaaggcttatctctaggatccataagttggaccctgggcgttttttacacatggggacccaggctcgccaaagcattgctgctcacctagataaccaggttccagttgagagtccgagagctatttcccgcaccaatgagaatgacccggccaagcatggggatcagcacgagggtcagcactacaacatctccccccaggatttggagactgtatttccccatggccttcctcctcgctttgtgatgcaggtgctcaagacagggaatggaattggagggagcccagaatacaagctgctgctagcaaaggggtggggctaaatgagaagaaaatttaaaaagatgaaatttaatctgaaaaacagaaattcatgtgttgattaccttttgtgactagtacaattactttaagctcatgtttaaacaatattgatgttttcctccttgtatagcccaagaagattccagtaatttcagcatcaaataactgttttaaatgaacttaaaatttgccttggcaaaatatcatgaaaatagttaatatgctgcacaaaagcaaaatcatagtacactcctgagctaaatagaagcaatattttgattagatgcattggtttttattc

SEQ ID NO: 138275 - DNA, 350 bp, Homo sapiens
gccagagccagcccagggctgggaggggagacagggcaggacacggccatggaggcagctgcccatggtctctggagtgcatgagggctgtgcctcttcggtggctgctgctccttctgaagagtggcctgcggtcggcagcggggcctctggggagagctcctgatttcactttcatgctctgccgccactgagaggagttaggaaaataccacgggctgcgtgatttaatcgccctgctatttgttaattagtctgtgtgaagtgccaatccgcagtgtgcgtgggcgtgggggcaggactgcggtttgcagggaagccagccgcttggagcagaggcagttggagtt

SEQ ID NO: 138276 - DNA, 439 bp, Homo sapiens
ttatttttgacatagtaaaggtttctaaaaacagacaaaatattctcactcttgtgaaagatcagatgagtgtacagaagctacagcagacgccagcaaggcagaagcagcggacaggcagacacagcagacgccagagacttaacacttgactggagctcagcgtggacagggagactgcccaccccgccctcaggtgaggagtcacagggcccacagtcaccactgacaacccggatgcccacatgggagcagccataggctggcttttattaagctgcccttttataagtttcctcaaacacttttcactgacccgaagcacttcattaggaaatatttcaaactaagtcatttttcaattatacaatttttttttcacttagtaaatatgctgagggtttcagcttttttatttttattttttagagactgagtc

SEQ ID NO: 138277 - DNA, 407 bp, Homo sapiens
ccagtactctagcatcggggaatcgtccccaggaagccttgtgagaagccaaaagggagctcgaggcgggagggaggagctgagaggtcccataattaagcgtcgggcttaggacgggtcgatatgtcacaaggaatgcacccgaaggctcttcctataggcttcgtttgctgaccaatcactgcattctcaatggcaacttgttgcttggattctcatcagaagcaaataattgtctttgagggggaatgggaaccaagctcttccccacccactccaaagctactaccagagttctacaaatagacatctgctcatttcaagaacactacccatctggtcttcacggagtccacgagtggctcctgtatagtccagcatgtcccgttgggtttaactcaggagga

SEQ ID NO: 138278 - DNA, 462 bp, Homo sapiens
agcccaaaggaggaggggagcagacgtggggtaagtctggtgaggctatgaattaatagctaacctcacaggtgtcccttctgtgccaggcattgttctgagatgtttacgtgcataatttcacttaatcttcatgaggaccttgtgacataagtagtgttattatccccattttatagagaagcaaacagaacataagaggctaactggccacggtcagatggctagaaaagctggactcaattcccggcagtcccactcaagggcctggccactggggcaagatcaggctgagcctgggtgcagggtctggtagatgatcacatagctatcaaggccaaaggtcgctgagaggtgatggcggaagaaggctgagaaggcatcagagttgatgactgcagccatcaattgccctaggaggtgccatttcaggcaaaggtggggtggacgccgatttgtaag

SEQ ID NO: 138279 - DNA, 421 bp, Homo sapiens
ccacttaacctctctgggctcttatctccgcatctgaaacaaggaggctgatccctaggctaacaattagcagggtcattgtgaggacacattaagataacgacttgtaaactgcttttcagctgagaaagtatcacacagctgggacggctcatcacttccctggcctccaactccctccaactcagcaggaacccgctaatggacaccaggagcctctcagcacctctggctgttcaaacaaacacctctcccctcactgcccctcccctgggctgccctttggatacagaggcaaagctcccagtcttccctctagcgctggggcagaccagtctggacacttgagtcacagccttcctgccttccctcaacagggcattcattttagctgagcccctgctgcgtgtttcatgggcac

SEQ ID NO: 138280 - DNA, 392 bp, Homo sapiens
  misc_feature (282)..(282): n is a, c, g, or t
  misc_feature (293)..(293): n is a, c, g, or t
  misc_feature (311)..(311): n is a, c, g, or t
  misc_feature (324)..(324): n is a, c, g, or t
  misc_feature (333)..(333): n is a, c, g, or t
  misc_feature (346)..(346): n is a, c, g, or t
  misc_feature (352)..(352): n is a, c, g, or t
  misc_feature (356)..(356): n is a, c, g, or t
  misc_feature (371)..(371): n is a, c, g, or t
  misc_feature (376)..(376): n is a, c, g, or t
agagcttccctttttccaccctgctctctgtccccagggaggataccttgtatagaatggttctctggtctccctcgctccctggcttccagctgggaccagtcaatggggcacagcagaggaaaaccaagggagagaggagaaatgcgccctagatttgtgccccgccccaaagttccttcctgtgggatgtctcttgatagcactctctccagagtgcacagctcctgtctggacagccctcttcacagactgcctttcttctaggttctggtacctccnttccactcctngcctttcaagccaaaggnccggtcacagcanttgctactnagcccagttactngccctnatgnctcttcttcctgtanccccnagagtttaatggacta

SEQ ID NO: 138281 - DNA, 378 bp, Homo sapiens
aggatgttggagtcagaggagactggggacaccagccatccaaggggatttaggactctgacagccaagggctggtcaactcctctgtgaagatctgaaagtctggtgctaccgtgacgcccacttgcaattcttgctgacatggactggagctggcattctcaggccctctaaataacctcaggagggccggatctctgatgctgcttcgccatctctgtactactcaaagccgtaagattattcactctggttctcagagaggaaggggcaggaactgaagccaggggctggtgagtgggagggtgaacctgtgcttccagagccagggagggacagcaggggctggtgggctggcacttgggggattttacagcc

SEQ ID NO: 138282 - DNA, 258 bp, Homo sapiens
ctgaggtgggaggatcacctgagtctaggaggtcgaggctgcagtgagccatgatcacagcactgtactctagcccgggcaatcaaacaataagctgggtatggtgggacacacttgtagtcctagctactccagaggcactccagcctggccaacagagtgacactctgtctcaatcaatcaatcaatattaaaaaattagctgggtgtggtgggacacacctgtaggcctagttactctggaggctgagatgagaa

SEQ ID NO: 138283 - DNA, 604 bp, Homo sapiens
tagaaattaggaagagtgtcccacttctgacactgtgttccctcttggaacctgaccgtcaatgctagaagaacccttggaaaacatgctggcccagccctctagttttacaaataagggagtgcacagccctgagaggttacatggcctgcccaagatcacgcagtcaatggcagagtaaagagcatagcctaggcctccccactcctctagtaatgctctttcatcttctccaacctggctctaagccttgtccatcctgagccccatatctagcccaacctagtccctgaaaacaagaagtggcccttagaaatctctctccagtcccactatcagaggccaactgctgtcttccagtctccttcagcctgtgctcctctccctccctgactgacaggcagaaggtactgtgcctctggatatccccacagtgccctgagctgcatctcttgccgactgctttaatacatcacagtgacattgtgtgtgtctctgccaccagactattgctccttgatgctctgggtcacctgcatctagcatggcatatatctagtgctcaataaatgtgtattgtacagatgacaagggcaaaaaaaaa

SEQ ID NO: 138284 - DNA, 801 bp, Homo sapiens
tagaaattaggaagagtgtcccacttctgacactgtgttccctcttggaacctgaccgtcaatgctagaagaacccttggaaaacatgctggcccagccctctagttttacaaataagggagtgcacagccctgagaggttacatggcctgcccaagatcacgcagtcaatggcagagtaaagagcatagcctaggcctccccactcctctagtaatgctctttcatcttctccaacctggctctaagccttgtccatcctgagccccatatctagcccaacctagtccctgaaaacaagaagtggcccttagaaatctctctccagtcccactatcagaggccaactgctgtcttccagtctccttcagcctgtgctcctctccctccctgactgacaggcagaaggtactgtgcctctggatatccccacagtgccctgagctgcatctcttgccgactgctttaatacatcacagtgacattgtgtgtgtctctgccaccagactattgctccttgatgctctgggtcacctgcatctagcatggcatatatctagtgctcaataaatgtgtattgtacggaattgactgaacttctctcactggcagccccctctatccaaatcacccacctcttttttaaggtgggtgatgatcttgtgtggtactgaggtgacctctccatgactggtccaaagggcaggcagggttcctgatactgagagaaaagtataccaaccaggaccttagctgcctatccatacgtagttgcaacacattcctgcctatctcctgcttc

SEQ ID NO: 138285 - DNA, 128 bp, Homo sapiens
taggaaaacagggttaaaggacaggggcaaattgaccagagctttctatgatccaactcaggacctccttggagcctgactgtgggctcacactaccattcctcaggggggtgctgtccaatagcata

SEQ ID NO: 138286 - DNA, 533 bp, Homo sapiens
ccgttctatggtcatagctgattcttgaggataaaattcctctcatcgaacctgtaactatgctcacagctttgttcacccaccctcagggggtgaggtcttgcccatgacaggccctgtgtggatagggactctgggcactaagggtgagcgctgagcccttgctgcgtttcctgagccgagtcactgtgtaaccgtgggtgtgcaccaggaccagcgagtgaagggccaaggtgcagacagctttaggagctgcacatctcttggaaatgtggctgtgaccctggctaacgacgaccgtcaccactgatgaaaaggaggagtcctgatgactcttggttggaatctcaggtcccatctgggactttgctgagggggtcccagtaacaacaacgtggcaaaaattgtttggtcagtaggttcctctaagccatgaaccccacacacagctgtgagcacacacacacacatgtgcacgcacacgcatgaacacacacacacagtgcccctgtgtgtgctgcagcatgggccct

SEQ ID NO: 138287 - DNA, 197 bp, Homo sapiens
ggctttcattgtaaagatactgcatcaaaatccaccttaaattctgccctaggaagtgaggaatggttctatctactgcggggccttccctaaagcccagggtggaagagacactgactctgcagacctgggtggggtagcaagcagcacggtcatgtggcgtggaacagacacgtggtaactctggggcacagctg

SEQ ID NO: 138288 - DNA, 403 bp, Homo sapiens
actcctggtctcaagcgattctcccacctcagcctctcaaagtgctggaattacagacttgagctactatgcccagccaccattttggtttttgacaactagatcatttagtattttcagacatggatctgaatgtggctttgggacatttccaaaaatccagtttgctctagaagcccagagaatactctagagactgtagaacaagttttgaaatttgtttgcaaattatcagcctcccaaagtgctgggattacaggcgtgagccaccgtgcccagcccacattttatacatctttattatgttaaatctttttagtttttttattataattttattgacaccaaaataggtaatgtgtctttattacaacatatttcagtaaatggtagtaaaatgttc

SEQ ID NO: 138289 - DNA, 331 bp, Homo sapiens
caacatcacagcacagtgatggttatctttgtagagaaatcttgaacacattttaaatttccgtgggataatgagaaaccatggttaaagtttatttacgttacagaaataaaaagctttcaatgcatcgtcacaaattgttctccactcttaccagcgattaagagtgcctgtttatccaagaccgttggccatattgaatgttaagaattcttttttacatttgataagcaagacatggtctcttcttgtttgaatttgcatattttaaaagtcctttgtgatggcataagaatgatgcagtggactttggcgatgcagggggaaaggt

SEQ ID NO: 138290 - DNA, 1186 bp, Homo sapiens
cacacacacacacacacaccggcgtactggaacctctctcgcgatcccgcacccagcttgaattcagcaagaatcgaaaacaggtgtgcccccgtgtccaacaaccgtcgtatctacagcgatccttagagaacaattaaggccagttgacagtaaagaacaatcagtgtgtatttgaagtccatgctgagagagcatcaatcttctggcagctgcaagactgacctatcaaccgaggcatttcttcattccctgccattgtctcctcctcttgagatcgccatcaggcacagtcacttttctacaaacaggcaataggactcccgctgccaccctgcccagattttagtcctctactgctgataaagtgagcaaagatacgtggcacttcctgaacccaaatactcttctgagctgattctaaatccacacagaatcaacctacctcctattacctccttccaagctctgtgtcccattctctcatttcagtctcagctccagacatcagtgaattcaatgtgatacatcaggggacatcacaggacttccctacttgaaaatcaagcaatcgtgtccctgaaacactctgtctttattcatgctcagttaccgtaaagtagatgcaactctaagaacctatggatttttttattgccactaatagatcatgatttacagcaaaattttaaaaggtccaattttactcacaaaagaagaagaaaacattcagcaagaagcatttcttttgctttatctttcccagttaaatatgactttaaaaaagacaaaattttaaaaggtccaattttactcacataggaaacaagaagaaaacattcagcaagaagcatttcttttgctttatctttcccagttaaatatgactttgaaaaagaagagcacacctcattagccgtaattgtctgattaatacaaagaaatggactcatatcacggggttctactacccctatggtagtgtttactatccttatttcactcaataattacagttactttaaccagaatgcctgccttgtttggcattttgggagaggaagcatatgactgtaaaccctcttcaaactttcagacttacgtttgcttcttctaagtccatcgactttatacataaatgacttctttttaaaaataaataaataaataaataaataaatgattt

SEQ ID NO: 138291 - DNA, 182 bp, Homo sapiens
agataacctcagggacaggttaacctttcataattatcagaaagctatctataagaagcattttgctgtattcctctatagactacttttgtggaatcatgatttaaccttaggttggcttcaccgtgaattaaatatttaaaaatattttatatgtaaaagatccatatgcagatctttgc

SEQ ID NO: 138292 - DNA, 413 bp, Homo sapiens
cactcttgacctatgaccttgtttccttttcactgagaaacagagaaaaaattagatgagaatgtgtacaagctctcaccacaagatcttcctacctcctctaactgcacctatatactattactatcaaagatccctctgtgtccctaacaaaggctatttcctctccttttgcactaaattccatatactcatgcctatggggagacattgttccagtaattatctcctttcctctgcttgggtcagcctctaggatggacccccatgatccccacctcctggtatccgcgccatgatgcaatctgcttacagcctaaatcaggatgaaccatatgactcatagaacactgcagaaggcatgatgtgtgacttcagatgtgaagtcatagaggacaaggacacagccacct

SEQ ID NO: 138293 - DNA, 269 bp, Homo sapiens
tctcctgaatgtgctcagaaccaaacaaattattcccaatgcagtgcggtcagcgcagagtacagtgactattaatatttctactgaggaagcacacggctacattcattcttttttagccaccacttcctactgttggttcacattaagcctttagtcacatgaactgctgccaagctcagttgttccccatcctgtaattgcgcaattgccttttgaatctaaaagcagaaatgtacacttattccttgctcaacttcatcatgttg

SEQ ID NO: 138294 - DNA, 522 bp, Homo sapiens
gctgaggacactaaggcctcctggtagcaaaatccaaccaccacttcctggtccttgatctcccacggcctctcaccagcatcctccttggcttaccacattccctcctgcctcgttctctactcgggggcacacctctggccatgagctcctccaattatctggctaggctcttgctctaactcacaagtactgatgtatgatcttttgccctcttcatcaaagctgcttggcttgctacctacaggctgagaactcccaaacgtgtatctttctcctgagcatcagacccacacgtcctgagcacaccacacacgtcagtcatctgagctctttaccttcctggaaactgctcctcctgagcctggggaatgatgctgttgcccatccaggctcctgggtcagaaactcacctgagggttaccctgctgtccccactgccagttagtcaagtccaagccattccacatttttttttttgagacagggtcttgctctgttggccaggctggagtgcagtgg

SEQ ID NO: 138295 - DNA, 268 bp, Homo sapiens
agcaggaggaattatttgtggagggtctttttgttatttgtggaaagattcctgttgccaccggaaaaccaggtatgaaagtatcaattaggtaagaaaccagtgttaatttcaaggaaccatctaagaaaaacaaatgcctgattttaagatgatttggtattttattatagaagccttgggatggtaacagaggcaaaggtatacagaattgccttattttagcagtgggttcactttgtgagttaaatctatgagtcccactgga

SEQ ID NO: 138296 - DNA, 115 bp, Homo sapiens
tagaggcaacagggagtgagattggagccacattgctaggacttttgatggattctattaaggagtgagggaaaaggaggaatccaggatggctgctgagtttctggcttgtgca

SEQ ID NO: 138297 - DNA, 420 bp, Homo sapiens
gatcctcctgcatcagcctctcaaagtgctgggatttaagatgtgagccatcatgcccagcctcaagccttttaataaacatatcttagtgccttagaggaacctgaaatctatcgaattgataaagatggcaatgagctgactcatctgaactgatcgtgcagaatctcttaagaaaataagtgcctaatcttaacgttgtccgtgtacaggggctcacagaattgtgccttcatcttttctttctacagtgctatacgcaaaaaattaaaacacaagtaccagtgacatcatgttatgtaacctccataattaaaatctagaggttagggttagaaccctcacttgaatctgcagttagtattaaaaactaactaaatacaatctatgattaaaatactaattgcagatccaagtaag

SEQ ID NO: 138298 - DNA, 603 bp, Homo sapiens
tctgttggttctcctcggcctggcatcccttaatcctacttacctctcctttcttccttctccatttcaaccatgggactccagggaggttaccaatcacattattccctccctttggctacgtggccataaactgggcccatcaatttatttctccataaaacttgaaactccaatgaaagcctcttgaagtctcatagatgtgccctgagagcaggcccagggtcacctgctggtaaggacctggagcttcccagtttcctgtccttccaaaggtcatgatctctatctcttccctcagttctggaactactcaagaatcctttttccaataaaccccttcttcccttagtcagagtcagtttctattgtgtgttagtcagagaactaatataatcccaattctctttttttctgccaccatcaatgagcaaaatgggaaatttttaaattatttaattgcattatacttattcatattttatttattacattttgtaaataagattttcgtggccgggtgccatggctcatgcctgtaatcccagcactttgggaggctgaggtgggcggatcatctgaggtcaggagttcgagatcagc

SEQ ID NO: 138299 - DNA, 290 bp, Homo sapiens
gttctatggagcattaagattcttctctcccctgcattgctattcctcccaagtataaccctttctgacacacccatcctctgagctggcattttattccttcagtgtcatgcaattctccaggtcacaaaggctcagtaaatgttgagtgagcttcccctgatcagtctatctgattttctcatgtatctgaggctatgcctattagagccatcctattagaagcaccagaattatctttttgtggctgtagttggcaactcttggccactatgcatagaaaatatctg

SEQ ID NO: 138300 - DNA, 519 bp, Homo sapiens
agcatttccaggataaaccccacctactcatagtttgttgttctttttctacattactgtattttattttctaatattttgttgaggatctttgtttctatgtacataaagggattttggtgtgtagttttctttttttggtaatgtctttatctggtttgacattcgagtaattccgtcctcataaaatgaattgggagtattttctgctcttctgttttctggaagaaattgtagaatttgttatttctttaaatgtttggtagaattcacctgtttagttatttgggcttggatatttctttttcataatttttttttaaactatagactttatgtaatagttatagcaatatacaggttactgtttaatcttgagtgagtttcagtagttattaagtgtttactaaaaaggtgtatttaaaagaccaggctgtgctatagaataactttatgaccttgggaaaggtactttagccttaacctctctgtccttaatttgttaatctgaaaaatcaa

SEQ ID NO: 138301 - DNA, 244 bp, Homo sapiens
tctgcagtgtcctgttggtcatacaggttagcttattcggtgcaggaatgcaagggcacaaataccaggaggcaaggttcactgggcgctgttttggagcttgattgccacagagaaatagggaagagagtggtagacaaacacagacacacagacctttatgaacaggagaggggagaagactgggtagttgagtcaagtccagggtgagggtgatcatgttctccagaagtgcgcctgggtg

SEQ ID NO: 138302 - DNA, 236 bp, Homo sapiens
actgggcagtactctggccaaactatggagagagtttttctgactggtgctctgagaagagggcttcataaacccaccccactgaggccagggctttttacctgtagtccagaggatctgtggacccccagaagttagataaaatcctatgtaaatgtgcatttgtttttccccatccggggattggttttcattagatgtgacaggagatggtaattccaaatagttaaaaccat

SEQ ID NO: 138303 - DNA, 321 bp, Homo sapiens
acagagcgagactccatctccaaacaaaacaaaaacaaaaacaacaacaaaaaacaagttgagtgaagaaggggtggttttctacacttggagtaaactgagtgctgaaaaaataagcagttgcaggaaacaaggcaatgaatgggggttgaagggcgctgggagcaggggtttggaaccctgagctgacagcagtgatggtggctggcagcactgacttaaactggatggcagggactgactcaggaatctttgacaaacctacttctctgtcaggaatctagaggaaagtggcccactggggtagggacaatactggag

SEQ ID NO: 138304 - DNA, 581 bp, Homo sapiens
ggtaccgcagggacgaagcattccagtagcacttactgcagttgaccactcagtacaaattccttaatacatggacgaacagccatcatgaacactagattgtgtttcctggttcgtggaatgcagcttttccttagcaatttgatgttgtctctaggaatataaactctcaattctcctaaatataagcacttctgcaaacacagctccccagaattaattccagaattgtgcactttcaaagcaacagctgaatagtaaaccaagattcttagagatttaaagtgacatgacatcatgagcatgtttattattttggcacaggtaacagctaaaaaatgaaatgagattccataaaaggataccaataaaaggggggaaagagaacgaaaaaatccacaaaaatagctctaaaactctatagtcttttgttatatgcttactcatactttttctcccctgacctcctcttttgaaccttaaattcccttttgtgtcttttaaattctacctactcttccaggcccaattcaatcttactacttatggagaacttaagcacaaataaaatgtcatttagg

SEQ ID NO: 138305 - DNA, 649 bp, Homo sapiens
ctaaattgctgggattacagacgtgagccaccatacccggcctggtgtctttttttaagaacatcagtcactggatttgggcccaccctaatcctaatagtatgacttcatcttaatttaaccaattatatctgtagagaccctgtttccaaataaggtcacattcacagattccaggtggacaagaagtttaggcggacactattcaactcagtacagacccaggaacaaagtccacccactgggctgtgttgagtggcagtcactagtttatcctccctcaacaagatgagctccaggttgacctctgcatccccagtgctcagtcaggacccagcagagcatctgaagggatctggtcaatatgtgtggaactgaactgtttctgaaaagctctgacgtatgttttggaaaatcaaatcttgttttaatccagacaccaatctttttgtaaggcaaacaagtagcataaatgtttaaaagtcaatttgcatgtttatatactgtcattccttaaagttgaagcatgcctttctttattcatcggtggaatcctttctcattttggcaaagaaaatgcccaagtgcctggcacaaacaagcactgagtaaatacttcttgaatgaataaaactagattctaaaaatc

SEQ ID NO: 138306 - DNA, 432 bp, Homo sapiens
atctagacgtacacagtaaacatttataaaaaattttttccaccaaatacaattatgcccaacattatctttaaagtataaaaatatgtgtctggatgtatattgtaatacatgctcttgttcactctttaaaaagttaacaagattataaatctagcataaagtgaaatttgattatacttattacaataattacataataatgcaataatatgcaatttttttggaaaaaatgtttcaagaacatgtatgaaaaggctattatagtgctatgcgcataaaaagctatgatttataatcatatatatctggaaatagttgtcttttgtttgtttgtttatcttgttgaatgaaagaatcagtagtattagggaaacttttgtccattatccatgaagcttatctttgttgctaaaacacatgaagaaacaa

SEQ ID NO: 138307 - DNA, 261 bp, Homo sapiens
catttaccttctgaagtctttaatgaaagctctgtcatcattcctgttttattgatgaggaaactatgctgtcagagttgagtatttataagtagagctgctgaaaattgtgatttctatttttatattgttaaaaaatgtttagaatgtttaattacttagtaatatagaatatgagctttaattttatttccatataatatccaatcatttaaaaaattctgccaatgaaaataaattaattgagccctttatttattt

SEQ ID NO: 138308 - DNA, 308 bp, Homo sapiens
tgcataattctttggtgctgaagactgtactgtgcattgtaggacatttagcagcagcaggccagggactgaagtgaggccaggaagatgctagggcacagaatttaaggaatgactcactctcagggtcctgcaagtgtaggcttggcatgtgcgtgattctgaatgtgccctcctaaaatccctcatcctagtccagatactgtttagcagcatccttggcctctacctattagatgccagtggcaacctctcatcatccccctctgcaatttttgacaattgcctccagacattgccagatgtcc

SEQ ID NO: 138309 - DNA, 346 bp, Homo sapiens
ctagcttgagagtaactaagcccagttgtaattatactgctggaaagagaaattaattaaacatccctgtgataaagacccagcagcaaacctagaataaacacataattggtgaagaagaggggcttgaaataaaggagaagagaaaggaaaggcgaatgtttagcccatctgttcagatagtaatgaacgaggtaatcttttcaagagtacatggagtgcattacagtggaaatcagactacctggcgggcaaagtcagccaagtttctaattctcttcttcaaatcaaattgtgatttgctaatgtgaaacacatgtctcaagttcaaataactctggaattc

SEQ ID NO: 138310 - DNA, 150 bp, Homo sapiens
ggacctctctcacctgctgtctggcctacaaattatttttgagatttgtccctggaatgtgacagtgttcacggtttctctagacctacccaggtataaaaaccccttgatccctgccatctaagatggatgctacccctgctccgtaag

SEQ ID NO: 138311 - DNA, 443 bp, Homo sapiens
ggagcacatggtgctgcctcccacttctaaatgtatcacatccttccttcttgcctcctccattcattcatgattcatccacttggcagacattggttccatgtgtccactgggctggacactgtgtttgtaaaagtggcaggggcgaggggccagaagtgaagggcgaataaaaaggagcaaggatgcatctgagactgaagtagaggatgggagaatctggagtgcagttttagacctttggggtttgaggtagctgcaggagctctaggcagataatgatgtaggtctggagccaaggagaaaaactgagactttgcaaacacaggtttgtgacccaaagcaggtcacaaattgctggccagagtcccaggactaaatgtaatcacacaggtgaggcatctgggggaaaagaaaagcagcaggggagtgagggagtgagg

SEQ ID NO: 138312 - DNA, 190 bp, Homo sapiens
gacctcgtgatccgcccgcctcggcctcccaaagtgctgggattacaggcgtgagccaccgtgcccagccgccaataacactttttaaactcctgtgcatcatctgtgtaatgctatctttcttgcagcataacagacgtatttttattgatcgtaatatataatatcaactcttttttttttttttttt

SEQ ID NO: 138313 - DNA, 477 bp, Homo sapiens
acacatagattaccctcagagtttagcacatatgggctgtagaactgaaacacattgtcctaagtcattgttgattccacagaatttcagccaacaacagaaacactcttaataaaaacaaattatcaacttctagacaatcaaaatcaccaagacatagtgaaaagacatggcatattattgcttggtgaaatcctggttggtgatttttgaaagccctgataccataatgtaacccttctctcttggttctttctttctttatgtgctcaggtaatgagcacatctaggcaattgcacacacacacacacacacacacacacacacacacacacacactcctcaggaatcacatgacttcaaagaacttttctttataaaagattgaagattcctgagttataggttgctggtgtaaaagtcataatataacatctgattgttgacactatgcagtggggggaacagtacatttt

SEQ ID NO: 138314 - DNA, 350 bp, Homo sapiens
ctcactgttgcttgtgcttgccaaaagcagacataaagcattggctgccctacctgtaacttctgctaaaaacagaacacaaaattatcatgggagccttcaacagctagaacaccatctaaacaaagtaaaaagtgattggattctttatggctccctcaaagatttttcaactccctgtagtccagttccaaaaaaaggaatgatggttttcttggagagccaacagttccctttgtaagtttctggaatttttgtacatgatattttgagttcttctacaataaaatttaatggtccatttgagaaagtgtactcatattaaatgtagtgtctattattgggtagtc

SEQ ID NO: 138315 - DNA, 701 bp, Homo sapiens
tgagataggggcccctattattaaccccgtttcacagatggggtaactgaggcctcaagtagacagggtcagtcggtgacagagccagtcatcgaatcaggatgggctcacttcaaatcctgtgctctcaaaccttttccagccccatcaccagtcccagcccaaagtctcttgtgtggccttgtcacattgcttcacctcagcgggcctaaggtagggacaataaaggcccattgggactgggggaaggggtgataagataaaaaataggagagcactgtcaaggcagaagggacagggctggccaaggaaagggggataggaggggaccggaggctgcagccatacaggacacagtttgtcccttggtttcaccagtgtcactttctcgtctctgctgctcagactcctgggctgggctggggctggctgcagggagccccccttgcagtagcgtttctcaggctggccctttaccaaggaccacagtgtccatgctgtcttggatccctaggctggcacagaaacaggggacccaggtggccctgagcactcctcagagcaaaggtgctctggaagcagactggacagagtgggcatggaatggggccaggagggtctgttaggaaggttcagccaccctgtgaagctggcacagataacagcactgctctgttgtccctcggagcctctgagtaacc

SEQ ID NO: 138316 - DNA, 719 bp, Homo sapiens
attgaagaaaaatttcagtgctactatcataactggtgtattactattgttaacaattgctacagcctatttgtgtgaatttttaggatttcaactttgactggattctaaaaagaaaaaaactaggttgaacaatgtatcagatgtacttattgcctcaggtagtccacagaatgaatttataaatgctttagcatatctgtccactacataaaaatcatgtctacatttctgttttgtgttattttggattttcataatctatataaatatcaataaaataatatgtgatattagctttgctctgcttttattttacattggtagcaatggtaaatattattttgtgaaacgtttgaggggtatgtgtatgtatgtgtgtgtgtgtttgtcctgggttgaatgtaaaattatttctgactggggactagggtaaaagaaaattttgaagccaggcgtgagtcactgcacccagccaggattctaacaatttcaaaggatttttatatgtaattgtcaacatgcaaattattatgttaaattcaagtgttaagtctacatattaatgtagcccatttatttactcttagactctctccctagaaatgtatcgttagtgttcattcatctgcttgttctttcttttaatgactttttttgagcatctattttgtgctgagtgctgtgcttgtgcttgagatattacagtgaacaacact

SEQ ID NO: 138317 - DNA, 420 bp, Homo sapiens
cctgtggtagagagggggaactgttgacttcatgtgaaatccttggatccagctggacctaagactactctttggaacttcatgttttatgaaacaataagtttcttcctttagttgagagagtttgagttagctttttgtcagttctatttagtgttattattaatgcagcttccaacctttctgatccaaggttcactactgcaatatccccataattggtctcttgccccccatacccacccttctatcttttctcttctctagagtcaggtaatttttcataaatataactatttatgtcatccttctgcccaaaactctaaatggctttctgttgctttttgatgaaaaccaaggttccaacatagtatatactctctataactgggctttgttcactttttcaggcttaacctt

SEQ ID NO: 138318 - DNA, 390 bp, Homo sapiens
atgtgtttccttggcttcctgttcagttttccttaggcctcagctgctgctattgctgctggctgctctccacattctcctaaattccagatgggtgtgaggaggtaagggcgggaagaaatagtggattgtggattgaggtgcgatttcccaccactggaggggacagattcataagctggcattgaagaggttcctgccctttgcacagtgtgtttggtcaccccagtgctcaggctgaaccctgagaagaaagaggaacttgactgtctgaaggctcttgggtggtgtttaagacccctggccactgtgtcctggctgaatgcatacatgcagatggaatctctttctttctttttttttttgagacggagtctcgctctgtctcca

SEQ ID NO: 138319 - DNA, 441 bp, Homo sapiens
gaaatcagttctttccttcatccttctaagagattcactcataggttcactaagcacctgctggcatcaggtgccatgctagggacaggaatgtctgcgacatgattcctaccttcaagaagcttgtagactattgaaacaaacaaacattgatacaatgtgtaacagcatatgaagcacaagttctatcacttttaatcctcattacaactcgccatttcctccacttttcagatgtggaaactctttgaccacaaccttcaattcttgctcaaccattcccactatgcctcagcccctcgctcaggactgccagtcctctgcctcctctgcttggtttgcaggcatcagctccttccattttcacttccctttctgtccatcttacatcctatagtccactgtttttgtcacttttgttgatactataaagtcccttgc

SEQ ID NO: 138320 - DNA, 1214 bp, Homo sapiens
gtgaggagtaattctatcttctcaatcctagagacagtggcttcaagaccactgaaacattttgtatttgtccttgggtaagggataatcattagactgtgtatgactcacggtagaggaatttcaaggcaaaagctgactaacaacagagcctgatgtaacaaagtagagagtcacatcctggaagtcaccacactggcttctgataaacggtcagatatacatgaatcctgtggaccatgtgtggagccagtttaaatcctactcaagagaactgcctggatgcatagtggggctcttcatgtggaaaagaacactggaaaacaaaaggataatgagagagtggtggctatagaaatagaatacatcacctcacttcaggaagttgccactgcctttggaaagcgcccccagggaagcctctgatggagccatacaaatgctcatgagataattcttaacatcagccaggcctagacagcatgaagccactaataacccttcctcttcattctgccccattcctagaaatatcagtgtagcaaaaggagagaagccaactaccccctctttcacagaggcgagctggctggctctgttgaccctagctgtggggtagagagattcttacctatgatgaaaattgatgtgttaatatatttcggaccaagagtatgttttgctacttaaagtggttgcaaagactattacctaaaggtgatccacatctgaggaaaacctctcccactgaaataaattgtgcagagacaggggaaaacaaattaaactttaattttcattacatttcttcagttggtacttgttaagcattccagttatggtcacctttgtattctctgaggcacttaattggcactcatgatattgagattattccttccagattgtagtatgtaaccttctggttaatatcctctctataataaaacaaaagacagttttagggacttaaatttcaataaatctggttgaggccaaggaaccagaaataaattgaaaactcaatttatttcaaggaaacttgaaataaattgaaataaagttagttggaaactaactttaagataatctagttccaggccaggcacgtggcttaccctgtaatcccatcactttggcaggctgaggcaagcggatctcttgagcttaggagttagagaccagcctgggtaacacagcagaaccctgtctct

SEQ ID NO: 138321 - DNA, 205 bp, Homo sapiens
cacccggcctcattttgctgatttctcttgagctcaggtaatatttcaccaaaaggctggcatatatttagccaaaaaagggatattgtttgaaataagaatattgtgaataaagttattctgtcaatagaataacattattacttcatacaagtcttacctgtagttgtacatcaaatgctactttttattaaaaatagtattt

SEQ ID NO: 138322 - DNA, 384 bp, Homo sapiens
tttctggcttctggcctctagaactgtgaaagattaaatttctgttgcttgaagccccccagtttgtgttactttgttacagcagctctaggaaattaacacacccaaccccaattacttcttaaagaatttaaaaaggttcttaaaatgacaattttattttgagatagggtctcgccctgtcacccaggctggagtacagtggtgccaccatggttcactgtagcctccacctcccagactcaagtgatcctcttgcctcagcaccctaagtagttggattacaagtgcatgccaccgtacctggctaatttctgtattttttgcagagacaaggtttcaccactttgcccagtctggtcctggacttgagtgatctgcctg

SEQ ID NO: 138323 - DNA, 500 bp, Homo sapiens
taatagctgtctgtttccagcaagctgtttttttccagcgctgagttcacaaaggggctttgttcttttttccttgactgaacagaccaatttaaaaaataaaacagaataaacacctagcgacactgaactctcacccttgctgtggatatatttaggatttttttcttttttttacttctttctcttcctttccattaccttctgggagttaaacctcttgttagcttccatttttattgatacaaagagtagttccaaacctctctgctgccttgacctgtcacccccaaggcctctaattttatatttctaattgcttgtaatacatgtcttgtgattccctaaaagtttacatcttgatagttctctctcatcttagtcattaaggccacttcctaaaatggcctcccagcactgaaacgtgcatgtttctctcaacagtttttttatttcatttgttccaacttatatccattcattctgtttagtgtttatga

SEQ ID NO: 138324 - DNA, 264 bp, Homo sapiens
ttatttccttgaaggtagtctttatttaggagactaaagtttattaaaaaaaagaaaaaaattaaaaacaatgaaaacctaagatctaaaccttgctccaccacaacattgtgggataaacttcatttatgttataccaaactatattaaaaagagtattctatataaagtcatatatacactgtaatgtataacctacaaaagatattcaacaaaaactacttgactgattgctttaaagaaggaaaaaaatatatatatatt

SEQ ID NO: 138325 - DNA, 255 bp, Homo sapiens
gccatgaggggaacagattagtacaggaagtgatacaacaggaacagggcccaggagagactgtgttctggctagaaaattccagaagccaggctgggcgtggtggctcacgcctgtaaccccagcactttgggaggccgaggtgggcaggtcatttgaggtcaggaattcgagaccagcctgaccaacatggtgaaacctcgtctctactaaaatacaaaaattagccgggcatggtggtaggcgcctgtaatc

SEQ ID NO: 138326 - DNA, 325 bp, Homo sapiens
ttaatttttattagggggaggggacagcacacttctacttaatgaagagaaacatttttacagtccagaggtcttttatgtttttgcacctattatgcttgaattcataggggataggttccagcagcccagactcctttccattggttctcacaaagtacacttctctgggtggagcagcctggcacttgagttgaacccaggtacctctctttttggcttcctttttctgatcattttccctcatgcgtttcaggaagctatcttggctcttagagtgcttaatgtactcaatccgcacattaattctcttggcaagaatctt

SEQ ID NO: 138327 - DNA, 458 bp, Homo sapiens
cgacttttccacaggaagtatgtgaaagttcaaatataggacaggtgccgtggctcacgcctgtaatcccaaagctttaggagactgaggcaggagggttactcgaggtcagaagtttgagatcagcctacgcaacatagtgagagctcatctctacaaaaaaataaaattttaattagccaggtatggtggtgcatgcctatagtttcagccactggggaggctgaggtgggaggattgcttgagctgaggagttcaagtccagcctgggtaacagtgagaccctgtctcaaaaatataaaagttaaaaaataaataaataagagagttttttgtttttttagtttttaaataggtcctatagcttttgaggatttgagatttctactaggttaaaatttattttaaaatatacgtgacaagatttcgaaagtacaaaaagataactcagtggaaga

SEQ ID NO: 138328 - DNA, 313 bp, Homo sapiens
ctttttcatagttgaagaaatgtattggaagaaggaacagagaaaccatttctttttcatagttgaagaaatgtattggaagaaggaacagagaaaccatttacaaaagaaaagaaaaaccatttacacagattatctctaatggataaagggaactttatcatacacacacacatacatacatatatgagcatgtatattctaataagcaaactgcagatgacaaattctaagtgcagaattatttaatacctcaaatcttccagtcctatcatcttctcatgtaactgccatgttctgcctatgcgttcat

SEQ ID NO: 138329 - DNA, 535 bp, Homo sapiens
  misc_feature (21)..(21): n is a, c, g, or t
tagggtttttgttttgtttgnttttgtttttttgagacaaggtctggctctatcgtgcagtggcatgatctcggctcaccacaacctccgcctcccgggttcaagtgattctcctgcctcagcctcccgagtagctgggactatagccatgggccaccatgcccagctaatttttgtatttttagtagagacggggtttcaccatgttggccaggatggtctcgatctcctgacctcatgatccgcctgcctcggcctcccaaagtgctgggattacaggtgtgagccaccgcgccttgcctggggctgttttataaggacactaatcccattcatgaaggctctgcccttatggcataatcacttcccacaagacaccaactcctagtaccatcactttggaggttaggacttcaacatatgacttttgaggggacgcagattcagaccatagcaatgaagaataggtttgtgacaaagtctttccaagccacagaaggctcttattgctgtaataataaactaaagggagaca

SEQ ID NO: 138330 - DNA, 259 bp, Homo sapiens
gccggcccagatttctatgggtgtatgtttgtgtacaagtcagtgtagagtctgggatctctggtaattatatattgttttttaagttgaatgaatataattatatctcaagggccaactctggacagtgtggagcatgtgatgtggaataaagcttatgactaatcccgttctaccctactggtgtccttatagagaaagtaggatctaggcgcttctaacttgggttaacttgggttaagttcatagaaaatatctg

SEQ ID NO: 138331 - DNA, 225 bp, Homo sapiens
atatgactctcctctcctacctgggccatgcccacagatgaaaaagtgacttatccctgggcccagcacacagggaatcttatttatttctcctagtctctttctacaggggacattgcgaagtatctcttagcccatcaattaattgatgcaaatctcttctcttacctgggatttgcccaaaggggatgttgtaacatatctcatggtccagcaagtaggaga

SEQ ID NO: 138332 - DNA, 389 bp, Homo sapiens
tgaaatggctttgcatttgcgcatctttgtggttgtgatctccaggggtgtttgggggccgatggaagggggcatcaaagtcctgtggtgtagtgatgtttcaggaagctatttcagcactgcagacctgagagctggctggttacatgacgcctggctcccagatgctgcccgggaactggagtttccttcctgcctttccttttcccagggcaaggaacagacctagtgctacaagccccccagttccatgtcaggcattagatttcattctcatacgccaccccacaaggcaggcatcatcagcatgttttataaatgggcacgcaggctcagacagatggtgaagacgcttgccgggcaacacagctaaggaggagcatgaatcc

SEQ ID NO: 138333 - DNA, 387 bp, Homo sapiens
gtttagtccaggctgggtgacagcgagcccttgtcacttaaagccaacctaagagaagagcttatccttttggaaaaacaatagaagacaattctgaaaaccaaattctgaacataggctagtatagcaagcaagcagggatagcatagagccatttgctcaacttccagaaagagttactctgttcatctctaaaaaatcttgaaaagggccgggtgcggtggtggctcacgcctgtaatcccaacactttgggaggccgaggcaggtggatcacctgaggtcaggagttcgagaccagcttgaccgacaaggtgaaactccgtctctactaaaaatacaatcaaccgggcgtggtggcaggcgcctatagtcccagctacttggg

SEQ ID NO: 138334 - DNA, 286 bp, Homo sapiens
ctgatagcctcgggcctggtagtatcaggaggacaaggaagccatttaaactgaaggtctacctagcaagggtatatgagcctgaatatgaacaacaggaggttattcatgcaagagaagagggaaaccctgacacaggttttggatcccaagtaggctgaagaaagcctcctctgcgtagaagggcagcttgagcctgagagaggtgagaaggatttcagcataggaagacagttcagcagggagtactacagcataggcagagtgaagatggtatctgcatggg

SEQ ID NO: 138335 - DNA, 330 bp, Homo sapiens
acgcccggttaatttttgtttttgtagagacagtgtcttcccatgttgcccaagctggtctcaaactcctgggctcaagcaatccggccgctacagcctcccaaattgctgaaattacagacgttgagtcacctcacccaacagtatcatctttttcttacacggaaagctcaagataggtctttttgttttttgtttttgagacggagtctcattctgttgcccaggctggattgcagcggcgtgatctcggctcacttgcaacctccgcctcccaagatcaagctattctcctgcctcagcctcctgagtagctgggattacacgcat

SEQ ID NO: 138336 - DNA, 571 bp, Homo sapiens
tgtgataccacctcttgggggcactattcaaactatatcccatgtgctacctggagagcccatgtagcctttccagcaaacaccttaacattgtgttaagacttgcctggccgtcgtacatggtaatgtttctatttctttattttcccagtactgtatgtctgtctttcccataagtgaggtccctccctaccttcatctctgaacttccctaaggcctggcaaatccaggacagtcaagtagattgggatctggatcctcaaaatccaggaccaaattattggaaataatccaattgttcattgacaagggattgtttaaatgaactatggtacctcctcaaagtgtattatcatattgttttttaaaattgtggaattaagaattccaggacatattgtgatattataaaacacaataatagaaccaaaaaaaaaaaggaacattataatttgtatgtggtgtagattagttgtctattcctgcataacaaaccatgtcagaacttcatggcctaaaatgataagcctccccgctcccttctgttagtctaatccgcccacctcagtc

SEQ ID NO: 138337 - DNA, 409 bp, Homo sapiens
atttattctgtagaatgcccgcattatggattgggcttattgaatcatgtaacctgttcctggtattttctgtaaactggtggttagatctggagccttgattaggctcagggtcagttctctgggcaagaagcattcctgggtactgctgtgtgctttgtattgtgtcacattgagaggtacagaacaactggctttcttctctttgagatgctcagatggatcactgcgttcaggcaggcagatggatcactgcgttcaggcaggcagatggatcactgcattcaggcaggggcagcctggtctatctgttaggaagtttcctgtcgttgctgattattgtctagagccaggatttcatcagtggatgcacaaagaggatttttctaattctcttagtctttctgca

SEQ ID NO: 138338 - DNA, 600 bp, Homo sapiens
tccatcaatcagtcgagtgaactgctgtgtgatgaattatcttgataggtgatttctatcacctttccattcttaattaacctatcaagatagtctataaagtttatccccaaatatctcccaaatccatccagttttctgatgagtaaatcaagcaatggaattagcttgttctgaatggttactacaactgctcactctatatagttataaatggaccatctttatctaaatactttctgttaaggattctgccacttcatatacctgtcacagaaccctttagagggaaagaaggattctaaaaaagaaggttctgtaaacctaaattttctcaaaaagaggacactttagcttatccagtaaacttggtttatgacaattcaattctttcctgaagggatttttaccattttaatttttatctcttaaaatatgcctagatttagactgtatacagcccaaactcttcagcttccctaattttacttcttctaggactgctatttatactttggctaatataactttctcttgttaatgataggaatctaggaaattcccagtaattatgcaaaaaatgtataactaaagtatttg

SEQ ID NO: 138339 - DNA, 207 bp, Homo sapiens
tttccctgtttcctagtaatgcataactctatctctccataaggcagggtgggccaggcattcagaaagttggggaagctaggcagaatgtgaaataagtgaagggaattgaagggtgctggaaaacctcccatcaaaatttcctcccccatgttattccaccattaggtaattagctccctggttcttaaaggattacatcacttt

SEQ ID NO: 138340 - DNA, 497 bp, Homo sapiens
tgtttatcgatgccacctaatatatcaataattcctggaaatcttgatgctttttaaggaacactaggaagttattgatatatttaggtggtgtgtgagctgagaacactattttggaggaaattttatagtgccatatatatgttataaacatatgtgaccataatcacatttgtaggaaaaataacctattaaatgatgtgtgactggctattataaattttccactaaaatagttaattaattgttcgctgatttttttctgttagtgcttggtacagtatatattcttctgatgcttattgtagtataaggtacatttcttgaaaaaaacaaattgaaattactctgcctattctgttcgcaaattaggaaaagataacaattcttttagtagtggaatattttggtccagttcttgagatgccagtgaaggtcaagaatgtagcttcagaaccagtggaatctgagcttacttggtggatttcttatggaga

SEQ ID NO: 138341 - DNA, 292 bp, Homo sapiens
ttgttttcttatcatgtaggcattagtattgaaaggttaaggccttcatcctcactatgctgctgtggtttctattggttgttggagaaaccccaggctgataatactacttttatgttgattactcattgtaacaactgtggggatggtactttcaatgaataccagttgttaaatagcatcttttgctcattgtggaatggcaggaaccttttggacttcttggtttgaaatcctttgatttggaagatcacttttttacaatctgttatcaacttaattgcctcactcc

SEQ ID NO: 138342 - DNA, 286 bp, Homo sapiens
gccaggcaggggcagaggggcatgagccaggaagctcaggtgtttcctcttcagaccaaaacacagtcttggagagtggtgggcatgggtgggcgctgtttcagcctgtctgtccatttccccttggagtgctagcatcttgatttttttcttttttttttttcccttttttgagatggagtctcgctctgtcgcccaggctggagtgcagtggcgtgatcttggctaactgcaagctctgcctcctgggttcacgccattctcctgcctcagcctccagagtagc

SEQ ID NO: 138343 - DNA, 134 bp, Homo sapiens
aaagaggggactcagagatcctttgtgccattcatgggggctgagctgccaccccagggtggtagaagtgggaagctgagtccaggtgatgaatacagcagcaaatgtttattcctcactcgcctactatacaa

SEQ ID NO: 138344 - DNA, 418 bp, Homo sapiens
tctttcacagtgcacggcagggcctcagcagatatgtgtggaaggaatagttgtctgagacacaaggccagagggtcctgatatgagagtaagaactgctgaactaccctcagctccaccttggatcagcactgcagaaaggccgggatggacacctcctgtccccctaccccaggcacctgtcacctcctcacagagtcacaaaaaggcaggacactgaacttggaggcgtccgtagagtcgatcccactccttcactttcggtaagagaaaaatgaggcctagacagggaacatacaccttaggacacagggcacagacgcagacaacaccagattcccttgattgtaggagatggaggagaagaccctgtcccatccaagctccacctggcacccagcgaggcagttgggcaaga

SEQ ID NO: 138345 - DNA, 262 bp, Homo sapiens
gaccttataatgagtaaggagaagaagtgtagtgctggacattttacaaggatgcctgttatataactaattatctaatattgcgtcgatagcctagtatatgcatctggagcccagggaagagatccagcctggagatataaatttggataaccagaaagctagaattaagttggtaaaatgctaagctcttggcagagttgcattcctccaagcactttatttaactttggaactctgttacctagctgaataatctcaa

SEQ ID NO: 138346 - DNA, 142 bp, Homo sapiens
ttttatttatttttttactgagtgttagggtaatttgttaatggggtatatttggtgacataaaaccttctgtcgattcatggcagtctggaacggagtggaagcgtcccactcctggggaacccccacacacatttggctg

SEQ ID NO: 138347 - DNA, 409 bp, Homo sapiens
ctttttctctagctcctggtccttcctgatacacatagtagatgctcaataaatgtatgctgactgaatgaatgaatatgcaattttcactatagtccatctgaaattaggctcccttggccatccagaccttctagggcttcccacatgcctcccactgtttatttgtgagcattcaaagtccagaggctcttgtcaccattgccctcaacacaagagagttagaaaggtaagacaaggctcaaggtcacaggcatggcttttagaggcaaagaagaaaggttaagagcagaggttctcaaatttcagcaggaactccagtcacctgtgaagactgttaaaaatgtagattccagccaggtgcagtggctcacacctgtaatcccagcactttgggaagctgaggcgg

SEQ ID NO: 138348 - DNA, 161 bp, Homo sapiens
gaaagagaaactgtggataaagggggacaactgtatagctgaggtggctggttttggagccagcagctgctgtgacagcttcctgatgaaggcagacacagcagctcctctgatggtttgccatatggttttgggagtcatttgtggaagtttggtctagg

SEQ ID NO: 138349 - DNA, 343 bp, Homo sapiens
gatttaaggtgctctagaggatctttactggggcttaaccctgaagaagatgcttgtttattttcacttttcaccatgatttaagtttcctgaggcctccccagtcatgctgaactgtgagttaattaaacctctttcctttataaattacctagtcttgggcagttctttatagcagtatgaaaatggactaataacacacgtaagggccatgtgcctatggatcaccagggttttacatttcagagtaagatatgggcaggaggaagagattgtcgaggcatcctgggctaagcacaaagagctgagctaggaaacacccatccataaaagtggacggagg

SEQ ID NO: 138350 - DNA, 359 bp, Homo sapiens
gctgggattacaggcgtgagccactgtgcccggcccctagggaaagaaaattgaccagtggttgcgagggattggaagagagtttgactactgagggcatgagggaatttttttgggtgttctgtgtatcttttatatctgttctatatcttgattgtggtggtggttacatagttatgtgttttttcaaactcaggagagtatatataaattacacctctccaattaaagttctagcatatattaccatattaaaaattattttggaaatatctcagaaaatgttttattttgtttttattttcatgttgtagagacagggtctcactttgtctcccaggctggagtgcagtggtgtg

SEQ ID NO: 138351 - DNA, 366 bp, Homo sapiens
tgggtaatgtgctcagccctctggtctaaagatgaattatctccagcctggagaagatcatcactgacatgttccagcatgatgtatatggcattcatcctcggaaacattaggagagcaggcgcgtttctttctccatcctgtaatgtatcgatagcggatgccagatgtatgtgtaaactcccagacccaggatgaatggatttttccccctgagaaatatctgtatcctgtaaatagaatgttataaacatttgtgggacagaaaaagtctctggccttttcacattgccacactctcgggtgatggatctgatctgctgaagagcaccaagctttttccctttgtgttggacacgtcttgtg

SEQ ID NO: 138352 - DNA, 431 bp, Homo sapiens
gccgtgcccatctcttgggtctcagcttggccctttcctccgggtgttccccctgtcctgccctggtgcctgtctgccacactcagtcaacgcggtccctcttcggttacagggcttgttaacactccattgaaaccggcagacttgactgtcccacccccacccctggagtctgcgcctccagggctgaaatcacatctcaattcttaatgagatgtctgcttccttcactgaagggactttactaagtgtttcattgcaagttttctttaaatagccaggctctcagagccatttcaaatagggttttatgttcctaaattcagttagttctcaacatttgagaccaattcttgcagcaaggtggagaataactctcatctgtgaaagaaaagcggttcaataaagcttgataagccttttgtatccgg

SEQ ID NO: 138353 - DNA, 347 bp, Homo sapiens
aagcgctccttccaaaggctgcctgctcatctgaaaccctcaccccattttagaggcttagattcagctggggaggacccacagcccgagaaggaaaacaaaccaacagattatgcttctaggtggccacagcaggccaagccaagggcagggtggccaaaggtcaagcagcagtcagactgagccaacacgagcctcctgtgacaaagccagagccagagcagggcaattttctaactataaacggaaactcaagaagctccaaaccgcacaaacacacgtgggaagatgagggtaaggcacagaagctacggggtgcacgcacacagaggaaggggcttcatgac

SEQ ID NO: 138354 - DNA, 396 bp, Homo sapiens
agtgcacacaaagggacattcggttctgtctgagtcttcaaaatgtctaccttccatgggaagagtgaaacggatgagaaattctaaaaataccaatagccaaaatgaaagctagaccagaaataaatgtgtgaaaatgcatttccgcatgtcagaggcctgccagatggaacttcgcagaggtaagtgatgaggacgtgctgctgtctcctcaggccgggagtcagtagcccccagcaggtccctggagaaggtgggggccatcagcagcacaggcaggcccatctatcagagcctcgtccttggtctccagcctccctggatctcacccacagctgagtgtcaggactcacaagtctgcgtctccagcccggactcaccctggagccccggacc

SEQ ID NO: 138355 - DNA, 246 bp, Homo sapiens
gccaccaatacagtagtctttaccaaaaataaaaaacaaaatcctcgagtgctaacagcaacaaatccagggcagaaatactgccactgaggttgaagttgggggtaagagggtattgtacgtgaccttgggcacaggtggcctagcatgaaacaaaactacaacccactcatggaactagcaggaggggtgggattttcctacagtgataaattccttgtggactagggagaaacctagagtgaa

SEQ ID NO: 138356 - DNA, 275 bp, Homo sapiens
tatccacattactttgcccacaaggagactaagactcagtgaggttatgtgactttgtcccaagtctggaatttatttctcccacttaggaggtaagggctttttgcatttaatcaaagaaaatatgctggtttaattagctgagtatccttggataagtcatgtaacccccaaacctcaatttcctcatctctttaaagtgtgaataataccacacctaataacattgttgctataaaaattaaagaaaatactatatgtgattactgatcaag

SEQ ID NO: 138357 - DNA, 449 bp, Homo sapiens
tgaggcaacctctgtccctgcaggacaagagaaacctgcagtttggaaaggaagtatagctctgaagtctgaagacttccaattggatgaatgttgaggaatactgagaaatcaaaaccaaaactcggaacttagaggagctatataaatttagaggtgttagtggactttagtgtgtaggcagaatgttttaagcttggcagctgcatggtctttgaatagctgcagtctaggaaagaggcattaagcctcagagcacatggtagtctaaccatagggagggactgcagtttatggtggcctggtctacaggtgagtgagtgaaactgcgtttgcaaaattacgacagtaagagaaattctaacatagctgactccatgttgcttctaacctctgaggtgtccctggtcattcctgggcataggccgagctaactttgggaagaattt

SEQ ID NO: 138358 - DNA, 387 bp, Homo sapiens
gatgttgacgcattggcttttgcacctcggtctaattggatgcaccagtcctcttggtacccagatgtggtgccctaggaacatcttcccgggatgcaccagtgtgccgtggtacccaggtgtggcactccagaaggctgtgccctcacactgcctgcagaatgggtgtttatagtagtaacagagggaggctgctttctgcaggtgtcacagcatcacccattactggaaaagtttacatacagataaatttgtttctgcctcacagtgagaaagaagcctcttctcttctggggctatcaccttccagtgctaggtcctcttcattggagacccctccctgtcacagcacaatgtgggtaataaaatggtttgtgacctgcggga

SEQ ID NO: 138359 - DNA, 227 bp, Homo sapiens
ttcttgccctccgacagacggcctccccccatcggtactcccccatcccggacagctcgtaacgccccagccgctcggcctggcactcctaggcaatgggggtcagagcagaggggcccatctgcagccccagggcgcacttcgcgccacgtggcttctgcaggtggaagtccagcccgcgctgcagccccgcctgggcagtcaggacagcaatctcagcacccacc

SEQ ID NO: 138360 - DNA, 264 bp, Homo sapiens
tgaaatctgacagattttttttttcctctgaaaaatatttcagtcactctagtcccagaaccaccaccagcagaacttagaagccatttatagcctcttacagttgttctgagaagagctgttttagaaaaatccccccatttccccagaaattagctctctcccatccttagccacctggaaaatattcagatcgttacaaagtcagaaagggcccggagctgacagcacaaagtcaatttgacagtttatttctttgtagca

SEQ ID NO: 138361 - DNA, 132 bp, Homo sapiens
ccagcatagagaccaagccgtgttctagaattcaggccacatctgaagccaagcccagctctagaactcaggtcagccctgagaccaagcccagctctagaacccagataagctctgaaaccaatcccagca

SEQ ID NO: 138362 - DNA, 430 bp, Homo sapiens
aggtgaaactagacagtgcactaaggcacttagcaaaacgcgctgccttgagaacccttattacgccttccttccttccacctcaccccctggccagacactctgggggtggagaggggcgctgacccaggccccagacgcccctcccgtccgccctccctagcaggcaggagtcccggctttcccgttccttaaattggataattggagacagaggcgggtgctcgagacggagaaatccccaagtgggcgaaaggcaaggggcctgtcctagtttccctgcactgggggcccccaccctcgccagcgctccctccggtgcgccctgggcgcgcagtctgtgcgctcgggagcccccagcgccggctgtcgaccccctccagagcccggcggtgccagcctccctctgttgcccgccaggcgcggtgtc

SEQ ID NO: 138363 - DNA, 170 bp, Homo sapiens
ggctgtcagctcctctccatcacttcttcccaccttgtggtctcagagggaaaatgaacccaggctatagactgggctggctctgatagatcaggacccacccctccatttgaggtctgcagggctgtcttgactcctctggaaatggacatgactctagaggaaggtgc

SEQ ID NO: 138364 - DNA, 345 bp, Homo sapiens
gctgattggtccataggtggtcataggcaggcctggaaaaagcaccgtctgattggccaaaaggcatcagtgaagttctcactccaggttgcggactccacctggaacggacagctgagcccccaggcttcaggccatccctggcttaaaggtagggtttcactagagacccaccccttcctgcctaggaacctgtctgcctcccactgccatcaacatgccatccatggcacgcaggctatctgcactgaggggcacccacatgcccacgctcagctgccctcaatgcccccagcctccctcccacactcatcactgcccgaagtccagaaagggctgaggcag

SEQ ID NO: 138365 - DNA, 419 bp, Homo sapiens
cacacttcccgtttcacgtgtgcagtcagtggaggtttgcgtgtacgtggatctgtttagccatccccacggctgattctgaagcattttcatcacgtcaaaagaaaccctgccccttttagcagctgcaccctcccccctgcccttggtagccacaggtccctttctggctctggatttgccgtcttgagtcatttcttggcctgcgcggtgtgcctgctgggcctggcttctccctaagccttgggtattcagggctcatctccacatgctgcctgggccagcgcttccttcctagttagggctgaacattccatggtccagacacactacatagtgttatctgctcatcagttcatgggtgttggggtccttctccctttggctgttaggaatcctgccgctaggaacattcatgc

SEQ ID NO: 138366 - DNA, 312 bp, Homo sapiens
aatgagcataattgtgggaggaaaaataagattatccacttaatgagcttaactctgcgcttggcagataataagctcccataagacctttgttgttatattttttcttcttatctctgttgcagcacttttctattatttaaaactttttctatcaagcagtattgtctgttattctttcatatagttttgttcacttatagcatactacgtcaattttcataaacaagattgtatctatatggatacatgtaatagaacatgaatatgtatcaaacactataaaatttaaatttatatataaggatgctt

SEQ ID NO: 138367 - DNA, 546 bp, Homo sapiens
aagtaatctctcaacacaagggcaatatggacagacctttctgtaaggaaggtacgccacagaggacattcatgattagagctttttaggtccaactaaagtctcattgctcacaatcatttgaatttattggttttatagctttgtttcatttaacttgtaaatgttcgggtgttatcggtgtataaaagatacaacacacacataaaaaaattaaaaagacaaaaaacaagaaagagacaagatgaggagtttatacctaattttatctttgcatatatgtgacatactaaaaaggttttaagttaacaatggaggatcctgagtatcttatttgggtataagaaatactgctcagccaggcgtggtggctcacgcctgtaatcccagcagtttgggaggcagacgcaggcagatcacctgaggtcaggagtttgagaccagcctgaccaatatgatgaaaccccatctctactaaaaatacaaaaattagctgggtgtggtggcatgtgcctgtaatcccagctactcgggaggctaagacag

SEQ ID NO: 138368 - DNA, 178 bp, Homo sapiens
agaagaatgaatatataaggaaatccaaaaacatttttaaaagtatgcaaaagaaatggaaccgccagattctgagatgtattgtaatgctacaataagatatagtataatatacaaacatatcaaagacaatagaaggcccccaacagtcctaaacaatatagaggaaataattatt

SEQ ID NO: 138369 - DNA, 219 bp, Homo sapiens
ttgggatttggggggatgttttttggaatcgttatcaaatgttattttagccatttcaggtatattaaaccttctcatgaaaactgcagttactgtctgagcatggtcagtatccatgatttcactcctatgcagatggggccagcactgcgtggccagtcttcctaacgaggcccatagcgagaaatttggctgtccgcaaagctacaccctcaggtt

SEQ ID NO: 138370 - DNA, 253 bp, Homo sapiens
atgattccaaccgatgcctgtcagtttagcagatgagattggaacagctgtatcttcaatacacatcattgtcttaaatagatgctcagaatgaattacaattaaattacagagctgtcaaaaagggttataattatagcatttattcaccatatttacaaggccagacatacacaaaaggaacagaaggctgaagaaaaagaacaaaaaacccactccacattacttacctcagcaggaaatctggttgggg

SEQ ID NO: 138371 - DNA, 488 bp, Homo sapiens
tcatgaactccattgcttcccagtgcattctccctagtttagcaaggatgcctttttctccacaagaaccttttagtgtgtggaaccgcaaactgaacacagtgcttaagaaaggatcaagtggactagggtggatctatctcctcccccattcagtaccttgtatcttcattaaggccacctaacaatatcctgttttgctatgtttgatgctttcattgtcctgctgacatatattcaatttgtaatcaactgaaatccataagccacctatctccccagtctcattgtgtactttttgttgtgtctgtacaaaacttcatgaaaccccattgaatgttatgttgtagcctcagtctgattcctgtttaatggtttccctgaagccctcattcagtcacatactctgccatctctgttgctggcaaatgtgatgggtgtgactaatgcccacatcaaagccaccaatacaatattttcaggggagg

SEQ ID NO: 138372 - DNA, 512 bp, Homo sapiens
actgataagtgccccactggggatgatgcttccctaacacgcgagagttctcccatcaagtttagggagcatggaggaggaaggtgtaaggagggggaagcaggaaaggctttctgaaggaagtgatgtttaagaacacagtgttccccagagatgagaggaaacagggcaaggttgcagaagtgcaacaagtacagtaaggtcaaagtaaagagtgtaaacagacgctgcaatggcaagccagagtaggtcacccaggcctcccagttaataaaaggattaaggagtatatagtatccatggggccatcaaagactcttatgcaggagagtgctgtgttcaagcttgcatggtagaacaatcccacaggtttcagagtagagaatgagccagtaaaaagggtcaggaaggccagatggccaaggcttgggctgaggtggtggcagtggggatggtgactggtaggctgctgtgagaacagaatcaacaggtcttgatcattgttgagaagt

SEQ ID NO: 138373 - DNA, 137 bp, Homo sapiens
cttttggatacctgtgaatgagggcatgcttctttctcatgcagggacctcagcccattgattgcatttatttggttgcctttgtttttgtttttgtttttgagacagtctcgctctgttggccaggctgaagcgca

SEQ ID NO: 138374 - DNA, 425 bp, Homo sapiens
gaaggacaaagcaagtcgtcttcctgaggctggaaaaaaaaagggttgagaaatcttccaagatgagacaaattccctgtgaattcagcccgaatgaggagcagtaactaccagccagataataaggaacaggaagcattctcatgagagaaaacaggaaacttcaattgagaggcttaaaatagcaggggaccttgggtaacaaaaactagttccttagagctggcggaaacctgagagttaggagacactcaaataggaggcagaaagcatgagcagtcagctcagttttgtagtaagcttatctgaactcatgtatgatctccacctcttacagtctgggtgacattgggcaagttaatgttttcatctataaaataagaacaataattactactaagtcactgtaggaactagagatatct

SEQ ID NO: 138375 - DNA, 373 bp, Homo sapiens
aggagtcttcggctgtagtaagctatgatcacgccactgcaccccaacctgggtgatagagtgaaaccctatctctcaaaagaaaacatactctaagaacaatcctttcttgtgatagctattactcaaatgacaaaagctgggggaaataccttgtaaatatcagaaaaaaacttctcctcctaagtagtttaaaaatatgcagataggcgggcacagtggctcacacttgtaatcccaacacttttgggaggccaaggtgggcggatcacctgaggtcaaaagttcaagaccagcctgaccaacatggtgaaaccccatctctactagaaatacaaaattagccgggcatggtagttcatgcctgtaatcc

SEQ ID NO: 138376 - DNA, 287 bp, Homo sapiens
atccttctgaatattttattctctgtatcttctgcccatttactcaagtgttttatttaaggttttgtttagagataatcagaatttctttcattctgttatccctcaggtacttgaacacagttagcctggctcatcgtacctagatccctaatttgtcaattctgtgggaaaaacatcttgagttactgcaacttttctttatatgacaagttgccaccccatgaatgatacatattgctgcagttgttattgaaacgtagttcctgtaatgcaggatcacagga

SEQ ID NO: 138377 - DNA, 509 bp, Homo sapiens
atctccaacattggggatgacctttcaacatgagatttggaaaggacaaacatccaaaccatatcattttcccctggcccctgaaatctcatgtccttctcatattgcaaaattcagtcatcccttttcaatagtttttcaaagtcttgacgtgttctaatgccaactcaagtgtcccaagtccaaaatctcatctgaagatgagatcctttgacctatgagcctttgtgatcaaaaacaaattatttatttcccagatacaataatggtagaggcattttgtggacattctcattgcaagagggagaagttggccaaaagaaaggggcaaacggccctatgcaaatttgaaacccagcagggcagtcatcgaatcttaaagctctaaaataatctactttgactccatgtcctgcatccagggcacactggtgcaagggctgggctcccaaagccttaggcagctctgcttctgtggctttgcaggttgcagccctcatggctgctct

SEQ ID NO: 138378 - DNA, 207 bp, Homo sapiens
ttccaaattgggtgacgctagaatttctctgaggcaagtccctggtgagtgccaggtaacggaggcgcctcatttttgtgccgaggctcaaggtttcctggctcccaagttttcccagggctgactcggtctcctggggaacggtggcagaaaggatgagaccagagacagtgagtgagccccactgcatagtcaggggaaaggaga

SEQ ID NO: 138379 - DNA, 186 bp, Homo sapiens
gggatttgcttatttctccacaaaagccagtcagactttaattgctactgcctgggacccctacgaggcccaggaaataggccctttattgcttgaacaaagaaaagaggagaggtctctggctggctgcaatcttccccttctaggatgaatgaatctttagagatggagggacttaaagagatg

SEQ ID NO: 138380 - DNA, 368 bp, Homo sapiens
tctggtgatggctccgttaaagtaacctcataactcctacaagtgagaagagaggatgcttggtttcttgacatttaatttgtaccaaaagttctccagggggaactcacaggaaacaggacaagccaatttagcataaaaccctaaaccctttgttagctgaaaattcaaggagtatctctaattaaagcccatctaagagtccttacttatcaagggtggcaaaggaggtcatttcagggaaaagcttccttaaaaaaaaaaaaaaagggggggggtatctattccatcctgctggattttgaaattctatagccagagattagtttaagatcatttatttgggacatgaagttactgtggacctg

SEQ ID NO: 138381 - DNA, 135 bp, Homo sapiens
ctttgaggtctttttcattcttcacctcttttagtcttttttcctttcttctttcttggcgttgcagctgccatattatggcagtggaaatgtttgaatgaataaggaggggatggacatctgagtttccctgtt

SEQ ID NO: 138382 - DNA, 353 bp, Homo sapiens
  misc_feature (81)..(81): n is a, c, g, or t
  misc_feature (140)..(140): n is a, c, g, or t
gtttggctgtcgtgactgcggaaaagctggcggaggaagtgacagtctcaacaggactccagccagagggcgcaagtcaangggagagttaagtaagcagaaaaagtgataagaaataagctaggtgccaatatcaccangggtgttcaaccaaccaatgagacagagcgcttgacatcaagatggcttttccagtccatctataatcaaaaacagccagggaaaggtggggcgggcacgctggctcatgcctgtaatcccagcactttgggaagctgagacaggtggatcacttgaggtcaggagttcaagatcagcctggccaacatggtgaaaccccatctctactaaaa

SEQ ID NO: 138383 - DNA, 516 bp, Homo sapiens
ctctgatgctgactcttgcctctcttttcgcttacatcctagcccttccaatctagccaagcagaattctttttttctttctttcttttgagacagagtcttgctctgtcgcccagactggagtacagtggcgcgatctcggcgcactgcaacctccgcctcccgggttcaagcaattctcctgcctgagcctcccgagtagctgggattacaggcatgcaccaccacacccagctaatttttttatgatcagtagagacggggttttaccacgttggccaggctggtcttgagctcctagtctcaggtgatctgcctgcctcggcctcccaaagtgctgggattacaggcatgagccactgcacccagcctagccaagccgaattccaagtgattcccaacacccacaagctccctcaactggacctttgcacatgccagttgctctaccaggagcaccctcccaccccaccacctccaaacatattcacctggccagagcctcgcattccttag

SEQ ID NO: 138384 - DNA, 528 bp, Homo sapiens
ggtcttgaactcctgacctcaagcaatccacttgcctcggcctcccaaagtgctgggattacaggcaagcccagcctcatagaaacttgttataggttttagtaactggtagaattagctaccttcttgcttttttttttgtagggttttcctatttattcttgtttgtttattcttcccattaaactttctaatcaatttgtctacctccagaaagtaactttaagcttttattgctatttaaactttataagtttatgtaggaaaaactagaatctttatgatactgaattttcccatctaagaacaaggagctacttgggaggctgaagtgggaggatggtctgagccccagaggtacagactgcagtgagctatcatcacaccactatatctagcctgggtgacagagtgagaccctgtctcaaaaaaagaatggtttctagtttgagatagaagtttcattttggcctgcagtaaagggatactcactttaatgtggtattatagagccgctaaatctcggat

SEQ ID NO: 138385 - DNA, 166 bp, Homo sapiens
tatcacgcatgtgatacaggaatgcccatctgaccactgaagatcgcatctattggccaatgcaaagagaagttggcatgatagggttttccatcagggaggtaagtgaggtggggcagggtctggcgctcaggggtctgtggcattgccatgcgtggattgccag

SEQ ID NO: 138386 - DNA, 161 bp, Homo sapiens
ctcgtgaagttagtatgtgacattctggagagtttaacagcatctgtagaggacacaacttcccactccatgtctgccgggctctttcctgtgttttccacccgttttctctccactctgcattctggggactttctttcacctgtcttcctggtcactaa

SEQ ID NO: 138387 - DNA, 345 bp, Homo sapiens
ggagaggctgggagagactgggaaagactgggaaagatggcataggccttgagccaggagtgtgagttcatgaagataggctgggggagtgagagatgcgtggggcaagagggaaggcagcagttcaggggtagcccatggagctgtatctggagcagccacgtgggtcacttctacccacagtggaggtggactcttgtagccagagctgtggacaacctctcagaaccagaagacccttgctgccctgtatgccaaggtctccctccggcctgggtctcagggatgccagctgcaaactgggagggccattgtacagacactaggtggctgaggtaccagtta

SEQ ID NO: 138388 - DNA, 603 bp, Homo sapiens
gtgtcacagtcgacggagactctcacatgtgccgggggtacacatgtgagagggaccagacacgagggggtccccgtcctggcctagggcatggcttctggccaactggggaggaggtgctcagagatgactttgcagaagaggggtttgctccacttggaaagaagggaggagaaggatatgaatgagggagtctcaagtacccttagagcagatacaaaccaaatctgaacatgtgtgaatgctccggaaaaaaacatcaaatgtaagcaaacccctgcagcatgctgcaagaggttaacaaccagctctctggaggaagaagtcctgatgggtcgtgtttgccagtttccctggtgtaaatattcccatggtggctgatttcaagctgtcgttgtgatgtcactcagtgcagagctgaaaggagatgtgcatgaccagcagttaggaaatggttgcctctggctccaacacattaagcccagttatgagtaaatgtgcgtggacatgcacagaacatgtgaaatggctcaacatgcagtattagcagagggtgtgaggagagtcccgtcgaacgggtacgagccataggtggtcaaaaaa

SEQ ID NO: 138389 - DNA, 320 bp, Homo sapiens
caaaggcaggaacttttgtcatttttgttcttcaagatgtccccaatgcctacagcagtaagtgcactgctgggcacacagtaggtattcaataaacattcaatgaatgaatgaatgaatgaatgaatgaatgcattgccaaaccttgcatggctgccttttgttcctgccctagctgctgcctccccagccggcctggctgctcccgagagcagagatgtgccttttcctgtgagccctgccacacagttgaacattgggtagagcccatgggccaggggcagaggcaggaacacactcagggcagcgtgctgcctcct

SEQ ID NO: 138390 - DNA, 585 bp, Homo sapiens
gagttccctggcaagtttgttccttcataaggaccatactttttgctgttgttgacggcttcagcagttaatggagttctttattcttacatttccaatcaccggatataattcagcctcctgaagccccagttttcattctttttcatgttgtaacatatcccttaaggtttctttatttccaagtaaaaatcctggattttttccatggtcctttggtaacactttgatatcctccaagctcagtcatatttggtcacaaatgcgatgctctcccaatcatgactagtggcttgaggtagagccctccttggcaaggtccagatcgctacaggtagacactaaagttttaagacatctccatatctgtgagctgaaagctccctgctgtttccactggagctcgattgtgtttttattgtgttcaggctggtagagggtataacagcattggcagaggagctggctttgagaggatgaggcgtggtgcttatggtggaggctatggaggctatgatgattaccatggctataatgatggctatggatttgggtcagatagatgtggaagagacctcaattact

SEQ ID NO: 138391 - DNA, 264 bp, Homo sapiens
gtctggagattctacacattttccacagaaaataatattcagccagggagtgtatctcttgagaattctctcagtttaaactaacagataattcaactaaaagtagtagcttaagcaaaggacagttacctgggccaaaggctctgtatgcacaagtctgtttgtgcccagtaaagactgcttacaactaacaaaacctccaacttttctcacataataaatctggggctagttcttccaggctggtgtagcctctcagtggta

SEQ ID NO: 138392 - DNA, 247 bp, Homo sapiens
tgttctaaatgtgagaagttattgggtgcttttaagtggaggagagcattgtttggcttacattgtaataggataactctggctgttctctagaatagggagtagagaaaaagtaggaagatgagttagaaggctatcattgggatgtgtaagagatgaaggagagtttagaccagggtgataatgagtgtgttgggaaatagacgaagatagaacagtggattggatgtgatgttggagaaactgg

SEQ ID NO: 138393 - DNA, 311 bp, Homo sapiens
gtaaaagctgcctagaagttggctaggggaagagtgaggtagggaagcgtgagaaaagcatggtgatgccttttctctggcatactgtgccatgtcaaagtggtggaaattaggccagaggaacaggaaggggcgggatcatgaagagccttggagcttgctgcccacctgcactccagcagtgaaagtctgtgtctggtccctgcagaggacaaaaacatgtaatagtgtgctcagctaaagctgctgaggttccctggggttctcagattttcctctagctctgattttcaaccccaagctttgtaaaa

SEQ ID NO: 138394 - DNA, 369 bp, Homo sapiens
tcctccaccaagctgatgtgttccttagcactgatggcaattctcttcagtctggggacaggtatcatctcctttggtttatcagtggacggagcacgggctgcagggttcaacaaagcatccatgtcctcaaagaaggcgcagggttctagcatgtggccatttctcacctttcgatagcttttctggagacttttgaacttggttcgacactgttctggggttctaaggaagccacattctcgcaaccattcagccacagcaccatacacttggctatttcggggacaggcctgaagtgtttcataaaagcgagactctttgagaattgccaggaaagtctttgtttcctcatagctccaatgcaca

SEQ ID NO: 138395 - DNA, 177 bp, Homo sapiens
caaagtgctgggattacaggcatgagccactgtgcctgacgcagccccattttctaccacatcaagtttaaaatcccctgcttggctttaaaagccctgtcatctgccactattccatccacactcccagaccctagttctcctccccacccggaatatgccagcctccttctcagt

SEQ ID NO: 138396 - DNA, 339 bp, Homo sapiens
cgggtgtggtgaagcagtcgctccaacagaaaaatgcagccgaggaaacggctgagaaaggagaaaggagctctgtaaacctgtgtcctatagaagttcctacccgtgaattccctggctgcgttctcaggccaccacttttaaatgctgaaaaggagcatgtttttcttttgggtcacttaaaaaacattttcatggctgggcacggtggctcatgcctgtaatcccagcactttgggaggccaagatgggtggatcacctgaggtcagcagtttgagaccagcgtggccaacatggtgaaatcccgtctctactaaaaatacaaaaaattagccggg

SEQ ID NO: 138397 - DNA, 278 bp, Homo sapiens
gggtgtgtaatggactacgtcacagatgaggaaactccggcacacagagatgaagtgacttgtccggctagtaagaggcaaggtcaggacctcaactgagatctgactccacagtgtgtgctcttattccttggacagcaacactagaacaagatcgggtttggcacctattagccaacagcatcaataagaacaaaaacaagcctcgggggagactgctggccctgccccagggcaggtgctgacgcaggcttggaatgaaggccctttgtgaggtg

SEQ ID NO: 138398 - DNA, 399 bp, Homo sapiens
ttgcccaggctggtctcgaactcctggcctcaagcgatccacctgcctcggcctcccaaagtgctgggattacaggcaagagccaccatgcccagcctgcactgtcattttctgtagctaacttcccccaacactcccacctccacatagcccttaagttaaaggagaacaaggaagccctgtgttcattaccgtgtctctaggggcctagcacagaactttgaacccataaagtgttgagtgaccactcccctgtaatctctactttcttagcatccattagccaacagcctaagcaaaaccaaagtgaatatcagagtagatacaaaaataaaataagctgatctggatattatcctgatgcagatgggtaatggccactaataagatttggggggt

SEQ ID NO: 138399 - DNA, 379 bp, Homo sapiens
gcatttctaagggaaatgaattgttggcagtagattcagatagcaatgatctttctaaaggatagagtaacttcatattggaaataacctctgagcctgcttgaaatttttaatttctggggtttagtgaaagtatttcctttacatattcaaagcaatgccaagtggttttatttatagcactcatttttatagctatagaaggtgcagtggtatgagctaaatccagaaggcaggatggatgtgtgagaggatgaaaagcaactagaacctgagtatagtccagcttggaagcaggaaaatcgatggttgagaaatgaggcaaggatctcttgagcccaggagtttgagaccagcctgagcaacataaactccatta

SEQ ID NO: 138400 - DNA, 474 bp, Homo sapiens
gcatttctaagggaaatgaattgttggcagtagattcagatagcaatgatctttctaaaggatagagtaacttcatattggaaataacctctgagcctgcttgaaatttttaatttctggggtttagtgaaagtatttcctttacatattcaaagcaatgccaagtggttttatttatagcactcatttttatagctatagaaggtgcagtggtatgagctaaatccagaaggcaggatggatgtgtgagaggatgaaaagcaactagaacctgagtatagtccagcttggaagcaggaaaatcgatggttgagaaatgaggcaaggaatgtagtggctcaagagatcctccctccttggcctcccaaagtgttgggataacaaggataacaggagtgagccgccatgcctggctgagccagtaatttttactctcttaaaaactaggttattcctaatgattctgcctttgag

SEQ ID NO: 138401 - DNA, 534 bp, Homo sapiens
aaaaggtaggggagctgataaccctagaagctcattttgtgtctatttctcgatgccacttgggaaattctcaagttgtcatagatcatatttccctttaagacgcctacaaaagaagttaggaacatcaagcagaaggctgggagacccccttcttccagtaggattcctggtgctcaatgcacatggggttgaaactgtgcttggccaagcaaatcagaaagaagctgggctttccttcttggcacagatgagattcttcttgtgagaaatggtggaatcttcagccatgccaagatacagggaccgagtccttaggctcagattaacaacctgcgcaagtttacaaggcttcgtctttatttcttatcgttatttgaagttgttccaaaataatgtcttttacaaagaaatactgtaaatatgacacatgaaaaggtcatttgttttgtagaatgataaaattcctgttctattattttgtatagaactgaggggcactatgaataagagtgataaagatatgtaggaagg

SEQ ID NO: 138402 - DNA, 188 bp, Homo sapiens
agatctcactagaaagctgatatttgagcaaaggcttaaattgctgaaggagcaagccatgcggccattttggagaagggagctccatcctgcagcgggactgtgcttgccatgttcaggggacaagtgggccagtgtggctgcggggagagagtgagaaaaaaagtggtctcagatgaggtcagaga

SEQ ID NO: 138403 - DNA, 829 bp, Homo sapiens
cagaaaggtcaggggcctggccaggatcccccagctcacactggagcccagcccaatgatcttctcatgacattgggccactctacttaggagtactcttttcttctattatttgccatccctaaactgggaagacctaagaagaggtttgagtgctccatggggtttagtgaaaggtctttgcctccggtgccaacggtgtgagacccatgagataatctgacctggacccccaagggagaatggccaccaagatccctcaagtcaggggagcaggctggactgggagagacccttggtaaagagactggggctgtgagcccgtcatcatgtggcgtccgggctgggtctggcgtggaggacaagtctgatctttttccttgctttaagggcgcagggagtctaaagcccaatggacatgctcagaggagcccccataccacccaggggtcggtggctggtctggggcagggaagatcgcttcactcgtacccagtgcctcatggtgagaggtctgagaggagagggagggccccagcatcctcctcatctacactgagacctcctccccttgctcctggcagagcatcagttcagagctcccacgtagaggcctctcccctgccagggatgagcccatctcagcacatgccaaaatagctgtctgggagcctgggcccgcaccgcccacaccccagcatctcgcgggttaacagcttgcctgtctctccgcccccttccccagcttgctgacattttacagagagaggcgggggcggttgtgaaagggggcaagctggttcttgctccccaacccacacggacaccc

SEQ ID NO: 138404 - DNA, 3418 bp, Homo sapiens
cgagcgctcccaccgagctgcctgccatggggctggggctgctgctcccgctgctgctgctctggactcgggggactcaggggtccgagctggaccccaaagggcagcacgtctgtgtggccagcagcccctctgctgagctgcagtgctgcgcaggctggaggcagaaggatcaagaatgcaccatccccatctgtgaggggccggacgcctgccagaaagacgaggtgtgtgtgaagccgggcctctgtcgatgcaagcctggattctttggggcccactgcagctcccgctgcccgggccagtactggggccccgactgccgtgagagctgcccctgccacccgcacggccagtgcgagccagccacgggcgcgtgccagtgccaggccgaccgctggggagcccgctgcgagttcccgtgcgcctgcggcccccacgggcgctgcgaccccgcgaccggcgtgtgccactgcgaacccggctggtggtcgtccacgtgccgccgcccgtgccagtgcaacaccgcggcggcgcgctgcgagcaggccacgggcgcctgcgtgtgcaagccgggctggtgggggcgccgctgcagcttccgctgcaactgccacggctccccgtgcgagcaggactccggccgctgcgcctgccggccgggctggtggggtcccgaatgccagcagcagtgcgagtgtgtgcggggccgctgcagcgccgcctccggcgagtgcacctgcccgcccggcttccgcggagcgcgctgcgagctgccctgcccggcaggcagccacggggtgcagtgcgcacacagctgtggccgctgcaaacacaatgagccgtgctctccagacacaggcagctgtgagtcctgcgagccgggctggaacgggacccagtgccagcagccctgcctgcctggcacctttggcgagagctgcgaacagcagtgccctcactgccgacatggggaggcctgtgagccagatactggccactgtcagcgctgtgaccctggctggctggggcccaggtgtgaagacccctgccccactggtacctttggggaagactgtggctctacctgccccacctgtgttcaggggtcctgtgatactgtgacaggggactgtgtctgcagtgccggctactgggggcccagctgcaacgcctcctgcccagccggtttccatggaaacaactgctcagttccttgtgaatgcccagagggactctgccaccctgtctctgggtcctgccagccaggctctggcagtcgggacactgccctcatcgtgggcagccttgtgcctctgctgctgctcttcctgggtcttgcctgctgtgcctgctgctgctgggccccccgatcagacctcaaggacaggccagcgagagatggagctaccgtgtccaggatgaagctgcaggtctgggggacactgaccagcttgggctccacgctgccctgccgttccctcagctcccacaagctaccctgggtgacagtctcacatcacgacccggaggtccccttcaaccacagcttcatcgagccgccctctgccggctgggccactgatgactccttctcatccgatcctgagtctggagaggcagatgaggttcctgcctactgtgtgccaccccaagaagggatggtccctgtggcccaggcagggtcgtcagaggccagcctggctgcaggtgctttcccgccccctgaggacgcctccacgccattcgccatcccgcgcacctccagcctagctcgggccaagcggccatcggtctccttcgcggaaggtaccaagtttgcaccacagagtcgccgaagctcaggggagctctccagcccgctccgaaagcccaagaggctctcccggggggcgcagtcgggtcctgagggccgggaagccgaagagtccacaggcccagacgaagcagaagcccccgagtcctttccggcggctgccagtcccggggattcagccactggccaccggcggcccccacttggtagccggacagtggctgagcacgtggaagccattgagggcagcgtccaggagagctcgggccctgtgaccacgatctacatgctggcagggaagccccgcggatccgaaggccctgtccgctctgtcttccgccattttggtagcttccagaaaggccaggcggaagccaaggtcaagagggccatccctaagcctccgcgccaggccctgaatcggaaaaagggcagccctggccttgcctctggctctgtcggccagagccccaactcagccccaaaagctgggcttcctggggccacagggcctatggcagtcagaccagaggaagcggtccgggggctgggggctggcaccgagagttcaaggagagcccaggagccagtctctggctgtggctccccagaacaggatccccagaagcaggctgaagaggaaaggcaggaggaacctgagtatgagaatgttgtacccatctccaggccaccagaaccctgatgaccttgaatttggggagtggggagagtggatggactagactgtgctgtgtgctggaaaatgatcccggggccaggacagacaaaccagagcctctgcgcctccacagggaaaaggcaaggcttccaggccagttggcccaggcccctggcagtgctcccggaggggcccaggaaggcctgggcagagaccctgtaggatggggtcaggaagggttgcctgcagggacttttgctctgctgtcctggaccctgtgtgcctcataagggctattctttctttcacgtgcaaaacatttttctgaaatagcaaacaacctacatgtttgctgataaaagattggctaaacaaaatttttttttttttttgagacagaatctccctctgtcccccaggctggagtgcagtggtgcgatctcggctcactgcaagctctgcctcccgggttcacgcccttctcctgcctcagcctcccgagtagctgggactacaggtgccctccaccacgcttggctaatttttttgtatatttaatagagacagggtttcaccatgttagccaggatggtctcgatctcctgacctcgtgatccacctgcctcggcctcccaaagtgctgggatgacaggcatgagccaccacgcctggtctatgaactttttaaaaaggatgtatgtgtataaaaacagattcaagggaaaggcactaaatggttttttcctctggaagatgagattgtaggtgatatttattttcttctgaaacttttgtatagtttgcaaattttctacagtgaacattcttttttacttttgttactagattgaatttgataaagtataataaaaagcaatgatctttgttaaaaaaataaaaagtactaacattacagacatgta

SEQ ID NO: 138405 - DNA, 376 bp, Homo sapiens
gggcggggcggagcggagacaggtggccgcggcggggcgccgggaggaggggtcagggcttcgcggtgctcctctcaaaaaacatacaaagtgctgggatgacaggcatgagccaccacgcctggtctatgaactttttaaaaaggatgtatgtgtataaaaacagattcaagggaaaggcactaaatggttttttcctctggaagatgagattgtaggtgatatttattttcttctgaaacttttgtatagtttgcaaattttctacagtgaacattcttttttacttttgttactagattgaatttgataaagtataataaaaagcaatgatctttgttaaaaaaataaaaagtactaacattacagacatgta

SEQ ID NO: 138406 - DNA, 939 bp, Homo sapiens
  misc_feature (930)..(930): n is a, c, g, or t
cgagcgctcccaccgagctgcctgccatggggctggggctgctgctcccgctgctgctgctctggactcgggggactcaggggtccgagctggaccccaaagggcagcacgtctgtgtggccagcagcccctctgctgagctgcagtgctgcgcaggctggaggcagaaggatcaagaatgcaccatccccatctgtgaggggccggacgcctgccagaaagacgaggtgtgtgtgaagccgggcctctgtcgatgcaagcctggattctttggggcccactgcagctcccgctgcccgggccagtactggggccccgactgccgtgagagctgcccctgccacccgcacggccagtgcgagccagccacgggcgcgtgccagtgccaggccgaccgctggggagcccgctgcgagttcccgtgcgcctgcggcccccacgggcgctgcgaccccgcgaccggcgtgtgccactgcgaacccggctggtggtcgtccacgtgccgccgcccgtgccagtgcaacaccgcggcggcgcgctgcgagcaggccacgggcgcctgcgtgtgcaagccgggctggtgggggcgccgctgcagcttccgctgcaactgccacggctccccgtgcgagcaggactccggccgctgcgcctgccggccgggctggtggggtcccgaatgccagcagcagtgcgagtgtgtgcggggccgctgcagcgccgcctccggcgagtgcacctgcccgcccggcttccgcggagcgcgctgcgagctgccctgcccggcaggcagccacggggtgcagtgcgcacacaggtgagcgggcggggcggggacaggtgggctggcggggcgggggcggacacaagtgagcaggcggggcggggcggagacaggggggcggggcggagacagggggcggggcgaanacaggtggg

SEQ ID NO: 138407 - DNA, 355 bp, Homo sapiens
tgtcgaatgagtctgaggaaagatgtagaaaacctcattagtggtgcagaaaacataaattctggctcctttctggcatccgctcttgccattggatgcttaggtcaatttgcacccactgtcttactgccttagtgccttagtggaaaagagggacaataacacaggtctttgtaaacccagaaatagagctgttgtgttcttcagtcctggatagcaatagaagtttggatgaaagtcagctggcaggaattcagctggctctaaagtcatgtgttatcagtagtgctgacagacacatggggttggggggcaggtggtgaaggaagaacttgaggtggtagcaacaaatagg

SEQ ID NO: 138408 - DNA, 611 bp, Homo sapiens
agacagatacgaatcgagccggtaccctcgcgaacgtgtatcactgcacaccatgatgaattattacagaatcaacatacttgtctatattccacctaactatagatattgaacattgcaagcactcagtatgctgcctcatgcctcctcataagcattacttccttcaacgttagccagtatcctgacttttctcacaatagattaatttttggctgtttcaaaactatgtataaatgtaactgcatggtttcattcttttgagcttggcttcttttgattgatattctgcctgtgagattcctccatattgttgacagtggtagcactttcttttccattgttgtatagggctccatcgtgtaaattttatccatacacttgatttattcatccatccttttttaatggacattcgggttgttttcagtttttgactaccatgaataacgctactatgaacatgccttttggtgactatatgtaggcatttctgttgagtctgtgcctaggagtggaactgatgagtcataaggtttgcaactgttcagcttcagtaaattctgtctaatagttgtcaaaagtgcttgaaccaacttatatcctactag

SEQ ID NO: 138409 - DNA, 434 bp, Homo sapiens
ggtctgctgctacgatttgggagcagaataagctgcttcatttgctcacattcaagtagctgtggtgactccttatatggtgttaccacccctttctctctcttgattttcttctcacctaatcatttgaaagatgatcagacacctctgaaatactgtaaaaacaaggctaaatgtagaaatatcagtgcaggttaacaagtgaggcagtgatgacaaatgctcctgtaacccagcattttagaaagaaggaaaccaccatggttttgtagcacactttatggaggagagaaaaataaaattccaagtgtacatgaaacagattgcagtgactcagtggagaattgttgcttcaaaaaatcatattacactttctccccttttataggtttttaaggtaggagggataattttctgatctttagtaggatacc

SEQ ID NO: 138410 - DNA, 398 bp, Homo sapiens
ctcaattaacactcagaaccaaaagtggggatactcctagatattgacccaagagaaatgaaaaatgtatgctcacacaaaaattgcagcatgatactcaggagcctgaggcacaagaatcactagaaccagggggcggaggaggctgcagtaagcctactacactccagcctgcgtaacagagtgagactgtgccctccgctccccccacaaacaaaacaaaacaaaataaaaaaaaaccctcaagcatgatggcagcattattctcttttttttttctttttgagatggagtctcgctctgtcgcccaggctggagtgcagtggcgccatctcggctcactgccagctccgcctcccgggtttacgccattctcctgcctcagcctcctgcgtagc

SEQ ID NO: 138411 - DNA, 350 bp, Homo sapiens
cacactcctgctaaatcccggcactttgggaggcggaggcaggtcgattatgtgaggctcacgagtttgagaacactctggccgaacatggcggaaccccgatcttctactaaaaattcaaaattatctgggtgtggtggtgggttacctgtaatctcatgctactcaggaggctgaggcatgagaatcgcttgaacctgggtggcggaggttgcggtgagtcaagatcgcaccattttaccctagcctgggcgacagagtgagactccatctcaaaaaactaaaatattttacttttaaaatgggagtttggaaattccaagttaatccttttgttttagaaagcttcg

SEQ ID NO: 138412 - DNA, 320 bp, Homo sapiens
agccggggacaaaatcttcacagagaaggtgtgttttggaaacagacttccaggacagaaaaaattttgacaaaatttcaggactgcattcaggacagaggatctagcacagaccaaggcagagacaggaaacattttgctgggttaggatgtcctggaagtatctagcagtggttctccattttggttgccattagagtgacttaggagctttgaaaaatacagaggcccaggcccaccccagaccaatcaattcacagtctccgaggaagaggtctatgtatttgtgacatttgaaaaaattcccagaagcgatttta

SEQ ID NO: 138413 - DNA, 380 bp, Homo sapiens
aagttatgtcgggacagcaagttaaagccgggccgtgagcggtgtcctcccacaacccacagggcaatgacgcttcatggcccctggcagcagggctgctgggacagcaggcagtgagaagagggtgtggacagcgtgcgtgcactgagaaaccacaccccactagctgggactctccccagagtttacagcctgcagtgattccagtttcctcccttccactacttccgagccaaaacccaccctgaaagcttccccaagagtcgacgccccgggccatgataatcagcccaggcactagtttagctggtgaaggacgtcactgagccaccatgacgtcctgtccccagcctgctactgtctagaatgccccgagaccc

SEQ ID NO: 138414 - DNA, 403 bp, Homo sapiens
atcacacttgcttatcctaatttatacaatcattatcaattttatgttttcaatggggaaatgggagatgttggtcaagggtacaagattttagttaggaagagtaagtttagtgatcacagtggtgatcatatctgataatactgtgttgcatatttcaaaatggctaaaagaatagattttaaatgtttttaccacaaaaacctaaagtataggtgaggtgatagatatattaatcagcatgatttaattatttcacatgtatgcatatattaaaacttataccccatttatatatacaattacttgtcaattaacagtaaataaatacataaatatataatatatactatcatagtgttcttcaaataggtctttgcatctttcttgtgaatttttttct

SEQ ID NO: 138415 - DNA, 254 bp, Homo sapiens
cctctaactatcagcttaaaaacagtatttagggaaattgtttgtgcctccgtttgtttcttacattccagggttatcatcgttggaggcaacatgcctcagagtgtgaccagaaaggctcacaagggcacctgcctcaggcagcatgtggcatctcctatgaattatgcatcatcggcatatggacagtggaggccgcctaaaaacaactagccgcttatcattgccacagttgtacattaccttcccgcggc

SEQ ID NO: 138416 - DNA, 344 bp, Homo sapiens
cctagtgagaccctgtctctacaaaaaaaaaacacaaaagccagcctggcatggtggcatgcacctgtagtcctagctactggggaggctgaggtaggaggattgcttgagcccaggagttcaaggttaccgtgagctatgatcgcaccactgtacttcagtctggcaacagagcagaatcctgtctccaaaaaaacaaaacaaaaaaccaaaaaaacctaagatatttgcatccattaatcaaactatttttatctcccttctctgctcccttcccagcctctggtagccaccaatctactctctatctccatgagatccaggttttaagctcccacatgtga

SEQ ID NO: 138417 - DNA, 478 bp, Homo sapiens
tatcagaacagaggccacagcgcaccttggttaaatgtacagtctctgggaccagactgcctggactcacaactctggctccgccatttacaggtgagtcacataacctctcggtgcccccacttccttgcctgcaaagtatcatttaccacaactactcattggattggtgtgagggttcaatgagaaaaatctatgagaagtgctaagaatagtacccgccatcaattaaattctatttgtgcctataaaaataacatttgttgtatgtaatgaaattgtgtttacttgtgtgtctccaccatcaggctaagacatcctcaagtctaaggaccttggtgttttcatcccagagccccacaccttgcaagtgtccagagcatagtcattggatgatgctgtttcccacttaccctctggtttgacatggctgcaggattggcatatggaaactgactgggttgagaagagactcaaa

SEQ ID NO: 138418 - DNA, 425 bp, Homo sapiens
ctaactgttgaaaataaaactcgtcgaaactactgtgctttcaaaaataaaaagcccatctagcagggactgggctatgagagctggtataaagggaaaattctggaatcaggggaacttccattacaaaataagaaagaccaatgccatagggaagtcacaacattttggaagcaggataaaaaggaatgaaaaagagctagatttcttttccatcagaaaagagaagatgggacaggcacagtggctcatgcctgtaaccccggcactttgggcggctgaggtgggaggatcacttgaggtcaggagtttaagatcagcctggccaacatggtgaatccccaactctactaaaaaaattttaaaaattagccaggcatggtggtgcaggcctatagtcccagctacttgggaggctgaggcag

SEQ ID NO: 138419 - DNA, 194 bp, Homo sapiens
cgtcgctctgtaggatcccagtgttagccaaaaattatgcaagacgcggtgtagaggaaagttcacagtgttaaatgtctacatcaaaaaccctgaaatagcacagacaatttaatgtcacatcacaaagaaatagagaaacaagaacaaactaaacccaaacccaggagaagaagtaacaaagatcagagcag

SEQ ID NO: 138420 - DNA, 253 bp, Homo sapiens
atgaacaaacccctatttgacaactgggtaaacagaggcacatggaagcagaatgatttattcctggtcttttagtttggatctaatccccagggccagggctttgaactcccttcagatcacgccccaccacacacaggagcacagtctggtgggaggtagagccttgagcaaatctgcttgaagctgggcaatgaagctgtgggaatgagagtgcaacaaaccctcggcacggagcaatggaaagtgtgtg

SEQ ID NO: 138421 - DNA, 572 bp, Homo sapiens
aagcacacacaacgcaacacaatccgtccaagttcacagccgcagaagaaccacacccaaaattgctgagagtgtgaaccttgactgccttacaaacacagaccgcaaagggaggtaaagcttattcggctacaaaagatgttgcttgtctcttaagtagttccttcattgacgccaaatgtcttttatttataatcacgtctctttttttttttttttttatttgagtgtatgcttgcattcccaccttcaaatcattgctctccgcccgagcacagagctcccgcgagcctgcaggcagcccaggactcctgcgcataccaggctctctggtcttggctctcccagccccacgccgcccactcacatctgcccagctctgctgttcttccacgttcttctccacattgggagttttttgcaggcgtgtcctgtctcatgctccccatcctccgctagctctccttgctcatctcttcagctttgttctctttgtccctgaactctcatctcaaatcttttcatgcctaagatcgtgcttggcagagagtcgatgctcaggaaatgaaaca

SEQ ID NO: 138422 - DNA, 273 bp, Homo sapiens
atattaaatacagacattttatttttattttttgtagagacagtcctgctgttgtccaggttggtcttgaactcctggcctcaagcaatcctcctgactcagcctccccaagtgctgggattacaagtgtgagccactgtgcccagctcagacttttaaaaatacaaaaaactcgaggtttattttataaagcccttaggaagaacaaatcctattatagcaaatacattgaattttcaatgtactgtgctagtaagatatttacactcctaa

SEQ ID NO: 138423 - DNA, 126 bp, Homo sapiens
ttattcagtcttcgtttacttccacacaggatctgaagcaacttacaataaataacgttgaaaccatgtgtcattaaaataaacattttaggctgggtatggtggcttacacctgtaatcccagca

SEQ ID NO: 138424 - DNA, 295 bp, Homo sapiens
taatttttgtatttttagtagagatggggtttcaccatgttggccacgctggtcttgaactcctaaccttgtgatccacctgccttggcctcccaaagtgctgggattacaggcgtgagccaccgcgcccggcctctttttgtgcctttttaagtagatttgacatagaaaggttatgcttcatcaaatataagaggagtcttattttgcatatgggcagagagcccatcatcaattaaataacataattagagagtatcagtaaatgctggctcagaaaataatctgcattttg

SEQ ID NO: 138425 - DNA, 355 bp, Homo sapiens
cagcagcgtgatgtaccgaccgcgtccgcggcctcgaggcttcctgctccgctccagtgcagtcaggcgtgcaggcaccacgcacctgagctcggtcaacacccctggggtcctgtccctcccgagatgtgacagaaatggccccacacacgagcggcctgatgctcggaggccctgtggcccctgggtgactcagtgagcggcagggatagggctggatccacagccccgccccaagcttcctgccaccgtgggaaccacaagctccacgtttccctgtcaggtaagcctttcggaggcaggcctgaaatcccagcctcactgtgtcgcctgactagtgaaacgagccccgcgg

SEQ ID NO: 138426 - DNA, 210 bp, Homo sapiens
cttttagctacaatcgcaggagagaaaacactactgtgactcagattagaacccaggttgcggcaaccacagctgcaagtattgaccactacacgaccaaaaagcctgctgacaaccattgtacttcttatatttttttatgtaaaaacactcatactattttctctgctttattctcgaacgtctgcagattttcgtgcttttctctct

SEQ ID NO: 138427 - DNA, 493 bp, Homo sapiens
agaagggactcctcctgccaagtaatcctctattattgcattttccatgctgtttcacaatgatctgcttactgtcttcttcatttttactgatggtagtagtagaactactattgttactaagagctagcttgtattcagcccttgctattcaagaagaatgccctaaaagctttaaaggaattcacacttaatattcacaacattaatttgagttagtggtcattattatcattttacagataaggaaactgaggcacaaaaaactgtgcacagtatcaaatgtagtaaatggttgaaccagaatataagcctagtaaatggctgaaccagaatataagcctacactctaacccacttatatggtgagctgttcaaaggcaagagtcatatgtctcatttatatttgtatcccaaatgccctaagtattgcctggcagctataggtattcaaaaaatgctgagatgagccaggtggatggtatcactgaag

SEQ ID NO: 138428 - DNA, 428 bp, Homo sapiens
acaattattagtttgtcattcgatcaagtaaaaatggtgttccatgaaaaatgcatctaattcagcttataactcaattatacaagtgttcattcctctagacaatcataagtagcaaatgtactttatacataattaatattttggcacacaaaatattaaaaagatatttttatggttgagatttaataaaaactagtattgctttattaagcaattggtaaaactgatttttcttttcttgtttaagattgttgtgtcagtaaggtataaaatgcaatgaacagttgagtgcactgccttgatttgtgctaagacacctgaacattttacacatcatggcttttgcaccatcagtgcaaatttcagcacgatgaaaatagcaacatcttagtactcttataaagatggatttgatttcatagtgt

SEQ ID NO: 138429 - DNA, 426 bp, Homo sapiens
aagatcccaaaagcaaatgcaacaaaaacaaaactagacaagtggggtttcattacagagcttctgcacagcaaaagaaacaaacagggtaaacagcgtacagaatggaagaaagtatttgcaaactatatatccagtaaaggactgatatccataataaataaggaatttgaatcaataagaaaaaataactcgattaaaaagtggcaaaggacatgaacagaccttctcaaaagaagacatacgagtggcgaaaaaaggtgaaataatgtgcaacatcactaatcatcagagaaatgaaattgaaaccacagcaagataccatctcatagcagttagatggctgttattaaaaagtaataaaataagacatgttggtgaggatgcagagaaaagggaacgcttacacgctgttggtgggaatgt

SEQ ID NO: 138430 - DNA, 480 bp, Homo sapiens
tctttaacagggaaatgctacggggaggagagtggaatcagccaagaggaccaaggacggagctcttctaaggtgttgaaagggctggtagaggaagaggagcccatgcctttgttgtcgaataggatggacactgactgcatgtggctctttaaatttaaattaaattaaattaaattaaaaattcaattcctcaatcatactaaccacatttctagtgttcagtagccacgtgtagttagtgactaccatattggccagtacatataatagaacatttccattatcacagaaagttctattggacagtgcttaagtagactaagaaataacaaccatggagatcagatgtgaatcagaccagtgagctcatggagttagcatttagtgtggtcaagtcctgccataggagccttaaaatgtgacccttgaatttgacaattagttactgtgggccttttaaagattttagttaagtgg

SEQ ID NO: 138431 - DNA, 122 bp, Homo sapiens
gagtatgcctctgcctggccacagactgctgtcattctctgaatgcagtggctgaagtgctgggctttaggttctgattccctgcccttggaagacccccttcaaggggaagagtccctcag

SEQ ID NO: 138432 - DNA, 366 bp, Homo sapiens
aaatatgaggataagtttggagacttctggggaagaaacgtgctcctgttctttaaggaaagaactaccagaagagccctcattctcctccagagtggcaagcagatatgggaactgaaacttcaagaaccatttggctatcaggaaggaggcagcctgacaacaaagacagccccagaagaggatgtgattaaggaaatcagagagaaacagagccaggttgctggatcattctgatcctgaagcctccattacatctaatcacagactgctgtggttggcagaggggtgcatctttgattgccgctggggacgaaagcagagtcccgaaagcagatgtcccagctgggtcccgcacctctccct

SEQ ID NO: 138433 - DNA, 602 bp, Homo sapiens
ccccaggtctctgtccctttcctgagccctcccctgtccttctccaggcaacccacagccccagcagcctgtgcacatttagcgctggatccctgatcccttgggcttggcctcactcctctctggctccatgcccccagatctctttggcatgaccaacaactggctggcgagtccagagatgggggaagaagggccctgagccatgagtgcacctcactgcatggccctggtcaggtccctctgcctcccggggcctcactgtgtccacagcctcctgcacgccacgaagcacctccccgatgtgccagctcccccagcaccagcctcatcccaaggaaggaggaggcgactcccactactcaaggggctgttccccatggcacccctcaggccgctgcaggagactataagcccctcacaaccgaggccattttccccactcccttccccgcaagccctaaatggcccagcaacaactctgaactctgatctcggtcagcccagcacgggtggggcaggaggttctgtcaacagcgagagaaactcgttaactgaatgtcaataggattaaaggctctgatggtccaggagaaaaatgt

SEQ ID NO: 138434 - DNA, 346 bp, Homo sapiens
atggtcggttaggaagtttgagaatcgtaaaggtttggaatacctcttatgagtagagaggatgggttgagtaagactcagacagagaagccttttgttttgttctttaaaaccagactggagaacccagctgagggtggagatcatgacacagtagggacacctgattactttctttaaactaaagaaagccctgcagtggtgctactacttcagcaaccctacaaatcaaagactagtcataatagatgtgaatattaattcaacatattaccataaagagacagaaagatacttgagaaggtagtgttccagagttgggttctggttctgatgcggcattgta

SEQ ID NO: 138435 - DNA, 284 bp, Homo sapiens
ttaacagaaaactcttattcaacaaatggcattatttaaaaagttaacaatcaagccccgaaccagaagatatttttactcatatagaccacaaagaattgatatgcagaatatataaagactgcctacaaatcactaaaagaaatcaacagaaaaatcacatgattagaaaatgtccttcacagaagaaacccaaatagctaaataaacacataaattctcaatcttcctagttatcaaccaaattctaataaaactacaatgagatattactcactagttat

SEQ ID NO: 138436 - DNA, 428 bp, Homo sapiens
aaatctacttgactgctatctccactgacacaaccatagtgcatccacccttacttacccagatgactacaggacttcttaactggcttctctggtgctcttcttgctgagcaagaagtacatcctccacacggttgccaaagggatttctaaagtacagtcaggtatacatcaaatcatgcatacaaacccaccaagggcttcccattataaccacgataaaattcaaatgcttggtcacatcctggaaggccctgtgtgacctggcccctgcacatctctccacccttattttcacctctctccctcgcttacaggatgcttctgccatgccagccttcttttggcctcttgaacatgttaggcttgttccaggcatattcccttcccggggactgtgtatgtatgtgctgtttcttctgtttgga

SEQ ID NO: 138437 - DNA, 416 bp, Homo sapiens
ctctagccagtggacggattcctcctgtgtgaggttcctcctctcatccagtgggctatgggtgtggggtcgttaaaatggaacacacatggccacctagccttccacatgggcagagggttagctgaggccagcaatgacacctgccattttacatctttatctcgcaacactcttcccaacttaggtgggacctgtcacacctccacattccttttctaatcctctgactgcactgaaatgctgtccttctacccttctctaaatcccattttagtctccaaggctcaaagccaatctttttttctttttttgagatgaagtctcactttgtcacccaggctggagtgcagtagtgcagtcctggctcactgcaacctccgcctcccgggttcaagcgattctcctgcctcagc

SEQ ID NO: 138438 - DNA, 542 bp, Homo sapiens
gtgactctagcaggatcttacgggggccttaaccctacccgcacacacacctgcacgtgaccctgatgccagtgctgggcgcccaagtcaggcagtccgcacagcagtggcaccagggtgaaaacctgctgctcaataccatcccggttaccacaaagagcctgccctggtggcccctgagttcttggaggaggccaagtcacagcaacccctcaagtgggcgggcgatgcacttgaccctgaggacatcaggtaccaggcccgccagctgacgccgacatcggagccgcagctgcagtctagacgtggtgcaccggcagtaagtgactggacaccccagaccaggcccgcccccccagtagcgtggatcctgaggccagacccccaggcggcaaaatcaggcgacgggccccgccagcagccgctcagtttcatccatgtggatacagagtgcccagcgcccgggcccaggatccagagagatcccaagaagagcggaacttgaggccaggtgggctgtgcactctgcgaccctgagggtt

SEQ ID NO: 138439 - DNA, 345 bp, Homo sapiens
gacctaacgtacacaggttatgcgctacacgactttgtatggctgttactaacaatagagagaccactaatggccattcacttgtctagagccgtgttataccatgatgctgtcccatttgttcctaggattaaatgcaaactgcaatgcctggctaatagaactctcagtatctggttccactactgtttctgttttgtctttcctactcttctcccttgaaattactcaccaaactttctgatttgctatcaatttctcaagacaccatactttctcttattcactaagccttctgaagagaataaattatgcctcttttttcattctgtgttacgtctagct

SEQ ID NO: 138440 - DNA, 419 bp, Homo sapiens
ggctggacgcagtggctcacgcctgtaatctcagcactttgggaggccgaggtgggcggatcacgaggtcgggagatcaagaccatcctggctaacatggtgaaaccccgtctctactaaaaatacaaaaaaaattagccagacatggtggcacacgcctgtagtcccagctacttgagaggggctgaggcaggagaatcacttgaacccgggaggtggaggttgtggtgagctgaggtcgtgccactgcactccagactgggtgacagagtgagactctgtctcaaaaaaaaagaaaaattaaattcttgtctaggtaaggcattcgctgcttcggatttgaaagataacaaagcatgtacagtgaaaagtctccttcatatcccttccaccagacagttctcccgctcagtagaccg

SEQ ID NO: 138441 - DNA, 158 bp, Homo sapiens
cccacagggaaggggaaatagaaaaccccagaagcacagaggggcaatgcttgtcttggtgagagtctggagtcattgagggaaaaataaattcagtcaagcgttctatttaagtttagagaaactatacgttttaaaagttgtccagagcatgcatg

SEQ ID NO: 138442 - DNA, 227 bp, Homo sapiens
ccccacattttttgtatctccattgctgttggagtaagatcagactcagcatattggtcaagtctatgacctttcatggttagtctccaatcatgcctttctgtctccattttccactcctctccttcattcagacttgccattttctctgctatgcctttagcgcacactttgttttcctgcttttgagcctttacttaccttcctttcacctgtaacagcctttt

SEQ ID NO: 138443 - DNA, 223 bp, Homo sapiens
cctaagttaatgtagataaaggttggtcaattttgttgattttttcagagaaacgactcttggtttcattcattttctctgttgtttttctagtctctactttgtttatctctgtccttttctcattatttccttccttcgctagctttgaggttagtttgttcttctttttctagatccataaggtgtaaagtgaacttgttgatttcaggtctttctccct

SEQ ID NO: 138444 - DNA, 662 bp, Homo sapiens
gggatacagggaaaattgtatcactggagagcttcaggagagaactgatgaaatcctggttgttccacatcttgcccaagacaaatcctataggttcagataagcaaaaactgtgagatagtttatctttcccttaaactcggaaagcacataaggtaccatgtgaaaacactcttctggtgagtgatgggaaataattcagtttgagagccaactagacctagattcagacctagatttgaatcccatctatgccactgattaggattaacctcagacaagcaatttatcctctctgaattgcaatttcctcatgtctaaatgggaggagaatgcccaagatgcagagttgtgaggattaaacaggctgccggcttgtataaagtgctcacatcttgcctgggagagaatcgctgctcaggatggtgacatggtaaacagtatgggttcaggagttgaactgcttgaggctgagccccagctccactatttaaccactatagacttcgggcaaatctctctaagccagtttcctcgactctagaatggagataatagtatctatttcttagtgttatgatgaccaaatcagatgatgtgcataaatagattaacctgacctggcacagggtaagcagctgccattcttctcctctacctcc

SEQ ID NO: 138445 - DNA, 390 bp, Homo sapiens
aatttcttatatttatggtagagacggaatctcaagggctggtctcgaactcctgagctcaggcagtccacctactttggcctcccaaagtgctaggattacaggcctaagccaccacgcctggctgattctactcttttgtcatggagattagcagccatcttttctctctcctccatcatgagattgaatccaagaggggcaacaatcttccaaagttagtgccagaagtaatacattgagttttaactgcctcagtatttctttcaatgtcaactatttcctcatccttttaatctctaaatccttaatgatgcagaagcctcaaaaaggtacagatacacctcatcaccaggttatcttcagataactggaaaatggcaactcaaa

SEQ ID NO: 138446 - DNA, 510 bp, Homo sapiens
tgtaagaaactgccagttgctccacttctcaccaacatttggtatagtcagtctttctaatttcagccattcttgtgggtatacagtggtatctcactgggcttttaatctgcttttccctcatgactagtaatgttgaatacttttattatgcttacttgtcattcacatgtcttcctttgtgaagtgtttaaaccttttgcccatgttttaaacaggactattttttttttaatcactgagttacatgaatttttaaatatatattctggtacattaatttcctactgctaacgttaacagattgccagactttatggtttaaacaatacaaatttattattttatagctctacaggtagtaagtccaaaaatcagcctcactgacctgaagtcaatgctttgtagggctggttctgtgtgaaggctctatggtgaaatctgtttccttgccttttccagctttttcagaggttccaaagatgaggacatggacatctttcttttctt

SEQ ID NO: 138447 - DNA, 898 bp, Homo sapiens
cccattttaactttctggaggataaaatagcatgctgaggaaagccaaagtgcgccagtttacagacagctcactcccagaagcagagccacctaattcaccagcatctgaccactcacacctgaaggagccaaactgagcccagaagaatggcccagctaagcccagcctaaatttctaaccagctcaaccctgagctagtatgtttcaggattgttatgcagttatagcttagtaatatatacacccattaaagacaggattccaggattccaggacagattgattacaaataacctgcaaatgcttggcaccctgtaagtattgatattgtgtttcctttatttaaagttaaatttgttgtaagatggtattgacttatatagaagtgaggcaagagaatagggtctggaggcagggaacttaaggccaattcgtgctgaattcctaaagaagaaacaccaaggtctgggagcagggaacctaaggccaattaacgtgaacttcctacatctaaaccaaaaaaaaaaaaaaaaacaaaaaaagaaaaaaaaagacgacaaaacacaataggaacaaacgacgcagatacaaaacaaacaacaaacagaccggaggccggcgacaaaacaccagcggagggaccaacaacacacaccacctataagaagagcacacaagaggtcaaaaacaaaccgcgggcgcggaacacaccgcgacgaagacaccgcggcgctacgtgagacgccccctgcggggactacgagccccccaacagtcgcggaaaacaagtgtgggcacccgtgcgtcgatcctcactactgcgagcccagtccccacagccacacacgtacccccagacccaccgatcacacaacgcggaaagaaaaagaagagg

SEQ ID NO: 138448 - DNA, 424 bp, Homo sapiens
atgtactgtctcttgtcatcatccctgatgctgctcctgaggacagagaggtaaggagctgccagacatgtgagccagggattctgctcgcccactggaggctgctttgcccttctcatctgtcacttggcctgctgggcaacaggagagatgagaaagtaaagcaaacatgggctgagaatgaggtttggaagaaactctgtttagcaagctatgttgcagattcttattgttatggaaacaagcaacaggtaaaaggatggggaagatctcaccagtatcttccttactcagtgcaaaaaggatcaggtcctgaaatagccaggaggaccacaaaaggagtgaaggaagctgaaggatgtggttttgagctatactggagctgaagccaaaacaccccaaagtatagacacaccctcgcccc

SEQ ID NO: 138449 - DNA, 386 bp, Homo sapiens
catgggtcccaccgataatacaaaatatattctctactctatgtctgtctccctctttcttatccccttagggctgcatttaagaatcatccaaagtgcacattttctttcctctttctcataataaccttgtaaaaacttcttcagaaaagaaaagaagctaatttcactctattgtgtctttagggctgggctacctgagctactgctcattttcctgtttgttttagggtctgatgcaagatgatttttaaattctgtattgtaggaatttagttcttaatatgtcagctccatcccactgagtgttccatcaacacacaacccagttatctgcagggaccttgaccccagacgggtagtcccagatggaagccaggacattg

SEQ ID NO: 138450 - DNA, 201 bp, Homo sapiens
gggaggcagaggttatggtgagctgagattgcaccactgcactccagcctaggtgacagagggagagctgagatcacgccactgcactccatcctgtctcaattaaaaaaagtcggggggtgagtggagttggatttggacacagagcccatgtaaacatgaagaccagccatctataagtcaaagagagagacctggaac

SEQ ID NO: 138451 - DNA, 226 bp, Homo sapiens
tgctgggtgactctgaggatcccagttcgacggagattctctgcaagtctccggaggctctccatcaggggtttccgcttgaccccacagaggaagtgcccgggcctggctggcatttcaggggacgaattcacgcccaggtgcccaggtactgcacaggtgcgctgggtgctggcacttacggtgtgtgtgagggcccattccctgaccacaggcagactggaca

SEQ ID NO: 138452 - DNA, 723 bp, Homo sapiens
cccaccctttttctttgtttctaacaaatctcaggtgccctagctctgctggtactcccaatgtttgtcatggaatgagacaagagtgagcttcctgtaaagcaccccacaatgatgaggaagctggatatatgtttacagctctcttttcccctacagaaacaagagcccaggggaatcttctttggcactgttacagcttgagagagggtgatgcgaaatgaaaccattcctcttaccctttgaatgcagctgttatctgttctgtggctggaggggctatctcccaaattcagggatattcatgaaagtattcttatctgcggatagttagtagttggatttatgtgacggggactggaactgcagaactcctcctattccgttatcttgctgacatcactctctttactttcctctcaatttacttttaataaaggaggtttcaagacagttcaatgaagaattaatagtcttttcatcaaatggttctaggacaactggatatctacgtgcaaaagaataaagttggagcctttccacacacccaccgtatacaaaaactaatgtaaaataaataggagacctaaatgtaaaagctaaaactctaatatttttataaggaaacatgagtacatcttcatgaccttgagataaaaggtttcctagatacagcttcaaaagcccaggcaataaaagaaagcatgataaattagaatttgc

SEQ ID NO: 138453 - DNA, 578 bp, Homo sapiens
catctatctgatgacagaggaatctgctcctcaggtgcagaaattaatatacaagtctttttatgaacatatgtgtccaggttgctcataatggccgaaaactggaaagggatgcaactatctatccacaggacaacgaataaacaaactgtgttgcattcatacaatggacctgctgacacatgcagcaatgtggatcaatgtcaataacattaagttgagcaaagtaagccagacataaaacaggtcatgccgcactattccacttcaatgaagttcaagaacaggcaaaactaccatgacagaagtcaagagagtggtgtcctctgggtgctgaagggcggggaaaagggactgggaacctttgtgggtgaggacagtgttctatatcttgatatgagtgttggtcaccaagccatacacttcatatttgtgtatcgtaaactatctcagtaaaggactgtcagtgggaaaacattctaataggaacattttcccctccaatccaaagtccagatacagttattccttctttccctttgagaatacaggactgttttctactccaataaggaatc

SEQ ID NO: 138454 - DNA, 450 bp, Homo sapiens
atcaaggctcggcacaaaggtactctcccaggaggccttcctgaattcttctgtgaggcagactacttcccgagctgccccggcccttctccggccaagtctctccagaaactcatcccattcgttctcagatggaaggggacccacacccacgacaagcctccgggtttgcttaatgactcagacagcgagggtgctcggtaagccccaccagcccgcgccctactcagcaggtaatgacggagacctactaggtgacgggcgccgcggtagacgctgggataaggtccctgctccagggagcttacggtctattcactaacgtcaaagagcagtgagtgctgttacgtgtatgggagccaccagggtctccgcctgcctgcagggccacgcgcgcactcgacgcttcgcgcctgcctcagtttctccgtgaggccgcacagccccagt

SEQ ID NO: 138455 - DNA, 212 bp, Homo sapiens
tctgatacgttcatttttttcatcagagaaaggaaagaaactctttctttttcttaggtatcctctatggcttcctaacttagcagaagttaacaatagctgctcataaaaataataggcacaattatttctattttctagtgtagtaattcccaatatgacttcctcagaacacctattgtaagagacgttaacgaacacaaagcaaaaac

SEQ ID NO: 138456 - DNA, 206 bp, Homo sapiens
acaagtttcctgaactggaattgcccttccaaggcgatgcttggaagttctctgcctaattcctgggttattttccccggagtcaccacagtggagatgggactattttctcagggatgaaagggctttgactttcatgagccaaaatgttattactccctaatgagggtgggggcttctcagggactcactccagcctagcactg

SEQ ID NO: 138457 - DNA, 440 bp, Homo sapiens
gataatacagaaaagcaattcagaaacttaggagaaaaatttgacaaagaaattgaaatcattttttaaaaatcaaataaattgttgaactatggaatgcatttgctgacctgaaaaattcactagaggttcttaactgcagaacggatcatgcagagaaagaaatcagtgagctaaaaccacctatttgaaaatacagtctgaggaaaaaaaagtaattaaaaaatgaaggtgtgctgctgtcatggaaaggaacggaaaaagtgagtaaatacagcacctttaactgaaatatccaggtacatgcattggaactaatcaaggaaataactcaactcacgaagaacagagaaatgtaaggcaggccaattccccacctgggagtgacacagagccaggagaacctcccctgcctagggaagcagtgagtgattgagaaa

SEQ ID NO: 138458 - DNA, 303 bp, Homo sapiens
cccttctgtctcctgtgatccagacacctcctaagcctcctcacatgggggcccagggccaggcacatccctctgggtgtggcctgctaggaaccctcgttctgggcaccacagtcctgccaccaccgccaaagatgaccactgcctctgtgatgtgactagtactgggtttgggggtcacgcatgtgattgctgagctgtgttacccaccctgtccttgtgcagttcagctttgggggtctttggacagggcctattcactctcttcttatagaactcaggttatcttgttcttgatcaaga

SEQ ID NO: 138459 - DNA, 694 bp, Homo sapiens
acatcagtaaggactgacttacacattaagatatttcagaagttagttcaagatgaggatgaatacattttcatagggaaaataggctagcaccaagaaggtgaacttctaatatattaactgaaattatatagttagccccaacttatctactcccaaatgactttatgaaatgcctgggacaggaaatggcctgcagccttaggcacagaaggaaatggtctgtttaatacgccacgtctctaaggggcaggtgatgttccagccctagagaaaggtgagagatgaggatcttcgctcttgccccaaacattctgcggcactctgggaaggaactctgtcattcagagtcatgtcccaaaacaccctgagggacagcaaaatgtaccatttgcctctgaggtacagggatgagtgatttcagttactaagcaactcacccttctgagctggcctggcctcattctggtctgtagttgaggtgagccgggacgagtcagagcaaatatgttgcttttagaaagagaatttaggaggtcaaaaacaacagatgctggtgaggctgcagagaaaagggaacacttatacactgtttcatgagaatgtaaattagttcagctgcggtagaaagcagtttggagatttcttaaagaacttaaaacagaactaccattcaacccagcaatcccattac

SEQ ID NO: 138460 - DNA, 628 bp, Homo sapiens
aaaggaaaaattatcttaatattttagaacactgaattcagatttcaagtgtcaaatgtttgcaaaaaagtcccaatattctctgaaaacattggatttctcttatgtaaaataccatttagacagaatgaaaaaagagaactgtatttggagtgctgagaccttgaaattggaatcttcggacctggtgaaggtgtggaatccaggagttgggaaagtgctgcaaaagcttcaccagtgggtgggttaataaaaataatttcgaatatctgtgtagtgctgtgtgtcaggtactgaaccaagtatgaaatgtaatcctagaacaattcattgagaagagagttgtacttttaactacattttatagatgagcaaagctgaggcaggagaattgcttgaacccgggtggtggaggtggcagtgagcctagatcacaccattgcactccagcctgggcgacagagcgagactctgtctttaaaaaaaaaaaaaaaagtgtgtagacagtggaggagaggatttcatcctgtgtataacattttaaccttatctttgccattctctgcgatcaagcaaatcagtcaaaaacactgaattgagcgcaggacttaaaagaaggagtaagaat

SEQ ID NO: 138461 - DNA, 503 bp, Homo sapiens
gaagatgagaggggctgccccaagaaagaagacatctggtctgcaacagaaaatgttgaagtgaaaacaaaaaagaacaaacagaaaatacctggaaatggagatggtggcagtaccagtgagatgcctcagcctccttggaagaaaagggcccccgggtagatcctactcttgaaaatgaggacacattcatgaacagagttgaagctaaaaagtgaagattcctgaagagctgaaaccatggcttgttgatgactgggacttaattaccagacaaaaacatctcttttttctttctgccaggaagaatgtggattccattctccaggattatgcaaattgcaaaaaatctcgtggaaacacagataatgagtatgctgttaatgaagttgtggcagggatagaagaatacttcaatgtgatgttgggcacccagctactctgcaagtttgacagaccacagtatgctgaaattcttgcagatcaccctcatgcactcatgt

SEQ ID NO: 138462 - DNA, 521 bp, Homo sapiens
catctaacattcactcccctttcttttggtaacactatcaacaattttctttggacaaccgtgcttcctgtgccttcggtccccctgctttggattgagctgaaactatccgatttcagggacaggcatgtgatctaggtttggataatcaaaatattgaacccccctggatctacagttgttttaggaacagaaacatgcaagtttgtctcatcaaagtgaggccaagacttctataggtatttcagggagagttgctcttttttatgttatattagaaaatggcaagatgtaagtttagagttgctaaaggatgacattaggaaataactcctttgacagttaaagcaagtattaagaaaaataggctgtagaaatgcagataccaagtcctgagaatactgtttgaacccttaatattttagtaatgagttaatttttttagccaattttcttttataattcctcagttgaccgagtaattatacccacccataggattgttttgtgagttaaaggaa

SEQ ID NO: 138463 - DNA, 363 bp, Homo sapiens
tgaggacagggagggagtaactagagacaatccatccaaaaggctggccctggcaggagaagtgaatggagaggtaatgaaaggcagggtgatactgaaggcctgtgttgtttaaaatgggaaagacttaagtaggtttcagtgctcgcaggacaaagtcagtggggaataaaaagtacacggtcagagagagaaagtctttgagaaggtgagagggaagggcatggggttcagggccttggacacgaggaaggactccccttccactgaaacaggaggcaaggaaagccaggcaggtgcagattccacagggagggagtaactagagacaatccatccaaaaggctggccctgggaaaagta

SEQ ID NO: 138464 - DNA, 307 bp, Homo sapiens
tactcacaggattaaaatgaaaattcctagtggaagatcaattatatgctgcttgctctagagtaggaaaaatcttgtcaaattttatccttttgatacagccttataagttacaatgttttatacctgtctgatgctcagttccgaaatgaactgagaagtggtggttgttacaagaatttagctgaagcattaattataagcagaggttcagcctacattggcacttgtcgacctatgggacaggtctgttgctgtttcatctgatttaggtggagtatgtaattacttttgggaatccatgctt

SEQ ID NO: 138465 - DNA, 461 bp, Homo sapiens
ttttcgcgggtggctccagtacagctgctggtgacccatcttgctctcaggagtgcaacgaggtaaaagcaagaagctctattcaacgcattttttaggtaagcactgcattgggtagggtgaaaaacagacgcagaaagttctggtactcatccaaacacacaggaagacacagtcttccacccaactgtttgcacagggtcatccacaggctcctgaggggtacaagggaccccagggagacctcagggtgcactgttcacactgttcggtttttgtttctgtttttaatctttttatctccataggttattggggaacaggtggtgttcagttacatgagcaagttctttagtggggatctgtgaaattttggtgcatccatcacccgagcagtaaacaatgcaccccatttgtagtcttttatttctcacccccttcccaccctttccctctaagtc

SEQ ID NO: 138466 - DNA, 211 bp, Homo sapiens
ttttcgcgggtggctccagtacagctgctggtgacccatcttgctctcaggagtgcaacgaggtaaaagcaagaagctctattcaacgcattttttaggtaagcactgcattgggtagggtgaaaaacagacgcagaaaccgaacagtgtgaacagtgcaccctgaggtctccctggggtcccttgtacccctcaggagcctgtggatgac

SEQ ID NO: 138467 - DNA, 214 bp, Homo sapiens
tcggccagattttctatgggagatccctgtgtctcatgaagatgtgagggagggggacatttgccagtttctcatgctaaaataaatatttggtaacacaataacttcttgttaaaaatatttgaaaaaatgattatgaatataacccagaaatttatctcaggctaatctgtgtcagacttaaggcctccaaacgtgtcatagaaaatatctg

SEQ ID NO: 138468 - DNA, 377 bp, Homo sapiens
tgcctcggcctcgcaaagtgcagagattacaggcatgagacaccattcccagcccctcttattttttttataaaaaatctaggaatattcaataagtgtgagattatctgtgtgtggttttgaattacagttttctaatgaatagtttattttgaggaccttatctcttatttgttgttcgattttatggctgtgcagaattgtccgttcaggttctttgcaaaatattagattggatgcttttgctactttgtagtgttttttgtgtacatgttagatgacaactcctcgtgaattacatgattgcctgaaatttttgcctaatctataggatgctttttaatttggaaagtagttttctttgatgtgcagaaact

SEQ ID NO: 138469 - DNA, 400 bp, Homo sapiens
atgacaatactttcatacaatgtaattctatatagccattacaaataatagagcacatcaaaagatgttcgtgatatgttaaagtaagtaaattataaagtagaatgaacggcataatcctagcaactataacacatagaagcaaaaatgttaaatgtgattatctccaaatatgagattctagtagtcttgttttcctttagcatatctgcattttcctttttttccacccctgttttagtttggcttttatttaaaagtcgttttgttttttttaatttattttttgactgcttttgcggagcaggctatcctataagcagtatgctgagagtagcgtattcagaagtttttaaaatggaggttcagatacaaatgaaaaggagatccctttgacact

SEQ ID NO: 138470 - DNA, 507 bp, Homo sapiens
tgtccgctcaataaggtcgagtctccaccctcgtgggactaagctcaactgagaaacaggtattgttcttgagttgtgaggagggctgatgcagccgtgtaaatacaaatgcacacaccccttactcacgtgcacgttggagcctgtgcgtatgtagttcttctttcatcactctgccccacttcgtggctctgcttacctacatcctatcgtgcctcccgcttgtaccccatcttctttataaaacctttcctagaaaaatctctccattgttgctctcctccctccaatcttcctctgtatctctggactcccgtcacctgtggcctaagtctatgcttcccaaatccaatttcccttaagaaacaattagaaatgcttaggcctctctcctttaagtatgagccgcagtaggcttagtatgaggctatggaatctacccgtttaaagtgatcttcatggctgtgtgcggtagctcacacttgtaatcctagcactttggttggc

SEQ ID NO: 138471 - DNA, 670 bp, Homo sapiens
tacccctgagacctcctacgctggggacattggtctgaggctggaagagggcaggtgggcatcatcggcaggctggatagttctctggatcacagaaaaaggtaggtacctcttaggagcgaatagctgaagtcactgagcagctcgtggtgacaggcaggtgctggaacccactagttggggactgggcagcagccgctggcaggtcagagacttctggacacaccactaaaatttatcatcatttccctggcctctggggctcagtggttattagagcaccagatatctgtactcactcaacttctgggtgatgagactgcttccaggtggcttgtaattatgggaactcaggaagggtccagaccatgcttggggcatgcagtacccttgagagctagctacagtgggcaagggatgcccacactggggccaaggtcaggctggaggaggtggactttggcccctagggagcccccacctgacctctacttgcaccttggctgttctgacatttggataaacaagaggcgccattccttccacattcggctattgggaggaaagccagtaggacccatttgttgacatggtggaaggggtttcactgtctacttcccttgacccaggaaaagcccaaccttcactagctagtcaaggagtcccaggg

SEQ ID NO: 138472 - DNA, 386 bp, Homo sapiens
ccggcgattatcttaaaagaagttggcatgaaagctgcactccaggtcagcatgaacgatggcctctcttttatctccagttctgtcatcatcaccaccacacactgttctgacggttccatcctggccatcgccctgctgatcctgttcctgctcctagccctggctctcctctagtggttctggcccctctgctgcactgtgattatcaaggaggtccctccacctcctgcctcagcctcctgagtagctgggactacaggcatgcgccaccgctctcaaatgccatttaaaaattttcctacaaaagcataatatattaaattgtgagctagaggtagatgaagaagaaaggaaaagggcttcctcatatagccatcagaaaa

SEQ ID NO: 138473 - DNA, 570 bp, Homo sapiens
cttggctcactgcaacctctgcctcccaggttcaagcagttctcctgcctcagcctcctgagtagctgggattataggcatgtgccaccacgcccagctaattttgtatttgtagtagagacagggtttctccatgttggttaggctggtctcgaactcccgacctcaggtgatctgctcgcctcagcctcccaaagtgctgggattacaggcatgagctaccactcccagccaataaattattcttaactatagtcaccctcttgtgctattgaacactagaacatatttcttctgtctaactgtatgtttgaattaattgctgtgtatagcgtgaaacagagattcagcttcattcagatattcagctttcccaacaccatttatcgaaatactttcctgttgagtatatcttgcttttatttttaccagtttcactaggatactctttcttgtttttgaggagaagtctttctctgttgcccaggttggagtgtagtggcgcaatcttggctcactgcaacctctgcctcccagattcacgtgatttttgtgcctcagcctccagag

SEQ ID NO: 138474 - DNA, 532 bp, Homo sapiens
ctgggtggtcccacttgagtgtggacatcccaacagctccggggccatacttgggctggttaggtggcagactgctgtgaccctccgaggatccaacatcactcagcagacatgtggtgggtgaggccctgtcaatgggggccagcagcctgtgcctcctgtgacccatgctcacccacagtctgctgggactcaaggtccagggacccttctcgcccagtgacatatgtctggccctgacggtgtctgtcataaccacttatggccacagatgctttttcctgatcatagtttcttctagatgccacatgtgtatcactttataagattgtaaactactctttggaacggaaagatgtactgaaattagtcttctgaactcgtctctgataaaagccaagtctagtagaacagttggggattgggctaggcccccattcaggagcaggctgtaccgtggccttgttgcacgggaactgcctctccataccagtgagttggacgtgtgcactggggcgtctcaggaggcagc

SEQ ID NO: 138475 - DNA, 378 bp, Homo sapiens
cctggcttgctcaggtctcctgctacctggctgcccagctgtcttagctgcattctccctcacagggcgaaggccagagagagctcagaggtttcctctgagtctaaaggtagcaccacccctacctgggggccaggaggcccagctcctagtcctgactctgttccctgtttcttggtggcctcaaactacttccacttgggcttgttacatgtataaatgggtcagttggtccaaatcattggttctccaccctctttgcacatcaatcctgtgaagagttttggaaaagcttagaccccattccaaaaatggttggggctagactgggcattgggatttttttttttttaaattccccaggtgactctaatgcgc

SEQ ID NO: 138476 - DNA, 319 bp, Homo sapiens
tctttgtattatgaatattccaatcgttattctaaaaggtacaacaaattgttgctgactgtagttactttgttgtgctatcaaatattagatcttacttattctgtaattcttatttcttagtatcaccaattgccatctcaaattcatctctttatgtttttagaataaaaataaagaatagttataaatgtaaagaaacaataagtgatgtaactaggtagacataatgatgacaaaacagtgacaatgttaagttctggatatatattatctcatttattcctggcagtagtcctgtgaaacaagtattattagt

SEQ ID NO: 138477 - DNA, 759 bp, Homo sapiens
cccaggttggtcttgaactcctgggctcaagctatccttcccactcaacctcccaaagtgctgggattgtaggcatgagccaccatacccagctgataaatggcgtcgttgatagttttaagagaattctgagttgtttagatcaaatggattttaaaacatcatataaatatgacatgcaacacataaacacaaacatccaagtaaggaaaacaacaaaaaattaataaaagggtggctaagctgtgagtttaggaaaatgcatagtctacagcaaagctcagaaattctaatctctgatttttagtcatctctggaaatgaatactttccattaatttggagctccattttaatattaatattactgcttatattcccctcttagggaaatagaaacaatgttatatttatggataaataccatatttctttttttgtctttcttcaagcttttttgatttgtgaattaatcttaagtttttcagaattatgtataattctaatattaaaaggatgatattttttctaaattggtttagttttcacatcctttttaaggctggcacttttgcagatagtaccatcttaagtaggccacagctttgattcttgataaatacctcacttactgaacacttcttacatgccaggcactgtgctaaatgcttttcagctattagctccttccagcctcacaataaccctgtgaggtagatactcttattaaccccatttcacagagaaaacagctgaggtg

SEQ ID NO: 138478 - DNA, 311 bp, Homo sapiens
tgacgggatttcagttatattacgatttctggttttaataaactaaagagacaagtgctttttaggcaaaaatccttagatttctatggagacagactgtttttttatcatcttattaaataacctattgcacactgattacatttattcttactattttctttattttttcctggatcattttcgcaattttatttttcacggcgttctcaatacttttcttcatgtttccttaatgttctgtatatagtccgaattctgtagcgacctctttagaagctctttattaatacctagctgaataatctcaa

SEQ ID NO: 138479 - DNA, 442 bp, Homo sapiens
tggcgtttctgttgactgctcaaactctttccttcatttcctgctcattggctgcattctggatggtggagactgctgaagagctcagtgctgggggtgtgagctgttctccaagcattttaggatgtagtggtaatacaggttatgcatatgaggaggtgggggaagatgtagggataaacatgtgatctcgttgagagaatgtggctggtcacttctcagttctgatctcacaggtgttttagagaagtgacctaattgtgctggactcctcctttttgtgacctagcaacctgttaccttcagggagcactaggagcattggttgctgttgaacagttctcacaataccaggatggagggctctcacccacagaagcacaggcctgcaggagcctaggtgacttgggttgtccttatgacttaggataccaggatctaa

SEQ ID NO: 138480 - DNA, 392 bp, Homo sapiens
gttcattgtactgggagaataaattggtacagccactttgaggaggaaagtggcctatctggtgaaactaaagatctgtgtacttcctggcacagcacttctaagcctgggcataacccccaaagctgaaatcagtaaactatagcccacagcctggaccttgtttttgtaaagtacgttttattgaatacagccacacatgctcatttacatggtctaatgctgcggctgcattcatgccacatcggcagaattcaatagttgcaagagaccatctggctcaaaaagcctgaagtatttttatctggccctttacagaaagtggcctgattcttgctggaagagacactggctcttaaatttagaggaccatgagtacaacctgccggtgg

SEQ ID NO: 138481 - DNA, 566 bp, Homo sapiens
agtcacattttcctggatggtgttgatgctagtagatgttctttggtgtctgggcacagaagagttaggcattaattgcagtcttcactgtttgagcttgtttgtaccaattcttcttgggaagacttcccagatatttaaaagaatttgagggttgtgatctaagctgtatctgctttaggaggcacacttagcccagtaatgccatggttcttgcagactcatagaggtacgccttgatgatcttggacaaaatctgagaaaattgtgtagattaccaggcagagactcgttctcttcccttactttctctcaaacaagcaaagtgtctctgtgttgtgacctaaactaggggtgggtggagtgacagaatcaccccttttgccaccaccactatgactgtgcagggtcagacctgaagctgacacaatactgggtgttgcccaatgcctgctataaccactccctggctactccctttgtttgctcaaggccctggggatgtaaaatgagcaggtagcaaagccagtcaggtctgtgtctttccctttagggtggtgagggcc

SEQ ID NO: 138482 - DNA, 375 bp, Homo sapiens
agaggcagaggtctgtctagaatatgttgagcttttgaggggcttacgggaagagtgtggatagacttggccgataggcggcccctccggatgtggacttccaggcagagctcggaggggcagaattagagacgtcagtagctcgtggggctgggggtgggattaaaaccaaggtgggagcaggtgccccaaacccaggagaggtgctcatgcgcaggatggacaaaccagtctccagcaagagcccgaggaagtcgggtcataccccatttttgcggagatttaggatagagccctgtgaaacccctaagtttaggatataggtcaaacttaggaggtcccgaagagggcagagaaggtgggagaaaagccagg

SEQ ID NO: 138483 - DNA, 917 bp, Homo sapiens
  misc_feature (53)..(53): n is a, c, g, or t
gcttggtaccggtcctggcctcgcggttaattgagccgggactcgcgggcggngggcggggcgtcgctgcgcggctggccggtgaggccgcggcatggggcgagtgcagctcttcgagatcagcctgagccacggccgcgtcgtctacagccccggggagccgttggctgggaccgtgcgcgtgcgcctgggggcaccgctgccgttccgagccatccgggtgacctgcataggttcctgcggggtctccaacaaggctaatgacacagcgtgggtagtggaggagggttacttcaacagttccctgtcgctggcagacaaggggagcctgcccgctggagagcacagcttccccttccagttcctgcttcctgccactgcacccacgtcctttgagggtcctttcgggaagatcgtgcaccaggtgagggccgccatccacacgccacggttttccaaggatcacaagtgcagcctcgtgttctatatcttgagccccttgaacctgaacagcatcccagacattgagcaacccaacgtggcctctgccaccaagaagttctcctacaagctggtgaagacgggcagcgtggtcctcacagccagcactgatctccgcggctatgtggtggggcaggcactgcagctgcatgccgaccgttgagaaccagtcaggcaaggacaccagccctgtggtggccagtctgctgcagaaagtgtcctataaggccaagcgctggatccacgacgtacggaccattgcggaggtggaggtgtgcgggcgtcaaggcctggcgggggcgcaggtggcacgagcagatctggtgcctgccttgcccagtcggcctgcgggcttgagctcatccaattgactactaatttaagggttctctgaaggcgccggaagctacggtgac

SEQ ID NO: 138484 - DNA, 827 bp, Homo sapiens
agtaagcttcctggagtgtggacgggtccttccctgcctgactgacttgtccacagggcaggaagaagatgcgccccttggtgtgtcccgagtgtctcctgtaggcagctgagctttcgcagccatccgggtgacctgcataggttcctgcggggtctccaacaaggctaatgacacagcgtgggtagtggaggagggttacttcaacagttccctgtcgctggcagacaaggggagcctgcccgctggagagcacagcttccccttccagttcctgcttcctgccactgcacccacgtcctttgagggtcctttcgggaagatcgtgcaccaggtgagggccgccatccacacgccacggttttccaaggatcacaagtgcagcctcgtgttctatatcttgagccccttgaacctgaacagcatcccagacattgagcaacccaacgtggcctctgccaccaagaagttctcctacaagctggtgaagacgggcagcgtggtcctcacagccagcactgatctccgcggctatgtggtggggcaggcactgcagctgcatgccgaccgttgagaaccagtcaggcaaggacaccagccctgtggtggccagtctgctgcagaaagtgtcctataaggccaagcgctggatccacgacgtacggaccattgcggaggtggaggtgtgcgggcgtcaaggcctggcgggggcgcaggtggcacgagcagatctggtgcctgccttgcccagtcggcctgcgggcttgagctcatccaattgactactaatttaagggttctctgaaggcgccggaagctacggtgac

SEQ ID NO: 138485 - DNA, 1370 bp, Homo sapiens
  misc_feature (53)..(53): n is a, c, g, or t
gcttggtaccggtcctggcctcgcggttaattgagccgggactcgcgggcggngggcggggcgtcgctgcgcggctggccggtgaggccgcggcatggggcgagtgcagctcttcgagatcagcctgagccacggccgcgtcgtctacagccccggggagccgttggctgggaccgtgcgcgtgcgcctgggggcaccgctgccgttccgagccatccgggtgacctgcataggttcctgcggggtctccaacaaggctaatgacacagcgtgggtagtggaggagggttacttcaacagttccctgtcgctggcagacaagggtaagtttgggagccagttcccgagtggtgacccctgggggcagcccttggagtggggcctgtctgtcctgtcctccccctttcctagatctgcctcttggatctggcactggcccatcttgtcccagggttgtgggccctgatggctttctcataggcgctgggtggctgaaggggccacctcccccttgtgctggatttgggtgggctctgacccctggcacagctgtttcacccttgccccattcccaaaccactctcctgttcaagccaagctcttatcctcagtccttcacccaagccacagacctgtgctgctgtggcgctggtgactgagacagggagacccagtgtgagctggtcagctgcagtgcccactcttatcctggccctgtggccacctcaggccacctcagggggggactgccccccacctccctcctgtctctgcagggagcctgcccgctggagagcacagcttccccttccagttcctgcttcctgccactgcacccacgtcctttgagggtcctttcgggaagatcgtgcaccaggtgagggccgccatccacacgccacggttttccaaggatcacaagtgcagcctcgtgttctatatcttgagccccttgaacctgaacagcatcccagacattgagcaacccaacgtggcctctgccaccaagaagttctcctacaagctggtgaagacgggcagcgtggtcctcacagccagcactgatctccgcggctatgtggtggggcaggcactgcagctgcatgccgaccgttgagaaccagtcaggcaaggacaccagccctgtggtggccagtctgctgcagaaagtgtcctataaggccaagcgctggatccacgacgtacggaccattgcggaggtggaggtgtgcgggcgtcaaggcctggcgggggcgcaggtggcacgagcagatctggtgcctgccttgcccagtcggcctgcgggcttgagctcatccaattgactactaatttaagggttctctgaaggcgccggaagctacggtgac

SEQ ID NO: 138486 - DNA, 520 bp, Homo sapiens
atagagatgaagcacagctttaaactcaacctggctgaatatctttcttttccttttctggggggcatagtgacttgtgagggagtagaaaatggctataagttccttgaaacttgttgctgctcaacctctataaagttctagcctttttttctcattatccttattttccctggtttatttggaaactcctatccaaacaaatcaaagctcattgtattcacaagtaagtaaatactgtgtttttagctcctatctcagaattaaactttttgaactttatttcaattttaaaaaagaacatgacatacttgcctctaccaaaaagtaatctaccaatcaactacataaaacataggaatcactgaagaggcagtttcccagcagttagttaaaatcaagctggtgactctgactctgtcctagcaactggtggacaggtttccagtgcaatcttttccctaacaacacaaggcgggtggctggcatacttgtcattccttatatgccctggacagtg

SEQ ID NO: 138487 - DNA, 506 bp, Homo sapiens
gataggcaggaccatagagctcccaaaagtttatgtcctttgtgttaagctaccagggcaggtggagatgcatagccaggcagggcctatctcaggtggatcagcactctgactctccatttgtggggcaagctgcagcccttttgggggttgggggcagttctcaagccactgaggtaataatgttccagtggagagcacaactgacttggctacacagaagagttcacgcaaggaatggggaatagcaggcagcaggaagcctcacccagattccatgcagttggcaaggcagctctcactcccacagtgctctgctaatagtactggactaagtctcaggtatcctgcactgagaacccaaacttgccccaggccataagctttccctgcagagacagcaacagaggctttcagaccatgtcactccccatctgcctcacaaggccaggcacccagctcctgcactcatgcctgcagtgtacttcccactagccccaccaagt

SEQ ID NO: 138488 - DNA, 317 bp, Homo sapiens
ggactgagcttggtgtatttgagaagtggctggagtggagtgagccaaggggagagtgctagaaggtgaaggcaaaggcttaagcctcgagggctacagaaaagagtttagattttttttggagtgtaatgggaagctcttggaaggctatgagcagaaaaagtgatactgtcttctctacacctttaaagattactcacactgctatgtagcaaacggattgtaaggggcaagggcggaggaagcagggagaccagtttgggaggcaagtgcatcatctaggtacaaaggcaacacaagctagtgtggtatctagt

SEQ ID NO: 138489 - DNA, 459 bp, Homo sapiens
agaaggcgggaaatataaacaggcgtggaaagaaatcagtcaattttgcccgggcgcggtggctcacgcctgtaatcccagcactttgggaggccgagaaaggttaaaatgacttgcccaaggtcaaacagctattccactggatttgtaatggtagaggagtgcctctggctggctcactgacgtggagacaggtagcacccattggtgcgttattactgtgttttcctacgattttcagagtccctcatctgcaaatccctttcacagatcttgaccctagcaactatgctggaaggcagctaggaccatggttgagatccagccctatgcccctccactgtcttcctgctgttgcctttttgctatttttctgatcattatcacatttcccagggagaaggcgggaaatataaacaggcgtggaaagaaatcagtcaattttgcccgggcgcggtg

SEQ ID NO: 138490 - DNA, 373 bp, Homo sapiens
gggcggcatgcagcctggctgtgggtgactggtgtgccctggggaggcccctgtctcttagagcttcccactgcccatctgtaaaacgggagaaaagggtctgcccgaggctgtgcagggctctggggaacaactcgaggaagccccgagctgcctgcccaggctccatcaatacccaccagacttaatctttgccgttgttgttgttgtagagacagggtcttactgtgttgcccaggttggtctcatactcttgggctcaagcgattccaaagtactgggattataagtgtgagccaccatgtcctgccccaccaggctttaaatgctctgtggaagtttggtctttaccataaggcctgctgcagacttc

SEQ ID NO: 138491 - DNA, 231 bp, Homo sapiens
ctacgtttgaactgtgtgcttgtttgcctctctatcccctctatttaagctcttaaaatacaagtctatttctttgcctgcctacctgtctgctctgtccttgcctctctctcttttggaatttgttgttttaaacatctttattgagatacaactgatatacaaagaactacatgtatttaatatgtatgatttgatgaatttggatgtctttgttatattctaaatggg

SEQ ID NO: 138492 - DNA, 792 bp, Homo sapiens
gcgattctcctgcctcagcctcccgagtagctgggattagaggcactcgccaccatacctggataatttttgtatttttagtagagacagtgtttcaccatgttggccaggcaggtctcgaactcctgaccccaggtgatccgcctgccttggcctcccaaagtgctgggtgggattacaggcatgagccaccacaccaggcctagttggtttttttaaagtggaaaaacagttgttttcctaaacattgtggctaattttaattaaaaacagaatggaggaatgaatatgcagtggaaatactaaaatcactgtttaaagtcattgcttggtgtttaaaaatctataaaaatgtgaaatttacaatttttcatcaaaattctattcagacagtcttttttgggggttggggttaagagatgaggtctctttctgttgtatagactggacttgaactggtctcaagtgatcctcctgcctcagcctacctggtagctgggattacaggcacccagccaggtataatgttagtggaatagacccctgctgctatgccctattctaaccatctccatcacaaataattaaagtggatattaatcatatttacctaagatggagtacatcttagttaagtagaatacaacttctagtttggttcagtaagattaaattgtatttatttttttgtttgttccataggtttagtgcagaagttacttttttgtggtaaatgaatttatgattttttatgtttcataattttagtgaaaattcttgtgtggtaattaa

SEQ ID NO: 138493 - DNA, 367 bp, Homo sapiens
tgtcccaagaaagttctctcatgctctcacccaatcattatcagaaacaactgctatctgacttccatccacattgattagttttgcttatttctgaacttcatataaatggaatcacattgcatgttctctcttatgtctggcttctttcactcaacataatgtccatgagacacttattaattttgctgctggagctaagagccaaagaatgtagtgattcctactctagaatactaataggcttgcagagtgtgttcccaagagacctacaggtcccactaagccgggaaggaaacggaatcggggtctaactggggccgggagatgtttacccctgatttatctgattcagctctttatctct

SEQ ID NO: 138494 - DNA, 240 bp, Homo sapiens
cctgtggtgtgtgcatggtttggggcgaggcaaaattttaagttagaggccattaaaagagagcaacaattaagtaatgttttaactacagaaataacactagaaagaaagctattttctcaaaacattttatagttgaatttccttggatttgggggctaattggacatgacatctaatcaacaggaaggggttgaagagatgactcaagggagtctccaagggagagatcctagaaag

SEQ ID NO: 138495 - DNA, 385 bp, Homo sapiens
tatagttggaggttgcatcgcagtggtggtgtctgctaagacagaactctggctctgctgtattcattcatttacagattcattcatcggtgacttcaacggctggtttaagggaacattgaccacacccattttattaccatcatttcctttagaaaatccagtttccattcaagcccgctaatctccaattccaactagatgatcacctctaagtcacttttatatcaaaattctagagatactggccaggtgcggtggctcacgccattgcactccagcctgggtgacagagcaagactccgtctagaaaaaaaattctaggctgagcacggtggctcacgcctgtaatcccagcactttgggaggccaaggcgggtggatc

SEQ ID NO: 138496 - DNA, 437 bp, Homo sapiens
gaacattttcaggtctaattctgccatttgacaaccttttgactacgtggaaagtggctaccacattgtacattctaatttgagggaaggaatgaatgatttctttgcagagaagcagctggtacatagaaaggagcaggacaagttcattctgtctttgaagattaggcagaattataatgcctgtgctcagaaatgcctaattcagccaagtcttcttctatctcttggtaaagtgcactgccaagttagaaaggagccagctccaccacccttcctacgtctgatcctccagacacatatttgctaaagaaagagccatggtcctatccgtaatgttcaggaagggcagattggcatatcaggtgagcctggtactctgctcacctacaagtctcatgcttggtgggacacttggggccatggctgcagagcta

SEQ ID NO: 138497 - DNA, 688 bp, Homo sapiens
tttctcttaacaaaataagtggtgatggctcttatttagaaacctgcacagccatccaaatgatatgatatggcccctgggcaaaagtttctctgtactatacttaaggcaatgccactttccaaattcatttcagtgttatttacagaaagggctcctaaattttgtgtaatattttgaaatgattggttgaaaggggccatatcttgatgaaagcactgaaattgttttaatgttctctggtctttaatgaaaactctatctgctttttcaaagatcacaaagttaacaaggcacttctgagacagttttaccttgttatctaggtaaggttatgagaaaacaccatttaataccaaattctcaaggtaataatactcatattagctagttaataatggattcatacagtttagatatgtgaatatcatgatttatcacataccaatgactttaactatgttcttttgcagatgaagcagggaggcaaatattatgatcaaagtgtttggcttctggagagctggcacagggataaggggaatatttctaaataggttttccaaattttggcaagaacgtggcttagcgcaagttcaaacatacaccagattcacttactccacaaacttgatacgtacatttatacctacaccattatcattaagaaatacaatgggactaccgt

SEQ ID NO: 138498 - DNA, 247 bp, Homo sapiens
agaaactgcagcagggatagctcctgtcacacaaccctacccttatgccctgaaagcctcctcctaagggatatacagggctttttctggcatcagaacttttagactccatgtcaagtctgtagtaaatcaacaaagagaaaaatcagagtacaatcacaacaaagacagacagctatcctttcaaagaccttagagccctctgcctcccctctctatggaaagtccagtactggccagaatacta

SEQ ID NO: 138499 - DNA, 381 bp, Homo sapiens
aataaataaataggccaggcgcagtggctcacacctgtaatcccagcactttgggaggccgaggcgggcggatcatgaggtcaggagtttgagaccagcctggccaagatggtgaaaccccatctctactaaaaatacaaacattagccaggtgcggtggcaggcacctgtaatcccagctacttgggaggctgaggcagaagaattgctcgaaccagggaggtggaggttgcagtgagccaagattgcgccaccgcaatctagcctgggcgacagagcaagactccatctcaaaaaaagaaaaaaaaaaagaaaagaagatgctagagtcacctagggacctaactgccctctttcctgtaagaaacagagacccagaag

SEQ ID NO: 138500 - DNA, 111 bp, Homo sapiens
cagaaacggcacactttggctattcaataattatttggtgaataactgacagaatagaacagaaaatgctatcccagccaggcgcggtggctcacgcctgtaatcccagca

SEQ ID NO: 138501 - DNA, 250 bp, Homo sapiens
ggtctgaggcgactcatagaggatcccccggggacccttaaccctggcttgtagacaggcaccttcttgcttgtgtcctcgcaatgttagagactggtctctctctccttataaggccacagtcctattagattaggccctgactgttatcacttcataacgtaaattacttctgaaacaacctatctccagatacaatcatgctagggattagggcttcaacactattaatcagcgaggtcacaggctg

SEQ ID NO: 138502 - DNA, 263 bp, Homo sapiens
acagaaaatgattttttagaagtcagaactatgacatgaagtcaagcagggcactctaggactgaatttgctgtgctgccttcatacgctccttgctcgctcttttctggcagctgtgactcacacaggtcatggagagtatcattccctaaaaggaacaactccgatattcatctttatccattaagttcatctgtcccattctatgtctgtggatgctaacttttgatcattgatggtgatacacatggacatttatcatc

SEQ ID NO: 138503 - DNA, 363 bp, Homo sapiens
ggtccattttcatacccagatgtggaagaggtggggaaacagggctcagggagaagagctgaaaggctctcctttccctgcctcatctgagtctcctgtggcacctgctgactgtggagaaactcaggaagagcaggactagtctctgcccctcaggggtggtgggatctgagactcttggaagactgggaatcttttcctgtcaaccatcaatagatatactggtttatgtttatcgaagcctggaagtgggaacatctactccgctgtacacagtttttcatcatcattgtcatctcatctcagcctggaacatctgctgtgccccaaagcatgcagacttgtgtggcagaaaaatagggg

SEQ ID NO: 138504 - DNA, 501 bp, Homo sapiens
atagtcttttaatgttttattaaaagcataaaacaatcgtgtggggtagctactactttcatcctcattttacagttgagaaagtggaggattagagacacaagatggtttgtccatgtcatatcagtaagaacagagtgaagatggcaacccaggtccccccggcccccaggcctccttctgaatctccagtcctctcccgcctgctaggagccttgtcctgggagggcagagtcttttatttatttatttattttgagacagagtttcactcttgtcacccaggctggagtgcagtggtgtgatctcggctcactgcaacctctgcctccaggttcaagcgattctcctgcctcagcctcccaagtagctgggattgcaggcacctgctgccacgcctggctaatttttatatttttagcagagacggggtttcaccatgttggccaggctggcctcgaattcctgacctcaggtgatccacctgcctgggcttcccaa

SEQ ID NO: 138505 - DNA, 300 bp, Homo sapiens
catgcctggggccagcagtttttcccactgttgctttgtgcacaaagtcaacacagtggaaaaaggcaaattgtgtcatcttactactatgaaaatagttttgaattccctaaaaggatctggggactcttaggggttggtggactactctgaggaccggtgaaccagagaggagcgccagggtcctgtcttagcatgacgtcctgatcatcaagcgtgtccagtggagatgccctttatacctgtggtgtgagggagatggcttggacctgcttcactgccaagggcattgctgcaaac

SEQ ID NO: 138506 - DNA, 555 bp, Homo sapiens
tacataagcatagccttggccactctctttcttagaatctacaataattataattccttagaatctacgaggctcagggcttgatctattccaacaaagatgtcgcctcagaacagtggctcaatttaaagctagaacaaagatatttctaagaggctgtgaatggtttaggcccagacccaatgagctccaacttgcaaagaaaaatttcaatataaaggaaactttctactaattagaggttcttcaatatggaataacattattcccaaagcttcaggagagagtacattgaagcacagcccatcaaggatgtgagagaaaaatgctctacagagtagaaaactgagctagaagaagttaaagttcttcccaaattagaaaatcaaagagaacaatgattgaagagagtcactccaaccaacatttgaatgttaaatcatagatcctatgtatttgtttaagaactgaattcctaatgctacccctttcccatgtactagaacacttagtcactcatttgctgatcaacaacacctctcaggcaagaaagtt

SEQ ID NO: 138507 - DNA, 370 bp, Homo sapiens
ctgcctcagcctcccaagtagctgggatgacaagcacgtaccaccacgtctggctaatttttttatttttttgtagaggtggggttttaccatgtcactcagactggtctcaaactcctggactcaagcaatctgcctgtcttggcctcccaaagtgctgggattacaggcatgcgccaccacacctggctatgctgtcttaagagacacactttgaatatatagagaccaaaaaagtgaaaataaaaggatagagaaatatatatttaatagagataagaaggtgaaatataaaccagaataagaacaaacaagaaagctgatgtggttgtattcatatcaaacaaagtaggcatcaagataaggagta

SEQ ID NO: 138508 - DNA, 160 bp, Homo sapiens
gtgatctgttctatcagcctgcccgctgctagagaggccgaggtggtccggccagccgtgcgctgctgctggtgtctctgtgggcatgacctggtgagatatcattctgcatctgggggtccatcctatcagccctgtgttctagattccccagtgactg

SEQ ID NO: 138509 - DNA, 171 bp, Homo sapiens
ttacacatttttaaagaattaaaacagaaggtacaaatgatgtttttccacatttaacttttagccaatctctgaattcagcatttcatatattaatccctttataggaattagcttaaatatagtttcactaaataataagtaatgccatcactgactttaaaaatcagt

SEQ ID NO: 138510 - DNA, 430 bp, Homo sapiens
tttttgcagaatcctagagcagcccccagcggctcagagcagttgctgcctttgcagggtgatcccagtcagggtctctgagtgcccctgcatccacctgagagcacactcacacctgcttctgccccgcaattgctatatataactttgactgccagtgtcaccccaggtttgtgcctctttagcagtgtgacctggcacaaattccttagctgcttctccctctagctgtaaagtaaagcgactgtcatggagccacccagccgtgctgcagttggctgctttcaacaaaccaatgcctgtccagtgctcagaaaaaggtgtggcacccagcatactaacactcaccatcatcaccatcatcattgctactaccatcattgtcaccatcaccaccatcgccatcactatcactatcatcaccaccacc

SEQ ID NO: 138511 - DNA, 393 bp, Homo sapiens
ggtcctaggggttaggacttcaacatctcttttttgaggaaacacagttcagcctgtggtgatggggaaactggactcacacccctgtctaggagccccccgaatcccctgctctcagcctggctgagctgctctgctgggagtcaggtctgagtgctttgctcaagttgttagccaagtccgttacagggttaatagcttcatagttaggggtcctcagaggtaacgggtccccgtggcacttgtcctatttccaaagaaccccacggcagctccacacattcccatgggaagactgcacagtctacccctgcaaacatcttgctcttagctaaaattgtgtctgtcagtgtagtcactggttatcacgtgggaacgggactcaggacccat

SEQ ID NO: 138512 - DNA, 328 bp, Homo sapiens
atttttcattctgagataagcagtttttttgtgggggcgggggaggtggagaggagccagcttcactctctgttcatgcgagttttgaatgaaatgagtaaagttcatgttccccccagagtacacaaggttcaagtgggattacccagtgggaatccagcccgattgtaatttaacttgttcgagggatctaaatatttaatctgccttcatcacgaatcctagaatcctatgtaagcagcaaaggccgagggtctgaaagtaaacactgcagttagaatcagaagtgttgcaactagcacaactgctgctgtgacgtcctacaaac

SEQ ID NO: 138513 - DNA, 177 bp, Homo sapiens
tccaaactgttcctacaaggatatttctaaaatgcagatacatcactcttcttcataaatcctcattaattttagtataaatgtaaacacctattcggattaaaaaagcccttcatgatcctagctgtgattttcttgctcccccttgctatatttattctgggctccagtatgcaa

SEQ ID NO: 138514 - DNA, 450 bp, Homo sapiens
taagaggcactgggaatatggtgttggcaagtggaacagactacaattttaagaggtcggtcagggtaagtctcattgagaaggtgacatttgacaaaagttttaaggaagtgagggaattagtcatatgggtatctggagaaagcatactccagacagaggacttagctactatgtgcttctggtagtcctgtggctggtgcagagtgagcaaagaagagtgtagaagatcagattcaagaaccaacgaggccccagctcacggaggtcttgatggtcactctaagattttggcttttactctaagaacaaagaggagccattacagggctctgaacagagcagtgactgatatagttccaatgaattcgctgttgctatgctatgtagaaaacagacctaagaggggaggggtgaaagcaagtagatctgagaggaggccacagcagt

SEQ ID NO: 138515 - DNA, 397 bp, Homo sapiens
tctctaacataaaattatttcccagcagtaacatttaaataatcttaatgatatcaaatgtcacctaaaaaaggaaaaataatgcatatcttttttagtgttataaatttagatgagataatgtatgtagtgtgcaaatccaagtcctagcgtataatacagctcagataattgcacttgaatatgagtagatttgataattttacaataattaattcattgtctttaataattgagaaaatgtgctacatttgatatgtatgtttttgggggaacaaggaaaacttattctttacttaaattctttaaagataactaggcatcagttgtcttttactaaaagaactttaaggtccccttgagcttcagaagctacaattttattatgggaactact

SEQ ID NO: 138516 - DNA, 485 bp, Homo sapiens
gcccctttcatcatgcagggcttggctcagaactcaccttctggagaggccttccttgaccccccagcttatatagcacttgcccaaacgctggaaaacccagcacactcaggttactcttatgaccttttaataagctcttactatagtgccaagcattgtattaaatgcttacatgcattatctcattaacctcggaaccactgaaggaggcattctaatcatccccattttatgcaacaggaaatggaggctaagagaggtcaagcctaaagtcattcagcttgcactaaggtctgattctagaattagggctcttaaccattagattcagctgattcagctgcttctcactttaaattctgttctgagttatggattatatggcttccaggagtttaatttacaggactgattggtttctattgcacttgtgtttgagcaggtaaagtaactcaggtgtatcagtgtgtgctagggaggga

SEQ ID NO: 138517 - DNA, 509 bp, Homo sapiens
aaattctatcaatcgaagtttgaatagatattgttgaaaaagtaaaatgctgtaattgttaataattgtgaagttgctgattttatgtaccaaagcaattatgtaagagtgttcaaatagttaaatagtgaatcagattgcatttgaacattaagagtgtggtagctagctaaatagaggaatagctgggtcctttcttgtgaaaagtgagtttttgataatccgtgagtcctagtcgtaggtaatgcaaaatgaggtagcgaggagctttatttagatgagttataaaatccacaaattattttgaatataacacacttggtttcagtgcccaatatttcacttgttcaagaaaggaaaaagtatctctatgaatctaagaagcagattgactgacaccaaactcttcaatgtgatccaaaatagacacttaaaatacagaatcttctcaggtcccaacgtagtatacctgcagtgcctgaatatggccctgtagtacctgcttattg

SEQ ID NO: 138518 - DNA, 437 bp, Homo sapiens
tgagctcaggagttggagaccagcctgggcaacatagcgagaccccatgtctgtttcacacagcacaggtctgatctgtttttgctttcactgtcatcatttcgtattgtcatgatgcagcgtctcccttagagggccagaagaacattcaggtctctgaaagtgtgtagtagaagactagcatctgttttactgcttccaaagagagtattattttgtttttgaccctagcatgacctccctttattgcacctaatcacatcacccaccttctgagagcaccatgcctttttgttggtgttaccttttaccagcagaaaacatcgacgtgtacctatgtgagaggtatctttatgaagcccatggagaagactgttttctctgtgtcttctgatgttgtttgtttgtgtgtttgtttttgagacagtctcactctc

SEQ ID NO: 138519 - DNA, 556 bp, Homo sapiens
catgaactgtgcccatgtgagatggtgaacttaattgatatgtgttgtgtatgttctgattactgctctgatcgtctctgcctgctcaggctgccctaggccctgagacacaacaatattgaaatcaggccaattaataaccctacaatgtcttctaaatgttcaagtgacacttggacgtctctcactttaaatcaaaagctagaaatgattaagcttagtgaggaaggcaggcgtgtcagaagctgagataggctgcacggtaggcctcttggaccaaacacttagccaagttgtgactgcaaaggaaaagttcttgaaattaagtgttactccagtgaacacaaatgattagaaagccttattgctgataggaaaaaaactttgctctaggtagaagatcaagccagccaaaatactcccttaagcccaggcttaatacagagcaaggccctctgttcaactctgtgaatgctgagagaggtgaggaagcagcagaataaaagtttaaagctagcagagttcagctcatgaggtttaagggaagaagctgtct

SEQ ID NO: 138520 - DNA, 271 bp, Homo sapiens
ttttattttatttttttgtaaagaagaggtctcaccatgttgcccagcctgttcttgaactcctggctcaagcaattctcctgcctcggcctcccaaagtgctgaaattacaagcgtgagccatcatgcctgaccttaatttgatctttcaggagcagaacatgcctgttttttcttgtgttttatttaataaaaagaacatactaaacttatgtaaggacttaccaagaaggataattgaaattctggtgtctttagacaaaaaagctaa

SEQ ID NO: 138521 - DNA, 216 bp, Homo sapiens
caagctttggagccttctaagctggagctactgtgtcattcccattgtcacttccttctgtctggacgttcccattgtccagatctgttcagaggcttcactctcagcctccttccccccccctccatttccatcttctccaaagcttcagagaaatgacctgcagcttattctccagtgacagtggcagtcccctgtctagtccacgcccttctt

SEQ ID NO: 138522 - DNA, 266 bp, Homo sapiens
tggcatcttctgcctgtttttctattgggctgcatgtctggctggctgtctccctttctttctttaagtaaacattttattttgaaataattttaaatttacagaaaagttgcaaagtagtacagagaactcttatatacccttcatccagttttcccacaatgttaacatcttatgtcaccatggcacgtttgtcatataaagaaattaatgttggtacaatgctgttaacaaagttgtagactatctgggtttcaccacttttt

SEQ ID NO: 138523 - DNA, 376 bp, Homo sapiens
ggcaaacatcagctccagcccgcaagggcatgcttataacattggaaaccctaaagtggtgggtggcagggcaggagcaaggtctgcagagtgtaaggctatatacactctagccactctgcaaattccataaacaaaagattgcagggaaagccgggcacagtggtgcatctccacatcagcctctgcaactgggactccctggaatatgagattctcagcttactcattttcatatattcactgccaatactaggcccagaacatggtaggggctcgataaatacttgttgaatacaaaataaagttcatagaaaatatgccaactgccaacattggcatttacagacctagtacaatgcttaatacatagcag

SEQ ID NO: 138524 - DNA, 534 bp, Homo sapiens
taaagacagggtctcactgtgttacccaggctagtctctaagtcctggcctcaagtgatcctgaaggtatttttgaagtaaagatgattcagtaagttatactggaacaattagttaactggaaaaaaaatcaagtcatctctgcctcaagtcaacataaaatatagatagatcaaaaagataaatatttagataaattatttaaaaaataaaagaaaatatagataagttatctgtttaaacagtgaaagcgtatactgcaattaccattatgtttgtaattgcaagaaacttgtaaattaattgacatgattagacatcttaacgatatttgtttattctattcagaaatatggaagggaacatgagtcaggcatggtgattcatgccttagttccacctgcttgggaggctgagctgggagaatcacatgaacccaggagtttgaaaccagcctgcgcaacatagctagatcccgcctctaaaaaaataaaaataaaataaatagactggaacatgaagcatataaagggc

SEQ ID NO: 138525 - DNA, 588 bp, Homo sapiens
gaacgtggcacgagagagagaaattatgagattgacagagagagagagagagagagagaaagagaaagagagagagaaagagaaagagacagagaaaagaaactatgttgtttaaaatgccagcggaaagtccatgggggtgaaagagtccggcaatggccagggagttagcagcttggcgtagtgtcttcccactgttttgtctgtcttgagaatagcattcaacgcgactgtgttcccgcagcagacgttaggccgctgcccacgccttgagtgccggacgaggtcaacataggctttccgtcacagaatatgtttgggcaggaagatcggaacacttggggctgggccatctaccgctcccccacggcacacacgagtcgtcagggaaatgcccgcctctgtgtgtgttgtacgtgcagccttctgggcagagccgtggagagttggacgtaggccaggtgtgaggaggagaggtgtgtttggggtggccactggctcccttcctgcgtgacgtaggctggcgtgggctcttcccccagccccttgccggtgctgccacgtgagaagggcccgggtgccggtccc

SEQ ID NO: 138526 - DNA, 270 bp, Homo sapiens
cagaacaagcaaagatcattaaatggactcatcactaatataaagcctcccagccaactggaaggtcctgtgactattccttcacttgtgtctgttgagtagtttaaaatgtgttgtttggtggtattattgatttttggcttggctgtctctttttgctccaaaccaggatagtttgtgtctacatgacagggcttcaccaaatgttctcatgaattgcgcttcacctcctaaagtgtttctgaaactaactccaaataaaatttcaag

SEQ ID NO: 138527 - DNA, 486 bp, Homo sapiens
cccctgccctggcatttgggagtggggaggaaacggctccatcagaaacagctctaccattggaccttaggccagccacacttcttgttggagcttgtgtcctcagctgtactggggatgagagctagctgtctgggtcagcggcactgaggctccaggggagcatgtggtctgtgcagcaggcttggggagtgctgagcagcacagattgggtttcatagcacagtgggagcccagacaggccagctagccataagcacctctgctggaggaagaggtggactctcttgggctggagggcccagttcaaggaaagaaacaaacagctacactgggctccttgatcacccagctgtggcagttcttcttgaggacttcctgcccctaggtgggggctgccttcagctccctgctgcgtgtgataacttgggtgtggccctcacagctgtgcagaagctattcccagagggttctggccccaggtaa

SEQ ID NO: 138528 - DNA, 517 bp, Homo sapiens
tgggtgctctttccttccacttatttatgctttaaacaacagttacggtaaatataacgatagaaaagtgcctacagtggacaggaagatgatcaagaagtcctgatatacagcaatccacgttgcttctttacaatcactaacgaatcttaactggagccatgttccgttcccatgtgagtgataagcaatgatttattatgaagtgtcatgaaaccggaatgccatacagtgagccatgagctagtggaaaatgttttccctgtttcccaacctcattactcaaagatgcagtgtccctttaccaagcctaatttaactgacttttttgagcactctactcattggcaatggaaagtggccaattcgaagatgtccaggaaagcctggtacccaatgccacagcactggtccatatggtgtctgagctggccgacaatgctggaactgtgcaaactggccagtctccagaagtacaatcccaagaatcagctcagctctctgccaaagcagcaaa

SEQ ID NO: 138529 - DNA, 143 bp, Homo sapiens
agttcagacaggaaaagctcttagaatattaccctacacagttacctcctcatgtgaaatttcagctttgaagtctgaatagttcagtaggtttttgacatatcatcaagaatgattggttgactctaagcacccccgccccc

SEQ ID NO: 138530 - DNA, 396 bp, Homo sapiens
tctggtgagctgtcttgtatgtatatccactgtgtatccattacatgtgtccactatgtaatacaactgaaacaatccagcatcacttcacccatttcactatagtaaattgtaacttgttttttaaacgttaaaaaaattgatatttccttaaaaatacttcataattaaaaggaaatttacctaaattagatttttattgtttcataagtgatccattggagcaatatacaaggaattctttcatgtaagctttagagcaattatttttagaaattctacttaaacctttgataaggatactatattagagatttattaaaagcaggatatttagtagttttaagataattaaaaagggtttgttattgtgctgatagtcaactagttatttaa

SEQ ID NO: 138531 - DNA, 234 bp, Homo sapiens
caacagcaaaaactaagtagctacatgtaggtattctgagattttgagcaagtgccaaatgtcctacctcagcagagttggtgccgggatgaaccagctctcgaaggcatcagagttgggggatggagccttcaggccggactgacaggtacctgctctgggcctgcagctatgccctaagcaagttcgagaggagccactctgggcatgagggaaccttccttctggatcttc

SEQ ID NO: 138532 - DNA, 329 bp, Homo sapiens
aatagtcagaggatattagttcaggtaaaaactaagtctgggcttagtactgtagtattaactgctgtgctaattagagtggattgtatggtattttcaaacattggcagcctcggaaaggagaaactatcatactttaggacattataggaaatccatctacatgggtaatttcaaaaaacaaagcaagtactaaatcccaggcactaagcagaaaactggaatgtggttgatactcttctccttccccaggaatgtgagggcagtatatgttactgattcttgattactagtaaaaggtacaagcattttatatccttatagacctt

SEQ ID NO: 138533 - DNA, 306 bp, Homo sapiens
gagatatggcagggcgagcttaggggaaaaagctgggttaggaactgttgaaactgaaatccctgagggctgtgccgacagagagacagccggtagaaggttgtctttgcctgtctgtggttccaggtaacttcatcgaaagagagtttcaggcagtagaaataagagcacccaggacaaagccccagggaagagaaacatctgacggaggacagaggaagaagggtcaggaatgagactgagcaggtgtcatgtgtctgacaccagagcctgacacatagtacgtagtagacactcagcccctgt

SEQ ID NO: 138534 - DNA, 355 bp, Homo sapiens
catgggccatggaggaccagggcctagggaaggtaggcaggcctcctccaccctttcttccccctccactggctggagcccagacatggctgcaacccaacttcaaccatgcaaacaacaatgttctatgatgtggcagcaacttcaaaaaaacaggatcccaggtgaccacaaggagccgagctgccccctcacttggtctgttcacgttgaggacatcagggccattacatgagacagaaaaacaaactcctcattctttaagccactgtatcattagaccccttcaacgcagcagggcagctttccacaaagaaatgcacctgccttcatagggtgagcagagcatcaatga

SEQ ID NO: 138535 - DNA, 620 bp, Homo sapiens
tagtagacattaaatatatattttgtgaatgaattaatgaattaatgcttatgatgtggtgggaaaggcatggccccagaccctggttcacagtgcagcctcctcccacctgttctaatagcctctccagtggatcagcttctctgcccctctgtgtgtgaccctaggaacttttgtggcaccagtcataggaagctgagctccaagaagcaggcagaagagtgaggtaaaccagattaagagaaggacctttgaagcagtcagagaaccaggcttgagccacttgtagtgctctgcagatagagagcatccctgatgagacagggggagcccagaaagttggctcaggtatcaggagcaattggcattcttggggccagactgcatggatgttccaagaagccccagaaggcaggaggtcccaagttcccagaacccgaagtctttgtggtggcatgtgattctgagtatgtccactgcttcatggcacacagtgtatgagcctcccatgacaggccactcctgtgtgggctgatgctacactgatcattagctttctgggagagtggcccaatcgttcttccatatggtggccattcacattggaaagagcagaatcc

SEQ ID NO: 138536 - DNA, 324 bp, Homo sapiens
tgctgggattacaggcatgagctactgtgcctggcccaaagcagcatttgaactgagttttgaagaaagaattgaggttaaccattcaaagaaggggaaatggacttttctgacagagggaccagcaaaagcaaatacatggtactatgaacctgtactctcaatcacaggtgttttagggaactacatattattcagtgtcaacagagtaaaatttgaatgtggaaagggatggtaaagaggagactgtagacataagtgggagctggttatgaaaggccatgaatgtgacactaaggactttgtgctttattctatggggga

SEQ ID NO: 138537 - DNA, 235 bp, Homo sapiens
cggctgctatatctaggaaagtattacagtagtatctcccacagtcaaaatggaaaaaattataaagcaggaaagcgtctcaggaggacccaccgctccttccatggccccttcatatcctgctgcccaatttttcctttccttcccaggttaacacaagttttttgccttatttcaagggtttctatagttagggaactagctgacacatatcccactacccatttgttttctg

SEQ ID NO: 138538 - DNA, 288 bp, Homo sapiens
caacaaaaagtgatacatgtaaatattatccacttaggtttttttttaacttttattttaggttcaggggtacatgtggaggtttgttttataggtaaattgcatactcaatgtttgttctcacttataagtgagaatatgcagtgtttggctttctgttcttgtgttagttcacttaggttaatggccttcagctccatccatgttgctgcaaaggacatgatcttgttcttttttatggctgcatagtattccatggtgtatatgtaccaccccaaagaaatatac

SEQ ID NO: 138539 - DNA, 708 bp, Homo sapiens
ccaggttactggcatttcccactcatctaagatgagctaagggaccaagatgaagctcagcagagtgggatacacccttggctgggtgttctgaattcatgcctaagaccttcagtgggatcttggaacagagaatagagcctaaattacccatcagggcctcagccttctccaccactgtgtccaatgccagaggaagtcgatcaatgcattcagtattctgagaaaagttttactaacacatattttgccaaacgagatgatgtttgactataaaggaaataggcagacattcttatcaaaggatatagggaacggaacgtagttctcttctaccttcttgaaaactatgttacaatgaaatgccagccaatgaagagatgaatcaaaatgaagaacctaaaacgagagcatacttgcactcctggagtctctctccagccctgaactgtggccagcacagtgtgtcagcctgtaccagctgccggtatgggtgacctgggcacaggcaaggccatcatcatcacacactgtgtgcaccagaactcctcttggcatctccaagccagttcaccattgtgtgaactgtgcactgaaggagctccactgggactcagaggccttggcacaactgcagctgtggaacattgcgatgaggaaagattgggaaaatgacaagagcccattgtctggaattcataggtgcat

SEQ ID NO: 138540 - DNA, 234 bp, Homo sapiens
cagtaatagtgaaaaagtggaaattgggctggtgaagggaaaacagaagcatcctggatccttgagggatccaaattcttgagttctggactggttttcagatggtttaggcttcctgagggacagtgttcagtctcccatttagcatctgtggtttgtctaatatgggatgtgaagatttcttggagttctaggtttctggcctatgtaaattttgtgttcattctctatttc

SEQ ID NO: 138541 - DNA, 474 bp, Homo sapiens
gggccatactgttttttgaaatgcctgtagggtatccaggtggagatgtccagcatgattttggaaatacagaactgagcttaggagtaactaagggtgagagggacacgaagagaaagagatgagatgaggagttacacgtaaaggccatagtaaagcgctgaaaatagatgtggttttctttcttctcttcttttcacttttctttctcatctatagaaaagaaggctgttggccccaggaagcctcagcacaggatgaagaaaatagagcaggaaaagacatcaagcagccagaaggatatgaggaaaaacagaagaaatgctgttagaggctaagacaggaaaatgtttcaagaagagaagggccagccatgtcaaataggtctaggatttgacaattaattggtgtaatgaaaactaagaaactagattcagtagtggtgtaaacaaaagtcagattatggtgagggga

SEQ ID NO: 138542 - DNA, 306 bp, Homo sapiens
cttatttgccctgcacaggattcttggaaatgttaactgaatgaatgagggggcacgaatgccccagttgccctaaactcacctctccttaacatctgcttcactcattcatactatctggctaaagcccaaagtcaggtgcattgtcaaggctctgctctatactcactggtcaccactgtgaccaaactgttaagagggtaagagaaggagacacatacacatatccaccaacacctccacccacaaagacaggcctctcttggagaatggacaaaagccatcgatagagccaatttcacatct

SEQ ID NO: 138543 - DNA, 353 bp, Homo sapiens
actacttaagcagctgtgctttggatgagagttttattgattgtatatacttcaaatgtttctcttcactagccatgttttctttgtaactcttggcgaatattcccaaatactccagtggaaatgttaacaaaagttcttaagggtggctgcagggccagggcatttagagtggacccttgaccattgatactgaccctttggacacttggtgaagaaaacaatggttcatgtttgatgagatctggatgagactaaaggcaaatatggaatatattaaataagcctgccatgagaagaaataaaatggtttctgataaaaacagagtcattcccaactataaataagaaga

SEQ ID NO: 138544 - DNA, 1155 bp, Homo sapiens
tgaagcaagtctatcatgatcctcagtttaaaatggaatctgagggtttcccaacaagttaaacatagaatttaattaccatatgacccagtaattccactcataggtatatgctccccctcaaactggaaactgatgtttaaagaaaacttgtgccaggtgtggtggctcacgcctgtaatcccatcacttgaggtcaggagtttcagaacagactggccaacctggtgaaacgccatctctactaaaaatacaaaaattagctgggcatagtggcacgtgcctgtacttccagctgaaggaaggctgaagcaggagaatcgcttgaacctgggaggcagaggttacagtgagccaaattcacaccactgcactccagactgggtgatggagcaagactgtgtctcgaagaaaaagaaaagaactgtatctggcacgtagtaaacaccctataattattagttgttattggctgtggatggatgaatgagttttagatggatggatggatagatggaaggcatggagctgagcctggcgcctgttttcacactgcatgttactgggaatcagatcaaattcaactgattttcaaatgaaactcattaggcaagttttcacattagaataggttatattcaataaattgaggaagagacatcttatttttcttttccccagcaaattttctgaaaataaaggctttttctctcccctgcatttttcacccacccactcacccgcctcccagagtcagacattcagtccatagatataactcttttattaatttcccttgaagactgatgatttttttctactttttgccacgtctcataattgacaaaactacaatgtggatttaagatcagcagcttttaaccacaaatattaaagcattttaaaaataagttcaattagggacagttcacattgtataaatcagcctttttgtatctaaatatcatacataatcattttatgaggaaataaaatgtcacattgttaacaatacaactgtataaaaggagctacaaaaataaggattacatttgcccttatcttgggatttcaacagttccagaaattttacaacttcaagaccaccattttaaatatgttagtgcctaaatatatttcctgtgctgcaaagat

SEQ ID NO: 138545 - DNA, 372 bp, Homo sapiens
aatgaatgtaactaattagagagggtagggatatgagaccagcctgtcaccttcaaatatcatattactaaggaatctatacaaattctatgagcttctagaacgaaaaggatatgtctccttaaattgtgtctgataacttactagatactgtctacatggcttttttgagggaaggggaataatgggaggtggctttaactaatgttaactgatttctacaatcagggaatctcgctggccttgaagagaaattagaatgaattcaaatgacaggaaactgtatctacatctacctcacagtagatatctaggtaggaagaatgagaaaaatacatttacaaacagtaaaatatcaaaggatacattatg

SEQ ID NO: 138546 - DNA, 380 bp, Homo sapiens
gcctctcgacagttgccactgacccctggagaggagtcctagttgggttgggaggaagggggttgggcttgaactctccctgcccccttacttttggagcagcagcatccccccgaggagctgagaggtcactccctgggtcaagcagcctgagctagtccctctccacggacaggatgattcacagcccagaaaagggagcagccacctctggaaaccgtgtacatcctaagagcccctcctgcagcacctttcttaggttgattcagggagggaagctgtgggaggagtcggggaaaggcctgggagcagtgcttcctctctccctgctgcaccaacatcttggaagcttggtggaggtggggacacaactcttacca

SEQ ID NO: 138547 - DNA, 399 bp, Homo sapiens
cattctacccagagctcagaaagaagagtgttaaacatggaacaactttgaagcagtttggtaagttgattttgtttgtatgtgcacttaaaaggttttgatgacatatattacttaattgcttctacttgggaagagaaaggataccaggatacagaactgagtttacaggtgccatcatgctatgcgaggcttggacactgagggagaaggtcaatctactgagagaaaagtcacaaaataaagcaataaacaccacatctagaacaggagaaattctatcacagctttcgcataaagccttttaaccattaaaaaccgtatgaatgtcaaatagcaatcagtgaagacattcagggccataggtatctttgactatacagacctggaaagctactg

SEQ ID NO: 138548 - DNA, 2884 bp, Homo sapiens
  misc_feature (2884)..(2884): n is a, c, g, or t
tctttttaaatgtttgcttgatatttaatcatggatgtattgagatggactcatctcaaactatattaaaaacactctggatgctttaaataaaaaatggcaaaagttaatgttgtaagagaagtgaaaagaaaaccaagagctcctacctgcctcagcttaccctttgtttggtgcgtgggtgcagtgggcagtgagccgtgccattccctcctggcagccggtgcatggctggccatggtccttagcagtgactgtgaacagccgtgggctactttgttacccacccagtgctgcttttgtatgttggcaaatggggctttcgctttccttggtttgattctgtcattgatgcttcagactagtcatgcttttgtttgaagggaaaaaaaaatcaatcaatcaatatcagtaacttgctatagatttttataaaggaaaaaaccccaccacatgtatggtggggagtgagttgatgtggaatcagtcatgaccgcgttgagttaggagcatcgcggatgtggagttacagctctgctgtggatgtttttgttttaagaaaacatcttttaaaaatctaataatggttcattaaaaaccagaaatggtcaagctcactagaaaccgtcatcagccacattctgatgaaagaggttttgactttcttttttaaaaaattaatgaagatacatccaaatatttgtggcaggcaggaaatcaagcggattttaatgggaaattatgtaagaaagcttaatgactaatttttctggatcagacaagtggagaacggtcttagggaaatgtgtacatccattactcattagtttgctgtattataattactgttgtataggaagaagcatgtcagataattaggaactgggtggcattttatgctaaggatcaaaacaaagattttgcttggaatgttgagcaaaattatactctggctgagattaaacacatggcaagcatcctactccagtatttaaaatcatcaggcaggctttattctatttttttgggtctttgttctttcatgttttcctctaatgaaaaggaatgcttagaaaatagcactgggaggccagcaagaaatcagtgttgggattttctcatgtgtgaggagctgttactgctcctgtcgcctggtttcacccctcggttctgctcccaggagctggacccctccccgctggcccctctgtgctgcaagcatccattttgggcttggggataatggtcaagagagttggttggtttgggctgtgggctggacaagcgcttgctgcttaaaccatgttgattgtggcttaactgctgaaccaaaccaatacttcatccaaagaacttctccagggagggagtgggcttcaggggagccacatgggaagccccctaaccaacatttctgtagcacttgattggagcctccaaacaccgtcgctgtcgatgctacagcagtcctgtgggccgcagaaggagtactcactgtgtgttctccatgcccttctgtctctgagaagcagcgtggcgtgttcggattgtgccctcctgccgaccccggtggctcaggcaaagggcttgccagatggtcggtgttctttgccaaatgggaccgatagcgtgcgcatggtggggatgaggggaggactagggaagtaaatacagtgcctgctgccacgtcaccttcacacagtccatgtttaataagaggtcgctgctgtgatgatagggggtcggccagacatgtccactgtttaaaaagcagcatccatctgaggactcattggattaaatgtacacctaaaaaaaatacagtggcacctgcatgcagtgcccgaggatgggtgtgctgttttactagatctggtgttttttggaggtgcacatttggtagttcattgttgggttggtatttgtctccataacctgtttcagcctcaaggtcatttacctttgatcagtgcttcaagcttagcggtttgtttatatacatgttcatgtataaattatattactcagtctgatcataatatatgcccagtgcaaatcatttcattaaagcctcagggatacacggtgccaccgtttcctcattcagggacacggggatagtggtagtgtgtcttcagcacgacatggggaaattcaaaggcagccatccgtggaagagccaacggcagcccgtgcaggcgtcagcgcctggggaatagtagcagtctacatctttagctgtcagggtatctcgttgtagcctcatcctgccctctttaggggtccttggatgagttatcagttgtagtattgacattttctgtaaatagtgtcactcaagcgagtgacagtgggaagcagacaccagcccttagggagcagcccaggatgcttttttcctccaaatgcctctcacctattcccagatactcgctggagttggagcacacatgtctgcagatgtaaaacgacctgctcccccaggtgaatggattctcgccagggccaatacttatccgcaggggtgtgtgccaggcagcccaggtcagcctccctccaccgggccacccgcaccaggttgcctcccatcgtttgcaggagcggaagacccgatggagcaggtttcacagtgccctcgctgctgcctcccgtttcatctgcacgtctctttcaatgcgggcgtgcgaacttccaggtagagccgagttcaagaaaatgaagtactgcatgcgacgagcaagtttattgaagagggtgtgaggtcgcggcgcctgaccctcattatgtcagttactactaaatgaaattagaacttcactgccctttttctttttcccatcgaggtgcaggaggaattgatcttagggtagtattttggatttan

SEQ ID NO: 138549 - DNA, 2062 bp, Homo sapiens
tctttttaaatgtttgcttgatatttaatcatggatgtattgagatggactcatctcaaactatattaaaaacactctggatgctttaaataaaaaatggcaaaagttaatgttgtaagagaagtgaaaagaaaaccaagagctcctacctgcctcagcttaccctttgtttggtgcgtgggtgcagtgggcagtgagccgtgccattccctcctggcagccggtgcatggctggccatggtccttagcagtgactgtgaacagccgtgggctactttgttacccacccagtgctgcttttgtatgttggcaaatggggctttcgctttccttggtttgattctgtcattgatgcttcagactagtcatgcttttgtttgaagggaaaaaaaaatcaatcaatcaatatcagtaacttgctatagatttttataaaggaaaaaaccccaccacatgtatggtggggagtgagttgatgtggaatcagtcatgaccgcgttgagttaggagcatcgcggatgtggagttacagctctgctgtggatgtttttgttttaagaaaacatcttttaaaaatctaataatggttcattaaaaaccagaaatggtcaagctcactagaaaccgtcatcagccacattctgatgaaagaggttttgactttcttttttaaaaaattaatgaagatacatccaaatatttgtggcaggcaggaaatcaagcggattttaatgggaaattatgtaagaaagcttaatgactaatttttctggatcagacaagtggagaacggtcttagggaaatgtgtacatccattactcattagtttgctgtattataattactgttgtataggaagaagcatgtcagataattaggaactgggtggcattttatgctaaggatcaaaacaaagattttgcttggaatgttgagcaaaattatactctggctgagattaaacacatggcaagcatcctactccagtatttaaaatcatcaggcaggctttattctatttttttgggtctttgttctttcatgttttcctctaatgaaaaggaatgcttagaaaatagcactgggaggccagcaagaaatcagtgttgggattttctcatgtgtgaggagctgttactgctcctgtcgcctggtttcacccctcggttctgctcccaggagctggacccctccccgctggcccctctgtgctgcaagcatccattttgggcttggggataatggtcaagagagttggttggtttgggctgtgggctggacaagcgcttgctgcttaaaccatgttgattgtggcttaactgctgaaccaaaccaatacttcatccaaagaacttctccagggagggagtgggcttcaggggagccacatgggaagccccctaaccaacatttctgtagcacttgattggagcctccaaacaccgtcgctgtcgatgctacagcagtcctgtgggccgcagaaggagtactcactgtgtgttctccatgcccttctgtctctgagaagcagcgtggcgtgttcggattgtgccctcctgccgaccccggtggctcaggcaaagggcttgccagatggtcggtgttctttgccaaatgggaccgatagcgtgcgcatggtggggatgaggggaggactagggaagtaaatacagtgcctgctgccacgtcaccttcacacagtccatgtttaataagaggtcgctgctgtgatgatagggggtcggccagacatgtccactgtttaaaaagcagcatccatctgaggactcattggattaaatgtacacctaaaaaaaatacagtggcacctgcatgcagtgcccgaggatgggtgtgctgttttactagatctggtgttttttggaggtgcacatttggtagttcattgttgggttggtatttgtctccataacctgcccctcattcccagtatttgccctggtaggcgggctatcctcttgaagtcgaccgtgcatgtatgtattcttggtcatctggtccgtacttactcaaacgtatcgtctggtacgccccgttagg

SEQ ID NO: 138550 - DNA, 100 bp, Homo sapiens
caaatgtgtgaacaaatgtgatataaatatgatgtgatataaatatgagataatagtttatattactaatatgaatcaaatgttatggttgcacagtgga

SEQ ID NO: 138551 - DNA, 281 bp, Homo sapiens
gtcttttgttttcatgccatccttttctgactactatcttagtttcctaaaagattttcctatgtttcttcaggccagtaccacataaatcctcctaaaatctgcctctgattatgacttggaacccttcagtagttgcctgctgggtcaagtttaaactccttaccctggccccaaggggtctcttgttccttgtctaaacctctgctttaggcaaactgcatggggcacatacactgtcttttctgcagcctttgtgcatagtatgattcatctctccc

SEQ ID NO: 138552 - DNA, 147 bp, Homo sapiens
atcagaagggcttaaaaggtttcaggtagtttcataaaccagaaggagggatccagaaaaaatagtgtttgatctcccttccgtcaggaatatgcaccatggtaagacttggggtatgtaatggctatgcttttcttttctaaggtg

SEQ ID NO: 138553 - DNA, 383 bp, Homo sapiens
aatgtggcccgatccctaggccagcggcacttgctcttgcagttgccaccttcatccttaagtttagggcagaacagccgtgaatctctgggcctgttcccaggaatggaggccaagacaactgttggaggaggtctacagagtcccgccacccctcagagcccagtcaagcatgaatgggcttttacaatccgtaggaggctgcagtggtcaaggtccttctaaagcacctgcaaaatcccagcagtgtcccacctgtcactgtgggtgttctttggcttcctgccgttgataagagttctctcctttttgacaagaggccgaacaaattgaaactgtatttaaataacaacactctttttacataatagaacacccagttt

SEQ ID NO: 138554 - DNA, 472 bp, Homo sapiens
agaaaaaaggagactctcaagatgagttccaaacatagtattggctgaaagttagcaattttttaggattttgttatgtgccaggcaataagcttggttctttgcacattatctgatttaatcctcagtacaagcctataaggaacatacaatattattttacagactttaagcattctgccagggtcacacattaggaaatggttagccaaatatgacttttgatgattcaacttcagaaccaacaatttacaatgtagcataccatggtttttcaatagcagcactgtcatttgggtcagataattttgttgtggtttgtccactgcattgtacaatgtttagcagcatccctggcctctacccactagatgtcagtagcaacacctctctcccttcccctaaatatttgacaatgaaaaatttctccagacattgccaaatgttccctggggggtggggggcggggaat

SEQ ID NO: 138555 - DNA, 225 bp, Homo sapiens
caggaggctgaggcaggagaatcacttgaacccgggaggcggacgttgcagtaagccaagatcgcaccactgcactccaacctaggcaacggagcaagactctgtctccaaaaaaaaaaaagaacactcatttccagagtcaagttacgtgaccacaggtggcacagggcctgtgagaacagcctgcgacgacttcctgccagtcctcttcttccccatctgtgc

SEQ ID NO: 138556 - DNA, 372 bp, Homo sapiens
cctgtgtccaagtgttctcattgttcaattcccacctatgagtgagaacatgcggtgtttgattttttgtccttgcgatagtttgctgagaatgatggtttccagcttcatccatgtccctacaaaggacatgaactcacccttttttatggctgcacagtattccatagtgtatatgaggcagctccaattctattatgtcactgacatctctctaggacttttcttacacatcctaaaggactcgacttcatatttacactaacatgagtataatatagaaatattacctctatatgggctgggcgcagtggctcacgcctgtaatcccagcactttgggaggccaaggcgggtggattgcttgaggtca

SEQ ID NO: 138557 - DNA, 155 bp, Homo sapiens
gacaagcctttcattttctgagatcaggaagatattttcttgaagtcacacagaaagtgagtggctaagcaggtgaaaatctgagtctgaggggttccaatgactgtgaccttctcacactgccagcaagacatttgctccatctgaaaacaaag

SEQ ID NO: 138558 - DNA, 165 bp, Homo sapiens
tttgctgttgaaatattttttctacagcaagtgagacttgagtattttctgttctcagtaatggttatttccattttttggtaataacagtgtatattctgctgctgctctaaagtgctttaattacctgcattctctcctttaagggagcataggtctgtttat

SEQ ID NO: 138559 - DNA, 176 bp, Homo sapiens
gtaagttattttgctgtgaagagtaccttttatttatgatattaaaggctttaacttaaattatccttcaaaactttggaggcaacaaagatgtctaccatggtttcttggatcaggtattagtcacttgtggaagtggtcacatagttttgtcttagagaaagttttgattataa

SEQ ID NO: 138560 - DNA, 131 bp, Homo sapiens
cagagagacaaagcagaataccagaatatctctgatggcatttaagctccagagctcctcatggatcaagctgaggctagacttcacctgagcccttattttgtgcttggcttctcctcctgcctatccag

SEQ ID NO: 138561 - DNA, 307 bp, Homo sapiens
actgtgtgtgcagatgtgacctcgtgattgtgtggggactgtgatttcaggtgtgacccccatcttgggttgacctctgtctggggaggactgtgcgtctgtcgggactcccatttgtgagtgactctgcagtgtgaccagggtccaggggtgactggatgtgcaactgggacccttgattgggtgactgcgtgagccgctggttctgagacctgtggccggggtagttctaggccctttgcctgtatgcctggctgtgcgatgtgagatgtgactgttgctgacctgccgtccggggactgtgcca

SEQ ID NO: 138562 - DNA, 544 bp, Homo sapiens
caaaaggggaaaaaacaggatgaggttagcatatgaaagtgttttctttccctccctttgggctggttttacaatgctagtgtgctagtagaatggctgctttcttcagcactttgttaaaggtccctggttgggtaagaaacttgactgcactaggacacatcaaacaaccagccaggctttggtcttacccaggcactgaaaagctgagccctgtgctctgctctcccatttgccacattttgccggatgagtctggtatgcttcagacaagcagttacacatttcacgaaggaaagaggtcggtggatggaaaattactgtcatttttagtgggtgaaggcaaagaagacctaccttctcttccattgtgagatactgtacagcaccttcgattcatgtgcgtaggtctgaattctgttttcaggatacttagtgttgtgtttgtagaattgaggagatgctacctaggggagaccatggagatccactgaagtggctgcggctgattgtgattgaatttttaagcatttactgaacattc

SEQ ID NO: 138563 - DNA, 325 bp, Homo sapiens
tgaaaggtccattccttgagttatgaggaaaggaacctatagattagagactgggaatatgatgggatcaactgttaagaaatttgggagtcctcagaacctgtgggtacagtaaaaagaaaacgactttagggcagagacagtttaatgtagctaaagaggcagttttcgatttatgagtgaacaactctgcttctgggtaatgtagtaggaaggaccggataagcctccaggtgggagttcaggtgggtacaaggcagttttctcggtcacatcccattcattgaattattcttctttatctgacacagaagagcttttactg

SEQ ID NO: 138564 - DNA, 427 bp, Homo sapiens
gttctggtgggtaaagccttgcggtctttttcacaaggtaaaacggtatgtgatatatgctcagggcaatacccctggagatgtgttgtgaatcgatggacacatttttttttcatttgtactttatttagtgactaaccaataaagtaatagataatagagtactaactttatgtgttactactactactttatgagtaactcgagacctttgcatatatattaatgcttttattaaaatatatattttgataaatacctggtcattgtaaaaagtttagaaagtgcagattagtaaaaagttcttaaatctcacaaataaccactgttaacatttttttggtgtactatcctcccaatattttatatgtatattttttaccaattgtatatattgtaaacacatatgtaacccctgtgttccttc

SEQ ID NO: 138565 - DNA, 808 bp, Homo sapiens
cataaatcataccaatcacttggtacagttgtttaaaatattcagtattctgtattttcttgttttgtgcaatgatcatctcttgctttagtaataaaaattacagggagaaattacaatagaaaatataattttacaatattttaaattatataagagagatagaagagaaagagaaacagaagagaacacctataattacattcataagctaaatatacaaatgatgtgactctactgtataagggcagggatgagtggggagctgagaaatgggttaaatgtttgagatcatttaaaagaattgtagcacaaccagggtaaagttttctctgaaattatgaaacattgagtggaattcagggctttgttgactctgcttctatttctgtctgcagacgaaagtctgatttggggtttgcagtttgtcagtttctaaaatcctaccttgattcattaatacaaagttgaaaattactttcttggtgctatatacataaaagaacagtttttgaaaaaattatgaggttaagtgtgttgtctgccctatcggtaccctctcctattaacaccctctttccttactatggcattatgtttacacctgccctccctggcaggagcaaaaccttaacatctctgtctcaacctgcttctacaccttcataaaaacttccctgtcctgcattttcttcccactgattaatagtctttctctgctagtgacaacagctcagctgaccaatttattcatgctaatttatctatgactattaacaacttgatgggttagtgcatccagggaaga

SEQ ID NO: 138566 - DNA, 466 bp, Homo sapiens
agcccattcatagagcaaagctaaatttattgcttacctcagtgtggaacatcaagaattggtagaggtgtagtggcatctcagaagaggatgacaaaggcatgcatgaggtttttttggtctggtttaaggcaggtctttgttggggggcacttaattaggattggacaactttgtggcataatagttttaggattgctggatgcaggggtgggggagggtttcgaacaaaccctttaaaactaaatagtcatttgatgctctatattgtcctgagacatgggtgtgttttctaaagagggtaagttgagtagtctagtgttaggatagagaaaaggatttttgcaaaattcctgaaacaaataaaaaagttatctgtgagttcatcttcctgggtaagagtgtcctaagtgagtagtcatgttaatgtatatggtgagctgtatgggttcaaatggttttggtt

SEQ ID NO: 138567 - DNA, 749 bp, Homo sapiens
agggagactctgtctcaaaaaaaaaaaaaaaaaaaaaaatctggaaaagataataaagttgtgaatgtaggttggaactaaactgtggaagtccctgaatgacttcaggagtctaggactttaactgtgttagccaggcacccagcattttagtgagacattctgctttgtagcatttgcattgcgggcacagagagtggaggtggcgctgggaagcgtgctcctgccagccacatttttctcctcactggggaaaagaaaagagcctggtggtggtgattggccatgatgtcataggtcagttaccggcaaaagccctacaagaggcaggggagagcacctgcaaactggggtgcaacagaagggacgtggggaagcagaggctgaggagaccaacccatgggaaggaaggcccgtggaggctgctgcagtgggcagtaacgaggggctggacttgaggattggagaaatcactgcagaatgggcttaatggaagacaaatttttaaaggaaaaatagtgactgatttgtaaaaaaattagatgaccgaaattttaagcacatattactgatagagtgttgataccactggcaaaatgaaaaggcaaggaaggatgatggcttccatgttggacatgttgagtttgtggtaacggcaagaaaacctgttagaaatctccagacttagaactatggacccacgtggaactcaaaaggtcagtttcgatatgtcacttgaataaaatagt

SEQ ID NO: 138568 - DNA, 515 bp, Homo sapiens
gtcaaaccaagacactttcctaatgacatagaataggagggaatacattagagggcatcattcacagtcaggttgagtactgtttcatgaaacctctgttatatttgtatgtatacatacacacggttaaatactgggttgcaatgtaaaatgtactttatattgcgagtcatggttttaaaaagtttgaaatcttcatactctgctagtgagaatgcaaaacggtttaactactatggaaagaatctgatggttcctcaaagagttaaacatagaattagcatacgaccctgtaatttcactgtgtacacatgccccaaagaaatgaaaacaagttatcaaacaagtatatgtacatgcatgttcatagcagcactatgcgtaatagctcaaagtcttcaatgtctatcaatggatcaatgaataaacgaaaggtggcatatatatgtaatggaatattattaatccgtaaaaaggaatgaagtttgggaacatgctacaacatggatgaaccc

SEQ ID NO: 138569 - DNA, 110 bp, Homo sapiens
atcatttaacatgtttaaaactgtgctatcattttcattaggtttctgtcttttttactgtcactggcaaaattttttaatattaagtcccaactccattttcccatagg

SEQ ID NO: 138570 - DNA, 414 bp, Homo sapiens
gggagaggcatgccatgtcattttaaggaactgcaggttgcttagaatgaaagattcgtttataggtgatagaatagctagagtacaggttggagagaaaggcaaagattggtatatgaagtgtcatgtaatcttgctaaagaattagaaaaataggaggtaagagaagatagaagaggaaaacagagatatattaaggaattttaggtgtgaaaaaataaatcatagtagtctagctagaaatcatgatataactttataaagaccttaatccaatgtattgtcttaatgaattgaaatcatgaatatggctatggttttcttaccactggttacccctacagaaagagttgagagacatctcagttgttaggtgtgcaggctgtttcttcttttctagtgggccctgtattt

SEQ ID NO: 138571 - DNA, 413 bp, Homo sapiens
cagccttggcctcccaaatgttgggattacaggcatgagctactgcacctggccttggagtgattcttgaaagcttagaaaagtcagtggcccacattaaatgacgtagagatgacaaaaccatggcagacttaacaaagggatccaaagattcatacatacacaaactaggatggaactagaagataagaccaagcaacccaccttcagttatgttccttaggagggtctggagagcattctgtttaccaaggttccaaggaatgccctggttggggggccatcagcatcactgagaagcttggtagtggctatcctggtttgcaggggctggttattatataacatcaccccagaccattcacattacagccagaggtgcagcagtgggcatgtggccatggggaccattg

SEQ ID NO: 138572 - DNA, 608 bp, Homo sapiens
gagttggatagctccccagtgaggaggcagcacatctagagttacatatagttttaaatttaattcatttaaatcaccaaatgcatgagccttcactgttgtgatgaatttttaatgtaacttgagcaaggctcccagaattttgcattctctctactgcctgaacattttaaggtgaaacattattctctagaatttcctactgtgtctgtccaatttattaggctagtagaacatagtccagacctaggttaaatttttcatgtgacgctttaggcaattttaattttgtaactcatatcccaggcatcagtggtataatgctatacatagtcttagaaaatagtcattatggctgttgaatgtctttgtatggtaactatttcactacaaaatccagttttattgatattactcagtggtgaatcatacttgttcagatcagggttctgtgctgttgacttgtttctggcacaggataaaatagaaataaaaaaaagcattccaatttgattgttgcttttttttttttaaactataaatgcagtttaagtctttgttttgtttttgagacagcctgggcagcagagtgagactttgtctcaaaa

SEQ ID NO: 138573 - DNA, 113 bp, Homo sapiens
aaataccccacacaatggtctgattcatcctcaagcctagttacacaagcctggctcagggtagagaaaataaatatcaatataagtgtccacgctgggtgctggggtgagta

SEQ ID NO: 138574 - DNA, 426 bp, Homo sapiens
tacactgtgagcatagaaccacctactcaagcctcagcaatggcggacacccctccccctgccaagctccagcatcccccggtcgatctcaagaattcgtgcgctagcagcgagcaaggctccatgggcgtgggacccaccgagccaggcacgggagggaatctcctggtctgctggttgcaaagaccgtgggaaaggtgcagtatttgggcagaagcgtaccattcctgcaggtacagtcactcacggcttcccttggctaggaaagggaaatcccccaaccccttgtgcttcccgggtgaggcaatgccctgccctgctttggctcaccctccatggctgcacccattgtccaaccattcccaatgagatgaaccaggtacctcagttggaaaggcagaaatcacccatcttttgcatcgatct

SEQ ID NO: 138575 - DNA, 188 bp, Homo sapiens
tgttcccgcacatgaagtccttatccaggaactcctggaatctgagattgtttcagagcctctctgtacccacccagtcacagccccccttccacacccatcctatcgaccaatccagctttcatgcttccaaaggcatactgactagaacactggccctaacagttgaggcagtgtttctgaaaatt

SEQ ID NO: 138576 - DNA, 460 bp, Homo sapiens
tcaatacttcaacttgaaaaattgccctaaaaaatttatggaatactgggcttcaaggcaagaaactaagccagaaagaggaggaatagaatgcctcattaagctgtaaaatctgaggtatagttaaaattattatgcttttaaaaaagcattctaagtaaactttttttttgagatggagtgcagtggtgcgatctgggctcactgcaagctccacctcctgggttcacgccattctcctgcctcagcctcccgagtagctgggactacaggcgcctgccaccatgcctggctaatttttttgtatttttagtagagatggggtttcaccgtgttaggatggtctcgatctcctgaccttgtgatccacccgccttggcctcccaaagagctgggattacacgtgtgagccactgcacccggccaaagtattctaaataaactcttaatttgaaatgta

SEQ ID NO: 138577 - DNA, 484 bp, Homo sapiens
ttaaatagttcagtcagaatgatggttgggaatattttatgctgctttcattatgcttcggctaggcagggtaattcttatgaattaccttgtttatttaattaagtaatgcaatacacgacaaaatattaccctgggtcatgaaaaatagagatctttaataagcatcatggtctcaaattgtaaaattacttaaaaaaccgtggcaggggtggttagttggttcatatttgattgaagcagtaattcattacatttatgaaatctttagagttcatttgctgtccaggcattctaacgtattacttacttggattgcatttttaaaaagctgctggcattaggcaacaagcaatcttacagcactaggctagagttagcaccttttccttgtggcttgttcaccgctaagtctccacggtgtcttgcgtatgggacaaaaccagatacctactcaatgcacccatcccaaaacatgacttca

SEQ ID NO: 138578 - DNA, 559 bp, Homo sapiens
tctacatttgaatacaaaattacttaaattgatgatagaaagcattctttagtaggtgagagtgattattctctttttagtttagttcaattgagtttaatactagagttttgtcttatgcttataatcataggtatctttcctaagacttaaatttaagatcaaaccaccttgtggataactaatcatatggtattataagattttcttaatttgtggatagcaatgtaagcaatttaaaataatcacagtgataaaagtggacatttcagaattatttgagtgtattaccctctttgaaacacttaatatttattcaatatataagttctgagcacttccattaaaaatctaaccattaaaaatataaaatcaccagcctgagcaacatggtgaaaccccatctctgaaaaaaatacaaaaattagccaagcatggtggcactcgactgtattcccagctacttgagagtctggggtagaaggatgcttgagcctgagaagttgagcctgcagtggatgtgatcacaccactgcactccagcctgggtgacagactg

SEQ ID NO: 138579 - DNA, 299 bp, Homo sapiens
taactctcaggaggaattggtcattactgtctgacgttccaagaggtcaagcagaatggcactgagaaagagattgtttcatttcttgaccagaaggttactggtggcccttcaaaaggaagtcccaagagagttgtggtaagaaaaggcatcccagagattcaatttagagaagataatgaggaattaagagaaagtttgtaagtttaaagaagagacacagaacagcaattgaatggagcaccttcttccaagaggaggcttgcttgtgtttgatgacagattttgagaaggattca

SEQ ID NO: 138580 - DNA, 512 bp, Homo sapiens
tacccttttaactaattttatggaaatataaaccaaattatttatattgcttattagtgggtggtgacattgaggcaggcttgtgatattttaatgttttctaatttttttctacagtgaaaactttaccacacaatttctggcataacaaaaataaaaaggggaaagctgttgtgttctaagttactgtgtttaaaactaatcagaagtttctggacattaatccaacacagagtttccagcattcttaatctttaatgctatccattatactcacagaaatgtacacctcatttggtgaacatttggcaattccaaggattctgcatgctaaggtttgcatttgcatgtgccatttgggtttgtgtgtgtcattttctaaaatgttactataatttcaacgaagtttgaattggtctttgaatcactttaccagatgaaagtgtaagacaaatgcctcccagttttgtacttcctaacaaggtagcttccaactgtggcatgtcattaaa

SEQ ID NO: 138581 - DNA, 211 bp, Homo sapiens
ggacgctcactcccagaaaagggaaggaggagaggacagagatggagacatgatcactctttcaataaaatatactttaaaagtttatattccttgcagcattatttataaagaaacaggcttagtgtaaatgaatgatgataagaaacatccctacctaatttgttactttccacaattggaactttcctattcacagttctcttgtccc

SEQ ID NO: 138582 - DNA, 257 bp, Homo sapiens
ctggaaaccataatgagaccccgtctctttttttaaattaaaacaaaaaagaggactgaaagtgggggaggagtcattccagaaaccagtatacagccacccagaagtctcttgagaaggatttgctgtgtctctgataaagagagaccctccttgaatgacatcttcctgggctgcaaggtaactagagaaaacagactgattctcacaagtttaccctcctaagtcaactgtgaaatctggtggtgtccagcagg

SEQ ID NO: 138583 - DNA, 454 bp, Homo sapiens
ctgtgtccttgaagacagcctcatttgatggtcatttggctcttctccacccccagcctcactactagctctttctctcactttgtgatctataatccaagcactggtgaaatatctcatgcacatgagccccggtgtcagtgtttctcaatcatttagaaattactgattatgcctgttaatgtgttactactgcatgcttaaactttataagaggatcggcagcattgtgggctggactgttcacatagcaagagtctggaagtctaagtttagttctggctttcccattgactggctctatgacattgggcatgtttcagcagtttcctcatctgtaaaatgggagtattggatgtgatttgatttttccatccttttttttttcgatgaatatctgagaccaactatgaaatcttttcaagagaaaaaaaatcataagcaattgatagtg

SEQ ID NO: 138584 - DNA, 391 bp, Homo sapiens
atctcgctccagcatggctctttcccagacccaggtagcatgaccctcccttcctggtaggagaagatggcaggaagataggcctccactggggggcccccttttttcctctgaatgtggcactggagactgccagcagacccaggccctggggcatcctcctggctcaaaggcctgaccttcgaccctagctaagcccagcctgcctctgcatcccccaaggggaaccacagggcaggtgctggctccaaaatgtatgggatcatgggactccactcacctggagacccagagacggagcagggaaacagactgggctggcactgggttggtagccacaggaaccttcctactggcttatttaccaagcatgactttacctgttttctta

SEQ ID NO: 138585 - DNA, 207 bp, Homo sapiens
agcggttcacacagtgggaactccacgtgtggtagctctcactgctattttcacttatgtgagcccctaggtgcaagtagaccatgaggtcacagttgagagggacatcaccagcgggacccttcatcagaagtggggccacaaagaaactcagaggacaccaagaatgagggacagagccaggaaagctaatgaaaagcaaaaaca

SEQ ID NO: 138586 - DNA, 282 bp, Homo sapiens
ggtcaccacacacagccagcaatagtttcttaattggtctttgtccccatttgtatgtctctacacatcaaccacagggataaatcatatctcgctccactacactacttaacacctccccaccatcacacacccaatggcttcctggtgtcatcagaataaaattcaaattcctcacctttgacctaatggccctttctggtctagttcttgcctataatctattttctacttatttcccccttgttgactgaatgctaaccacacaagccttttttctgt

SEQ ID NO: 138587 - DNA, 450 bp, Homo sapiens
tggatgatattgttctaaggtcaaaaactgtcctacactgaaattcctcaatatgttgacatcctgaaatgtttaaaaattacttattgaaaaactaatgaatgtaagttactaaaggaagatgaaaataccctaataatcagatttcatttttatattgctattaacttttctagttgaagaaggaaggccaatcccagagaaaattatggaatagaccacggttctcatcactgtcttccaagcctctctccatatttccagcccctgtcacccttgattccctgtttcagcattgccttggtgcccaatttccatttcagtgtgctgttgcttttataacccccatttagcatccctctccagtctgggctaatgcacttttctccacggctttttaactctctacttcacaaagaacagactaatactcaaagtatagtgatagta

SEQ ID NO: 138588 - DNA, 331 bp, Homo sapiens
gtaaattgagagatatctttaatgttccaaagcaatttgctaaagcccgaatcattccttcacacacctgcaaaagattcagaagcccatggggaagtaaacatttatttcaaaaataaacttaaaggtttggaaataaaaactgacaagctgttttctcatgtaagatgtggctctatgccaccagaggcactgtaatcagaatttcaaagagtagaaataacaggtgacaacttactcggagacattcaaaccaagggaactgcagaacaagtgtcatttacatccattaaacaccatatcagcagagaggactggaaataaagagaca

SEQ ID NO: 138589 - DNA, 229 bp, Homo sapiens
ccaccctgctgtcccgagtgcaagatgagtggcaagcggtgcccgtcacgggatccctctggaggcctttacatctggggaaaggtcctacctctaggcaaggaaatgagaacacagacctcgctgaagggacagggagtgaagggggatgtccccaaccaaaccgtccctgcagctccaggatgttcttaagcattctccgttactccccttactctgcccacctccc

SEQ ID NO: 138590 - DNA, 415 bp, Homo sapiens
aggtttttgtaaaacctgtcttagagtgatgagttcaggtaattggagtattccaaaaaggacctctaattagaatgagtttgaaaatgatcatagagttttaaagttaacaaggacgttagagagcaaatagacccaacttccagaaactggatgcaaatttgtgcatacacgtacatatgtttgtcatatatggatggggtctctgcctttcattaaattaggagttgacaaactacagcccaaagaccaaatttggtccattgtctgtttttataaggcttttgaactaagaatggttttcacattttcaaattattgaaaagaatattttgtgacttgtgaaaattacatgaaattcaaatttcaggccaggtgtggtggctcctgcctataatcccagtgctttgggagc

SEQ ID NO: 138591 - DNA, 203 bp, Homo sapiens
tccctaactgtgtatctctcctctcccaggtactctcaacaatcttttcttcctatacaaataactggcagaacaattcctgcactggctgtttctttccttagtaggctcacctcccttccagctaagagaggacatcaatcctcccactctctgggagtcctccatggaatggaagaagctttgtatatgtatccttgggg

SEQ ID NO: 138592 - DNA, 451 bp, Homo sapiens
ctacctcagcctcccaggtgctgggatgatagtcatgagccactgtgcctggcctcattttccctaagtggaccagccatagctcctcatttagaaacctaaatttgagtcaactcatctctaattataattcaaacccaagaagatcattaccatccagtcttttcttgtcttccctgtgtttagtgaactagtcaccttgacaaccagattcagatcactgacagagtaaacagatttccattttcatcctccttgttcaaattagaagttatttatagctgcattttaagtgaaaatgaaactcaaaacgagtaccaggaaactagtgtatacaacaatagtacacagccctatctcagagataatgttgagagttagacccagtgtttcctttaacggcagatggaccatgtgagaccgcagggtggtctccacacggccctctgtt

SEQ ID NO: 138593 - DNA, 502 bp, Homo sapiens
ttgtttaaaaataaaaatcctagctaaactcttgcctatcccagaaatgaatttaaggaccgtattccttatgaattatgaagggaatttaaaagggaagcatccaggaaggtgtaattagtgtctggtaaactggctcttgtgttttctctgcctttcctctctttcttttaccagctacctgtagaccatttccctgtttattagctgcagtaccagaaggtggaataggaaatgaagtttacatccttcagttttgttatttgttagctgatttcttaaattttaggtgtgaagaactataaaaaagttaggttgtttgtgctgcatccttattattttttgtatcctgttatcacaggcattgatgacttatgtataattgagtaaagctgcaggaaagaaaagcacttaggaaatgcctcttcagattttcaagatcttttcacacctctcttggagaaaagaatttaaaaaaaaaaaagtcgacatggattctaat

SEQ ID NO: 138594 - DNA, 284 bp, Homo sapiens
gatcttcacaggtctctgagcggagggctgggctttccagccctactttctgaaactcttatggtcagcattggagttcactggttcccctaggcgttgatcagaggatgggaaccagcccggccgggcccaccttcactcactggatcagtaaataccctggcggtgcacctggtgttggaagctggtgctgcacaggcgtgtgaggattagatcagagcagaaaactcgggcgatggcagggtggtgaggcacaggtgaactttatgggcagtaagtgaggt

SEQ ID NO: 138595 - DNA, 196 bp, Homo sapiens
caagttgcttaacttctataagcctcaagcttgtcatcaccaaatcaggattaaaaatagtgcccacctcatggtagttgttatgaagaccagtgattatccatgtaacagccatagcacaatcctgggtacatggtaagtccttggtaagtgttgcctgtgccacactattattatattacaggtgctgttgttc

SEQ ID NO: 138596 - DNA, 763 bp, Homo sapiens
cagcctccctagtagctgggaccacaagtgcaagccatggcacctggctaatttaaaaaaaaatttttttgttttttgtctcactatgttgcccaggctggtctccaacttctggactcaagcgatcctcccaccttggcctcccaaggtgctgggtttacagtcatgagccactatgcctgtcctgttgtatcattatgaaatgtcagtctttatttctggtaatactctatcttggagtctataactgaaaataatatagcctctccccattttttcccccttaaacattacgccataagaagcttttcaaaaggagctaagttgcctggctggagtgcagtggctattcacaggtgtgattataacccactacagccttgaactcctgggctcaagagagcttcctgcctcagccaccccagtagctaggactatagacacaagctagcctttttatacttactgttttcatcaaatgtctttttccaactagtttccaacctgtctttgtatttgaagtgcatctattgtagatagttcagtgttgcttttaaagtgcttactccatttgtgtttagtatgttgacatggttggatttagatctactattttgctttctgtttttattcctgtttatccttttttacttcttacagcttaatgaattttggggggggaattccattttaatttctctcttgggtttttagctacatctttctttaggattgcactagagattacaatatacattcttaa

SEQ ID NO: 138597 - DNA, 443 bp, Homo sapiens
cggggtttcactgtgttgcccaggctggtctcaaactcataggctcaagtgatatgcccgcctcggcaacccaaagtgctgggattacagacatgagccaccatgcccagcctggcatttttttatgtgcccgacatctgtatatcttctttggagaaatgtctatttaagtcctttcctcatttcttgaattgggctttttgttgttgagttgtatactctatatacttaattttcatctattccttgggttgcctttttacctgttgatagtgtttgacacagaaaagtttttaactttggtgaagtgcagtttgtctactttttctttggttgcttgtgcttttggtgacatatccaagaagtcactgttaagtcgaaatcatacagattttcccctatgttttctgctaagagttttatagttttagctcttatatttt

SEQ ID NO: 138598 - DNA, 522 bp, Homo sapiens
gcctacacctagataaatgtctatcacattgtaagtgctcggtaaatatttgctgaatgaataaatacttgtgttttaatcaatccacacaatctctccgattgaaaatagtgcccttatatgtaaggagggagatctattactttaagacatgtgctggaaagatttactgtattagttcattttcacacaactataaagacatacctgagactgggaatttataaagaaaataagtttaattgactcatttccacatgggtggggaggcctcaggcaacttacaatcatgacaggagaggcatgtcttacatggaggtaggtgagagacagcgtttgtgagcgcaggaaaaactatgatttataaaacaatcagctctcgtgagaattcactcactaccatgggaactgcatgggggaaaccactcccacgatccaatcacttccctcccgggacatgtggggattacagttcaatatgagatttggatcaggacaaaaagcctaaccatatcacatact

SEQ ID NO: 138599 - DNA, 172 bp, Homo sapiens
ctgttttgatggggttgggagtgaggttgaggataggggatagattttacagtttctaggatgtagaatattcagaacttgacaagaggttagtaagggtgtcagaggagcctagctaggcacagacttgcaggtgtctgcactggacaactggaggtataatgaaggcctt

SEQ ID NO: 138600 - DNA, 494 bp, Homo sapiens
agttcgacggagactctccaaaatccattcaagtaccaaaaagttcttccttgtatctgacataaatccagtatgcttctcactgaggatctcttcaattcttccatctataaattgaaactcttttaaaaagagactaaaatacaagctttcatctggctgtattggaatccattgagaaaacagatcccaaatttagagtggtaaataaataagatgatattggcagactaaactcagggttttaaaatagaggggcactaagcagccagcttgacaagtacattgaaggtcatacatgtccattttgccttctctaatatgttaaaattttctggtatcgccatggcaatttacagagtcaacttcctgctttctgggcacccaatctaacctggaccacatatctgcctttgtatatgtaaatgtacaataataggaaagctacacagatctctcaaacaaaggaaggctttgtttgagagtctccgtcg

SEQ ID NO: 138601 - DNA, 299 bp, Homo sapiens
gagtttcctacctcgagtttcaggattacatagccatgcaccaagcaaggctttgaaaaataaagatacacagataaattatttggatagatgatcagacaagcctcagtaaaaacagccaagacaatcaggatataatgtgaccataggaagctggggagacagtaggcaatgtgcatccatgggacagcatagaaaggaggggcaaagtggagagagagcaacagacactgggatggtgaccccaaaacaatgagggcctagaatgacatagttgtgcttcattacggcccattccc

SEQ ID NO: 138602 - DNA, 358 bp, Homo sapiens
aggcttgggagccagatggcctgaattcaaagatctgcatcatggttttctactcttcattacagacaaattccataatatatgtaaacttcagtttcctcctctgttaagtgggaataattacagaacctaccttagagtataattataacacttattcaagtaaaacatgacaagcataagtgctcagtaactgttagatattatttcctattaagcaaagttttgttggtggtggtggtggtggtaatagactcaaatctatcaatcttttcctatttcttgattttagcttccctacctgaagtaatcctaataaaagtaatttttccctcaaatagatagctaattcttgcca

SEQ ID NO: 138603 - DNA, 207 bp, Homo sapiens
  misc_feature (189)..(189): n is a, c, g, or t
cttcccaccactggcccggcggctagctgccttcatgggtaggggagatgcaggcagctcggtgtgtgctcaccagagaacccagagtgtgcttacctgggtacctcctcagcctcagaaaccatggagagacatccctgcattctgacaatgttgaacttgacctgagccctgtggacaacgaagtanaggaaacccccacccacc

SEQ ID NO: 138604 - DNA, 429 bp, Homo sapiens
cagaaccacactgcaacaccaccttcaaattaatatgattgttcttagtcttgactccttcctggggctttttgtcagccatgatgagcaccggtttctcctcagctgccgcttcacaaaagagatatcaggtccacactgaacgagcacatgagcagcaccaggagccacagaagaaggaggcagcagcagcagatgaaggagagggaattttacttcattgagtgctagattttgttgtattcttttcaaaagcgctagactttgttctggcatgcagttaagttacttggaatcagtggtatcgttttgaagctagcatgtaaactttgttaggctggctccagagcacccattaggaatgatgtagcccgagtacttatctgccgtaaggcagtattcttctgaggactttacctgatgttgtgt

SEQ ID NO: 138605 - DNA, 561 bp, Homo sapiens
ctctcattagctttacgaaggcggttgagttttggagaagggatattatcatttaaactataaactaaatgtctcccaaagtttgcttggcccaagcccagatatgattaaaggcagtttggatgttgaaggcaagatggggattggtgagacccaatctttcactgtcgtaatttccttactgttataattttttgcaaagacagttttaggagagacaccaggccgtggagtcacagaaatccagtgggaagagtggatcaagaaaagactaatcagccaggcatggtggctcatatctgttatcccagcacattgagaggccgaggcagggagatcacttgaggccaggagtttgagcctggcctagctaacatggtgaaaccttgtctctgctgagaatacaaaaaattagctggaggtggtggcacacacctctagtcccagctacttgggaggctgaggaaggagaatcgcttaagcctgggaggtggaggttgcagtgaggtgagaccgcaccactgcactccaagcctgggtgacagagcaagactccatctc

SEQ ID NO: 138606 - DNA, 255 bp, Homo sapiens
gcctgactaatttttatgcttttagtagagacaaggtttccaccttgttggccaggctggtctaaaactcctgacctcaagtgatccgcctgcctcggcctcccaaagtgctaggattacaggcatgagccaccatgcccagccaaatttttgtgtattttaatacagtgttttacattggaaaaaaacagaaattgaagatctgccaactgccatgcctagcataataaaaatgggcttccttccccccacacc

SEQ ID NO: 138607 - DNA, 380 bp, Homo sapiens
ctgcagaaagtggccttcttctactagctagaggggttgcttgcagaactgtgctgtccctcttacccccagctcctcctctctcgcctactgactatcaccaaaccaacaactagggttaagtcacaagaacacctagttcggggtgctggatctgcgaagggaggaagggactgtacacacaaacacacacacacacacgttcccaaactgcaccaaggcaccccaaagcaccaccacagacacaaaagaataccatgggatatttcagaattttaaaggaaacacagcaatatctgtcacaaattactagcttgaggtagttcacggttttgacattagctcatgccacatttcttttgatgatgtcatatttttgc

SEQ ID NO: 138608 - DNA, 251 bp, Homo sapiens
tgggctctggtccaactcctggccgacatgagcatggacaatgtggcacagttgtggctctgcatcttgtgtgtgactgctgccctgtttttgtttagcaagctgctgtgccaatttactatgcatgttgttacatattctgctctaatttgactgccattttgcttcagcgagacgatgattgtttatggcagggctgtaatgtgttgtcagcacaggttactcgctacttgttggcaatggcctaacat

SEQ ID NO: 138609 - DNA, 169 bp, Homo sapiens
ggcattcatttttccattcacagaacactgattctgggttggttggtttgtttgaaatgggtcttgctctgttatccaggctgactatagcctcaaccttctgggctcaagcaagcctcccaccttagcctcccatctcaccctcccaagtacctaggactacagatgc

SEQ ID NO: 138610 - DNA, 299 bp, Homo sapiens
cctagctagtcagaagtctggggcaagagaatcacttgaacctgggaggcggagattgcagtgaactgagatcgcgacactgcactccagcctgggcgacagagtgagattctgtcttaaataataataataaacgaaagccacatagtatgtgattccacttctatgaaatgtccaggacagacccatttacagacaggaggggatgcgtgggggccagtggatgaagggtggcagctgctggggatggacatgactgccctgagactaggcagtggtgggagctgcgatacctactg

SEQ ID NO: 138611 - DNA, 439 bp, Homo sapiens
cgccaccatgcccacctcattttttggtattttagtagagatgggtttttaccatgttgcccagggtggtttcgaactcctgagctcagggaatctgccagcctcggactcccaaagtgctgggattacaggcgtgagccacctcgcccggccaaagcttcaattattaattgtaaaatttttctttgtaaataatactctatagataagatttgttaataataagaaatctgaaaaattcagtgtctaaatattaacttttgaaaattttacccttaaaaatggataaaaatctctgaaaatttttctataattcatcaattttaagaagtacatgttttttcacatcttaataatcctcaaatcagggttagtcttacaacttacagtacatcacagttgaattagcagcatttttcttggggacacataaaataag

SEQ ID NO: 138612 - DNA, 283 bp, Homo sapiens
gaagacaagttgatcctcaagtcagccagaatgttcagcgaatactgaaattcttcctaagcaagttatactttagattagaatatatttgactctttatatctggcaactgatttttgtttgtgtagggatattttggtttggttatcttgtaggtctctttgaactttccaattgaacagtgatcttaattgcctttcttttatttatttatttttttgagacagggtcttgctctgttgcctgggctggagtacaatggctcgatcttggcttactgcag

SEQ ID NO: 138613 - DNA, 183 bp, Homo sapiens
gaacccacattatgtcctggttttgcataataagtaatgctgtttattctgtttccctcagaatatactataggccttttctcccctcccagagcctttatccaggaccctttgacgctgtctttgctgcatacagtgtcaatccaaggcccaggtccccatatgagcccagggggggtgtgg

SEQ ID NO: 138614 - DNA, 304 bp, Homo sapiens
ttccagataaacttgtgagggtcagaagctgacagaccaagctcatttttcaagccaatctgtgtcatacagagaccacgggttttccttgggttgggtccttctacctggttcagtcagctgtgaacaaaacttgtggaatttggtcgttttccttaaaatggagatacgagagatcaccatggctggcgtgaaactagttctggatctgattgtcttttcaattgtttgtccatcaggtgaacccactctgaagggacttttggtaacattttccccaaaataaagatcattaattaattat

SEQ ID NO: 138615 - DNA, 355 bp, Homo sapiens
caaggtgataatttaccccgcaattctcagacttcacttgtaccagaaatgtttgggggaaatgtgctaagatgcgggtgctcaggcccttcccccagcgattctgattcttggaatttcaactgggactcaggatctgcattttgaagcaagttcttctggagattcggttgtgctgttctacagacaacatttttagaaagactgacttaggggaggtgtttttgatctctgtgtcttctgtcatttaagaagatttttcagtcacttgggctgattgataaatacagctgatcactcaggacacaatataaagttcctactcagagagaagctgacttgagctatctctacc

SEQ ID NO: 138616 - DNA, 262 bp, Homo sapiens
cccagagagctattcaatgggggaaaggaaaaacataaactcccaaatgagtaactccgagtgtcctttaattttcctctaacagaaaaccattttctaagagaaggtatgtgcacaaagaggtaactttttagaaatttaccagtgattttatcatggtaaattgagccacaatcccaatgagaatacttgctattattgttagaaatgcatagagcctgtatttattttcagaggagtttggtatcatttttatgagttg

SEQ ID NO: 138617 - DNA, 374 bp, Homo sapiens
tgccactggaacaggctgagctgtaattgaattaaatatctgtgtaatccctaggagaagctgaataaggtttgaggatcttggaagttcagttatactctcagtaactgaggtgagatccgtaggcaaggaatgacaagatcgagattgattagctacatgaccttaggaaagtgacctaaaggttgttcacattcagagtcctcatctttgaatgtgaatgatatttctggcctctcctatcttatggagttggtgtaagcatctgcatgagatgatggacgttaaagtgctttgttagctgttgagactcttactgaaatgaaacccaaggatgggtgccactgaaagaaacaagaatgaatgcaaactag

SEQ ID NO: 138618 - DNA, 203 bp, Homo sapiens
tggcaggcaccatgcaggcattgattcctttggaaagtggatcaggcatgactcagacttctggtgttagcacagaaacaggagatgtagtcaaagatatgggtgtcaataaccagagcaaggaaggaaggtgtccatggaaggatcatgaggcagctccctggatttctgaaaagcctaaaaagagaggcaatgaaggcaaa

SEQ ID NO: 138619 - DNA, 222 bp, Homo sapiens
gaaggtcgctcgttggaggctcccccctcggcaggttgtactacatttctggagtctgaaccaattagcctaaaggcagtacatgctccctccatgcacctttcttttctttttttttttttttgataaggagcagtcttccctctttgatttatagttctcataaggaaagtaatatatttcatgattagttttagtcccaagtcatttgcatattgaata

SEQ ID NO: 138620 - DNA, 689 bp, Homo sapiens
gtttccttgaactattggtctgagaatgtgaagggttttttttttcctttaagtaattggcctagaaaataaaaattttatgtcttatcaagggaatttcttgttcttgatgttgtcttttatcacgtctttggttacttaagaaaactaaatcttctcaatatcaaaaaacctaagtttttcttcacaactatgtaatctgctatatttgcctttaaaatattttattgtcaccaacatggtgaaaccctgtttctactaaaaatacaaaaattagtctggcgtgatggtgcgtgcctgcaatcccagctacttgggaggctgaggcagcagaattgaacccaggaggcggaggttacagtgagctgagattgcaccactgtactctagcctgggcaacaagaatgaaactctgtctcaaaaaaaaaaagttatcaacactttgattagataaccgagattatgtttaattaagtgctttaacccttttgacattttttataaacttcccaaaatcatattctaaattaagtctttttaacttcaagttaattttggtattttccagttgagccccaggatatctcaaaaggtatgtctctcacctagtaaaagaaagatattaaaataattacacttatttcatatgttaaattatataggaagcattgtgaaatgagaaataatgt

SEQ ID NO: 138621 - DNA, 428 bp, Homo sapiens
tcacagcatgatcaaataaggcttgtgactcaatgagacataaaatggcaataaaaggcatacaaattggaaaagaagaaataaaacttcatccttattcacaggatatgattgtttatgtagagaatcccagagaatctatttttcaaatctcctagaatgaatgagttgagcaagcccatacgacacaaggtcaatgcaaaagttaaccatatttccacatgcgagacgaacaaccaggaactggctatttttaaaaagtaacatgtacagtagctcccccaccacatgttatacacagtcagcccttgtgtctctgggttccacagcgtcagactaattcaactgcagatcaaaaatatcttgggggaaaaagactttaaaaatacagtatagcaactatgcacacagcatttacatgtattagg

SEQ ID NO: 138622 - DNA, 164 bp, Homo sapiens
agcttcctgaggacaggctctaggtcttacatctttgcattcccaggactttacatagtacctgtcacacagaattaaacaaaagaagttattaatagttcaatgaaaggtgacactcacgccaaatacttggttttgaggaggatcacatgagataatgcatg

SEQ ID NO: 138623 - DNA, 237 bp, Homo sapiens
ttcaattactatattctcattcccctataaacatcagctccttagaacttctgctccacatcaaccatcctgtctcactgacttcgagcacaaactgagctctgctgtactcactcccaaaactagtatatgcacattctgaccacttgagaaaaatgtgacaattaagcaacacaactcctcatttcccttattctcaggaaatctctggcaatggttattctacactcctctcac

SEQ ID NO: 138624 - DNA, 372 bp, Homo sapiens
ttattgcactatggaactcaaacagatttagttactcacttggcagcctggcaggaagtctctggatgggctgctgtattttgaccctgtttacactacactcagtttaacacctccttcccacttctcactctcagctggcagtcttgctgtttattgcaccaagaaaatagaagcacctgaaaaaaattcttggtcctcctattgccaaatatactaatcttcctacatctatactcgtattctctgacattcttcttattcaattagatgaactgccactgttccttccacttgtatgttggtcttcttcgttttgcctactcattgttcctagaattctctcttctcattctagtttttcatctattt

SEQ ID NO: 138625 - DNA, 183 bp, Homo sapiens
cctgaaggaaaaaaacagatggaccattctgcaggtgccccactcagtgaggttggaaaagaaggaatttcgatgcacgttttatgtgtgggcaacagaatgagaccacactgagtcttgaaggctttttcaacagtgatgtggccaaagaattagagcacacccagtggtacacatggagtc

SEQ ID NO: 138626 - DNA, 215 bp, Homo sapiens
cagctgagttccttgatgttagggactacatcttattcctttctgtatcttcagagatgctcaataaatgttttttgaatgtcttagttcactctttgcatccaagcttgaggctcttccttgagggaatacttcaggacaaacattgaaaaggattttatatctgagatgaaattgtattcacacgtccagagaatggggtaaaattcacaaac

SEQ ID NO: 138627 - DNA, 218 bp, Homo sapiens
cagggggaaaaaaaaccccaaacaattgaatgcagttacaggatgggtgggggagtggattattaatgcgctgcaaacatcctaaaaaccccctttccccatcagtcttcacagactgcaacaccccatccaaaatgtcttccccattctctgcttcgtcccagaaaatgatgtgaacttggctgcttggccctgtcttcacccggtcatatcctcag

SEQ ID NO: 138628 - DNA, 277 bp, Homo sapiens
ataaagtttgaattacatactatgtagcctttttatattggcttctttcacttagtaatatgcatgcaacttttctctgtgtctttttacggcttgatagctcattccttttttagcatcgaactatcctgcttttaaataaaaattatccggacactttgtttcccataacacagccacatgaggtcctatggctatatcatacttttctgatgattatcaggtgaaagggtgttgtaattaaagcattatacaacagaggggaaacaatttatcc

SEQ ID NO: 138629 - DNA, 336 bp, Homo sapiens
ctgcctcagcatcccaagtagctgggattacaggcatgcgccactacgcccaactaattttgtatttttagtagagacgggggtttctccatgttggccaggctgttttcgaactcccgacctcaggtgatccgcccaccttggcctcccaaagtgctgggattacaggcgcgagccactgtgcctggcccttgttgctttttttgtagaagctgctgccctttggaagttagaagggcttcaggagtacttcagttctggggtgcccatcaagatagaaggaacgtctagcatccccaaggccgggaggacctgagaaaatgggatgtgagtaca

SEQ ID NO: 138630 - DNA, 507 bp, Homo sapiens
taagggtatggtagatgttggtcttccaggcagccaaggacttgaagggaaacgcttctgggtcacacagcaactgcaccctgaaagtcagaagagtggccactccttccgcgctcttgggtctctgtggattctcttggactcacccttcttgcatgaatctatctgaccttccgatctcactcccagcagctgactggtctagtgcccaattccaattctaaggagagaggctctgatgggctccttggtcaggtgtctgctctggtccaatcggctctcacctcacccagacgcagcctcccactctcactcccacagttggctgggctgagggcaggttctcttagaaagggttggactcgaatcggaggtcagagactgggccagaggatgcattactgaagaatactgcagccatattttgcttggctggcatagtgtcttaaaagacctagaattggaatgctttgaggtggggcacgctctctccagccgaccccaggc

SEQ ID NO: 138631 - DNA, 198 bp, Homo sapiens
tgaaaactgtaaacccatagatccaagagtgtcaatgaaccccaggcacaccataagcacaaaagcagagaacagccacctccaggaatgccataatggacacttaggacagtacccactgccccactctaggcagctgtggaattgaggactagcatgcttaacccattgtagctacccacaacaccaacatggacc

SEQ ID NO: 138632 - DNA, 119 bp, Homo sapiens
aatacagcctgggcagacagaaaccgggacaacaaacaaaactcagtcatgccactgggactggatcttcacctgacagcaggcacggtgctttaccgcttcctgcctcattctcctca

SEQ ID NO: 138633 - DNA, 170 bp, Homo sapiens
tggtcaggctgatctcaaactcctgacctcaggtgatccacccacctcagactcccaaagtgctgggattacaggcgtaagccaccacccccggccttgtcctggctttttaaatccattgtaatttgtttttgcttattctagaaataaagaattaaaaaaaaattttt

SEQ ID NO: 138634 - DNA, 819 bp, Homo sapiens
atgcaccaccacacctggctaatcttttgtattcttaatagagacggggtttcgccatgttggccaggctggtctcgaactcctgacctcaggtgatccacccgcctttgcctcccaaactgttgggattacaggcgtgagccaccgcgcccggctagtatttctttactatattctatttggctgtctcaccaacagagacatcacaccattttgtcagttacagaagaatgagacatctggccgccagaggtcagcctaactatatttcggttagttttttttttggtttggtttggttttaatggttaaagccatgggggtatgggttcagtattttttgatattataatctgaaaatattttttcaaaggtgctagattaaatttaaacaacatagtatactgccttaaagcttacatttttcctgacttttgtactgtgaaacagaacaaaaacaattatgggaaagtaagagcctttttaaaaattttctgagtaacataataactgaagtatagccaattagtaatctcacaggtgcaatctggttgaagtgaaaatagtaaaaatattagaggacagcacaattaaaagccaacagcttctcctgtctcagttaataaagacttacggtccacgacaaagaatgaatactctttttcagattgaacaaggtaatagtactataatctaaacttagaagtattacattgtttcttcttaaagttataagcagtttcctttatattgctgtagtagcatcatatatgttgatcctgccttaaaaaaattatctcatttgtctttgtctaacat

SEQ ID NO: 138635 - DNA, 421 bp, Homo sapiens
ttttctccttccaagcctctgcagtctcatgagtttgtctgtatttttcttcttataacctaccttgctaccttagccagcctggatctcataggagattaactgaaatactcccaacattgggcctttcctgtgcccctgtcttcctgctgtaccctggcaaaatgccagcccaatccagtctgttgttctacttctgtatgagagggctaaagaaaaagcaactagtcatacagattaactctgttttaaattaactattaaatattttcaacctcatctgagtactctgccttgcctgatgccttttgcttgcctagccctgtttagttctcattctcttcaagaactttaccaaatcttctccttccccctcttgaccttcctgtctcttcacctgatacagaggttcttagcttcc

SEQ ID NO: 138636 - DNA, 119 bp, Homo sapiens
aggagagctttctggaggaggaggcaccaaggctgagacctgaaggatgggttcaacagctcttcttgaaatggggacctggggcaggaagatggtaaggacagttggggacatagtag

SEQ ID NO: 138637 - DNA, 251 bp, Homo sapiens
ctaactaaatatataagacgtagaccatgctttcaaggagctttcaactgacttcactggggaagtaagacatgagcatagaagcaggactggaaaggtaccctgtgagcagcacggacagtgaggacagtgagtggtgtggaggacataagagtcctcatcagagtggttttcagtacatttctgtggagctccacccatgtgtcagacactgctatgagtgtgggttccttgcggtctctacaaacccc

SEQ ID NO: 138638 - DNA, 161 bp, Homo sapiens
tttccattcttattcttagagtttccttgggtcatagaccacttactctctgaatctgctgattcatatgtggggtcctttgtaccccatgctgctagggttaaagcatctggtctactactcctgtagctggatagtgttttgctcagtctcctcctgaa

SEQ ID NO: 138639 - DNA, 410 bp, Homo sapiens
tcccctcctcagcctggtgtgatgactaaggcctccagctccaggtcactcagcctatgccagaatcacagctcagccagacctgagcaagccaggcctggcttgctcaggtctctcaataccttaactatggcatgttttataatttgcttttgtttttgctttatcacagtattttcctatgttttttatagtcttaatttttaagcactgctttaggtatctattaatagttcagaaagttgcgaagattacaagctcatatttgtgaaagtgtctggcacataataggtgatcaataaatatttccttctagcttgtctgtcccctatctcccactggttgtatgtatgaaacaaaaaaatgaaggagaaggctgagcatagtggctcatacctgtaatcctagca

SEQ ID NO: 138640 - DNA, 389 bp, Homo sapiens
cagcaaaggggctgagatggcaggttagccaaggacaccacacgcgtgagctcctggcagactctgggtgcgctacagcaaaaggcagaagaacttcaaaacgtccagcagacgacagagaatttccaatgactttggaattgggaagagtttcttaaatgtaatagaaaaaaatattagatataagctatgactgctaaactcaactatattgcaattgagaatttctgctcatcaaagacacctcagaaagagataaaagaaaagccaaggtgggaaaaaaaggtacactactgctgacagccagtcagtaaccagtaaccagaatatagcagaaactcccatggaacgggctgggcgcggtggctcatgcctgtaattccagcact

SEQ ID NO: 138641 - DNA, 485 bp, Homo sapiens
aattattgttcacattttcttgcatactctggataagacttgcatttttggtcatcaacaatgaagcacagcaacaacttttgagaaagtcattgaaagccagtattcatggtgcagcatcatctataacaatataaccagacttcaataaattgtattgcaaaagtagtacagatgtatattgttcattgtaaacaagttcccaagaacttggcattgtgagtaatgacagtattgctacttttcttcatgactggagatatggaattagccaagaacacagagatagtgcctggacattatgaagaaagaattttcacatgcactgattaagtaatgaatatgtaagtacctcatctgtatccattattctgaatgactttcaataaaacactataccccacatgggtccatgaattttgtaatactttcttagtcaaattatttatttagaaaaaggtcccacaaaaaaatatttatctgag

SEQ ID NO: 138642 - DNA, 320 bp, Homo sapiens
ggtgggagatgacgaagaaatcccttcttcctcagaggatttcaggaagttgcccagaattataaaggatctgaggttttaccctatttgcatgctaacaggttagctggcattatggactgaatgccccaaaattcgtatgtgaaattcccaacccccagtgtgatagtttttggatgtggggcctttgggaggtgcttaggtttagatgaggtcatgagggtcgggcccccatgatgagatcagggtcttcacaagaagagagaccaaagagctccctttctgtctctctctctctctctgtccctttctctctctct

SEQ ID NO: 138643 - DNA, 934 bp, Homo sapiens
ggagaatgcgagctctcacctctgacagcctgtatccatagggaatgtcatggaactgtcccacggtactgccggagtctctggtgccctttgtttcaaagcaccaacctactcttttgattcattcaggtcttttaaaaatgagttatacatatttaaaattcgaatctcaccaccacccacacataattaattatatcagttctttgtaaatacagatcctgctttttcttctcatttcttaattatgagcctttgttcatcacttcttcccaaaaataccctttcttaatgtttttccacccccaaagcatgagttacaacccattaattggatatgaaatcagtctggtagctaatgaccaacagtttttgaaaaatggaataaagccatcctggctaattttttgtatttttagtagggacggggtttcaccatgttagccaggatagtcttgatctcctgacctcatgatctgcccacctcagcctcccaaagtgctgggattacaggtgtgagccaccgcgcccagccgtttggaggtttatttctgactttatccatgctgcggccaagaagttgtctgcctccaagatctatctgtaattagctcttaaatgtcacagtagtatttatatagcacagttctcaaactgtaaaagacctcatttctaccctgggttgaggacattagtctgagtgaccttggggagggagttcagaaacatttcctcaccatacacttgtttggcttcgtaattaagtacatggtagtttaccctcagtacttgctcccgtgggataacagagccagcagtgtggatttttgggaactttgctgccccgggctgctgcacttccttttcaggaatgtctgctcttctttttttaagagatatggaaaagagttgcagccagtggttttgtgaagga

SEQ ID NO: 138644 - DNA, 492 bp, Homo sapiens
gtactcgtaacactgtagtgttagtgtactcataacactgtagtgttagctaacagacatagcctttacccttcctttgatccagaatgagaatctgcaactgccacaaggtttttacatcattgcctccaccctatgtgaacagacaatatccacaggaaattgtcaatttctttgcacagactaagcacctgcttgtattattaccctgctgtatacaaatgagccattttaggaaatgagtagaacaaatatgctctagaaactgcagtacaagcagtacccaatttgcagacaggttgtgttccctgagttgatttccaaattagctacttggaaatcagaatgcattatcccaagaagcagtgttataaatgatggccagcttcacaactgtcatccataaggccctggtaaactagcaacataattaaaatgacactgtctttaagaatgggctgttctttatggggtaaatgccctttacagggc

SEQ ID NO: 138645 - DNA, 188 bp, Homo sapiens
tctagatccaatacctccctacttctctatgtagatggcccttgaggcccacccatagaggttaagtgaggtttgcaaaatcagtgacaaggtggctagaagcacgaaagggaaaggccatatctaacactcacaatcactcttttccattacatcataatactctcgtttttttttttttttttttt

SEQ ID NO: 138646 - DNA, 416 bp, Homo sapiens
tcttgatacttcccacaaaacagaactaggaatcagcggttatgtcaactttccagggaatccctacaagtggaaggctagaatgataggacaaagaactgcctgtgcctctccaggcaaaaacctgcaaacatctagcaaaaaccttaagcactcttgaaattcatttattcagataacctaaaaattgaaatatgaatttatgctttattctttctttaccaatatagacatggtctcattgatttgtggacaatgatgagcttgaattcaatgcgaagaatctttgaacactttcacatactttggccctagttctaccacagctggaggagctctgtttcacttgatcgttgtgctggatgccattcggccacatggcttattccagccgctcttgtggtgatctgctctgc

SEQ ID NO: 138647 - DNA, 222 bp, Homo sapiens
aagttgctcattttggagtaggaactactttaaaatactgactttacaatattatttaagatactgaacacttattcaggtggataaatgctgggagaagttctatgtattaatttattcctgttgcacaaaggatgcattatctaagaaaatgcttgggcttatatataagcagtacaagtaaagggataagggggttgggtgcggtggctcaatcttgta

SEQ ID NO: 138648 - DNA, 289 bp, Homo sapiens
ttcataaaatctatgatgtttggtaaagtaattgatcagctgtcttaatatatatatatgtgtgttgtgtgtatttttagggctggaaattgatttttaatgataaagtacagtggacagcacagagggggctaagccaaactgtctgggatgctgtggtggcaatgagctggccacacaaactgctgctgctgctgcttctaggtggctgccttgctggtgaggtccttgccttctctgtagctgccagtgccatctcctttgcctgctccttggcttccttggctgt

SEQ ID NO: 138649 - DNA, 400 bp, Homo sapiens
agccctactctgaacatttgtgtatatatatgtttttgtgtggaaaaatgctctatttttatctcaaagatttgtgcatgcttcattacatgccaaaagccttattaaggccaaaatgacatcttagcatgaaataaagtacactttcttaaaccatattaatttgacttaatgagattctgaattgttaagtatagaaatcaatttgatttttgtgcaaacaatgtaaaataacatttggttgacctgggctccaaattacttggtccaggcagaatatgtaaatgagcattctgaatataaaatctggaccgtagcatttacaatttaataaaactaataaaatggtatacactgtactagagccagtgtctttggcaagttataatattctgtaaca

SEQ ID NO: 138650 - DNA, 529 bp, Homo sapiens
acccgatcctccgaggtcccctgcccccttctatcctgccagggaaacccacatctgcccttgctcccgggcctgtgggtttggacaaaggcagctcctctaccacccagcctcgtggccagcgccatatgcctcatccctcctgccccggcgttctgtcttcacaccagttgctccagccatggccagccacggccctgtccctggatgggcctgttaggcctgctccccactgctccccttgggcttcatgccaaagccatcaggccagtatcagtcctcacaccctgttcagctgggggcacctttgcacacagcgctgggttctcttccttggggaagctgggccccaactaaccctacctagacgtggtctaggtgcctggcttggggcccctggtccccttcattgtggcacagagaggaacccatcctcaggccaccctcgcaaaggtgggagccctaagtcctctcccgggagtgtacacctggactcggggagcttccagcctaggaggactcggagggc

SEQ ID NO: 138651 - DNA, 202 bp, Homo sapiens
tgtgcacatgtaccctagaacttaaagtataaaaaaataaaaataaaaaacacgttttggataatcaaagttaaaatgtccagcaggcggttgtgtgtagtccaaatcttattgggagaggcctggactctgctatagactcggggataattgaaaccacgaaagtagatgggccaaccttgggtgagattgtaaagggaga

SEQ ID NO: 138652 - DNA, 616 bp, Homo sapiens
gttcgcgaacgtgttatccaggctagggagcagatgacaaggagaagcttctctaaagcaatagcatggctcttaagcgtggctcaaaactgacacactcacttctgcccacatataattggccaaaacaagtcacatggccaagtccaaagtcaaagcataagaaagtacccttcacccataatgagtccatggtaagaagatagatgcagggaagactgaaaacactgaggcataaaattaaactaccataatgtctactacagcaaacgtcacacattcaatagagattcattggatgaatgaataaatagaacccaaaacattcagagtaaatctcaaagtttgtggaaataaaatatgccttaaaaaaaacccctcagtaatcatattcctctttagtaagctttgagttatcaatttaaccttgtttggacttaagtacatgcatttcttgttatggtaacaaattaccacaaattcagtagcttaaaacaatataaatttattatcttatggttgtggaagtcagaaatctgtgtctcactggactagaatcaaaatgctagcaggactatataccttttggaggctctgggacagaatcctttttctt

SEQ ID NO: 138653 - DNA, 372 bp, Homo sapiens
gaaaggaatgaaagacctagaatgtaggtgacctagagcggaggctgagtgaaacctccaaaaagtaggccaaagtcagggtggaagaaccctgaaggataaaggtactccctaaaagtgagacttgtggaagctgtggttggaaccctcaaaccttccatgtgtggccctggctcaggaatatgatatgactgcaggggtccacactggatctgggggtgcagtgggactggaggggtcattgttctatcagtgttccttgcttctctggcttcctcccctctttctctgactcctttggtggcttctccctgccactccctgcctgtcccctgctcccttctctttgccatgttctcccctgtggtgctg

SEQ ID NO: 138654 - DNA, 318 bp, Homo sapiens
taggctaatagcaagttaacatccatcgatagcactaacatcagtttttatttagttcaaacaagtgacataaacctcagggctcttgtttaagttcctgacagaagaatgtcatattccttatacatgattgttctaattgttgactgtccctatctcagatcttagcatctgcttaggtaaacttatatcaacaatatggaacaatcgttacactgaatcggctgttgtccaacttatctcattcagtcttacgtacccgtgagataactgacactgtttttccagtggaaaggccgaggctaaggcgttaaatta

SEQ ID NO: 138655 - DNA, 113 bp, Homo sapiens
agcaatcaaaaagaaaaaattcagatttcaccactcagagatgacactgctaacaggctgaagcatgtgttcccctctttctcatttgagtcatcccaggatgaggttatata

SEQ ID NO: 138656 - DNA, 188 bp, Homo sapiens
tatagtcctgtacccatgaaactccttaaatgtggcaccttgccgagaacccaagcaactgggttctccataaatgctttgtggccactgactctgatatacgagtaaagcaccaggcaattccgtttatttagccagcattaacctagcatctttatgttctaggaattctggggacacttttttct

SEQ ID NO: 138657 - DNA, 396 bp, Homo sapiens
aggaggaggaaaagcagcataatgtgatagaccagaggccaactgaataaagtacttccagtaggggactaattatctcaaatgttgcctactagtcaagtaatacgtgattggaaatcggctactgggtttaccaatgtagaggttattggttctcttcataggaaatagaatagggcacaaaaacctaactggactaggttcaagagagaataacaactactatggagttaatacaggcaaatctctcatggaattttgctattaagggaagcagaaaactggagcagtaactaggaaaattgcagataaagagatgcctgtttttaaagtagatgaaataacttcatgtttgtatgctggaaataatccagtagagaaggcgaccctggtcat

SEQ ID NO: 138658 - DNA, 310 bp, Homo sapiens
ccagattcatataagcggtagcatctgcaggatgatttggtggtggcttgtgtggtttggtcgggaagttccatgtctgcagtctaaagacctcttcagatggcctctgcagcagggtactcagacttgtaacatggtgactcaaggctttggaaaatcttgatagttcttaagaaagacttgggctgtagccctgcagagccacataaaattgcttttcgaacatacacatttaattctctctatattttcttttgctgcatttatatttctaagttacgtttttctcatattcgtaattgttgtggtg

SEQ ID NO: 138659 - DNA, 221 bp, Homo sapiens
aaatttttaaaatattttgtagaataggggtcttgctatgttgcccaggctgttctcaaactcctggcctcaagcagttctcctgccttggcctcccaaagtgctgggattacaggtgtgagccaccacacctggtccacaccggctcttaaagtattcacctggaagtcactgccgtttaaaaggcattggctaaaggaagtcacgtggccacactgggg

SEQ ID NO: 138660 - DNA, 253 bp, Homo sapiens
cttgaccttgaaccttccctgaggcctccagaggcaatttcctcctcaggactcagctgcccttcactcttccctcgtgcacagcctgtcctgtgagtaggtgcaggtactgactggtcttatctttcgccctgaaaatataaacgttttaaaggcacctgaggatttgtcagcacctccccacccccaccctgggtctgacctaggactctgagtcagggaggcctccctccactgagtaatagtagccttg

SEQ ID NO: 138661 - DNA, 397 bp, Homo sapiens
tccacaggaatcgaaaggactagaaactatgcatggagtcgacttggtccgtgttgttatgtgaatcgtagctgatactagtcgactccataccgtaatctgggtcatatgtttagtttcatgttatgcatgttttcccacaataaaaaaaaaaacaaaactcagcagtagagaacaatttaaaaacgggcaagagatgtgaagatacatttaacccacgacaacatgcaaatggaaacaagcacctggaaagaggttcggaatcacccgccactggggaaatgcaactaagaccacaaggaggtgttgccgcagagagaatggctgaaggttaaaaatagcgactgcagggatgttgacagtgtgcagagaaagtgaggccgggcgctgtggctca

SEQ ID NO: 138662 - DNA, 391 bp, Homo sapiens
ttttccatctggggagtaaaaagttctggaactaaacagcggtgctggttgtataattccgtgaccgtactaagtatcacttcatactttaaaatggctaaaatggtaagtttcatgttatgcatgttttcccacaataaaaaaaaaaacaaaactcagcagtagagaacaatttaaaaacgggcaagagatgtgaagatacatttaacccacgacaacatgcaaatggaaacaagcacctggaaagaggttcggaatcacccgccactggggaaatgcaactaagaccacaaggaggtgttgccgcagagagaatggctgaaggttaaaaatagcgactgcagggatgttgacagtgtgcagagaaagtgaggccgggcgctgtggctca

SEQ ID NO: 138663 - DNA, 574 bp, Homo sapiens
cataagaaccctcagaatgcagtaagaaaacaaccaaccagatttttttaacgggtaaaagatttgaacagatgcttcccaaaagagaaagggatggcaaataaacatatgcaaggatgctaaccatcagcagtcattagagaaatgcaaattaaaaccaccactactcactaattagaatggcaataattaaaaagactgactgcaccaaatgatagcataatgctggtgggaatgtaaaatggtactgccactttggaaaaccactggcagtttaagaagaaactaggtaggtatagaacatatagctaccatatgattcagtcattctactcctaggtgtatgcccagagaaatgaaaagtttatgtccatacaaagacatgtacatacatattcatagaagctttactttaaaagtcaaacactggaatcaacccaaatagattatcaaaaggtgaatggatacacaaaatgtggtatatccatacaatggaatactacttaccaataagaaagagtaactattggtgcatggtacaacacggatgaatctccaaataatgctgggtgaa

SEQ ID NO: 138664 - DNA, 273 bp, Homo sapiens
aatctgcatacacacacgcaaacacacacacacacacacacacatgccccaaggaagggcacaaagggaaaatggccatttgctgcagacacgtctttgtaatgagaattggcggttaggacagcactcatccctgtcttcgaggtaggaacttcagggaagataagatgctcagcccaggcccaaggccacctctcttaggaacaaggttcctttcccttgttactgctgctgtcaacagcaaagacagtgtgggaggacaggggagtgcca

SEQ ID NO: 138665 - DNA, 292 bp, Homo sapiens
gggcaattaaaacttttgttccagtaaaggtttcattctaaagaggtttcattaattatgaaaaattccccgtgggcattacattgtgaatccttttgtagctatcataaataatgaaggaaaaacacttgtcaaaatatagcagaggtgactagataatgcatctctcctttgatttttgatgggtttccttttttaatttttaaaggaataactcttgcttatttttttaaaaaagtaaatactcgttataaaaaattcaagcaaaactgaaaagtaaaaagaagccagc

SEQ ID NO: 138666 - DNA, 321 bp, Homo sapiens
gttttacgcctaccagttgaatttattggtatctttgaaattgatacctagcacaaagcaaacaatttatcttttcctctcttccgaatcttgctcttttgttttctctttttttggtgttaatatcagaaccagtatctactgtgtcatctaaaacaatttaggaggttatctgaatttccttatatatctagatttttatcgatttctgtgagtcatttcatttgctgctactctggtgtttatgcccttactgtgccctatttatagtagtttcttaattgatttttataatcctagtctagctctcattgtcaagag

SEQ ID NO: 138667 - DNA, 120 bp, Homo sapiens
gcgcagccgcggagccgccctcggccgcagccacggaaagataagaatgttctgggcccaggcggtgagctcggcccccaggaatgcagctccagctcccgctccagaggcgcaggggga

SEQ ID NO: 138668 - DNA, 268 bp, Homo sapiens
ataaagtgagatccttagaactgtgcaagaatatgtgtcacccagctgttaactgtagtgacgcggcgtgaccacgcaggcctggagcgcgggccagccttcctgaggaggctccagtctgtactcacgtgagaccgttgaaaagaacgtggtgtttctgtgcccatcttcacactgtgtgtgtaatttgccaaccaaaaaaagaaacggaattaagacagatgttcggcatgaatagagcttatttttagaaggagaactgatgagc

SEQ ID NO: 138669 - DNA, 580 bp, Homo sapiens
taatgacaggggaaattgggaaatttaggtctggaacatattcaggtgaaaaactgagagtcctgttttaggcaggatgattaaaatgtctactaggcatctaaatagaaatattatggaggtagtttaacttatgagtcctgagaaggaggatatagcaggatatacatatttgagacccatcactgtgttgtttaaatgccctgaaacttgaaactgatgttggtaacaagtgaaagaagagatccaggggcagagccttgagccatgcccacattcagaggcaggaggagaggaaccaccacaggacacaaaggactggtcaatcaggtgaaggccagactggggactgtagtgtcctagaaattaagtgaagaaaatgttcctgaaaagaaggtgatttgctgtttaaatgttgctgaggaggcacgagggtgttagaagacagagaataaaccattggaagataggtattgcttgtatcttgagaagaatggttgtagaaacaacttattttgtagtggtgtttttttttatggcctaatttttagtcacttttgtgtccatttggtaattttta

SEQ ID NO: 138670 - DNA, 563 bp, Homo sapiens
cgttcaggaaaaggagaaaccacgtacctgtagcatcccctaggctcctggcttcagtacgaacccacgtagccttagccccacggcggggatacctgagaaagcatgcaccccgccagcatgctgcttggccctgttacccccaacccccgctgcttctgagcctctccagccaggtgtctgcagggcttccaggccttgcatgaccccagcagctcctgggaccatggccctgtgacagtcaggacacacagatagggctcctcgagctctgtggacggtcctaccccagtccacagctacatctcttctctcactcctcctcccatccgtttgcttaaaagcagggcctttatttttttttcttccttaaatgttttaagtaattggagaaatcttctggaagctgacaagctaaataaatacgttgtccactcttctgagaggcttcacattctgttggaaaatggatttaatccctaaaaaaagccttgccccattgggtcttcccagtaaatgttgagaggtacggtaggttgagtgtggtttagccttctggctgt

SEQ ID NO: 138671 - DNA, 262 bp, Homo sapiens
agttcgacggagactctcggcttggggcggtgtcatctcgaacttcttgctcttctccatcattatttatcatcagtattttcatcattttcaccataggtctcttcagcattatgctccagttcccccatgtatctggcttgcatctctcagagggctctgcttctggactagttcaagtatctgttgtacacctcatggaatgaacccagatacttgaactagtccagaagcagagccctctgagagtctccgtcgaact

SEQ ID NO: 138672 - DNA, 225 bp, Homo sapiens
gccggaccggctctttgggaggcacttggcgtggcacctggcgtggctcttcgtgtggctcgtgggggaagcgagagataggagactctggtctctttaaagtaagataatatatttgctatataatctctttactaattagtaaagagtccgtgaagaaaataagaatctactaacgaagtggcaggattcatccaatcaattactaaacacatcccaactccg

SEQ ID NO: 138673 - DNA, 269 bp, Homo sapiens
cagatgaggatggcaggctcagcacaggggcccatgtctctgtcaccaggcaaggtgggggggctctagggccagaatcgctcccacctccagccggggatcagaggtctctggttagcagccgaggcgagcgggacacaggctgagggatggggacagctgctcgcccggcacagacaaggctcccctccccatgctggagaccccggctgccccatcagtcacggcccacccaggaccatgcaatcatcctccacttctcctaatcc

SEQ ID NO: 138674 - DNA, 221 bp, Homo sapiens
cttgtgcatgctcccactaccagtttgatttgcagcctcatggttgtgttgtactaaatgttctttcttctggccttgtccagtgaaaacggttcacatggctaacaccacttcttgagatacgggcaccacgtaaagcaggaaaaatgggcctctcgggtgaggaggaggcacaatagtaactaaaccaatccattctcagctttacgtggtgcccgtat

SEQ ID NO: 138675 - DNA, 434 bp, Homo sapiens
cttatgagaattgccacgaacaaatctaagagatcatggcaaagaaaagaatgaaatgaaaccagaacatttcagcagcttttgcaaagatgtcaagagaaccagtccaggagtcagactggcggcatccttccagcttcttgtcatgaattctaaacctcacatccagactccaaagcttagagagttaaagaatcagctactggtcaccaagctcacgtgtgcaggatgagggtcacagccaggttggctgccttccagccctgagctttcttgggggtgtgtgtgtgtgtgtgtgaaccaccttctttttgagacggagtttcttttttcttttttgagatggagtttcgctcttgttgcccaggctggagtacagagtgaacgagactccgtctgcaatcccggcaccttgggaggccatactggcggat

SEQ ID NO: 138676 - DNA, 744 bp, Homo sapiens
cctctgatccataaggcgcgtctgcgtagctgcccaagggatctgtcaacacacacatcaacatgctgattccctgcttaatcccttccccaccagtttcactctggataatgttgaaattcttcaggtgtcatccagagcccctaatctggtcatgaccttttctcccaagccttgctacttaccctccaaccccctccctatggctgctctgtcaaactgcctttcatcctgtcctgagtgctcactcactctcacctatttatgccaggctaatggctacatcatttagacttttacctcctctacaaagctgtcaatgcctattccttccaagctaagttgggtcttctcctctgccttccacatccccttagaactttctctcttacatctcatcccattctaccttactctctattcatcacctatccatctgactggagagtgagcttcttgagggcaaagaatgtgttttatttttgtatcctacactccaagcatagggtcttgctcagagtaggtgtaaaacgtgtgtggaataatcaaattgaatgtatggatgaggtcaaaacaaagacaacgttgggaggcagttctccatgggttgcttatgtttctgcatgtctttcaagtaaggcattggctgctgattgttctggactttctttcacagatatttgaatagctaacagcagccttggaagactgatattgtctcctgctgggacaaaggcaggcaga

SEQ ID NO: 138677 - DNA, 461 bp, Homo sapiens
cccagacgccatgaccttgcagcctttggccccactctccatgatgaaccgcagcacaccatagcaggccctccacacagcaagccctcctaggagtttgtaacgcagagactctgcctgggcaatggcacacagacctctagtggcaaccttttcagcataaagctctacactgccctctggaaagccaaacctcttctgaactatagcagtcagttcccgaatccgtcagcccttctcaccaggaatattctgtgttctggtggctaagataatgatttctgtcctggttggtgtaacttgcatctcaactccagagtagccatcttcagccagctcctgagtaagaaactcattcagttcagctttgaagatgtcatcagtgacaaacatcctcttcttggaaatttgcacagccatcttgccgccacgctccactgaaaggaaaggcctaattttgt

SEQ ID NO: 138678 - DNA, 376 bp, Homo sapiens
ctgtgctttgggacggcgagagaggtccaatcttccggccggaagattggacctctagtggcaaccttttcagcataaagctctacactgccctctggaaagccaaacctcttctgaactatagcagtcagttcccgaatccgtcagcccttctcaccaggaatattctgtgttctggtggctaagataatgatttctgtcctggttggtgtaacttgcatctcaactccagagtagccatcttcagccagctcctgagtaagaaactcattcagttcagctttgaagatgtcatcagtgacaaacatcctcttcttggaaatttgcacagccatcttgccgccacgctccactgaaaggaaaggcctaattttgt

SEQ ID NO: 138679 - DNA, 348 bp, Homo sapiens
ggatgtgccctttatctaaaagggattgccacagtatctctttaactcaactctaacaaaaattttggaaaaaaaacaaaagaaattctcctgcccaatggcctggagtcttcctgttctgctctgtaaaatgcaaaggctatttataataaatgtgtataacaagaatctttgttaagtggaagagattccgaagccctaggcaggcagcatagctcattttctttatgcaatattcagcagaaaaaacctcccactactccaaagactgcgggccattccctggccttcactgtactataaagagatttgacttatcttcccaccacccaccacccaccagatctc

SEQ ID NO: 138680 - DNA, 263 bp, Homo sapiens
aacaacaacgacaacaaaaaaggagggcaggataaaactctgcctgagaggttctgttttctgaggcctaaagaatcccaacattctaccacagggctgtctttcaccttcatcactgatgctattccaaagctgctttgggaaccacggaccaaagtccacatactttaacagaagagatacttattgtttcagtcacttaggaaataacaagcgtcctgggagtgatgagccatgaacgtggatggaaaccaatgtacatg

SEQ ID NO: 138681 - DNA, 498 bp, Homo sapiens
atctttacctagcttgacaatatatcagctcatggccaatcttgtgtcatctacccattacccactgccctctgccatgttttattttgaagcaaatcccagacaacatatcattgcatctggaattattttagtatgcatctctaaaagaaagggaattttttaaaaagctccataacaccaccattgtcacaactgaaaaataattaacaataattctaataattccaataattccttatagcatgggacgccaacaacaaaacaaatcattaagcctcacccaaggaggatcatggcaagggaaaggcaatcatgcaaaattcagattaacagcatgaatcacccaaacaaacaaaagtacctcatcttcagtcttgccagagtaaactagcaggaacatagattaaatgaatatcttaactggaaatgcaaagccatgcacccaaatggtaggaaaatctttagttcagcagatgtgacacaagtgctactaag

SEQ ID NO: 138682 - DNA, 163 bp, Homo sapiens
gccccacaccagctgattgttcagtttaacaggtggttctctgcaccagcacaggtggcagaacccatgttctgcagaggcatagttggtgaatcaggactagcgggggagagctggagctctcatttcaggcacatgaggtgtctacttccagccctggtgt

SEQ ID NO: 138683 - DNA, 544 bp, Homo sapiens
ctttttagtagagacagggtttcaccatgttagccaggatggcctcgatcttcctgacctcgttattcgcccacctcgacctcccaaagtgctgggattacaggcatgagccaccgcgcccagcttctaccagtcttgatacctccaataatagctctcttgtgctcacctgcaagttcaggttcagggaacagatgcctgggagtccatctttcatgcaaatgactttcttccagtggttgggaagatggcaagaatggaacaggagagccgtggattcaggctcgtctgagttctagtctcaatcccaccatttcccacccgagaccgtgggtcagctcacaaattcatacgtactgaataggtgcttaaaatgtgccaggcattatgctagatgatggggaaatcatgataaatcagaaaggcacagccaggcacagtgactcactcctgtaatcccagcactttgggaggccaaggtgggtggatcacttggagtttgagaccatcctggcaacatggcaaaaccccatctctacaaaaa

SEQ ID NO: 138684 - DNA, 287 bp, Homo sapiens
aggaagcaacactgactaagacaccctcctgccctccaagtgcacagggatgaggggatgtgctgtggtatattagatctgaagccaaaaagaacaacttgaacatggccttgaacttgtaaatgtttttttccaaacaatatcactgtggctgggtggtaacaatatgttcagcaaatggtagctatttaaatggtagctatttaaaatcagagccagctaactcaacctgtgacagcagcactatgatatatgtggggaaagcaatattatattcagcctttaga

SEQ ID NO: 138685 - DNA, 464 bp, Homo sapiens
accccactcacattacacagaaagagaggccccaaaggcagagagggtggctccaattacactggaggtcaatggaagagtcaggatcttggtggctgggggcacaccccaatgcccccctcaccagaagaacccctcaacactaggacagctgagtcaactcacagagaagcctcctccagcccagccccacccaatccaggccaacaggaagcgaggccccaggtcaaggtgggatggggagataagggccttggtcctgccttgtgcggctagtcaagcaggcaagtgacctcttctggtgtgtgtggagcagaggggtccctggcacagccacactcacgccctgtctgccacaagccggcaaggggggcttctgggcagattctggagccaggctgtgtgggttcaaatcttggtttcaccacttcctagacaagtgaccttgaacaagttacttaact

SEQ ID NO: 138686 - DNA, 367 bp, Homo sapiens
agacctgctccgctcagcgtcgggcacgatgcccacctctgtctgaagacttggaatgagctccctctccccaaccgcgaaacgggagcggtgcaagcccctagtccctcatctgcgattcccaagctccaaagctgcctggaagcccagaagtttttcgtaatccaattggtggcaaaattgcgcttgaactgatgtgaggctgttgatggtctttatttgtcaaacttgtgtgaatattcatgttttgctgcagaaatgcaaatgagctcgatgaccggctgctgccccaagccctgctgggaggttatgtgacctacagcaggtgtgtgccccatagtctctttccaagtcccagctgttctgt

SEQ ID NO: 138687 - DNA, 314 bp, Homo sapiens
tgactgccacccagcctcaggatgtgctgccacttggctagctttggcccttccctgtccagtgcatctggagcccctggggcctggccgtttcctttcccacgattgtttgaggttttatcccccagagtgtggagccgggagagtttccagagtccccgggctgtccctgcgccccacagcccacccaggtgttgtcgccacgtgaacgtgaacctggtagcccgagctggggcctcctgcctatgggagctcctctggcccactcgtggggacagccatagtgacggctctgccgctagccagaaaccaca

SEQ ID NO: 138688 - DNA, 325 bp, Homo sapiens
ggcatgccctgcaagcagaagcttttagctcacactcacttgagactgagggccacatagggtgcaaccgtacgtacaatcttacggtgtggggtccctgtttctcatgaggttctctaggaaaggtagtttttttggttctccatcatgtacccaacgaaattaaaagaatatggaacaaaacagccttgcaataaaatttcgttgagtgaatgacacctgtgtcaatacacttggaatggatgtagaaaagataactttttctgttacatctgaatttgattggcaagcatgttgtccagtgagtctgcatctttgcccttag

SEQ ID NO: 138689 - DNA, 133 bp, Homo sapiens
catgcccaggtgtccccagaatgaaatgcaaccaccacatgcacatttctattattcctgttcagatcttgggctgagctcttccttaggagtttcttcactggctgtactatgttgagaggaagactctggg

SEQ ID NO: 138690 - DNA, 103 bp, Homo sapiens
cgccacagtaccaggcctgtaacgatgaggtttcttcacccctccagtagagggcgcactcttgcgagcggcttttgtagccagttgcttcctgggtgcttac

SEQ ID NO: 138691 - DNA, 374 bp, Homo sapiens
gatgaagactacacagtccaaattttctattgctgctgtaaaaaaattaccacagccttgatggcttaaacaatacaaacttcttaccttgcagttctttaggtcagaagtccgacatgggtatcactggactaaaattaagatgttggtaaggccgccctcccttctagaggctctgagggagaatccattttcttgcttttcccagctgctgggctgcctgcattccatgctttgtgacctccttcttccgtcttcctcgccaacgcagcaagttgaattcttctcatgctgccactgccacctctctggttctatgtccacagctgagaaagtttcttctctttcaagactcatgtgattagagtggcccc

SEQ ID NO: 138692 - DNA, 347 bp, Homo sapiens
tggcaacttcattgctacatcttagtgtttaaattacagcagtattagagatataaaccaaacataccttatctaacatcccccaaaactcatcaattctaattctagttagaaagtcttcaagactcctgtctctaaaaaaagaaaaataaacacgtaacgtgcatagagctacatgtgtgagccttgcattgttctaggagctcatagagataattcctcacttcattcagtcatcttacagattcctttcaaatgaaggatagtctgtcttaattgtcatttagatgaataactgaataagggaggtgcattcattcaagtcttttttactttttctaaataat

SEQ ID NO: 138693 - DNA, 235 bp, Homo sapiens
gagctccttgctctggcgtggtgtttacttttttaaaaaataacgggggccgggggctgtaatcccagcactttgggtatgattgcaggtgggtgtgacacagtcagaaatagtgtgcaaaggcggaaccaaacatggagtggcttctgctgggtccatccacttatttctctaaaaaagaaagcggaggcagacatgcaagatgtcagcgtttgttggctctgtgtggcaagca

SEQ ID NO: 138694 - DNA, 379 bp, Homo sapiens
gcattttaatttgataagcagcagcggcagttttctctgaagtgctgaaaacatggctttttctggccctgttccagataggattctggttgccacagagaggggtttgatattgttgtttatttctcaacaaagatcttgcatatttgcataaatgtggaagatgctgcttggttctagacaaccagaatcaaatgaatacaggctatctttaggttatgaatatctatctgctctaggaaggtcacagagatactgccccatccccagctcacaggaccacccagtgacctgtgcagtggatcttctgacttaatgtccttacccttctgcctcccccatctacttatatgtcacactattctcaatctcttccctt

SEQ ID NO: 138695 - DNA, 720 bp, Homo sapiens
tattctgtaaagatggaatagaaaaactttttgtaaatctgctgcttttagcttttgcaaatgtatctgttcatctgtatcatgttttaatctgtatcatcacttattcaacatatttttctagtttaacttttaaaaatcatacatttttggttcaaaattaaaatacacacactctgaaaattttctctctcactctgttcccacatttaccactatttgtctaccctttagagtttcatgcttatacagtcatgtatgacagtacaatcttatacctctcattttttacacaaaaggtcacagacaatacatgttgccttgtaccattaatttctcatttactatattgtggtgatgtttccatatcataattttttataagtcaagattatatatgcacatcgttgaaaagttgaataattataaaggttccttaagaaaaatagtactacattgtccatctcaccatcactttcattttcctttggcatactgaattcagcaatgcatattatgaccaaattgggtttattccaggaataaaagttgtcttaacattcaaaaatataattgtgataatgcatgatagtagcagattaaaggagaaaaatcatgagatcatcttaacagctgatttggttaacattcagtattcattcttaatctcaaaaaggatatcaacaaaaaattatcacaaagcatcaaacttcatagtga

SEQ ID NO: 138696 - DNA, 129 bp, Homo sapiens
ttctgagggtcaaaggcaacctctagatgcttccataggcccgcacagagttctgctcctactggttgtccaaaagcactcatcctggcatctgcatctgctcacctgtgtgctcccccttttgcaagg

SEQ ID NO: 138697 - DNA, 209 bp, Homo sapiens
ctgctcctccataccacccccaccatctcctgacactgcacttcttttgacttttcacagagaagagtaaatctcacctgagattctcatttatgaattgactgatacgtttttcacccctctcctccaccagaaggtaaactccaccaaagcaaagattctgttgtactcagagcaatatccccagcacctagaactgtgcctggccc

SEQ ID NO: 138698 - DNA, 394 bp, Homo sapiens
gcaaatgacattcttattttctacccagtagtttattagagtttctgacaagatataagaactgattaaagggttcatttttaattccctttctcagccatggctaccaatgagcactcaatggataaagagatgggtgattagagaagagtcattccatctagctcaagtgcctgaggtccctgctcctagaataatggacaattaaccattaaaatgccctttggaagctctgccatcccagagactgcagggagagggcaatggggaatgtgtttaatgggtgcctggagatggacggtggtaatggtagtgcaactatgggaatgtacttaatgccacagaacctgacacttcaaaatcattaatggcaaattttatcaatatttcacca

SEQ ID NO: 138699 - DNA, 213 bp, Homo sapiens
tctgaaatgacagcctgtgcttctcatgatacccatggttttggtgcgtcagcttttgatttctggttaaacaaggcactggctgaatagttagttgtcttttaattctcttcccactagagtgcccctttcatcctgctcagaaggaaggactgtaatgttacctctttttaggactcattgtttctccctctcccagagtgaccagcattt

SEQ ID NO: 138700 - DNA, 299 bp, Homo sapiens
gcctgactctctcagggcagcaaaacccagtgacaactgggcacttcctggtcctcttgaggtcaggccagggcagagtgtgtaaggcatccataaaacctgggggtgactctgggctcataccagggctgcagtcctcagggtgactaggataagagtgtgcaccgtccctgggccagctggagggaaggaaggagattgtgccctttcctggggagtgacagcccctctccatttcggcctctgcaacactgagggaaaatgaaagaccccacattccgctggagtttccaccagag

SEQ ID NO: 138701 - DNA, 286 bp, Homo sapiens
tcagctgaacaagcaaagtacaactctcaagcaatgcttaggtttgggagagaggtttttgcatgctctgcctatgctaacttccctttgaatttcatagttcctttccgctcagagtcaggatgatgaaatgtattcagatttagacgattagaatctcaaagtcccaactcttctctctgttccctgccccaccagcagctttcttagccctcttagaagatagaggagctgattcagtgtattctttcatcaaatactgattgcttgttccgctgaacgccct

SEQ ID NO: 138702 - DNA, 269 bp, Homo sapiens
  misc_feature (258)..(258): n is a, c, g, or t
cctagttcctggcaggtgaaggacaaccgtgtgagacaattgcccacaagagaatggactgcttggatgatggaagctgacccagacctttccaggtgtcctgagatggttctccagttgagtttgtcatctgccacgccccgcagcaagcctgtgtgcattcataagaattcggaatgtctgaaagagcagcagaaacgctactttaaagtattttcagacagagtggtatatactccagaaagcctctgcaagganccgctggcctc

SEQ ID NO: 138703 - DNA, 437 bp, Homo sapiens
tgaggctgggttttggaaaaactcttgtgctcgtgatgcagtcaaaggaaggtccgcgggtgaatcattctgtgaagccaactttgcaagattcctgaggacagactgtgtgacctgtccctgtccctgcagcccatgggcggaggcttcaacacacattttacagtttacaatgaactttattttttaattttatcgattcagggactcactctgtcacccaggctggagtgcagtggcgcaatctgggctcactgcaaccaccacttcccaggctcaagcaattatcctgcctcagcctctggagtagctgggactacaggtgtcagccataacacccagctaatttaaatttttttttttttatacagatggggtttcaacatgttggccaggctggtctcgaactcctgacctcaagcgatgtgcctgcctca

SEQ ID NO: 138704 - DNA, 397 bp, Homo sapiens
agggaccctggcacatctgccacccgcaccagcccccagagccaaggcccccgacccatgctccggcaggtctgggcagcgagccatgccctgagtccagggctgtatttcaggacggtaaaccaatgcccatgctccctacgtatgtcctgggttggacacagcagggcaagacatgtgccttccaaagccaagcagcatatggccgggaggtcagctgcttccctggccagagacaggcccagaggctccgaatctcagtccatggccccaggggacatgtggaccccagcaggaatgctcccaggaggcctgacctggcccggggaggggtctggctgcttgtgacccatggccctggaccccaaaactcaggctccttgctcacaggctcagc

SEQ ID NO: 138705 - DNA, 309 bp, Homo sapiens
tgtatgtctgtcctgtcactgtagcagaaattgtaatttaggacaagtctcacatgtaaaagtaataaattatataactcaatatatgtggcagattaatggactttaagatgtttgatgatagattagcaaatgaagttaaatcacctctataatgttatcagacattgattcaattttatcctttaataaagtccatgaagctaataaaacctttgaggtaacctgccaaatagactgaaacacaccttctaaaaacaaaagaatccacagatgtcactttaaaaatctgcatgctggctgggggtg

SEQ ID NO: 138706 - DNA, 277 bp, Homo sapiens
cctgcaccaggacctgattcttcagacagaagctacaggatagacctgttcacaggccgacctcagatcaggtagaaggctctgagatgcgtcctgtgctgagggtccctcttgaattgttcctaggagggatcagaggccgaggagagctgttgggttctctttcagttacctcttttagaaccttaaatatcaaaagcagtgtttttcagactttctaaaaaccatcttcctactgtaagagatacattttgtgttgtgacccagtactcccatg

SEQ ID NO: 138707 - DNA, 369 bp, Homo sapiens
ccttaagtcctcagcgtctaaccttgggtttattttttgtttaattacagttctgtcttgtaatatttgtttctgtaagttttgtctctttcactagattataagctcttttgaggtgagggatcacattttaccaatcttgctagcaccaagcagaggactttgcaaacaaaacataaatgatcttcaacaaaagtctgctgcattgaatgagcatctgggatgagcctaaacccaaagcaatagaccgccacctaatatatctgtattactccccctggggaggcaggtagccagcccagtgggtagccctgccctctatttttgaagtaagatctttccctgtcccagacctaaactaatcccagg

SEQ ID NO: 138708 - DNA, 178 bp, Homo sapiens
gcaaagccccctggatagtttattttttagcagttcagcttgtgcttggacccagttgttccagaaatcagtaaaacctatttgagtattcaagaaaaaggatctttttgttaactaaggattaactagaaaccttattttataagggttcctgaagtctgcttatttactaaggaat

SEQ ID NO: 138709 - DNA, 372 bp, Homo sapiens
gtctttgtatctattacctcatctgacctgccaacaaccttacaagtgattagactcatgatccctattttatagatgggttaggcagaggcccagagaggttgaaaaacgacttgttcaaagacacacagctggcaagtggtgaagccagcatacaggatggtctccaaagcttacatttgcaactgtcactacagggcacagtatttcctgtttaaatcatgatttttaaaaattaaagtaaatggcagagcatggtggctcatgcctgtaatcccagcaccttgggaggctgaggcaggcagatcacctaaggtgaggagttcgaggccaacctgaccaatatggtgaaaccccgtctctactaaaaat

SEQ ID NO: 138710 - DNA, 144 bp, Homo sapiens
agattctactgtcctatgacttgtactcattactgattctccagctcgtaattcaaatacagtttgtgtatctatatccaaaatgcttggaacctgaagagtttcagaatttggacggggagaggttgattttggaatatttgc

SEQ ID NO: 138711 - DNA, 386 bp, Homo sapiens
tgaaaagaacccagagacccagctattattattattatttgacacagggtgtagctgttgcccaggtttgagtccagtggtcactgcaatctgtgcctcccaagctcaagctatcctcccacttcagcctctcaggtagcggggactataggtgcgcaccactgtgtcccactaatttttctattttttgtggagatggggtttcgccatgttgcccaggctggatgcaatggctcgcacctacagtcccagcactttgggaggcggaggcagaaggattgcttgaggccaggagttcaagaccagcctgggcaacatagcgagaacctgttcctatgaagaataaattaaaaaattagccaggcgtggtggtgtgcacctgtagt

SEQ ID NO: 138712 - DNA, 336 bp, Homo sapiens
caattatttatataaattgaagcactgtggcgatgtactgagcaagtttcttggtgccattttttcaacagcatgtgcccacttcttatctctatgtcacatttttgtaaatcttggaatatttcaaactttacaatttttattatatctgttatggtgatctgtgatcattgatctttgatgttactattgtaattgctttagggtgccacaaaccacgctatataagatggtaaacttaatctgtaaatgttgtgctgtgctctgccaatcagtagttccttatctctgtgcctctccttgggcctccctgttccctgagacagcaatattgca

SEQ ID NO: 138713 - DNA, 395 bp, Homo sapiens
cgtgggacaggaagcggaagcggaggtcaggctgagaggagatacctaggaaagccggggcacagagcaaagcagccgtggaggcgtgcatgaccaatgcagagccagccatagactcttccaagcctccttcgaggaggccagtgtggggaggtggaatatgtagggatgaacacccacactatgtgtggaggtatgtttcactttaggttttgatgaactaagacctaagaactatcgagttttcacagtagttccaaacactttcaaatacataacctagtggagattgtttagacaaggtccttgccttcagcatttgatgattctatttataattgagaaatcagaggtgaatctatcgtctcaataattatgacaggcgaagttccatt

SEQ ID NO: 138714 - DNA, 777 bp, Homo sapiens
gtacagtacataacttcatgaatcatgcttatacacatgtatccggtgggtcaagtgtgtttgccagttgccacaatcagggctttaaaacttttgaagtcaatatttaaaagttgacattttgcattttttaaaatttaatttcaaggttgtcttgaaacaacagaagctctgaccacactggggctgcaagcctacgtggtatctcttggctggatcagagcaactgttgccctttggacagggcatgtaacattcagtctcccctgctctaaattttctccccaacatcaaagccagccttgcttgaactggtgcttttcttatactggagaaatatttttttggacctttgttgcttttgcagctggagaaataagatatccacatggttattcttaccccagcctgcatttactagatttttggattttacagcctcatctcatcaaattattggaagcatgtgggattgtaaacctttcagtttgacaaaaaacgatatacattccaaactaataaaacaatcatctcttttaccaccatttcatgaagcaaaaggacaatttcacaccaaaaattagggtagatgtaattatgaagaaaagaatgggcatccccaggaaaacactcgcatgtggttgcaagtgggagtagccccttcaaagctggcttaagcataaaagggctccaggaacagctagatctaggaggcacgcatgataccatcaatgcctggtccctctctctctctctctctctctctctctctctctc

SEQ ID NO: 138715 - DNA, 441 bp, Homo sapiens
tctgttactcagctttgccaataacaggtgtttcagtagcccctgaatctgagctctgcgtgagctccacctctgccccatggtcaggaaattgtcacaggcagagagagtttggatgatcctggaacttaccttgtgagcttctcttttctcaggcattgcagtcttgtgctacctcttgtctgttgcctgaaaatggctacttcatgtatttggcctgttgtaatagtcgtttatggcaagagagctcatctggcaccagttattctgttatgacccaaagtggaaatctctccctgtgtcattttgagtttctggaggccacagtttatggccagacttggagggtggttcctcagaatgtcagctttatccttattgtttcaggcagctcatctgctagtacaatggttttcacacattaggaggagggagaatcat

SEQ ID NO: 138716 - DNA, 344 bp, Homo sapiens
tttctctggcagaactcagaagtcaggacaggcatgggtgggccgcccaatcccccaggagagtgaagtaagggattccaatgcgttgacaagcgcatcgctgaagtgttggaattcaaaagcagaggcaaagtccagcaggagcagaggggttggaaagggacctggaatgggaaaaatctgatgttcttattgtaatctgtcagctgagctgaaggacagaagcttctggtgagtgggatctctggatttcagctcagaagcggttcctggtattaacagtgtctttttagggtaacctcctcctcctagtttgagcactgaaagtcctgcgtcctgtgaaa

SEQ ID NO: 138717 - DNA, 149 bp, Homo sapiens
tagtcattactttttacttgtaaatgccaaatgcctttataaccatatgacttattaatagagtctccaagtcaaaaaggttgaataactaaggtcaagtatcaaatgaccagaagacctggaaatatgtgatttcaatatactgaatg

SEQ ID NO: 138718 - DNA, 320 bp, Homo sapiens
tccctactctcattgccccagtttaattcctcaacacctctcacctagattattgtgatactctagttttatcttttaaatcctttatattgcaaagcagagtgatttacctaaaacacaaacacaaccacaataagcctctatttaaaaagctttcaacggttcactgttgtctctacagaatgtaaacagagcgtcttaacatggcacaccaggccctccttaacctagccctcccagcccatcacaacaactatattccttgatattctcgaattgcactttattttgttttgtttttttgagacggagccttgctc

SEQ ID NO: 138719 - DNA, 395 bp, Homo sapiens
acataatatcatagctggcagaggccccaagggtggggaggaagaagctgcctcctggagaattaaccaaagaccccacacagagacatgaggccatcctggccccttgtctgttgtccagagcagctatggcattgtggggcttggggaagacagcagagaagtagcagcaggttgggtaccagccagggggtggacctatgagttccagcttgctgtgatgaatgctctagaggtctgtgactttaagagtcttggaaaagaatgagacatgaaggattaggaacaaagtgtccttaaagagaacatgatgggccagcagggttaccatagccaaggatggaggggcaggttttgaacaggggagggaggttctggggattctggatgagaac

SEQ ID NO: 138720 - DNA, 404 bp, Homo sapiens
aaatctttttccacctaggccccacctctaacgttagggagtataattccacataggttttgatagggatatagagacaaaccatattattctgtccctgatcccatgaatctcttgtccttttcacattgcaaaatacaatcatgccttgccagcatgagtcttaactcatttcagcattaactcaaagttacaaagttcaaagtctcatctgagtcaaggctgcagcctcttttgcctataagcctctgaaataaaatgcaagatcactgcttctaaggtacagtggtggtacaggcattgtgtaagctttccatatccaaaaggaagacattttccagaaagcttcttatttctatctgagacctcctcagcctggccttcactgtccatgtttctgtcag

SEQ ID NO: 138721 - DNA, 405 bp, Homo sapiens
cccatagaggatccacccaaagccaccgggagaaccaacacatccctgcagacgacaaaagcgtccttttgctcatggccacatgccttgcagcacaagctcctctcaaatacttcccaggacctcaccgtaagggacagtcaaccagacgtgtgcttccacatgttcttcaaatgtgtttttcatttgcttgggttcaacctcattataatggcattagccagaggaggtagcatggtggttcaggtttctggaagtggggttaagccagtcctttcactttcttaactgaaattccccaacgcccttggcttactcacccctcagcatgctttgttctctttctgtctttttctgtctaggttctctatcatgagtgtcctcttctctgaattcatagccttt

SEQ ID NO: 138722 - DNA, 258 bp, Homo sapiens
cattcccagaaagaaacgtgtaaaaacaaaatggtcacacctcctatttgaaccatacccacagaaatttgttcattaggtatttcacagagactagaaaataagaatggaaggcttttagattaataaaagctccatgaaagccaggattttggaaatgctgtttctacaagttactagctggatgagttcacttctctatgcctcaattttctcatgtgtaagatgagaaaattaatagtacctgtgtcatagagg

SEQ ID NO: 138723 - DNA, 341 bp, Homo sapiens
tacaagtcagaggacctcagctccaggtcaaggctatagcaggatgcagaggaggaggctgagaggtgggcctccactaagttcaggctgcctgggaggacagagcctgggcaactgggagccactgagggcttttgagggccatgagatgatcagatgtgcattcagagagatcattggctggatcgtggaggactggagacctcgggagtctgttgcctcggaaaatgatagtggcactggagatatgaagaaccgagaggtcgaggtaattgtctggatgtttggggccagggagcagccatccgtgctgcctctgatgcctggctgacaaggagcct

SEQ ID NO: 138724 - DNA, 278 bp, Homo sapiens
aagctaatgaccaatgacttacagaattcagagctccggtaccccgccataggtcctccacttcaaaggttgcactgacctgccttttctgatgtctctggacatgctccaccttcagaccctcagctccaccgagaccaccagcatcaggctccagcccatcctgtgcaaggcctccccttttttaaggagctagtttgatgtctgctcatcttaccaaggaccctacacccacatccataacttgctagtgaagacatcaacctaggtgccaccta

SEQ ID NO: 138725 - DNA, 401 bp, Homo sapiens
aagctcccctctagcatcactccccgttgaggctgcaggtgaggggacaaagtagagcgccgagggtcagatgcctttggagaaagtccatgagaggagtgtagcctgcacatctagacatagcttggaacggggaagtgaacggtaaaaagctacggtgggtaaacatggagacacaagatctgggttaactggccatgctatcttctccagaaagatagggccaggattaaacctagtatcagctcactctaaagcctgtgcttctatcacggtgccagtggccggcctgggaatggaccccaagcttcagaatcctggtcgagtgtgtcttctcctgtcacaagtttagggccctgggttcggcaaattggggagttcacggaagcaaatggctttgg

SEQ ID NO: 138726 - DNA, 472 bp, Homo sapiens
aagctcccctctagcatcactccccgttgaggctgcaggtgaggggacaaagtagagcgccgagggtcagatgcctttggagaaagtccatgagaggagtgtagcctgcacatctagacatagcttggaacggggaagtgaacggtaaaaagctacggtgggtaaacatggagacacaagatctgggttaactggccatgctatcttctccagaaagatagggccaggattaaacctagtatcagctcactctaaagcctgtgcttctatcacggtgccagtggccggcctgggaatggaccccaagcttcagaatcctggtcgagtgtgtcttctcctgtcacaagtttagggccctgggaagactagaggcagggctaggcaggatggaagtcaggagtggtggacagggagggctgttttctgtttaaagcagtcagtgtggagcaagaagtcacgtggagaatagagt

SEQ ID NO: 138727 - DNA, 334 bp, Homo sapiens
  misc_feature (24)..(25): n is a, c, g, or t
agaggatcccgttcactttctacnnagaaaaagtatcttaaaacatgtcctggaggggaggtgggcaaagtggtgatttgggaaggttttggatgtgttggatggattggtgattgaagagactgagggtagagatgtaaacagaacagttaaaacattgagttgtacaggtctggcgtacagagggaatagactaggataataacagcaaaagtagagagaatagaaaagaaagagtacttgaaagcatagatgaaatatctgtagcaaaacaagaaacctagttgttggcatttcaaggcatcacctacttttggatttgttagctacttat

SEQ ID NO: 138728 - DNA, 1144 bp, Homo sapiens
tctgttaagtcgaagtaccctagccagttcagttgaaatttccatttattcaatataatcctggatgagaagcggtcaagatttgataatccttaagtggcacggttggtccacatttgaacctgaggcaccagagaggccagggtattaccaacttccatgctttgctatgactcaccagcactgtgaatgttactctgctgtagtcaaagcaaagctggactgaaattctctgtctttcccaacactaatggatctaaggggaatattagaagcacaactggaattgttatgaaagaagttagatttgtaatcttgaggcctgacatagcagaaagtgggttaaacatttacactctgaagtgtattatttacactccaaaaagggtaggggccatcctagttataaataaattcattcagatgtggctaatatgatactttaggtacagaatgaagaacaggaagggtagtggcacctattaagtggacttcacaatcttttttatttctggtaacagcttttcatatacatgggaacatgatgggactttatttgcttattcatttctttaaaaagcttttcattttgaaaaaagttcaagattagaaaaaagttactaagtatgacacagaattcctatatttacttcatcaaactagtcttagcatcttaccacacagcaagtatcaagcaggaaatattgagaaaatattaactaatttatagatctcattcaaatttcattatttatttccctaatgtttttatctgatccacacattgcatttaggtgtcgtgtctccttggtctcttccaatctgtaagagttcctcagtctttccttgactttcagttccctgtcttccataactttgatacttttaaagataactggtcaggttcgtttttgttttttcttgtactcactgacagcagatggtcaggtattttgaagaatgtccctcagtatgtgtttgatgtttcctcataatcacattcggtttaggcattttttgcaagactaggacagcagtctttctgtctttctcagtgtgtcatagtagaagacacatgattgatacatctcagtactgattatgttacccttgagacacattgatatcatgtgccccttgacat

SEQ ID NO: 138729 - DNA, 208 bp, Homo sapiens
tatgtgagcctgggcaacatggcgcctggcagagtgggcgctaggctgaggttgacctggactagactgaacttcatctgcagggcagccagcattttggattgaacacatagctctttcagtcaggaactgtacagaaagatagggggaaaagcggtttgtggtttgatccttgctctacaagagctgttagtctagagagacccca

SEQ ID NO: 138730 - DNA, 397 bp, Homo sapiens
aatcatgtgcccattagcaatcactacccactttcacttcctcccagccctaaacaaccactaatctattttctgtctctaaatttacctatctggactgggaatgtgcctgtagtcccagctactcaggtggctgaggcaggagaattgcttgaacccaggaggcagaggctgcagtgagctcagatcacgccactgcactccagcctgggcgacagagagactgtctaaaaaaaaacatacacacacacacacacacacacattatgtatctggacatgtggtattttatgatgggcttctttaatttcatatgttttcaaggtttatacatattgtaatgtgttaggttttcattactctgtgtagctgagtatatgccacattgaatttatct

SEQ ID NO: 138731 - DNA, 426 bp, Homo sapiens
tcacaatgaaaataaaaataaaaataaaaagaaatacacttaacttttacttttttctttgaattttcattttgttttatatgtgttctagaatattcattcatagtgaatagcttgttatttgacagaaatgtttcatgttatattaactccctgacagaattaaacttgttttattggctctcaagtattgagtttaaagaaggggagaaaaggaaaaacctggacaacgagccattgcgaatatttgtgtctgtgtagggaacttttagaagggtttcttttgaaggggtggacctcttttgctccagccaccctgtggagttgagggatgtaacttgtaaccttcatcctagaccatgtggattgactggcacttctctttacagatttgcctgaaacaaaagtagttccaagcatctcttg

SEQ ID NO: 138732 - DNA, 902 bp, Homo sapiens
gggcattgtcattcaggattttgtgtcctatcttcatatctcattaactctgtggcagccccagggagatgagtggtgtcttatgatctttggttccagggccctgtctgtaaggaagaagtcgcagggcagaaaggtgcctgagtcaaggccaagcccagtgcccctgattccttgtctggggtggtttttcctgttccctggttaggccttcccactacaatttcaggacatttccagtcactgtgggactctgaaattatgtagctttcttttgtcccggatttgatacatggatctgcggggaacaagcgaacacctttgccccagctggtggtagggagaagacagaattgtttacttctgagtggctcagttgggtctcttgtttttcccagtaaccaagtctagcttggtcacttggagccccatgcagtcctttgttttttccctttgatttggggaaacacctgagttttttcccttgaggattctcaactccctgcccctggggtgagcctcagtatcttcatctgtaagatggggctaatggtgctgcactgcctgcctctgtcaccgggagcattgaagtgcctggcccaggtggggctggggtgtagacaggggccggggtgcacaggatgtaattctagtccgtagcttgccgccttgttgggggaatgggacgctcatgagagtgacattatgagacaggtcaactgatagagatgcacaaacaggctttttcttttataaaaaactcggtatgctacacactttccccagatactctcattcacctttagtggctctcattaccatctaaatgtgggactcctcaagtcattcccaccaggcctctattgggaggcagaaatggcagaacttggctggacctctcg

SEQ ID NO: 138733 - DNA, 379 bp, Homo sapiens
tgctggggccttgcaccctgatggagggcaggcagcgagatgtttaccaacataacaacaagccatggaccatctccaaggacatttagcattacatttttcctgagtgtgacgagatcaagggtcccaagtcctttaaatactctctatctgggaaaggtagtactgaacatctatgtgggaagatcatcagaaccagacagaggaagaggggaagacaagaaaaggcaaaatggggttcactaattgccaagtgcagcatctcctccttcagttcctgagggtttgggagttctgagaatggaagtgcagagaggccaatcctggagtcacaggaggtttccacccactcactcagtgggttatgtatatggagtaa

SEQ ID NO: 138734 - DNA, 436 bp, Homo sapiens
tttgaggtatctttgagataaaagaaaggcaaggccgggcgctgtggattacaggcttgagccaccacgcccagccagtgttgttattttatatatgttgcaaaatactaaatatatggttttccttttgctcttgttcacttaacattgatacacactgaaaggtaaaaagactaatcatactctaccttcctcagttattacttacaggtgtgtatcggcttccaaaatcgtaaaaagtaatattccagatccgatgattgaggccaactgcagagtccaagaaagcactctcttatttagtgttctgagttttcctgttcttttataaagccttctatatgctgtctgaccttggatttagcagtcttttcatttacctatctttcccttagaaggccaagatgggactcttactagctagggagcatcattg

SEQ ID NO: 138735 - DNA, 420 bp, Homo sapiens
tccccctgcctcggcctcccaaagtgctgggattacaggcttgagccaccacgcccagccagtgttgttattttatatatgttgcaaaatactaaatatatggttttccttttgctcttgttcacttaacattgatacacactgaaaggtaaaaagactaatcatactctaccttcctcagttattacttacaggtgtgtatcggcttccaaaatcgtaaaaagtaatattccagatccgatgattgaggccaactgcagagtccaagaaagcactctcttatttagtgttctgagttttcctgttcttttataaagccttctatatgctgtctgaccttggatttagcagtcttttcatttacctatctttcccttagaaggccaagatgggactcttactagctagggagcatcattg

SEQ ID NO: 138736 - DNA, 246 bp, Homo sapiens
gatggggtatgataccttattcatcttatctcttaccttgccttaataaatgttgttaattgaatgaaatccgatggcactcttatctgtatcttttaaaaagcacttgtcctggtctaataataacatctgccagttgtacattgcctaacaattcactgagtactttcacatgcattttctcatttcatccttgccagagcctcgtgaggtcagaacgattgttatcccagtatacagagaaga

SEQ ID NO: 138737 - DNA, 288 bp, Homo sapiens
gctgggattataggcatgagccaccacacctggccacttcttttatttttgagaatgacatttgtactttcaagtaaaaatgatattctgtgaaaaaaaaatggcttgtttagctcacaattaaatcacaagtgcttttccttaacacaactctacctcggtatgcagaattactttatgtgaactttctgcttactccagaatagtgaaaagaaaggtcaagatttaataataccattaatttttactgcttcagcaaggatattcatgagtgaagcaggtgttttt

SEQ ID NO: 138738 - DNA, 266 bp, Homo sapiens
ttcctttagctcatcaagcatatttaggacaagtgatttaatgtctctgactagtaattttaatgtctgagcttcctcaaggatagcttctgttaaatcctcttttcccctgtgaatgagccatatttttgtttctttgtaattttttgagaactgaacattgagtattataatgcagtgactctggaaatcagattgtctccctcctcaggaattgcttttttgcttattgaaggatgcagtcttctgtgtccatagtgactttt

SEQ ID NO: 138739 - DNA, 264 bp, Homo sapiens
cagacctggaggcacagagtgatgtagagaggacaatggatctgaagccatgtatctgggtgccagacacgctgggtgaagccgagcaaaccgctcctgcagatagattgagtatgcacacccagcactttgggaggccgaggcgggcggatcacgaggtcaggagaccgagaccatcctggctaatatggtgaaaccccgtctctactaatacaaaaaattagacgggcgtggtggcgggcgcctgtagtcccaggaggcgga

SEQ ID NO: 138740 - DNA, 500 bp, Homo sapiens
gcccaggtaaatgcaggcacaaacggaggccgctgatgcttgagggagctgggctttgtgctttgtaggctcttgctgagggaggggcaacagaggtaaactcctcgcttactccctcacctgtgcaccaaacacacccaccaacaaccaacgcagaacccaggaaggaggccacggggtgatcagctggctcttcaggccctgctgtctgtggtggccttacctggaggccctcagctcacctatacccatctggagatggctgaggagagaagaggggctgtgtaacgttccatgcttgcccttgtcaatgataaagatgtccccatctcctaaaccgggcagagggagctgggcagagggaggtggggacgcactgcctcagaggtcttctctcggtctctgctggcagtcacctgctcccggaagaccagcgccctcctccctcactgttactctgtttcatttctaagatgtgagccaagataggtggcctctga

SEQ ID NO: 138741 - DNA, 438 bp, Homo sapiens
ccaacaagaaaaaaatagctaaaacatgttaagtaaaagaaccaagacataatatgtattgtaggttccagtgcgtataacatatacatgtgtatttatatatatatgcacatgatataaactgtgtatgttacacatacttgtgtatatttagtatacacagagaacactgaaaaggatacatcaaactggtaataagtgttacacattgggaatgaactgaatgggggaaaggatatgggtctttcactttttccttcaaatacttctgtctaatttgattttttttaaacaagtatcttattactttcattttttaaagtgcaggacattaaagctgaaaggcgcccctaaagactagccagtctatctagaaacagtgactcacatatccaaggtcaaagaataggagtaaaagatttagaactcctgactgct

SEQ ID NO: 138742 - DNA, 726 bp, Homo sapiens
aacaggtgatatgcccaatttgacccttgagctatagtttgccaaccactattacagactaagaggattagaagaaactgagtcattttacagaaggcaaattgagagccatgcagagtgtaagggaggtgtgaaagtccccacagccagattctgcatccatacctgtttcctttctctgcaccctactgccatctgctgttagcagtgataatagcatttagtggagggagatgggaaatttgtattaaaatgcttccacagtcaggataatataattgagataagacagtagttcacccaaaatcgtgtaaaataattgccatgtcatagaatagaaaataatatagtagcctcaccagtgaaagttttgtaaccagtaacataaaactacagattgaaatgttattgcataaaacttgtacaacagtgtagaaatcttgtttttgtttagaagattggagaactcagagctgtgtgcctataatccttagaactggatatttagctttctaagaagcactttgctcagccagaagtctttaactcacagtgtcctataatcttgctagctaggtggcctaagtggttaatattctgagtgatttttgtagtttcccctttatatagacctcctggccagaatggttaccttcaccggtatttgtttgcgcgatctcgatgtaagttattaatatgtattagggtcagagtcggggggcctga

SEQ ID NO: 138743 - DNA, 164 bp, Homo sapiens
catcctgcaggggatggcgcagatctggggtccatgtctgtgagcggacaccattggaacatgtgtctagagaatctgggcgggatcactgcccacagcccttcaaggcccacaaacctacaacacatctctcctggaaacagcacgtgatcccatatgccccc

SEQ ID NO: 138744 - DNA, 550 bp, Homo sapiens
  misc_feature (1)..(1): n is a, c, g, or t
  misc_feature (10)..(10): n is a, c, g, or t
  misc_feature (12)..(12): n is a, c, g, or t
  misc_feature (14)..(14): n is a, c, g, or t
  misc_feature (17)..(17): n is a, c, g, or t
  misc_feature (28)..(28): n is a, c, g, or t
  misc_feature (45)..(45): n is a, c, g, or t
  misc_feature (48)..(48): n is a, c, g, or t
naaaaaaccngngnaangggggccgggnccttttctgggcccagncgnccggaagaaaccccccgaaaaactcaaaacaacctactggattttaaaagccatgtacaaaagggctcctgctgcatgatgtttatataaagtataaaagaggaaagtgacctatgctgttagagatcaatatagtgtccatccctgagaataagtgactgggatcacaaggtggtatctggtggtatctttgggctaaaaatgttccccaccccccgctttttttttttttaagatctaaaaagcctcagacaaaactgtccccaatatttaaaactatatggtgctatccacttaggacatgtgcatgtatctttaaatattttaaatacatgtaagaatttttgttttaagttgaaggatgctaaatagagtattgctgcccacagggcacaggtattaagttgcttgacactgcgacagtgtttaaaagtaagctacaatttctaggttaaaaacaaaaataaaacaaaatataaataaatataataaataactatat

SEQ ID NO: 138745 - DNA, 364 bp, Homo sapiens
gatccgcccgcctcggcctcccgaaagtgctgggattataggagtgagccaccgtgcctggccctggtttgcttgtgagctggtgactctgctacatgaagagcaaactttgaccaagttaatctggcacattgactaatttgcataaacatttttggtgcagcattgtcgtaaggtatatagattaggcagggagcaagagagccaaggacaaactgcacctgggccaccagcccaaagttgtcagcgtcatctcagctccatctggcaaagagttagtgagcaccaactgttctgcagtcagaatctagcctcaacctgttaggacctcccagggccctgagcagacaggtgtgcaggaact

SEQ ID NO: 138746 - DNA, 398 bp, Homo sapiens
gaacattctccatcctctgcttcctctcaggccttgtcacctagaaactccaactcacctttcatggcctagtacacttgtcccttcttctgtgatgttctccatgatttctcccccattcttgcccacagcttccctgcagttgcccccagcatttggataggctctatcatagaatttctcgaatcatgtgcccattgtacttacattagatccttgagggtgggcactgtggcttatctgacccctgtattccctgtagtttgggcagtgatttgcagaaataggcatttaataaacacttgccaaaaaaaaaaaaagcaggactaagattttagagcaaaaagaaaggtttgagaatgtctcatctaagccccctattttgtaggtaaagcctg

SEQ ID NO: 138747 - DNA, 424 bp, Homo sapiens
tgcaagcaggcataccacagcaaggtgtcctgcttcgtgctgcagcagatcgaggagccgtgctcgctgggggtccacgcagccgtggtcatcccgcccacctggatcctccgcgcccggaggccccagaatactctgaaagcaagcaagaagaagaagagggcatccttcaagaggaagtccagcaagaaagggcctgaggagggccgctggagacccttcatcatcaggcccacctccctccccgctcatgaagcccctgctggtgtttgtgaaccccaagagtgggggcaaccagggtgcaaagatcatccagtctttcctctggtatctcaatccccgacaagtcttcgacctgagccagggagggcccaaggaggcgctggagatgtaccgcaaagtgcacaacctgcggatcctggcg

SEQ ID NO: 138748 - DNA, 372 bp, Homo sapiens
aaaaaaatgtgtgagatgggggtgtgtatgtgcccaagccgtctcaaactcctggccaagcagtcctcctgcctcggctcccaaagtgctaggattataggcatgcaccaccgtgcccataatgtgagcatctttccatgtgcagataggcattccatcatcataggaggttctgtccaacagcactccagaggataggggtgaaaatggcaggacctgtgcagagcactatgggtggttgtcactgtattgaagggagttccttggaatgggctcctccccctggggggatgcaatgttccctactgtgtagggtttggtaactcaggccaagtcaggcagcctgtttcttgagtgtttaaaataatgaag

SEQ ID NO: 138749 - DNA, 427 bp, Homo sapiens
agggatatggcacagtctatttagtcaggaaattatgactgattgctcctatgggcaaattcaatcatactttgtagtaaacttcctataaatgtcacaagtaggattcaccaatggaagtcttcttcaaaatgctaccttataacaggcaaaatatttcctaattgaaattttgaattaatgtgctttgtattcaaagtaacaaattagccacaaaatatgcaggtagctcatgttcaaatctaaaaaagaaagggacattcatgagctaaataacagcatgctgacccccagaatctacacagtcctcatctcagatcacctcacagcacctaaaagaattagaaaagtatatgaaaagttactacatggggctgggcacggtggtctgagctgagaccatcgtgggggaacctcagaacgcaca

SEQ ID NO: 138750 - DNA, 747 bp, Homo sapiens
agggatatggcacagtctatttagtcaggaaattatgactgattgctcctatgggcaaattcaatcatactttgtagtaaacttcctataaatgtcacaagtaggattcaccaatggaagtcttcttcaaaatgctaccttataacaggcaaaatatttcctaattgaaattttgaattaatgtgctttgtattcaaagtaacaaattagccacaaaatatgcaggtagctcatgttcaaatctaaaaaagaaagggacattcatgagctaaataacagcatgctgacccccagaatctacacagtcctcatctcagatcacctcacagcacctaaaagaattagaaaagtatatgaaaagttactacatggggctgggcacggtggctcacgcctgtaatcccagcactttgggaggctgatatgggtagatcaactgaggtcaggagttcaagacctgcctggccatcatggtgaaacccactctctactaaaaaatataaaacctagctgggagtggtggcacgcgcctgtagtctcagctactcaggacgctaaggcgggagatcacttgaatccaggaagtagaggttgcagtgggccgagactgcgccactgcactccagcctgggcgacagagtgagactctgtctcaaaaaaaaaaaaagttagtacatgggtcgggtgcagtggttcacacctgtaatcccagcactttgggaggccaaggtgggtggatcacttgag

SEQ ID NO: 138751 - DNA, 349 bp, Homo sapiens
gcatttcagttactgcatcagcgagcatgctctgcaaatggcaaatcattctgatagccaggtaaaaggacaactgagaacagtcaactttctcccctgtcaacatggtatcctccgtggtctgcttcctggtactccagctacagttcccagagcatcgtgctcactcccacttccacacctttgggtgtgccatttctttctgcttgaaatgactctcctgactcgcctcccaaactcctcctattgactttccattctcagctcaaatactttctcttccacgaagcctcctttgacttttatagtcatattgagacatgcttcctatgttcccacggtgttttat

SEQ ID NO: 138752 - DNA, 473 bp, Homo sapiens
cctcttggatcatgattttcatcactttcttgcggattggcggacctgttggtgctgagagtaagaggtcttctgtacctgaccattgcgtttcttagtaaaaccaacacagaacagatgaagcaaataaccattagtggtcttgacattaacatgagcttctttcatgatctaccagtttttggccatggaactcattttgtcacaggtaagatccatgcaatggaagttaggtcgtttagcgcctcaacatcctcagtagtcagcttgaatttttaaaatgcaatttcatcattctgcagatcagaaaggttcacctcaaatatacacaacacttgaggccatcagatataattttggttccttgagtcctggtgactagtgtttctctccaatatttcttatactgaacacagcacgtgctttcatatcatatctatcttttttagaaagtagattaaccacttctttgc

SEQ ID NO: 138753 - DNA, 411 bp, Homo sapiens
  misc_feature (141)..(141): n is a, c, g, or t
taaggaggagcgagtggtgcttggacacaaggatgccactgttcttatctcctccaatttgggaagtgcccagcctagaaaggtgagggtcccatctgggagaccatggagtacccccaggtcacactgagcctaagaacnttcaaccatcctgcaggtcaaaacccactgataggtctcccaaaatgtttggggtagggggaagaaacatagggcattccaggtctgtaaccctgcaagagagagactcaaactaatatgtctaggtctggggtgaaggtggggggcctgtctggatacctcctccctcaattgaagggctcgttggaaacataggaacccactgctctctgggactctggaaagacaaattttctttggcaaacggaacagtgtcgcgctgtcgacaga

SEQ ID NO: 138754 - DNA, 388 bp, Homo sapiens
ggcagaagcaaaggaagtgtgggagggcaccttcccaacggaaggtaaaactgccattcaggcaaattagaacacattcaaaccacagaggataattcatcttctcctcattcagacctagagctcagagtgataagttccatttcattatcattactaatttttatttatttctttttgagacagagtcttgctctgtcgcctaggctggagtgcagtggcgcaatctcagctcactgcaacctctgtctcccaggttagattctcctgcctcagcctcctgagtagctggaactacaggtatgtgccaccacgcacagctaatttttgtaattttagtagagatggggtttcactgtgttggccaggctggtcttgaattcctgac

SEQ ID NO: 138755 - DNA, 418 bp, Homo sapiens
tagaatccatcagggaagacatgttaacaaatagttagaagtgaaatgagtgttacaaatatgcctgtataaattagggtgtccaatacctggtgggctctcaccattgcaggctctcactgtaatcccattgcatcttcctaattttctgcaacccctaagccgtacctcttttcctaggagttcttcctatttcagaaaaaaacagtcatgcatgaatgaactctctttgctttctcacctcctgctctgccttagaagaaaggcaccatgtctctgtttagggtgatccacccccttgggctgcacatgccatccctctttgctccaaggaggcctggcttcatcactttccttttctcttttcctgtgtcttcacctcttcaagtttgcccccagttctcctttcttcctaagt

SEQ ID NO: 138756 - DNA, 425 bp, Homo sapiens
gagcagaggagggagatgatctgactcagattttaacatgctctctctggctttcaggttgagaacagactgtgagcatgagggagcagctactgcagtagtgttgatggtgtctggtctagaggtgtggctgtggaggtgagagaagttggtaaattttctgttttttaaagtagggtgattggattttttgatgcgaaaggtgaaagagaggagagtcgtggatgaccctaaggttggtttgtttttgctgtagctggtaaaattatgaaaatgccatcaactgagatagagaagttggcagcaggtatgatttttagtggttatatcaggagttaggctttggtcatgtttaggttaagaggtctcagttgtcatcttagttgaggcctcaggaaaacacacaggtttttagttctggggaa

SEQ ID NO: 138757 - DNA, 185 bp, Homo sapiens
tctgatggtttcgttactatgcagaccttcccatgggtaatattaccatgatgagccttcaggctgagtaactgtagggccggccacatggggaaacccttgacttcaactggtgatgaattcaacaatgtcagtctcagcttgcccaactcaaagagatttgggctcaaacttattttgggatc

SEQ ID NO: 138758 - DNA, 170 bp, Homo sapiens
cacacattttcttggggccatattattaaacattcttgaagcgactggttctaggctgttttgttctgtgctgacaattgcaatcgctagaatgtgaagacgcaccgggagagccctttccaaaccctttggagcaaatgaggaagagaaaggaagggagatgcagagaa

SEQ ID NO: 138759 - DNA, 164 bp, Homo sapiens
gaagaaaaaaaattgagaattcagattaagtggatctgaatatgggaattcccatctaaaggtatgtgtaattaagttgaaatctattaagaataattaaataacagccttcttcatgataacaacatttgagttgcactttcaaactcaatttctcgttgtaa

SEQ ID NO: 138760 - DNA, 548 bp, Homo sapiens
tttgagaaagaaacaacagcatggcagacacccccaaaatgcgtttaacgtgcagtgaaatctcccatccccactccattcccaaaccatgaggtttcagcagcagataagcgtattattcatccatgaattctaagcaatcagggtggtgtctggcatgcagaaggtgctcagtatgcactattgaactgaactttcagatacctgatagttcactcattatagcaagtgataaattgcagtaaatttccaatgaatgcctgaacattgctattttaaattgttgatgagagaggaggactagagagagaggtgcatggagccaaaccactgttttgttgtgattatgttggcacctgacttgtgttcttgccattccacttattcagagaggctcagggaaactcgaagtaggtaaaaatatgcttaaggagagatgaacatttatatgaagtaaggggaaaagctggggttttggaggatacacattcattttgatgttgagctttatcattgactacatatataaacttcagaaagtcactaag

SEQ ID NO: 138761 - DNA, 689 bp, Homo sapiens
aaacaggtatacttggcatgtatagagaatattctcccaaatggtggcatttgcagtacaagtcagctaagattgctagtgctacttagaagtctcaagcaattcaagtgtaggattaatctcctaaagctggaattggatcaaaattaaaattgcaaagccacaggctaagcaatgtcaactctcaaactgtggggctgctgaggctcccaaattgccttccagagaaatcaaagagcattctttttcatctaatggttggaaatctctttcccaacaggtaggggtggggtaggtctccaaattaaggaatactggtaaataaatctcagccatctctttcagcatcagggggaaaatgcaaataggatttttatcattgtaaaatttatatttgtgaaagccttgttcaatcgactacaatttccacacacacaaaaaaccacatgtaagaatggctgccaaatagaaataaaaataacagctaacctctttattagtgctttgtaggtgccaagcacgatgataactgcaatatatgcactaagcattctctcatttaattatcaaaataatctcctaaagtaggtattttctttactccattttacaatgtggaagtagtacagcctaagagtggattatgtaatcactatgttaatgctgccttctcccatccagaagtgcca

SEQ ID NO: 138762 - DNA, 382 bp, Homo sapiens
agctcctgaaaaggggcattcagtacatactgttttgtatcttgcagtttccccttaaaaatatatcctgggggttgttctataccagtacagaaagatctactttggactgggtgggattttgacagatgggagataaggaagggtttctgacagagggcacagcctgggcaaaggcctagaagggagaccttggacttgtttacttatccccagaatgttcaaatttgagtcttccttgaaaccaaaaggaggcgatcttagaagaaaatctccccggagtggggagagagcaggcagaactcgccaagcccagaggaagcctcaagctatgccctgagttccatgtgccctggttctactgggcttggaggccggagct

SEQ ID NO: 138763 - DNA, 244 bp, Homo sapiens
taggaagtttaagaccagcctgggtaacatagtgagacctcgtctctaaagaaaaaaaaaagaaaagaaggtccagttatgaggcgtgtgcatttagaaaggtgcagtcctgagtctgatgctgtccaagcctgatatggcctagaagtgactctgattgaagaagacatgtctgaggactagagatggaaagcctgggagcattgcatttgacagtggaacatgtgcttgtcaataagaaaaa

SEQ ID NO: 138764 - DNA, 408 bp, Homo sapiens
ccacccccaccacctccataaagtgatcctgaaaaaaatagtaaaatccagcattgtgaacaccctaccattaattataaaagacgaacatgtgaaagaactctggggtgagcggaaaagaagctagcataatcagctttctaatgttcttgttatacttttacttagatctgtgtgtttctacagcaacatgtttctaaattgctacctcaattcactgaaaaataaacattcagcaagtctcttttttttctggagtgaaaaaacaacaacaatatttgtttaagatgtaagaaaatatccaaaatctatttagatatagttttgtcagaaagaatatcacaaaatagaagccaatattccatataaactggcttaatacaatatgctattctataaaacccaaaa

SEQ ID NO: 138765 - DNA, 453 bp, Homo sapiens
catttgtgctgctgacatttaaacatcagatttcatttaaattatttcaggcttttcttgaaaggtcaaagcctgggcaataccaaggccacagtacaggaaagctctagtgctggagctcagtagtgactgtccctgtacaagggcccacatgttccgatgaccagacatgccactgctccttttggtcttgtgtggtcctgggccacttcagtcgcatgtgtgtttagatggcttactgtacggaagcacttagcagagtgcttggtgcagtgtgttactgttatattagctgcgcggtccgtgtaggccctgcagtgggtgatatttggcttgatcctacagcctgacagtgttaggagtcttcacaagttccggcaaaacctggttgcatgctgcatgttaagttagagggaagaagccatatatattacacacgcagggtgatggagg

SEQ ID NO: 138766 - DNA, 343 bp, Homo sapiens
atatccatcttagggtctcttgctgagcctgccctggttactccacataaaacctcaatcaatatcggagaaaggaaaataaacagcaactttttcaacagaagcaagtttttcaatggaatacagtttcattggaatatggaatactccttttatctaaacaattaaaccttaaagccattaggcaaagcagagcaagacaaggacctacactagggcaggtcgccccagaggggatatcacagctggcatggaaagaggagtgggtcctggcatggcatgaggagaccaggcctgacagagagaaggcatggggtggaagagcccacaaagggtcaggagg

SEQ ID NO: 138767 - DNA, 123 bp, Homo sapiens
acagagggacttgcagatgcaaagatcccaaggctggtgtgggggactggggggagtgctccaggaacagtgggaggccagagcagagtgagccagggaggggcagatcaggtgggagctaga

SEQ ID NO: 138768 - DNA, 135 bp, Homo sapiens
caccaccacaggggaatccctcagcttctatggtaattttgaaactaagagaaaataagacagcatgagaaggcattatgctgctttaaatatgacttgggaatggtcttactttacaatcaaatataccacttg

SEQ ID NO: 138769 - DNA, 359 bp, Homo sapiens
cggacccaccggagggttgttactctggcctagacatacaaaattacttttatgacccactaaaggggctcaacccattatttgaaaaacattgctataaggatcccagactcacctctgtctcaagtatgggtgaggagaggatgaacaccagagaagttaaactatttccaagttaacagctgggttatctgttcttaaagccatgggacaattatggaggttcaataagtagctgttagaccatctaggcaatacctaatgtaacaggtctggaaactgctggcctgatcaccttgcgtaggaactatagctgaatattttgagtagcttctgctattaaaaagactgcagaataa

SEQ ID NO: 138770 - DNA, 764 bp, Homo sapiens
ctcagagcacctgaatgggtcatgcagtcccgtcagcatctcagggctggaggggccctctgaggctgtggcctctccctgcaacttcctgtaggtctctctgtagcaccagccaagaagtcacccgcccccgctggcacagctccagtgacatggagctcactcctcacatggcttgctctgtccttgcccagcccaggcgtttgggaagttctttctgaactctgtctccctgcagcttctaccctttggttccagttctactcattggaaccatatggaacaagttaagcctccctgagaattggtttcctcacttgtaaaatgggcatgattgtccctgccctcctgccacataacagaggctataatgtgggccctataacgtggccataaggtggaacgttatccagatcctcctgggcttcagctaggaatttctgtcctgggaaaccagtggggaccatcccttatatgacggagggcagagtttgctgagaggattggcttagagtggggactcaggctatagccagggcaagggctcaggctgtgatcgaaaccagggctcatctgtgaactttcgttcattctgggagagggcgaaggctcagtctgaagtcaagatcagggcttaggcttgagccaggttaagggttcggtgtagggttaggatcagggctatgtaggatttggaacagggctcagtttatagacagagtcagagatagggtaagcgttcattctggacttaggataatggt

SEQ ID NO: 138771 - DNA, 338 bp, Homo sapiens
aaaagctgtggtttgaagtaagaacatattatagttttgtaagacaatttccagttggtataatgagaacccatataatctaattgcttaaccagtaacattcatttttactattatataatcacctatgttctaagtacatttttattaaatacagttccaatacagatattaggaaacttattttatgctactgtaatactagaacattgtataagtgctcaaatagttttgtcagggcaattcccttccacgggaatttaaaaattatttgtgtcatagatgaatgagaaaactttaataataatccatgagacaataacacatacacacacaca

SEQ ID NO: 138772 - DNA, 361 bp, Homo sapiens
gttgaatcacttaacaccaactcctcctgttggaccttgcctacctacctgtgcctgatttaatttagctgtttgaaagcaaagaacttgttttatttttctgtatggtaaagaggataataacttacctaaggtcacacatataaatagcagaggaggctttgagtaaagatgtggctcattctgaagttcatgggaacggaagaaagcatgctctcctaagaggcaagaaacaaaatgtaggcactctactacttaccttgtcaccttgggaaaatacatttatcctctttcagggaaaggactacctttctgattcccaggccaatgccctttctgttgaccttcttgggtttcattt

SEQ ID NO: 138773 - DNA, 160 bp, Homo sapiens
cacggactcatttttatttttgtttctctgaataatacggccttttccttctggacacttgaagtttttctttttaccactgatttttagcactttggttatgatgtgccttgatgtggttttatgtatgtttcttttgtttggggctttttgagtttct

SEQ ID NO: 138774 - DNA, 376 bp, Homo sapiens
catcttgaacacaaaccctgtttgtgtgtcccctactccccagtttgatgtgccaggcactttgttctcaagcccagcagctgttgtgggatgaggggacattttgcatgcttagccagcagctgccagaaacatttctaatctggttttggcaggaaatagggcacaagtggaagccaagttaaaagaagctggaaaaataaacagaataactttagatgtcacttaatatatggtccattttcagccgaagatttgccctagtaatttgttaatatgactggactgtgatcccttccaaaggcagggttgaatatagtcacctttgagatccaggatgtagtccagtgcttggaatatgcttgtaggaggttat

SEQ ID NO: 138775 - DNA, 508 bp, Homo sapiens
tcagtagaaggcaccaatcaccaattacccaagcaggagacctgttagcccttcacttccaactgatgctcctaaatccaaaatgatcccaatgaagtgactgcctcagggatccttttgtctatcctgcccctccaaccccactgctgatttggggcactaacctctccctgactcccctgttccaggactccacgagcaatttaactggaatccctaacgccagtcttaagactttttaacgacagctccaaagtggtctttcaaacacacaaaaaagctaatcatgtttctgtttaatttcctcactgacaggataaaaaccaaatgactaagtgtggcataaaaagtcccacttgggaggccgaggcaggcgggtcacttgagagcaggagtttgagactagcccgagtaacatggcaaaaccctgtctctacaaaaaacaaaaattagctgggcatggtggtgcccgcctgtggtcccagctacccagtaggctgaggtggga

SEQ ID NO: 138776 - DNA, 148 bp, Homo sapiens
caaatgtgctctcctagcatactgtgtctccttcatgacacaaaccatgaagggttcttataaggattaaagtacttatttcacagaaaataatagcttatttattgagcccttatttgctagtcactgtatgggcagctttatgtat

SEQ ID NO: 138777 - DNA, 302 bp, Homo sapiens
aatgtcttatcagcaaacagtgctagggcaactagatatctatgtgaagaagaataaagtgagaactctaccttacatcatattaaaaaattaactcaagattgatcaaagacctagatgtaagagctaaaactataacaggcttagaagaaaacataggtgtaaattttcatgaccttgaattaggcaattatttctttaaaatatgacactaaaagcacgaaaaacaaaagaaacaataataatttggacatcatcaaactaaaaatgttgtggctcaaaggacaccatctataaagtga

SEQ ID NO: 138778 - DNA, 881 bp, Homo sapiens
aaactgaaactaaagacgtttttgaaaattcctagacggcaagtacagatcttagaattagacattgccagagctagaaggaaccacagtcatctcttgcctaccttcttaactttggaaacagtctgaggttgaagaagttcctgacttgcccaagattgtatatgtaactggctaatgacagaatttgggttagactctagtgacttggttcctaggtcagtgacaatcttagcatgcaactgcatgcagtcttatgtgacatttcatcctggtaacagtataaaattggtaagagtgaaatttgaaatttaaaagtttctggtacccatagttgattacatgttggcgcaatatgaaaatggaaaagatagctctatactatggcactattgcacatggagtctccattcgaagtggcagtcctgacactgagatgttttcattctcagtcctaaacttttctactagctgggtccttggtagttttaaaagacaagagagaaaaacttaaaagtacattttttaaacctttcttacagactgttgatttgagtttttgtttacaatgaggatattttagggaaagaatactaatctaggtagtgaattgccataagtataaaaactgttgacttggaagaaaagtggttatgttgtccttaatggtttctgtttaaggcttggagagaagtgcttttcttaatatgtactgcaccaggtaaaggtacaaaaatgtattcttgagtcttgagaagaaatgtggttgatgtaaacctaattgtttgtgaaacgaatggttattacctgttcttgcaaggaggtgatcccatgatggtcaaggaataattttggaggagacgtttaactttaaaaaaaaa

SEQ ID NO: 138779 - DNA, 326 bp, Homo sapiens
agaaattgctccagccacctcagggttctgcaaacaccacccttctcagtctgcacccatcaacatctaggcaaggatcctccaccagcaaaaggatttggacttgctgaagacccagatgattgttagcattttttagcagtaaaatatttttaattaaggtatgtatattgtttagacatagtgctattgcatatttaataaactgtagtacagtataaataataacattaatatgcttctgggaaaccaaacaattcatatgaatcattttattgctatggtctcaaaccaaacccacaatatctccaaggtatggctgtaca

SEQ ID NO: 138780 - DNA, 450 bp, Homo sapiens
tgccaccacctccctgaagtggctcacaagtcctcagcctccgccggagccccaagtgccagactcccccttcagccgcacagcctgggcactcggaccaagctgccaccttccctgtgcttgccggggccaggtaggacacgtctcacaacagagccttttccgggggcgcccttctgcagtgattcttgcagtcctgcactctgctgtgttctgctcacaccaggcaggggtgagagggagcgtggcccctctgggaagctcccaggacggcaggggtgggtgctgccctacagatacagtacctgctgcgcagggaatggacgcctcctggacggtggccccagcccaggaatggctgggacacccactccagtcttgcccacagtctgcttccagaggacacttgcccctgcctctccccacccccaccacgccctgcatctcgca

SEQ ID NO: 138781 - DNA, 276 bp, Homo sapiens
ttgtgacacatcggacaagacgtctaggatgcaggtgggtccgtacgtgtctgcggcatgagagagaagactagactgaagataaggatttgagagtcattcaaagtcatatttgaagtcatcagagtgattgagatattcccaagagtgaaaatctacagagcagaagacacagtctgaggaagttcagctgtcatgcatgttattgctgttgtctctcgcatcacggtttctgagctctgattcgttctctttggctctccgggttccggtgtc

SEQ ID NO: 138782 - DNA, 322 bp, Homo sapiens
ttgtgacacatcggacaagacgtctaggatgcaggtgggtccgtacgtgtctgcggcatgagagagaagactagactgaagataaggatttgagagtcattcaaagtcatatttgaagtcatcagagtgattgagatattcccaagagtgaaaatctacagagcagaagacacagtctgaggaagacaacatgtaaagcaaattactgccgttctcatcgtcaacctctctcctcccctgtatggaagttgataaaactagtttgtccatcagcagctgagcaagcagaatcacaaaaaacttttaacaaaatcaggaagct

SEQ ID NO: 138783 - DNA, 319 bp, Homo sapiens
gttgcccaggctggtctcaaactcctgggcttaaacgatctgcccacctcggcctcccaaagtgctgggattccaggcatgagccaccatgcccagtggagagccttcatctttcagaggcaaagcctggtgggttttgtgtagaaatgacgtgctgagatttgttgtgggacagttctgaaagtgggtggagactttggcaaaacaggattcaccttgagctgataattattgatccaagaggtagaatgtgtgggatttgttacatttttatctctattttatttgcatgttagaaattttccatagcaaaaacttt

SEQ ID NO: 138784 - DNA, 536 bp, Homo sapiens
accacaatgcaatataattagaactcaacaagaaaaacataaacctcccataggctgagaaactgaaaaacatactttgaaatcattcaagagttaaagaggaaattacactgaaatttatgaactatttagaactgaatgataaggaaaacacaagcagtttccaaatcatttcccctatgaagtcagccctgaccccacatggctcctcagatggctctccaccctctacccatttctacgccctaggaggctgacgtctatgggctgcagcaacaggttcccttgttcttagcttctgggaggattcagctagtgggggaaacctggccagagatcagacggagggagagagggaggagagtgaggcctcttacttgccccctgtccttccctgtatgattgctgtgagctgggtatgcccctccaccttaggccacagcagcgccctcctcatagctcccactttcaccattccttccccacactcctgcagcctggggttgacagcctctgctcttgtgagccctttggtg

SEQ ID NO: 138785 - DNA, 405 bp, Homo sapiens
gggacggcttcgaaaactgcctctgaacttgtctgacaagtacatactgtccgtttcatgggaaccaacatctcagagatcccacacaacgcttcctctttagagaagaaaaacacagcaaaacaacacaggcagcctctgtttaaacgcacgtggcccccccaccccgcctggaagcctctgcacgtggccttcatctggaagcctctgtatttaaacacatgtgggcctcctccatctggaagcctctgtatttaaacacacgtgggtccccatcccccgtccagaagtctctgcatttaaacacacatggccccccatcccccatccagaagcctgtgcatttaagcacacgtggtcccccgtctagaagcctgtgcatttaagcacacgtggtccccggtc

SEQ ID NO: 138786 - DNA, 350 bp, Homo sapiens
cctcaagctgttgtgtttgatgcttgcctagtcataccttgcagagacctacaaagtcaaaggcaactagcctcttcagaaaagtatctttgcccttggtactcaccccaccctcaatctgatccttgcaagattccctataattggctaccttgccattcctggtacgatattctctggaccactcagtcccaaggctggacttcttcagcaggctgcacctccctaaaaccttatatccattttactaaacaaaataactcctctaactgccaacacctccgatgtaacctggtgcatatttctattactacttcaacctccactaaccatattcccaccctaagtcg

SEQ ID NO: 138787 - DNA, 264 bp, Homo sapiens
tgcactgagctgcgaagtaccattcctaaagccccagtggcccaatttggatctctaaataataggcgtgtctaaatcagcttttaaaaaattagctcttgctcattccaataggtgctatgtggtgacataccagagacctgagtctgacccaggaatacagacattgaaagctgtctgtgttctttgaataggcttctttatcctgatttgttattgtattaactctttatagtatacactctaggcattttggcagcatcc

SEQ ID NO: 138788 - DNA, 251 bp, Homo sapiens
ggtctcgaactcctgagctccagtgatccgcctgtcttggcctcccaaagtgctgggattacaggcatgagccaccatgcctggcctaaaaagattttaaaagtaagaaaaaatgtcttttactttatatgttttccatttctggtgttctttattgcctatgagcggttccagattctcatctgccagattttcttcagttttttctcgtcagttcagattttctttctgccagaggacttcctttaatg

SEQ ID NO: 138789 - DNA, 221 bp, Homo sapiens
agtacccaagtacaaaatcactcaatttgtaacagaggaaacctttttgttctgcatcgagttgaatgcattgcctggcagaatattaaagtgcaagaaccagtttttcttgctctttacccctgcaaggattgatcagcacatgaaggtctccttgacttcaaaggcatttctggacttggatcagcctgattgagttcagaagagaaggaaacactagc

SEQ ID NO: 138790 - DNA, 176 bp, Homo sapiens
agcagttggtggagagcgcttctgctgttattttcccacattatcacttattaatggtagcctaagtgacacagcagaaagagcctgagtcaatagctaagccactcaccagctagctgtataatttgggcaaatcacttcacctcctttgtcttcagttctctcttcagtaatag

SEQ ID NO: 138791 - DNA, 342 bp, Homo sapiens
aggaaaaggaatacaaatcagtgagacggagaagcgctgagtgagagagacggatacgtggagagaagagggatgccggagcgggtgttaaaagagacaaatctggccgggtgctgtggctcctaatcccagcactttgggagactgaggcaggcagattgagctcaggagttccagaccagccaacatattgaaatcttgtctctaccaaaaatacaaaaattagccgggtgtggtggtgcacgcctgtagtcccggctactcaggaggctgaggtgaaaggatctcgcttgggcctgggagggtgaggctgcagtgacccgtgatggcaccactgcgctc

SEQ ID NO: 138792 - DNA, 796 bp, Homo sapiens
tccattgccttagtgagaattttaactcatctttctcagtaattgactgtatcagtttgcttttggtaagtaatacaccaccccaaaatttagatgcttaaaacagcaatcacttgttagctcattatattgtgggtcagaaatttaaactgggtttatctgggtaattcctctgttgatcttcactggggccgtgcatgtttgatggcattgctcacgtgtctatgagtttaccggagtgatagatatctggcccatatttatcccattatctattaagttaatggaccttgttcatgtgatggaagatcagaaaagtagcaaggaaacaaatgttaatgcacaagcactttgcaagcctttgcttgcatcacatttgctaatgtcccactggctgaaaaaggtcatatgaccaacctggatacaaggggtggaagaagagattccattttttttgatggacctgctatctcatttcaaggatatagattcaggtgggaaaatattttgtaaccatttttatagtctacatattgatagagcaagaagacaaaaaaattagtaaggctctaagaagttttgaactatacaaaaagttttgtatgctttatatataaaacttatactctacaattagaaaatacaaaatcttttaaaatggacataatacacctataaaaaataaataatatacaaagctaaaaaattattctcagcaaaaaaccaaagaactgctcttttataaaccccattttcaggccaaaactcagttaagctaggaattagttacaagata

SEQ ID NO: 138793 - DNA, 229 bp, Homo sapiens
gtatagtggtgcctgcctatagtcccagctactcagtatgctgaggtaggaggattgcttgggccctggaggtcaaggatgcagtgagccatgatcacacagctgcattccagcctgagcaacagagcgagaccctgcctaaaataaaatataaaaataaaaatcttaatctcttctttggacccatgtagtgatgccttatttttgtctctcagtgtcccttcaccca

SEQ ID NO: 138794 - DNA, 420 bp, Homo sapiens
tgatgtggactaaatgagataatccgggtgaagtgtttagaatgatctggcacagggcaagtactgtataaatgtcaggtactattattagagactatttaagaagtaataagaagccatctagaaggcaggaaataaaacaccaagttcctgtttcccacgactttactcaaacccctagaaaacacttcctcccaccttgttcaagtgagctcaaattcttgggaaaacaacaagtgggtataggaactccagggctacatctatctccttcttcagcagcctggcacctctccatggctttaatctctctctgcagctggtaatcgacatgttcatagcctccttatttttcagtctcactagctctgccggggtgtttgtatgtggtgcttcctatctcagttgagataaaagacg

SEQ ID NO: 138795 - DNA, 424 bp, Homo sapiens
gtttcctctctggagtattgtgtggttttccacagatagctctctattctggggtatgctggggtggcaatggacactcctacaggctgacagtgaccttcctgagccttctcatcacatcagactatctaggatgtaaaggacccactaagtcgggtactaagaattcaggttaataatctagaggactgaaagatcctctttagaaacattcatactttgtatatgattaaaaaggaaaactagtgatatgctttggctgtgtccccacccaaatctcatcttgaattgtagctcccataattcccacgtgtcgtgggagggacccagtgggaggtaattgaatcatgggggcggagctctcctgtactgttctcatgatagtgaataattctcactagatctgatggttttataaagggga

SEQ ID NO: 138796 - DNA, 471 bp, Homo sapiens
acaaaaaagaatcatatatatcccctatcctttagctcctagacaaacatttaaacagttgatacaatgatagaaatctatacagggtaactgcgagtccataaggatggtagagtagaacagtattgaaaacttgaaactctatccttgagctcaatcttgaaaatgagtagatggtttgtaagaaaagacacaaagaaaggtattcccagcataggaacaaaggaatactactggcctattggaggactgtgagtagttcaggctaactggaggttggtgggagtatagtaagagctgagactgggaagtcagcagaggccacattaaagaaccttggggacaggcacggtggctcacgcctgtaatccctgcaattttggaggccgaggcaggcagatcacaaagtcaggagttcgagaccagcctgaccaacatggcaaaaccctgtctctactaaaaatacaaaaa

SEQ ID NO: 138797 - DNA, 140 bp, Homo sapiens
cgtgtgacaagtgacatattccttgatatatcttctcaagacattttctatctgtttctgttggaatcttcctttgattacaagttggttattaccatctatagaaccacttgtacccaattcagccaacaaaaatgcac

SEQ ID NO: 138798 - DNA, 327 bp, Homo sapiens
cttgctcctatcactcaggaaattacaaaggtcttagacactatgtgtcaggaaatggggtcaaggaccaaatattagacctgaaaattatcccagtcgccgctttaggagctctggttcaaagactggggagactgtgtgtttgtgtgtgtgtgtgtgtgtgtgtgtgtgtgtgtgtatgcatatgcatatttcttatttcacacaagcaaagatttatataatttgaatgctttatgaagggtaaatgtgaatataaagtttgagggaaaacaaacatcttatttcaaattggccaatttttgtgtggtatacatgagagggaga

SEQ ID NO: 138799 - DNA, 387 bp, Homo sapiens
tcagagggtaggggcagggaaagaaagctattggttcctaacattacagcacacaccacaaattaatttcatttatgagaggcagcaacaaaaagaaatcaatatccagtctaatggggaactggactagaaaatgcaacactagatactgctggaatcctggcttctgcagacaaaattcactttaaatgctgctcttctcacaacaaaccaagttagttccctctccagaccctaggaaatccacttacaaaactgcaaaatagcaccagattggttattagaaaaattgggttctgaacctgccctggtagaaaattgtgggcaagtagtttaatttctttagtactctccataccagagtttgttaagttatggctgggcacc

SEQ ID NO: 138800 - DNA, 362 bp, Homo sapiens
gttcaatttctagtccagttccccattagactggaaattaatttcatttatgagaggcagcaacaaaaagaaatcaatatccagtctaatggggaactggactagaaaatgcaacactagatactgctggaatcctggcttctgcagacaaaattcactttaaatgctgctcttctcacaacaaaccaagttagttccctctccagaccctaggaaatccacttacaaaactgcaaaatagcaccagattggttattagaaaaattgggttctgaacctgccctggtagaaaattgtgggcaagtagtttaatttctttagtactctccataccagagtttgttaagttatggctgggcacc

SEQ ID NO: 138801 - DNA, 553 bp, Homo sapiens
atttgtatttaagaaaaataacaaagaaatcaataaaaataatcaaactccagatttgtctaacagcttgctttgttaagaatgtaatgagatcccttcaaatcacgacaaaaaaaatgctacattttttaaatagtgtaaaatctgtctaaaatagatgtctgacattttttcaaatttcgtatcttcatagaaaccaagctcaaaggcactgactcatttcctttacacctaaacatattattaagggcatccacagtaatgtaaattgttttaaattaatgctatccaaaatacgcaaatgcatgttcttactcaacagctcctttcctaatcagcaagcattttcttccagctactgaaactcaataaatttgaatttgggtttcagtcttatacaaaagaacttcatatcaatccatctccagaattaacagtgttgcagttagatgagaagtatacatttggctttgggacccagaatgcacaaacactgactaactgaattaacaggttgattttcatccacaaatgaaagtgttttatgctcaat

SEQ ID NO: 138802 - DNA, 293 bp, Homo sapiens
tttacttgaagcaatggtgagatgctgagccagaaggtcatagtcaacctgcagtaacccctcatctaataagtcactttaccaggagttccatccacttacaacacagctttgactctggtattaatcaaataaagtttctagctgtcccccaaatgttgagacttaatgcagtgatgctgatagtgtccccagccctccactttcactgtcttcctttctttaaagcagcaaatggaaggagggagggaaggtggagacaaactacagctgatcaacaccctgtccatacg

SEQ ID NO: 138803 - DNA, 389 bp, Homo sapiens
aaacatcctcagaacgcattttcataatgtattatttgaacttttatcgtttgtaagaacagagtcaggtggcaagccgtgaaatgaggcagtcacaatgacggactcttaaaagatatcaattcctgtaagcacatgacgccctgcactgcttaacctttctgaatatgtttgtctttaaataccagaaagtaaatctgtcaatgtgtgagatcatcagttttgatcaaaaaatttatcttggactaaatattcatatttatttaaacataaattagaaatgtagagaatgctggctgaattggggtgatggtggtggttgacattggaaaaatacctacattttagctgtttctaggtaccgcttattaataagttacattggttgt

SEQ ID NO: 138804 - DNA, 296 bp, Homo sapiens
aattgggatctgctgacagttgactaggaataaggtcctgcaaatgttggagggagtaggaactggaaaggaaagggacagcaggttggaaagctgctgatcagactagctcaccgtctcgtgttgcacaggccatattctgccttcttgtttcagttctcatactgtaaacaaatgttcttttcctttttctttttttttgttctttttttagggggtggggaaacagggttttgctctgtcgcccaggctggagggcagtggctccatcatagctcattgcagcctcgatccct

SEQ ID NO: 138805 - DNA, 474 bp, Homo sapiens
ctgaaaatttagtaaggaaaacagtgctacctgtcatctataatattatcctagttgcctataattttaccactatcattgtttggggaaatccttctggtctcttgtctgtccagatgcacataagtccttatggtcttttatctatataaatatacacaatttttgtatgaaaatggaatcattctgtacataccattttgctgctcttttcactcagtgatgcctggaacatttttttttttttttaagacggtctctagctgttgcctgggctggagttgcagtgagccgagatttcttagaaggaattgttacttattgttctgaagtgaaagtctggtctgattcagaagaaatgttacaacaacttaaacactgatgctttcagaacgggcagcaattctcagcgtaaattctgatcacagggaccagcaaaattggtgagttgcatagctacaacattctgtgcca

SEQ ID NO: 138806 - DNA, 359 bp, Homo sapiens
ccccttgttatgcccattatttcagattgtatgctttttttcccacagcacttaggtgtaatcatgtattttatgcagtttctttatagtctgtcactcccattgaaggacacagactgtgtctctttagttcactatcgtatatctaacacctgtaattgtatgtgccacatagtagacattcgttaaatattttttagtgaattaatgtgcagtgattttaagcaagtattagttgaataacgttttacatgtttaatgatgctgcatacgcattttccgatagtgtctaccacggtttatcacagaggccagtgtgggctctcacatgtaataaagctaatctgaagttaatttgc

SEQ ID NO: 138807 - DNA, 144 bp, Homo sapiens
gcaatgcaggtctgtaaactggaattgtaaaagtgaagtggcccaggtcccatttgttgtagtggtgcacagagagacagtcttgagaggtgaggagacatttcccagaggaagtaacatccaagttgagacttagaagacagc

SEQ ID NO: 138808 - DNA, 258 bp, Homo sapiens
acaggagacagcttgttgcctcttccacgggcccagtggccaggcgtgaggctcagcaccctacccacatcttcctgccttcctgaggtcaggagaagccccagcaatgtgtgcttcagcatgggcaccactcccaggcctggcccctgaagcccccatgccaatctcatgctctctttcccctcaaaggtagagcagcccggagataaaactctccgtgcaggccgggcacggtggctcatgcctgtaatcccagca

SEQ ID NO: 138809 - DNA, 693 bp, Homo sapiens
agtctcgacggagactctcacacagaaaggaatggaacatgtggaatcacattattttgaggcaggatgggctgcggagttcttttgatccggcctgccttcaatcatttctgattatcaaaataagaaagttcgacggagactctccactcaaaataattgagtggagagatcaaggtacaagacactctgcctttaccttcaaagtctgagcaaatatgattttatatcgttttaatcagagattcttttaaagaccaagttactgcagtcctgtcttgttcttctcctattttatactgatgtgctcagtaccttggtgtctttgtctgtcttttagggggaagggaacccacgttttggactagagtagcacagatgccattcttacctcactgtaggtttctttaaagaatgtttagtcctgacaatgcgatgcagatttctttctctccccactctatcttctcttgcagagctttatccctttttcattgttcagcatgactgggaacctgccagctcgccacaatgaaacataatgtttttgcgaagtgtgtgtcaaatgtcgtgagcttagaagagattcatcgtagagactgctgcttaatgagtgtaaattaactgatcatttgctaaatctgatgtgcccagtggtgtggacgggagaatgctggataggatgtaggagat

SEQ ID NO: 138810 - DNA, 321 bp, Homo sapiens
tttcctacacatagagaagggtaagacaagacctcaagtaaatgaagtcagtgagtaagcatatgatagtatgcttatacttactgtcacggtttctttagacctgtttaaaccattgagcaccctggcatttggaccaatatgtgattttatagctggtttacttagcaagtgaaaaacagattagactaactacggtttactgaacgatatactggttaattacactctagtggttctgcagacaagtaggctttctaaaacttggcatgtttcttcttccagtatgttccttccttctccaaaataaagatgttttta

SEQ ID NO: 138811 - DNA, 158 bp, Homo sapiens
cccctgactgccacacagtagccaagaaagcctttgaacataaagcttcatattatgttgctcacttcctaatagctcatcctccaataacttcatgttgcccttaaaacaaaatctcaactcttttttttttgagacggtgttccgctcttgttgcc

SEQ ID NO: 138812 - DNA, 556 bp, Homo sapiens
aagtgtgttgagctccttatagagggaaaaacgtgtcatgttaagggagttcatttacaaatataagtgtgaatggatgtgcttagaaaagttcaaagtaccacacaaattcattgcattgagaacttatgatcctaggcactgtgtaaaaacccttattttcaggatggttttacgatgtaggaaagggaagaaaggtaaatgttctttatgcaaatgcttacaatataaagtcaaaagtaacagacttaataaaatacaaaatggtgaaggagaccagaaattttccatggaggaaaatatatttcaatggaatatttaagaactatagaaatggaagaaaagaaaaaccattgttttaaatagactttctaaattactgtctttaattttttttcagttttcatataacaaaaataatttgtaaatggtaatgttaaataacaattacagggagtcattgttttggactaagctcctgcactaggtcctcaatagatcagactaaaaataaaaatgaagtcaccaatgctcaccaaaccaaaagtaagttgtt

SEQ ID NO: 138813 - DNA, 192 bp, Homo sapiens
ggccaaggtcctggcacatgtcatcatgtggacatctgtcttcatttctcttgggagcagagtggctggctcacagggaggtgcacgtttaactttctaaggaactgcagccgtcttccacagtggctgtgctgtataccctcccactggcgatgtgggtgcacgcagggtgtccgtgcatgtgcaggagta

SEQ ID NO: 138814 - DNA, 259 bp, Homo sapiens
aaaatattgatgacttttgtgtagtaattgagattttcccccgttttcagttcgattttaatggtaaattttgtctctagtggactctgcacatagatataaagagtatcattatttgataaaacaaaagattgtatgtattaatggtagaccatgatacatcgtttggatttaattacttactaaaaactcaagtttaagtaatatttcagtgtaaatttacttagcaatgcttacaaataaaaaacaattatgtact

SEQ ID NO: 138815 - DNA, 534 bp, Homo sapiens
cccatgtgcagctgtggtatgaggggcacagttctgtggggtgacagatgcatccatgccttgaaccacatgatctagattcaagtctgtttggggctgactgaatgtcaggcacattaggcaacctccctgaagctgagttttccctattaataaatgggatctcaaaatctccacaaaatcatttcacatattaaatgtaagatgtgatacatttgctcatgtaaacataggggaaaattgtgcaatatttagaccctgatagagtttggattttttctagtgtcaggatttgccattgaagcccacaggaggggactaacaggatctggattctattttaaaagagttagtaaatattttaggcttgtgggtcattgcaattactcacctctgctactgtagcagaaagctgtgcggggagagggaaggaggtggatatgggacttatcgtagccatcgagacaagagatggggccgccagcctaggagaagtagcggggatgcagtgcaggcctggcgtgagtcctggag

SEQ ID NO: 138816 - DNA, 355 bp, Homo sapiens
gttgtctatatatacaaaatgtctgatgatagctgagaaaaggatttaagttgacaaaatctttgaggagctatccacaaaaacacagtgataagaagtgtgtacaagaggaatgaagtgaatgcatccaagttgaaagtcagttatgttaaaatgattaaaccagctagtgaagaaacctatgccaactacattaacagctcaccgttgatatgggaaatgggtgactggaaaactccttttcgtgtggtaccaacaaaaacagctggtctgaagaaaataaaataaaacaacaaacaatttatcagccagcagaaaaaaaattaactctagaagtaggaagatatagtcagga

SEQ ID NO: 138817 - DNA, 342 bp, Homo sapiens
attatacaacctcgatcagcctcagacgcctaatggcggggttggaccctgttctgcccacccacgtgacgatgcccgcagaaccgcgcgctgttccagttcctcctgtcacgacagtggcctcgggggtgctgggcctatttccccatccctgagcagggtcatgagtggtccccacaggagggagctggccccagccccagcccagctgccaggagggggccgggagacgctaatggcggtgacagtgatgatggcgaccggtgacggcagcacgccccagccccagggaacactccgcacacggtctcaccacgggacaatagccacgcgaggtccagc

SEQ ID NO: 138818 - DNA, 228 bp, Homo sapiens
agaaatctgaatatttggctcttcttggaaaaccaggagatatgggaaatctgtactgactccaccatattgtctccccaccccttaagagggacagacctgcttggtggccaccagaagtggaattatgaaggccacggccatatgattctcaagaaaccctggctactcacataagccactccagaccatgatttctgtcttctctgtcttgaggtgcctacctgt

SEQ ID NO: 138819 - DNA, 199 bp, Homo sapiens
accctctttccctacaccataaaggtatctctattgatttctttatctccgtagtgatccacgtccccctctgcactccccacatcaaatcccagccaaacgtccatgatggtcacccaacaggtgttctagaggtatcatgaaaaacaatacattaactctttgtaaccaggaagtcagggcttccatctgggaggga

SEQ ID NO: 138820 - DNA, 216 bp, Homo sapiens
aaaaaatcaaagaaagtcactctcttagctcaggatggtgtatttgcaagtgtttaggccaaacatgtgttgagaaattgcacatatactgtgtacaactcatgtcatcaggaacttatgttaccaaacctcttgtttcacccactatcttatcatctgtattgagcagactaagacctagcaaaccagatgagccttcaggagatctgcagactg

SEQ ID NO: 138821 - DNA, 679 bp, Homo sapiens
ttttgggaacgcgggacgggcgatctgcggcgccaggagctgggccgaggcgcggcggcgcggctgccggctgccctgtgaatgggaagttacgcgaagtccacccagcgtttctgaggcaatctgaaggcaaatcctgtttagacccaggcgaaggttcccggtgacccgggctctcaccagccaattgtcccttgccgtcctcctgagggtgcctggagcttaagcactgtgtgctcttggcctccacactggggatgccgctgactcccactgtccagggcttccagtggattctccgaggccctgatgtagaaacttccccattgggtgcaccaagagcagcctcacatggtgtgggctgacatcaagagctgccagatccaacaggtaaaaatcccgaggcattgccagctcagtggggtcagagagtcctctttgtattatgactcagatgtgaagggaagatgtcaaggtccctaaacatcacagggccttgcttggcatgcaacagatattaaataaatatttgttaaatgaatgaacaaatatccacagcatgtgctgcccatgagctgcagtgccgtggtcaggtagaagtgattttacttcaggagaggacagtgttctctccaggacttttccttactagctagatctgcgtcccgaaactgagaca

SEQ ID NO: 138822 - DNA, 401 bp, Homo sapiens
catcatagagcatcccccctccggcaggttgtactccaggagcttacagggattcagactgacaagaccgcactgctcatgaggggtaaactggagagactgtgaaaggtggcatgtcttgtgccaaggagctcaggttttatcccaaagacagtaggaatcctgtgatcagattaaagggaaggggaagggttcatacagtctaataacttttaaaaagtcacttagttgcccacactagggaatgtactagaaaagatagaagcaaactggttaccaactgcctccaaggagacatggagcccaaacttcaaaaacacctttgcatttcccaattcaatactatagaatcattaaaaagctggtggttaaaagttaaacagtgttgcattcaagcttca

SEQ ID NO: 138823 - DNA, 223 bp, Homo sapiens
tggaagtgacgttttaagagatttgatggcatagctggggaggaaatgtataggaaatgattggatcattttctcgggtttgatttaatacattgaggccccagggaaaagagctgcttgtttcactccgcgtctgtagctaagttcccccaggaaatttagagaccttctgcagggtttttggaagtgttaatctaacatacagtaatggtgggaattgagc

SEQ ID NO: 138824 - DNA, 231 bp, Homo sapiens
tgatggacaggaggtgcctggctgtgacaagtacccactggggataaggggtaagggctcccccaggctggaagggaaacttgaggggtcactctggtgagcccctgtctccatgcaggctggactgctggaatggaaagtggtctagggagaccgtcaccatccttggggagaccctcaccccctgcccgtctgtgtacaggcagagtgctgccagcccagggacatccg

SEQ ID NO: 138825 - DNA, 128 bp, Homo sapiens
ggcattttttctttgattttttttcattatcaatcatatttgattagtaagagagaaaagatgttggaactttaatctgcaattaaagataccattttttaaatgaaaaatactgttttaaaataaat

SEQ ID NO: 138826 - DNA, 494 bp, Homo sapiens
caggccatccagatcactatgaaccttatcagaaacttcagtccattttctccgttcccttccctgggacttgcatgctataatctccatacccctccttccccactctccaggcttagtgggtgaggcagagagtgagagccaggcttacctgccttttctcctcagtgggaagaagctcagtaactgagctcagacgctagtggcatacctaccaagaggatgacataaatgcctcctgtggccctgagataggcagagctctgctggcagcccaaccatatgttcactcgttcattaacaaacatccacagaggcaggctgctctggcctggagggggatgtcctacactagacgactcaggttcatagagccaggcctcattccacccccactggctcaagtgactttctggtgaccagaaactggagagctcttttttttttttttagacggggtcttgctctctcgcccaggctggagtatactgaca

SEQ ID NO: 138827 - DNA, 512 bp, Homo sapiens
tattaatattaccttatcactgttatgatgataatgttatagcattgaagctgacttaatgaatcgatcatatctatatacttgcaggggaataattggatggagaggtggggagcaggaatctgtagtgggaagacactttcttcccatggaagtaaaaagaaaattcttttatagaaaatggaattttcaaccttcagagatcatgtgatcaaatgacattttactaataaactgaggcttagttacttgacttgtataaggtgacatggctagttcatgtcaaagctggaactagaagctaatccgtgttctacgctttgatccagggtatcatggtgcagttgaaagaacagttgatttggaatcaggagaccagggttcgttgcctcacttcattatatactacttcaagcaggtctcttaaccttgaaaatgatgctctaaaatatccacaagataaagaagctttctttcctatctaccatgtatggtagggggatcaaatatgt

SEQ ID NO: 138828 - DNA, 450 bp, Homo sapiens
tattaatattaccttatcactgttatgatgataatgttatagcattgaagctgacttaatgatggcaaggatattatttacttcaatgatttatcttagttattaaataatagctaaatcattatgctgccttccaccctgagtgatactaagatgagtaagccaagtgggttagatttctctgggttataacctgtcatgctgacactaagtgttgtcacttaaactttttattttcaccaaagggcttcagtcccatcacaggatacctcttttgctcttaggtaagtggattcttgagggaagctgaagttgtaggggattttattttatttttttattacagaccacaacctgttaatcttaagacctgaaagttgctggagtcacaggaaagcatttgagctgaaatgtttaatttgcttatgattcaagttagtggtacttaat

SEQ ID NO: 138829 - DNA, 287 bp, Homo sapiens
gggcgcaggctgtcttggcggctgtggctgagccccgggcgtcggtgtggctcttggagccctgctccccatcgcgcatcctggcagggtctccataacctgtcatcctcgtttcatcttgatttatgatcagacctaatgagtttttggagcagctgtctcccagggatgtggcgatcaatctaggagatggctgttgaactttgctcctcccttcctcccttccttcctcctttccttccttttctcccttccctccctttcctccatctcccagggaaacgagc

SEQ ID NO: 138830 - DNA, 417 bp, Homo sapiens
ggctacttgtttcggctctacttgtctctcggctctagcttgtctctcggctctaccttgtctgtgtcctgccttcctgggacacagactggagagagactatgaactcgagatcagaatttgtatggactcttgggatcttgagagaaaaaaagagagccttcaggcaacctcctaagagccacaaaggaagctgcagctgtgagtcctggttggctgagaccagcgtgctgccttctctggatctgagtcttgcctgcatcatgaagcggggccaggaacttgtgttcacttcactctttttcatgtctagttctttttcagcccatatcttccccttcatctcctggggtttggatttgctggtttgggggctctttttttcccttcctcactcatgaaacatggtagaaagat

SEQ ID NO: 138831 - DNA, 348 bp, Homo sapiens
ccccttctgcctcctaggcagaggcatggaagaaatgaggggttgctgggagaggccattgttccatggcagaggctgcaggacccccagctccccattcttccccactagctgaggatgaccatcagatgcagagcaggatgacccaggcctgggggtgtttctctgtccatggtctctgggctgggctgggttgcaggcactgattcacaggcggttggtcagagagggaaagaccttagcaaccatttattcccaaccttcttttttcccacctgaggaaactgatctatccagaaaggttaagtgatctccccaaggtcacatagccagtgtagggccaggact

SEQ ID NO: 138832 - DNA, 321 bp, Homo sapiens
ggagtaagggagtgatctggggcctcagttcccttctgcttggcagttgtggggcttggggcagctagctagagtcagcccctcaaagtccttgccctttctggttcgggagctaacatcattgtgtgtttgggattgagggagagagtcaccttgttcagtccttaggacccacactcttaggaagggctgcttattcttcccgcctggggcagttactcccacctttcctgatgcctctggttgccaggccttgggctgggcaccacagactcacagatgtattggacacggttcttggccttcaggagtccatcttgg

SEQ ID NO: 138833 - DNA, 278 bp, Homo sapiens
aaagatggaaactttctaatactggggttccttatccagggctaatttatcctttaggcatagtaaacgtgtgccttggaccaagatacatataggggtccacagaaatattttcatttttatttcttttaaatcagaagtagtaatgtatatacatgtatgtaatagcaaacctatacagtattttattcgtgtttatacagatgtacagaaaatatagtcataaatgtatagaaaatataatatttaatagtttttgtggagtaagtgccttacaa

SEQ ID NO: 138834 - DNA, 185 bp, Homo sapiens
tgtgtgtgtctgatcacagatgtgctccattgtcccagcacacttcacttaaaaaacacaggttcaaaggccagactgttaagaatttcaagatggcgacagcagagcggctgtcacaccctgaagctgattctgcctgtgccatagcaggacgcatgctctcaaattccatctcgtaccatctg

SEQ ID NO: 138835 - DNA, 485 bp, Homo sapiens
gagctccatttcccatcactgtagaagatccccatcaacactgacaccttgcatctcaatatctcagctctcttagcttccactggttcttccattgtgcctgcctcatttcctttgtataaaactcaagtttcagtttacagtggttgggaagacacagatggactctgcatagaatcaccacatctctcagacactagcccatggttcctgaaacagacttttccctctgaaatgtgcatttcacctctttgtctgagataaaattatccaaattcccttagttccttccaataaaacaggcctataaggggcccacccaccagccctccagccattcctgatacaggtttacgctagaacacctattcaagaatatgccaaggctcaaccatatgcctcctcttcttttctttatttttaatgagtaccacttgtctatgccacagtagtccccagcttcagttagcctccacagcaccaca

SEQ ID NO: 138836 - DNA, 280 bp, Homo sapiens
tggtgtagtgtaaactgagtaagcactttgcagacttgaagaagccagtgattatttactatttgcactaggcgaaatccagccttgggtgtgccctctgcagtccctgccgtgtccgtgcatgttagatcagaacaacttcctcaagtgtattagaattagaatgttaagaaatcaagaaagctctcaaggggtgatgtggccccctttttaattttaatcacagattaaaatgctatcgagaagaggaatttgctccaagagaagagggatttcacag

SEQ ID NO: 138837 - DNA, 546 bp, Homo sapiens
ctagattggggattttaattgagacagatgatgtttatcgggcatcccaccacctgagagttttagcaacagagtcacatgtgagtccatcagaacttacggcattgattcaagtgctgtcataaataaccaggactgctgtttttggttacttttaaagacagtttcatctggactttctgggcatatcctccttcagcaaaaccacattaggctgggaaaactattctgcctggaagtaatgacaacttgcaaccaacaagcttataaaaatacaaagaattctggagcctatggcttccattacattattcttttatagccttttatgttcattaccgcatcccagaggtgagagtcagacacaaatatgaaaataggtttcaatgttggagaggtaaatcctaacaggaaaggggtaggaaaagatataatcccccaatattaaaataaagatattgaagaagaaggatgggagagactagggctgtgtccttccttttactcaccaaaagagaaagtaagctcctatttgagtcaatagat

SEQ ID NO: 138838 - DNA, 400 bp, Homo sapiens
ttttgtgcaggggggtgccgcccatatggctggtcgttatgagagcgtatacaataaaggagggtgaaagtttttatttatttatttatttattttttgagacggagtctccctctgtcgcccaggctggagtgtagtggcaccgtctggcttattgcaagctccgcctcccgggttcacgccattctcctgcctcagcctcccaagtagctgggactacaggcgcccgccaccgcgcccggctaattttgtttttgtatttttagtagagacggcgtttcactgtggtatcgatctcctgacctcgtgatccacccgcctcggcctcccaaagtgctgggattacaggcgtgagccaccttgcccggccaaaagcttttagttttgacgtaaatcttgt

SEQ ID NO: 138839 - DNA, 363 bp, Homo sapiens
aaatgcatttatatagtcttactttgtttctttcattgcactctataatgatttttaaattaagaattttttatcttaggcaaagtgtgtctctttcaattcattaacttattaattttataatgcagttttatttttggaaacatataaatatcagactgtccttaattgaaattttgtctttggtttccaacaccatgatgaagctcttgctttttaaaaagtagttagtaaattctgcatgaattttagtaaactttaaaaaatagattttttccctaagaaagaatgtttgtagaatttaaagtggacagatgcctgttggagtaaaatcaactgcaactttttgatgttaattttttt

SEQ ID NO: 138840 - DNA, 300 bp, Homo sapiens
gctaaaactatcagtgaatctacagccacattcaattaagggagaaagttccccgagcagcatccatgaaaacctagtggatttgacagttacaggccagtagtacattaagactgactcattccccagcataagactaagttcacaacctcatgaggacattgctctcccctgaaactatattcaccaagcagcaatcatttttagttatatctacctatacttaaaatactggaaacagctattttggaaatgggcataaatattttattatttactgctaacttaaaaatcagttgt

SEQ ID NO: 138841 - DNA, 143 bp, Homo sapiens
atttttttcacaacttgattccaatctgtgtatgtagattcacataaattttctgaactgtccaaagtctgctcaaatatgcaagattggtttatcattagaatatcagttaatttaatccatcacattaacaaatttaaaag

SEQ ID NO: 138842 - DNA, 414 bp, Homo sapiens
agttcgacggagactctcatctggtcagtatctctttcttagcagtattggcatttgaccattccctccccttcttgaaacactctcttactgtggcttccaaaacactgaaaaccttattggttttcttccttttcacctatttcttctctgtcccctttgcaggtttaccccttcctactagctattaaataataagcttggttgcaggccatcttattattttgtctatgtaacatcccttaggtgacctatttcatatgtatggctcatacatacatccccacctccctacttgacatcttcacttggaaaactatagccagatttatgatctttcccacccaattccattctctcttaacattccctttcttaatgtagggaatgttaagagagtctccgtcgaactgg

SEQ ID NO: 138843 - DNA, 342 bp, Homo sapiens
ctcaagtcttggtctatgaaaagaaactgactctggaaccagaaaatttactatcgtcctgtccctgttgttatatattggctacatgacctcatcttcttctatttctttagttatcaaatactagatttgaatgatgatagccaagaccccttctagttgtaaaatctgcatggtgctatgccctagcactgacttcccttccttcctttttataaagcacaggagaaaattaatctcatcacattttagattatcttggcatatttggcagttgagaaactagtcggctataccaaggctggtggtttgtcagtaaagctgatctgcatgggtggacaa

SEQ ID NO: 138844 - DNA, 577 bp, Homo sapiens
gcaccttggaacgcagtagaatttactcactcagaccccatgaaaccctgaatgtggccctcagttcagaatgaatgaataccaggcattcccaacaacctaaagaaacaattgcacatagccagtttgagagctgtgattgtatagaaagtttccatgggcaataagataaatgggtcaccctcatggataacttctttctttatctgataaactggtaaaattaatatgattactgaaagaaacactatcagtagtacatggaagagtaggagaaacataattttacatatgcgacagcttaaattctcttacctttctaaagctgttggttttcaagttccatatgcaattgtagctttttatggttagtatactttttaatcttcagtaagttatttcacaaacatggtatataatgtgtttcatatacttgaagcataacaaattaatacaacttgtttcaccatttagtgtaaacagatgatcaaattaagctgagtcatgggtataagggtattaatcatattgtcttatttcatttgcatgtttacagtatttcacaagttgaaaatga

SEQ ID NO: 138845 - DNA, 188 bp, Homo sapiens
ttgtggacagtgggcatgtgtttctatttctcttggataaatacccagaaatagaattactggatcacaaggtaagtgtatatttgactatataagaaactagaaaacatgtctaaaatggttgtacccggttgcatctcaacctcatcaagagttctagttgctgcctctcctcagcagctttgcag

SEQ ID NO: 138846 - DNA, 321 bp, Homo sapiens
gactacaggtgtgcgtcaccatacaaatattttctatttcatattttttgtagagatggggttcaccatgttgcccaggctggtcttgaactcctgggctcaagagatcctcccacctcggcctcccacagtgttgagattacaggcctgagccaccacacctggctcctccttcttatttgaaggctgtattcgctttccctcatttatttcaccagtcccctgtttactgatggacagttaggtggactctcatctttgctcttacaaaccaggctggaatgaataaacttgatcacaggcatattgcatgtatctatg

SEQ ID NO: 138847 - DNA, 208 bp, Homo sapiens
tggctgtctagaggatccctatcacaatgtcgtattgaaattttgtcttgggtttttctcttcaaagtaaaggggaaaaggaaaaaatactctgacaaatcctagctttagagtactctttcaaaacgtatgtttccccctataattatgtccatggtaaaatatagtccagtactcccctgactcgtgcatcgtttttgatttggtc

SEQ ID NO: 138848 - DNA, 488 bp, Homo sapiens
gatccgcttgcctcggcctcccaaagtgctgggattacaggcgtgagccactgcacccggccaggaatgattcttcataaaacagaaatcagatcatgtcattccttggctcagaaccctccagtggccttccatctccatgctcaattgaagtcaaagcctggctgccatggcttgtgaggccccagatcccactaccgcaccactcccaccacaccttctgtgcctctgggaccacattccctactaaccccccggctcaccaccttccagcccactgacctcaaacatcaactacatgaagctccccctcctcggggcctttgcacttactgttgtttctccctggaatctcttcccagatattcctgtgactttctcccctcaccttcttcaaggttttaatcaatgtcactttaccaatggggccctccctgattatcagatcaaaacttctaagtccctgccattccctttctgcacgaaga

SEQ ID NO: 138849 - DNA, 244 bp, Homo sapiens
gagcatctagacccaacgtttttgtcaattgatcagttaataacctttttaaatgtgtgtttctgtttaaaaacaccttagttaatatatattgtcaattcattgacattgaactcatggccatggatactgtaattcatgccttagcgaagcttatcaaggacatgttttctctgaggcacatcacagccttctgtgcttggggacactaggcaagcacttcagtgctagggagcattttaaa

SEQ ID NO: 138850 - DNA, 396 bp, Homo sapiens
gtgatgctggatgtttcctgttagcactcaggaaagctcagagcctttgatgagcatcttttgatccattagttaaaaccacgctgggttctttatagtggttagttagctctgggctatgggattgtggaagacatttatttcttctttggattcacctggattttctgcaacggacatgtatcgataaaatacatggtgcttttcagaaattgccccatcatcatgttgctgtagttgttattgatattgttgtttctgatggatagagatctaggcctgacactccaagcagtgtgaacagcatttaccttgataagcattcttacatcttaaccctcgggaattttaaatagaagtgttccgtgtgattaaattaacaggtttagagatggg

SEQ ID NO: 138851 - DNA, 201 bp, Homo sapiens
ttaattataagtattttacttaatgatgattttaattagacttctaatcattgctcataaaaaaaggaatttttagtgaatgtgtatttaaaacttcctttaatcccgtccttatcattctttgaaatattttatctctgtgtataccagcaggggtattattggcgtttggggagggagaattcttcactgagcataact

SEQ ID NO: 138852 - DNA, 367 bp, Homo sapiens
cagaagacattgggacatcaggctaaagtgagagcaggctcttacccagcaagacaaagccagagctggctcctatacaaagggaatttaaagcttagtaaggaagcagggctgactgctaatgtggaggatggatgaggaagatgtctctgtggcttgatataccaaactccacagagctcatccagagagattctggagagacagagtcctttgagtattctctgccagacctctgccaaaaactgagaccaagtcaccatatgctgcctattacaggggtaattcacatgaatgccatgtgaactaatttcttgccatctcttcttgaccttgggcaagtcaccaggtctccatgggttttgtg

SEQ ID NO: 138853 - DNA, 99 bp, Homo sapiens
aacagttcagggataacaacaaaggaaaacatgcttttatgaaaccagattttctcatttcctacaacattacaggcactcgtttaaatatttattgct

SEQ ID NO: 138854 - DNA, 437 bp, Homo sapiens
ttttccagctcgggaactaacaattgtgagcacttcctttcccccccaacagaagaatccagtgtatgcacgtgtgtattcaatctgccttatgcttaaatttctattaaccatttgattaccaaacagattttgcataaaccccatgaggcaggactagggttcagattgctgcagcccttatggtgcaatggtaggttccaggattcactttccaaaaataaattcaggatcaagttctacagcacagccctggccaaagccctgccccatacaggcctgactctgcacaaaccagggaacattactcgagggtagggcattctccagtacactgtgggtaccacctgcttgcccatgattactgcaaatgagggtagtccatgtccactcccatcaggttttgctgggtggtgccatattgtcccctgtagaga

SEQ ID NO: 138855 - DNA, 243 bp, Homo sapiens
aatatcatactgttaatataagaggtcatctgttttgtattagttctagaaagctttctgcacctgaaaattacagtgttcatttcagttagttcatgatctgtttttagaatctcattatgttcatgtttgagaatatatatgattaaatatgtcagagatagggagcaaatgtttcagtatctagaagtccttaaatcctgagtcttagtgatgtggaagttcttccactaaaaaaggtgg

SEQ ID NO: 138856 - DNA, 457 bp, Homo sapiens
ttaaccgcagccatgggttggtatgtcccatcctgggttatctatacagcacaggtgaaagccaaaatgttcctaggatgaccaaacgtacaagagtagcttgggaatgggaaggagagaaggagagaggaagaacaaacaacatagatggagaattctgtggcatagggcgcaaagacagcaggaacaaccaccgagacccccacctctgcccagagccatgggctacatgaatgtcttctggaaactggagacggcatgcatatcaatctctcaccagtctaaggataaaaaggcttaggccaggcacggtggctcacacttgtaatcccaacactttgggaggccaaggtgggcagatcacaaggtcaggagttcgagaccagcctcgactaccctgtctctactaaaattacaaaaattcgccaggcgtggtggtgcatgcccataatcccag

SEQ ID NO: 138857 - DNA, 692 bp, Homo sapiens
gtttaacttttattttagtttttctcgattgttgaatgaacattctttctcccagtttccaattatgttatctacattgaatcactgcttgactccatttccatatttgtagtgttagtccctggtaagacaataaacttccttataagcaaatttagaagcaattatttaattcaagcttgcacaattttctcgagtccagcacgagttgttgccacatctaacaatagcaaagtaaaggttgcaatgcttactagtgatgatttcttgaggaagaaaaataagtcttacttaacaatagaaaccttttttgtcttgctgcccaagtcaccaattttatataggggaagtagttaaaattaactaattatgacaattccagggtaaattaatttcttagaaatgtttcagagaataatactttctgcctcaaaagtatgcatttattatgtatcaaataaaattttaaatttagagaacattgaagaaatatgagatcagagaaatcaaagattattattaaattacatttcttttggtatctcctgagatttctcaattatgcattacttgtattcattcatttattcatcaaatacaatatttatctaaaacctgctatgaccaagactgggtgaggaactggagacatagctattaaaaaaatagtatttatatttataagtgatgaa

SEQ ID NO: 138858 - DNA, 391 bp, Homo sapiens
  misc_feature (11)..(11): n is a, c, g, or t
acggggccggngcttctggaccaggcgcacttctaacttgttttttcattaattcattcagcaactgtttattgagcacctactgtgtgccaggggctggggcacatcggtgaatgagaacacgaccaccctgggagctgactggcgagggagatcagctcaggggtgcacagtgctgtgtctgatggtggcaaggactaggaagaacctaggacagggtggcagggacatgacagtggggcacagtgtacagggcagagtgagccatgggaggctttggggaggaaatgttcctggcagagggaatggcacatgccaggttcatgagaaatacacggtgtgtgtcagcacagtgaagaggccagtgaggctggagaagtgcgcctgggtg

SEQ ID NO: 138859 - DNA, 433 bp, Homo sapiens
attttattgtgtatcgtgaactaacaaaaatattgttctaattgtggtaaaatacacatcaaatttaccatcataaccatttttaagagtatagttctgtgacatgaaatatattcatattgtttagcaaccatcaacactatcatttctccagagttttttaaatattcaaaactaaaacattgcaaaaattaaacaattactcaacattccttcctcctccaagcccctagtaaccaccattctactttctggttttgactactctaggtacctcagaaaagtgaaattacacagtatttgtctttttgtaactgatttattttgcacagcataatgtcctcaagcttcattcatgctgtagcgtgagtcagaattttcttcctttttaaggcttggtgaaacctcatcacacgtacataccacattttgt

SEQ ID NO: 138860 - DNA, 380 bp, Homo sapiens
ctgactcgggggtgggggcccctctgcctgtcctcccctgagccccaggctgggctcactctgcacagacacatcagtgggccaggggtcaggcaggctgcctggatgagctggaaacattctagaaagaactttgagctgcactgggtctagtggttagccagctgttgacactggagcccttccttcctatagaatctagagactccctaactgttggggttgaggcaaggctgggggcttctgagcgaggaccactagggttggccctgggggtccctcctgaaccctcgtacccccgggggacagtttgaaagctgctggtcttctccacccttcatgactcctatggggagactgagacccagaggggcagggcc

SEQ ID NO: 138861 - DNA, 449 bp, Homo sapiens
tcataaataggcatttcaaaagagggaatttactgacatgagggtctgaatgttcttaacatgtaggaaattgaatctgctttctaaagccaggacggtactattacattatctgtgcagcaggaaactaagcaatgaagtgtccccgggtgggaacatcggggcctaggttggtggggtttgcacctcctttgtgctggtgccaagtcagagtcctgcatgtaacatttacgccggaaggacccaactgaagccggcacggggtctcttgccctcttttagacaggactgcaattaacagctctcactcttgcaaagtgatattcactttatttactatattagtgggaattaaaaacttttacaaacattctctgcttttgtgttacttttcggtggaagagagaatagggtgaggctcattcaccgagccctcggtggagaaggtt

SEQ ID NO: 138862 - DNA, 362 bp, Homo sapiens
tagccggccagattttctatgggtttggaggatagcattaatttaccaggtaaagaaaatctgaccttagcagtaaagtcatggaccattcagggaatggtaaataagtcatgcacctggaattgtgggagatgagcctagaaaaacagttatcctaaaacagttatccattaaggaccttgtattatctatttaatgaggaaccatcaaaagttctcatatagaggactgaagtgatcttctttatttttttacccatccagaatagtttacttggcacaaatggactagtatatgacatggagaacagtattaggctttagttagctttttgattaaaatctactcatagaaaatatctg

SEQ ID NO: 138863 - DNA, 130 bp, Homo sapiens
ggcggccagatattctatgcactaatatatatcatgcagcgaggaaagcagagtacagaacagtatctgctgttctgagtacagtatagaatggtatttataagccatacagatgtattacacagatgta

SEQ ID NO: 138864 - DNA, 418 bp, Homo sapiens
tgtggcaggagctgtctcctggtttgctgggtcagggccctttccaggaacagtttactgtgtcttatttagtgcttgtcctccacatctctagctgatggtagtgtcttcctgaattctaggcaactctaccaaattccaattgggtgatactagcatagataccctggctgaatttttctgggatttaccttcacttgctcatgtagccatggagatatttaaaataacgataatactcactggtagtctggtgcattatttaatttctaagattaaaaacaaaaaacaaaacaaaacaaaacacttgccttaaaatggccagagtcatacagtttgatccatgtgtgaggcagagaaattcctgatgacttgggcaccagacccggcccgctgtgtgattcagatctgtggaaac

SEQ ID NO: 138865 - DNA, 559 bp, Homo sapiens
atccctgtgaggtgctgcccaggtatccaacctgcagtgcacatgctcgccactggcactggggatggtgagtgcagcagagagatgggattcttaatttattcaattttaattaaaaaacacagttcagttgttaaaaacctatttaagtgtgtttggaatagcttggatatgtgaatttaccttttcaactgtgaattttatgaactctaaatacagatcaagtatttccagcaaaaatttagtgtcggatttgaaatgtgctctaatggaaactagacaccagatttcgaagacttagtatgaaaaaaacataaaatacctcagtaattatctgtattgactatacattgaaagaatattttggccacattgagttaggtgtcctatgttatttagatgcattttacccatctcttgtttttcatgtagctaccagaaaatgttaaattacctatggggctccccttatatttctgtgggacagtgcgagtctagacagtgccttacgggatccatcagaagcattattggactttctagggaaagttgctggact

SEQ ID NO: 138866 - DNA, 454 bp, Homo sapiens
cccttttctccctgcccaaccactagagggccaggtcatttaaaaaaaaaaacaaaacaaaaaaacaggctggacgcagtggctagggtttgagagtactgactctaattttgaaaggtctatggcagagagaaatgttatcaaacagtatcacattacagagaaatctgtggtgaaaggaagaatcaattgatgtggcaaatttcataggttgttactgccaccccagacaatcaccaccctgatcagtctcagcagccatcaacatcaaggtaagaccctccaccagcaaagattacagctcaccaaatggcaatttttcacaataaggatttcttaattaagatatgtacttttggctgggcatggtgaaactcttgagctcagcagtttgagaccagcctgggcaacatagtgagaccctgtctcaagacacagggaaacaccgggtacc

SEQ ID NO: 138867 - DNA, 435 bp, Homo sapiens
taaacttagttgataaagcagtggcagggtttgagagtactgactctaattttgaaaggtctatggcagagagaaatgttatcaaacagtatcacattacagagaaatctgtggtgaaaggaagaatcaattgatgtggcaaatttcataggttgttactgccaccccagacaatcaccaccctgatcagtctcagcagccatcaacatcaaggtaagaccctccaccagcaaagattacagctcaccaaatggcaatttttcacaataaggatttcttaattaagatatgtacttttggctgggcatggtggctcatgcatgcctataatcccagcactttgggaggctgaggcaggcagatcatgaggtcaggagttcaagaccagcctgtccaacatggtaaaactccgtctctactaaaaatacaaaaatt

SEQ ID NO: 138868 - DNA, 170 bp, Homo sapiens
ttgctgcttagcccatctttatctccaataacttctctttaatctagtttctgtaagagtttatttatctttcagatttagcaattaatgtgtgccagcatgcctcttctatcccatggccgttatcattagtcaatgaggcactcatttctgctgagtcaagaaatctt

SEQ ID NO: 138869 - DNA, 445 bp, Homo sapiens
ggcggacatagcgcgtcgggttattatccatgcccgttgcaattgaccgcttttttggccctacaaacatgaagcacagataattaaacacgcaggagacaaaaagaaaagcttaatctgaaatttgcctgtgtcatttgatttttcatgccttatttactttcataattatgtttgcctaagaagctagagactcatactgccatttactacaagcatttttcgagcgacctttgagtaaagggtgaggtggagagcagggaagttgcctgtgttgctttagaaaaaatattaacatctagacctccctctggaggttctgactgatggtgtccatggtacggcctaggtacttttaaaaaagttcccgtaaggactctgacgttcagccaaggtcagtgaccattgattgaaggctacctataactcgcttttgtttagttac

SEQ ID NO: 138870 - DNA, 426 bp, Homo sapiens
aggtcgacctagaggcccccccatcggcggttgtactccaccggcaggttgtactgtcttaagtattttacttgtattaactcatttgattttcatggtaacccagtgagatagatgggttatttattttagggatgaggaaactgaggcatagagaagttatttacccagtgtcacacagctagtaaatgccaaaactagggtttaaatccaggcagttcgactccagactggtctgtattgcttctttttcatgggagagttaacatgattctagttagtgttgaagtctacagtttctctattactgtgtccttagctctttaacttttacctcttatgacctttcaccacttgatctgatgctctcctgctttttaaattcttcctccttggacacatggtaatgtctgatagattgcatag

SEQ ID NO: 138871 - DNA, 473 bp, Homo sapiens
gcccaacttccatgttgcaggttctttatgtgtattgcctctgagccttacagcaaccccatgttaggataccttcatggtaacttcataaagttacccaaattttacagccgatggcagtgagactttgtgaggtgaagtgacttgctcaggttcacacagagaataagtagctaagctgggattcaagcaggttcccaaagcacctgccactctgtcttccttgtttcctgacgtttgcttctcactggcaaccgtaagggcagaaatctcccggtggaggattgaggaggactgtagttaacgatcgtcccctgggcctgtgtggacctacagcatttggtatacgggaacagggagggtgggaacacagtgagctttgaatgtggccagagggaagactgattctaaagttaacttgaacatgaacaacaaacttaggctctgttttccctttcagttaaaaacaaaca

SEQ ID NO: 138872 - DNA, 247 bp, Homo sapiens
acctagtagggatagaaatcacaatctaagtaaatctactcaattttaatttttaaagtcatgttgtaaatttctaacaaaaagatttcaaattcacattatcttattaatactggcatttaaaacattaagttgctaccttgaacccatctcacctcccaaataattttcattatagccataagttcatcaatacaatgctttcaacctaaagctaaaactacaaaggtcaacccttcttactcgt

SEQ ID NO: 138873 - DNA, 432 bp, Homo sapiens
cccttgtgcccagcagtcctgctgcaggtgagaccccggcctaggcactgataggcaggtgctggcctgacccctgagggtgggctgagtaaagtgtggaagaccccctggctggctgcagcccttgggccttgcccagctttcagtcctgcagtctgagatgccggcaggagaaaggaccgtttcaactaaaaggggcttgagggaccatctcatccaatccccgtcttgttcagcagagaaaagtgaggctcagagagtgccgggacatgggcaaggcacacatgtggcagggctgcctctgagatggaaattctgctgacttctgggatatccagcacctcctggggctcaccactacagcgcctcttcatttactattgcccatgaggagctggggcctagggagttttcactggcttgtccaaggcc

SEQ ID NO: 138874 - DNA, 262 bp, Homo sapiens
caagtccctgcttcagttcctttatgtacatacccagaagtagcattgctggctcacatggtaattctgtttaacttattttgaggaaccaccaaaccgtttttcacagtggttgcaccattttgcatacccaccaacggtgtacaagggttctaatttctccacatccctgacaacacttgttattttctgtttttttccttgatagtagccatcctaatggatgtgtgttcttagtcatgtatgttatgaagtacactca

SEQ ID NO: 138875 - DNA, 528 bp, Homo sapiens
tttgtccctttcagtaataacctctttggtcattttatgggataagggaaaacacacttttagctataaaccaccttctcttatgtcctcccactaagctcatctttttactcaactttcctccttccagccaaacatagcaccccttcttccaaaacggttctcttgcgctttggatcccacgcattaaaccatctagaatccctcacatccctctagctgccctttttcttctcctccccttcgaacatctttaacaagttgtaaacacttgttaccccccatttcctcaccccttggatcactccagtccaagctgcaaatccaaggtctgccttgcagtcctcacttaagttgatggcagcagcattccgcgtcagtcaatactttctgaaatacttttacattggcttctataatatatcacttctctggtttcccttaagctgctctagctgctcctactgaatttccttttctagtttcttcctcttctccccctccattagtattgaaagttcttttttt

SEQ ID NO: 138876 - DNA, 439 bp, Homo sapiens
gcctgggtccaaaagtatcaccagactccctaacattataaaggggaagaagcaaccaagatacttgtattaggaacttttcttgtgtgtttttaagctttttgccaataaatgcactgagtgccataaaaggttctgcaaattctcttaaaactcacacatgtcaaagctactggatcgtatttaacatgttactgtttgctccatattttgaaattcacagcacatgcattttaagaacatcccaccttggaacacccttgtacattttgaataaagaatagaatcagctcatgtcaggccatgaggtcttatctctcatctacataaacgttgagcttcaacggatatcctatttttacattcgttaaacttaaatcttgtgttaaaaagggaattaactgaggaggctgccacaggtgtcatcttaaatcttgac

SEQ ID NO: 138877 - DNA, 528 bp, Homo sapiens
gtctgagcggagcccctggaggtgggggaatggccttattctttgaacctcgcatccggcccagggtctggctcagacagagtgcacagagtgtgtgctgaggagggcgcaggtgcggcagccccttacctatgagccaggcctctgtaggtctgcccaagggccaccaccaggccccaggaccaaagaggaaggagactgcccgggtcctgacatctcctgagaagacagatgaccctggctgccagggcgcctgccaggtggcccctctgcccatccttcctccagctcccagcaggttcccagttgcagtggcatatggggggaggggcacaggtgatgagggcaggggacttacccggggggaactaggacattggccagagacaggctgctccttggccccacttgtggccctaattcactgtgtgatctccacaagtcactttgcatctctggtcctgtttcctaccctgtgcaatgtgctgttgcactccagcctggatgacagagcaagattctctctct

SEQ ID NO: 138878 - DNA, 118 bp, Homo sapiens
ggttgctaaatactgaaaattgataaacttttgtacctgccttcttaaaaaatacccacaggtcatggttcaggcatgatggagaaaggcacagaggaggcagaggacctgtgtttta

SEQ ID NO: 138879 - DNA, 1104 bp, Homo sapiens
cggcattcaaaggctgaagggccacctgacactccagaggctgctggaaatgcagggctgtttcatcctgggaaagcaaaagattcttcaaaatcaaactgtgtccggaattggtgggttcttggtctcactgacttcaagaatgaagccacggaccctggcagtgagtgttacagctcttaaggtggcgtttctggagtctgtctcttctgatgttcagatgtgttcggagtttcttccttctggtgggttcgtggtctcgctggctcaggagtgaagctgcagatcttcacggttgctagtaacacaataataaagctgctttattttccagtgaagatgtatgtgatagggagtggaggaagaaaaaggccagaaaattccatagttagcaaatatacctttcttacttaaaattctttttccaatgtgagccttctaaagagttactgagaaattaggtgagctcacctcatttaatgcaatagatatgtttctgaaaaataagcaatacataggacattggccaattaagaattttgatgaagaagaattttcacatccgaaagagtaaaaatgaaaaacggtacaaatgtagtggcttttaaatttcaaaacaaattattttgataagataaatattcctctcataaagtgaaaatggaagagactgcttgctgggtgttcgtcaaaatggagttagatggtctgtcccagactcccctgttgttagttctgagaacagaagtaatggtgcttcttcaggactggctcatagaaacctgccgtgttcagcccccacaatcctctcccttctgctggctggaaacaaatgacaacgaagcctcacgtcttggagaaaccacactgctgaggaactcaagtcctagaagaaccatttgaagagacccatctcactaaagaaaatcacacaagcaagaagtaaacttcattgtatctatgtatttaattgtcataacagtctaccttaactgatacagcaaaaattcgctccttttctggacacccagtttcaaaatctcagtgtcattttttacttctctcttttcaggttgtttaatataataaaatttgtgtgtgtgt

SEQ ID NO: 138880 - DNA, 821 bp, Homo sapiens
cggcattcaaaggctgaagggccacctgacactccagaggctgctggaaatgcagggctgtttcatcctgggtattttccagagagaagtactgagaagcttaaagtatttgaatgggaggaggagaagcaaactacagctacttcagaggataacactaaacacctagtccactctgtatacactagaggtgctgttaattttcttgtggagaaggaactgtctttagaaaaatatctcaaaaagccactgaagtagaaagtttcagcatgctgaagatggaacttgagaagatagaaagttctgggtccttagtggcatgactgagtcgctggaccactgttggaaccaccctatgtcttagtttttaaatctctttactgtctaagacatttttagtggaagtatttatctctggcatccaataagacctttaaggatttgcagttctaaaaaaaaaaaacaaaaaaaaaaaaaaaaaatttggggggggcccgggcccagaaaagtttttaaaccccttcggtgggggggggggcccctggttttattgaccactggcccaagaggggccccaagaaatccggccaggaacaaggggtggtttcccccaaaaaaagcggcggggaccgggggtctcggacataccaaaggggtgcggaggcttaccgggtcctacaaaggtccagggaccgatacgccgccgcggggggggggcaaacacacaacaacacaccacacacaaacgagcacaccacaacaacccaaaaaagcaacaacaacagagaaaccaaacaaccaagagacacacgcaagaacga

SEQ ID NO: 138881 - DNA, 861 bp, Homo sapiens
gagagatgagaagactttcgggacagattgtgtggaggctgtcattctcctcgtgacattgctgtgggagaagaaggaggcattccatgttggcttcagtgaagaacttcagtattttccagagagaagtactgagaagcttaaagtatttgaatgggaggaggagaagcaaactacagctacttcagaggataacactaaacacctagtccactctgtatacactagaggtgctgttaattttcttgtggagaaggaactgtctttagaaaaatatctcaaaaagccactgaagtagaaagtttcagcatgctgaagatggaacttgagaagatagaaagttctgggtccttagtggcatgactgagtcgctggaccactgttggaaccaccctatgtcttagtttttaaatctctttactgtctaagacatttttagtggaagtatttatctctggcatccaataagacctttaaggatttgcagttctaaaaaaaaaaaacaaaaaaaaaaaaaaaaaatttggggggggcccgggcccagaaaagtttttaaaccccttcggtgggggggggggcccctggttttattgaccactggcccaagaggggccccaagaaatccggccaggaacaaggggtggtttcccccaaaaaaagcggcggggaccgggggtctcggacataccaaaggggtgcggaggcttaccgggtcctacaaaggtccagggaccgatacgccgccgcggggggggggcaaacacacaacaacacaccacacacaaacgagcacaccacaacaacccaaaaaagcaacaacaacagagaaaccaaacaaccaagagacacacgcaagaacga

SEQ ID NO: 138882 - DNA, 527 bp, Homo sapiens
acttgaccatacccattcttgcatttgttaacatgtgtgttctgccctgcaaccacagccaagttgtagcttaattctaaagtcgaaaataacattatttacattattacacatgtgagtattgttcttggcgagaccaaataatgaatgtgcccaggattacatttccttctttacagatctggaccactcaaaggagaatgaccaatcaaggtcaaatggattcccttttcttagactctgtcacctgcttaaaatccttgctaggatttaatctacttcatattcaaaccttggcttgcttatatagctctttgttttgcccaccatttctagttgcctttttattttgtttactattcctccttgattatgttgtaaaatgctattagcagtgctgtttattcacgtactcctacaccccagtccccttctgtgagttggccccctcgaccacactcctgggccacatccagtcaacgccacaattcctctcccacccgggtacactctaggaacagctatga

SEQ ID NO: 138883 - DNA, 585 bp, Homo sapiens
acttgaccatacccattcttgcatttgttaacatgtgtgttctgccctgcaaccacagccaagttgtagcttaattctaaagtcgaaaataacattatttacattattacacatgtgagtattgttcttggcgagaccaaataatgaatgtgcccaggattacatttccttctttacagatctggaccactcaaaggagaatgaccaatcaaggtcaaatggattcccttttcttagactctgtcacctgcttaaaatccttgctaggatttaatctacttcatattcaaaccttggcttgcttatatagctctttgttttgcccaccatttctagttgcctttttattttgtttactattcctccttgattatgttgtaaaatgctattagcagtgctgtttatttcgtacgattcggctttttccccactgaagacctttctcttggaaggcctctgcccttctgcaatctgggcaagtatctgctctttgatttaaggttgcatatacagctgtacctggaccttctcctcactgggctcttgggttggagcccgtgtcttaaaacccatatcttcctttca

SEQ ID NO: 138884 - DNA, 770 bp, Homo sapiens
ataatttgtaagtttcaaattgcatgccattctgagtaatgtaatacgatctaatcttccaccatcctactccatcccacctaagatgtgaaccctctttgtccagtggatccagactgtatctgctacttgcgtgttagtaatcaaccaaagataacaaggcaactcttaacgtaggagtgcttttctgtgtaactcccttctttccagatctctgcccaacataggcagccacctcagcctctctgaattctgctccttttcctcaactcactgttatcacagttctctacctgggtttttccttcctaccctgcagccaaatgtagggtgggaaggaaggtttttctttcccaccccgcagccactttcttccaggcagaaagccagaatgatggtatagagttgaccttactggttgctttatatattttgtccagttttttagttgtacagtgggagggcaagcccattaacagttagtggcagtataagtcttgaagctaggattctaacctaaggccctggtttccatgtgtgaatcagtgttttatgccattctttaaaaatctatgattttatgtttcatataaattaaaattttgttcatgggatttgtagttgtgcagtatacatcacaacagaaacttgtagttttaagtgctgttttacactctgagatttatcagaattgagtaatagtacattaaatattatttccaaattatagcacttaatcacaaaacacattccttaaaaagtaaaacaaa

SEQ ID NO: 138885 - DNA, 158 bp, Homo sapiens
tcagaaccgagcaacacagccacatctagttgtaagagaagctgagaaaacagggaacacaggagtctaagtggcttagaccaatcatggttcattcattgcctggggctagacacattgctgcctcagaccagggtattttagcaagaaggataaat

SEQ ID NO: 138886 - DNA, 279 bp, Homo sapiens
tataaacttcaaaggaaagtcatgtggaaggggaaatgcacctctgtttaagtcttttcttaatctcttatgattaatttcttcttccatctgatgaaagaaaatgcaaacgaaatctcttatttggttcacagttgaagatgagttccagaaagccgcctttagaaagggaatctgttttgaacatatgaaaaccatctgagtcaagatgtattacatggtgattacagtctgacagatgttttgaagttgtaatgtgttcatcagaaagcacacaga

SEQ ID NO: 138887 - DNA, 459 bp, Homo sapiens
gtgtgaccaagctattcggttaacataaccacaagaatgggaacacttttatcagaacagatctagtttccaatatctacccacccactggggagagaaaaaaagtatggatctctagtacatcatgactctggcaggagcacccctctatgaaacagaactcttgggtcttttgaacccaaaccaagcatttcaagggaataattctgagtcagaacaaagctgaccaagaggctgccccgagccacggctcttgcttgacaagttcatgctcagcctacctgcgatgagctttgtagttgccacatcatggtctcctgcaggagccaactgcactaggaacagctcttgttacataaccctcggccataccccatgactgtgcacgaggacatggctttgccctgcacaaaggcacacaggattttagacatggcatcttgtttttcagggagcaca

SEQ ID NO: 138888 - DNA, 183 bp, Homo sapiens
cacaagtcatgatgacacctacctcagctataatattgtttttattacaaattgagggaatgatctagatttgtgtacagagtcaaaatgtagcttaaatccagaggcctgacaactgaggcctctaagtcttttgctaagagaatccttcttcatcaatgcttccttaccaggaataccctt

SEQ ID NO: 138889 - DNA, 406 bp, Homo sapiens
acacctggccagactgtacttgaataggcatgaagttaatcagttgattctgtggttcaaataaaatttcaactaccaataaaatattcttactaccgacatacactatgcgaaaaaaatactacatcctgtcaaactttacttggaaacttaagtcagctgggaatgggggatgatatcccaaagaacaaacttaaacagtaacagatgttgctagtgtcttctaaggcagcttactcttattagaagtagtgcttctgtattgctaaacataatcagcaggagagcaagtttggtgttggaagatgaactgctcatggtgatacaaaaaacacatcacataatgatgtctcaccacctccatagtacatcttggtccaagccaccatcttcatctcttggttgg

SEQ ID NO: 138890 - DNA, 509 bp, Homo sapiens
cccaaagtgctgggattacaggcgtgagccaccgtgcctggcctggatttgtcctgtttctgagtgccataggggtcagccacagagctgtccatctgtaccacaagaagaagaaaagcagacttggcaatttactggatagggctcccatgatttcagtcttttgatatcacgggtaaaatgggatgactgagaaacagctacggataggagactgaggataggggtgccctctacagaggtcctcttagccgtctgcaccaaaacagtcagatagtcacccccataaagcctggggctttaatgacctcagagtccttccacctctgggttctgtaaggaagaatcagtagagtgtttcacggcttggtcacatggagaccgtgagcatcagcaaccaattcagaacttcatctgggacccaagaggggcactgacaagtcagaactcagaaattagcctaagaaggaaaggtgggtctctgaacacacctaggcttgcctgaaagt

SEQ ID NO: 138891 - DNA, 146 bp, Homo sapiens
aaaataaccaatttttatgtacatatacctgacaagtctgcagtgtggcattcagttggcagatgtggttatgtctagacacttagaaaagagcaagcaaagctaaggcagatgaggtaacttcaagaacaaaacacttcctttga

SEQ ID NO: 138892 - DNA, 214 bp, Homo sapiens
acagatatttaacaaaaaaagaaaagtcttagtcaagattttgctggcaagacttcaaaaccaaattgaagtgttacagctcttttagaatgtgtctagcaggctttctggctttcactgtgaaacccttcacggatggcagggggtggtggacaattgaacaggcggtatttctagtgagacagcaaataccattccccccccttttgagtct

SEQ ID NO: 138893 - DNA, 217 bp, Homo sapiens
tctcaaactcttgacctcaggtgatctacccacctcagcctcccacagtgctgagattacagacatgagccaccatgcccggccccgtaatcattacttaccaccaagaatgcctctcattccacactcatgaaccacatttgtctatcagttttaagtgttatgatggttaccctgcttgttattaaagcctgccaataacagagctgaaatatcg

SEQ ID NO: 138894 - DNA, 208 bp, Homo sapiens
gtgacgcatgtttcccgaaggctgttctgtagcaagcagtcacaacaatgctcaaggaaactaaaaatgataatgactgctgtgaacagttgtcagagagggagctgaagttttgggggatgcctgaggcacagtgcccaaccctgctggtctgggatgaatttgtggcccccacaaggaatgtagagtgtcctggttgtgctgggtg

SEQ ID NO: 138895 - DNA, 529 bp, Homo sapiens
tcccgggggcttaaccctattacctattatctatcatctacctctatttacttattatctgtctattgatatctatctatcatctatctctatttacctatcatttatgtctatctatcatctatctatatctatctctatttaccaattatctatctagctaggtagctatcatctatctattactatttatctatgatctatctgtctacctatgtattgatctaatctatctatcactatcatttatctctattgacctgtgatccaaatatctatgtatctatttccactatgtatctatatctatctatccatccatctatcaatcatgtcactatttatctataatctatctatctctatttacctattatctatctatcatctacctctattaatctatctatctatcaaatatctatctacctacctacctgtctatccaacacctccctctctctctctctctcttcccatatacagggtgaagggcccccgggggtaccgcgcccgagctcgcaaccag

SEQ ID NO: 138896 - DNA, 266 bp, Homo sapiens
ggttgcactgagacacactggccctataaaagctgcactaaagaaaaataaactgatgtccaaggtgcatcagaagaaagtctgtaaggcatttcagaaagcactacaggaagccttttaaggaaaactctgaacagaaattactgtcataagataattctcccttcagccttctgcactctggagtcttcttccttcccattcatcatgccaatagcctgcaacctgcatgacccaaatccagaatgaccattccagaccagaac

SEQ ID NO: 138897 - DNA, 185 bp, Homo sapiens
actcctgggctcgagatcctcctgcctcagcctcccatagtgctgggattacaggcgcaagccaccatgtctggccttaattaaatctaaggtaccaatcttttatcatgagtactgcctgcttcctgtttaaggaagaggttaaagttcattttttccacagggacaaccagttgatccagaat

SEQ ID NO: 138898 - DNA, 268 bp, Homo sapiens
gggagccttagcctggagagagaagaactgggaggaagggagagaatagaaacagacaagtgtgggtggagataggaacttcagggcaactgggataagtgagaacaaagaggatacctatgccccttccaggatttatggaatgtgggagataaagccattcccatttgagaagacttcaagggaaaaagagtaatcaggtactacctaggtttcaatttacacaagaaggtgaagggaacatccagatggaagaatgagggcagaa

SEQ ID NO: 138899 - DNA, 194 bp, Homo sapiens
agtgttagatgacaaccaggcatggccccagtaaaagacatagttaattctgttctaaatcactctgcccgtcacgctccatgaccttgcatattacttaattaaactatatctgaattggctcatagcattataatgctatttctccctcataggacacatttcaaggctatttaactataagatgtgggact

SEQ ID NO: 138900 - DNA, 219 bp, Homo sapiens
ctactataccatgcagccatcatattcattttcagctcttgaaaacatgttttaaattaagaagcatttaaatgctgagaagacatcccagaccccagcctctgtctggttagagacagaagaaaaataaagttaaagggcatgtacataacctcacacatggaagcattctcttaattttactttatcaatctaactttttttttttttttttttttt

SEQ ID NO: 138901 - DNA, 352 bp, Homo sapiens
aaatgagataacaatgcactgaatatattagcaatccatgaatccatacggatataaacacaaacaaataacaaaatggagtccaagagaaagctcttctttacaatggaactccaactaataaaatgtggaagtaacggtaaatttagaaaatcacaatcatattgcaactgcaatagtaataactgtttcaggaaagaatcaaattagtgagtcaaagttttatgagaaacaagatatttacaatgtcatggctaggcacagttgctcatgactctaattccagtgattttggaggcccaaggtggaaggaccacttgaggccaggagttcaagacagcctaggcaacat

SEQ ID NO: 138902 - DNA, 255 bp, Homo sapiens
agattctcaggcctggccccagacctacccagtcagaatctgcatttgaccgggaccccccggggactggtgtgcgttcagagttgaaaagcctgctgcatgttctctcctgagccggggctgatggcctaactatccacgccgtaggccctcagccccgctgtctccgcaggcatgtgtgcccgtggcactctcctctgcaccttggcacctattgccctaggtgccgtccatgcccttccccagtcaggcccc

SEQ ID NO: 138903 - DNA, 327 bp, Homo sapiens
cacattctgaggtactggggattacgactccaacatatctttttgcggggaggagaacacagctcaggccataacgagccatttgtagagattagctcactatctgtttctgactcttctttccatacctgcctacccatttctctccacactgtctcttgacagaacctgtggtctggaaaacatctggtcaacttagtcacactgaggagtaagtggccaaagctgcctttgtctatctgtagtatacagtggttcaaaaggataaaaataatgataggaaactgttaaattttatatgttatccctcctcgaaatactgcattt

SEQ ID NO: 138904 - DNA, 224 bp, Homo sapiens
tcccaaagtgctgggattacaggtgtgagccaccacacccagccaaattttttttttaagtgaataaaaaatggctaggcataagccaccatgcccagccaaaaaatcaattcttgtgatcatatcatcacacaaactcttccctcctagcacataggtttggagtactaggttcccttacttacttgaacagaatgatttttttttttttttttttttttttt

SEQ ID NO: 138905 - DNA, 448 bp, Homo sapiens
tcacacagaaaatgtttgaggcaggtcttctttaattgcatgcctatcgtacagaatagtgattataagccctggacacatggatttgagtcctaactctgtctcttagatttttgtatgcagttttaggtcttatggccagagagatttgaagatatttaatatctctaagctgcaatctttatctgcaaactggggttagtaatccaatcaaccttattgcggatattgtaagaaaaaatgagatgacaagtgtaaaaactcagaactatacttacaaggtaagcagacaaaatatgctattgttgtgattgttttctctctgaataaataaactctgctgaagaatttattagattatgtttctcgaatcgagaattcagttccagctctcatttctggcactgacatattggccaaatatgattcttatacaataatcagctgc

SEQ ID NO: 138906 - DNA, 190 bp, Homo sapiens
tccctgtcctggatctatgcctgtctgttctatatcagcctcttgctttgaccataagaataacttcagacctttaagcatagaggaaataggatttctgtctcccttccccacctttgtgataatctcagcttctgcttttaaagtctatctcccaagtagtttgcctactatgttcctcccaaggtca

SEQ ID NO: 138907 - DNA, 166 bp, Homo sapiens
cgtagaccatgtgtagaatcagggctgtgaaggaaagcagctttaattgtttgcacaacaaatatagaattggaccttaaagtctctctagatccttaaaccacatcatcctaaggctgctagacacatacagtgttctcagtacagcttggggttagttggaact

SEQ ID NO: 138908 - DNA, 385 bp, Homo sapiens
ccttgaaattcccaccattcttgaatcccctgacgctggactccagcctgaggttccactggggaacagaaactggccccctgccagcggggagcatggactctgggccctgggctctgtaactagcagctggcagcatgaatgggaacggagtgagcagggtgcacgggaacggcctgcatgaggccagcgagttttactatgaggctgtggaaggggcccacaaccccgggggcctcctgctttcaccagctgctttcatcaaccctgctcagtatgccagcgtgctggaaggacgcttcaaacagctgcaaggtgaggcccgggggccccctgtggggacgactgtgcctgggcgagagggacctgggtgtggggagagtgg

SEQ ID NO: 138909 - DNA, 802 bp, Homo sapiens
actccccctcagcttccaccccgttggccttttcagtgaagcccacactccccgatacccagggacacagaagccttaggacaccctccctgaatcccccagctgtgcccagcccagtgactgctgcgggatgacagcacagtccagccttgcgggccaggggaagggagggggccccacggccaccgtgaccacatgcaaggttaggggtcagatgtgctttcctggggaaatgacttcctttcctggatccaatctaaaggcccgaattttgaaaagaaagcggcaggcgggctctgaagtgattccgactcccgtgcttaagccgcgtgaggctctcccaggcctgctggggccccgcccaccgctgggctgtccacagccaccctcctgccagcttcacgatgtccccatgactgtgcagcccctacataacgtcaccccaacaaaaacacgctgcttgaccggttccacctgcttccgagccttccagcccagcctctctccagccaacaggacggaggaagcccagggccccgaccttcctgtggctcctgactaggggcacagtcactgctggggacactggtggggaagggaaccagccacaaaagggatgtggcctcccaaggcagtatttatacgttcctggcctcaagcgggccagatgcttctcagaagcttagttctgacacagaatggggcggggggttcctgacccatttttgcaactcttctttacgtttgaaattctgtcaaagcaaaatcagctcagaattaaaggttacgcggacactcacaa

SEQ ID NO: 138910 - DNA, 131 bp, Homo sapiens
cgagttcagggggaggagggagggtgagatgaacgtccggggaaagagttcggtgtccacgcctaagactccctcagaatggacaaaaatgtccggtcagcaggtcaggttcccagccctgtgcacgcgcg

SEQ ID NO: 138911 - DNA, 183 bp, Homo sapiens
ggactgggagaccctggcgaatatgagagaaaatcatgctgttttacaaacgcctctggcaaataaaaagacccgtgcatgtcaagattagaaatgaagtcttacgtggtttcggcccctttttaatggccttttcctcttctgagtataaacacttcttacaaagggaaagtccaaggagct

SEQ ID NO: 138912 - DNA, 127 bp, Homo sapiens
cacgtacctgcacgcacgtgtacacacacacacgcacaggcactcatgcacagatgcacgcatacacagggcatgtaccttcacacacgtgtaaacacacgcacaggcactcatgcagatgcacgca

SEQ ID NO: 138913 - DNA, 291 bp, Homo sapiens
gttccctcgtggagaggagatacattctgaaaatggctgtaaataacaatgcatcagcagacctttatttccttatctgttccattaattgaggtggctcagctcacaggtgcacaccaaacttcacttattcatggacacaaatctctgcctttgtatcataaatcttacattttaacagaagagataaagactcaggaaatttaaaaatgtgtatgtatttggaaaatcagaaagttaataatgctataggaaaaagaaaaaatactaagtaaaaaaggacgatatccc

SEQ ID NO: 138914 - DNA, 541 bp, Homo sapiens
ggaggctgaggcagacgaattgcttgaacccaggaggcagaggttgcagtgagccgaggtcacaccactgcactccagcctgggcgacagagcgagactccatctcaaaacaaacaaacaaacaaacaaacaaacacttatatgccttagtttctgaagtcagtaatttggacttaagaaaaagaaaagataatactttgtttttattattttattttggaatctaccacatttccagcaatactatatttacgtattaaaggtctagttcaaaagtacgtggaaaggtcccttttttcagttccttcattcttctactctccaggggtctacccttcacttccattgtgcatgggcagttctcatattgaagtaaagtttaatctgagcagaactgcgtttttaccaacctgctggctttagtgatgtttagagccccagctaagtgacaagttttgtggaaatacgagtaaaagaggaggcagtgatagcaacaaacagtggaagtagcttctgttgttcacattaattgtcacgagga

SEQ ID NO: 138915 - DNA, 298 bp, Homo sapiens
tcagttttctatgcttttagaactgagcatgaatacttcaaataaataaaaaccagcaggctccgttcattctctcttactgctgtaacaaattaccactattatttggctttaaacaacgtgaacgtgttatcttacggttttggaggccagaggtccaacaggaccctcactgagctaaattcaaggtgtccacaggactgtcctcccttctgggatctccagtgggggctgtttccgggcttctccaagcttccagaggccgcctcaatcccttgcaccatggcttctccctcca

SEQ ID NO: 138916 - DNA, 116 bp, Homo sapiens
ggtggtggcagtggtaggaggcccaggttgagacatgaggggaagaacagtgtctagggcaacggtccctgaacttgtttgcacaaggtactcacccagaagcctcgaaaacacgg

SEQ ID NO: 138917 - DNA, 522 bp, Homo sapiens
accaagaaaagattttcctttttgtaatggctttgttgttttgtaaaggtgcacatactgaagcgttcacagaagttcaaagaaaagagtaaaactttgttgaaacctcggcacccagagaagtatctgaggttaatggtttgacagatgtcatgtccttccagaaagagctctgtgcagatctcacacacacctggcttcctggatagttgacgccacctgcacagggaggcatgtagctgaggagctgggatggacggctttgagtcagacctggcttccagtcccagctccaccatttttctagccagagttaaataccttgacatgaggccttgacattcagttttctcatctgcgaacagggtgtaatgataggtcctatctctggaggttggggagcaggatcagtaaggcccacaggtaccctgtgcccagcttagcgcctggctcagagaagtgggaacagctggtagctattgctcagagaagcagccttctgtcttaaggatgtgacataat

SEQ ID NO: 138918 - DNA, 551 bp, Homo sapiens
gtaactcagctgggcgtatcaggaagccctagcagctgcttctcacctttctgcccacggagtactccactgaaggaggccagtgagagatgccccagccaggcacagagcaggtgccggccaggcttgagtctttcctgttcccagaggtgcatttggccagtttaatcagtagatttaagccaacaagcctccctcaccctgtgcccggcttgatccccgtgaaatggaaagtacagccctctcccaccgtagcccgctttgagagactcagataaccgggaggaggaagcatcttcaaggacaggtggtcacccccttatttaatcagtgctgggcagctgggcagctgggcagcggcagacgcacaactagacccaggtccctgactccaggactaggcgtctgcaattgcatgggactgtaacagcctcctttctccccaaaggaaggagtggacctcccttgaatatgtcactgcaccagcatgcaaactcacacacacacacaaatgctccaatgctcacatggacactcaataccgggtaccg

SEQ ID NO: 138919 - DNA, 174 bp, Homo sapiens
cctttccctgccagacagtagcctcttagtgatcaaacattatgtcttcaaaagtcttttaggccctacccagcacccaatactgtgctgagaacatggaagatataccctagagagtaaattttgagattgggaaccattctgttttatttactgctcctccccagcaactaa

SEQ ID NO: 138920 - DNA, 326 bp, Homo sapiens
atccttttgtgatgcgcgagccctggtgggaggtgccggtggggagcccgctgactgtgtctggcactgggctcgtgggaacaccgtgcatcccgggtgggcgaggggctcgtgggaacgccgggcatcccaggtgggctcggggctcgtgggaacaccgtgcattgtgggtgagcacggcgagggcctaggtgggcaaggggctcgtggaagcgccatgcatcctgggtgagcgagggtactgggtgagactgggcggatgcaggcacagggctcgtgggatcaccgtgcacgtctctggaaggtgcccaggctggtgcacgctg

SEQ ID NO: 138921 - DNA, 477 bp, Homo sapiens
aagcacttagggttgtttagggagttgtgacatcctatgagaagtggaactagatggcagttgaggtccctttaattccagtgaatttaaatctagactgctttgtatagtaaccagacatgattaagtggtcgttcaaagtgtgatgttgtggggcaatggagcaacggtgcttatgagaatgacccctggtcagatggatctgggttgaggcacagctgcataacttaatgattgtgtgcttctgggcacgtctcctaacctttctgtgcctcagtttcttcatctgtaaaatgaggacagcaatagtacctattaaggttgtagtgagaatcaatgagataacacatatgataacacacgtggtaagtgctcagtcaatgttgctggtggttgttaaggctgttattcttattgaaggatgcagttttaaacacttgggtactcagatgaaccatctggctctatggagtcatc

SEQ ID NO: 138922 - DNA, 579 bp, Homo sapiens
gtcttttgtggccacatggacggaactggaggccattattttaagtgaaatgacttacaaacagaaagtcaaatatcacatgttctctcttataagtgggagctcaataatgtgtacacatggatgtacagagtggaataatataattggagacttggaaaggtgggagggttggagggagagggatgagaaattacttaatgggtacaatgtgcgttattcaggtaatggttacactaaaagcccaactttaccactacacaatatatccatgtaacaaaactatactagtaccctctaaaatttatattttaaacaaggttacttgcttctccttgcctgcaggtgtcccagggcaactcctttcatatcacagtaatgtcatcctctttgtctgtgcttgtcaccctcatagatacagagccatagatggctctcatatttagaaagagtttgggctacgagatcaagatgcaacagtcaagaatccagtgggtcacttaggaagagtaactgatgaaagagcaatgctagtgaggatgctgctgagactggccaggtgcactctgtgcagaacac

SEQ ID NO: 138923 - DNA, 421 bp, Homo sapiens
gcacagctcaggatacccacgctatgtaatgggagaccccacaaagttagtggagtcacagcacggctgttagaggaagggcttccagcctttccttgcactgacccttcatgattactgggcctattggtgctacaggtttttgtacagagcaaggaaagatagctactgataagctagataaaaggttggggagagggggagacaactggatagccctaaaatagtccttgccaataacatattgccaggaacagtcctgaaagagccacggaagcagtttgctgtcaaaatgccagtgcctggagaagctcttccgataccgggcctccagatccctcacctatgacccacatcaccctctctgatggtggagctgtgtgccacggggcagaggcctctccagtctaccacttggtca

SEQ ID NO: 138924 - DNA, 474 bp, Homo sapiens
taattcagtctcagataggatagattcatcagtcatttctattttgattccttgacatattaaatggatcttgggtgttttctgttactgggaagctttggacaaatttcaattaagatatctgcagacttacaatctcctagagatgtttatcttaaatattattgagacagaattttattaatgaaaaaaattgtttactaaaagtaaactgagataaagtaaaaaaacaaaaggaaatcccaataggattttagctttctgaggttcaactatttgtgcttcaggtcatatgtgaaacgataacaaggtaaatattctaataatgacactatttgtcaagaacctgtcagttttcatgggtgagtgtttatgcatctttgtcatttatcctaatattcttatttttccttgagagagatattataatccaaccaagtaacagatgaaggaaactgttccctttcatgttgc

SEQ ID NO: 138925 - DNA, 562 bp, Homo sapiens
agggtgtgaatggagaccgactgagaagagacatgaggcaactccaaagtgatgcttatagtctgtaccctgctgcaggctgcgtacaaacgtgaatgaaggcttctatcaaaagtcactgatgggtgctcacttcagtagcacatacactaaaatcggaacaatgcacagacgattagcatggcctctgtgcaaggatgatgcacacattcgtgaagcagtcattaaatttttttttaaaaagtcactgactggtaccctcaagattgtacatttcactgtatgtaaacttcaccgaaaaacccaaccaacctataaacaaatactgaattctaagtgttcagaggtgaagtatatcgatatttgtaacttgcctcaaagaattcaggcaaactgggtggacagaaggatggacagatatatagatacataatagagcaaatacaattaaaagttaattgtaggatctaagtagtgggtatacgggtgttcactgtacaattctccaaattttctatatgcctcaatatattcttaataaaatgttgggaaaaatgcctga

SEQ ID NO: 138926 - DNA, 443 bp, Homo sapiens
gtcatgaggcacctttgatctgggagagcttccgcctctgcagcaaggagctctgagaagtgatgttgaagggtgatccttaacccaggtggctgctgacgtggccacacagaggctctgagactccagaagaaggatgcgttagggcctggggtagaggtagtcatctccactgagatgccccatgccaagggtggggggctggaatctcccaccttggaaagtctacaccagagaagtctctggtcccagggacagggtctacagtggagtctcccgcttgagactcaggtatcttacatccacacagccaggaaactatgccttaccccatacagtgacaaatcaagagggggttttggaagcatgagccgggggcacctgcatccgagaggggtcctcagccttacggtggggacacatgcagaggcgtggacacctca

SEQ ID NO: 138927 - DNA, 354 bp, Homo sapiens
gggggaactggtccccagggaggaacaactgctggagaactcactaaagaaaataacgggagcagctaggcgcagtggctcacacctgtaatcccagcactttgggaggccgaggtaggtggatcatctgaggtcaggagtttgagatgagcctggctaatgtggtgaaaattttgtacttttgtactaaaaatgcaaaaattagctgggtgtggtggcggcgtctctaatcccagctactagggaggctgaggcaggagaatcgcttgaacccgggaggcagaggttgcagtgagccgagattgcaccactgcactctagcctaggtgacaagaacaaaactcggtctcaaaa

SEQ ID NO: 138928 - DNA, 361 bp, Homo sapiens
gacactgcctggcatgatcaatagtggttgaatgaatgaatgcttttctaccttgagctcaagctattcatttcacctcattccccgttgctctctggctgttttcagaagcctgccaactgttcaagggccagcttaaatgtcttgtctataagccccataattgaatatgacaatcccatcttttgcttctctcgctcttttgtttctacctctgtttggcactttccacactctaccccatggtaagatatttgtgtgtctgttttaaccccagcattgaaacaccctgtatagggcagggaccatggctttctgttctcattttatgtcatttctcctcccttccaccccgctacac

SEQ ID NO: 138929 - DNA, 742 bp, Homo sapiens
gaatgatatctttaaaaatgtccatgattcattgttaaggggaaaatacactacaaaatattagtagcctaatatttgtgtgtgcctatgtgtatgtgtgtgtgtttatgagtgtgtgtgtgtctgtgtgtgtgtgtaggcacatgcacacagctttaaaggaacgactgtatgcccatatattaactgtggccatttctgggtagtggggttaaaggtgatgttttctttctcttccatgttctctgttttctgaataatgcactataaatgcatattgcttttaaaatcagagaacacgtcttgacatggatgtctcacagacatctcaaattcaaatgagcccttttctcaccttaaatcatcaccaatatttccttctctcaatagatagcaaaataaccagttgctgaattcagaaacttgggagtcagcttgactctttcctccctctctcccctcatatgcaattaattacttagctttatcaatgcatttcccttaacatctcttcaatctgtttccttctttctatcaccacagccactaatgcattccagatcaccattatctcttgcttgcttcttgtttcctggaaacctccttgcattccttctagctctcttccaactccttccccagtctgtagtcagaatgattcttctaaaatgcaaatctcattgaattaaggttctccagagaaacagaaccaataggatctatatgtctatatctagctagc

SEQ ID NO: 138930 - DNA, 323 bp, Homo sapiens
ttttctatcatagaggtggcgattgccttctcatcgcctgcaccctgaggctgatgggtgggagaggtctcaccatcctactttcccctggtcctccagtgtaccttctgcacttcttaaaggtgaccctgacgtcctccttggcttgaagcaagggtagctaatgagagaaggcagaaccaccgtggtcggaggccgtgggagaagcagttaccctctcattcttgaactcagctccgctcgcctgctctctgaaatacacactcaacctgctctttgcagaagtgtcaagtctttggcctccttaagaaaggaagcatata

SEQ ID NO: 138931 - DNA, 441 bp, Homo sapiens
ataaccattcccagggacatactgccgttaggatagggggcacagtggtggttctttcccagctaccccactcctcgtcctccctgcacaccagatccttggggaggtgggcaaatgcgatgccacagccttcagctgtcattgattacctcacaaggagcgctgtgaacatctgggaacatgagcctgcctggcaaaatagtcttctgccttccacacccctcttgaattgagcgttgtcactcttgaaaatgtgcccagatcttaggaacctcacagagggcttaattaaaggcaatggagagatcacacaatcaggacagtattgttcctcatccacctgcggttctaggccttcaaagtcttcatctcatccaatttctttctcaactcatttgacttattacaataaagaaaccactcatcaggtcaaagaatgta

SEQ ID NO: 138932 - DNA, 595 bp, Homo sapiens
ctatacacagtccttgttccagacccaactctttactgttccccagatacttctcttctttttaaaagggtttaaccaactattttaacagaaaagttgagaatatagtacatggaagtcccatatcccaccttattattatcatcttctatgaacatggtactttttatttacaacgaatgaactaatattgatacattattattaaagtccatactttatccagatttcttcagtttttacctaatggcctttttctttgttaaaatatatttaattgatttgtaacaattatacatatgttggggtacatacgtagtggtacatgcatacaatttgtaataatcaaatcaggataattaagatatccatcaccacaaatatttctcatcctattgtgttagaaacattacagttcttctcttctagctattttgaaatatacaataaattactgttaactataatttccctactgcgctatccaatgttagaacttagtccttctatctaactgtatttttgttcccttttgaccagcttctgttcatctcctgaccctctcccctttccagcctctggtaaccaccattct

SEQ ID NO: 138933 - DNA, 637 bp, Homo sapiens
ctgcactccagcctggcgacacagcgagactccgtctcaaataaataaataaagaaagaaagaaaagaaaaactgtgtgtgtctatttgtagaaagaaaaagatctcttcattaatcccatcagccatttattgagttcctactatagtccaggcacaggtgctaaggatacaaagatgaataaaacccaggaccttccctggagggacttgcaatgcagaagcaaggaaagactaggtaagctgagtgatagaagttaatcagggtacatttagaaggctccaaataggagtaatggtactacctgggcaagggatcaggaaaggtttcatccaggaagagaccttccacctaaccaagactagatgaagactttaaaggttctaaactctgaaaagattgtggtgtcccatttttcatatgtaatcagaatgaaaatattaagccatgaaacatttaaagttcaacatgattatacttaaaacatatattgtatatagattaactatcaaattctgtttctaattttttcttttatttttcagttccccagttttgctggtgtctaagcactggcgtggggtgtcccttgagtaatgcagcactaatgactctatccattcttccatgagcagtg

SEQ ID NO: 138934 - DNA, 462 bp, Homo sapiens
tggtggggcttggttggcttactgtacagagcctttcttgacccctgaagaaagagatccgtctgcagtgggcaaaagcctgcctggacttcctggccaccagaaatatgagcatggtggtggtccccagttccctattcatgcttgggctcaagagactgggagtctaggttcactgactccctgagaaagactaagaccctgcattttagaaagaggtttggggatctctgccctgcgcaagggtagaaggatcagctgttcctctgagcaccttaacccggaaccccggtccgaagccgagacaggagactggatgcgaggccctcccagagctggtttctctcaaacaacttccaaaactcctagatcctaggggtacgccgaaatcccccaaagcagtccaaagaacacaacgagagtcctaacatcccaggtggcggcgcgctggctccctggagc

SEQ ID NO: 138935 - DNA, 358 bp, Homo sapiens
agctagaacaggggcaaggacagagttctacagcatgtcaatagaggcttccctcttggcttacaacagtccattcatcaccacttcttgttcagctagttacatatctgtcttcagaccatgtttctgttctttatccatggagacacaaaagacttgactatgtgactccaaaaagttagaggtgtgaggcagcaagaaggaatgggtgggacattgactctagagtcctacagacctgtaatagaaacctgtctcctcctactcttgactatgtgactatggcaaatagttaaacttctctggacttcagttttttcttctataaaatgaggagaatgatatctaccttgctggg

SEQ ID NO: 138936 - DNA, 477 bp, Homo sapiens
tgttgcataagcgggtctgcgtctgagctcaggcaatccacccacctcggcctcccaaagtgctgagattacaggtgtgagccaccgtgcccggtctgacctgtgcctttcaccttctctgcacacctgtggtgccctttctacatggggcctcaactccagaccccgcaaacaacaactaacatgaggacaactgctgggaagaggctgaagcaattgcagcatgatcacacaaggttgggatagatttctttcccatctctcatacacaccccttgcaaaaaaataggtgggcagaaaagtctggggctaagcttgccctgtttcatcaatgtacagttggcattactgaacagactagaacaatgtgtcaatgtaaaaacatttatatctggcttaaatgacaacagtttatctgccctccctccccaaaatacaaagcagtacctatcttacctctgatgtaattaaagtgtc

SEQ ID NO: 138937 - DNA, 269 bp, Homo sapiens
ccagctactcgggaggctgaggcaggagaatggtgtgaacccgggaggcagagcttgcagtgagctgagtgcgccactgcactccagcctgggcgacagagcgagactccgtctcaaaacaacaacaacaaaaaagaaagttcagaggattagaggtaatgataatttttttccttaaagagaaacttatcggtaaagctgagttatgggctttgtcagatgtaattactttttggacgtttagtttttgactttttttttttattttt

SEQ ID NO: 138938 - DNA, 327 bp, Homo sapiens
ccctaggagtcgaccatgcggacatgctgggcttgtgaccctggccgtcaggtatgacgacgccggtggcgtgtgcctaccctgtcgtaaaactgaaatttagatagtcacgaagatactagccctatagcacttaggtgtgagctgcacgcattttaaatctgaaacaatacttgcagattttccacagcctccatacacagtggtggccattatcatttccacagcttccatacacagtggtggccattatctctaagctaataagattcagaaatttcctgtttcatattcataaatgtgtatctcacttagcaaaatgaatgt

SEQ ID NO: 138939 - DNA, 346 bp, Homo sapiens
ttttgaggccaacaatgctctggtaccaaaaccaaaaaaaaaaaaaaaattctaaaataataagaactacagaccaatgtaatctggtaaagacagacaaaaaggcctttgcaaaattttagcataaaaaatgcaaaatatataaaaaaggacaatgaccaaaatggggtctatcccagtaaaacactttgtttaaccttcaaatcagtgattcatcatctttacaaaggagaaaaatatataatcaccaatacattagtaaaaagcatgacacaaacataaaccctcatgccaataaaacccacaaaaaaattcttagcaaacttagaagagaatagccttaatc

SEQ ID NO: 138940 - DNA, 288 bp, Homo sapiens
cttctctttttcccacccctacctttgggccctccttccttaacctccgctggccccccattccatgatccgtccacctgacacgctgggtttcatgcctctctttcccaggctgtgggttgtgcccttcactccttgccctcctccattccctgtcctgatctgaactcctctccttgccacgctccctcacccttatccctctgcacactccaaaatttttaaagaaaaaggagagagagaaaaaaaagtaaaagaaacccaaaagggaaaatatagctaaggtga

SEQ ID NO: 138941 - DNA, 351 bp, Homo sapiens
ccacttgggtacaaaggcactcattgtgaactgtggtggcaggggcctcaggcctgtgccccacctgcctgtgtggtgttgcccacaggaatgctggtggacttggctcatgtgcctgcgctcctggccataatgatgtgggatcccccacagctcagcgccaaccacagcctcttctcggtttacaaatccccttcccaccaaaaaagaagggctggggaagcagcccttgacagggagatcacaggctcaagtttccagtgcccacccagcctttctgaactgtggtgccttaagcaaatcaggttacctctcaatgtatccttttgctcatccatacagtcgggtcaa

SEQ ID NO: 138942 - DNA, 125 bp, Homo sapiens
tatcttttcatgtgctaatggccatctgtttatattttttttgagaaacatctatctaaatccccatttaaattattatatttttaaactattgagttatttatatattctggacacaagtatgt

SEQ ID NO: 138943 - DNA, 275 bp, Homo sapiens
cctgctgttaaagaggttacaattgaatagtgaggaaaggcaagaacacacatctaataaaatatcagtcaaatatattgattatcctagaagaggacaataggggttatgggaaccttaaatctcatcaaacagaaagatgaagaaagtcttcatgagattagagatgtgtgagaagcaattgaaaaaaatgagcaagttttttgccatgtgaaggtagaagggaaggcgctccaggttagaaaataacatgagcacaaaagtgggaacttcag

SEQ ID NO: 138944 - DNA, 355 bp, Homo sapiens
tcacaataccagtttgtataccgttccttcatctccttccacgtcaagaaactccctcatggtcaaaacgcaaacccagtgaaaagttcagagatcaaccattttactttgggcctggtggtttatgcggaagagctaacctccttcctttttcccatccacctgagaactacaacttcccttctggagccctgaagccgcgtgataatgtagcctttctctacctcagtggctgtaatgcacaccttggaaatcactgggatttacccaggcagactgaagttgtctttggttgctgtttatttatatggactgtgatctcttaattggagatggtgcctctcccagggttcgc

SEQ ID NO: 138945 - DNA, 168 bp, Homo sapiens
agatgagctgcatgtatcaagatcaggtgctgagtatggctcaggcctccaccacatgccagcttgacacaatcttatttgaatctcatattggttttacaattccatatttgacctctcaccaactccctgccaaggatgtagcatggttcaattagactgcttttt

SEQ ID NO: 138946 - DNA, 315 bp, Homo sapiens
ctagcaaccaagtcactattcctagtagaatgggctatcatgccttttctttcaggaaacatcatgtagagtttaaagcgagtttaaaggtccaaacatctatattctcttatccagtctgtcagttgtgtttattagtcatgaactgtgtctctaggcttttgcattaactgccccccttcctcaaatatcttttggcttctctagtacttctttacttcctttccctaagagactgggttaaataccctttaagtgtgctacattattctgttattgcctgcatttcaggcttgctttctcactagatgcaat

SEQ ID NO: 138947 - DNA, 256 bp, Homo sapiens
ctggctctcttcccctaccctttcagcctcttggtaagaccacaaatggtctacagttccctgaaaccagtgagcctttttctctgctcaaaatgaaactctattgttgacatacactttcctttgaacttctatgattgtcacatttggctacctttgatagcaacaggagacagacaaatttctaggcagatagggatgagtccctggtgaaacccaaccttcaagccaaggacagtttaaagcctgaaaacca

SEQ ID NO: 138948 - DNA, 532 bp, Homo sapiens
ggaatccagctaagaacaacctcataaccagtctccagaggtccgtccaggagacggcgtggccagtggtgggcgccctgggctgtatgtccccatctgtgtctgcctttgtgccactcatttacaccagcaattgcaggagactgggaccccctctcttcaaaattactacccctctttatgtagaggcacactgcctaaaaaaacaagttggaaaattttccaaatagctttgactcaataattatccgacagcatgtggactatctcttgggtcttttataccatcaaaccaaattggcagcatgaatcttataatcctatttacacatgttttgggttaggaaggagtggtacagattttgttctaaacagcatccattagttactacttgtacaatacattctatatgcgggccctgtgataaatgtcaaggctacaaagaatgtggctcttgccctccaggactacaaattcattgtggaagactgggaaataaagcaatgacagttgggtgcaatcaatgcttta

SEQ ID NO: 138949 - DNA, 633 bp, Homo sapiens
ggagacgacacagagagcacaggttggagcacaggtgggtcgctaggcatatccagggtcctgggctgatacagtatctaaaacagaaaacatccagtgcttacggggtactggctctttcctcagactccacatttgagatgcagaggaactaaaactccatctttgtgtatgtagcaagttttcccctttcagctttgaaaatgaaagtttgttttaggtcaggttcagcctggggaaatgagaaaatcacccactgggatgagcccttcccccttcaacactgtaaatagctttttccacttggcgcggtctcctcgccacggtaataaggagctcttgctggctgctccgacccgtgcgacagccaggccttcaggaggtctggtgtccctgcactttgtggtctctgagcagtccagctctgcctgccatcagtttgggcacttgacatttcaggaaatcctgagcccagattgcaggccctctttttccgtgatgatacccactacattgaaatgatggatctgtgatagcaacaggagcgatgatatacatctttgtatatccctgccctccccagaccccaagtcctatataaaaacttcacttcctgggcttcctttaccccac

SEQ ID NO: 138950 - DNA, 427 bp, Homo sapiens
gcgcacacctgtaccgggtcacagtcacgatcacacattaaccacagccacacacacagatagaaacatgcagttactcgcaggtatccccacctgaactctgccgcacacagtcacacagcatatagtcgcacaccactacggggacaaacgcagtaacactcaaccaggcacaagctccccacagccgcacacacaatgccgcacgtggtcctgctccctctcacacacacaccagcagccacagtctccgaggccgtgctgcacacggtgtgagcgttggaaacacactcatcacaagggcagcctgtcacaatcgcgcgatcattcaccacacacctccacacagacgcaagcgcacgctttcaatctcacctccaccgccgcacaaagccgaggcttggcccccggccccgccctctcccgg

SEQ ID NO: 138951 - DNA, 467 bp, Homo sapiens
ttaatattttactctatattatgaaagttctaagctgggaaatagtaagcagcttttctaaatggtttagatcacataccctttcccatccgtggagtgcccctcccatgaagttctatggaagtactttttaggggactttccgaaaccttgagtaggtccttcttgtggtctggtgccagctttctcctcagtcctcaactgtctgttgctatattttctcaactaccaggtttcctagctttaccctctttcttctttcttctaaattataagctgctgtcagatttatatttctaaaccttggctctgaacactttaccctgctgctcgtgagtgaacctgaatttccttccctcttcgtattaaagtaattccagatgagccaaaggcttaagtggtgtaaaaaaagaaaagaatataaaatcagtggaagaaaacatagctgaattaatttaaaattttgt

SEQ ID NO: 138952 - DNA, 467 bp, Homo sapiens
ctcccaaagtgctgggattacaggcgcgagccactacacccaactacttgtatttatttactgctcctccctgcctcctacaaacagaccccaggtctgttttcttaaatgctaaactacatgaatccttaaaatgctaaactgctaaggtcctccagcctcagtgttcttttcagaaacatggggctaagaaccacacttcagtgggtagctttgttcctgccatcttctttctcatccccatatcactgtgcggcttttgctctgcaacgacccttggtcttacctctgcccagcaggtgataagatctgggaacagagaggaaacagaggggaaacagagaggggaggtcatctccccgggctcacacagccagtgagtggccagacagggcctgaggcaagtctcccaatctgagcacttactggcagaggtgattcttcatctgtgcaacgggtacagcatc

SEQ ID NO: 138953 - DNA, 401 bp, Homo sapiens
  misc_feature (53)..(53): n is a, c, g, or t
taagacggcagtgcagctgcatagctgcggtcgactctaaggtatccccccgngcaaatagtgaaaccccatctctactaaaaatacaaaacaattagccgggcgtggtggcaggcgcctgtaatcccagctactcgggaggctgagacaggagaatagcttgaacccaggaagtggaggttgtggtgagctgagatcgtgccactgcactccagcctgggtgatagagtgaaactcggtgtcaaaaaaaaaggatagaattttcacacctatgttcctagcagcaagtccatagtgagccaaagggccagaaccacccaagtgttcatccagggatgaatggataagcaaaatatggcacgtagacacaatggaacattacttagacttaaaaaggcagg

SEQ ID NO: 138954 - DNA, 315 bp, Homo sapiens
gtcctctttccctcctgtcacctgcagtggcattcttcttccagcctgtgggatgttgctttatgctggacagagctggattctgtcttggctctgctggtgctgaaagttccccaggcccaggaccaccatccacacacctccgatatctggtgaagcaccaggcatcgtaggcattgctgagtatttgggtgactgacttctgagcatgaaggcagggagggtcccctctgtctggatggtaccccacccttcgcccctaggcaccttggccagaccctcctcattcttcaagattcagcagcccttgccttc

SEQ ID NO: 138955 - DNA, 218 bp, Homo sapiens
aagagagaaagaaaaaaagatttctagaccctgagacaaactcatacatctgtccataaatctgctcatttcattttatagaaacaaagaaatatgcttagtgggtagatttaaatactcagacaattaaagtatacgatactttgcatggcaacaattagtggtgagaagagtagggagaggtcctgattctgcattccccaagagcctgatctgat

SEQ ID NO: 138956 - DNA, 428 bp, Homo sapiens
gcgacctagaggaccccaagtagtcgggatcgcctttacaccgaaatgatactgaccacttcatcactgtatttcaatcattaattccctcagtcatacccaagaactggcttagaaacttctctccccaaaatcttacatgcacttattttactttctcacatttttttctaaccagttcctgcatagactcatgtccactctaccagccctccaacctcagagactccagacccatctctccttactagtctagtctattggctgtcttttggtatcttatttttttttctccttccctacaagcttaaattcatgactgatcattcaaaacagcataagcaccttttagattcctgatgtacatataattttatctcagcccagcaaatcccaaccccaaagcaatgccaaagtgtatttgttcc

SEQ ID NO: 138957 - DNA, 226 bp, Homo sapiens
gtgggtacacagtacgtgtatatatttctggagtaggtgagaaactttgatacaggcaggcacttatatttgtaaaaattaaatgccaatgttaaaataatcaattgcattttcaattttagactctaagaaatttttgtagacaagctataactgaataaatgtatatttgagaaaattaagttaatgtctggcagaccattaatactcaagtctatatttaatg

SEQ ID NO: 138958 - DNA, 453 bp, Homo sapiens
acattacatacatgtctgatgacatgcactagactaagtggaagtccttctttggctatgaaatttcagtagtctctgactttctttaatgacgtgacatgactgacttcccatttctcctcttaccattattttcaactcaaatccagcttttatgcctctatgtcctccaggtaagagagactgaaaatcagtaggtcttgacaactgattaaatgtgaacattgagagaaagaccaaagatgtctttaggatagatgtctttagccaggcgtggtggcgcacggggatgcatgttttcaaacctgcctgattctctgaacctcctgggacatttgttaaatatgcaaattcacaggttccactctagacccacgaatcaatctccagaggtgggcctggttgggcatttttatcaagtttctaagtgattcttgtcatcagacaatgtat

SEQ ID NO: 138959 - DNA, 331 bp, Homo sapiens
caaaaaacaaacctgcccagtaattctctcttggcaataagaaaatgtcccagcttcttactgctgaatatcagcttcttcatggcatggcttgtagctacttctgcagactcatttttcaccagtcgctctcacatcctaatgctctaggcacacttgaggctcttaccagaaacacgcaggaactgctcccatgctttactcgggagtgtcgtccacctggaatacctccttcccttcttcctctgctatctcctgctcatccttcaaaacctagctcagatgttacctcttttgagaagccttctctacctgccccaggagaataagc

SEQ ID NO: 138960 - DNA, 372 bp, Homo sapiens
atagctgttcctgagtgtacaccaacgtctataagctgagaaattatgcctgctgaagatataaatagactcaagaagtagttggagacatttagacatgagagagccctaatgaactcataaggggacataggcagtaaattgctaaagttttctgggttcaaggaagtaatagccatgctcaatgaaggccattgccatgttgatgccattggcagaaattaccactgccctcagtgtacctatcttgtaggctgctgtgatatttcctgccctcctctgatccaccttgagtcttccaattcttccctatgtctctactacatgcagtttctggtttacttcttggattaccagaacattcttcttgcc

SEQ ID NO: 138961 - DNA, 258 bp, Homo sapiens
agttcgacggagactactctttttctcttaatcaacttcactttgattaaaaatgttttgttttgttgtgcttatttcttatgatgttctttcagtctgaggactcattgctatgtagtggtgaattctttgctatttttatttaattattgctctccctcccctttattttctaattctggaacttctagctatgtgttagaacttttaggtctagcttttgtaaaataaaggggagggagagtctccgtcgaactg

SEQ ID NO: 138962 - DNA, 295 bp, Homo sapiens
gttttgagatacaagacatctgaaattatatgaaagaaaaatgaaaggcttggatgacagcattgcatattgcagaccattaatatcaataatatttagggagctcctacttatcaataagaaaaaataatctcattgaaaatgagcagtgaaataagttcacatgtgaacaaatgtctgaaaagatgcttggctttgctaataattagaaaaatgctaattgaaaaattagatatttatttgtgctattgagattatcaaacattaaggcaattaagaacctcctctgttgaga

SEQ ID NO: 138963 - DNA, 509 bp, Homo sapiens
tcattacccaattgttcatttgagaaacaaactccacatgtatcagcaatgtgctcatttcctaaacaagcctattggctgcattactagatatagaatgaaatattttgattctaggtgccccattttaagaaagattgatattgacactgtccagggacatgtagtcagaacatgtaaggatctccagatttttgtgtcctgaaggttttcaaagacttggaggagagggcaatggtttgtagggtacagaatactcttattctgtgtggttcccaaagagagaactagaaccaatgatggagttttaggatgatttctctcacaatgcaggatatttaatcagcaattagagactttcataaatcaaacataagccagatgacatctatgaagaatattgtaaatattttttgcttagcatgggagattggtctgggtagtctctgcggcctcttttttaaatctggaattttgtatcatgaatgtcaaatgaatatttctttttc

SEQ ID NO: 138964 - DNA, 431 bp, Homo sapiens
gctctgtgtactcttgtccaaatgtaaaaatgctgcagcataaacaaataattcatggcataaaatacaatacaataaaatgaaaataactcattagttaagttcagcaaaacagagaagtaaaagatagagaaaggaagaaaactaagtgcccttgctggtgttagctggcaatgtcttttgtcttgaaagttctgggtgaatgtttttgggtttttggagagaatgtactcccactgaaatgagtaatccattgtgtctagcatcatactgggatttggaatgccattgtgttttagtatgaagtgcttgacaatgcattcacacccagaggtcagtttcaaaactgccctttagtttaaccctatagttgtgatttagtagaaggattcgaataactgcataatttgtttaccacacattattctgct

SEQ ID NO: 138965 - DNA, 984 bp, Homo sapiens
ctcatctccccttcccttgccagctgcctggctccatagagcaggaggtgtgtggcaaggacaggggcagttttccagcttccacctatccacgcctgggggagtttttggactgtcctgataattaattccagaggcagttttcagtcctgggtgggcggaggacatctcactaggcaggatcttcagcagaaagtgattctccatccgtcaactcatgcaggaagatgaagaaagcccagataatctccaacttgcattcgtttaggttttggtataccacccacctcactgtcagctgcagggcttggggctctgcctagaatcagaaatttgagccaaactgggaccctcagatggcagtgagccatcccatcagataactcccaagaggaagccaactcaaatatgaattttattattctggactatgaccctgatcagagttctcccaccccgaaaacctctgatagtctggtttgaaccagagtcaaataaaacagacaagatttttttttcctctgcacaaaagcaaaaaaacaaaacaaaaaaaagtctgccagtagtttcctgggtttgatgcccagataagcaaacactgttgcctatggctgttgctgttttcatcaagaaagaggttatatagtttgcatttccatccactctccctgattttatcttaacctagaatttctcctgaactaccccaaatgccaacttgaatttgggtagggctctgttaatcgagggaaccctcatcttcacttataaacctaattctctgttcctccctccaaagatcctgaaaagatctcctaaaggctggccaggatggggtggagtggggcagtgcacctgaagaaaaaaacttagctgccagctggctgtatgcaagttctccgaaaatttctattgtatgaaagggatggggtcaattgcagctcaaattaaggaagccctcctaacaggctgggttgtctgacc

SEQ ID NO: 138966 - DNA, 300 bp, Homo sapiens
cctggaagtcgcaagtactctcccctacttcccttaaactcacttgtatttctgaagaacagtaataaccctcatcttcacttataaacctaattctctgttcctccctccaaagatcctgaaaagatctcctaaaggctggccaggatggggtggagtggggcagtgcacctgaagaaaaaaacttagctgccagctggctgtatgcaagttctccgaaaatttctattgtatgaaagggatggggtcaattgcagctcaaattaaggaagccctcctaacaggctgggttgtctgacc

SEQ ID NO: 138967 - DNA, 250 bp, Homo sapiens
ctatgattgccagaaagctcagaaggctacatgaatattatccctaatacctgccaccccactcttaatcagtggtggcgttctggtaaaaagctggaagatgggcctaaattcttgaaggattcagtggtggcatgccaagggccactcatgctcacctggcaggcagctctgccctgcagcatgggtcatttgatggtggtgactctgccttttaaaaacaagggctcagctgggcacggtaactcac

SEQ ID NO: 138968 - DNA, 415 bp, Homo sapiens
accatgattatttgttgagggaatggagaaatactgtacatacacatatgttgtcaggtttatcattccagccctgggtttagtacagcatatgcataacacacactacacctaaataattagtttggtgaataagtaaatgttaaacattttagtctaagagccaaagaagctctattaaatagaaggctacaagacaactttaaaaaaagatatatatttccactgccttgaagtttccttctaaatctgactctttggtttacaaagttagggttttttgtttttcagagagaatctcattctgtctcccaggctggagtgcatctggtatgaacacagctcacagcagtgtcaaccttcttggctcaagtgatgctcctgcctcaggcctctgagtagctgggactacagg

SEQ ID NO: 138969 - DNA, 971 bp, Homo sapiens
ccagggaaagccatcctcacactccctggatccagggaacccacgcccaggtccccccagcttgttccctcagtgcccagctcttggctatttctttcacttcattccatcgcccagacaccattaccacatacacattccatccatacccccaggtctcagcctgccctaccttcccaggctccagtccctgttcctcagcatcccccaccacatcctgagtaagctttgtccccagataacctcttcagcatgatccttaaatctccctaagcctcagtttctcccctgtggaatgggggtaagaatctctttctctgaatgcccctgtgttaggaaataatttagaatacttcggaaacaaaaagctctgttcacacctaagcaatcagggcagtggccctggccttgccaggaacttaggcttttatctggatcctctttccaggcctctcaattaattccccaggtccttaacctttgggaaattagaaattaggaagagtgtcccacttctgacactgtgttccctcttggaacctgaccgtcaatgctagaagaacccttggaaaacatgctggcccagccctctagttttacaaataagggagtgcacagccctgagaggttacatggcctgcccaagatcacgcagtcaatggcagagtaaagagcatagcctaggcctccccactcctctagtaatgctctttcatcttctccaacctggctctaagccttgtccatcctgagccccatatctagcccaacctagtccctgaaaacaagaagtggcccttagaaatctctctccagtcccactatcagaggccaactgctgtcttccagtctccttcagcctgtgctcctctccctccctgactgacaggcagaaggtaccgtgcctctggatatccccacagtgccctgagctgcatctcttgccgactgctttaatacatcacagtgac

SEQ ID NO: 138970 - DNA, 422 bp, Homo sapiens
ttttgttatcttgtcaaagaaccaacttatttactttattctgctagctttgggtttactctgctccttttttcctagctcttatgggtatgatgttaggttattgattcaggcatgtgatttttttttttttctattttaatgtaggcatttatatctagaaattttactctgagaactgctttcactgcatcccctaggttttgggatattttgttttcattttcagtcatctctaagtattttgtaattttccttgtgatttattctttgatccattggtttaacagtgtgttaattttcatgtatttgtgagttttctagttttccttctgatattgatttctagtttcattcaattgtggtcagagagaacgtactttatatgactgcagccatttgaaatttattgagacttttca

SEQ ID NO: 138971 - DNA, 592 bp, Homo sapiens
ttctcccattccagaggaggaggtgttgaaggatttgttgttcacttagatcattaatgagggtctggaacagtcatctgaagtttgggggaaacgtcacgtctcctatgatgcgcctggctttagggaataatccttgtatccattttgggaacctgctctgggattccagatctgtggttttctgagcacgtctgtgtggaagctgctgcactgagacctatttagccaattattgagaagatgaggtccctttcgtgagtctgcacggagccgccgtacaccatgaaagcgctcacttgtttaaagtttgctctaactttgtacattttttcctttttagttttggctcttggtgctctgagagctaccacttcctgccagctggttcgttaccgcagggaaaatgagggacttttgggggcagatgtgtttccattccactatcataatgcccctaaaaatccttattgctcttgcagtattcctcgggggtccctgggccagaaagacatcagctcggagttcctccagcaactcaaagaagagagaaagctgttccccaaactcttccgctgtagcgccttctggg

SEQ ID NO: 138972 - DNA, 182 bp, Homo sapiens
agaagctgctctgcctcccattccatcttccataccaaccacgatgcactgactcctggcccaatcccatcaagcaggcttccagaagtatggagagagtcggcagcaactctctgcactgttcaatatgacttggaaagttaaattaaataacacaaaaaatgcagttcctccattacagt

SEQ ID NO: 138973 - DNA, 258 bp, Homo sapiens
ccagttaatctgtattgtgctttgtcatgtattgttactaaacagctcaagatcaaggggaagaaatgtatatgaggctcagttcatgttcagtttttttttttcagcattgcaacattgccactcatcatcatgagtgtagccctgtgtcaggtactgaaggtaatggaaaaggtatataaggttgatccctgtactcttgttgggaacttgagtggtatgaatagagaaggtgagttcttggggacagaggctaca

SEQ ID NO: 138974 - DNA, 385 bp, Homo sapiens
gctccctgacgccttctcccctgccttcatcttgtgctctttattggagaaaagtgtgaggtgaacgcacagaaaggtgctccccactgtggcaggttgaacgtttgtttttgttaattaatgtccatgcattctgctctttcagtaactagatttaggtaacctgggcctgtttcccatcacttcctggccttgtgactgggcaaataactttgtctccctgggcctcagtttccttaaccctgaaatgaaggggttagattccagcgctttgcattctctggccagctcttgagcacctgcgactccttcctgctcttcagttcttcctccatcctggctgacttttgcttggctcccgctgcccccattggcccccttaact

SEQ ID NO: 138975 - DNA, 499 bp, Homo sapiens
  misc_feature (499)..(499): n is a, c, g, or t
aaagagcacaggagagggaaccttctggagtgatataaatatcctgttttcatctgggtagtatttacaaaggcacatacatatttatatatatagaaaaactcatctgagtcatattccatcttaccacttccaactgccttacctccattaagttatttaacctatctaaacctatttttttttccagtacaagatgggaataatgactttgacacaggatatgaagattataaaacactcaataaatgatgatgatgatgatgataatgatgatgatgatgatgatgatctggtttcttatttgcttcaaataaggaacacagtggaataatgtatgagctcggtacggtggctcatgcctgtaatcccaacactttggaaggccaacgcagagggatcccttgaggccaggaattcaagacatcctcccaactggacctcccaaaatgctagcattacaggtgtgagcccacatgcctcagacaagactcagccn

SEQ ID NO: 138976 - DNA, 460 bp, Homo sapiens
aacctggcaagggagtgggcaccagaatctcaagggagcagagccagctgctgcacggccttaagctcagaaacctcagaaccagactctgccaccactcatgcacccacctagcgtttcattcttttgctcctcaaatatttactaaggtccagtggttggcaagggccaggcctgcatggcgtgcaggagaggccaggccctgccatcatggaagctgcgtgctggtcgggccagacacgctgagggagggaagggtgtgtggtgcagggcgccaggcagacctgctttaatccaggtggagtggggagggcctctgctgacactcatccaagctggggcccgactgagggtctgtgaatactccaggcagaggcccagaagtgggaccagtctagcttttttggggaactgaaagggcattgtgactagggtgttatgaggggcagacacggtcaca

SEQ ID NO: 138977 - DNA, 377 bp, Homo sapiens
  misc_feature (18)..(18): n is a, c, g, or t
attttttggcattcggcnttctttttactcactcaacattaaattgctgagatttggccaatcactgaagagttttaatcaggaagtgacacaattggaatttaattttgaaaaggccacactgtacttgccacgtgcagtacggactacagtggggccacggtggaagtaggattattcagattactggtgaactagaaaatgtaagttagggtagtgagtttcaaattaatcttgaatcaagcctaaatacataagatctttaatgtagtcttatttactatagaaaacataaggctaaaataattctttcacagattctagtcaactcccagcaggtcccaccgtgaggctcatccctagatggcattctgtaa

SEQ ID NO: 138978 - DNA, 239 bp, Homo sapiens
aaaagttttacttcactaataatcattgtagttaaaattaaaataatgagacactattgttctcatacaaattgtcaaattttcaaatttgccaatgatggcaaaaacactttgaaataggaaatatgccacttaatattagaaaagcaaaacttggaggtgaaatcccaagtttcaaaattatttaatgaccattgacccagtaagtcctaagattccattctagggactatgtatag

SEQ ID NO: 138979 - DNA, 352 bp, Homo sapiens
taggacaatgcagtatgggcattgctctgataaagtagagagtgtgtggaaacatgaagaaggatccccagtccagcctggtagtggtattcagagaaaactgtgaggaaagtggtactaagcagagaactgaactggccatggtggaaaagatggtgcttgtatttcattttattcatttgggactgtctgttgtttgctgtgaccttctaaaggcgtattttgctttgccatatacaaaaatttctttacctataaataggacaaatattctttcaagtgttgttaagaattttagcattgtgtacaatgggggcattctaagcaacctacataaatattttattggtag

SEQ ID NO: 138980 - DNA, 283 bp, Homo sapiens
  misc_feature (66)..(66): n is a, c, g, or t
gagtgctgattcatttatgctgtatatagttgaattatatataattaccttcttctggccaccccngctcccatcttagtattttgcaagatctaatcagttgtacaccatgatgcagctcagtgtcgaatatttccctgcagttctatcaggctttacttcacatattttcatgctctattgtcaggtgcatacatgttaaggattgttgtctccttagagaattcaccctcctatcattatgtattgctccattatgtaattatccctgataatttccatt

SEQ ID NO: 138981 - DNA, 457 bp, Homo sapiens
tatacccatttctcactataagtcacaaaacttggagttatgagtaaaaacttgctaagcaacccttgattttcattgtaattaacagaaaaactgcattgtctattaacagaaagataaaattgagtctcagattggtgatacaatgatacgcactcataagtctctacttaagatgaccataaaccaggtgcagtggttcatgcctgtaatttcagcactttgggaggccaaagtaggaggattgcttgagcccagaagtttgagaccagcctggaaaacatagtaagaccctgtctctataaaacataaaaaaatgagctgggtgtggtgatgcctgtgtgggggccctagttactggggaggctacagtaggagagcctgggagatccaggctgcagtaaaccgtgatcaagccgctgtaatccagcctaggcgacagagtgagactctatct

SEQ ID NO: 138982 - DNA, 189 bp, Homo sapiens
tctccaatctctcccccaaaggtgtctactcctgcaggcttacctgtaacctttgtcactcactcttctgattctgcaaacatataaaccacggagccacagccaagagaatctggacttgttcgtttttcctgaaataggatatcttaaataatccgtggctcagcactgcgcccttttttttctttt

SEQ ID NO: 138983 - DNA, 129 bp, Homo sapiens
agttctgtcctcagagggtttgggggtaaattacttaaagcactaaacatttagaacagtttggcacatggtaagtgcctgaattctatgagttttgtttctttattctttcaagtagattcctctaat

SEQ ID NO: 138984 - DNA, 328 bp, Homo sapiens
ctcatccctctgctgctctcttttctggtcagtagatgtgagagccccaacaagtcccaagaggatgggctaccaggcccaccccagactgtgttgctgggaaacacagacgagggaccatcagcccttttcaagcttctatccaccaaaggccttgcctctgagggctgcctgaaagcccagctgcttccctgcattggtcctgcaaggacaaggattatgctgctagtgtggtttgcagggagtgaccattagcttccctagggtctctaatctgcaacccctggctgcagttgtggcccaaagaggtgacggcagcacgtctgtg

SEQ ID NO: 138985 - DNA, 485 bp, Homo sapiens
ggggagcaaccacaggcttttcttttggtgtgttatagagaccctcatccatctggcatggttaggaaatgaaaaaattggttaggtaaaaattacaactaaattgtttgagtgccaaaacattttaatctcaaattttactttcttttctgaggaaaaatgttctgaaaacttctatacctccatgccttaatcaacagactagattgatagtgatttttttcctgatattttaggatcctcattgtgcacatttgtactgaagtcttcgggctcctcacttcactgtgtactgagtatctgctccccaagctgctgggcttttatataagttttttttttttctttttccccttccccttcacctctataaaatgttgagagctgtttctgcatggactgcatcttcagcggtcacactcacgctcctggacgcactgctggcctcagcactgcctgttagagctgtccgcagtggccacctc

SEQ ID NO: 138986 - DNA, 138 bp, Homo sapiens
tctaaagcattcctgcaaggtgctttcaagttgttggaaaaggataatccttagtcaggattgtggcaaagcctaaaataatctttgaccacaaagataatcgtagcatcccatgtgctcctgctcctgcaggtgcac

SEQ ID NO: 138987 - DNA, 244 bp, Homo sapiens
ctcttcgctgttccctctgcctggattgcgctcctccaagatgctttcgtggctggctccttctcgacttgcaggcctctgctctgagagaccctcctgaagggtctagctgaagtggacctccagcgtctcttcccatgacccagaaacatcccattctctgaaggcagctgtttgtgcggtctcatctgatcccttgtagattgagctgagattatgttcgcctttcccaaagaggccaggg

SEQ ID NO: 138988 - DNA, 398 bp, Homo sapiens
tagataaacagggtttgattcaactgaaaggggagctgtagccattatacaacctcagatgaggattgctgagagagatctagggatggtaaatggcgactcaaagactcctcaatgagtctaagcctagggaaggtgctgagtttgtggttcttaaagcaaaggactcgaggtcaccatcgctcagagatgagacaatctctcagctccatttcatgctgatatatttcctcagatccattacatgcgagcttaatttttttaaggtgaaggtttctgcaacctggaaaacaaagcaataatcttacaatacagtagaattgggcagaagtccccaactatctctgcacatcagaatcgctgagcacacttaataaaaacactacgtcttgggctcc

SEQ ID NO: 138989 - DNA, 645 bp, Homo sapiens
taaaagttatccaggcatggtggtgcactcctgtagcccctgcttctcgggagttcaaggatgcagtaagctatgatcacaccactgcactccagcctggatgacagagcaagagaccctgtctcaaaaaaataaagaaaatagccctcatcctttctgcttcattccgttggtccagatgatcacaatggtctgcccaggttcaaggggaggagccatgggaggtgtgtcagtgtcacaagaaaagcttcgttcttcttgtgggataagatacaccacagcagctgcctttgaaaagatggtctgccacacagccacatgggtttctgtggatgctgagaaaaacgtgtgtgttgtttctttacagattaagaaaagtctgtgcattgtctcattaaattaaatgcagccattagtatgtggctctggggatattgtgggaataggctatgccttgggtgattttttttcttctaaatgttcttcctggagtttgtgttgccagcctgaccatttctctttgctaatatgatatcacataaaaacatcatcatcattaatatggcagagtcagcagggtgggatacagaccgtgatccaggaaggcaggctggttcctggctcagcagctcctggggaggaggt

SEQ ID NO: 138990 - DNA, 321 bp, Homo sapiens
atgaatgttggaaaatgttcttattttatatacttgattgatggtttgactgtgtacattgttagttataaatcatttccctcagaattgatccactttcttttagcttcaagcattgctcttaaaaaagctagaagccattatatgtattacccccagccctccagctgttagaagtttttgaaggtcttcatccctgctattttgaaatttcacgttggggtttataactcctttttcacttattttactgagtagcttcttttgacagtctggttatgcactttttagccctgagaaactgtcttgtattctttcttt

SEQ ID NO: 138991 - DNA, 421 bp, Homo sapiens
ttgctcatgtccagaacttagctacatagcctgagctagctgcaagagagaactgaatatgtcatctgtagctgtatggctatgtgtatacataaactccagccaccctgatacacaatgagagggtgaatattggaggacagtcaggagtctgccacaagacccaagaaataagtagttaccctatggcctactgacagtgtcttcaaagcaaggacctggtagcttttccatcacacaataaaaatccagagtcatcacagacttcagggttcctacttattaaccctgtctgccccatctgaagtagcacccctgccccactctgctgtcttactatgcattctttttcttcataacctttgtctctacttaaccatgatatattttgtcttctccattaaaatataagttctctgaa

SEQ ID NO: 138992 - DNA, 500 bp, Homo sapiens
tctactatgtactgctttcaggaaagcactctcaggaaagcactttggaaatgatgtgaatgagtaatattaatatctgtcccaagacctcagggaaaggctgtcctgactacttctgataatagccctgggacattcagggagagacccactgatctggcctcccatgaccctctccaaccctattctcttaccagctggaatgagcctaatgaccctgatccagcaaagcctcagctcactcagccttaacccactaattctctcttactaggggagggaaccctcaaggcgtagagggttttccaagaaacaggctctgtgccacctactagctgacagtcttctaaaactggtaaagtcagcctggcccaaccctcacttgacagagggacagggcagaaggggagatataaggaagcaggggtattgggggcagaggcaggcagatcatgaggtcaggagattgagaccatcctggctgacatggtgaaaccccg

SEQ ID NO: 138993 - DNA, 434 bp, Homo sapiens
aggggagagagaacgagggaacattagctagaaagaatgagacccattccaacccttgcaaagggggaagaaatgagacccaatatgaacgtcaagagatgaaactacatttaaattaactgcctctaggagcaggaagagaacacctaccctagaaaactgagatgccagttcttaaatggaagaaatctctcagaggaatttcaggccagcagctctcaactgggctgggggaggagtttgtgtgcatcttactacccaagggttttttccttcccccagttctcactttcccttcccaagcccatcagaatggtggcttggaggcaaggctgccagggcaattccctaaaacacaactcccttcccaattccaagcatgagcatccaaacccagaaagttatgtagacaaccctggccttctctctccact

SEQ ID NO: 138994 - DNA, 302 bp, Homo sapiens
ctagtatttaaattaggttattgtaaaagctcctttgcacctgttgaaaatgctggcacagtttctccattagtaaaccctagaaatctgagctctctttcactgaagtttcttatttcaactggaacattcttcttgaatgtgtgtgataggatcagtgtacggttttcaaatggttcagtctttctgcaaccacaaagtttcttattcaggggagtgcttgcagttctcttcattcccctcctccacttgtagatgaagaaaagaaaggcttatattatttttgaggcagctgctaacaa

SEQ ID NO: 138995 - DNA, 660 bp, Homo sapiens
gtaccggtccgcagtcgtatggacccacacattgaggggcgcttacatctgagcagcttgccggtgctttatatatcgtttgtccacgttgcctagcaacgccatcctctccctgccatcctttttcctacccttcctaagactgcatttaaagcaacttctgctaaatacccatgttcagagggttagcaggcccagccctgcaggtccaactggcttctccctgctatcccctggttttagtgtattctcaaaatttttaatgagaacattaattttaactttttattttttattttattttttgtgacagagtgcgactctgtctcaaaaaaaaaaaaaagaaaaaaaaagaaaaaaagaaaaatgaacatgctcatggtgacctctgggcaactttgaaatagcctcagtttctcaacagccgtgccagggggcgggggtggggtgtggagagtgttagagttgagtttcagcaccagtccttgaaagtgcctttcagaagaacaggttttatcccccaaacagagagacagtggtcagttcaccgtacttcggtgcacgtttgcagacctggtgggaagaggggcatcttagagccgagacccattcactcttggcactccaggtggagctgggcctttggggcctggatatatc

SEQ ID NO: 138996 - DNA, 669 bp, Homo sapiens
cagcgaggagaccgcagccatcgccccacgagcccacacattgaggggcgcttacatctgagcagcttgccggtgctttatatatcgtttgtccacgttgcctagcaacgccatcctctccctgccatcctttttcctacccttcctaagactgcatttaaagcaacttctgctaaatacccatgttcagagggttagcaggcccagccctgcaggtccaactggcttctccctgctatcccctggttttagtgtattctcaaaatttttaatgagaacattaattttaactttttattttttattttattttttgtgacagagtgcgactctgtctcaaaaaaaaaaaaaagaaaaaaaaagaaaaaaagaaaaatgaacatgctcatggtgacctctgggcaactttgaaatagcctcagtttctcaacagccgtgccagggggcgggggtggggtgtggagagtgttagagttgagtttcagcaccagtccttgaaagtgcctttcagaagaacaggttttatcccccaaacagagagacagtggtcagttcaccgtacttcggtgcacgtttgcagacctggtgggaagaggggcatcttagagccgagacccattcactcttggcactccaggtggagctgggcctttggggcctggatatatc

SEQ ID NO: 138997 - DNA, 295 bp, Homo sapiens
ttttctgtctgactcggtaatttgacttatatgaaaacagccggcctgttctgtcccgtgttctgaagcctgttctttcccgtgtgtgacaagcgcgcaggattaaaaagcacagccttttctcttcagctcctgcatgtcccttccctgcactgcccagttgcatccctttccagcatcgtttctgctgctcttgaacctgtggagtgggaagcaagacagggatctctcattttatatatcagtaaggtgtggcgtggacagacccgtgtcgctccctggacaccactggtgg

SEQ ID NO: 138998 - DNA, 725 bp, Homo sapiens
caaaaagtatgtgctttcactgtctatctcctttaaattgcttgtggttttaggacatgaggcttttacacactttgttccctagtccccgcccccaaagagagagagtaatggttttggagagaggggaaaatatcccattgtctgccaaaacaagattataaagatcctgtcaggagcggctctttgggtctctctctgtggttgactcctgactcctcttaaggtgcggctttgcctgaacagttgggtggatctctgggaatagacattgctccacggtctttcttctgtagtggcatatctcatcctcagttctgagatagcccactttgaaacacagcttcatgggcctggaagttgcttcaaacttgcattaaccgtctcatctgagtcaaagtggcaaagaagacaagacagcgtgtttattgttttcctgggaatggagagagaatggagtataagctgtttgtagtcaggcctggagtaatgagggtacctaaatactgaaggcatttttatgcagattgactgaaacctgaatcaaattggaaggagagggctgaattttgatagactggaagtattagagaattttctatactttgactcaaggaatggtcaacttttaggaaaagcaactatattatgtctgttaagatcatagaatcttaacctgaaagggaccttggagactatttagtacaactctcttaaaaaaaaaa

SEQ ID NO: 138999 - DNA, 503 bp, Homo sapiens
  misc_feature (48)..(48): n is a, c, g, or t
  misc_feature (55)..(55): n is a, c, g, or t
  misc_feature (58)..(58): n is a, c, g, or t
  misc_feature (99)..(99): n is a, c, g, or t
acaagcattacaaaaattagccaggatgtggtagtacgtacctgtggncccagtnatnccagaggctgaggatttggcttgagcccaggaggtcaaganctcaatgagccaccgtgcccggccagtttcctacttctaacccttaggtaacttaagtatcctggatgttagtgactattttttctaaatgatttccaaattgctttattggcaagaatccacctctaggatgtccttcccgtattttgcttcatccttgaactaacatcctaggagcaacacatgctgcctctttttaaaggggcctggaggcgtggggcagacccttgaaggaaggaaggagttggtgagctgagatggtgaatgagttgacattgtgggcttctttcagaatccgtttctgaatctatgtagctacttgattacagtttgggcttctcaccatgatcagagcagtcttggcctatttttctcttcatttaaaggtacagaccgtcgtgagc

SEQ ID NO: 139000 - DNA, 1382 bp, Homo sapiens
agagcaaaactctgtctcaaaaaaaaaaaaaaagatttatttagagaaatgtgggagacttcttcggtaaagtcagtacttctgaaagagtattttctctcttaaaagactgcatccactctggagaagcacccagctgttccttttgaaactaagcatggactcatcctatgatccagcaagggcactcgtggtgtcactcatggtgtaccagagaaaatgaagactgactcccagcaccttcattcataacagcccaacactaggaactacccaaatgtcctgtaatggtgaatggttaaagaacctatgggacatccataccatggaatacgatccagccataaaatggaacaaacctttcacaccaggcaacaacttggaagaacctcaaggaaattatgctgagtgaaaaaaaaaaaaaagccagtctcaaaaatggtgcataagacatagttctatttatgtaacatccaaaaaaataacataattacagagatgaagaacagattagggattgtcagaggttagagatatggagagaggatgaatgtggctgtagagggatagctctagggagtcttgtggtgatggtagtatagtctcttgattgtggtggtggttatgcaaggctatggatgtggtaaaagtgtataaagttacacacacacacacacacaagtgcatatgtaactggtgaaatctgattaaactgtatggattggaccagtgtcaatttcttggttttgatattattttacagttgtgtatgatgctaatatttaggaggctgagaaaaaggtacatgagaatttcctggacatttctttgcaacctcctataaatctatcattatttcataagaaaagaaaaaaagcccacgtacacacattaaatctttatatttaaggtgacttgtttgaagatacaaagacgagcaggggagcaggggagggaattgctagctgtttggcatgtatggtggccactccctatgtattgccatagcaatatggcagtatttcctatgaacagcgtatttttaatatattaaccaggaagataaaaatgtgttctgcattcagtgctagccacagagtttcaaagacctgatggaaccaaagtgtgttaaggccttagctctgtgttatacttgccaaccttctaagggtatgggtatcacatagaagaaatctaaggacaggtttcagggcccttgatcattcctcaacctgtcagatcctgagtgtttatcacagaatgtttcagtaaatcagttatattacttgcccaccattttcactcctccagaagattatttctcaaacaataacaactttttctaggttccaaatattatatccattgtttggccttagttt

SEQ ID NO: 139001 - DNA, 1036 bp, Homo sapiens
ggctttcagagcccaagcgttgcaaggaggccatccacgacggagaactgcctggaaaggagagtgagagccaagcaggaaaacatgggcatctgggccggagtgggtgtggtagcagaaattggagattgtttccatagaagattgatcaaactagtaattatcttaaggaaaatgaaagacaaggttttcactgttggagaaggaagttacaaatacagcagaggaaaaaacaaggatgacccccgtggtgttgaattggaattcggcatattgttgtaaactcacggttttcaagatagagataatagattaataaatacacacacacacaagtgcatatgtaactggtgaaatctgattaaactgtatggattggaccagtgtcaatttcttggttttgatattattttacagttgtgtatgatgctaatatttaggaggctgagaaaaaggtacatgagaatttcctggacatttctttgcaacctcctataaatctatcattatttcataagaaaagaaaaaaagcccacgtacacacattaaatctttatatttaaggtgacttgtttgaagatacaaagacgagcaggggagcaggggagggaattgctagctgtttggcatgtatggtggccactccctatgtattgccatagcaatatggcagtatttcctatgaacagcgtatttttaatatattaaccaggaagataaaaatgtgttctgcattcagtgctagccacagagtttcaaagacctgatggaaccaaagtgtgttaaggccttagctctgtgttatacttgccaaccttctaagggtatgggtatcacatagaagaaatctaaggacaggtttcagggcccttgatcattcctcaacctgtcagatcctgagtgtttatcacagaatgtttcagtaaatcagttatattacttgcccaccattttcactcctccagaagattatttctcaaacaataacaactttttctaggttccaaatattatatccattgtttggccttagttt

SEQ ID NO: 139002 - DNA, 858 bp, Homo sapiens
ggctttcagagcccaagcgttgcaaggaggccatccacgacggagaactgcctggaaaggagagtgagagccaagcaggaaaacatgggcatctgggccggagtgggtgtggtagcagaaattggagattgtttccatagaagattgatcaaactagtaattatcttaaggaaaatgaaagacaaggttttcactgttggagaaggaagttacaaatacagcagaggaaaaaacaaggatgacccccgtggtgttgaattggaattcggcatattgttgtaaactcacggttttcaagatagagataatagattaataaatacatatgcaaataaaaaaaaaaaaaaaaaaaaaaaaaaaaaaaaaaaaaaaaaaaaaaaaaaaaaaaaaaaaaaaaacaaaaaaaaaaaaaaaaaacaaaacaaaaaaaataaagggggggggcccacagtaataacatctctgggaggcagctaactatactgcacgaaccctccagattttataaaaagaggaggacgtcataaagggaggacattatgacgaacaaggaggcgcggcgagtataaccactaagttgggtgagaagaaagtatgtgagcaggatttttggaggagagacaacatcatagggtggggaaagttaaagattgtatagtctggaaaacaaacaacactaggaaggatataaacaagcgcctccgtgggtgagagtaaaaactaaaattcttaggtagtagaatgagtgcggtggggtaacaaagacgaggagatatgatcgacgctgtggagaagcaactaagcgcgtcggacgcaagaggttgtatacgagaaaccaaatacttatcagcgcggagc

SEQ ID NO: 139003 - DNA, 314 bp, Homo sapiens
aggcttggcctaaaaatggcaggctaacaggagaagcagcttctgctgactaagacacagcagacaagttcctgggcaccgctgaacaagtctttaatgcagttaaaagtgtcctattctcggggtggcagggaggggggcaggccacaaaggacatgagtgttaggaaaagaagaaagcacagggaattaaggcaggaagggataggctaactactgttctgtgcaaatgcaattgggtttatgatcaggactgactgcccttacgtataaagttgctaacccccaagacctgaagggaaaagtcttttgaag

SEQ ID NO: 139004 - DNA, 410 bp, Homo sapiens
ggccctggcttttctcatgaaacctgtgcgaccttcagccaatcatgccccctctctagatcccaggtgtccctctgcacttgaattccatgtggcattgtagcaggacgagccgcagacaaaactcctcagacaccaagttaaagaaggaaggggtttattcggccgggggcatcagcaagactcctgtctcaagagccgagctccccgagtgagcatttcctgtcccttttaagggctcacaactctaagggggtgcgtgtgagagggtcgtgatcaattgagcaagcagggggtacgtgactgggggctgcacgcaccggtaattacgtgggaacaaaacaggaaagggattttcacagtgcatttctatacaatgtctgtaatctatagataacataaccgattag

SEQ ID NO: 139005 - DNA, 221 bp, Homo sapiens
catctggctcacagccttgcaccagaggcgtcacgagaatcaggaaaagttctcctctcatgccgaagacgggagggaaaccagagggactggtgagccttgagtcggccacaggtgtgtggaggatcgtgacttagcaagccggggacacgctgttaatggacttcctgctgtgggggtgagggctccgtgctccatctctgatgccctgtacacacctg

SEQ ID NO: 139006 - DNA, 363 bp, Homo sapiens
gcgcacacaggaatgcacacatggcgtgcgcagggcacaggctcacacacacggactcacacctatttgttccatgtacacctgagttgcagagacaagccagtaggtatacacgctcaggtctcacctggcccagagggcctagatgtacccaattcatacctggttattcagaacacacgtgcacacatgtgaagcccctgtgtgttcagagaacaaatgtgcacacatatgcctatgaggctgtgctgcagccacaactcactgcaggacacagagcacatatatataccatggcacagaggcagggatgcacatacacaatcactgtacagggtcatctgtgtgcacacacacgtgtac

SEQ ID NO: 139007 - DNA, 338 bp, Homo sapiens
gcacacacacagacaaatactcccgtaagacgaacatgccatagtcaaggttagataagctgctgtggcagcagagtagggtgatgcattcagactagtaattagaagggattcaaggaaaaagtaacctttgagatgagtgttgaaggtaactaaaattcttttgatcaatggatggagaggatgtctgtaagagtatgaagggcattccaaactgaaggaacatagacagtttcattttgtttatttatgtctaaggctgtaaaactcagagtattttacaaaggcgattccatgtatcaaaactattaagtttcattcagcaaaaattatatgta

SEQ ID NO: 139008 - DNA, 256 bp, Homo sapiens
ctgagtccagacacgccccaccttggcccagtgtccacctgcacctgctcacattcccatgtgccaccattccttgatgcagctcactctctagaccagtggctcccagccactggggtgcatgagagtctcctgaggagccgaggtacatgtgtgctcaagtcagcatccagacccactgggtccagtctccaggctggcccagtttgagaggtgggtttagagagtttctctgcaatagcactgggaataccta

SEQ ID NO: 139009 - DNA, 881 bp, Homo sapiens
ctctgatgcagtgaaaaaggtgggaagaaagggtgtcataacagtaaaggatgggaaaacactgaatgatggattagaaattattgaaagcttgaagtttgatcgaggctatgtttctccatactttattaatacatcaaaaggtcagaaatgtgaattccaggaggcatatgttctgttgagtgaaaagaaaatttctagtgtccagtccattgtacctgctcttgaaactgccagtgctcaccgtaagcctttggtcataatcactgaagatgttggtggagaagctctaagtacacttgtcttgaacagcctaaagattgattttcaggttgtggcagtcaaggctccagggttttgtgacaaagaaccagctcaaagatatggctgttactactgttggtgcagtgtttggagaagaggggttgatcctacattttgaagatgttcagcctcatgacttaggaaaagttggagaggtcattgtgaccaaagatgatgccatgctcttaaaaggaaaaggtggcaatgctcaaattgaaaaacatattcaagaaatcattgagcagttagatgtcacaactagtgaatatgaaaaggaaaaactgaatgactggcaaaactttcagatgggatagctatgccaaaggttggtgggacaagtgatgttgaagcgaatgaaaagaaagacagagttacagatgcccttaatgctaccagagctggtgttgaagaaggcattgttttgggagggggttgtgccctgctttggtgcattccagccttggactcattgactccagctaatgaagataaactaattggtatataaacaatcaaaacaacactcaaaattccagcaatgaccattgctaagaatg

SEQ ID NO: 139010 - DNA, 424 bp, Homo sapiens
tgctgggccctgttccaggtgctgccctcatgaaacatacattccagggagtctgtgaccctctggccctggactacgtgagaggtcagtggggttcatgcttcctgctcttcccaccttccatatctctgctttttgaaattgcttttttccccaaagtctgctctgcactctccttccccaagggtgtgatctcgtctccatcttagcctttcttacagctggccttacactcagctgctgggcccagatctggctgccccattgactaggagcttcttgagggcaggctcgcttcgttctcactccccacagggagcagggtgtgaccagaagtgtttgctgaattgaacagaattatcaggggctggtcaggcatggtggctcatgtctgtaatcccaacactttgggaggctgaggtag

SEQ ID NO: 139011 - DNA, 249 bp, Homo sapiens
ccgcgatccgatggccatgccccgtcccgatggcatgcatgttaatggagccagggctgtccaccttggagtagttgttcaaacagctgaggtggagtggggatgactcaggaagtggcagggacagttggtcccttgtgtgtgtctggatttcttccgtggaaccccatgttgtcgcttcacttgtttccttccaatgatggggagctctctacctgtactcccctcctttactctcaagggccaatc

SEQ ID NO: 139012 - DNA, 253 bp, Homo sapiens
ctggcaaccccacgctaccttctgcctctttgaatttgcttactccgggtacctcatataaatagagcatttgtccttttgtgactggctcatgtcgctcagcgtgatgtcttcaaggctcatccatgtggtagcgtgtgtgagcgtttcctgcctgccttagactgaggaatacgccattgtgtgcctgcaccacattctgtttgtttgttcacccatcggcagacacttgggtcgcctctaccccttggct

SEQ ID NO: 139013 - DNA, 729 bp, Homo sapiens
tgctgggattacaggcgtctggccttaatttgcattttcatcttgcagtgagctaacaggatcccgaaactctcctcgctgtaggagagtttgctctgctctttagtgaggaggctgtcctggggctctgggatttggtgaaatgattcctctccagttgttgatccctgcttcagccccacttctggctctgcccatttttgccttctcctgcccaagttggagtgccctggtataatgccgaatggatcctgccatcaaacccccatccttgaacccactcccattccagggctggagggaccctgagtgcatgcaccccttaggtgtggggtaagaggcacccaattgctctgttttcctccgcacccccacctctgttctagctccacattagacccatgacctcactgtggtggtcccagcctgaggccagcatttcccaaagctggtctcagtccaccatcatccatcacttggagaggctggaaaagcctgtaaatgtgggatcctgctggagacccactgaagcagaagcactaaggggagctgggactctgcatctaaagccacccaaggaggttttgtgctcacaaaaactctggaattccacctggggtctcctgaaggctgcaactgagactcccgagctacaattaaggtttcagaaggcccaatggatacctcgcctttacctgtgatttggtgctcaggcaattatgtaataaa

SEQ ID NO: 139014 - DNA, 752 bp, Homo sapiens
aaaaataaaaatgtctttctaggccaggtgcagtggctcacgcctgtaatcccagcattttcatcttgcagtgagctaacaggatcccgaaactctcctcgctgtaggagagtttgctctgctctttagtgaggaggctgtcctggggctctgggatttggtgaaatgattcctctccagttgttgatccctgcttcagccccacttctggctctgcccatttttgccttctcctgcccaagttggagtgccctggtataatgccgaatggatcctgccatcaaacccccatccttgaacccactcccattccagggctggagggaccctgagtgcatgcaccccttaggtgtggggtaagaggcacccaattgctctgttttcctccgcacccccacctctgttctagctccacattagacccatgacctcactgtggtggtcccagcctgaggccagcatttcccaaagctggtctcagtccaccatcatccatcacttggagaggctggaaaagcctgtaaatgtgggatcctgctggagacccactgaagcagaagcactaaggggagctgggactctgcatctaaagccacccaaggaggttttgtgctcacaaaaactctggaattccacctggggtctcctgaaggctgcaactgagactcccgagctacaattaaggtttcagaaggcccaatggatacctcgcctttacctgtgatttggtgctcaggcaattatgtaataaa

SEQ ID NO: 139015 - DNA, 278 bp, Homo sapiens
gggataggttactgatagtcatttttttcaggattcagtagaaaattaaagtaaatcgatcattttatagccccactggaatggctacaagggcatgttgctaagcaaatggtaatttaaatgtactgtgtaatttttctacgcaatttactgaaggcagattttatttctcagttaatatcagatgctctttatctcttagtgcatgatgtatcagtgatagacaaattattaatccatgtttcaatcaaatactgtggtttgacaactgctcatgt

SEQ ID NO: 139016 - DNA, 300 bp, Homo sapiens
atatgatctcctcctcagctcacacagtgcttgcattaccgtcgtaagccaacgtgccagctcacttgtgcgttcagcactaaatgctgtatagaggcggattcttcagcagatcaactaccgaatgaggctgggtgtttttgtctttgttctgtgtttgggttgagaaggttggtctttgggaggagtcaggatgaggaaggtggtgttctgctgggtaagcggatatgggcactgaaacaatcgcaggctgcctgaattccaggcagggtggggcacgaggatgctgggatgtgagcc

SEQ ID NO: 139017 - DNA, 268 bp, Homo sapiens
tctcccttctggataactacctagaggcaggtcccagaaaccctgggcacatccaaccaggggctgtgaaaggtgctctggggcctggttggcattggctttcctcaaatccagttccccactgagttgtccatgctggcgtccgacgtttcctctcctcaccttctctcttgaccccactcctatcgagctcttgctcctccgcctgctgagatggctcatagcccagtcctatcctgggggctgctccatcagcctcctcccactc

SEQ ID NO: 139018 - DNA, 504 bp, Homo sapiens
aacaaggaaacaaagaatcaaaagtttgtattcctttcattttgctgcaaatttatgtaaacaaagtggctgcaagggaggataaaacagtataacaccttactatccatccgccgttctcaactatgtgcaagacagccctaatctggaattttgttttttaaaaaaagtccaccttaatcaatgtggataaatgccttaacgttcattcattgaaggacgatcctataatagcagagctgtactcagaagattttactctcactctatacacagtgctaacagatggtcattggctctctagcccacagtatataatgcccaaaaccagaaaagggatttctagagggaggcatcaggaagcaggaagaattcataggaaaggagcagacaagtaaaccgcagaaagcagatgagcagtcgagaatgcacaatctggctccagttcgtgttggggcagatagcgctgaccactccaaggtccctgaaagcttggcaggaagt

SEQ ID NO: 139019 - DNA, 578 bp, Homo sapiens
tgaccaacttctctttgttacccctccctaattcctgttttccacatatggttacatttcttccctgctatataaacctctaattttagtcggtcagcaagacggaattgagactgatctcccagctccttggctatagtacctgattaaagccttcttccctggcaatattgttgtctcagggattggccttctgtacagtgatcagtgggacctagaccgaaaccctggcatttcagtaacagtttcatctgtgttaacacactcttcataacagtaacaggttcatttttctgaaactccattttgatcatattgggacttgtccacatctgtgccactgcatttgggttaacccagtcacatctccattagaaggttcatgcataccgggccgggcacggtggctcacacctgtaatcccagcactttgagaggctgaggcaggtggatcaggctggtcagtagttcaagacaagcccggccaacattggtgaaaccctgtctctactaaaaattaaaaaaatttaaaaaattagcctggtgtggtggcacttgcctgcggtcccagctactca

SEQ ID NO: 139020 - DNA, 701 bp, Homo sapiens
atgtgtgtgaacactggaaaaactatttccaaatatttgagagagaaattgcaacgttagaaaaaaatacagcattaggtgcacagaaaactaaacaaacgagtaaaaaagatacatatttttaactccagaaaaataacataaggtacagaaaaggaaaagaaatcatggggtactttctggctcagcataacagtctcaaaaattttgatgtaactattctgcaatcagtgctataccaagccatattgaagcctgaggcaaaagaaaaaatgaatgcccctataagttttgctttgtgtgtggtgtgtttttgttttgttttttgtttttagcaacagggtctcactttgtttcccaggctggtctctaactcctagacttaagcaatcctcccagctctgtctccaaagtgatgggattacaggtgtgtgccattgtgcccagcctgtttctgtgtatttaaaaaattttttttctagaatgttagtcagaaaaatattgaaaaatttaaaagtaggagaattaaactcacattagcttaaacttaaagattttatttatgccaaaaacagtattattttattctcctggctaatggaagcaaatgcatcaacagtacattttcaaatctaattcttttcttattttgttttcaaatgagcaaactgtcatgtacaatttctcttgaacaagtgaca

SEQ ID NO: 139021 - DNA, 579 bp, Homo sapiens
catacactgaagcaggggcggttttaaacattacacagaacttaaaacaatcgaacgaattcgtcctttgttctttttattacattaattattacattaatactgtttaaaaagaaactcaaaaggcattaaacttaggtaccaatctacacaaagtcctcgaaggggcctggcttggaccgaacgcgcttttgtgccgccccgctcgctcgcagcaccctgaaggccactgagcttagggcgctcggtccctagaagcgacttgaaatgagggggtcgccaggccaggccctcgctctgcaggggaggatccgaccaaagtttgccaagtttccaggcaagcccaactgcgcaaatgccgctttttagctccagcggcaggcctggcccgtgggagttttgccccaggggtctccgggccttcaaagaaaagtcccacgaggtggggggcgccgcctgggccgccggccagggggacccgtcgccccagggcacaaagaaagagcgcgcctacagggtgtcccctgaccccggcgactcggggccagggaggctcggcgcgccccagcggccgctctt

SEQ ID NO: 139022 - DNA, 783 bp, Homo sapiens
acctcaattatgtagactgttttatcactgctgtcccagcacagcacctggcacagttagctgttcaagacatctctgttgagtgggtaaatgaatgagttccactccaggttcctgtgtttgtgacctccaggggcctcttctcttcccttccccttctcacgtaggctgatgccctggtcttccagctatgcactctacctgcctctcgatgctctaagccgatgtgtccatcatttggctgtttgcatattctgattcatgacattttcctgcacagtgctggctgacactctgtagcccatcatatctgacttctctggccagcctgtatgcctaccatcagctcgccctccaaggcacagtccttccccgtttcctgatgttttcacttctgccccagccatgcaaatctcagcacacacagctcattaaatagctttgaacctctcccttctttttttttcaatactgtttggcaaatgctttccaagagcctactaagggctgggcacagcgcctcatgcctgtaatcccagcactttgggaggccgaggcagttagatcacctgaggtcagaggttggagaccagcctggccaacatggtgaaaccacatctctactaaaaatacaaaaattagctgggtgtggtggcaggcacctgtaatctcagctacttgggaggctgaggcaggagagtcgcttgaacccggcactccagcctgggtgacaagagcaaaactccttctcaaaaaaaaaaaaaagagcctactaagcaaaaa

SEQ ID NO: 139023 - DNA, 235 bp, Homo sapiens
cattcatatcaccttccctttctattctcaaaccaactgctacacataagcagaatcggtttttagttttctcctaaatgtgaaatcacaaaaggacttgacatcaaagaattccaaatcggtctttatcaatggctattccaaagccgtctgcaatcaatattgcaataactaaggctccacggaatcctatggtatcaatcccagcgatgaggccaataaaagaagccctgca

SEQ ID NO: 139024 - DNA, 193 bp, Homo sapiens
ccccagcccacttttaaggcacctgcctaaaaaacctgctcctaaagcatgttcttataggtcagtgttatcaacaccacctggtgtttattagaaatgcagaccctcaggccctacctagacctattaaatcagaatctacattttaacgagattccaggggatgtgtatgaacatcaggagtctgagaagt

SEQ ID NO: 139025 - DNA, 801 bp, Homo sapiens
cagccttagcaagtcaagtgcattttataagttgggattttctttgtatcagtgttttttcacagagccaaatctgtgaagctgaacctatatacatgattagttcagaatttttcttaaaaaacagttactacatgccaatttctttaggttggttatttctaatagataactttcccagttgactggaaaatactggtaacatactagtaacaatatttttcagtgaaactcatattctgttgactagttagatgaaacattttgttttctcttccctctagttaaaaacaacctttaatattttcttctcatattctgcaacctctttactctcaaactttaactccgtggaagaccttgctcattttttcagttttattatgtctgaaactttgctaactatgaaaaataatttaggagccattagttttagttttgaattatgtaatctaaaaagttttcagtttttagagttattctcttgattcctcttatggtttaaggtcttaggatggtgcttatcaaactgaagcgtatctctctgaggtataaactttactcagttgggggaaaaataactggtaattatgttaaacattttaataaaatagatgactgtattgtggaatgggatataagtatttcaaaaaatctgagtgcctataaaataaaacttcaaggacattttagaccattccatgggctgcctcagattgtgccttcaaatcctctggaatcatacatttactctcatattctaagttgactgtctctgtcatgaagattatagtcgtaaaa

SEQ ID NO: 139026 - DNA, 328 bp, Homo sapiens
ttgaactagtgttaaggtaggagaggcaaaaaaggatgagcattttggaggcatcacctagaatggatatcagaggagagagacatgtgagagcaggtgtgggtaaacagactatatcctggtgctttgggagtttacagaagtaaagcatgcttttagtaacctattctgaacttggagaacttgctgaaactcgaatatatatttttaagagctaatggctatattgtttgtacctggaaagcaaatcatgttcctgaaatatttctgtgctctcttaaattattactactgccatgtgaatggatttactgtaggattcctttaa

SEQ ID NO: 139027 - DNA, 577 bp, Homo sapiens
aatcagtgaggacaaaactggtattttctgcttcttaaaaaccatcaggtttcatccatcaacgaagactttgagtgcaaccaaacaggtaaaatatgagggaaaacaaatgatggatgagttaagcactaggactggaaaattataaattcttaaaattgaggagcttcatggaaggttatacttggaaacttctttacagaaaaactctattgcatagggaatggaatgtagcaaacacatacagaggaaaggaaacctagaaccaaaattaggtcacaaaagaatatttgcaactgtggtttccggaggtgggcgctggtgcacgaagccttccaggtatgaaactttgcctttgttttcttctcacttccctcacgttccttccttccccccatgtctcttccttcctgctgggcttgttctcacagcccttgcaagcatgcaaagagtcactaaaaatactgaggaatcctcagagcaaaagagatatttttctcctaactgagagtactacaagataattgcaggtgaaatacaaagtttaaaaccatcttcagatttcacaagtgttgta

SEQ ID NO: 139028 - DNA, 1009 bp, Homo sapiens
acctattttttcttgctcctcccactgaggataactgtaaaccctggaaaaaacaagaggcaaccaaaggagaattctgaaaggtgaaaagaggaaggcaaactagttatgtcagtactagagaaacaacataacagcagggacctcacaacccccaccaacaacagcaacaacagaaggtggcccaggcctagtgtttctgaatgccaacctagcaatagagggtggcccagctagactaattctcacccatatctaacagaaatccctccagcaacatccacagcacctgtaaagagccctaatgaccgtaagtggttaagagaaggggtttccttcctcaccggacctgcagcttctctttcccaccaagagacatcaggtatctgagtggctccaacaagaaggattctagaagtggcccagaaagcctctttgtttctgtgggactgcgactctcgtctacccagaggcactgaacattcagagacactggacatctacccagaaaacaccaggaaaggggatctggccacaacatgcagtcaagtatgggaagcccctgtgttctcacaggcaagagaattttgcttcttcacccagagacaccaagcagctgggtggcattagcaagggagatctggtcataatgggtgtgtggtccaggaagcctctttatccttgtgggccagagacttccctctcccactcagaaacactgggcagccaggtagcaccaataaaggtgatcctgccacaacaagaaacccaaaatgggaagcctctttgtccttgcaggctggagatccccattccatacttagaccaggtggcctggcttggggaatttcttgccacccacataggcagtaccagtagagaccagcgggagccccagtgataccatataaaccaaacataccaagatagcactgcaaaggctattttccaaggaaattgtcattgaaactacagcccacaaaagtaggtcaggacctgcatgttaaac

SEQ ID NO: 139029 - DNA, 685 bp, Homo sapiens
aagtccgagtccggtgcagagaacgaagccccttctctttcccaccaagagacatcaggtatctgagtggctccaacaagaaggattctagaagtggcccagaaagcctctttgtttctgtgggactgcgactctcgtctacccagaggcactgaacattcagagacactggacatctacccagaaaacaccaggaaaggggatctggccacaacatgcagtcaagtatgggaagcccctgtgttctcacaggcaagagaattttgcttcttcacccagagacaccaagcagctgggtggcattagcaagggagatctggtcataatgggtgtgtggtccaggaagcctctttatccttgtgggccagagacttccctctcccactcagaaacactgggcagccaggtagcaccaataaaggtgatcctgccacaacaagaaacccaaaatgggaagcctctttgtccttgcaggctggagatccccattccatacttagaccaggtggcctggcttggggaatttcttgccacccacataggcagtaccagtagagaccagcgggagccccagtgataccatataaaccaaacataccaagatagcactgcaaaggctattttccaaggaaattgtcattgaaactacagcccacaaaagtaggtcaggacctgcatgttaaac

SEQ ID NO: 139030 - DNA, 269 bp, Homo sapiens
aactcgggcaggattacagggaagccaggaggagtggaggtttgtgcttcctctttcaaggagaaatgggtgaggttgcaggccagcacaattctggagtggtagaaacagttgtctaagtgggaaggggttgtggcagcggtctgagggccacagaatatgcctccttccataaggtataaggaagcccctacagttctttagttctgtttctttttcttttttaattttttgagacagggtcttgctctattgcccaggctggagtg

SEQ ID NO: 139031 - DNA, 230 bp, Homo sapiens
tgctggaattacaggcgtgagccaccacgcccagccacactattttattaatgggaagaaggaagataatttcttctttcaagggacttatatttgaaaagtcaccacataacaggatttggatctggatttagaagttttcaattctgtttcctttttgggttttgttggaactgatgaggaagtaaggtagagaaagaagacaaatgggatagaaagtgagggtagga

SEQ ID NO: 139032 - DNA, 130 bp, Homo sapiens
tagttgaaatatatacaatttcagcttgaatccaggcttcacatatcaggctctttttagacctgtgtcattttccaatttcaaagttatcagttgcccaagggtctttctgtgccatgcaaagatgtgc

SEQ ID NO: 139033 - DNA, 281 bp, Homo sapiens
aagggcagtaactcattctggatgttactaaaagtagaaaacaaaaatccaaaaacaaacctacagcctcatttacaattagaatctgtctgggccttctgatttctaaagtctgtgaggctgccaggattcaccaattctcctttcccctgaggcccagcaactattgatttatagcttaaactctgtgaaggtccacagacctttgaaaggaacttgctggtactttgtcagtcgtgtacacctaactgactcctcctacgaggtacagtctcctcata

SEQ ID NO: 139034 - DNA, 222 bp, Homo sapiens
caaaggcctaggtccttgcctccagggacaggggacagagaagggaacaagggggaggggaggcctctgggcttctatctggacttctatctgcagtgctccctactgtccctgcccttcatcccaggaccactgctctcatcctgacctccacccgccaccagacagcctcctaactaactcccctgcatccttccaccccagcctcagaggctccttcct

SEQ ID NO: 139035 - DNA, 292 bp, Homo sapiens
tcatgcaacatgtgcctgtgtccagcttctctcacttaatgtcatattttcaagattgattaatgttgtagcatgtatcagcatttcatttcttcttattgcaaatattcgttgtatttataccttatcttatatatgcattgtccagttcatgaactatgattagcatatttctactttttggctattttgaataatgatggtatgaagatttgtgtacaggttttgtgttgatgtgttttcgtttctcttcattatatacttaacagtgaaattgctgggtcatatggaa

SEQ ID NO: 139036 - DNA, 481 bp, Homo sapiens
gacagagaagaaagccctggaattctagcttcaaatagctaataagcaccatttctttttcttcataaggtgtgctaccagaggggaatctgaataagcagcattcatttttaaccaggagcttcctctgcagttgaaattctgccttgctgctgcagacgcctctgtatgcatgactcgaggcttctgcctctcgagcttgtagctttcagaagcaataagtgaaggcagggaacgtttttatctagcacagggcttaaccctgttttccagccaatatcaggaaatgtccttgttttaatagggcccaagataatcactataaaaattataaaagtcactttttaatctctgaataatctcaagaaggaaagagagaagacagcatgagacctcctagtaaaacaggtgccccttcgaagtctggaggaggttgtgtttagaataaatcaaagcaagcagttgtacagcaggcagcctc

SEQ ID NO: 139037 - DNA, 459 bp, Homo sapiens
tctggtgccctactttaagtgaagtgatcctgtttactttctttaaaggacgggaatctgttgccctcacttttttgttaacagaatggaccccccaccacctcgcatcagcacacactcccctcctgttctctcctgggaaaagtccgtcagttagggtgatttccctaaggagctttctctgataggcacagggatcctttagagcaatgtcaatggggctagttgatcagttacagacacacctacccttgagttttacagaagaccttatttctgagtgacgtttccctgggaattccaatgacttttgaatgacttttacaatgactttcgcctgggagttccacctgggggcatttgttacaagtgacagaggccattccaattctcactccccatttagccaacatctctcctttccattcatacccaacgccgtgcccctgtcttgtgaca

SEQ ID NO: 139038 - DNA, 247 bp, Homo sapiens
cttcttggatgtctgcccagggagacaagcatctctttgataatcagcagcatacagctttgtctctacctgttacttgaaagcttcatacacaagacctgtctcccctgccagcaatttgaagacaggtaccatggcttactgccacttctgactttgcttacctaggtgctccttatggacaggatgccatcttggtcatttttgcatctttggtgcccaacagtgtttggcacacagtaggtac

SEQ ID NO: 139039 - DNA, 381 bp, Homo sapiens
ggtgatcaaggaaatgcaactgaagacagtgatgatgtagtctaagcccattttagtggcaaaggttaagaagtagggcaatatccagcattaaagagactgtggctacacaggtccacttcggcattgctggtgggagtgtaaattggtacaaccacctttggaaaagagtgttcactatctcctaaagattctgatcccttatggccaagcaaatctactagtagttctatccccaaaggagactcttgaacatttacaacaagagacatgtacaagaatgttcttagcagcagtgctttcaatagaagaaacactgacacaacccaatgcctgaaattgaaagcatgaatgaacaaattatggcttattcacacaatg

SEQ ID NO: 139040 - DNA, 159 bp, Homo sapiens
tctggtttttcagaggaagatatgacacattcattaaggtgattcaatatagtgcatatctaaataatatatcatttgttctcttgctagtctcagcgaaatgtcatttgctcttgtgttagtctcttgtcagtctcagaatctctttatagccttcaa

SEQ ID NO: 139041 - DNA, 161 bp, Homo sapiens
ggtcgcacggtgctggggactccctctccctgcccatgagagggagctgacaggtgtgcctggtgtttcctcccagtgaaaacacctggggaaaaccaggctggagataggggctctgagcccaggactgagagccagccaggttccagaacatgacacct

SEQ ID NO: 139042 - DNA, 358 bp, Homo sapiens
ctccatcgtgactttcttcacacaaccaaatctcagagacatttgattatgcctcttctcaactgaaagaggtgccacagaataaaatctaaatttcttaaagtagcacccagggcctgcatgatctggtcctctcaacctcactattcctacttcctctcccatatcataaccatcccacagacttacgtggctttgcatattctagtattatggcctataattcaccctcctccccaacagcttgaaatgctactggattctctaaagctcaagtcaaatgccactctcctccctgaattgtttctccccaatgagatatttcccttctctgtgcccacctgtacttcctttgaat

SEQ ID NO: 139043 - DNA, 480 bp, Homo sapiens
ctgtcttcatccttttctccttcagcggagatttatttcttccaatttctgcagccaactctgtgggagttgttgggttggtgaacccgaggggtggaagagacagctctgggaccactgaatagcctagctttgtttaggggcatgttttcctgactgtttatggtgcctgacagggttgtttttgttctggggagagctcatttgataaagcaggctgctgagaaagctgtggggctccactttttctggggatatctccaaggccccccagggagctgcgatttagcatcccgcaggcaccccttgctcacggaggtcatctgaggccctttgcatcctcgtcccaagtctaactcagatagtggaggggagagaaactgttgccagcttcaccagcttaatagtagtcaggaaggagttcaggccagcaagattccattttaatcgtcaatcacacattaccaaataaaaaagaaa

SEQ ID NO: 139044 - DNA, 350 bp, Homo sapiens
cctccaagacggcccctatatgtctcacctcctggtacacatgcccttggactgacctgtgtaaccaaaaggatactgtggaaataagtgtgacttttgaggctaagtcacagaagactctgcagtttctatcttgcttgctcttggatcactcactctggggcagccagctgccatgctgtgaggatactcaagcaacccagcagtggtccacatggtgaggactgcagcctcccaccaacagccagcactcacagcccaggcaaatgagtaagccgccttaggagaggattcttgagcctcagtcaagtctttaaacaactgcagtcccagccgacatcttgacagca

SEQ ID NO: 139045 - DNA, 277 bp, Homo sapiens
gggaaattcaaggaataataaactgaatgaaaaaatgggctttaccaacctgctaaaggccagatatttctgccagtaatggggaaaaatttgagtcaattagatcaatctctgtaacccggtcttctttgtaagacactttgaaaaagtctagagttgtagactttcagagcaaacctcgcacatttctgtatggatgggcacttccccctgtactcactgatcccaaaccagggcacacaacagtcaccttgacagcttctaaaattacagattt

SEQ ID NO: 139046 - DNA, 271 bp, Homo sapiens
taatttgtgcatgtgggggaaaatgaggaaggatatttacagaaatgttgtcatgattcttatttctgggtgattagactgcagtggagttcctcgccttgccccttctttttacttatttgtttttttcctaagccttctgtggtcaacatgtgttacctttatagaaagaaaacaaccacaataagagctttgtgggaagtgttcagagcaggagattctaaaccttaggagtctggatttagcaacccaattcccaccactgctcgtg

SEQ ID NO: 139047 - DNA, 280 bp, Homo sapiens
agctgggactaaaggtatccaccaccacgcctggctaatttttgtatttttagtagagatggggtttcaccatgttgatcaggctggtctcgaactctggcctcaagtgatctgctcgccttggcctcccaaaagtgctgggattacaggcatgagcagctgtgcccagctggataattatttaataaattggggagcataggaagcatagtatttgtgaagtgggtaggcaggtgtgatgggggtagtgatgttacatttggggcattttgaagttggt

SEQ ID NO: 139048 - DNA, 244 bp, Homo sapiens
tccaaattaatttcttgaaaactcaactgtcccgggctttcaaaccagggggttaaattgatctgatgtacaccagaggccttgggaacgtcctggccagggtaataaatgaaatgcattaaataatcttaattgatacagtaatactcagggggcagctgtattgccaaattgtccctttattcatttctgctcatttagatatcaatcagatttctaaagagagatgcagtgcatctggatg

SEQ ID NO: 139049 - DNA, 294 bp, Homo sapiens
gcctgcaccgcagcccaagctgaggtcacctctccctcgactctcactgggctcccgtctttgctccactccgtgtcccccacatggcagccagacagatccttctggagcagaggctagatcatggcacccctgctcagggccctcatctccctcaaaccccaagtccttaccgtgcctccacggctctatacgatctggcgctggccacatctggaccagcacgggggccattctgccctctcttcgcccctacctcattggagcaagccaagagccctcccagctcagtct

SEQ ID NO: 139050 - DNA, 670 bp, Homo sapiens
ccttattagaggattctgctcatgccagggtgaggtagtaagttgtattgttgtggggtagggatattaggccccaattagaagataactatacaacttactactttccctggtgtgtggcatattcacacttagtcttagcagtgttgcctccatcagacaaagttgtagatgttccttggataatttggactggaagaaaagagacatggaaggggacagatggtgtttagggtgaggcagatgtcattataaagtgacttgtctttcattaattggagcatataattattttacctttgggcatgaactcattttgctattcttcaactgtgtaatgattgcattttattagtaatagaacaggaatgtgtgcaagggaatggaaagcatactttaagaattttgggccaggcgcagtggttcatgcctgtaatcccagcatttttgggaggccgaggcgggtggatcacctgaggtcaggagttcgagaccaacctggccaacacggcgaaaccccgcctctactcaaaatacaaaaattagccaggcttggtgacactcgcctgtggtcccagctactcaggaggctgaggcaggagaattgcttgaacccaggaagtggaggcttcagtgagctgagaacacgccactgcactccagcctgggc

SEQ ID NO: 139051 - DNA, 432 bp, Homo sapiens
aaagacaacagcaacaaaaaagttagaaaaatttatgggctgggtgtggtggctaacgcctgtaatcccagcactttgggaggctgaagtgggaggatcacgtgaagccaggagttcgagaccagcctgggcgacatactacgactccatctttaaaagaatttttttttaaattagctcatgtggcggcacgtattcgtagtcccagctactcacgaggctgagacaggaggatggcttgaccccaggagttccaggctgcggtgaaatatgattgtgccactgcactctggcctgggcaacagagatcctgtctttaaaagcaaaaacaaacaaacaaacaaaaaacttgtgtatttaagtttacaagttccaactcaattaaaatttcattttaagttagtccatatactaagggcccccacagaggta

SEQ ID NO: 139052 - DNA, 465 bp, Homo sapiens
tggacccacggcgggtgtctagggattacataaaaacaacaataacaaatctcatgaaaatttcacaaatggaagtgaaacaatatcacctctattatacagatgtgaaaagagaggcccgatgaggtctagcaacttgccctaaatcatatccctagcagagcagatggagaggcaggattcaaacccagaattcctttttttttctttgagacagagtcttgctctgtcaccaggctggagtgcggtggcataatctgggctactgcaagctccacctcccaggttcacaccattctcttgcctcagccttctgagtagctgggactacaggcacacgccaccacgctgggctaatgttttggtatttttagtagagacagggtttcaccgtgttaaccaggatggtctctatctcctgacgtcatgatccgcctgagtacaacctgccggtggggggatcct

SEQ ID NO: 139053 - DNA, 742 bp, Homo sapiens
cttgcctgggcccagccagtagcctgttgctgttggcaaaaagcctgggccttggagcccgctggccgtcaaggtcctgggcccattgagaagaaggaagaaaggttgggccgcaaactaggagcagctcccagaatttccatggaaagctggaacaatgcctgctgacagcaactttctaacagtaactttcccgacccagacaccacaaagctagcacaacggagctcagatgcaggctaggactcggtccatgcctcaggaaccagggaaagccatcctcacactccctggatccagggaacccacgcccagggccccccagcttgttccctcagtgcccagctcttggctatttctttcacttcattccatcgcccagacaccattaccacatacacattccatccatacccccaggtctcagcctgccctaccttcccaggctccagtccctgttcctcagcatcccccaccacatcctgagtaagctttgtccccagataacctcttcagcatgatccttaaatctccctaagcctcagtttctcccctgtggaatgggggtaagaatctctttctctgaatgcccctgtgttaggaaataatttagaatacttcggaaacaaaaagctctgttcacacctaagcaatcagggcagtggcctggccttgccaggaacttaggcttttatctggatcctctttccaggcctctcaattaattccccaggtccttaac

SEQ ID NO: 139054 - DNA, 525 bp, Homo sapiens
catggggaaacccctttcgggcttttgactcggtccatgcctcaggaaccagggaaagccatcctcacactccctggatccagggaacccacgcccagggccccccagcttgttccctcagtgcccagctcttggctatttctttcacttcattccatcgcccagacaccattaccacatacacattccatccatacccccaggtctcagcctgccctaccttcccaggctccagtccctgttcctcagcatcccccaccacatcctgagtaagctttgtccccagataacctcttcagcatgatccttaaatctccctaagcctcagtttctcccctgtggaatgggggtaagaatctctttctctgaatgcccctgtgttaggaaataatttagaatacttcggaaacaaaaagctctgttcacacctaagcaatcagggcagtggcctggccttgccaggaacttaggcttttatctggatcctctttccaggcctctcaattaattccccaggtccttaac

SEQ ID NO: 139055 - DNA, 1628 bp, Homo sapiens
  misc_feature (37)..(37): n is a, c, g, or t
  misc_feature (92)..(92): n is a, c, g, or t
cgggcgcgagccgccgcagccccgcgcccgctgctcnctgcggagccgttttgtgccgcggcgcgggggaacggggacgcggggcggggggngcggagccggcgggcgcagcctcagcatggacgtgacagtctcggagctcctggagctcttcctgcagagcccgctggtgacctgggtgaaaacttttggcccgtttggaagcggcagccaggacaacctgactatgtacatggatttagtggacggcatctttttgaaccaaattatgctgcaaatagatcccaggcccacaaatcaacgcatcaataagcacgtcaacaatgatgtgaaccttcgcattcagaatttgaccatcttggtgagaaacattaagacctactaccaggatagaccctttttccggtaactaaacttcttgcgggcagacacagcgtttgagttttcgcattggcttcaaacaaacccagtggaagtggacagtgaacaagacacccccgcaggaggcccgggcacggggtgtggctgccaggcctggccatggaaggccatcactgtgggctcttctgggagtggcactgacagccagcaaggagaatgggtgctggggcggagtggaagaaggtgagcttgaggccggagttcctaccccaggaggcaccgtcagcgtcccacttctgctcgtgtgatcccctggaggcacctgaatcaggcagtaaacatggagtgagaaacaccggagtagaagaccttgcaacagcacatgtgtgggcccagttcctagctgccccgggtggccaaggccacatcctgtacacacaggtctgggagtgtctgcatttcagcccttgaccgtgaacttgaccctctggaggtgtccatcttgatgtgatcctctgactgcaacctcatcctctgcctctcagagctgcctccccctgtggcttcttgccctgaggcatgggaggcgttggtgccaggagcttggggtttgagtcaggttggctcggggataagacccagcctttccacacattagtttgtgatgctgggtcatagtgcgtctgtttgctccctgtcaagggaccagtaacatgaggggtcagagaagggatcagaactctcgtgggcctccagtgtgtcgcaagtttttgctgttctgcttttcctcagctgctggtgggaatgcaaattgctgtgctgactttggaaaaactctccggcagtaaagcctaaagttccacatccacacaccgtactgtggcccagctgatttctctcctaagggtatcccggagtaacttctgcacatggatgcctgggacttcacagcccttctgcacacaataacagaaacctggaagccacccagatgcccatcagtgggagaagggatgaatacacgaagacacgatcacacaatggaatattatacagctgtccaaacacattaactgcagcataacttcagtgatgtaggtggattctggcaatatcataaatattagtaaaaatagcatgttcccaatgatgacttacagcactatgccttttaaaaataaagttaaaagcaactacaatgactgtactctctaggaaaatttacaggtgcaataaaactacataaa

SEQ ID NO: 139056 - DNA, 551 bp, Homo sapiens
  misc_feature (37)..(37): n is a, c, g, or t
  misc_feature (92)..(92): n is a, c, g, or t
cgggcgcgagccgccgcagccccgcgcccgctgctcnctgcggagccgttttgtgccgcggcgcgggggaacggggacgcggggcggggggngcggagccggcgggcgcagcctcagcatggacgtgacagtctcggagctcctggagctcttcctgcagagcccgctggtgacctgggtgaaaacttttggcccgtttggaagcggcagccaggacaacctgactatgtacatggatttagtggacggcatctttttgaaccaaattatgctgcaaatagatcccaggcccacaaatcaacgcatcaataagcacgtcaacaatgatgtgaaccttcgcattcagaatttgaccatcttggtgagaaacattaagacctactaccagagatggggtgatgattatgatgaagaaggtgaagaagcagatgaggaaggggaagaaggaggagatgaggaaaatgatccagactatgacccaaagaaggatcaaaacccaacagagtgcaagcagcagtgaagcaggatggtctaccttccgcttccctgga

SEQ ID NO: 139057 - DNA, 597 bp, Homo sapiens
  misc_feature (37)..(37): n is a, c, g, or t
  misc_feature (92)..(92): n is a, c, g, or t
cgggcgcgagccgccgcagccccgcgcccgctgctcnctgcggagccgttttgtgccgcggcgcgggggaacggggacgcggggcggggggngcggagccggcgggcgcagcctcagcatggacgtgacagtctcggagctcctggagctcttcctgcagagcccgctggtgacctgggtgaaaacttttggcccgtttggaagcggcagccaggacaacctgactatgtacatggatttagtggacggcatctttttgaaccaaattatgctgcaaatagatcccaggcccacaaatcaacgcatcaataagcacgtcaacaatgatgtgaaccttcgcattcagaatttgaccatcttggtgagaaacattaagacctactaccagagatggggtgatgattatgatgaagaaggtgaagaagcagatgaggaaggggaagaaggaggagatgaggaaaatgatccagactatgacccaaagaaggatcaaaacccaacagagtgcaagcagcagtgaagcaggatgtatgtgccttgaggccgacagatgggaaggggggaaagaggagaacaaggaagttcgagtcatgaact

SEQ ID NO: 139058 - DNA, 269 bp, Homo sapiens
gcacgtgttggagagagcagctgatgggcgtcccaggtgtgcagttggggtaggctggccaccctttcctcccggtgccagtgcgtagtgtgcagcacaatagtgaaggtcatagtttttccacctgagaatttttggtttattatttttaagagatggggtgatgattatgatgaagaaggtgaagaagcagatgaggaaggggaagaaggaggagatgaggaaaatgatccagactatgacccaaagaaggatcaaaacccaacaga

SEQ ID NO: 139059 - DNA, 1636 bp, Homo sapiens
ctgcctcggggcggaccgggtcccagtggtcactcctgtccctggggtttagccactcccgaaaaggaccccattcttcccaaccaaatatctcatgtagtttttctgaatccctgagaccagccggtggatggcggtgacgggtggggaatggggggcgccgaatgggaaagcgaacagactggggtgaaaacttttggcccgtttggaagcggcagccaggacaacctgactatgtacatggatttagtggacggcatctttttgaaccaaattatgctgcaaatagatcccaggcccacaaatcaacgcatcaataagcacgtcaacaatgatgtgaaccttcgcattcagaatttgaccatcttggtgagaaacattaagacctactaccaggatagaccctttttccggtaactaaacttcttgcgggcagacacagcgtttgagttttcgcattggcttcaaacaaacccagtggaagtggacagtgaacaagacacccccgcaggaggcccgggcacggggtgtggctgccaggcctggccatggaaggccatcactgtgggctcttctgggagtggcactgacagccagcaaggagaatgggtgctggggcggagtggaagaaggtgagcttgaggccggagttcctaccccaggaggcaccgtcagcgtcccacttctgctcgtgtgatcccctggaggcacctgaatcaggcagtaaacatggagtgagaaacaccggagtagaagaccttgcaacagcacatgtgtgggcccagttcctagctgccccgggtggccaaggccacatcctgtacacacaggtctgggagtgtctgcatttcagcccttgaccgtgaacttgaccctctggaggtgtccatcttgatgtgatcctctgactgcaacctcatcctctgcctctcagagctgcctccccctgtggcttcttgccctgaggcatgggaggcgttggtgccaggagcttggggtttgagtcaggttggctcggggataagacccagcctttccacacattagtttgtgatgctgggtcatagtgcgtctgtttgctccctgtcaagggaccagtaacatgaggggtcagagaagggatcagaactctcgtgggcctccagtgtgtcgcaagtttttgctgttctgcttttcctcagctgctggtgggaatgcaaattgctgtgctgactttggaaaaactctccggcagtaaagcctaaagttccacatccacacaccgtactgtggcccagctgatttctctcctaagggtatcccggagtaacttctgcacatggatgcctgggacttcacagcccttctgcacacaataacagaaacctggaagccacccagatgcccatcagtgggagaagggatgaatacacgaagacacgatcacacaatggaatattatacagctgtccaaacacattaactgcagcataacttcagtgatgtaggtggattctggcaatatcataaatattagtaaaaatagcatgttcccaatgatgacttacagcactatgccttttaaaaataaagttaaaagcaactacaatgactgtactctctaggaaaatttacaggtgcaataaaactacataaa

SEQ ID NO: 139060 - DNA, 832 bp, Homo sapiens
  misc_feature (37)..(37): n is a, c, g, or t
  misc_feature (92)..(92): n is a, c, g, or t
cgggcgcgagccgccgcagccccgcgcccgctgctcnctgcggagccgttttgtgccgcggcgcgggggaacggggacgcggggcggggggngcggagccggcgggcgcagcctcagcatggacgtgacagtctcggagctcctggagctcttcctgcagagcccgctggtgacctgggtgaaaacttttggcccgtttggaagcggcagccaggacaacctgactatgtacatggatttagtggacggcatctttttgaaccaaattatgctgcaaatagatcccaggcccacaaatcaacgcatcaataagcacgtcaacaatgatgtgaaccttcgcattcagaatttgaccatcttggtgagaaacattaagacctactaccaggaagttctccagcagctgattgtaatgaatttgcccaatgttttgatgattggcagagacccactgtctgggaagagcatggaggaaatcaagaaggtgctgctgctggtgctgggctgtgctgtccagtgtgagaggaaagaggagttcattgaaagaatcaaacagctggacattgagacccaggctggcatcgtggcccatatccaggaggtaggtgcgtggcctcgtggtgggctcagctgtggactgctgctcctgtggtggccgggaggcaaaacttctctatgagtggaaacgtttgaagaatacatcacccattacgattttgctaatcttaggtttcagacaccacagacacattgattctatttggaaagatagccatcaatcagccagctaaaataaaatgagggtaaaaataaaaattaaaaaaaaaaaaca

SEQ ID NO: 139061 - DNA, 326 bp, Homo sapiens
tgcctttattgggatggacagctggagtaaacatcatccagaaagactgggactctgggtcctctcaaacccagcacacccgcaccacgaataccagcccccagcaagaaacctctaagcactttgggccaaagcggtttcagtttgaaaccatgatgaatttaacataaatcaagaaaagcaacagaagcaacttttcccatctggaatggagtacagccttctattttatgctatttgtctaccctgtcactaactgcagagaaaacgttctaaaaactgccctttgtagcctcaagccatttccctagggctgtttgacttaa

SEQ ID NO: 139062 - DNA, 250 bp, Homo sapiens
caggcatgctctagagagatccaccacggactgacgactgataaatgatgagttcaatgccagcctcagaacgcagcacctgctttatgtcctcctagaggtgcgctaccatgcccacttcatgtagcatttgcatctttagctcaggcagccagtcagcccaggctggtctcaaactcctgacctcaaatgacccacccaccttggcctaccaaagtgctgggattacaggtgtgagccaccatgcctg

SEQ ID NO: 139063 - DNA, 435 bp, Homo sapiens
aaatgaaaagaatcaccttagcacttggaaaaaatgagtaattatttattgcataaaggaggaaaaacaagttaacagtcaggatgggcaaagtgtacataaccacagaggtgggtagcatggatttacctgattttagttcaacagcttcatagatctaagcttcaaaaatggcagatgcaccgtgtgtgttattcgggccaaacatgtgtaatggaatgctaagtggagagaaaaggtcagagaagtgataggcaccctgaggccgtcattctttatctgttcaaatagttacctcattttggcttttggccctggggggcaggctccggagcctcaggtgcgtcagagttaagctgtttcccaccccggaacacgcaccggcatttcagccttcacttgctcaactccagagccaggacgctccagagagga

SEQ ID NO: 139064 - DNA, 492 bp, Homo sapiens
ggaaaagtctacaaccattatacaaagcatctgatccttgtgtcagtataccaatattgtttataataaataagaggtaggcagcatgtcataatgaaagaacaaaggtagtcagaactgaggtttcatcataaatgtatcacttattttttgtgtgaccttggacaagttacttatcacagcaagccttggctgtctcatttataatacagtggtaatacctatctaccttgtagagttgtaagcactagcaataatgtgtagaacacacctagaactattattaatatattaattggagctactaacataaataaaaactataatttctgccctcaaaagggttagcaatgaggaggtgttactgagatattccacggacattatttcttttattccaaaggcaatctgatgaatacctcatgcccatttcaaggtgactctgatttcacttcacaatacacagctttccttttgttgttgttgttgttc

SEQ ID NO: 139065 - DNA, 315 bp, Homo sapiens
atgtgcatctatctttctgtgtggctgtgacccattctgggtgattgcataggtgcattcctgggttgcgtgtcctggcactgtgcgcgtttttgtgggtctgtgtgtggcccaggtccgtttgcctggccactttttcctctggggttgattgagggcactgttgccctcttagcctgcagggttggcctggcttgtcctaggctggggccttgggcctctgagcaggtcagccctctgtagctgcagggatgaccctctggtcgcgcaatcttgcccaccatctcttgaagaacccgtcaaggcctctggtct

SEQ ID NO: 139066 - DNA, 800 bp, Homo sapiens
ttctgggcttaagctatcctccctcctcagcctcccaagtagctgtggctacaggcatgtgacactgtgccaagccctatgtatattatactacaatagcatttgcaagaaaaacgaacagttaaaagtttaaaaatttgtatgttgatgtaatttcacaacagtaacaggggtctatatatagttgtaagacttctttgttttacttgaacttgtgaaatatcgactcttaagtaagtagactgtgacaagttaggtttgtatattgtaatccctagagcagctactaaaatgcagtacaaagatagttgaaaagtagataaattaatatggaatactaaagtatattgaacagaggggaggggcacctcaccaaagaaagtacacagatgtcaaataagcatatgaaaagatgttccacattatatgttattagggaattgcaaattaaaacaaaaatgagataccacagcacagctattggaatggcagaagtccaaaacaatgacaacaccaaatgctggtgagaatgtggagcaacaggaacactcattcattggtggtgggaatgcaaaatggtacagccactttggaaaacagtttgacagtttcttataaactatatttttaccatatgatccagcagtaacaacttcttggtatttacctaaattagttgaaaacttatgtccacacaataacctgtacacagatatttatagcagctttattcataattgctaaaacttggaaacagtcaagatgtccttcagtaggtgaatggataaactatggtacat

SEQ ID NO: 139067 - DNA, 286 bp, Homo sapiens
cccggcaggtgagaggaagaaagtgtggagaacggtgcacgcttacatgatcctggcaggtgagaggaagaaagtgagcagaatggtgcatgctaagatgatcccggcaggtgaggggaagaaagtgagcagaacggtgcatgctaacatgaagccagcaggtgagggaaaggagaacagatttgttcatagcaatgtcagtatccattttggcacataaagatttttgatgagccctgtttgcatagagccagatgttttcccctccctgtcgggctagtcgggg

SEQ ID NO: 139068 - DNA, 502 bp, Homo sapiens
gatcaacaactacactctagaataatctcagctgccagtaagccagaggggcttggagggtgaggagtccctgtgataaccaagatcaagttctaaaccagccagcaggcctcgcgaggctggctcacctttcaggctgctggtgttggaaacatgagactgtgcctctcagcccaggcagggccctgcctggggtcccacagcttccaggagccagtagggagcccagagcctggcaaggccagcaagtagggaggggatactgcttggcaggaagtcctcaggagggagtgtgaggcttggtctgcctagatcattacagcccagggctttctgtacctaggacttcagtcccaaccccgctgaccccatcttaaagaggacaaggaagggatatctgcagctggaaggagggatatctgcagctggaaggagggatatctgcagctggaaggagtgtgccagcttgaacagtgacggggcaccactttctggaaaatat

SEQ ID NO: 139069 - DNA, 344 bp, Homo sapiens
ccagctttatacttcttctaatattgaataatgtgttcataccacatctccccaggtaatgggtctaaatgagtaacaagctcagtatgtcatcactttctttacaaaacactgcatttactaaggcttgaatcagtccttattagatataactttaacgcagttttttcattaataacaagaaaaacagcaccaaaatatcgtattttctgaagatattatgattttaactacagaaaggcaaaaatatcttccaactccctaattccatttcagtggtgacataagtgatatatagtagtggttaacatacaaagacaagtacactgtaacactatacatct

SEQ ID NO: 139070 - DNA, 298 bp, Homo sapiens
gatatcatcaacagtgaaacaaaaaaacaaacaaaaaagacaccctccgcccaaaaactcccctcttaccaataggctttgattatattcctctgagatatttaaacagaatcttttttttttttttttgagacggaatctcactgtgtcgcccaggctggagtgcagtggtatgatcttggctcactgcaacctccacctcccaggttcaagagattctcctgcctcagcctcctgaatagctgggactagaggtgtgcaccaccatgcctggctaatttttgtatttttagtagaa

SEQ ID NO: 139071 - DNA, 426 bp, Homo sapiens
agggacacaatgtgggatgagtcttttgaaggaaaagatgatgcaagtgaactgtgatagtggcaggagcatagagaggagtgggaagactgtgagacacttcctaggaagtgtttacaggacttgattattccccagaggtgagaggtaagagagagaggaatggaagctggctcctaatttgtcataatatgaaactttgagcatgttgtagcttttgaataatgtaagccccagattaacaaaattaaaaatgggaaactggagtcttttctattttccaaaaatctcccaggaaacaaaattatgcctgtaacttgtgtggtctttagctattgtgcatttttttttttaaaccactttgagtgatccttataaatacacaaatgccggtgcaaacagggaacatgaaaaccaagtgagagg

SEQ ID NO: 139072 - DNA, 523 bp, Homo sapiens
tgggctcaagtgatcctcccacttcagcctcccaagtggccagaactataggtatgcaccaccatgcctggctaattttttagtacttttttaggggcaaggtcttgctctgtgtcctgggctggtctcaaatgccggcctctggtcttcaaatgaccctctcgccttagcttccagagtatctgggattagaggtgcagaccgccatgcctggctaaaaacagatactgtaagtgtaatgtaaatgtaattagatattgtaaattgtaaatgaaagaatgctgccaattaactttaaggtgtaagatggcaactgagactatcaggaataatcaggccaaaagtcctgtgtgtcaaggatgggttttgcaactggtgtatgccactatagaggtatttgactagctaaaataataataatcagatatatttgaaaaagaaccatttcatcagtttagccatccacagtttatacctacttgaaaacatgctgtgcatgataaatacaatttttatcaattaa

SEQ ID NO: 139073 - DNA, 811 bp, Homo sapiens
  misc_feature (798)..(798): n is a, c, g, or t
ctgaggaaactctgagggccatatctttaatatgtaaatacatactgctgtctttgataaaggaaggatatagcacctcctataggaaagaaaggatcccttggctcactgatgaaagctgaatttccttaataggaaagaaaggatccattgactgttactgatgacagttggatttccgtattagaatagataagctgaggttgtccagggccaaattgtgtagctctttgatgcctgttgggtaaaaatgtgatttgaaaatggaggaaatttcaggatgaattaattgagaatcttctggttgagaagagctgctttaacagccttaacaggaggaattagtgtctttctctttgctgtatatgatggacagaactcatatactaaagatgggtgattgatctagttcagagaaagaaaaatgtgtaaaacatttaaaaagttggtggtcttcctatttcccatatgttgtcataaatgcttcatgtgtactatattatttaagcttctcaacaaccttgaataagagactacatgtctgttgtagatgaggaaaaagatttaagtgacctacctgaggttgcatagctcataacagaatcagatctaaaattcagctgtgtttaacaactcagctttttaatcatttttagcatgtgcaatattttttctttatgttctttaatttcttttcgaatggtagagaaaagcagtgggaatggaagttacacataacctacagtatcctatctcatccacagaagcttatgtggtgagaagaaatgtttgagaaangctagtgccaatg

SEQ ID NO: 139074 - DNA, 895 bp, Homo sapiens
ctgaggaaactctgagggccatatctttaatatgtaaatacatactgctgtctttgataaaggaaggatatagcacctcctataggaaagaaaggatcccttggctcactgatgaaagctgaatttccttaataggaaagaaaggatccattgactgttactgatgacagttggatttccgtattagaatagataagctgaggttgtccagggccaaattgtgtagctctttgatgcctgttgggtaaaaatgtgatttgaaaatggaggaaatttcaggatgaattaattgagaatcttctggttgagaagagctgctttaacagccttaacaggaggaattagtgtctttctctttgctgtatatgatggacagaactcatatactaaagatgggtgattgatctagttcagagaaagaaaaatgtgtaaaacatttaaaaagttggtggtcttcctatttcccatatgttgtcataaatgcttcatgtgtactatattatttaagcttctcaacaaccttgaataagagactacatgtctgttgtagatgaggaaaaagatttaagtgacctacctgaggttgcatagctcataacagaatcagatctaaaattcagctgtgtttaacaactcagctttttaatcatttttagcatgtgcaatattttttctttatgttctttaataaacattaattttctacttaaaaaaaaaaaagggggggggtctaaaagtatctggagggccagtttggtacagtttttgacaagggcatagggggccatataaaaggcggcgggttaacggtggtggaaaagcttggattgggaagaatcgggggacatggaacccagaaacctgggaaaaaggcggccaccattcggaaggaata

SEQ ID NO: 139075 - DNA, 367 bp, Homo sapiens
cagaaggtgtcaagtaagtaatagtttggggagcttaaagtgcatggagggtacatggcaaaatattaggcaagttagtcaggggtcatgtcagttaagagcattttatgcctaagagtgggcttaaatctttgcaaacaggacatgcgagccagagaagtgttatgaaggaagaagaggcataagaaggctccctcttgagataatctgaagaattggccagattgaaaaccttttaaaatcaaaacccctgatttgttgataaatcttactgttcaacctataggttccctttggaaattgattttgaaaagtgaaaaattccattataatgttaaaaagcctcttccaatttgtccattttgta

SEQ ID NO: 139076 - DNA, 384 bp, Homo sapiens
tgggaccaaatcttacctcagaagcttgtgtgaagatgaatgatctcgggtatttaacgcatgtagcgcagtgtctggcgtgttgtacgtgcgcagtgaacgatagttctctgggtctctgttcttgccccttgtttgtcagctggcgtgagggccagaggataagtttttctccctcaagaaacgaaccaacattttccaagttgctaactgcttctccatattagatttttgttaattttctgaccagtgggtgaggtgggatatcagttttgcttgttatagataatgggctaagaccaggtgtgatggcacatgcctattgggaggccaaggcaagaagactgcatgaggcctagggaacatagtgaggctctgtctcta

SEQ ID NO: 139077 - DNA, 431 bp, Homo sapiens
cgtaccgcacgagttcggagttgggggtgtttgggaggaggattatgaattccactttggctacactggctgacaggtgcatgtgggacatccatgtggagttgcagaagtacttagatatgagtctggagcccaggagtggtctggaactgtacatctagtagtacatatttgggctgggagatgaaaatggaggccatgggcttaggtgagctcacctagggagaaagtatggtattagaacagggccaaggaatgagcactgagaaaatctaccatttcaagctggagtgggagacagtaacagaattggggagatatggaagcaggaatgtggtagccaggttccacgttggcctccaatgacaccacctcctggtattcatatccttgtgtagtctcctcccacactgaatacggctaacctgtgt

SEQ ID NO: 139078 - DNA, 270 bp, Homo sapiens
acctccccctgcagatcttgggatttgtcagcctccataatcacatgtgccgatttcttacaataaatctctttatgtacatcccattggttctgtttctctggagaaccataatacaattgtcaatcagtccaaattaatttataattttaaagtgagtaaataaaaatctcacttggagaagataaaacaattctaatattcatctgaaaggataagccagtatgaatagtttttaaaaattaaaaagaggaatttacatgtggctat

SEQ ID NO: 139079 - DNA, 212 bp, Homo sapiens
tatgtcctatataacttagcctaaattgtttaaaccaagtatgataatattataagaagatattaataaaccaacgacatgggaattttggattaacctctcgcaaaaactgaaattatatgaaaatcaattacaaggacttacgaataatatcaaaattctaaaaaccacaaatatgtgttttcagaaacaatattacaaacttttctcca

SEQ ID NO: 139080 - DNA, 519 bp, Homo sapiens
acatttcacctgacacttcaaaaagattggccatcaagggattctggcaagagccctgatgcctctggagtagattacagaagcattccttgaaaccttaggatgtgagcataaaataaacacaaataagctccccttgtctaaataaaccaaggtacagtttgatgaggcagttttcgttttctccctaccccttccacacttctctcctcaaaggccaggcttgtttgcttacttatttaatactaaaccctttgtaccttcaaagaacgcctttgtgtctgagatgaagtggagcatttctgcctgctggacacaattttccaaatgaacctccaaacacagagtagcccagattattaacaataagacaacctcgcaggttggccggatggatgaaatgaacaggaggtaagaaggaaaacatgaaaaaggatggattttcagcaggtttttccagccaaaccatttgcaattccactggaaaggattctcagggggaaagaaaccaaagaacat

SEQ ID NO: 139081 - DNA, 342 bp, Homo sapiens
ctccgtaaagaggtgtctttactataaaagctatagtgtaagctagtcatattaaattgttggctcaggagttcgataatgcttgggcagtgagagtgaataataaaatgttcaatgagcctagggtgttgtgagtgttaatcagtgcaatgagtaagggaagggagcctactaaggtgtataagagaaaatgtggctgagtctctgttgtgaccagccctacccagtagggccctgaaatagcattttagacctgtctctaatagcattttagacctgtctctaaattctcctctgtctccttctgctcctcttagtatacctacccagtactgagccaga

SEQ ID NO: 139082 - DNA, 423 bp, Homo sapiens
atactcccaaattaatgctttttacctattgtcccttggattaagtaaattcaacttgactcaactaaatcttaaggtttgacaccctgacaaacatgtcttaaaatgttttaaagtacataagatttaaaaccttggccaggcatggtggctcacgcctgtaatcctagcactttgagaggtcgaggtaggtggatcatctgaggtcaggagttcgagaccagcctggccaacatggtgaaacccgtttctactaaaaatacaaaaataactgggtgtagtggtgcatgcctgtaatcccagctacctgggaggctggggcaggagaattgctggaacccgggaggcagaggctgcagtgagccaagatcacgccactacactctagcctgggtgacagagcaagactcagtctcaaaaaaa

SEQ ID NO: 139083 - DNA, 521 bp, Homo sapiens
ctctctaactcccttggctcattctaacatgcaaaaacttgctttttattgttgtttactttaaaaaaaatattttgcattgtgaaatataatgtacacacagaagaataaacaaaacaaagtaaaaagcttaattattccaaagtgaagatctatggcccaggtgcagtggctcacgcttgtaatcccagcactttgggaggccaagttgggtgggtcgcctgagaggtcaggagttcaagaccagcctgaccaatatggtgaaaccccatctctactaaaaatacaaaaattagccaggcatggtggcgggtgcctgtaatcccagctactcaggagattgagacaggagaattgcttgaactcgggaggcgcaggttgcagtgagccaagatggtgccactatactccaacctgggtgacagagcaagactctgtcttaaaaacaaaaacaacaattcttctgaggggtaactaccacagactggttataacatattaagcatctggccagacaaagg

SEQ ID NO: 139084 - DNA, 234 bp, Homo sapiens
aatatagtggaatgtgattaaaatgtctttagacacgtgaatacaaactcacttgaaaaagcagttcccaagatggaatagacattaattcattatatataatatttattatgtataatattcatgtatataatatttacttatatgtaatgaatatgttgtttgtaaaaccttaggatgcatgctaatcaactgtgatagagtccatttaacactgagtgttgtggcaagtcg

SEQ ID NO: 139085 - DNA, 489 bp, Homo sapiens
agtaagcctaactttgaccaacagagggtcttaaagacaacagggcagcagactctgccagacactgtggcaatccacagtgagcttctcctggtctggctgcattcccctcacacatctgctgtgcaccagccccctcaaccttccctgtgaacactagcttagaatcaaaatcaaagcattactcagcaggccatcccatcactccgctgtgtcttccccaggctgctctgtggaagggtcagtcaagatccctcttaatgccggggagagctgtccagagtctgcaggaggccctctggcttcagagggcccaggccaagtgaaggtcaccctgcactgtgttgggcatttacacacaatgctgggggctgccttggctcacacaccagcctcacccatggggctacactcagtggcatcagcaagcagcatctcctcaaaggcccagattacaaagtaaaggcacatggccaggtgcagaggctc

SEQ ID NO: 139086 - DNA, 498 bp, Homo sapiens
ctcactatacatttgttaagtaaaaagctgtcttcgtatttaaaaggtttcattagtactttataaactcaaggctttcaaataccaccacccttaacaaacacttactgaaagagtaaatagcttcttgctaatacagcatatatccaaaagagataactgaggagaacagcaaatcttcctatatgcttgttgctttttatcattatcaatatccacacaacaccagcctagcaaaaccctgacaggatgatgtcctcaatgatgtacagcaggagagaaaacccattctccagcaaggacaaataacccacagggaagggggagcacaaaggcataaagggcagctttctgtcgtctgaaaggcgatttgttttagaggaacaggaggattttattgttcacctgatgtctttcattaagaacaggaaactacacttctctgaatggttcaactccccattactccatggagtgctgcgggggccctacccaggg

SEQ ID NO: 139087 - DNA, 184 bp, Homo sapiens
tgctaatgttttcttaaattacatcctcttgtgggtccataaaatactaaagttattacaaataaataaatggagtttctcttcatgatgtaaagcagctttcaatgaagtcattgagaggaagtttggtttggaaggaagcagtgcctaaccagggcaaagcactgctttccacccatggggg

SEQ ID NO: 139088 - DNA, 810 bp, Homo sapiens
gttagtttcaagagtcctaaaaatgtcaactctgaccatttttgccgatgttcctgttttcacagaggagaggatcttgagaggggcttactccaccatcttcactgacatcactccaagaaatgtattttgcaagaaatattttgaagcagaaagacaccatttattttgcccatgaattagaatacattagagaaaataagactatcccttgctggcaagaacacagtgacacagtagggtggaatataaattggcacatttgtggaaagcaacagtacatatcagtcaatgtttttgagattcacattgatgcgttaattttacaaatagaaatagggcctaaagaagtcacctcaaaaggcatgaacgctccatgaatgtatccatgcagggatcatagctgagcactggatgccccctgcacgtccgggggcaggaaacaggacagggcagagctgcgtcacagggcaggacagtctccgttagacggagaatcctccgtagagctgcttgcacgtgtacattcatctttttgtcagatgttaattcaagttgcctttggttgtgggactgggaggatcttttctctttgttgatactttttcgtactttccaaatacttgactgatgagcacatgctgccttggttaccggaggataagtgagcgagcaaagtgaggcctgtgctgtgtccatcctggtgcctcaagcacaagcccctattcctgccctgagcccagctgccggcatgtccggggagaaggcttctcccagctccggcattgacttctatctgctggaatcatc

SEQ ID NO: 139089 - DNA, 220 bp, Homo sapiens
gaagttgccttaacctctgtgtacctgttttctcatctgtaaattggatgtgataacagcacctttgtaggctgtgtgtggagtctttgagaaggtgtataaagagctttcagtgcctggttcatagtagccttcaatcgttagcttatatgaatcaggaaagctagtatttattagcacatacaaatgtgtcaggcactatgctctgggcttcctatca

SEQ ID NO: 139090 - DNA, 330 bp, Homo sapiens
tgagtgatgcagggagttcagtgagaggaagctggggtgaagactccattgattgggggtgtgcctcgttgctgacttgagccggagcagtatcagtggaaggaggtcagtgggagatgcttgtagtgggagggaatgaaaatgggaatggagcgaggagtcatccagagatgactaagaggatggcctgggggagccatcagggtaccaacaggaggcaggtggcatgctcaaatgtgtgactagagaagctaaggaagagaccctttgtaaaagtatgttctggtctaggtacagcatcaagtcatggtgtacctgtgggaccgaggg

SEQ ID NO: 139091 - DNA, 567 bp, Homo sapiens
tagcgaccaaaaggtgaaaacacatttatgttcacctttcatatgaagtatgaatgtgtttttttgtaattttttttcaatctaatttgaagtagatggaggaaaaataataaaaaaagagataacattgtatatattacattattttctttattttgatttctctgcaactgtgctactattgtactccaatattccttactcaatccttgtctgctattccagtttcctttttactagcacatgactatgatcctaccagagttttaagatgttgatagacatacaaaagcacttattatttttgcatgtgatattaatagaaagatagaaaggatctcactataggagaaaaatcaatcaaggctcaaacttatcattaaatgagaattctggccagaatccaatactttttttttaatgaaagaattcaaagccttacaatttaaatttcatcatcaagctatatatagagaagatgggaggccttggctcagcagaagatcatgtaaaaatttcatatctagaatattaaaatgactgctgaagcaggtattctggttgata

SEQ ID NO: 139092 - DNA, 395 bp, Homo sapiens
attctttatatgtgtgccatccataaaatctaattgtatggatgggctgtaatttagtctaatcagtgtcttattgatgaagcttattttaaagccttgtacttttccagctgataattaggtacttgaagatttgtgactgttacatctcatgaactataggtttattcagaatggaatattgctaccacatttaatgttttttgctttgaaatttatttgctagcaatgttactgtatatgcctttttttttaatttttatactttctatgacatttaatttttgatatggctcttagaaacacatagctagattttgtggttttactcaatctgttattaatacattcatatttgttgtatttatttatatgtttgggcacacattattcct

SEQ ID NO: 139093 - DNA, 557 bp, Homo sapiens
gcatactaccaccattgcaggtgagttctcatcacagagcctcaccataatggaaactgccgtgacttcagatgagctctcatcacagagccctttaagcagccagggttgggggacttggtgaaaacatccaggggagaactgacctaaggacttggacaggggtggctgtggccattttttctctccctcagaggtggttttgaatgtggaatggaggagtctacccctgggtaaataaatatacataggtatgtcatatgtatctgtatttatatttattggcctttctcagggctgttgactcacaggaactcaggagctggagaggcagcagttttggtgagggaggttgagggtggaggtgagatgagggtagactgaccaggctacttagacttctccaccgtctccctcatcccacattattttcttccctgggtccatgacccccaaccctccatcctcaaggaaacttgagcctgcctttgccttgctttgaaccctgagcaacgggctccccatgggtcatggctgtgactgcaaactgtgtttga

SEQ ID NO: 139094 - DNA, 296 bp, Homo sapiens
gtacttactggatttagatcaactacacagcaacacgtttggattctaccataatgtacttaacagcaatcatctatgtgtcttttctaaaccccacacttactagtcgaatattttttccttttgttgtaaatttccacaaagattcaactgctctcttgaaagcaaatcattgatgtatgtatgggcagatgaaaaattaggcaggctaagaggtaaccctcctgcacattaaaaaatccattctgtagccagcaggcaggaatttccgcgggggtacccgagcttcgcaaatt

SEQ ID NO: 139095 - DNA, 108 bp, Homo sapiens
cagctctgtatgccagaagagagtggagtgattgctgtaatctcaaggatagtaaatatgagctaaagattttatatcatatagtaaatacatgctaaagattttata

SEQ ID NO: 139096 - DNA, 256 bp, Homo sapiens
acttttcagcagtttttttaaacttcactgcagtgtttttggacacagctatgtcagaaatctatttccccttctcagagaccaggaagctcttgaggtacaagctcttattaagcagaaaattttaaagtggttttccttctccttttcttgggtctgctttcttggggcaaacagaatacgagaagccagcttagaaattgcatgggtccttcctgcattttgtgagaaaatggtggcctcctatatttcttcc

SEQ ID NO: 139097 - DNA, 371 bp, Homo sapiens
aaggtgagtaaatgactaactaaatttttgttcctacttatttttttttcccattacacttggagcatttggaaatgttcccaaattaataacttgaagctgccaagaagtagatataaccaataccttagctcaggcatcatgtttgcatgattttgccattcatccatcattcagcaaaacttctttgaactaccatgtgctgagtacagttgatttccagccctcctaagttcctgtgtcatcctgggttacatgggttattaaactgtttctctccatctttctcatatatcagcttctaagccttcactctgtgctcagatcgtttcctatcttttctgtttcttcattgagtggaacaaacacca

SEQ ID NO: 139098 - DNA, 416 bp, Homo sapiens
cagaaagattctgaattttcgagggagacgcagcgccatctgttggacactctgtgaattactaactggctggaaatgatgctgtgtctgtggatgacgtctttgtgaagccgggtttttttgggtgcagtgatacaaagcaccacaaggaaaaccagtgtggaacaggaaatgagggtgtcactgtccactctgatttcaaggtctgagataccatgcagtgcccaataggtgcacacgaggcattagtaattgcaattatttttttaaaaattaatttatgtgtattatctgtgaacagctactaagttcttaggacattcgtactcactaagttattcagatctacttaatgagcagaactgttaactgtttccttttggctgcagaaaaaaaaatgactgagacactaaggg

SEQ ID NO: 139099 - DNA, 301 bp, Homo sapiens
cgggcaataccacaatatggtaagtgctaagagatttagctacagagtgctttgggagtggagatctaacccagcctaagggatcagaagacttctcagagatgatgatatctaaggtatatcctgtgggatgagtgaaacccagctgagtacaacaggaggtgagcagtgagatgctggggcaagaacttccacgcacacagaagagcacgtcgtggcaagtggaagaggggacaggcttcggctaactcattgacacacccagaactcatgccaggcacttggggctcaggaggtgctg

SEQ ID NO: 139100 - DNA, 371 bp, Homo sapiens
ccaatgaagtgacaaagctaataaacttattttctgggtagaaagcatatttatattttatttacagaataaatattaccagtacagaaggtaatattactgaaattaaattcattcatgtcctccatgaggacaacataaaagtagctaccactgatacccacttagtacgttatatcaaccctgagaccaatattattatgttttaaaagtgaggaaactggccgggcttggtggctcacgcctgtaatcccagcactttgggaggccgaggtgggcggatcacttgaggtcaggagttcaagaccagcctggccaacatggtgaaaccccatctctaccaaaaatacaaaaattagctgggcgtggtg

SEQ ID NO: 139101 - DNA, 107 bp, Homo sapiens
tggaaatggcaccggacacagataacaccactgggagctgaagaacaatgccttcagaagtgggaggagtggaaaattattctcagtgtagaattctcttcccaaac

SEQ ID NO: 139102 - DNA, 222 bp, Homo sapiens
ggggcatcggggcacctgtccacctgggaggtgggggtcagaggcccagcgctggtcccagggctgttttctggtggtgagacctggagtccaggggctttgatgtgagtgtgagcaagagggagtgggcagctggccaggccactgcttccatcatgcctggaccgtggcaccttcctcctcccaccgtcagcccgtgtggcaggagactcaagctgtgag

SEQ ID NO: 139103 - DNA, 791 bp, Homo sapiens
tcaagaacgaaggtaaaatagccaacgataccagcaatatttgttgatctgcttttcaggcaattaaaaaaaagacagaaacagatacacaaaaggccatcattgagtttctatggcagtgtaaaataccagacattaagcacaaacaattgcaaattcataaccgactggtgcaactaagaaacctgtgacgctagaaggccagggaaaaatttgacctgttctaggctggcccaaaaggcctccccaagaagtggagatttgacagagctgagatctcacggatcagtaagagttaagtgggatgagagagatggggcgttccatcaaaggcctctgtgggcaggaggatgtgctattttcaaagaactgaaaggcccaacgtggttgaaatgagagtaagagcttctgagagttcagtgtgtggatgaagaggcaacaggaaaaagagcactgaggccctctaaacatgttcagaatgtttgtgtctttaccttaacatataatgcaaggccagtacctcacatggtgcctatctcatagcaggcatacaagaaatacatggtaaaacggaagtggttataggagaggaagctagagatgtgggctggagctgggtttccaagaaccttgtagaacaggctaaggagtttgaacagccaggcgcggtggctcatgcctataatcccagcactttgggaagctgaggtgggcggatcacttgaggtcaggagttcgagaccagcctgactaacatggtgaaaccccgtctctactaaaaatacaataat

SEQ ID NO: 139104 - DNA, 544 bp, Homo sapiens
aataaaacacaagaaagacaattaaaaacaaaaatcacttatctttccatgatctagaaataaaatttcatgagtaatctgtcatttttaatgaatcaatgtcaataagtctttataaatacacacaaacatgcacacacaacactgtggtctaattccacatagcttaacactaacaaaaattgtgtaagttagttttttataaccctgtgggagggttctgggaacaaataggaaacatgcaatatgaacatgtattcttccccctccacctctaatcccagcctcaatcaacctacttcccctgagccttatggtagtttgtgccttttgtcaatgagtataggcaagtgaaacctagattttattggagttacataaagagggctagcaattgaaagccttaaggcagatatgggcgatggagtatcctgggaagttataggttctcagagaattgtagaaactgtagtgacatgaacttgtcttaagatatctggtttctttgagcacaaagtcaatgaacagttgggccaagcctcac

SEQ ID NO: 139105 - DNA, 185 bp, Homo sapiens
gtacatgacgtggcagtgaccggcaggccttcctctccgatgctgggggcagctctcaggtccaggtggtgctgggttctctgggccccgccccccatctcccagggccctgaagatgtaagagctgcatcttttctggggcaggcctcctttgggcccagccctgtgaggcccctctgcctgtg

SEQ ID NO: 139106 - DNA, 415 bp, Homo sapiens
gtttgttattttgctttctaattgttttgttttacatttaagacttcatccgaagttggtattaggcacaataatttacactcattaatattcttccacaatatgcttggggtgctatgcagaaaagagttaatgtcgcaggtctaagattgcctcttcttagataacccgcttgaaaggttggcacttggctggtaaacagttccttagagtgctataaaacttttcataaatgataagagcacagtaggcttgctgtgcctaaactgtttgcacagataatgtgatttatgctgactacctgctttccttttgggagtctagaattttgatacatgcgaggcagagggtacccacaagaccatcccccagtgaaaccttgggagctgagtttcttaagaacatccacggtggg

SEQ ID NO: 139107 - DNA, 358 bp, Homo sapiens
gtgccagcagcgcacacacttttgcaaagaaaaggctttctggtatgaggtaaattctggagacactgggaaagacaaagctgcatcaacttcttgactgcaggatttctagccttcgcggtgtcatatgtggatccctgggtgcattgtgggcactgccacatgagccacacactgccagtcccatgtccctttcagcaaacaaaatgagggagcagtggtagctgatggctggttaaggtgtcctgggtgccagcactgcagaggagccagggtgccccgagatgggtgtgttcctggcatggccttgttcagctttgtgacgctggacaaatcacttggcttctcacagcctcaa

SEQ ID NO: 139108 - DNA, 2339 bp, Homo sapiens
tgaactatagttgattatttttaaagataaggagatcaaatttccttaatatttcagtatgttgctttttgtacccttaaaattattttttcctatgcagaattgactttgattaaaaaatgtttttgatgactattttcctgattcgtcagtatatctaattgtgttcattttactcatgaaaaatcttgtctatgagggacgtatttttagtaacatttttatagcatataagaacttttacagcaaaaacaggaatcattaagtgtgtgtgcttttatcataacttctcttttaatggaacttaaaatcttaactcgtgtttttgcagcactttttttgcacatggtaggttcttaatatttgaatggaattcagtgtgactgttctttgtgttctcaaaagtctgatctttgtaacaatttgtctttcacttgagactttttttttctttgcatatgtgcacgtctcactcttggttttccttaatcttttttaactaaacacatctatgactcatatttccctatttatgaataggagcaatttaaaatttcccaacatggtggtatgtgatgtaacataaccaaaggctacatgtttacccttgtttaattacccttcatttgtggaaagatgacgtatgtatttatgatgtaaatgtctttcagaatgacctttgggactaagcttttttttttttttcccaccaaaaaatggtcatgacctaggaagccttgttagtaaaatttaaaaaggaaaagttggctgggcatggtggctcatgcctgtaatctcaacactctgggaggccgaggtgggtgtatcaattgaggtcagagttcgagaccagcctgggtaacatggtgaaaccccgtttctactaaaaatacaaaaattagctgggcatggtggcctgtgcctgtgatcccagctactcgggaagcagagacatgagaattgcttgaacctaggaggtggaggttgcagtgagtggagattgtgccactgcacgccaacctgggtgacagagcgagacttcatctcaaaaataaaataaaataaaaataaacaggaaaaatctggtcaaatgccccttgttcttcttcaacagatacatagtgagttgtgtaaaaaaggagttggaaaaggaatatgtagattcaaagtgacttaaagaatagaaaaaaaatttgttttaaaaaatggccaagactaaatcatagtgtctagggaggtacacctgaataataaaactataaagaaatacaaaatatgattactactaagaatagtctgttgccagtagtacacagaatgagcactcaaattataacagaagcattttggtattcataaatgttctttttttaaaaaagaacacaatcgaaattataggctgtaagtactgattttaattgtagtgaatgtgaaagtgttgttaatgaaaatataaagaatatttgttaaagtgtggacctagccaggaatactaggtagaaaaggtaactctttaaaaacatttttttaattgtgaagttaatttattgtcactttgtttgatatttattattagagtccctaggttaattctgtttttattgcttttcagaataattaagacctaaatcttctgccgaattctgtttggtttccttatttcttttgccatgttctttcattccacaaatgttattgagcacttccagtgtaccaagccttgtgtttactgctttgatgataaatgcaataaggtaatgctgcttttaaggatccttcaggataggctcttgtagcagtaaggacttagtatttttgctatagaagtgtatggagagctatctatggtgcaataactgtggaaatacagtttttattctatttggttcccatatacattgagtcctcctttggtgggaatttgatcaggttggtctcagttgaatcctggctgcatatgcctcagtaaggaagaaggcctaggggactgtggaaagcctggtggtggtcctggaaggcttgagaatacctggagctggaagctccttgctcattggtgacctttttcatatgcagcagagctcttggcattcctagcatactaccttgaaaggactgtgtcttgcctcctagaaattctggacttggtagaatcatttgtttatgttattttaaaaagaaaaaaaactctgaaatgtactttttggaagaaaaatgaacttgtttttggacttttctgtgtgttgtttctttaattgaaaattctgtctggagattgattttcaacccccttcctttccctctagttttaaattgtaacattgctttccaagcatttc

SEQ ID NO: 139109 - DNA, 184 bp, Homo sapiens
gaccaaattaaccccaaagactccttccccagcaaagagttgtgaagtaagtcagtaatgtggctaatgaaagaaatattttctgagatgttgtgatctgtcataagaagtgttgattcttgatgacatggaaaatgactaacatcttatttcatgcattccaaagagaaaaacccacagatgt

SEQ ID NO: 139110 - DNA, 678 bp, Homo sapiens
gttccatactatagaaaaatgtaaagttttaaaattatttatccagtggttgcaaaattgaaatcaaaaggggattaagggaagaaaacagatagatacacaaataatataggcattcattctgttaatattgagtaattactgtttgtcagacactgttttaggtatgaggaaatgacagtgagcaatacaaaggccacattctcatggagtaaaattccagaggtggagacatgtaattaatacttaaatataaaacagtagattttctaaacgcagaaaacggaagagtaacaagaaactaaatcaaggagcattatatagcctagactgcagagactcaatataataaagttggcgattcttcctaattatcaaatttactgcaattccagccaaaatgtttcagtggttttttttgtttgttgtttttgtttttgttttgccctttagcttcacaggtttgttctgaaatttatgaggtataaattcttaagagcagcaagaaaaatttcgaatctatttgtagaaactgcatatgatgatggttcataccagtagagagaaagattggatttgggggtattactagtagtaaggggattcactagtagtaagggaaatgcaaaataaaatcacattgaactagttcaaaatcatcacattggcaaaagcatt

SEQ ID NO: 139111 - DNA, 296 bp, Homo sapiens
  misc_feature (222)..(222): n is a, c, g, or t
atccaggggatgtggactggggctgaacctaatgactggctctgagagcagatggccaactctgccacacggggtcctgagcctgtgaaggtctctgagtggtctgcgagttttcgaggttctgcgagtcctggggggtcctgtgggtctctgagtggtctggccctgctcagagacatggtgcttgaggctccgccctcacccaggactttgctccgccanaactgagttgcagctctgtaatcaaagctgaagtccacactgtagtagacgaccaccagaagtgcgcctgggtg

SEQ ID NO: 139112 - DNA, 259 bp, Homo sapiens
tactcttgggcaagtgtgtcacttgtctctacatgtctgacctttcccagcttctaaagtgcaaaaagaaagattggggacatgtccataagaatattcccatatcttcagaaatgcaaaggagaaaaccattaagtctgcaaagtagtgaaatcagaactcatcatggagttacaagttactaacacatttcagtatttctaccctcttgtctatgtacttttcttttggaattccttaagcaataaaacctgacttt

SEQ ID NO: 139113 - DNA, 558 bp, Homo sapiens
agcaggcactattttggtagagatatacaaagtctgggctcagctgaacagacacagggcttttctccattgcttcctgcatgcctttgtccataaaaatgtgcgatcaggcccagcaaggaaccagcagcatttgttgaatataacacatatgtgctttggcagggtgggagctcttgagaaaggaaggtgctctgacttcagatagtgttttctcactcccgaggaagcgagcgcctcaaaatgatttggttctttgtctcgaagtccccccagcatgagcaggttttgtgggagaagactgagcctcggccaggaatcacagccgtgagcctggctctgcgggggtggcagaagggccatttgtcatccccgtgtccaggtcatgtttttcctgtaggagatggctttgttcactcggggaacaggcgcctccccctgtggctggagcctcagcttcatatccatcgttgaacttaggatgacccctccacagggcctgccttctgctcccagccctccgcccctctgtcgctttctttgtttttattataaaag

SEQ ID NO: 139114 - DNA, 283 bp, Homo sapiens
cctctctttgctcatctgttaaaatgcagttagtaacaggcttactgtgaggattaataataataataaggcttactgcatactttgtgtcaggcactgtgcatgttacttggcatgcattatcttatttcctactcacaataactcttcggaatagataccagtactatgcccccactttcttatcagaaaacaggcatagcgagttcgttatccagagtcacacagctggtaagtgaagccagaattcacatctagtcagcccaaactctagcacctgcac

SEQ ID NO: 139115 - DNA, 403 bp, Homo sapiens
ttgggaggaatgtcggggggatggtgcaggaggaggcaacatgccagctctccaaggggagatggaggtttatccactccaggaggagcaaggatggaggatgaacccacagagacacataggcctggggtgaggcagttgggggacctggcacatttattcagtaaggaataacgctttgagtggctggggacggtggctcatgcctgtaatcccagcactttgtgaggccgaggtgggtagatcatgaggtcaggagtttgagaccagcctgtctaatatggtgaaaccccatctctactaaaaatataaaaattagctgggcgcagtggcgggcacctgtaatcccagctacttgggaagctgaggcaggagaacagcttgaaatcaggaggtggaggtt

SEQ ID NO: 139116 - DNA, 521 bp, Homo sapiens
tggaacattgaaataaagaataatagtattatactagaaagggtgaattctaaggatataacaattaagctctgtgaagaatattctaggtagagaaggaggtatgcaaaggccctgaggcccaaaggcaataaggaatgcagtcgctgagacctcttctacctgagtgtgaataaggaggcaggttctgaaggattttaatcaacgggtatgatacagtttgtatatttgtctctgtctaaatcttacgttgaatagtattccccagtgctgcaggtggggcctggggggaggtgtttgcatcatgggagctgatccttcatggcttggtgttgtcttcataatagtgagttttcaaaagctatggttatttaaaagtgtgtggcaccccgccaccaccaactctctcttgctcccacttttgtcatgtgatgtgccttctccccctttgctttccaccgtgattgtagaagctccctgaggcctccccagaagctgagcaacgtcagtgctatgcttcc

SEQ ID NO: 139117 - DNA, 137 bp, Homo sapiens
tatattaataaatagtgcatcaatattctaaaccactcaaaaaagttaaaaaaactataattggttgctgagagaattaaaaataaaattatataaaatgctcaattaaagctaaagaaggcaggatagagtgaaaa

SEQ ID NO: 139118 - DNA, 376 bp, Homo sapiens
atgagaacaatctaagcatgacaggtgatgtcttcttttatgactatgtaactgcaattgtaagaatgtatttcgtgtcagtatttttggatggatgaataattttttaggttattgaaatctaagatcttaactcaagtaaaacaaggtttttaaataaaatttgatccttaagctcattctatgttgccaagacaactcagcattaagcataacatttgcttttcaaaaagcatatcattaactataatccccaccatgagcagctgagtagaaaggcaggttgaacctgaactccaaaaccaacctaaaactcagaaagtggaaggagcatcggctaggccctggcctctgggattcagatgcaccgggttca

SEQ ID NO: 139119 - DNA, 214 bp, Homo sapiens
aagaccacatgatcatctcaatggacgcagaaaaagcatttgacaaaaatcacactttcattataaaagcattcaacaaactaggaatagaaggaaactacctcaacataataaaagccatatatgaaaagcccacaactatcatgttaacatcaccacacttaaagactgacagcttttctcctaagatcagatacaagggaaagatgcccac

SEQ ID NO: 139120 - DNA, 299 bp, Homo sapiens
aagtgaagtgggggtgaaatggggaagtgggagtgggaggggaggaaggggcaggtgctgggaagttggcccttgtggccctaatctgtctgtgacagcttccgctcctacccatccacagggacaagaacaagtatccccttccccagcctgctccctcttaaaaaaaaatcctcttcctatttagtatgcaacaggtgctcaatgtgtgctcctaccgttctccaggaaaggagggagctaagcaggacacagcccagagctcagcactcccctagcctcccaccctcacctcccaa

SEQ ID NO: 139121 - DNA, 315 bp, Homo sapiens
attctgacagttaatttactgtaagctattgtttgctgctatcaaaacacaaaacacattccccccactcccccaaaaaaatacccttgcgattggtcctatagttcgcattttaagaaacaagggcttcaaaaataattttcatctgtttgaaaccatgggggctgctcaggcattattctgtaatcatgccagtaaaactttgagaagagaacctcaactttgagtgatttttctaaatgtgcatgttacataatataaagtgactagatccctttataaaaaaattcgcaattgttttaatgaatgtgaacg

SEQ ID NO: 139122 - DNA, 334 bp, Homo sapiens
tgagcctgcaataatgggctgatgggatgggcccacagggagtgaggcagtggagggcagcagcactgatggatgttaagcatcagaacggcccactagaagacttaattgacttcttcaggctcttccttcgtgtgcacttattcatccatccatccatccatccatccatgcacacacccagctatttattctttcatccactcattcatatctttagcttaaagcacaggtctgcctcttctttttggtgcatatcatccatccatctatccatccgtccatccatccatccatacatgtatccataattcatccatgaacccttaattca

SEQ ID NO: 139123 - DNA, 432 bp, Homo sapiens
ccagatgacttcactagtgatctaccaaccatttgaagaaagaattatcaattctacaccatcttccagaagaggacagaaaacacttcccaactcattctataaggccagcattaccctgataccaaaactaaagacctaaaaaaatcacagaccagtgtgtctcatgaatagagacatgaaaatctgtaacaaaatgttagcaaatcaaaccctgccatacagaaaaagcataacccggccaggagtggtggctcgcgcctgtaatcccagcactttgggaggctgatgcaggagaatcgcctgaaccaggcagatgcaggatgcggtgagccaagattaagacactgcactccaacctaagcaatactttgtctcagaaacaaaaaaaagcctgggaagcaaagtgagaccccgtctctacaaaaaagt

SEQ ID NO: 139124 - DNA, 376 bp, Homo sapiens
taggatgagtacggtttcagctggccgcttttagccatcattgaacaactaataccaagaccaaagcaggggctatatatattcatattttaccagaaatgtgtttcagaacatcttaaagaaaaacctcctattttgcaaataaaagccttaatttttcaactacgtaccattgctgaatactttgtttacatttctgctaactttagcaggtactcactttttactttaagctctaatattccatatcccagcctccttttcaggaaagcaagacataatacattaaataaacaaaatagcttcaaaggtacagaaaaatctcaaacattactccatttttctttttctttttattatttgagatggagtcttg

SEQ ID NO: 139125 - DNA, 299 bp, Homo sapiens
gtactttagagaactgggggactcaaactaaagtcagattgctacctgcatccttcctggcctcaccatctaagcctcactccaagaagtcttgagctccacctctttttggccttttaatttagctatccatgtcctacccattttttcaaaccatggtcttgagttcagaacccaccatcattctaccttacttttagttttagaatttttttttatattgatttttgctgagttttctgaaaaattggtagtggattgccaggcatggtagctcatgcctgtaatccccagcattt

SEQ ID NO: 139126 - DNA, 194 bp, Homo sapiens
tggatctacaggatcctgtgtcatcccccttcgtagagatccctcttaagggtattgaaacctagctgtttacacaaaactagcaagttggtgatggaaagtcttaggagtgaggtgagggcacttttcttggtctgtcatccaggcaggaatgcagtggctcaatcacagctcacttcagcttccacctccca

SEQ ID NO: 139127 - DNA, 152 bp, Homo sapiens
attaagatatgtgtagcatatatagatactgttcagtaaatgttagccattatttagtgactacctaatactaactgtagtattttaacaaatatctacagtgtgtactatgcaccacgcactactatcactctctccatctctctttctct

SEQ ID NO: 139128 - DNA, 534 bp, Homo sapiens
ccaccttggcctcccgaagtgctgggattacaggcgtgagccactgcgcctggccctgaaatttcgcatgttttacggttggcttgttagggttaaattggtgcaccttatacttggttgcatactagactcactggaatgatttgactttcgtcatagttgcagaggcactctgaaaccctatgtatgtgcttcaccagggacagccccacgcatgggaggtggtggccagccatcaccccagggtgaatttctctaagagcagtcctaggccagggggtgagtgtgggaaagtcagggccgtttccatcagttaacgtttcagagcgggttcccgctggaagtgctggaaatacccagatgccatctgtagcattttatgaactgtggcggatccactctctgtgtcttgagcttctgctctgtggtctgctcagtggaagcatcctgtcagtccactgtacagtggggtggagccgcagccagggtgggtgtgccgtttgattggtcacggaatgaacagggcaaaggtca

SEQ ID NO: 139129 - DNA, 462 bp, Homo sapiens
ctcagcctttcacagctactggcaatggtggcatttgacacacactgcagccccgtggggggctggagggaccctgcctttgtggtggaggaaagggaggtagtgatggtaagctggaccccagctgctgtcttggaggccgggaggtgccaagcatctctctctgatcccgtgatggggtttctgccgtgtgtcgctggaacacctcctccttgctgatgtccgagccaaaggaagttgttttatcccagtgccgtgaaaagcttgtcagtgtcttggtcccgaataggacatcagggatgaatattttagtttttaaaagctttttgtttcagctggacatggtggcctacgcctataattctagcactttggggggccgaggcaggagaatcacttgaggccaggagtttgagaccagcctggaaaacataacgagaccccatctctgccaaaaataaa

SEQ ID NO: 139130 - DNA, 586 bp, Homo sapiens
tgagagaggggtctttgcttcaaaaagcttgcactctatcttcctaggaggtgattaaaattagttctctaaatttatattattttccccatctattgggctataactatctctttcatgtaggacattgatgtctcatgacttcaccactactacggagggaattgttgccatataggcattgactgtgaagcttctagaacacctgtctccaaaatggggatgtatactcccaagaaggcatgcaagtcaattctaaatatagctaggtagagagacagagatattaagctttacttgtgtttaatatattaattgatactgacaaaatcaggcttttttgtctgatggtcccattttatatacaatatgtaaggtatgcctaagaaacaaatcccacacaggatttacactggaagattttacactggcaccacatttatgtaaaattatgttaccacatattgcaattaaatgtacttggttaaatggatcagatgattatagtacgtcctcactaacattgtcagtaggttcttggaaactgacttgaaccaaaacagtgtacagcaaaaccgattttacc

SEQ ID NO: 139131 - DNA, 154 bp, Homo sapiens
tgatcttgaactcctgacctcaaatgatctgcccaccttggccttccaaagtgctgggattatagttgtgagcccctattggtgcctggcaccattatcgtttcattcatttgcatttctttgatatttaataaggtttaatatattttcatct

SEQ ID NO: 139132 - DNA, 425 bp, Homo sapiens
aagaccacatggaatggtttgtcaataagtttttaagcttattatttcctatgcttacttagcatagtgactgcctttcaaaataatatgagtggaagagtaagattttcttgcacaaaatgtgttaaatgtatacttaaattaagaatatatgagtatctgaagataatctctaatcaaatatatttttattttatttttgtaaattattcttcccaggagcatggaatcaagttgccctgaatctatgctctcccaaatagattttttttttttgagatggagtttcgctcttgttgcttaggctggagtgcagtggtcttatatgaaaaatgtcataatctttgctaaaatttctgtgtaagtgaaactaactttctccactttggaatgctgaccccattcatttggagtcagtgtttctg

SEQ ID NO: 139133 - DNA, 100 bp, Homo sapiens
gaaatggacttcttcatctgtacagatttgttaaaccattctatttgcttcttaataataggatttatattagtactcattaccattggacacaatgaca

SEQ ID NO: 139134 - DNA, 486 bp, Homo sapiens
cgtcacaaacattttacaattgtttccagagcacaggcagaaatggggaagagtcgcagaaagaatagggtcattccaatggccatgatatagttcgctgcatttctttgaagaaaagtgctgcccatttctaacatttctaaattacttcaatgccattggagctagctagctttctaaagcagagttcttggtattctatgcctttcctcaaaaatgactccttggacttatagcattctatctttccagtctcactttcttcctttcccttttactcaccgtctgcctctgccctactagactacttgctactcaccttcatgcttcttcacctttgcctttgcagcttcctgagcctagtataccttttccaacatgactgttggttgaaattctacacaacacagtttagatgacatccactctagttagaattaatcacttctttcttctcttttacaattttttttttcattttttgct

SEQ ID NO: 139135 - DNA, 394 bp, Homo sapiens
acaaccagtagaacatggcagcgcaaatgtggggcttggctcttaacagcttcacatgccatttacttgaaattatgggcccatttgctgagagaaaaaaaaagaagattgaacacagtcttgcttctgagttagggtttttgcctttcttaatcaatatatctttcccaggaataccggtggatgagtctgtgttaagcccaagggaagaaatgtataattcaggcagcagagatagcctcactccaatgtgaacaatctctcttcagactccagggaaaatgcccaagatggtatattgcgtatggcgcaggtttcctgttttagctctttggtcagctgagaaaattggtgaggcctgatctgctgaaggatgacctgaattaaccctcct

SEQ ID NO: 139136 - DNA, 209 bp, Homo sapiens
aaccttccctgctgggattctctaaccacagctcgcctgaagtattttgcctttccctctggctaacagtttcccctcagcccttggttttttggttgtctgtgccacagactttctctatctgtgaccctccctctcaggaaggattcacaatggctccataccggctcttctttctgccaagtctgtgagtccatggagaacagttg

SEQ ID NO: 139137 - DNA, 227 bp, Homo sapiens
gttcctagcttctctgcctggaacttgaggctctcagggcctaggactctgtcagactttcctctcctgccccctgctcgcccgactgccccaccactcccccatggcctcccactgcctctgtgtctttgcccatgttgttcatgccaacggaagggcccttctctcccttgcttgcctgtaccacccactgcctgcacagggctccccgctcctccagaaagcct

SEQ ID NO: 139138 - DNA, 366 bp, Homo sapiens
actttgggaggccgaggcaggcagatcacttgaggccaggagtttgagatgagcctgggcaaaatagtgaaaccccgtctctactaaaaatacaaaaattagctgggcatggtggcttatgcctgtaatcccaattactcaggaggctgaggcatgagaatcacttgaaccctggaggcagaggttgcagtgagccaagattgcaccactgccctctagcctaggtgacagagcaagaccttgtctcaaaaaagaaaaaaaaaaccagaaaaacaaagttcccattgttccacatcctcaccagcatctggagttgtcagagttttggagtttggccattttaataggtgtgtctcatttttgttt

SEQ ID NO: 139139 - DNA, 271 bp, Homo sapiens
cctcggcttcctaaagtgctgggataacaggcgtgagccactgcacctggccagatctttatatatatattttttctctttggttattgctggcatgaaggaatattgttaaccaaattcagtatgtggattttatatagtttgaaaacaaaagcagactgcttaaaaaagatttatgacatttatgagattgttggaagtttgaacattgattggttatttgatattaaagaatcgttaacattttagatgtggaagtgatattgtaatt

SEQ ID NO: 139140 - DNA, 485 bp, Homo sapiens
atgtcatagtaacaatcatcataacagcaggacagtgaacatttgtaaagagtagataaactcttacagcctggaagaggcatctcatgggagcttgaatactaagtagaggaatcaccaaggcaatgtcagatacttctgcagtagagtagtttcctgagactttatttctgttctgtttccattgttctgttccttgcctttggtggcaggtggagaagagatcttctcggggatataagcattagggcctcccagttcccgggagacagcagaacctgagaaagaaatgggtgtgtggtacaaatgaagaccgggcaagcatggcatggaagccttagtgtcaatgcaaagggttacccagacttagataataggcatgccagatatacagggagataagtgtaaacttaaagccagagggacctcatcaaatgttccactccgattaatcactggttccttcacatgagccatagaggttg

SEQ ID NO: 139141 - DNA, 323 bp, Homo sapiens
ctgtctggatatcaggaaagagtttatcaaatgcctgtggaaatccaagataaggtctcatgatgagtaacccagtgaaaacatgaagtcaagtctaactagtcactactatttcactactgctgactcctgatgatcagctccttttctaagtgcttactgtccacttattccatcatctgcctagaatttatgtgaaggaatcaaagcaaaaggatcataaggcttcctttttccagtatgtttttcctcctttttgaaaactgggccagttagctatctccatttttatttcatgaatacatccccagcgcctggtatat

SEQ ID NO: 139142 - DNA, 437 bp, Homo sapiens
caatttggtgagggtatttaatattttatggtttcacataaaatgatcacagcgagtgagagttttgtggcaaggtgcaaaagtatctaaaaaatgccatgattgttgtgaaatctatattagcgaaaatctaaattttccaacagaaggacatgtaagttacctgcacctctgtggaatgtttttaaaggatgcaagtatgaactaagtgtggtagggtcaacttttgatccttgcattttaaaagttggcactagtatgaagttttttatggcagcactaaaactcacacggtctgaatagtttattaaaatggtgtaaggctgcactaatggccagttcccaaatgcactaagatacttaatgtgtaccattcctactgaaagtatgaacctacttagctgatttccagcttgcccatttctggaaaggtaagc

SEQ ID NO: 139143 - DNA, 142 bp, Homo sapiens
aaaacctgggatttagaaataccaattgacatgaaaactggccatttctgatttaaacattttgtagacttctttggcaaaaatagctatgacgatcctttaaatttatctctttgcctaacaatatttgtctcttcatctc

SEQ ID NO: 139144 - DNA, 543 bp, Homo sapiens
tcacacagggacatttaagtctgcagaggttactgctgtctttttgtttgtctgtgccctgcccccagaggtggagcctacagaggcaggctggcctcctttaaaggagtcttatatgaaaattcccagaactaaagcacataaatctttggactgaaagagctctggaggacccagcataatgaatgggaaataacccacctcaataaccgtagggataaaatgaaggtatgacattctttgagaaaaagagaatatataaggaatgtagaattagaatgacattagatttttcaaaaaacaaacacaaaataaaagatagtaatgctttcaaaatcagagtgagaatgactttcaaactagaattcaatacccagacaaatattgatcaagtctaagggcagaataagacatttaagacattcaagaatacaaaacaatttctctcccatgccccttttctttggagaacatgaaaggatgtgctccaggtaaacacagaatcagaaagaagaagaaataacaactggaacacagtaaaga

SEQ ID NO: 139145 - DNA, 567 bp, Homo sapiens
aagtcttaatgagagtcgattgtggtttgaagtatgtgtagataagtagactaattagaaatatttagaagatagaatatatattaatgctagcagtttttgagcccttgctatttgccagtcactctactagcactgtgcacatattatctatttaaaccccacttcagtcctccaagggtagatgctgctgttgtctctattttgtaggtggggaagctgaagcctagaaatatttgttagattggatgtgggcagaggtatcaaacatgaccccctgggttctggcatacatagcccgataaatggtgctgtttactaagattgggaacactaatggaaagcagatttctggaagaaagatgatgagttcagttttgaacatgttcaattccagggtcatataggagaagtaaatcggaaatgttgagcagcctgttggatatgtgggtctggctagcagtagactcatgagttgccagtatatagactgtggttgaagcctgggagtgaacgaatcactacaggagagtccgcgacggtcggctaattttttttttcactcac

SEQ ID NO: 139146 - DNA, 631 bp, Homo sapiens
gcggccgcgccaacacccccccccctcccccgccgcaaccaccgcgcgcgcgcccggcgggggacagtaggaaggggggccggcggcgagcgcgagcctcgcccacccgggtctacaccgaagggtagcgtgcccgcgcgggggccggcgggtgggagatcgcgccccgaggagggcgagggagacccaggccccgcgcgacggtccccctcgctggagtgagactgaggaaggggccgctttctgcccccctcctcccacttcgccccagagaaagagccttaccccttccacacccaaacaccactctcctggacaattacttttactctgagagaaagggcgaccagcagtggccccatcctctctgattgccggccaggttggttgtcatggtaacccttccccagcggtgggggcgaggtggtggggagcagccttcccctcgcttccacctttgtggttatggagccccaaacctcttaggactctgcaccaggagaaggttgctaaggtaacctaagtgtccgtggtggtccttctgctcctatcctcattgattactatggcaacctcccccccacctagcattcaggtagaaaggaccccagccccaaggacactgatctct

SEQ ID NO: 139147 - DNA, 411 bp, Homo sapiens
tataatcccagcactttgggaggccaaggtgggcagactgcttgagctcaaaagtttgagaccagcctgcgcaacatggtaagaccctgtctctatttaataaaagaaaaaaaaaacactttgttttaatttaaaaaaaaagaaaaaaacagatctctttatcagggagccccaagagtggttaactgtgactctctcagaaggggccttcagggatagaaagacacaattcagatctaaccacttaggttagtctgcccttaatcggctgtttcctcccagctgatggctcaagaagagtctcttaggagattatcctaaggaagaaatactaagtaccattattactatcatggcaacacttaacagcagcaaaaaattagtctatcaaatgtccaactaaaggaaaac

SEQ ID NO: 139148 - DNA, 385 bp, Homo sapiens
caaacgctgctctgatctctgcattcaaatcctgatggactcaagtcaagagtgatggcctcccacctctggccactcccatccccacacgcctttgcctcaccgagcccacacgcggcggcagcagcacgcctaggctgaaccatacccggtcaacttggagactacaactgccaagcaggccggtgcttcccgttctactgtaactctctaagcaaaatgtgccaggtttttaggggagaaaacacactcagtcccctccttgcactgtccccaatctctacgcctcaatcactccctgtgcctcaacagtgtgcccactcatcgctgatatatacactcctgtttgccattcacgcagggccgctctaacttgtggtttctg

SEQ ID NO: 139149 - DNA, 225 bp, Homo sapiens
tgagggctgatctcagcccatgacatgttcagtcaccctgcggacgccgatagggagcgcgaggcatcctggcatccacaaggagcccagaggatcgctgagagcaccacatcaagctgtcgggcagcaacccctacaccaagaacccttaaaacatggattaagacaataaaaagtggagaatatcaagaaactctaagcttcttattttaagaacagtgataa

SEQ ID NO: 139150 - DNA, 252 bp, Homo sapiens
cttaaaaatggataagtctcctgcagtaaagtgacagattaattaaactgcaaaccttctcagttgtctaggtctggagaaagttaagatataagatgatcataaaaatggaaagtccagatatcaaagacacaaaatagctgaggcaaagactagggaaatgctggtaaaggagatttcagcagtagagaagcaaaccagtgaggggaagatctattttttaatagatgattaaaaattttctctcaggga

SEQ ID NO: 139151 - DNA, 209 bp, Homo sapiens
ctcctgaccttgtgatccgcttgccttggcctcccaagtgctgtgattacaggtgtgagccaccacgcccggccattatcaagtggtttccttatgcattatctttttgtgctttgatcatgctctgcagttttatgattagagtattactgttcatggggggtcagtttctctgtaaaagcagttttgagactagctctataaaatct

SEQ ID NO: 139152 - DNA, 270 bp, Homo sapiens
ccaaaatgagatggaatgaaaagaatattcttataaaatcgcaggactagaataatcattttacacgtatccaagtaaacttcctttgttgtcaaggatattctgtttcaggttttaaatgcgtctcagattcctacacataatatttaaacgaagaaaaaaaaactctagaaagaaacaaacaagaattctcgagtaagcaagtaatttaaaggctgaatacacagatacgcaacctcaccagtatgctccatgttactacatatttaa

SEQ ID NO: 139153 - DNA, 195 bp, Homo sapiens
tctgtttttttgagcgtgtctttctgtagtgtttttctcttctaataactttgtgtagggtttgactttgataattttctgttccctttttctcagctttgtgctgtatttcacaatccataaaatctacccacttaaaagtatacatttcagtgtttctttttgtttttttattttttgagacaaagtctcact

SEQ ID NO: 139154 - DNA, 1257 bp, Homo sapiens
tttagaatctatatccagaccaaggccatggaacaatgtagattcactcagtaaaaactcactagcggccttctttgtactagtctgtcacctttgcttggctttgggaagcttcaaactagggcagtttatgtttgggagtgaccagtcaaatagcaagacagacataggcaaggatgtaatttttaaaaatttaagtggggaatggtgaagcatgaatcaaaacagaaggtagtcttaccttcttggaactgtaaaataaatacatttgaaaaaggcaccctctcaaccttctgcgagtcagaatttttgctgccacccctcattttgaatctctattctgcattttttattcttttttttaggaaggaggaagaaaaatttctcctgaagaattcattggaaattaaaattaacttgcgtattttgtattctttggaatgtgatgaagactgatttgaaagggcagtgctggatttggtcaggcataggaaaggaagacatgcagtcgtcctgcctagctcatccccgccacgatggagaagtggggttgctttcgttgtactttttttcatttgtttcttgccaagcccagtggcttctgttataacatgtggcagcttctcccttggagactgattcagtccaagttaccataatatttaggaccagctacagagacgtttcttcccctaaacccatgccaaatctaaatcaaactatcttcttctccttagccgttcaaatagctccagctcttatataaaaatacgagaaatacacaggcctcttttcgttttattcctgttcaaacagataaacaaacaaggcacatcatgcctaggttgctttgagcttgatcacttcctcctaaagcagtcttacgctgtgttgattttaagaattgcaacttaggtgttctagaacatattctgagagcatagtcatagtctgtgatctcagaatatgtttgcttccttctagaacatctgagttctagaaattgcgtacaataaactgctgtcagtgctgctggaggaaggaagagtaactctgacatcactggccttcaacaggtgtggcgctgagcttctgggcctcagaagccctgacttctagaggctgggggccagcggggcagggaggtgatctcatcatggatggccacagatcatccacctgccaaacagttaaccctgaacaagtcatgtcaatttattttgcttttaaaaaagaaagtctgcaaaatagaaaaaa

SEQ ID NO: 139155 - DNA, 504 bp, Homo sapiens
cacacacacacacaaagttgttgacacttgaataaggtggttccccaaaatgtaactactcatagcctaacattgaccagaagcctcaataacataaatgttgatcaacacgtattttgtatgttatgtgtatcatacactgtattcttacaataaagtaagctagagaaaagaaatgctttaagaaagtcataaggaagagaaaatagatttactattcatggagtgaaagtggctcatgataaatgccttcatcctcgtcatcttcatgttgaatagtctgagaaggatgatgaagaggagggattggtctttctgtctcaggggtgacagaggcagaagaaaatcttcatgtaaatgtttataccatgtttttcaagtgtcaaactatttaaatttaatgtgttgtgatggttaattttatgggtcaacatggcttggccatggtgcccagatatttgatcaaacattattctggatgtttctgtgaaggtaatttttgga

SEQ ID NO: 139156 - DNA, 147 bp, Homo sapiens
aaagttaccttcaaaaagtattttcttttaggatataatggcttcattcatgtcaaatagcttttcttttatttattttaagttggggaatagacaaaagtcatacataatttaacacaataaataaggcaaatgcaataatattgg

SEQ ID NO: 139157 - DNA, 401 bp, Homo sapiens
tacttgagtaattacttggctagaacttccagtacagtgttgaatggaagtgaagaatgagggcatccttgtcttgttcctgaccttagcaggagagctttgtcttttaccactgcgtatgatgtgagctctggggtttttaaaggtgttctttgtcaagttgaggaagttcaattctattcccagttttttgtgtgttcttatcatgaaagtttaattttgtcaggttctttttcttttttctacatcaattgagataatggtgtgttttttcctctctttattaatgtgggatattacatatgtttttgtatatcgaaccaccctcataatcctgggacctgtctcaattgattatagtgtttaatcttcttaatatgatgctatatttggtttgcaag

SEQ ID NO: 139158 - DNA, 489 bp, Homo sapiens
agatattttaaaattctctctggatttcctcttttatccagttgttcaagagtgtattgtttttatgaatttgtgaatttttctattttctttatgttaccgatttctagttctttccactgtggcctaagaagataccaggtattatttcaatcttcttaaatttgttaaaacttgttttgtgacttaagatgtgacctatcctggaatatgttccatgtatacttgagatgaaattgtattctgctgctgttggctaaaacgttctgtatgttaggtccatttggtgtatagtgttattcaaatcagttgtttttttattggttgtctgcctgaatgtgctatccattattaaaagtggaatattgaattctcctactattaaattgtttttaacctctttcttcatatctgtccatatttgatttatatatttaagtgctctgatgttcagtacatacatgtttataattgttatagcttcctgtt

SEQ ID NO: 139159 - DNA, 340 bp, Homo sapiens
catgccccaccacacctggctaatttttgcatttttagtagagacagggtttcaccatgttggccaggcttgtctcgaactcctggcctcaagagatacgcctgctttggtctctcaaactgctgagattacaggcatgagccaccatgcccaacctcacttgcttcttatccttacactcccctggccctagaacaaccttaacctggcttcctccagacctctgagtcatgcattgaagtcagcaccaccacgtggagaatcaccattatgtgcctctccttgggcctgccttagcagaactcagccccacccctagaaaagggcactgtcctctgcc

SEQ ID NO: 139160 - DNA, 401 bp, Homo sapiens
atcctgactatactagtttttatggccgaggtcactgaagttgtgccaaaaattcaacaatgatgttcaatctaatgtagcaatgcatttatcttattgctgaattttagactcctcagaacaaagcacttcatttaaatgataaatgctcacctaaaataccctgttgtaaacatttctcacatttaaacaattgtggataaaatactgcaatggtaaagctttcttttcaatacagaataaaagttgatgtttaattatttaatgtctcttttaattggagggaaagaaagtattttaagtgcctgttgcataattaaaataaacaaacaaaaaaccctgtcacatttaaaatggtaaaagtccataatttgaattgacaactataaatgaatttaact

SEQ ID NO: 139161 - DNA, 196 bp, Homo sapiens
agaggtcgatctgaggatccccactagtccacggttggcttatcagtacatggactatactgataagccagacatgaaattccatttgatatactctgctaaataaatgatgcaagcacagtacattttagagacagaatcttaaagtacacagctctaaaggtaccatctcccttttctcgtctgtaagaataag

SEQ ID NO: 139162 - DNA, 456 bp, Homo sapiens
atttcaccggccccctgaattgggtaacatatgtgtcatctacttagttagaggctctaagactgataatgaatcaatgagtgaagcttttggaggaattcggcttcttggttcgtgggaggaggggtaggtctgtgttttagtgttttacaggcaaattttcttccctgccattttattttgcacatctcttagcattattgctgaaatgtgagaacagcatttaggaagcccaacaaagcttcccaagtgtgaagctgtgacattttgttattctagaaccacttcagaaagcaacgttgtatttctacttaacatttaatgtgttgcagctgctacagaattatttacaaagtagtaaaacagagaaaaagcaatcatttcccaacatcattagtaacaaatatgtttgcttatattttctaaagaagtgacaagaaatgcagataatgagtg

SEQ ID NO: 139163 - DNA, 399 bp, Homo sapiens
cccgtccaaaaaagtgctcaatgaagaatgaatgaatgaatgggtaagctctgggagaaataaccaggctggttgggcagggaaacgtccttctctgaactttagggttctcatccgtaaaatgaggataagcaacagtctccatctcacgggaactgaaggtatggctgaacaaaataggcttattgtcactacagtggcataaacacctcccttactcaaaacactttcaagggcgcagagagaacgctgtacgagtgagcagtaccgtaaactgttactgctctgggttctgtcacgggacagtgactactcctcactgaactgtggaagaggtggcccaaaaaacgcgagaagaaaagagaaagtttttagacgcagaacgcggctcgcggccac

SEQ ID NO: 139164 - DNA, 338 bp, Homo sapiens
atgagatgacacttattaggaggagattgtggggaactaaaaaattctggaattaagaaaactcatttttttacttataggtgttttcttatgggaaaatgaaaagagaactcatttttttccaagaaccctttttttcttaaatttatatgcccttctgtctctaaatacagttcaaaattgtactttttaaagaacaaacctaattgtacacagtacagtttggctcttaaattagaagtcatcaaattcacaaactgcattttaagaaattcagaatattaggctggacatggtggctcacgcctgtaatcccagcacttggggaggcctaggcg

SEQ ID NO: 139165 - DNA, 493 bp, Homo sapiens
catttattctatgcagacgtattacctctctgaaccctcattcatacattcagtagtatttcctgatgacagactctacctgtaacaaaattagctttcatatattttaagttacagaatacagtgcatgagtctagttagcacgtgacagacaattctcagttacctgccttgtgtattctccctgccagctgacccagtaagcacgagctcaagaagccaggtatctttttactttttgaactgaaagaaaaagttgttaagttcatagatcagtcgccttaagtgaaaagtcagccttccttccaccctctccagccacatccagccaccattcccttccccaaagcaacggctttttccagtctttttggtttttgtttttttgagacagggttatgtgcccaggctagagtgcagtggtatgatcatggctcacagcagccttgacctcctgggctcaggcagccctcccacctcacacacctgacta

SEQ ID NO: 139166 - DNA, 414 bp, Homo sapiens
gtacctgattcttcagatgtcactcttgaaatagccacctgcccacgggcccatcatgccctcaatattttcttcatatctctgagcaaagggtgtggggttttattacttctcctgtgtgtcccagttgaatgtgagctgggtgagggaggtgctttctctgttccctgctgtgtccccagggcttggacacaatgaaggtcatgccactcctaagtagcgagcagccagcagctgggctcctaagtagcgagtagccagcagcgcagcattcaaatgcagaggccaccttgaggtgtcccactgcacccccatccagcctctgccgcaacctcccttagaagcaaagacatctagggaagtggcttgcttactcgaggatagagaaatggttgcttttagttttaccattca

SEQ ID NO: 139167 - DNA, 513 bp, Homo sapiens
agttcgacggagactctctgagattggctcctcatcctcctgctgacagccaggtctcagagaggcaagtcccacacttcccaaactctggatccgagctctgccgccgccggaggaaaggcttctaactggttaggaagcacagaacttgcctggccttcaccagcattatcagatctgtcattctctttaggaactggctctgctctaggccttgttctttgctccagaggtaacaattgccatttttctttggtatttctgctgtagtgatcgtacttgcccttctcataggaaaccatgggaatcagcccaagtcacagctggcttccagatggctcttgatcctgtgacaccaccaacattccaatgctgatttgcttgggaggttcaaacttggcttgccggggcaccatgcttctggaaccccaccctgggagatttataggcaggccttggagagtctccgtcgaactagttcgaaggagactctcggatgaccatgttgtagct

SEQ ID NO: 139168 - DNA, 138 bp, Homo sapiens
aaggggctctcaggaacaggcaacggacaatgacatcagactggtccatggaatcagtgcaggaggtatccaaaaacacctgcacttaagattcagttcaataaaaagtgacgttacccaagggctatggaaaagctg

SEQ ID NO: 139169 - DNA, 288 bp, Homo sapiens
tcatttccatcgatggcctctgtctttgggtcactctagaactatgggcctgcttgactctctaagtccagcccgttcccttcagtatccaggcctccttccatgattctttgattcctgagtgacttcgtctccatgttggtgtctaatggtcttactttctatgtcctatttctgttcccgggagccactttctgtccagtgttgtcaccttttgtcttccctatctctttggtcattcctggactcctttgtctgtcattgtgtccatggactgtccactctgca

SEQ ID NO: 139170 - DNA, 498 bp, Homo sapiens
taatagtgtgatgaacatgctcagccaaaggcacttgagaatgtctctggggaaaattggatgcagacacagacaagcacacagggagaataccatgtaaagagtggagttatgctgccacaagcaaaggaactaccagaagctaagagaagcctggaacagatccttccccagaatcttcagagaaagcatggacttactgatgtcttcatttcagacctctggcctccagaactaaagaagaaacgaacttataaatatcaaagatatcatttgagattacatagcaatggagcagcaaaggtcttattgattggagagcgattgattggagagtgcagacgtatgcagcaacaggtttgtcagatgtggtggtcattgctcttactccagctttgcatcctagaatcaccttgttcagatcatcaccacttctcaattgggtgatggtggtagtttcctacctactgttgttaccggagaggggtcccgatccag

SEQ ID NO: 139171 - DNA, 393 bp, Homo sapiens
gggcatgggagccgctagaacaggagacagagggggactggaccccaggagggctggagggcagaatgaaagagggatgtgtgagggagtctgtgaggcaggcatgtgagagacacacagagatccagaagagacactggcacccagtgtcctgaagaccgggtctctccagcctgcccaccaggccagctccccaggaggccacccggggtccttccctagatggagccccccaaacctcccctccctatctccttcgtttggtgggaagaatccagtagcctcagaagaaaaagggagcaagagaaaagtgagagtcagttggtctggccttgggatggtgcgtgcgttccctgcaagccagccagctccaggacacctgggcccatgcct

SEQ ID NO: 139172 - DNA, 424 bp, Homo sapiens
gtagcagagagggcattttcctccctcttctctccttcccctttacaaaccccatctcaatcagtctgatttcccagatggagcaaatggggccagggaacaagatatgacaaatgattgccaaagcgcagtagaagatggctttgggattgcactggaattggtaaatggagatcctggtgtccactgggcaggtgatttgggtgctggtgaaggttgtggcaatcattctgagcagaatgtgcctgtgagagcctttctctactattggggctaattccaggagaaaggatgcctagttaagacactaccttatatgattttgatccctttatttctcagtctcattggttgcacctgatttcctctatgacattatacaactattgtataattttttctgctggtagcacatgatttttcc

SEQ ID NO: 139173 - DNA, 748 bp, Homo sapiens
aataacaaagcaagctctcaaaaagttttatttcctctgtatccatttttatgaaggtactgagagatgtgcatcaacaaaataagtgagtaaactaagaaagaagaatgtactggatcttataaaaaaggaccaacaaagaaaaatattttttaaagtcctagggtgacagcctatagagcaaccagtatgaatgaagtagagatctgggtgcaagatcaccaagaaataaacataattgacaggtatctgatatatttgaatattttgagaagaaagagattcaaattagagaatgtaaagaaactaatattagtaaatggaaaattatgtaagtacaaaacaattttcagttctaggaaaaatgtttctcaagaaaggaaatttaatcacactacactaatgtgtattttgaagaaagcttagcaatatggacactattagtttaacttaaaaaaaactgtaggctgggcactgtggctcacgcctgtaatctcaacactttgggaggctgaggcaggaggatcagctggggtcaggagttcatcttgatttttacatttgaaaataatgaaataaatttacaaaataaaaggaaaagtgaatatctttccaacagtccaccaatatcctcatcccaaaattatcaaaatgtgttaatattcctatttattttcatgcagtttattacattttgtttggattataagccatgatctctctctctatatatatatatatatacaca

SEQ ID NO: 139174 - DNA, 405 bp, Homo sapiens
gcgaactcccgacctcaagtgatccgcccgcctcggcctcccaaagtgctgggattacaggcgtgagccaccgtgcccggccgggttattatttaattgtgaaggcacaaaagcttaaacggcaggattcaggtgtccactagtacatcttgtttctgttttgaacagattggaaagttagctctgtccgtcagttctttcagtttttgttatttctactgagattgcctataagcattccattgggtgccagtgtggtgacttaattcaagagagatgtcaaattcatgcttcttaattcaacatttgtaaacattgtttttttggtcattgtgaatctgttatacatcttgagccagctgttccatatttttgagttcctaacataacctgtatgaattcagg

SEQ ID NO: 139175 - DNA, 499 bp, Homo sapiens
tatcacttcatcgtctctttgtttcaaagcctcaaccagctctgttctactcaaagaacaaaagtccaaatacgtgctttgtcagcctggctggtactcaatatcctcccaaatttagcctcacctgacttgactggctttctctgagctcccccagcataaactcagacatggagtgtccctatctgtggaagaaacctttggacatgagatgtctcctctccaccttgctgacctgtctcctcccctaaatactaccatcatccttttctgagtcctcaaagactcaagactcaccttgtcggaagtgaactctcccctggctggtgcagtgataaatatttctttctttctttcctttttctttctttcttttttctttttttttgacagggtctcactttgttgcccgggctggagcatactggcacgaccttggctcactgcaacctccgtctcctgggtttaagtcattctcatgtctcagcctcccaagtag

SEQ ID NO: 139176 - DNA, 370 bp, Homo sapiens
caacatgagtaaaatatactcctaaccctcaagaatcttatattctagtacagaaaacaaatctacaaataacacaaggtacaataagtgctataagaaatatacgaataaagagagaaaacaaaaaggagtcaagtttaaatttttacagtgtacttttactattctttttttttttttggaagaggcgaggtctcactgggtggcccatgctggtcttgaattcctgggctaaagagatcctcctgcctaagtctcccacagttttgagattacaggtttgagcaattctgcctggcacatacattcatttttttaagaactaaaagtatacatttcagttcctgagtttgtatcaaattcatttatt

SEQ ID NO: 139177 - DNA, 321 bp, Homo sapiens
caatgttattccttctgacttagtacttctgcttcagaaatcttacagtgatctaccttctagaaagactggagataaatacatcaaaatgttcacagtagtgtgtctctgagtggtagaattatgggtaaaaaaaaagatggcttgtttccatttttcttttgcacccctctgcattttttccaaataatctataatgaagacaggctccttttatatttggaaataatttccaaatataaacattttaattttataacattttaaatttttcaaaacactggtcctcataacaagaaaagttatttgttgcaaccacac

SEQ ID NO: 139178 - DNA, 332 bp, Homo sapiens
tgctgggattacaggtgtgaaccactatgcccagcctgtttttaatttttttagagatggggtcttgtcatgttgcccaggctggtctcaagcagtcctctcacctggccctgtattggagttctgaaaacatgattcctgagctagttctttttatttccctagataccttttctttccttgcccccaaatgtgggtatctgcatgcacaggcaggcaaacaccttatttctgaggtcagattttactatatcccaaatttaggcctaaactgttgctcccatgggcagttttttacactactatccttgaagaagaaggaaactaagttt

SEQ ID NO: 139179 - DNA, 434 bp, Homo sapiens
ctcccaagtagatgggactacaggcatgcaccaccatgcccggctaatttttgtgatttttgtagagatggggtttcatcatgttgtccaggctggtgatactgtattttaaaaatacagtttttatttgattcttgccagtgaccttctaccataatgaagcgactctgagtcagagcccccttcacagagcactggagctccttcatgacacttagagtccatctctggctggtcattggtgaatggtgtccagtcttaccgtcaggtttatttgaccctggacctttttactaagggagtggcaagcgaattgctgccacgtgcttgtgtggtgatccagccgcgcctttccggcacagtcggctttagtgaacaggcccgtggatcagtggtgctaagaataatttaaactacttaggggaagatttggg

SEQ ID NO: 139180 - DNA, 458 bp, Homo sapiens
gttgtgtccagactgaacagtagttcttctgcaggcgatcactcctgtagttttacctgcttgggatgtggcctccatctgcgcatgtctagaaatttctcattacgagaaattcctatttagttaaacatttgtttagtatttatttcagttctttcgcaatcatctactttgtaagtttacatgtctcatagatgttgataaataaatacagaagtcaatgatcaaaattaaatggtacattgttaacatccaccagctttaatccagctataatgggaaagaattggaatcacttggtctgttaccagttgttatgggctgaattatcttctcccaccctgactcctgccccaattcatagattgaaatcctaacacctaatatatcaaatgtgaccttgtttggaaataaagtcatcgcagatataattagttacaatgaggtcatactggaat

SEQ ID NO: 139181 - DNA, 495 bp, Homo sapiens
tcccttagtctcccaggcgggagtgcaggggcgcgatctcagctcactgcacctccggctcccaggttcaagcaattctcctgcctcggcctccgcagtatctgggattacaggcacccgtcaccacatccgactaatttttatattttcagtaaagacagggtttccccatgtagaccaggctggtctctttggccaggctggtctccaactcctggtcttagaagatccctcctacttgagtcttccaaggtgttgcggttgcaggcatgagccaccgtgcctggccttggtgctctctattcatgtgggcttgagttactgtctagtgtcctttcatttatcctgaaggactcttaggtctttcagtgatgaactctctacttttgtttatcttggaatgttttatttttcctttatgaaggtagttttgtgtataaaggttttttttttttttttttttttagacagagtctcaccctctcgcccaggctg

SEQ ID NO: 139182 - DNA, 327 bp, Homo sapiens
tgatgtccaagggcaggaaaaggagtgtcccagctccaggagaaggagacagaggaaattcttttctctccttttttgttctatgtgggccaccagcagattggatggtgccctcccacaatgagggcagatcttccctactcagtccacttactcacatgccaatctcttctagaaacaccctcacagatgcacccgaaggaatgttttaccgcttctctagtcttcttttttttttccagactatagtcaggcttctttttttttttgagttggagtttcattctgtcacccaggctggagtgcagtggcgtgatctcagctcac

SEQ ID NO: 139183 - DNA, 428 bp, Homo sapiens
ggccatatcatgaatatccttaaatgctagactgaggatttagacttcatttgtttgggagttaacagaaatagatcacttgtgcattgctaatttaagaaaaagatattgtatgcttttgacatatttagggaggtgttgtggacccaccacctggagagagatatatggccagcagtttgaaatgaaattcatttcatagcagaatttgaggacagaggaaaagatttaggaatcacttgcatgactggtgagggtgaaaatggtgattatggatgagatgactgagggagggagaataggcaaaggagagaaagtgtatcaggcagaaacttagaacacaccaacatttttaagattaaatgagcaagaagagagcagagagatgtagtcaaagaaagaggcagtaggtatgattcagagctgta

SEQ ID NO: 139184 - DNA, 252 bp, Homo sapiens
tcagcctcccgagtagctgggactacaggcacgtgccaccatgcctgcctaatttttgtatttttagtggagacggggtttcactgtgttagccaggctgatgtcaaactcctgacctcgtgacccgcccacctcagtctcccaaagtgctgggattacaggcgtgtgccactgtgcccagcctacttggtttttgtgtatgtccctggcacaccgactgtcgccctggtatttaattgttgtctctgtgag

SEQ ID NO: 139185 - DNA, 643 bp, Homo sapiens
tgtgatgtcttcttcatgggcacagaatgatctgtgggagcgccagggaggtgagaattaagcaaccatattcccttccttgcccacccttggaacagcttctccttggtcactggcattggtcaccccccaagtccacaccttccctctatgctgttctaggatggaaggacccagagttgaatgctgggccccaccacgagctgggaggtaatcttagaattattctccacaattatattgatctcccaagattccctctggtgctcaggatgttggtgtgcgtagaggccataacactctgtgggagcagtcagggcctgcagtgctacagagatcggatgctgtcttgagcaggaagcagagcccctgagccattctcagcagtgggcctgctctgaagggacctctggaactgccgtccagggcaggtgttgctggggagggaatgcgagtagaaggagctggaatttgagagcaggttgatgcaggcagggccctttgaagacctccgaaacagtaggcctgctttctttcagaggccccaccccatcctgggagacagattaaaatagactcacatcccatattaaatacaacagttgaaaaaattctttaaactttataaagtttattataaagc

SEQ ID NO: 139186 - DNA, 304 bp, Homo sapiens
tatgaccccccttttcagtttttcatgccaaatgccaggatttcaccctttcatgcttttttccatgcttaggctctgtctctctccatactacgtggaacatgaagccactggctgcagcagtaacagcacagagcagggacggcagctccctcactcccctcctcatttacttcatgcctccactgaaagaggatatttttatactgcccattcttacaatctgctcaagtcaccaaagatacatggttgacgttagcaaaaatactgtaaaaatgtaaaaatggttaacccgagctaggca

SEQ ID NO: 139187 - DNA, 267 bp, Homo sapiens
ggtgacagagcaagactctgcttcaaaacaaaaaaaacacgaatacaatgacgtccaaattgttgtcaacagtagaatcctttctggagtgcagtggaatcccaaacagcagacaacagcagacctgccctggctgaggctgaatgggcatcctagggtctcaccaattcctctatcttgattccaaagtgtttctcagagcttctaagagcagaatttgaaaccacagattcagtccaattccctcatgtaacaaatgaagaaatc

SEQ ID NO: 139188 - DNA, 1232 bp, Homo sapiens
gaggattttttagcttgctaagcagttgttgaagataaatatgcagacaaagataatttaagagttcaaaagttttctattccgtattgggagactacatggatatttagtagcctctaaatatagtgctctatcctcctgcttggcatgagagtaacatcaagagaaagactgagataatatttagtttctgacatgtaaataggatcccagctgcaggagaaaggctttgctacgttcctttggctactgccctctcttgcatattacagccaagcctggatgacctccaccatagagttctctttggtgtagagaagatgctcattccgtctttaacagcaaagcatggagactgttgctcagcaggtgcaggggtatgtatatgacaaaaggaagcaaaataaaaactcactctctgtctcagaggaagtgggacagagaggagagggaaaggaagaaagtgaaagaattaaatgtaggccccaatttactgtgcattttacaagttgagggagcaaacagcctccaggaagcttttactccccacctccaactctcatttgggaaccctgggaggacacttctgtgcacagtggggcagcctagtgattaggaaggggaagctgagtggtcctatgagacccagaaaaaggtctggttgtcattttctagacacccctccattcctaaggtgttcatactgagttaaaagccgtcaagtctgtaatagggtttgtaatggtgggtcaaggtaatttggcagcaaagccatgggcaggctgtaggccagggctgaatggggtctgtggcaactgcataggggtagttggccatcagaagctgagtcaaagcctcgaggcctatttagtcaaggaggctcaggatcaccgagccaagagatgagattgagctaaagtagtggtatcctgcatcagtggatgctagcaagacagagcagtttggggtttactccagagaccagaggaggaggccattaccatgcttgcgagcacttcctcttttttgctgccaaaaagtcatgcgggatgtcctgatataccgcactgccgttctaatgacaaaagcaggggaaggggaactatgtgagagatttaacacttttatttaagaagactgaatattacctaaattatgattgcagactaatctttaaatcgatcgaagagtaagttaatcttttccccactagtcagtatagtaagactaga

SEQ ID NO: 139189 - DNA, 1188 bp, Homo sapiens
gtgtcccagaaaaaaaccacttgggctccctgtttggagtctggctggctctgagcattgccaatggcccctactcacctgactttgtatcctcttcttttagaggctttgcattctgcacccagcttcactaacagtgggctgaaaccaaccttgggttgagtgtttcatttgggagttatttggccagggccttttgaacaatagtgtccccatgaagtgctagataatatatgtgtaagaatcagcttttttttttttaactataatatccttcagaaatttctaactactttgtaactgcatggcttaacctggtgataaaagcagttattaaaagtctacatttttttttaaaaaaagaatagaacaaataatgggagcattgggttgacctttgcaaattatctagttttatttacctattttacacaggagaagactgagagaagggaggagtagcttgctgtagttcagacagcaacttatttcaaagctggtgctaaaacctagagtgaactggtacttctccatttctgaaggaaatgcagaagaaacagaagcagaaagacaacattttggcctggacatatttaacttaaagatgactccatttttgaactttatttcttggaatagagtatcttctaaatttaaactgatccaactttcacaaaattgggcagttagaagtcacagagggaattagcagctgttgttataagaaaaagcaaagggattgttgccagacttcataaatcttggcatatttgagaaaaatgtcccaatttgttacatatgctcattcatgtgtgtaaacctttggttatagtgctttgtcaatataaatatgttttacattataaattggtctgagtgctggatttcatgtttattatcccttagaaccccactttcttttgctcttcttctcgggctttctttgctttatttctcccactcttttcttcttttttttagtgtacaagcagtgaagggtgcagatcatggatagagctttcaagaagtttgttctagttcttctcctgaaactggacctccctcctagcttggtaacaactaccttatggtctccagcctggtgacagagcgagactccatcttaaaaagcaaacaaacaaacaaacaaacaaaaaaattactcccaggtaactcacaaaaaccaaa

SEQ ID NO: 139190 - DNA, 353 bp, Homo sapiens
cgcctatcgatcgccgcaggctgagactggaggatcccttgaggttaggaatatgagaccagcctgggtaacatgggaagacttcatctctacaaaaaataaaaaattagccaggtgtggtgcaccatgcctgggtaatttttgtatttttggtagagacgaggtttcaccatgttggtcaggctggtcttgaactcctgacctcaggtgatccgcccactttgaacttccaaagtgttgggattacagacatgagccactgcgccggtcattttttttttttagccttttaaaagatataaaagccattcttagttcccaggccatcagtaaaataggcagtatgctagatt

SEQ ID NO: 139191 - DNA, 733 bp, Homo sapiens
ctcccatcagcattagctcattcacgctccccagacccaaatgtggaggaggggttgagaattggccttatctgctctattcaggaaattgtcatttctgctttgctgctgcaacatggattactggttctcccacctaaaaggaaggttgtggggtttggggttagaggggtttaggagcaggaagatttaccatagacgtcgcttaaagcaggatggttgagtcatggcttgctgcaactgataagcaaggaactgccctaaagattgtggcttattcatttcaaaagacaaaataattgcctttccttttcgtgtggctcaggagttattactttactttttctctctctgtatcatattcagtgcagccacgttataaactggaaatgattattactaaactataaaaactacagacttaattaggcagaaaatctaagagcaaatgtacactgtattttgagaaaaaaatgacggcactggcttcttcaaaagccggatcctgtaggtgcattcaaacgcagtagagagaaagctaagacagaaaaatcccaacttgagtttaatatttctgtccgtttatatagcactttatgtttgtcaaagtaattgtgcctatcttaagtcatccctgtgcagtagaaggagaaggaagagattattacctacactttagcatataaagaaaagaggaggtgggagatttaagggtttctttgaatatccccaa

SEQ ID NO: 139192 - DNA, 848 bp, Homo sapiens
tggaggctgaaagcctagctctcgcaaaccccagaaagtgtctcttagcttttccgtttgccgtttgcttttccatggctttgatcgcggtcaaactccgatttcccgcgtgtgtgattccagagttcttctggaggcgaggttacgggaggtctgcagcatgtctgacctgcagccccggctcactggcctggctgtagggagttagtggatggagagtggctggacagtttggagaccaggtaacccagcgtggggtcctccctggagaaacccccagtgctcctgcgacatcggcctggcttcagggctctgctatttgaatgtgatgctcaactctccaataaatggtcgtctgtgttaggcttgcttccagaaagagctcagggatggttttgggttttgttctgcttcttttcaatatgggaggaaccttctctgatgggagaaaagagaggaggagaaccacattcctgagatgctgtgattttatcatgaaaccatccccagccctcatcctggtgacgtcagtcggcccagtcctactccagaacgcttcttgggtgtctgtctgcaggactttgctcagttaatttttgtctcctctaaaacagaccccgttgctctgggaggagagccgagctgcggctcaggggccgtcactggtcatttttgccctgatgtatttttgcctctacatttcttgatctctggaacgttaatcccaacgatgcctggtctgcggtgctcacagtctgtgtctgtgctttctacacctgtcctgctcagatgcacatgatgtcacacccaggtctccatcctggctcttgttggctgcggcggcagcc

SEQ ID NO: 139193 - DNA, 590 bp, Homo sapiens
gtaccaatgtgtgttatatttattttaatgttattttaaaatgaatgaacataacaatagacacaaagcacttcttagtataattttaaataactgtgaagcaaatttcaaattaaatataaataatttggcaaaaccaactaaattcaattaacgcgccgtatttcttgtagtagatatatttttctcccctaaagcagttcaccattgttgaagttaaaaaaaatagtagtatcaagttcaggtttagattaattgtgattctttatgttgactttagtaaaattaaggcagaaagtgcctactaacatagatatactgtacagatcattattaataacttaaaatatgtttgctagtttcaaataattgcaatatacttttcccatgagcagctatcaatggctaactttaacaagctgtctctaaaaactgtctcactcgccctaagataaatttagctatattgctttactgaaatttacattaagtgctgatctaatccaattatggctagtgtcatggccgtaacatttattcattttacattgactgaaatatttattgtcaatgtactttcacaagttagg

SEQ ID NO: 139194 - DNA, 331 bp, Homo sapiens
gcctggtacatagtaagcactcagttaatgattattaatattattttaaaatatctaattttcctataccatttccttcagtttggagagcactgtctgattgctttcttccctactgaaatggtactagatgattaaccacgttaaagaaaaaggtcctccacacccacacatccatgtctcacctgaaagattcctgcccttgtcatgatgaagtgaacatgactactatgatcaaggttgtatctccatagcagctaggacattaaatggtgagatgcaggaaatttacacacactcatgcttgtgtagccgtttcattcatagtgtg

SEQ ID NO: 139195 - DNA, 348 bp, Homo sapiens
agtccgttcgactgagcgcaggtgcagaggccaacgagtcagaacgtcacacaggccagcctgctgccgactgctctcctgactccctgaggcatgacgacagctctgctgggtcaccgggaacctcacggccccagggatggaaaggaagagagtgttgctgtctgaatttccggtgcatgccctccccaccctttttttttgagacggagtttcgcctttgttgcccaggctggagtgcagtggcgcaatctcggcccactacaacctccgcctcccgagttcaagcgattctcctgcctcagcctcccgagcagccgagaccacagggctcagtcgaacggactg

SEQ ID NO: 139196 - DNA, 448 bp, Homo sapiens
tagtaacatcgaagaccactgatcataggccaggtgcagtggttcacatctgtaatccattgttttgggaggattgcttgaggccaggagttcaagatcagcctgggcaacatagtgagaccctgcctctaaaaataaaaagagatccctgttcacagatcaccacaacagatgtaataataatgagaaagtttgaaatattgtgagaattaccaaaatgtagcacagagactcaaagtgagcacatgctgttgaataaatggcactgatgacttgctcgatgcagggttgctgcaaatcttaagtttttaaaaactttttagtaaatgctgttaattgtagcttgatttgcataaatactctaatgaaatggtttgtagacaaaagcaggaaatagttgtttttgccttagtggcactgtcctcccccttagcagttggaagcctca

SEQ ID NO: 139197 - DNA, 521 bp, Homo sapiens
ctataccttctttacagtctcttcaaacagatgttgctttttctttcatatgccttattcttataaacctggagatggagcaagtgtcctcctcattactgttttaactactatcagtcatctttgatcctccaaaatcccaagtccttggaggctcactataccattcactatagggccttcccactgtttgtctctacctcacccactgttttagctcctgactgccttcctcttcaccccattccaacaatctctcatgattatttcaataatcatgcacaatcactgaataaataaccttactattgaattgtttgatttcttcactttaatgatacattcccctaaggctaagccttacacctagaatatatcagcatgcactccaaaattcataacctttaatttttcatcaacaagtacaacatgtctgaaatctaaattttaaggacccttttttttcctcactcagtctgctatccctcgattctattagctttttttactgtaccaaattg

SEQ ID NO: 139198 - DNA, 282 bp, Homo sapiens
  misc_feature (20)..(20): n is a, c, g, or t
  misc_feature (40)..(40): n is a, c, g, or t
taaatggtaaatggtaaaantaatggtaaaaccctatctntactaaaaacaaaaaattagccaggtgtggtggcaggcgcctgtaatcccagctactcgggaggctgaggcaggagaatggcgtgaacctgggaggcagaggttgcagtgagctgaaattgcaccactgcgctcctgcctggggaacacagcaaggctctgtctcaaaacaaacaaacaaacaaaaaagcccattgagcccggtgcagccgcctttcacttctctgagcctcagtttcttca

SEQ ID NO: 139199 - DNA, 271 bp, Homo sapiens
tgtgatccaggctgcctgtgttccctggagaaggtgatcaccctgcctttcataggatgcaatcagaacccattcctggagaccgtatcccaccctacaaagtgcaatcagttggcctttcctgttttccacctcccgctgcacagagcttcagtcccctggcctccctctgcccttagagtcaaaaacccctcacctcccaagggcttttaacagccctggtggcccaggccaatgatacctaccttgtcctgatcaggactgtaacaag

SEQ ID NO: 139200 - DNA, 665 bp, Homo sapiens
atcatattagaagacagctggattcctacactggcttctccagtctgtggcaatatattattttggttgaagtggatgcagaaaatctggcctcacatatgcaattggaaaaggcatgagaagtatggtagtagccttttcagataattacacataatcttctttaataccacaccaaaacttgacacatcagagtattgtagagattagttgcaatacgaaatctaaaaccaaatcatgtaacttttcatcctctgttaaattgaaatccattggtctgtcttgcagttttaatagatctcttacctctgcattaatttataacagtatacatcagtgatttggagattatcagtctactggtttatgacaatcttccaagtgttagtgtatgtcattataccataccagaagtcacgtttgtttctgttaccagtgatgtcatcagaacaatctgtaagcattgagaagctgtcagagtcacagtagtggacacaagtgttccaagttactgcttgaatgctcgaaattttatcactggctattttccttgaaatgtcaagctcacttatttttgagaaaatgtcagccagatactcaagtctgaataactgtagcttattggtagttatactaggtaaaagcagcactccattaaaaaaaaa

SEQ ID NO: 139201 - DNA, 595 bp, Homo sapiens
gtgggactccacgtagccccccaagggaccacgtgcaagttcctcaacctatgtgggccttgctttcctcttctgtaaaatgaggaaattggatcaattaatctctaaggttcttttcaattctaggttctattataattaattcctttaatgatgaatgggaaaggtacagaagcaaatttaccaagaaaatttaagagtagctttgctcaaacgatatagtacatttacaaacaatatagtacatttactcccaagtggaatctattttaccaccaattttttagagtgaagtctttttttacctttattttacaataaaactagatctaataacataaaagtatcagcatatatagtgggaaatatcaatctgctacagtggtcattcaagaaggaaactagggccgggcgtggtagctcatgcctgtaatcctagcactttgggaggcctaggcggagagatcacttgagatcaggagttcaaaaccagcctggccaacatggtgaaaccccatctctactaaaaatacaaaaaaagaatttacctgggagtggtggtgcgacctgtcacccagctattgggatgcgagga

SEQ ID NO: 139202 - DNA, 587 bp, Homo sapiens
ctaaggcaacgttgttgagtgggaaaacacagggtcatatttcaggattaagttttagagtcaaacagaaccaggctcaaatccaatttactgtgtgaccctgggcaagatactctgccaaaataaacctgtttcctcatctgtaaatggtgacaccaatgaatatgtcaaatcttataggttgctgtaacaactggccctaccacttaacacctagtagatatactcaataaaaggcagctactgtcaggaatttttcccagacccactcactgcacttgaacccttgccagaagcaggcaggcatgctcactgtctcctcagaagctacgcactgcatttgtcttggcactaagggagagaacgttttttaatgaaaaggtcagtctgccccaaactcacactaattttttttttaaacagggctttgcctgactccacttttttctccctactctggtcctgcccaaatttcatagcaggaagacagctttgagaattagcaggggtggtttgccagatgttcctttgcagtctgcctttgtgactgccctctgactaattcaaactaggtttaacctagtact

SEQ ID NO: 139203 - DNA, 380 bp, Homo sapiens
actgcaagctccgcctcctgggttcatgccattctcctgcctcagcctcccaagtagctgggactacaggcgcccgccaccacgcccggctaattttttttgtatttttattagagacggggttttaccgtgttagccagcatagtcttgatctcctgaaccctgtcaaatttaacagtgagggatgtgtgcaactttgataacactgatgttaataagttctgataacccagtaacattgggccggcccaattttcaattttgaatacgctaagttcttactactgtggttttctttatggtttaggaggcctacgtttaatatctactcaatactgaaataaccaatgttatgtagtggttaccccttgctctgtggg

SEQ ID NO: 139204 - DNA, 172 bp, Homo sapiens
aaggttgggaacagaccatcgtttttgtcatccagattcttccagcgaatctcacaccagcaaaggagatacaaatacttagagccaacaaatgaccagtagaacctgacatgcatacatgcgcacacaccccttttctctctagcagcccccacacatactctcttcctct

SEQ ID NO: 139205 - DNA, 410 bp, Homo sapiens
ttaacataaaattaaagatgacagatgacaattataaaatatattttagaaaacaagagcattttctttaaatttaaatagttattgaaataggtacataaagataaccatttcctccattgttgcataggcttaaaaatgtttgcaaattaaggcatagaggtgtaatgtcagaggtagccattttcttcccaagaattccctaacattacgccaagatctggaagtgaatctgtctggttctggctatgcactggagcacagcactgaggtcttattcctggtcactgagccacgaacagtaaagggttcatggttcagaaagaaacttgcaccagttatttagaacaagtataactatctcccagagtgtacttcaattttttttatttattttattttttttattt

SEQ ID NO: 139206 - DNA, 204 bp, Homo sapiens
ggttgctattttaagcaggactcccccactcccattttctgattaaaaaaacaaattgttcttaaattgtataccttcctgtgtccttaaaacaagggatgacaagttctttcgagttgagggtttggtgtaccccatatcaaacagccagactgtagtgctaagtttatttattttatggttttttttttttttttttttttt

SEQ ID NO: 139207 - DNA, 546 bp, Homo sapiens
cagatggctacgaattcctggagatcctgaaacaggttgcccgggacaatactgacaaccccgatctgagcatcctgtggatcgacccggacgactttcctctgctcgttgcctactgggagaagactttcaagattgacctattcaggccacagattggggtggtgaatgtcacagatgctgacagtgtctggatggagattccagatgatgacgatcttccatcatctcttttcccactccctttgcgtcaggagcagcatcattcagcaaatgccttttcaaatgcagcaatcccacttagcagggacaggagaaaaattattcccatgttgactgtcttgactgtcacggaacagatcttgttctttgctggaccatcaagggtcatggcagtgcctgaacatggcagtctagggtgaacaatcccctaacacaagtttacttgtctttgattatgacagtaacaaaattgacagctttctaactcacaggcatagagtgaccttttaatcagagcccagggaagacacatgattaatgatt

SEQ ID NO: 139208 - DNA, 219 bp, Homo sapiens
ggcaaatttaaattccatcttggaggacctaaagatatgtattaaaagttaatatatattcaaaatgtatgactcatttataatcaaagaatttgagaaattataaattgaaacaggatataaatttttaatttctactgtcttattcagtggtaattttttattcaaagttcttaagctgcagaaataaatttataaactgcagtttttgtaaacagc

SEQ ID NO: 139209 - DNA, 256 bp, Homo sapiens
ggcggcccagatttctatgtattcaataaatgccagaaatcaaatctaagtgaaatctgatatttaagagtggcaactaatttcaaataattttaaaagaaagcgtaagtcacataaaatatgcccacaagcttaatttggctctctagccaccagttagcaacctaaacaaaaccggttcaataaattaaacacagtgttttctctgatgctctgaccatgtctgtctccatgctcagaagggggactcctctag

SEQ ID NO: 139210 - DNA, 170 bp, Homo sapiens
caggcacactcttgcctcagggtctttgcacatactgttcccaccatttgaaaggctctttcctcagtcatccgcatgcttacttcctcactgcttgccaatataatctcaaataccacctttcttaaccatgctacttaacattgcaaccccattcccagattttctat

SEQ ID NO: 139211 - DNA, 489 bp, Homo sapiens
tgtaaatgctgatttgatttccaggcttccctaaccaaactctatttaactaacaatgctgctaaaaactagagtagaaatttacctgtcctatttatgactcactactctcagatcactggaaatacatctcatctgtcacaggtgccttcccaaaagagaatcctctcttagtcacacaggtaatatattctaaagcaagcagcctcttcctcctattctgcatcatgagtatcatgacattcactgtcactgaagagttgaatgtttcttgtcctatgagagggaaacccttctctgactagctgcataaacaagtcatttgtgagctgagaataatctgtaattttattgccagctcttattcttaagctcctttttaagatgtcagtttctgatatgtaaagatctagttgcatgaggccagttggcctgaagaaacagagaagaaagagtacatgattccacaaagttagagaaaatgatata

SEQ ID NO: 139212 - DNA, 170 bp, Homo sapiens
ccttccctcacttttctttcgcaagtacatcagtcgttgaatttagggcccatcctaaattctagatcaccttatctcaagatcctcaacttaggtatatttgcaaaaactctattttattttcttttccttcttttttttttttttttgagacagtcttgctctgtcac

SEQ ID NO: 139213 - DNA, 514 bp, Homo sapiens
atcctatcccagtcctctccatccaagatctgcaggttggggcaccagggcagacttccagaacacaaaagggtagtgggaatcttggccatctggcatggagacgctcagcctgcatggcccaagctggaactcttctgcacaaacaggtctgtagctttcttcatcatttttaagtgaatttgaggagtgtggaacagccagagatcattgttttagctcaaatgaatttaagcaagatacggaaaatgtagttagatccaggttctcatgtgctattgacccatgtggctggcactcagttctctctccatctctctttcatgtgttactccctctactaggtataaagaatggtcacaggcagtcccaagcttcatccttacagcttgtaatccataaggtctaactatctgtctgtctgtctgtctgtctatctatctatctatctatctatctaactatctatctatctatcgctcttcctctctctcagcttccacatagaaatcca

SEQ ID NO: 139214 - DNA, 776 bp, Homo sapiens
gcatgcacagctacttgttctagtagtctgagagtggggaatggtagctgcagttgtgctaagagctggaatggactgagattaaccaaagcttacttcccaagccttcccttaaatgttgcaaatcttcattagattccagagttccaaattagttacatcagattctgccattgcacttgttgtggaggtggagagatagaattctggtgcttcacactcccacatcttctttgaaatttttaagaattttaaatattattgaattttaagtagttaatattttgcatgccaaattcagtccagcctttattctctgaaatgtttttctttagaaaccatggaggtagagctttgttttgttttgaaggaaatagttatcataaataatgtgcatttaccaaactgcttttaaaataaattctaggaaattctaatgcaaattaaaattcattgagaaagagtactttattgggaacatacaatgtatataacctgtttgtatcgtttttgttcatgtgtacatgagggattttgtttttataccattttaatatatactttttaatttagatcttattgctattacgttaggattgcttttatctggaggacattttcagcaaacctctatacattttcatttttgtgataaaaatataaatatatggtttgaagagtcatttttaaaaatgtctagaaatattcatattataacaatctttattgagaacaaatgttgaatgttttatgtaacaaatttattcactagagat

SEQ ID NO: 139215 - DNA, 192 bp, Homo sapiens
ctggggtatctggccatagacggctcatattcccatttggcatcagccatgtggatgtaaatagtatctgtatttgtttttttttataaagtgctctccagtttgccccagtccccaccactccctatgtgtccccaggacctcctgaactttctgtcctctaatgttagagaaatttttctctgtacccgt

SEQ ID NO: 139216 - DNA, 387 bp, Homo sapiens
agttgactgaaatttgagttctttttttttgttgtttttaattaaggcttttgctccttatgagagaagcacctgggtgaggagtgggcagctgattcctttctctacatagggccttcttcctgtcatattgcctgccccggtcttctggggagaactcagtggaccctcatggaagagagctcactactgagtacaaagccgtctgtgtttgaggcccccagctattccagactgaggtatcagcccacatttggcctccaacaatttcttaaaattgtagctgatttcttcttacccactcttggggtgggtggcccacctttgggtgagctagtttgaacatgtcttttcttcttagaggagcctcttcctccttggaattca

SEQ ID NO: 139217 - DNA, 199 bp, Homo sapiens
atgagcctggcctatgtgcgctaggtcaaacaaccgaaactacttcatgctggtagaaatcacaactacggtcatcttggaggtgggggggggtgtggagcttgaattctaaaaacgcagatttcgaaggaggactcctccctgatgtctgtactcaccagaatataagcttcataaaggcatggatgcccacggtcat

SEQ ID NO: 139218 - DNA, 642 bp, Homo sapiens
gggctcagtctggagataggtgcaaaagtggtaagtgaagggcggcggagagagaggcattacaagtacacgcacgcttacataatgaaactgttgagggattagaaatatgtgatccagaacataattgagggtggcaaggaacagtgaaatcaaacattcggtgaaagagttggtgctcttcaaggccatggatcaaaaaaaccctctgcacaaatccacaaattacatactttgattttcctgggaatgtccagaccgagtagaaagccctaggggaatcatttaagtttcacttttgaaaagcaaagactgttgttttccaggtagggcagatgctataaacagcaggcaaatgtgctttcccgcagcctaccttccagttcctccagctcagacgtcacaaagcccattaatctccagcctctggtgctacaaaacaattggaacctcaattactcctacccaaaatgtttggattgtggcttctgaaagttttccactcactcctgtgtatgccagagtcattagtagttggaactaagaaaacagattgtggatccagtgttcttggagcttgtccctctcggtgtggagagcctgttgttccaaattcaacagtatcgtccctctccttacatg

SEQ ID NO: 139219 - DNA, 409 bp, Homo sapiens
cagtgaatcaataaagtctggtgcactcaagaaattcaaggaatccaaaggtggtgctgtcctgtggtaaagataagttgcaaagagtagaatataatttttgtgcactgtgggctttttacttgatacagttggctggcccttagaggtcaagtattgcttttgatgttattggaatgttggaaaatatcagaaaatcctagaatgacgaatacgggtagttcatttggtgcaaatcaacccagctcaatttgttaatataacaaatagaatgtgtaaaataaagctttggaggtgggtgtaatattttccatgagacacttaacgtagtacgtaaatatatcaggcagcctagtgtgtcaagtactgtgggtatggtagacaacagattagttaaatctctgctctc

SEQ ID NO: 139220 - DNA, 104 bp, Homo sapiens
tgtcctttctaataaatcttcaacattgtgtcacaaaaaaacctatgccaactccctcaatgtatgggaatggtttattttaataaaatattggagtttaaagt

SEQ ID NO: 139221 - DNA, 107 bp, Homo sapiens
gcaaacaccagcacttgtgccagcaggtcctggcaggttaattctggggctacaggtagcttgcttggataccagtaatgttggcagtgggctgtacagttgttgga

SEQ ID NO: 139222 - DNA, 363 bp, Homo sapiens
ccgatatgcagtccagttgaacagagtagaggtaataaatgtttctaacaacaggtatttaaaacagaaccattaaaaatatattttactgcctgtgtaaaaaggaaaggtaacaacagtctttcatctcttctctgagttctgagtgagaaatacagtttcatgaacacatcctggaaacaaaagaatagattaatggctaggagtgtgaatgaaaatatctggacaacaagtaaagaaaaagtgtatcttaagtggttaagttatataacaatatacaaaaattgacagcttaatatcttaacatataaattagctatgtattttattaacaaacattagtgctgctttacttttattttt

SEQ ID NO: 139223 - DNA, 323 bp, Homo sapiens
ctcattctctcatcccacctgactagaaatacccacaggtgtagaggggcaggccaccccttcaatgccatatcatctcttcaccgacctttcccaatcacgtgctcctttccctacccagcttttggtcatgattttgcaaacaccctcaactccaagtatgtatgttgctaagactcaaatttatatttccagccccaaattctgtctgcacttgagactcctagtgcatacttcattcttggatatgtattaggcatctcaaatttaataggtccatttctgaacctgctctatgccctatatttcctgcctcagtaaat

SEQ ID NO: 139224 - DNA, 218 bp, Homo sapiens
ccctgggttctggagggtcccctcccctcctgctcttgagatcgccctaggaaagactcctgagtagtaagtaggtatggcactactcagctgagaattagatcaacccagaagaaaaggaacatgtttcactgaaacctgcaaagtgctttagaacatcttcagtcgggcgcagtggctcatgcttttagtctcaacactttgggaggctaaggtgg

SEQ ID NO: 139225 - DNA, 291 bp, Homo sapiens
atacgaaaaatccagttcctaaatcctgccaacccactgtgaaaactacttccaggttttgaacaggatattccttttggttaagaattaaattacacccaagtgttcaaaaaaataatctagtcacatggctccaaatgggcatttcttaaacaactcataaacggcctatttcacatggaacctgttacaggacatttccagaacagacataattagggctattcacaccaacaaagtaacgtcactattactggctattaatcagtataaattaatagccttatggct

SEQ ID NO: 139226 - DNA, 414 bp, Homo sapiens
taattactttaattgtaaatgataaaactcttcaatcaaaaggcagagtttgacagaatgtataagaaaaacacaatctacaagagattgtatatgctgtctacaagagactcatttcagatccaaagacacaaataagggatgtaaaaagacattctatacaagtaataaccaaatgagagtgcaggtagctacattaatattagacaaactaaatcaaaacaaggttgagacaaaaaagatattacacatcaataagtgtcaatatagcaagaagatataataatcaaaaacatttacatgcctaataagagaccacccaattatatgaagcaaaaaattgacagaattgaaggtaaacagacagttctgaaataacagctggacacttcgataccctactctcaataatgg

SEQ ID NO: 139227 - DNA, 316 bp, Homo sapiens
cttatcagcaggaacatgggtcacattttagtagaaatgatgatgctaaatttggttggttggtgtaggtgggaatcacctgatctctccatttgtaaaggcacattgttccctctgtaattagaaactaatatgtggggggttttccccactcattcctcatttctagttggtttagtttgtgggatgatattttgagacactgagtatctattccccaaagacatttcacacaatccttgcttaaaccaatttgttttgttttgttttgtttttgagaaggaatcttgctctgttgcccagggtggagtgcaat

SEQ ID NO: 139228 - DNA, 304 bp, Homo sapiens
tcatttccatctccttgagtgagaactggacttagtgactcacttctgatggacagaatatgaagacagctgtttttacagtggagcagacaccatcttaactcagaggtctggctgacatcaccatgaataagacatatcaatatcatgtacgccctgcaatgacgtgatgatagggcaatcacctctgtggtgttcttccccaaaatccacaccctcatttgaaaaaacaccagaaaaaaacaagttgagggacatggtacaaaatgcctgacttgtacgcttcaaaaatgtcaaggtcatg

SEQ ID NO: 139229 - DNA, 331 bp, Homo sapiens
tcacagcagcattatctgcaataacaaaaatctggaagcaacctcatgtacatcaaaatgggaagacacatatttgatatgtatcaaatggaatactatgcatttaaaatgaggaagctctatatttactgacacagaaaaatctacatcacaaattaagtcaaaaaagaaagccacagggcatgcatggtggctcccagcactttgggaggccaaggcaggaggagactgggagacgaccctggtcaacatactgagacccccatctctataaaaaaaaattttttttttaattagcaggccgtggtggcatgcacctgtagtcccagct

SEQ ID NO: 139230 - DNA, 250 bp, Homo sapiens
  misc_feature (15)..(15): n is a, c, g, or t
tctagaggcccctcnttatcaccgaacaggccggtggcctcaagggcagttgtagctctcttggagctctgggacctggtaccgatagtgtgtgagcagagggtgtcccaggcaggtattcagtcctggtggccccttatattctcttcaatgtagttccaacattggtgggagtagccttgccattaaggaatgtataatttccccgggggcgcaggatcgtgagatgagtaatgttggtggagtgaga

SEQ ID NO: 139231 - DNA, 391 bp, Homo sapiens
cttaatggtgtcccataaatcctataggctttttccttctttttttcctttttctttgttttcctttctttctttccccccaccccttggtctgcctatgttacttcaaacgacctgtcttcagaaattctttcttccccttggtctagtctgtctttttgatctagtcttgtattttttactttattcattgaattatttagctctagaacttctgtttggttcttttttatatctgtctctgttgattttctcattcaaatcatgaattgttttccagattttgtctaattgtctttatgtattctcctatttcttctgtcaaaccatatatttgtacccattagtcaatttctcttactctcactctctccctacccttctcagcctc

SEQ ID NO: 139232 - DNA, 549 bp, Homo sapiens
taccgtgtgctttccgttggtgatctcactgtttaaaatgtccaagtggtgtgaagtgctccctgacgtttctacacataaggcggctatggtgtgtgttaaagaagatccatccaggcatgagctgtggcattgctgactgtctttccccagcaatggttcagtatttgctaatactgcttgtggcaactctacgaaacataacttcatgaataatgagaactgattgtacttgcacatcaatattcacaatagccaaagggcggaaacaacccaaatgtccatcaatggatgaatcgataaacaatttatggtatatacacacaaaggaacattatctagtcataaaaaaggaatgaggctgggcacagtggctcacgcctgtaatcccaacactttgggaggccaatgcaggtggatcacttgaggtcaggagttcaagactagcctggccaacatggtgaaaccccgtctctactaaaaatacaaaaattgaccgggtgtggtggtgggtgcctattatcccagctacttgggaggctgaggcag

SEQ ID NO: 139233 - DNA, 187 bp, Homo sapiens
caccccagcctcctgagtagcttggactacaggtacatgtcaacacgcctgactaatttttaaatttttttgtagagacagggtctcgttatgttgcccaggctcatcttgaaatactggactctagtggtgctcctgcctcagcttctcaaagtgttgggactacaggtgtaagccactgtgccca

SEQ ID NO: 139234 - DNA, 199 bp, Homo sapiens
agggtggtgtggcagtagacaaaaggatgcctatttcaaacagcactgttagaacagcaggtcagcattaacacttaatccccaaggttgttgggatgaacagtattaaagtacagtcgcccctctgtacctgcaggttctacacctgtgaaatgcagtcctcagccaggtgtggtggctcacgcatgtaatcccaaca

SEQ ID NO: 139235 - DNA, 300 bp, Homo sapiens
gtttgtagggggccgccatgttggtttggggaggccaataagtgaagacctccgagccgctggaggcgggacatccggggcgtggtttagaaagagtgctttcgccgtgggtgcagagggtgggcccgccgggttgggtggggggcgtgtgatgacggtaatggcgacgagatgctcaactcacgcggcctcttttaatcctcacagcagctctgcgtggagaaactacagtaacgtgttaccacgttaaggcgggaagctgaggcatgggagtatttagtaacgttcccgggccgtaga

SEQ ID NO: 139236 - DNA, 420 bp, Homo sapiens
ccaacatccactcactgcctaagcctgggaccggtcatccttctttccttctctctctctctgtgtctcatgtccaaataccaagtcatatctaccctaaatacctctatttcttcaagctggataccgaatttcaacatgggagtgctcaaagaatatctgctgctgggagggttacagggctgggggctcatttcctagccgtaggagcatagctaaacactgctttgaatttaactttctgtttattgaggtgactttcggaggtgctttgatcgagattatgggaagtggttaaagacccctaacctctctgccatcactgttccttctctcagtccctgccaccaccatacccctgagggaggcagggcaactacacagcctcccacacagagtccctgccttcctgcttcttct

SEQ ID NO: 139237 - DNA, 172 bp, Homo sapiens
aatccacattacgaaaaagttacctgatcaactttataaacttctaaaatgatggacaattaaaaacttttcagtacttgctcactgttacacattcatttataaaatacctttacatggagaaataagactgagaaattaaccatcagattctattggagtatccctacca

SEQ ID NO: 139238 - DNA, 227 bp, Homo sapiens
gctggagtttgaaacaaattaagaagattctgtagtagtaatctcgatgagagatgatgccagttggacttctggagaaaaatttaggagctaaaattaaaagctttgaagattgatttctgagggaaatgagagtgaagatataatcaggatgacttctggacttctggctctcttttatactaatttatttatattcagtatctcaggtatgaaatttcatcaac

SEQ ID NO: 139239 - DNA, 274 bp, Homo sapiens
tttcaaagtcagtcattctctttttctgttggatattgaacttttaattaagaaatcgtggtagtttttaatttctgaaaatcttttctatttttagttctataattccatgatatttttcattaaaattatcttctgtctcttccattggttctgcttcagtagacatctctcttatttctgttgcactggtcatctttcttcccatgccccataaatgaatttaacttttcctggcctactcaagctatggtttcctcagcatctgccagca

SEQ ID NO: 139240 - DNA, 194 bp, Homo sapiens
gaggggagcaattctgtgtggtcacggggacagatcaatagacagaggccatcttgtctggagttcttgtgaatccaggtgacatggagattacaaggtgtgtgtggtagagggaggcagcaacaccttcttgaggacagaagtcaagcctctgttcccaagtattcctcactctgctgcttcttccaaacctt

SEQ ID NO: 139241 - DNA, 244 bp, Homo sapiens
ctcttagttgaggaatccaggttgtagccctgtaggttgactagatatgactggtcaaatgctttccagttccttaatggtaagacagtcaccctggccagtagaatgactgggaactattgtaaaatgtcatagtctaccactttcgcctcttcctctcttctcatgggtatgcgatgttagaatcaaagaagatcagagcccttggagacattaaatagcatgggcttccctcctcatttta

SEQ ID NO: 139242 - DNA, 191 bp, Homo sapiens
tttctctgtacgacttttcccattctctcgtggtgatgtcttcttcatggctgctacagtatcctagattctgcagcctgccttctctcaaaatgtctgcatacttttgcatctttctattaattgcatccctttcttagaaaagaagatcttactggggttgtggtgactttccagtatggactataaag

SEQ ID NO: 139243 - DNA, 519 bp, Homo sapiens
tacatttctgataatacataaaatctatcccataggttctttgatcctttaacttttcgataaagaaggtacagaaagtgataggaattgaacaaaactagtggcttcaaactttggcaatccaacacacatgcacacacacatacacacacaactgaaaagtgtcatgaaacaacatttatccttagtcatgaactctgatattttctataactttttaaatgctggttgtggctcactaatttgctttcatgatttagtaaaaggtctcaacctgcagtttgaaaagctgtggaataaaccacatggccaccaaaggcagaactagaacagtcttcaaaccactcagctccttcttcatgggttattattaaatcagaaagggcctaagtttcacttcttgctgtaaaagaaactgtacattccgtatcctcctcctttgccctccacagttcacgtgagcactagaaattcagagaacacccaggaaccagtgggcacttcctatgtatgcaactc

SEQ ID NO: 139244 - DNA, 473 bp, Homo sapiens
tacaggtgcactccaccacacctggctccagtgagatcttttggcccacactcacccacttcttactttcatccttcctccccaggaagccttccctgacctcactcttcctgcctgggttaggtccctgcctccatgttcccatgtgttttgttatctcacaataccagccactgtactgtacttaactgcttacttctccattaccctgatttttccttgagtatagaagtgactttggtttaccattgccagtggcatattgataaatgtttaccaactagttctctcttgagaaaggtgaaaaaaaaaaagaccatgatttatagtgtctgcccatttctgtggtgtaaatacccctaccactgtgaccactttcaagctaccaatgtaatagcactgaacacaaatttggggagagatgtgcaggaacacagtgttactctgtatttctactatgcagatataataga

SEQ ID NO: 139245 - DNA, 1003 bp, Homo sapiens
ttcctgccacagttgcctcacgtctcctccctcaaacctcaccttcccctcatgggccttctgtccgacttggggtacccctagtggccagacgcacaccctgggttcgaaactgggacaccagggtccccggggcccagcgcaagggctgatgcgaagacactttcttcctcggggacccaggctctgcttctctgcgacgtttttgtttttgtttttttcgcttttccccaggtgcctcaccttcccctcatgggctttctgcccgccttgaggtaccactagcgggcccgaagcgcaccctggtttcgagccagggacgctagggtctccggggcccagttcagggctgatgggtagggacgttcgtctgtgggggaccaggccccacttctgggcggcgcagtttttttatttttttctctgccccaggtgtctcacctttccctcatgggccttctgtctgccttggggtacccctagcaggccgaggcgcatgctgggctcgagccagggataccagggtccctggggcgcagcgcaagcgctgatgtgaggacagtttcttctgtgggggagccaggccccgcttataggcggcgcggttttttttttttttttcctctgccccaggtgcatcaccttcccctcatgggccttctgcccgcttttgggcacccctagcggcctgaagcgcaccctggtctcgaaccaggaatgccagggtcacctgggcccagcgcaagggctgatgggaagacacttttgtccgttggggacccaggctctgcttctccgtggtgcggttttttttttttttctgccacaggtgcctcacctcgccttcctcaaacctcaactgcccctcatgggatttctgcccgcttgtcttccgaggctgcggtgtggatctcgcactgcggccgcctcgccttggctggggagaacctcggtgggtaggattcagaggggcttttggtttcccattttccacactgaaccc

SEQ ID NO: 139246 - DNA, 441 bp, Homo sapiens
attcctgaagaatattcctttgtatgaatgtttcagaattagtttatccatttctctattgtaggatatcttggttacttccaatctttgtcagttgtgtataagctgctgtaaacattcatgtgcaggatttgagtggatataagttttcaaataccaaagaatgcaattgccagattgtatttaaacatacaaggatgcagatgccatacacacaaatatgtatgtatatgtcatgctcatatacaattttaaatacatatatgtgttctatggatatataagtatttctctactttcacagaaatgtcactctaaatcagtacctaggaagggtcatcattttcttaatctacaaatcaagacatgatatgagtggctgcatccttgtttagtacgtcctctattattgaggatgttttcctgtttcctttttcattg

SEQ ID NO: 139247 - DNA, 339 bp, Homo sapiens
aggaaaataaccactttattctgaggagaaaaataatgttagtcatataggataggcagggaagttctattaaattaagacccagaagaggagaagcctctttgggaacagctggatttctgtggcagcaataaaaacaaatgaacaattcagaaaagaggttgaagatgcaaaggagtttacaggagctccagggcaccaagggcaaaggagattgagccagatcaacaaacatactgagcccagtatgaagatgagctaattatggatacctgagaaggttgggcttcatatcatcactggggtgaactgggaagagaggcatggttgaattaattg

SEQ ID NO: 139248 - DNA, 309 bp, Homo sapiens
atcacataagccttgattttcataatgcagacagtattctctatatggctgtaggaatataagacttcagtggtgtttgcatagtaactcctttttcaccttctactacaagagcccctcttgtagctggggagtgcacccacaagatctaacagctgtttcagagctgctcattttagagtgattggtagggagttggtggctcagaggtcctaatcagaatgtgtcctgggttctgaatgactagcagactatcattaaccaaagtgctgggattacaggcatgaaccaccatgcccggcccaattt

SEQ ID NO: 139249 - DNA, 260 bp, Homo sapiens
agaatttcttctttctgtggagttttacctgttgctcctctggctgacctcccgatagatccctgtggtgccaggcaggaatggcctgcctggggacacagtgagctcccagggccttccaactgcttcctctacccctgtattttgctcggctctctaacttgactcagcttcaggtaaagtcggaaactcctcctgcacacaaaccttcagcttctccagtgggggtgtgtgttccagagaggagggtctccctttcc

SEQ ID NO: 139250 - DNA, 390 bp, Homo sapiens
tggcatttcataatctccttgttccaatgtgtctggggacagctaggcagactttacataagtacagattgcctctctgggcactgctgggagacttcatttgtggcaggaggagtgcccccaggactggtgagataatttgagctttaaatagctcctggcccttgaaataaggacagcatgatttaggggaaaggccagaacttgatctttgtggccttcggcacgctggcctctccttgcactggaggcagtcatgagggctgcaccgcggggcggtttgtcttcagcattcgcacactcagtaaagtatgccagagatgggtggcagcagcgcccaagggctcagctccttccaaagccaagtctgggcagttttttttcaggctg

SEQ ID NO: 139251 - DNA, 143 bp, Homo sapiens
ccaggaggagccacgggggtgattagaaatctgccttctttcttccatctggcaggagagatgttttcttttgttacgtgtgtaattaggatgatgagtgacttcaggcaacggcccctctcctggttgtggggtttctctga

SEQ ID NO: 139252 - DNA, 300 bp, Homo sapiens
agctgggattacaggcacccaccaccacgcaggctaatttttggtagagacagggtttcgccatgttggccaggctgatctcaaactcctgacctcaggtggtctgcatgccttgctcagcctcccaaagtgctgggattacaggcgtgagccactatacctggccactcttttaaacttagagaatgaaattgagacagacaagcataggtatgagatgaccagttaggaggaagttattacagtggcttaaaactaaatttgtggtggagatggggacttggggcgctcggccgggta

SEQ ID NO: 139253 - DNA, 428 bp, Homo sapiens
gaagctggcgggacaacgtgtggcgagcaagagctagcagacttcaagaccagtctgaccacaaaaaggaaggaaagaaggcatttgactttcttttgtgaaaactgaaacatcctagtaaccatctgactagtatacagtttaaccactactttgaactaaatttcaggaacatagtccataacagacaccctgtgattcccgagaaaacgcaacattttagaagaagacttatccaacgtgaagatttttttttacataaggcaatgaaaggcatcatttattctcgaaatgtgtcatgctctcagaagtgtggtcatatactgaatcaaagtctacaatcactcatcttcccacgcctgggaaatacagcctcatcatgtgaacaggccaaacattcaaaagacactaaaattcttcaattttcc

SEQ ID NO: 139254 - DNA, 171 bp, Homo sapiens
gctgggattacaggtgtgagccactgtgcccggcttatactgagagttttaaaattaatatttcttagattttttaaaatttatgtaggtttttaccatattttttcatagtatgtcagagtataaatgtactgtaattttttgagacattcagccggacatatttaggtt

SEQ ID NO: 139255 - DNA, 254 bp, Homo sapiens
ctcctacaagctttcattaactcttgcttgaattactgattgactaactagtgtctctagatcccctctttaacatctccagtccactttccgtatcacggctagaatgatagttttgaaatacaagtctaattgctttacatcctgttcacacacagtaatgacttccctggtcttgaagtatatatttttttaatttgatccaccaggctttgcatggtctggctcctgttaatcttgcaaggattactttg

SEQ ID NO: 139256 - DNA, 436 bp, Homo sapiens
tgcacctggccccacagtacttctgacaccagatgtgtgggaattttttcccaactgaccaattctctccacataccaactgggtggcttgtgatttgattcagttctgacactgtctacctgatgttaccatcagaacccacaagttaaagggctcagtcctacaagactgcccccacttgaagctagtcacaagtccaggtttgtacttctgaccaactggctataaagcaaacaaggtatgctttctctgaggtcactaccttcccagcacttcagtgtgttctgttcaccagcccagaagctcggctcatcacatctcaatgttcaagagttttgttttttaaaaaaaacagccttactctgtcacccaggctggagtggagtggtgccaccatggctcactgcagcctcaacccccaggctcagatgatcc

SEQ ID NO: 139257 - DNA, 212 bp, Homo sapiens
gggatcttcttagggaattggtatgggaagaccttgacgttagcattttatacactgcataacctcattactaagcaaatcttcttgtttaacattaaaactgggccttcaagcaaggtttcattaatgccacccttatattttattgattacaaatacatagatcctaggagacagggattttttttcttttcatttgacctaacccaggg

SEQ ID NO: 139258 - DNA, 518 bp, Homo sapiens
tctccagctggtactccaagacggagagtgcctaggccacaggtcatgagagcattgctttattagatcagtatctgcaagcaggtcagtgacagtcttcccaagacgtccttgagcccctcagagcatccccttctgcctcacgtccttgcaaaatgtggtttaacaagcaaatacttccaagaacaacctcatactgctttttcctcctaatttgtatttccagataaccaagtattacctcaccttcttctatttaacaactctttatttccctgtgtgtaacttgtttttaatattgtcaaaattactgcaatgcaaatgaggaacatcagggatccagcgggaccgctgggaatatgtgcttgttccgtgttgaaatgtcagtttcatttccagcctctgaatgaaggcagtgaccgagcatggctactgtgagatgcaaacactattcaattaacagagttacatagaaatgggctcaaggacctggtcttccctggacgacagaagtgtca

SEQ ID NO: 139259 - DNA, 385 bp, Homo sapiens
ccctgaaccactgcaggtgtgctgaggcggctcacctagcgcaactgctacaacaacctcatactgctttttcctcctaatttgtatttccagataaccaagtattacctcaccttcttctatttaacaactctttatttccctgtgtgtaacttgtttttaatattgtcaaaattactgcaatgcaaatgaggaacatcagggatccagcgggaccgctgggaatatgtgcttgttccgtgttgaaatgtcagtttcatttccagcctctgaatgaaggcagtgaccgagcatggctactgtgagatgcaaacactattcaattaacagagttacatagaaatgggctcaaggacctggtcttccctggacgacagaagtgtca

SEQ ID NO: 139260 - DNA, 268 bp, Homo sapiens
tggtggcttgcgcctataatcccagcactttgggacgccaaggtgggaggatcacctgaggctcaggaactcaagaccagtctgggcaacatagacccccatctttaccacccctacatccccaaaattagccaggtgtgatgtcatgctactgagaaggctgaggtgagagggttacttgagccctgaagttcaaggccccagtgagctgtgatcatgccactgcactccaacctcagtgacagggctagaccctatctctgaaaaa

SEQ ID NO: 139261 - DNA, 268 bp, Homo sapiens
aagttcatgaacttgtaacactcagctcccctaaaataaaatgaacttatatacgaaagtaagtactatagatttagtagggaaaaagggatatatgaaatgctcatttgctgcccttcaaaaatggaccctgaggttttcaatgaacatcatgtgtgagaaatcagtttctaagctcgagaaacagcaagaggaatatctagaagaactttaaattagaaccacatacacactggaaaaacaagtacattttgttataacaagtgaa
